United States Patent Application Publication US 2019/0016770 A1 - sequence listing, part 3

SEQ ID NO: 21557 - protein, 42 aa, Artificial Sequence; identical to SEQ ID NO: 18453
  GFR-binding peptide
  MOD_RES (2)..(4)..(38): Xaa is C or S
  MOD_RES (16)..(17)..(18)..(19)..(20): Xaa is A or G
  MOD_RES (21)..(22)..(23)..(24): Xaa is A or G or is absent

SEQ ID NO: 21558 - protein, 34 aa, Artificial Sequence; identical to SEQ ID NO: 18454
  GFR-binding peptide
  MOD_RES (33)..(33): Xaa is C or S

SEQ ID NO: 21559 - protein, 35 aa, Artificial Sequence; identical to SEQ ID NO: 18455
  GFR-binding peptide
  MOD_RES (35)..(35): Xaa is C or S
  MOD_RES (11)..(12)..(13)..(14)..(15): Xaa is A or G
  MOD_RES (16)..(17)..(18)..(19): Xaa is A or G or is absent

SEQ ID NO: 21560 - protein, 38 aa, Artificial Sequence; identical to SEQ ID NO: 18456
  GFR-binding peptide
  MOD_RES (1)..(38): Xaa is C or S
  MOD_RES (14)..(15)..(16)..(17)..(18): Xaa is A or G
  MOD_RES (19)..(20)..(21)..(22): Xaa is A or G or is absent

SEQ ID NO: 21561 - protein, 42 aa, Artificial Sequence; identical to SEQ ID NO: 18457
  GFR-binding peptide
  MOD_RES (2)..(4)..(41): Xaa is C or S

SEQ ID NO: 21562 - protein, 34 aa, Artificial Sequence; identical to SEQ ID NO: 18458
  GFR-binding peptide

SEQ ID NO: 21563 - protein, 41 aa, Artificial Sequence; identical to SEQ ID NO: 18459
  GFR-binding peptide
  MOD_RES (2)..(4)..(41): Xaa is C or S

SEQ ID NO: 21564 - protein, 34 aa, Artificial Sequence; identical to SEQ ID NO: 18460
  GFR-binding peptide
  MOD_RES (34)..(34): Xaa is C or S
  MOD_RES (12)..(13)..(14)..(15)..(16): Xaa is A or G
  MOD_RES (17)..(18)..(19)..(20): Xaa is A or G or is absent

SEQ ID NO: 21565 - protein, 37 aa, Artificial Sequence; identical to SEQ ID NO: 18461
  GFR-binding peptide
  MOD_RES (1)..(3)..(37): Xaa is C or S
  MOD_RES (15)..(16)..(17)..(18)..(19): Xaa is A or G
  MOD_RES (20)..(21)..(22)..(23): Xaa is A or G or is absent

SEQ ID NO: 21566 - protein, 40 aa, Artificial Sequence; identical to SEQ ID NO: 18462
  GFR-binding peptide
  MOD_RES (2)..(4)..(38): Xaa is C or S

SEQ ID NO: 21567 - protein, 41 aa, Artificial Sequence; identical to SEQ ID NO: 18463
  GFR-binding peptide
  MOD_RES (2)..(39): Xaa is C or S
  MOD_RES (15)..(16)..(17)..(18)..(19): Xaa is A or G
  MOD_RES (20)..(21)..(22)..(23): Xaa is A or G or is absent

SEQ ID NO: 21568 - protein, 42 aa, Artificial Sequence; identical to SEQ ID NO: 18464
  GFR-binding peptide
  MOD_RES (1)..(3)..(40): Xaa is C or S
  MOD_RES (16)..(17)..(18)..(19)..(20): Xaa is A or G
  MOD_RES (21)..(22)..(23)..(24): Xaa is A or G or is absent

SEQ ID NO: 21569 - protein, 42 aa, Artificial Sequence; identical to SEQ ID NO: 18465
  GFR-binding peptide
  MOD_RES (1)..(3)..(40): Xaa is C or S
  MOD_RES (16)..(17)..(18)..(19)..(20): Xaa is A or G
  MOD_RES (21)..(22)..(23)..(24): Xaa is A or G or is absent

SEQ ID NO: 21570 - protein, 40 aa, Artificial Sequence; identical to SEQ ID NO: 18466
  GFR-binding peptide
  MOD_RES (1)..(35): Xaa is C or S
  MOD_RES (13)..(14)..(15)..(16)..(17): Xaa is A or G
  MOD_RES (18)..(19)..(20)..(21): Xaa is A or G or is absent

SEQ ID NO: 21571 - protein, 41 aa, Artificial Sequence; identical to SEQ ID NO: 18467
  GFR-binding peptide
  MOD_RES (2)..(4)..(38): Xaa is C or S

SEQ ID NO: 21572 - protein, 38 aa, Artificial Sequence; identical to SEQ ID NO: 18468
  GFR-binding peptide
  MOD_RES (2)..(4): Xaa is C or S
  MOD_RES (17)..(18)..(19)..(20)..(21): Xaa is A or G
  MOD_RES (22)..(23)..(24)..(25): Xaa is A or G or is absent

SEQ ID NO: 21573 - protein, 38 aa, Artificial Sequence; identical to SEQ ID NO: 18469
  GFR-binding peptide
  MOD_RES (37)..(37): Xaa is C or S

SEQ ID NO: 21574 - protein, 41 aa, Artificial Sequence; identical to SEQ ID NO: 18470
  GFR-binding peptide
  MOD_RES (1)..(3)..(40): Xaa is C or S
  MOD_RES (16)..(17)..(18)..(19)..(20): Xaa is A or G
  MOD_RES (21)..(22)..(23)..(24): Xaa is A or G or is absent

SEQ ID NO: 21575 - protein, 39 aa, Artificial Sequence; identical to SEQ ID NO: 18471
  GFR-binding peptide
  MOD_RES (1)..(3): Xaa is C or S
  MOD_RES (16)..(17)..(18)..(19)..(20): Xaa is A or G
  MOD_RES (21)..(22)..(23)..(24): Xaa is A or G or is absent

SEQ ID NO: 21576 - protein, 41 aa, Artificial Sequence; identical to SEQ ID NO: 18472
  GFR-binding peptide
  MOD_RES (1)..(3)..(37): Xaa is C or S
  MOD_RES (15)..(16)..(17)..(18)..(19): Xaa is A or G
  MOD_RES (20)..(21)..(22)..(23): Xaa is A or G or is absent

SEQ ID NO: 21577 - protein, 33 aa, Artificial Sequence; identical to SEQ ID NO: 18473
  GFR-binding peptide
  MOD_RES (12)..(13)..(14)..(15)..(16): Xaa is A or G
  MOD_RES (17)..(18)..(19)..(20): Xaa is A or G or is absent

SEQ ID NO: 21578 - protein, 42 aa, Artificial Sequence; identical to SEQ ID NO: 18474
  GFR-binding peptide
  MOD_RES (2)..(36): Xaa is C or S

SEQ ID NO: 21579 - protein, 40 aa, Artificial Sequence; identical to SEQ ID NO: 18475
  GFR-binding peptide
  MOD_RES (34)..(34): Xaa is C or S
  MOD_RES (12)..(13)..(14)..(15)..(16): Xaa is A or G
  MOD_RES (17)..(18)..(19)..(20): Xaa is A or G or is absent

SEQ ID NO: 21580 - protein, 37 aa, Artificial Sequence; identical to SEQ ID NO: 18476
  GFR-binding peptide
  MOD_RES (1)..(3): Xaa is C or S
  MOD_RES (16)..(17)..(18)..(19)..(20): Xaa is A or G
  MOD_RES (21)..(22)..(23)..(24): Xaa is A or G or is absent

SEQ ID NO: 21581 - protein, 40 aa, Artificial Sequence; identical to SEQ ID NO: 18477
  GFR-binding peptide
  MOD_RES (1)..(38): Xaa is C or S

SEQ ID NO: 21582 - protein, 44 aa, Artificial Sequence; identical to SEQ ID NO: 18478
  GFR-binding peptide
  MOD_RES (2)..(4)..(38): Xaa is C or S

SEQ ID NO: 21583 - protein, 42 aa, Artificial Sequence; identical to SEQ ID NO: 18479
  GFR-binding peptide
  MOD_RES (1)..(38): Xaa is C or S
  MOD_RES (14)..(15)..(16)..(17)..(18): Xaa is A or G
  MOD_RES (19)..(20)..(21)..(22): Xaa is A or G or is absent

SEQ ID NO: 21584 - protein, 39 aa, Artificial Sequence; identical to SEQ ID NO: 18480
  GFR-binding peptide
  MOD_RES (2)..(39): Xaa is C or S

SEQ ID NO: 21585 - protein, 37 aa, Artificial Sequence; identical to SEQ ID NO: 18481
  GFR-binding peptide
  MOD_RES (34)..(34): Xaa is C or S
  MOD_RES (12)..(13)..(14)..(15)..(16): Xaa is A or G
  MOD_RES (17)..(18)..(19)..(20): Xaa is A or G or is absent

SEQ ID NO: 21586 - protein, 39 aa, Artificial Sequence; identical to SEQ ID NO: 18482
  GFR-binding peptide
  MOD_RES (1)..(38): Xaa is C or S
  MOD_RES (14)..(15)..(16)..(17)..(18): Xaa is A or G
  MOD_RES (19)..(20)..(21)..(22): Xaa is A or G or is absent

SEQ ID NO: 21587 - protein, 33 aa, Artificial Sequence; identical to SEQ ID NO: 18483
  GFR-binding peptide

SEQ ID NO: 21588 - protein, 40 aa, Artificial Sequence; identical to SEQ ID NO: 18484
  GFR-binding peptide
  MOD_RES (36)..(36): Xaa is C or S

SEQ ID NO: 21589 - protein, 36 aa, Artificial Sequence; identical to SEQ ID NO: 18485
  GFR-binding peptide
  MOD_RES (1)..(1): Xaa is C or S

SEQ ID NO: 21590 - protein, 43 aa, Artificial Sequence; identical to SEQ ID NO: 18486
  GFR-binding peptide
  MOD_RES (2)..(4)..(38): Xaa is C or S

SEQ ID NO: 21591 - protein, 43 aa, Artificial Sequence; identical to SEQ ID NO: 18487
  GFR-binding peptide
  MOD_RES (1)..(3)..(37): Xaa is C or S

SEQ ID NO: 21592 - protein, 42 aa, Artificial Sequence; identical to SEQ ID NO: 18488
  GFR-binding peptide
  MOD_RES (1)..(3)..(40): Xaa is C or S
  MOD_RES (16)..(17)..(18)..(19)..(20): Xaa is A or G
  MOD_RES (21)..(22)..(23)..(24): Xaa is A or G or is absent

SEQ ID NO: 21593 - protein, 40 aa, Artificial Sequence; identical to SEQ ID NO: 18489
  GFR-binding peptide
  MOD_RES (1)..(35): Xaa is C or S
  MOD_RES (13)..(14)..(15)..(16)..(17): Xaa is A or G
  MOD_RES (18)..(19)..(20)..(21): Xaa is A or G or is absent

SEQ ID NO: 21594 - protein, 37 aa, Artificial Sequence; identical to SEQ ID NO: 18490
  GFR-binding peptide
  MOD_RES (2)..(2): Xaa is C or S

SEQ ID NO: 21595 - protein, 38 aa, Artificial Sequence; identical to SEQ ID NO: 18491
  GFR-binding peptide
  MOD_RES (35)..(35): Xaa is C or S
  MOD_RES (11)..(12)..(13)..(14)..(15): Xaa is A or G
  MOD_RES (16)..(17)..(18)..(19): Xaa is A or G or is absent

SEQ ID NO: 21596 - protein, 37 aa, Artificial Sequence; identical to SEQ ID NO: 18492
  GFR-binding peptide
  MOD_RES (34)..(34): Xaa is C or S
  MOD_RES (12)..(13)..(14)..(15)..(16): Xaa is A or G
  MOD_RES (17)..(18)..(19)..(20): Xaa is A or G or is absent

SEQ ID NO: 21597 - protein, 43 aa, Artificial Sequence; identical to SEQ ID NO: 18493
  GFR-binding peptide
  MOD_RES (2)..(39): Xaa is C or S
  MOD_RES (15)..(16)..(17)..(18)..(19): Xaa is A or G
  MOD_RES (20)..(21)..(22)..(23): Xaa is A or G or is absent

SEQ ID NO: 21598 - protein, 37 aa, Artificial Sequence; identical to SEQ ID NO: 18494
  GFR-binding peptide
  MOD_RES (1)..(3): Xaa is C or S
  MOD_RES (16)..(17)..(18)..(19)..(20): Xaa is A or G
  MOD_RES (21)..(22)..(23)..(24): Xaa is A or G or is absent

SEQ ID NO: 21599 - protein, 37 aa, Artificial Sequence; identical to SEQ ID NO: 18495
  GFR-binding peptide
  MOD_RES (1)..(3): Xaa is C or S
  MOD_RES (16)..(17)..(18)..(19)..(20): Xaa is A or G
  MOD_RES (21)..(22)..(23)..(24): Xaa is A or G or is absent

SEQ ID NO: 21600 - protein, 32 aa, Artificial Sequence; identical to SEQ ID NO: 18496
  GFR-binding peptide
  MOD_RES (11)..(12)..(13)..(14)..(15): Xaa is A or G
  MOD_RES (16)..(17)..(18)..(19): Xaa is A or G or is absent

SEQ ID NO: 21601 - protein, 41 aa, Artificial Sequence; identical to SEQ ID NO: 18497
  GFR-binding peptide
  MOD_RES (37)..(37): Xaa is C or S
  MOD_RES (13)..(14)..(15)..(16)..(17): Xaa is A or G
  MOD_RES (18)..(19)..(20)..(21): Xaa is A or G or is absent

SEQ ID NO: 21602 - protein, 37 aa, Artificial Sequence; identical to SEQ ID NO: 18498
  GFR-binding peptide
  MOD_RES (1)..(3): Xaa is C or S
  MOD_RES (16)..(17)..(18)..(19)..(20): Xaa is A or G
  MOD_RES (21)..(22)..(23)..(24): Xaa is A or G or is absent

SEQ ID NO: 21603 - protein, 33 aa, Artificial Sequence; identical to SEQ ID NO: 18499
  GFR-binding peptide

SEQ ID NO: 21604 - protein, 38 aa, Artificial Sequence; identical to SEQ ID NO: 18500
  GFR-binding peptide
  MOD_RES (36)..(36): Xaa is C or S

SEQ ID NO: 21605 - protein, 36 aa, Artificial Sequence; identical to SEQ ID NO: 18501
  GFR-binding peptide
  MOD_RES (1)..(3): Xaa is C or S
  MOD_RES (15)..(16)..(17)..(18)..(19): Xaa is A or G
  MOD_RES (20)..(21)..(22)..(23): Xaa is A or G or is absent

SEQ ID NO: 21606 - protein, 38 aa, Artificial Sequence; identical to SEQ ID NO: 18502
  GFR-binding peptide
  MOD_RES (1)..(3): Xaa is C or S

SEQ ID NO: 21607 - protein, 40 aa, Artificial Sequence; identical to SEQ ID NO: 18503
  GFR-binding peptide
  MOD_RES (1)..(3)..(37): Xaa is C or S
  MOD_RES (15)..(16)..(17)..(18)..(19): Xaa is A or G
  MOD_RES (20)..(21)..(22)..(23): Xaa is A or G or is absent

SEQ ID NO: 21608 - protein, 35 aa, Artificial Sequence; identical to SEQ ID NO: 18504
  GFR-binding peptide
  MOD_RES (13)..(14)..(15)..(16)..(17): Xaa is A or G
  MOD_RES (18)..(19)..(20)..(21): Xaa is A or G or is absent

SEQ ID NO: 21609 - protein, 41 aa, Artificial Sequence; identical to SEQ ID NO: 18505
  GFR-binding peptide
  MOD_RES (2)..(36): Xaa is C or S
  MOD_RES (14)..(15)..(16)..(17)..(18): Xaa is A or G
  MOD_RES (19)..(20)..(21)..(22): Xaa is A or G or is absent

SEQ ID NO: 21610 - protein, 37 aa, Artificial Sequence; identical to SEQ ID NO: 18506
  GFR-binding peptide
  MOD_RES (35)..(35): Xaa is C or S

SEQ ID NO: 21611 - protein, 40 aa, Artificial Sequence; identical to SEQ ID NO: 18507
  GFR-binding peptide
  MOD_RES (2)..(4): Xaa is C or S

SEQ ID NO: 21612 - protein, 34 aa, Artificial Sequence; identical to SEQ ID NO: 18508
  GFR-binding peptide
  MOD_RES (12)..(13)..(14)..(15)..(16): Xaa is A or G
  MOD_RES (17)..(18)..(19)..(20): Xaa is A or G or is absent

SEQ ID NO: 21613 - protein, 35 aa, Artificial Sequence; identical to SEQ ID NO: 18509
  GFR-binding peptide
  MOD_RES (12)..(13)..(14)..(15)..(16): Xaa is A or G
  MOD_RES (17)..(18)..(19)..(20): Xaa is A or G or is absent

SEQ ID NO: 21614 - protein, 38 aa, Artificial Sequence; identical to SEQ ID NO: 18510
  GFR-binding peptide
  MOD_RES (34)..(34): Xaa is C or S
  MOD_RES (12)..(13)..(14)..(15)..(16): Xaa is A or G
  MOD_RES (17)..(18)..(19)..(20): Xaa is A or G or is absent

SEQ ID NO: 21615 - protein, 39 aa, Artificial Sequence; identical to SEQ ID NO: 18511
  GFR-binding peptide
  MOD_RES (2)..(4): Xaa is C or S
  MOD_RES (17)..(18)..(19)..(20)..(21): Xaa is A or G
  MOD_RES (22)..(23)..(24)..(25): Xaa is A or G or is absent

SEQ ID NO: 21616 - protein, 35 aa, Artificial Sequence; identical to SEQ ID NO: 18512
  GFR-binding peptide
  MOD_RES (1)..(1): Xaa is C or S

SEQ ID NO: 21617 - protein, 38 aa, Artificial Sequence; identical to SEQ ID NO: 18513
  GFR-binding peptide
  MOD_RES (36)..(36): Xaa is C or S

SEQ ID NO: 21618 - protein, 34 aa, Artificial Sequence; identical to SEQ ID NO: 18514
  GFR-binding peptide
  MOD_RES (33)..(33): Xaa is C or S
  MOD_RES (11)..(12)..(13)..(14)..(15): Xaa is A or G
  MOD_RES (16)..(17)..(18)..(19): Xaa is A or G or is absent

SEQ ID NO: 21619 - protein, 33 aa, Artificial Sequence; identical to SEQ ID NO: 18515
  GFR-binding peptide

SEQ ID NO: 21620 - protein, 42 aa, Artificial Sequence; identical to SEQ ID NO: 18516
  GFR-binding peptide
  MOD_RES (1)..(3)..(37): Xaa is C or S
  MOD_RES (15)..(16)..(17)..(18)..(19): Xaa is A or G
  MOD_RES (20)..(21)..(22)..(23): Xaa is A or G or is absent

SEQ ID NO: 21621 - protein, 42 aa, Artificial Sequence; identical to SEQ ID NO: 18517
  GFR-binding peptide
  MOD_RES (2)..(39): Xaa is C or S

SEQ ID NO: 21622 - protein, 38 aa, Artificial Sequence; identical to SEQ ID NO: 18518
  GFR-binding peptide
  MOD_RES (34)..(34): Xaa is C or S

SEQ ID NO: 21623 - protein, 38 aa, Artificial Sequence; identical to SEQ ID NO: 18519
  GFR-binding peptide
  MOD_RES (1)..(3): Xaa is C or S
  MOD_RES (16)..(17)..(18)..(19)..(20): Xaa is A or G
  MOD_RES (21)..(22)..(23)..(24): Xaa is A or G or is absent

SEQ ID NO: 21624 - protein, 36 aa, Artificial Sequence; identical to SEQ ID NO: 18520
  GFR-binding peptide
  MOD_RES (1)..(1): Xaa is C or S

SEQ ID NO: 21625 - protein, 35 aa, Artificial Sequence; identical to SEQ ID NO: 18521
  GFR-binding peptide
  MOD_RES (1)..(1): Xaa is C or S

SEQ ID NO: 21626 - protein, 38 aa, Artificial Sequence; identical to SEQ ID NO: 18522
  GFR-binding peptide
  MOD_RES (34)..(34): Xaa is C or S

SEQ ID NO: 21627 - protein, 36 aa, Artificial Sequence; identical to SEQ ID NO: 18523
  GFR-binding peptide
  MOD_RES (1)..(1): Xaa is C or S

SEQ ID NO: 21628 - protein, 36 aa, Artificial Sequence; identical to SEQ ID NO: 18524
  GFR-binding peptide
  MOD_RES (35)..(35): Xaa is C or S

SEQ ID NO: 21629 - protein, 37 aa, Artificial Sequence; identical to SEQ ID NO: 18525
  GFR-binding peptide
  MOD_RES (2)..(2): Xaa is C or S
  MOD_RES (15)..(16)..(17)..(18)..(19): Xaa is A or G
  MOD_RES (20)..(21)..(22)..(23): Xaa is A or G or is absent

SEQ ID NO: 21630 - protein, 33 aa, Artificial Sequence; identical to SEQ ID NO: 18526
  GFR-binding peptide

SEQ ID NO: 21631 - protein, 34 aa, Artificial Sequence; identical to SEQ ID NO: 18527
  GFR-binding peptide

SEQ ID NO: 21632 - protein, 37 aa, Artificial Sequence; identical to SEQ ID NO: 18528
  GFR-binding peptide
  MOD_RES (1)..(35): Xaa is C or S

SEQ ID NO: 21633 - protein, 36 aa, Artificial Sequence; identical to SEQ ID NO: 18529
  GFR-binding peptide
  MOD_RES (35)..(35): Xaa is C or S

SEQ ID NO: 21634 - protein, 37 aa, Artificial Sequence; identical to SEQ ID NO: 18530
  GFR-binding peptide
  MOD_RES (1)..(35): Xaa is C or S
  MOD_RES (13)..(14)..(15)..(16)..(17): Xaa is A or G
  MOD_RES (18)..(19)..(20)..(21): Xaa is A or G or is absent

SEQ ID NO: 21635 - protein, 35 aa, Artificial Sequence; identical to SEQ ID NO: 18531
  GFR-binding peptide
  MOD_RES (35)..(35): Xaa is C or S

SEQ ID NO: 21636 - protein, 38 aa, Artificial Sequence; identical to SEQ ID NO: 18532
  GFR-binding peptide
  MOD_RES (37)..(37): Xaa is C or S

SEQ ID NO: 21637 - protein, 38 aa, Artificial Sequence; identical to SEQ ID NO: 18533
  GFR-binding peptide
  MOD_RES (35)..(35): Xaa is C or S
  MOD_RES (11)..(12)..(13)..(14)..(15): Xaa is A or G
  MOD_RES (16)..(17)..(18)..(19): Xaa is A or G or is absent

SEQ ID NO: 21638 - protein, 36 aa, Artificial Sequence; identical to SEQ ID NO: 18534
  GFR-binding peptide
  MOD_RES (1)..(3): Xaa is C or S
  MOD_RES (15)..(16)..(17)..(18)..(19): Xaa is A or G
  MOD_RES (20)..(21)..(22)..(23): Xaa is A or G or is absent

SEQ ID NO: 21639 - protein, 36 aa, Artificial Sequence; identical to SEQ ID NO: 18535
  GFR-binding peptide
  MOD_RES (36)..(36): Xaa is C or S
  MOD_RES (12)..(13)..(14)..(15)..(16): Xaa is A or G
  MOD_RES (17)..(18)..(19)..(20): Xaa is A or G or is absent

SEQ ID NO: 21640 - protein, 40 aa, Artificial Sequence; identical to SEQ ID NO: 18536
  GFR-binding peptide
  MOD_RES (1)..(35): Xaa is C or S

SEQ ID NO: 21641 - protein, 38 aa, Artificial Sequence; identical to SEQ ID NO: 18537
  GFR-binding peptide
  MOD_RES (2)..(4)..(38): Xaa is C or S
  MOD_RES (16)..(17)..(18)..(19)..(20): Xaa is A or G
  MOD_RES (21)..(22)..(23)..(24): Xaa is A or G or is absent

SEQ ID NO: 21642 - protein, 37 aa, Artificial Sequence; identical to SEQ ID NO: 18538
  GFR-binding peptide
  MOD_RES (1)..(3)..(37): Xaa is C or S
  MOD_RES (15)..(16)..(17)..(18)..(19): Xaa is A or G
  MOD_RES (20)..(21)..(22)..(23): Xaa is A or G or is absent

SEQ ID NO: 21643 - protein, 40 aa, Artificial Sequence; identical to SEQ ID NO: 18539
  GFR-binding peptide
  MOD_RES (1)..(35): Xaa is C or S

SEQ ID NO: 21644 - protein, 37 aa, Artificial Sequence; identical to SEQ ID NO: 18540
  GFR-binding peptide
  MOD_RES (35)..(35): Xaa is C or S

SEQ ID NO: 21645 - protein, 36 aa, Artificial Sequence; identical to SEQ ID NO: 18541
  GFR-binding peptide
  MOD_RES (35)..(35): Xaa is C or S
  MOD_RES (11)..(12)..(13)..(14)..(15): Xaa is A or G
  MOD_RES (16)..(17)..(18)..(19): Xaa is A or G or is absent

SEQ ID NO: 21646 - protein, 40 aa, Artificial Sequence; identical to SEQ ID NO: 18542
  GFR-binding peptide
  MOD_RES (2)..(4)..(38): Xaa is C or S
  MOD_RES (16)..(17)..(18)..(19)..(20): Xaa is A or G
  MOD_RES (21)..(22)..(23)..(24): Xaa is A or G or is absent

SEQ ID NO: 21647 - protein, 40 aa, Artificial Sequence; identical to SEQ ID NO: 18543
  GFR-binding peptide
  MOD_RES (1)..(38): Xaa is C or S
  MOD_RES (14)..(15)..(16)..(17)..(18): Xaa is A or G
  MOD_RES (19)..(20)..(21)..(22): Xaa is A or G or is absent

SEQ ID NO: 21648 - protein, 41 aa, Artificial Sequence; identical to SEQ ID NO: 18544
  GFR-binding peptide
  MOD_RES (2)..(4)..(38): Xaa is C or S
  MOD_RES (16)..(17)..(18)..(19)..(20): Xaa is A or G
  MOD_RES (21)..(22)..(23)..(24): Xaa is A or G or is absent

SEQ ID NO: 21649 - protein, 34 aa, Artificial Sequence; identical to SEQ ID NO: 18545
  GFR-binding peptide
  MOD_RES (11)..(12)..(13)..(14)..(15): Xaa is A or G
  MOD_RES (16)..(17)..(18)..(19): Xaa is A or G or is absent

SEQ ID NO: 21650 - protein, 41 aa, Artificial Sequence; identical to SEQ ID NO: 18546
  GFR-binding peptide
  MOD_RES (2)..(36): Xaa is C or S

SEQ ID NO: 21651 - protein, 40 aa, Artificial Sequence; identical to SEQ ID NO: 18547
  GFR-binding peptide
  MOD_RES (2)..(4): Xaa is C or S

SEQ ID NO: 21652 - protein, 36 aa, Artificial Sequence; identical to SEQ ID NO: 18548
  GFR-binding peptide
  MOD_RES (2)..(2): Xaa is C or S

SEQ ID NO: 21653 - protein, 36 aa, Artificial Sequence; identical to SEQ ID NO: 18549
  GFR-binding peptide
  MOD_RES (36)..(36): Xaa is C or S
  MOD_RES (12)..(13)..(14)..(15)..(16): Xaa is A or G
  MOD_RES (17)..(18)..(19)..(20): Xaa is A or G or is absent

SEQ ID NO: 21654 - protein, 37 aa, Artificial Sequence; identical to SEQ ID NO: 18550
  GFR-binding peptide
  MOD_RES (1)..(3): Xaa is C or S

SEQ ID NO: 21655 - protein, 33 aa, Artificial Sequence; identical to SEQ ID NO: 18551
  GFR-binding peptide

SEQ ID NO: 21656 - protein, 34 aa, Artificial Sequence; identical to SEQ ID NO: 18552
  GFR-binding peptide

SEQ ID NO: 21657 - protein, 43 aa, Artificial Sequence; identical to SEQ ID NO: 18553
  GFR-binding peptide
  MOD_RES (1)..(3)..(37): Xaa is C or S

SEQ ID NO: 21658 - protein, 45 aa, Artificial Sequence; identical to SEQ ID NO: 18554
  GFR-binding peptide
  MOD_RES (2)..(4)..(41): Xaa is C or S

SEQ ID NO: 21659 - protein, 38 aa, Artificial Sequence; identical to SEQ ID NO: 18555
  GFR-binding peptide
  MOD_RES (1)..(38): Xaa is C or S
  MOD_RES (14)..(15)..(16)..(17)..(18): Xaa is A or G
  MOD_RES (19)..(20)..(21)..(22): Xaa is A or G or is absent

SEQ ID NO: 21660 - protein, 36 aa, Artificial Sequence; identical to SEQ ID NO: 18556
  GFR-binding peptide
  MOD_RES (1)..(1): Xaa is C or S
  MOD_RES (14)..(15)..(16)..(17)..(18): Xaa is A or G
  MOD_RES (19)..(20)..(21)..(22): Xaa is A or G or is absent

SEQ ID NO: 21661 - protein, 39 aa, Artificial Sequence; identical to SEQ ID NO: 18557
  GFR-binding peptide
  MOD_RES (2)..(36): Xaa is C or S
  MOD_RES (14)..(15)..(16)..(17)..(18): Xaa is A or G
  MOD_RES (19)..(20)..(21)..(22): Xaa is A or G or is absent

SEQ ID NO: 21662 - protein, 36 aa, Artificial Sequence; identical to SEQ ID NO: 18558
  GFR-binding peptide
  MOD_RES (36)..(36): Xaa is C or S

SEQ ID NO: 21663 - protein, 34 aa, Artificial Sequence; identical to SEQ ID NO: 18559
  GFR-binding peptide

SEQ ID NO: 21664 - protein, 37 aa, Artificial Sequence; identical to SEQ ID NO: 18560
  GFR-binding peptide
  MOD_RES (34)..(34): Xaa is C or S

SEQ ID NO: 21665 - protein, 41 aa, Artificial Sequence; identical to SEQ ID NO: 18561
  GFR-binding peptide
  MOD_RES (37)..(37): Xaa is C or S
  MOD_RES (13)..(14)..(15)..(16)..(17): Xaa is A or G
  MOD_RES (18)..(19)..(20)..(21): Xaa is A or G or is absent

SEQ ID NO: 21666 - protein, 42 aa, Artificial Sequence; identical to SEQ ID NO: 18562
  GFR-binding peptide
  MOD_RES (2)..(4)..(41): Xaa is C or S
  MOD_RES (17)..(18)..(19)..(20)..(21): Xaa is A or G
  MOD_RES (22)..(23)..(24)..(25): Xaa is A or G or is absent

SEQ ID NO: 21667 - protein, 42 aa, Artificial Sequence; identical to SEQ ID NO: 18563
  GFR-binding peptide
  MOD_RES (1)..(3)..(37): Xaa is C or S
  MOD_RES (15)..(16)..(17)..(18)..(19): Xaa is A or G
  MOD_RES (20)..(21)..(22)..(23): Xaa is A or G or is absent

SEQ ID NO: 21668 - protein, 39 aa, Artificial Sequence; identical to SEQ ID NO: 18564
  GFR-binding peptide
  MOD_RES (2)..(4)..(38): Xaa is C or S

SEQ ID NO: 21669 - protein, 34 aa, Artificial Sequence; identical to SEQ ID NO: 18565
  GFR-binding peptide
  MOD_RES (13)..(14)..(15)..(16)..(17): Xaa is A or G
  MOD_RES (18)..(19)..(20)..(21): Xaa is A or G or is absent

SEQ ID NO: 21670 - protein, 44 aa, Artificial Sequence; identical to SEQ ID NO: 18566
  GFR-binding peptide
  MOD_RES (2)..(4)..(41): Xaa is C or S
  MOD_RES (17)..(18)..(19)..(20)..(21): Xaa is A or G
  MOD_RES (22)..(23)..(24)..(25): Xaa is A or G or is absent

SEQ ID NO: 21671 - protein, 40 aa, Artificial Sequence; identical to SEQ ID NO: 18567
  GFR-binding peptide
  MOD_RES (1)..(38): Xaa is C or S

SEQ ID NO: 21672 - protein, 42 aa, Artificial Sequence; identical to SEQ ID NO: 18568
  GFR-binding peptide
  MOD_RES (1)..(3)..(37): Xaa is C or S
  MOD_RES (15)..(16)..(17)..(18)..(19): Xaa is A or G
  MOD_RES (20)..(21)..(22)..(23): Xaa is A or G or is absent

SEQ ID NO: 21673 - protein, 42 aa, Artificial Sequence; identical to SEQ ID NO: 18569
  GFR-binding peptide
  MOD_RES (2)..(36): Xaa is C or S
  MOD_RES (14)..(15)..(16)..(17)..(18): Xaa is A or G
  MOD_RES (19)..(20)..(21)..(22): Xaa is A or G or is absent

SEQ ID NO: 21674 - protein, 41 aa, Artificial Sequence; identical to SEQ ID NO: 18570
  GFR-binding peptide
  MOD_RES (2)..(36): Xaa is C or S

SEQ ID NO: 21675 - protein, 41 aa, Artificial Sequence; identical to SEQ ID NO: 18571
  GFR-binding peptide
  MOD_RES (2)..(36): Xaa is C or S
  MOD_RES (14)..(15)..(16)..(17)..(18): Xaa is A or G
  MOD_RES (19)..(20)..(21)..(22): Xaa is A or G or is absent

SEQ ID NO: 21676 - protein, 35 aa, Artificial Sequence; identical to SEQ ID NO: 18572
  GFR-binding peptide
  MOD_RES (12)..(13)..(14)..(15)..(16): Xaa is A or G
  MOD_RES (17)..(18)..(19)..(20): Xaa is A or G or is absent

SEQ ID NO: 21677 - protein, 39 aa, Artificial Sequence; identical to SEQ ID NO: 18573
  GFR-binding peptide
  MOD_RES (1)..(3): Xaa is C or S
  MOD_RES (16)..(17)..(18)..(19)..(20): Xaa is A or G
  MOD_RES (21)..(22)..(23)..(24): Xaa is A or G or is absent

SEQ ID NO: 21678 - protein, 39 aa, Artificial Sequence; identical to SEQ ID NO: 18574
  GFR-binding peptide
  MOD_RES (2)..(39): Xaa is C or S

SEQ ID NO: 21679 - protein, 41 aa, Artificial Sequence; identical to SEQ ID NO: 18575
  GFR-binding peptide
  MOD_RES (2)..(39): Xaa is C or S

SEQ ID NO: 21680 - protein, 35 aa, Artificial Sequence; identical to SEQ ID NO: 18576
  GFR-binding peptide

SEQ ID NO: 21681 - protein, 39 aa, Artificial Sequence; identical to SEQ ID NO: 18577
  GFR-binding peptide
  MOD_RES (34)..(34): Xaa is C or S
  MOD_RES (12)..(13)..(14)..(15)..(16): Xaa is A or G
  MOD_RES (17)..(18)..(19)..(20): Xaa is A or G or is absent

SEQ ID NO: 21682 - protein, 39 aa, Artificial Sequence; identical to SEQ ID NO: 18578
  GFR-binding peptide
  MOD_RES (1)..(3)..(37): Xaa is C or S

SEQ ID NO: 21683 - protein, 39 aa, Artificial Sequence; identical to SEQ ID NO: 18579
  GFR-binding peptide
  MOD_RES (2)..(36): Xaa is C or S
  MOD_RES (14)..(15)..(16)..(17)..(18): Xaa is A or G
  MOD_RES (19)..(20)..(21)..(22): Xaa is A or G or is absent

SEQ ID NO: 21684 - protein, 38 aa, Artificial Sequence; identical to SEQ ID NO: 18580
  GFR-binding peptide
  MOD_RES (2)..(2): Xaa is C or S

SEQ ID NO: 21685 - protein, 35 aa, Artificial Sequence; identical to SEQ ID NO: 18581
  GFR-binding peptide
  MOD_RES (13)..(14)..(15)..(16)..(17): Xaa is A or G
  MOD_RES (18)..(19)..(20)..(21): Xaa is A or G or is absent

SEQ ID NO: 21686 - protein, 39 aa, Artificial Sequence; identical to SEQ ID NO: 18582
  GFR-binding peptide
  MOD_RES (2)..(4)..(38): Xaa is C or S

SEQ ID NO: 21687 - protein, 40 aa, Artificial Sequence; identical to SEQ ID NO: 18583
  GFR-binding peptide
  MOD_RES (1)..(3)..(40): Xaa is C or S
  MOD_RES (16)..(17)..(18)..(19)..(20): Xaa is A or G
  MOD_RES (21)..(22)..(23)..(24): Xaa is A or G or is absent

SEQ ID NO: 21688 - protein, 39 aa, Artificial Sequence; identical to SEQ ID NO: 18584
  GFR-binding peptide
  MOD_RES (2)..(4): Xaa is C or S
  MOD_RES (17)..(18)..(19)..(20)..(21): Xaa is A or G
  MOD_RES (22)..(23)..(24)..(25): Xaa is A or G or is absent

SEQ ID NO: 21689 - protein, 39 aa, Artificial Sequence; identical to SEQ ID NO: 18585
  GFR-binding peptide
  MOD_RES (35)..(35): Xaa is C or S
  MOD_RES (11)..(12)..(13)..(14)..(15): Xaa is A or G
  MOD_RES (16)..(17)..(18)..(19): Xaa is A or G or is absent

SEQ ID NO: 21690 - protein, 36 aa, Artificial Sequence; identical to SEQ ID NO: 18586
  GFR-binding peptide

SEQ ID NO: 21691 - protein, 40 aa, Artificial Sequence; identical to SEQ ID NO: 18587
  GFR-binding peptide
  MOD_RES (1)..(3)..(37): Xaa is C or S

SEQ ID NO: 21692 - protein, 34 aa, Artificial Sequence; identical to SEQ ID NO: 18588
  GFR-binding peptide

SEQ ID NO: 21693 - protein, 38 aa, Artificial Sequence; identical to SEQ ID NO: 18589
  GFR-binding peptide
  MOD_RES (2)..(4)..(38): Xaa is C or S
  MOD_RES (16)..(17)..(18)..(19)..(20): Xaa is A or G
  MOD_RES (21)..(22)..(23)..(24): Xaa is A or G or is absent

SEQ ID NO: 21694 - protein, 34 aa, Artificial Sequence; identical to SEQ ID NO: 18590
  GFR-binding peptide
  MOD_RES (12)..(13)..(14)..(15)..(16): Xaa is A or G
  MOD_RES (17)..(18)..(19)..(20): Xaa is A or G or is absent

SEQ ID NO: 21695 - protein, 39 aa, Artificial Sequence; identical to SEQ ID NO: 18591
  GFR-binding peptide
  MOD_RES (1)..(38): Xaa is C or S

SEQ ID NO: 21696 - protein, 42 aa, Artificial Sequence; identical to SEQ ID NO: 18592
  GFR-binding peptide
  MOD_RES (1)..(38): Xaa is C or S

SEQ ID NO: 21697 - protein, 38 aa, Artificial Sequence; identical to SEQ ID NO: 18593
  GFR-binding peptide
  MOD_RES (1)..(35): Xaa is C or S

SEQ ID NO: 21698 - protein, 42 aa, Artificial Sequence; identical to SEQ ID NO: 18594
  GFR-binding peptide
  MOD_RES (1)..(3)..(40): Xaa is C or S

SEQ ID NO: 21699 - protein, 41 aa, Artificial Sequence; identical to SEQ ID NO: 18595
  GFR-binding peptide
  MOD_RES (1)..(35): Xaa is C or S

SEQ ID NO: 21700 - protein, 40 aa, Artificial Sequence; identical to SEQ ID NO: 18596
  GFR-binding peptide
  MOD_RES (36)..(36): Xaa is C or S
  MOD_RES (12)..(13)..(14)..(15)..(16): Xaa is A or G
  MOD_RES (17)..(18)..(19)..(20): Xaa is A or G or is absent

SEQ ID NO: 21701 - protein, 39 aa, Artificial Sequence; identical to SEQ ID NO: 18597
  GFR-binding peptide
  MOD_RES (36)..(36): Xaa is C or S
  MOD_RES (12)..(13)..(14)..(15)..(16): Xaa is A or G
  MOD_RES (17)..(18)..(19)..(20): Xaa is A or G or is absent

SEQ ID NO: 21702 - protein, 33 aa, Artificial Sequence; identical to SEQ ID NO: 18598
  GFR-binding peptide
  MOD_RES (12)..(13)..(14)..(15)..(16): Xaa is A or G
  MOD_RES (17)..(18)..(19)..(20): Xaa is A or G or is absent

SEQ ID NO: 21703 - protein, 36 aa, Artificial Sequence; identical to SEQ ID NO: 18599
  GFR-binding peptide
  MOD_RES (1)..(35): Xaa is C or S
  MOD_RES (13)..(14)..(15)..(16)..(17): Xaa is A or G
  MOD_RES (18)..(19)..(20)..(21): Xaa is A or G or is absent

SEQ ID NO: 21704 - protein, 40 aa, Artificial Sequence; identical to SEQ ID NO: 18600
  GFR-binding peptide
  MOD_RES (2)..(4)..(38): Xaa is C or S

SEQ ID NO: 21705 - protein, 42 aa, Artificial Sequence; identical to SEQ ID NO: 18601
  GFR-binding peptide
  MOD_RES (2)..(4)..(38): Xaa is C or S
  MOD_RES (16)..(17)..(18)..(19)..(20): Xaa is A or G
  MOD_RES (21)..(22)..(23)..(24): Xaa is A or G or is absent

SEQ ID NO: 21706 - protein, 34 aa, Artificial Sequence; identical to SEQ ID NO: 18602
  GFR-binding peptide
  MOD_RES (11)..(12)..(13)..(14)..(15): Xaa is A or G
  MOD_RES (16)..(17)..(18)..(19): Xaa is A or G or is absent

SEQ ID NO: 21707 - protein, 35 aa, Artificial Sequence; identical to SEQ ID NO: 18603
  GFR-binding peptide
  MOD_RES (12)..(13)..(14)..(15)..(16): Xaa is A or G
  MOD_RES (17)..(18)..(19)..(20): Xaa is A or G or is absent

SEQ ID NO: 21708 - protein, 43 aa, Artificial Sequence; identical to SEQ ID NO: 18604
  GFR-binding peptide
  MOD_RES (2)..(4)..(41): Xaa is C or S
  MOD_RES (17)..(18)..(19)..(20)..(21): Xaa is A or G
  MOD_RES (22)..(23)..(24)..(25): Xaa is A or G or is absent

SEQ ID NO: 21709 - protein, 35 aa, Artificial Sequence; identical to SEQ ID NO: 18605
  GFR-binding peptide
  MOD_RES (1)..(35): Xaa is C or S

SEQ ID NO: 21710 - protein, 39 aa, Artificial Sequence; identical to SEQ ID NO: 18606
  GFR-binding peptide
  MOD_RES (2)..(4)..(38): Xaa is C or S

SEQ ID NO: 21711 - protein, 36 aa, Artificial Sequence; identical to SEQ ID NO: 18607
  GFR-binding peptide
  MOD_RES (1)..(35): Xaa is C or S
  MOD_RES (13)..(14)..(15)..(16)..(17): Xaa is A or G
  MOD_RES (18)..(19)..(20)..(21): Xaa is A or G or is absent

SEQ ID NO: 21712 - protein, 43 aa, Artificial Sequence; identical to SEQ ID NO: 18608
  GFR-binding peptide
  MOD_RES (2)..(39): Xaa is C or S

SEQ ID NO: 21713 - protein, 41 aa, Artificial Sequence; identical to SEQ ID NO: 18609
  GFR-binding peptide
  MOD_RES (1)..(3)..(40): Xaa is C or S

SEQ ID NO: 21714 - protein, 37 aa, Artificial Sequence; identical to SEQ ID NO: 18610
  GFR-binding peptide
  MOD_RES (2)..(4): Xaa is C or S

SEQ ID NO: 21715 - protein, 37 aa, Artificial Sequence; identical to SEQ ID NO: 18611
  GFR-binding peptide
  MOD_RES (2)..(36): Xaa is C or S

SEQ ID NO: 21716 - protein, 39 aa, Artificial Sequence; identical to SEQ ID NO: 18612
  GFR-binding peptide
  MOD_RES (1)..(3)..(37): Xaa is C or S
  MOD_RES (15)..(16)..(17)..(18)..(19): Xaa is A or G
  MOD_RES (20)..(21)..(22)..(23): Xaa is A or G or is absent

SEQ ID NO: 21717 - protein, 40 aa, Artificial Sequence; identical to SEQ ID NO: 18613
  GFR-binding peptide
  MOD_RES (1)..(3)..(40): Xaa is C or S

SEQ ID NO: 21718 - protein, 33 aa, Artificial Sequence; identical to SEQ ID NO: 18614
  GFR-binding peptide
  MOD_RES (12)..(13)..(14)..(15)..(16): Xaa is A or G
  MOD_RES (17)..(18)..(19)..(20): Xaa is A or G or is absent

SEQ ID NO: 21719 - protein, 44 aa, Artificial Sequence; identical to SEQ ID NO: 18615
  GFR-binding peptide
  MOD_RES (1)..(3)..(40): Xaa is C or S

SEQ ID NO: 21720 - protein, 42 aa, Artificial Sequence; identical to SEQ ID NO: 18616
  GFR-binding peptide
  MOD_RES (2)..(36): Xaa is C or S
  MOD_RES (14)..(15)..(16)..(17)..(18): Xaa is A or G
  MOD_RES (19)..(20)..(21)..(22): Xaa is A or G or is absent

SEQ ID NO: 21721 - protein, 37 aa, Artificial Sequence; identical to SEQ ID NO: 18617
  GFR-binding peptide
  MOD_RES (35)..(35): Xaa is C or S

SEQ ID NO: 21722 - protein, 39 aa, Artificial Sequence; identical to SEQ ID NO: 18618
  GFR-binding peptide
  MOD_RES (2)..(4): Xaa is C or S
  MOD_RES (17)..(18)..(19)..(20)..(21): Xaa is A or G
  MOD_RES (22)..(23)..(24)..(25): Xaa is A or G or is absent

SEQ ID NO: 21723 - protein, 37 aa, Artificial Sequence; identical to SEQ ID NO: 18619
  GFR-binding peptide
  MOD_RES (35)..(35): Xaa is C or S

SEQ ID NO: 21724 - protein, 36 aa, Artificial Sequence; identical to SEQ ID NO: 18620
  GFR-binding peptide
  MOD_RES (2)..(2): Xaa is C or S
  MOD_RES (15)..(16)..(17)..(18)..(19): Xaa is A or G
  MOD_RES (20)..(21)..(22)..(23): Xaa is A or G or is absent

SEQ ID NO: 21725 - protein, 41 aa, Artificial Sequence; identical to SEQ ID NO: 18621
  GFR-binding peptide
  MOD_RES (1)..(3)..(40): Xaa is C or S

SEQ ID NO: 21726 - protein, 37 aa, Artificial Sequence; identical to SEQ ID NO: 18622
  GFR-binding peptide
  MOD_RES (2)..(36): Xaa is C or S

SEQ ID NO: 21727 - protein, 43 aa, Artificial Sequence; identical to SEQ ID NO: 18623
  GFR-binding peptide
  MOD_RES (2)..(4)..(41): Xaa is C or S
  MOD_RES (17)..(18)..(19)..(20)..(21): Xaa is A or G
  MOD_RES (22)..(23)..(24)..(25): Xaa is A or G or is absent

SEQ ID NO: 21728 - protein, 40 aa, Artificial Sequence; identical to SEQ ID NO: 18624
  GFR-binding peptide
  MOD_RES (1)..(3)..(37): Xaa is C or S

SEQ ID NO: 21729 - protein, 41 aa, Artificial Sequence; identical to SEQ ID NO: 18625
  GFR-binding peptide
  MOD_RES (2)..(39): Xaa is C or S

SEQ ID NO: 21730 - protein, 41 aa, Artificial Sequence; identical to SEQ ID NO: 18626
  GFR-binding peptide
  MOD_RES (2)..(4)..(38): Xaa is C or S

SEQ ID NO: 21731 - protein, 37 aa, Artificial Sequence; identical to SEQ ID NO: 18627
  GFR-binding peptide
  MOD_RES (36)..(36): Xaa is C or S
  MOD_RES (12)..(13)..(14)..(15)..(16): Xaa is A or G
  MOD_RES (17)..(18)..(19)..(20): Xaa is A or G or is absent

SEQ ID NO: 21732 - protein, 40 aa, Artificial Sequence; identical to SEQ ID NO: 18628
  GFR-binding peptide
  MOD_RES (2)..(4)..(38): Xaa is C or S

SEQ ID NO: 21733 - protein, 39 aa, Artificial Sequence; identical to SEQ ID NO: 18629
  GFR-binding peptide
  MOD_RES (1)..(3): Xaa is C or S

SEQ ID NO: 21734 - protein, 38 aa, Artificial Sequence; identical to SEQ ID NO: 18630
  GFR-binding peptide
  MOD_RES (1)..(35): Xaa is C or S

SEQ ID NO: 21735 - protein, 39 aa, Artificial Sequence; identical to SEQ ID NO: 18631
  GFR-binding peptide
  MOD_RES (37)..(37): Xaa is C or S

SEQ ID NO: 21736 - protein, 40 aa, Artificial Sequence; identical to SEQ ID NO: 18632
  GFR-binding peptide
  MOD_RES (34)..(34): Xaa is C or S

SEQ ID NO: 21737 - protein, 34 aa, Artificial Sequence; identical to SEQ ID NO: 18633
  GFR-binding peptide

SEQ ID NO: 21738 - protein, 38 aa, Artificial Sequence; identical to SEQ ID NO: 18634
  GFR-binding peptide
  MOD_RES (1)..(3)..(37): Xaa is C or S
  MOD_RES (15)..(16)..(17)..(18)..(19): Xaa is A or G
  MOD_RES (20)..(21)..(22)..(23): Xaa is A or G or is absent

SEQ ID NO: 21739 - protein, 39 aa, Artificial Sequence; identical to SEQ ID NO: 18635
  GFR-binding peptide
  MOD_RES (1)..(3)..(37): Xaa is C or S
  MOD_RES (15)..(16)..(17)..(18)..(19): Xaa is A or G
  MOD_RES (20)..(21)..(22)..(23): Xaa is A or G or is absent

SEQ ID NO: 21740 - protein, 36 aa, Artificial Sequence; identical to SEQ ID NO: 18636
  GFR-binding peptide
  MOD_RES (1)..(3): Xaa is C or S
  MOD_RES (15)..(16)..(17)..(18)..(19): Xaa is A or G
  MOD_RES (20)..(21)..(22)..(23): Xaa is A or G or is absent

SEQ ID NO: 21741 - protein, 41 aa, Artificial Sequence; identical to SEQ ID NO: 18637
  GFR-binding peptide
  MOD_RES (1)..(3)..(37): Xaa is C or S
  MOD_RES (15)..(16)..(17)..(18)..(19): Xaa is A or G
  MOD_RES (20)..(21)..(22)..(23): Xaa is A or G or is absent

SEQ ID NO: 21742 - protein, 35 aa, Artificial Sequence; identical to SEQ ID NO: 18638
  GFR-binding peptide
  MOD_RES (12)..(13)..(14)..(15)..(16): Xaa is A or G
  MOD_RES (17)..(18)..(19)..(20): Xaa is A or G or is absent

SEQ ID NO: 21743 - protein, 41 aa, Artificial Sequence; identical to SEQ ID NO: 18639
  GFR-binding peptide
  MOD_RES (2)..(39): Xaa is C or S
  MOD_RES (15)..(16)..(17)..(18)..(19): Xaa is A or G
  MOD_RES (20)..(21)..(22)..(23): Xaa is A or G or is absent

SEQ ID NO: 21744 - protein, 43 aa, Artificial Sequence; identical to SEQ ID NO: 18640
  GFR-binding peptide
  MOD_RES (1)..(3)..(40): Xaa is C or S
  MOD_RES (16)..(17)..(18)..(19)..(20): Xaa is A or G
  MOD_RES (21)..(22)..(23)..(24): Xaa is A or G or is absent

SEQ ID NO: 21745 - protein, 39 aa, Artificial Sequence; identical to SEQ ID NO: 18641
  GFR-binding peptide
  MOD_RES (2)..(4): Xaa is C or S
  MOD_RES (17)..(18)..(19)..(20)..(21): Xaa is A or G
  MOD_RES (22)..(23)..(24)..(25): Xaa is A or G or is absent

SEQ ID NO: 21746 - protein, 35 aa, Artificial Sequence; identical to SEQ ID NO: 18642
  GFR-binding peptide

SEQ ID NO: 21747 - protein, 40 aa, Artificial Sequence; identical to SEQ ID NO: 18643
  GFR-binding peptide
  MOD_RES (36)..(36): Xaa is C or S
  MOD_RES (12)..(13)..(14)..(15)..(16): Xaa is A or G
  MOD_RES (17)..(18)..(19)..(20): Xaa is A or G or is absent

SEQ ID NO: 21748 - protein, 38 aa, Artificial Sequence; identical to SEQ ID NO: 18644
  GFR-binding peptide
  MOD_RES (2)..(36): Xaa is C or S

SEQ ID NO: 21749 - protein, 43 aa, Artificial Sequence; identical to SEQ ID NO: 18645
  GFR-binding peptide
  MOD_RES (2)..(39): Xaa is C or S
  MOD_RES (15)..(16)..(17)..(18)..(19): Xaa is A or G
  MOD_RES (20)..(21)..(22)..(23): Xaa is A or G or is absent

SEQ ID NO: 21750 - protein, 41 aa, Artificial Sequence; identical to SEQ ID NO: 18646
  GFR-binding peptide
  MOD_RES (1)..(38): Xaa is C or S
  MOD_RES (14)..(15)..(16)..(17)..(18): Xaa is A or G
  MOD_RES (19)..(20)..(21)..(22): Xaa is A or G or is absent

SEQ ID NO: 21751 - protein, 41 aa, Artificial Sequence; identical to SEQ ID NO: 18647
  GFR-binding peptide
  MOD_RES (2)..(4)..(41): Xaa is C or S
  MOD_RES (17)..(18)..(19)..(20)..(21): Xaa is A or G
  MOD_RES (22)..(23)..(24)..(25): Xaa is A or G or is absent

SEQ ID NO: 21752 - protein, 38 aa, Artificial Sequence; identical to SEQ ID NO: 18648
  GFR-binding peptide
  MOD_RES (2)..(2): Xaa is C or S
  MOD_RES (15)..(16)..(17)..(18)..(19): Xaa is A or G
  MOD_RES (20)..(21)..(22)..(23): Xaa is A or G or is absent

SEQ ID NO: 21753 - protein, 34 aa, Artificial Sequence; identical to SEQ ID NO: 18649
  GFR-binding peptide
  MOD_RES (34)..(34): Xaa is C or S
  MOD_RES (12)..(13)..(14)..(15)..(16): Xaa is A or G
  MOD_RES (17)..(18)..(19)..(20): Xaa is A or G or is absent

SEQ ID NO: 21754 - protein, 41 aa, Artificial Sequence; identical to SEQ ID NO: 18650
  GFR-binding peptide
  MOD_RES (2)..(4)..(38): Xaa is C or S
  MOD_RES (16)..(17)..(18)..(19)..(20): Xaa is A or G
  MOD_RES (21)..(22)..(23)..(24): Xaa is A or G or is absent

SEQ ID NO: 21755 - protein, 41 aa, Artificial Sequence; identical to SEQ ID NO: 18651
  GFR-binding peptide
  MOD_RES (2)..(39): Xaa is C or S
  MOD_RES (15)..(16)..(17)..(18)..(19): Xaa is A or G
  MOD_RES (20)..(21)..(22)..(23): Xaa is A or G or is absent

SEQ ID NO: 21756 - protein, 35 aa, Artificial Sequence; identical to SEQ ID NO: 18652
  GFR-binding peptide
  MOD_RES (1)..(35): Xaa is C or S
  MOD_RES (13)..(14)..(15)..(16)..(17): Xaa is A or G
  MOD_RES (18)..(19)..(20)..(21): Xaa is A or G or is absent

SEQ ID NO: 21757 - protein, 39 aa, Artificial Sequence; identical to SEQ ID NO: 18653
  GFR-binding peptide
  MOD_RES (36)..(36): Xaa is C or S

SEQ ID NO: 21758 - protein, 38 aa, Artificial Sequence; identical to SEQ ID NO: 18654
  GFR-binding peptide
  MOD_RES (1)..(35): Xaa is C or S
  MOD_RES (13)..(14)..(15)..(16)..(17): Xaa is A or G
  MOD_RES (18)..(19)..(20)..(21): Xaa is A or G or is absent

SEQ ID NO: 21759 - protein, 40 aa, Artificial Sequence; identical to SEQ ID NO: 18655
  GFR-binding peptide
  MOD_RES (36)..(36): Xaa is C or S

SEQ ID NO: 21760 - protein, 37 aa, Artificial Sequence; identical to SEQ ID NO: 18656
  GFR-binding peptide
  MOD_RES (2)..(2): Xaa is C or S

SEQ ID NO: 21761 - protein, 42 aa, Artificial Sequence; identical to SEQ ID NO: 18657
  GFR-binding peptide
  MOD_RES (2)..(36): Xaa is C or S

SEQ ID NO: 21762 - protein, 41 aa, Artificial Sequence; identical to SEQ ID NO: 18658
  GFR-binding peptide
  MOD_RES (2)..(4)..(41): Xaa is C or S
  MOD_RES (17)..(18)..(19)..(20)..(21): Xaa is A or G
  MOD_RES (22)..(23)..(24)..(25): Xaa is A or G or is absent

SEQ ID NO: 21763 - protein, 36 aa, Artificial Sequence; identical to SEQ ID NO: 18659
  GFR-binding peptide
  MOD_RES (1)..(3): Xaa is C or S

SEQ ID NO: 21764 - protein, 37 aa, Artificial Sequence; identical to SEQ ID NO: 18660
  GFR-binding peptide
  MOD_RES (37)..(37): Xaa is C or S
  MOD_RES (13)..(14)..(15)..(16)..(17): Xaa is A or G
  MOD_RES (18)..(19)..(20)..(21): Xaa is A or G or is absent

SEQ ID NO: 21765 - protein, 41 aa, Artificial Sequence; identical to SEQ ID NO: 18661
  GFR-binding peptide
  MOD_RES (1)..(38): Xaa is C or S

SEQ ID NO: 21766 - protein, 41 aa, Artificial Sequence; identical to SEQ ID NO: 18662
  GFR-binding peptide
  MOD_RES (1)..(3)..(37): Xaa is C or S

SEQ ID NO: 21767 - protein, 36 aa, Artificial Sequence; identical to SEQ ID NO: 18663
  GFR-binding peptide
  MOD_RES (34)..(34): Xaa is C or S

SEQ ID NO: 21768 - protein, 36 aa, Artificial Sequence; identical to SEQ ID NO: 18664
  GFR-binding peptide
  MOD_RES (1)..(35): Xaa is C or S

SEQ ID NO: 21769 - protein, 40 aa, Artificial Sequence; identical to SEQ ID NO: 18665
  GFR-binding peptide
  MOD_RES (1)..(3)..(40): Xaa is C or S
  MOD_RES (16)..(17)..(18)..(19)..(20): Xaa is A or G
  MOD_RES (21)..(22)..(23)..(24): Xaa is A or G or is absent

SEQ ID NO: 21770 - protein, 43 aa, Artificial Sequence; identical to SEQ ID NO: 18666
  GFR-binding peptide
  MOD_RES (2)..(39): Xaa is C or S

SEQ ID NO: 21771 - protein, 37 aa, Artificial Sequence; identical to SEQ ID NO: 18667
  GFR-binding peptide
  MOD_RES (2)..(4): Xaa is C or S
  MOD_RES (16)..(17)..(18)..(19)..(20): Xaa is A or G
  MOD_RES (21)..(22)..(23)..(24): Xaa is A or G or is absent

SEQ ID NO: 21772 - protein, 39 aa, Artificial Sequence; identical to SEQ ID NO: 18668
  GFR-binding peptide
  MOD_RES (36)..(36): Xaa is C or S

SEQ ID NO: 21773 - protein, 32 aa, Artificial Sequence; identical to SEQ ID NO: 18669
  GFR-binding peptide
  MOD_RES (11)..(12)..(13)..(14)..(15): Xaa is A or G
  MOD_RES (16)..(17)..(18)..(19): Xaa is A or G or is absent

SEQ ID NO: 21774 - protein, 37 aa, Artificial Sequence; identical to SEQ ID NO: 18670
  GFR-binding peptide
  MOD_RES (1)..(3): Xaa is C or S
  MOD_RES (16)..(17)..(18)..(19)..(20): Xaa is A or G
  MOD_RES (21)..(22)..(23)..(24): Xaa is A or G or is absent

SEQ ID NO: 21775 - protein, 40 aa, Artificial Sequence; identical to SEQ ID NO: 18671
  GFR-binding peptide
  MOD_RES (1)..(3)..(37): Xaa is C or S
  MOD_RES (15)..(16)..(17)..(18)..(19): Xaa is A or G
  MOD_RES (20)..(21)..(22)..(23): Xaa is A or G or is absent

SEQ ID NO: 21776 - protein, 39 aa, Artificial Sequence; identical to SEQ ID NO: 18672
  GFR-binding peptide
  MOD_RES (35)..(35): Xaa is C or S
  MOD_RES (11)..(12)..(13)..(14)..(15): Xaa is A or G
  MOD_RES (16)..(17)..(18)..(19): Xaa is A or G or is absent

SEQ ID NO: 21777 - protein, 34 aa, Artificial Sequence; identical to SEQ ID NO: 18673
  GFR-binding peptide
  MOD_RES (1)..(1): Xaa is C or S
  MOD_RES (13)..(14)..(15)..(16)..(17): Xaa is A or G
  MOD_RES (18)..(19)..(20)..(21): Xaa is A or G or is absent

SEQ ID NO: 21778 - protein, 36 aa, Artificial Sequence; identical to SEQ ID NO: 18674
  GFR-binding peptide
  MOD_RES (34)..(34): Xaa is C or S

SEQ ID NO: 21779 - protein, 37 aa, Artificial Sequence; identical to SEQ ID NO: 18675
  GFR-binding peptide
  MOD_RES (1)..(1): Xaa is C or S
  MOD_RES (14)..(15)..(16)..(17)..(18): Xaa is A or G
  MOD_RES (19)..(20)..(21)..(22): Xaa is A or G or is absent

SEQ ID NO: 21780 - protein, 39 aa, Artificial Sequence; identical to SEQ ID NO: 18676
  GFR-binding peptide
  MOD_RES (35)..(35): Xaa is C or S
  MOD_RES (11)..(12)..(13)..(14)..(15): Xaa is A or G
  MOD_RES (16)..(17)..(18)..(19): Xaa is A or G or is absent

SEQ ID NO: 21781 - protein, 36 aa, Artificial Sequence; identical to SEQ ID NO: 18677
  GFR-binding peptide
  MOD_RES (2)..(36): Xaa is C or S

SEQ ID NO: 21782 - protein, 38 aa, Artificial Sequence; identical to SEQ ID NO: 18678
  GFR-binding peptide
  MOD_RES (1)..(3)..(37): Xaa is C or S
  MOD_RES (15)..(16)..(17)..(18)..(19): Xaa is A or G
  MOD_RES (20)..(21)..(22)..(23): Xaa is A or G or is absent

SEQ ID NO: 21783 - protein, 39 aa, Artificial Sequence; identical to SEQ ID NO: 18679
  GFR-binding peptide
  MOD_RES (1)..(35): Xaa is C or S

SEQ ID NO: 21784 - protein, 36 aa, Artificial Sequence; identical to SEQ ID NO: 18680
  GFR-binding peptide

SEQ ID NO: 21785 - protein, 39 aa, Artificial Sequence; identical to SEQ ID NO: 18681
  GFR-binding peptide
  MOD_RES (2)..(36): Xaa is C or S
  MOD_RES (14)..(15)..(16)..(17)..(18): Xaa is A or G
  MOD_RES (19)..(20)..(21)..(22): Xaa is A or G or is absent

SEQ ID NO: 21786 - protein, 36 aa, Artificial Sequence; identical to SEQ ID NO: 18682
  GFR-binding peptide
  MOD_RES (36)..(36): Xaa is C or S
  MOD_RES (12)..(13)..(14)..(15)..(16): Xaa is A or G
  MOD_RES (17)..(18)..(19)..(20): Xaa is A or G or is absent

SEQ ID NO: 21787 - protein, 42 aa, Artificial Sequence; identical to SEQ ID NO: 18683
  GFR-binding peptide
  MOD_RES (2)..(4)..(41): Xaa is C or S

SEQ ID NO: 21788 - protein, 41 aa, Artificial Sequence; identical to SEQ ID NO: 18684
  GFR-binding peptide
  MOD_RES (2)..(36): Xaa is C or S
  MOD_RES (14)..(15)..(16)..(17)..(18): Xaa is A or G
  MOD_RES (19)..(20)..(21)..(22): Xaa is A or G or is absent

SEQ ID NO: 21789 - protein, 34 aa, Artificial Sequence; identical to SEQ ID NO: 18685
  GFR-binding peptide
  MOD_RES (11)..(12)..(13)..(14)..(15): Xaa is A or G
  MOD_RES (16)..(17)..(18)..(19): Xaa is A or G or is absent

SEQ ID NO: 21790 - protein, 34 aa, Artificial Sequence; identical to SEQ ID NO: 18686
  GFR-binding peptide
  MOD_RES (1)..(1): Xaa is C or S

SEQ ID NO: 21791 - protein, 36 aa, Artificial Sequence; identical to SEQ ID NO: 18687
  GFR-binding peptide
  MOD_RES (36)..(36): Xaa is C or S
  MOD_RES (12)..(13)..(14)..(15)..(16): Xaa is A or G
  MOD_RES (17)..(18)..(19)..(20): Xaa is A or G or is absent

SEQ ID NO: 21792 - protein, 41 aa, Artificial Sequence; identical to SEQ ID NO: 18688
  GFR-binding peptide
  MOD_RES (1)..(3)..(37): Xaa is C or S
  MOD_RES (15)..(16)..(17)..(18)..(19): Xaa is A or G
  MOD_RES (20)..(21)..(22)..(23): Xaa is A or G or is absent

SEQ ID NO: 21793 - protein, 36 aa, Artificial Sequence; identical to SEQ ID NO: 18689
  GFR-binding peptide
  MOD_RES (34)..(34): Xaa is C or S
  MOD_RES (12)..(13)..(14)..(15)..(16): Xaa is A or G
  MOD_RES (17)..(18)..(19)..(20): Xaa is A or G or is absent

SEQ ID NO: 21794 - protein, 39 aa, Artificial Sequence; identical to SEQ ID NO: 18690
  GFR-binding peptide
  MOD_RES (37)..(37): Xaa is C or S

SEQ ID NO: 21795 - protein, 40 aa, Artificial Sequence; identical to SEQ ID NO: 18691
  GFR-binding peptide
  MOD_RES (1)..(38): Xaa is C or S
  MOD_RES (14)..(15)..(16)..(17)..(18): Xaa is A or G
  MOD_RES (19)..(20)..(21)..(22): Xaa is A or G or is absent

SEQ ID NO: 21796 - protein, 35 aa, Artificial Sequence; identical to SEQ ID NO: 18692
  GFR-binding peptide
  MOD_RES (1)..(1): Xaa is C or S
  MOD_RES (14)..(15)..(16)..(17)..(18): Xaa is A or G
  MOD_RES (19)..(20)..(21)..(22): Xaa is A or G or is absent

SEQ ID NO: 21797 - protein, 34 aa, Artificial Sequence; identical to SEQ ID NO: 18693
  GFR-binding peptide
  MOD_RES (34)..(34): Xaa is C or S

SEQ ID NO: 21798 - protein, 37 aa, Artificial Sequence; identical to SEQ ID NO: 18694
  GFR-binding peptide
  MOD_RES (1)..(35): Xaa is C or S

SEQ ID NO: 21799 - protein, 41 aa, Artificial Sequence; identical to SEQ ID NO: 18695
  GFR-binding peptide
  MOD_RES (1)..(35): Xaa is C or S
  MOD_RES (13)..(14)..(15)..(16)..(17): Xaa is A or G
  MOD_RES (18)..(19)..(20)..(21): Xaa is A or G or is absent

SEQ ID NO: 21800 - protein, 43 aa, Artificial Sequence; identical to SEQ ID NO: 18696
  GFR-binding peptide
  MOD_RES (2)..(39): Xaa is C or S

SEQ ID NO: 21801 - protein, 37 aa, Artificial Sequence; identical to SEQ ID NO: 18697
  GFR-binding peptide
  MOD_RES (1)..(35): Xaa is C or S
  MOD_RES (13)..(14)..(15)..(16)..(17): Xaa is A or G
  MOD_RES (18)..(19)..(20)..(21): Xaa is A or G or is absent

SEQ ID NO: 21802 - protein, 35 aa, Artificial Sequence; identical to SEQ ID NO: 18698
  GFR-binding peptide
  MOD_RES (2)..(2): Xaa is C or S
  MOD_RES (14)..(15)..(16)..(17)..(18): Xaa is A or G
  MOD_RES (19)..(20)..(21)..(22): Xaa is A or G or is absent

SEQ ID NO: 21803 - protein, 39 aa, Artificial Sequence; identical to SEQ ID NO: 18699
  GFR-binding peptide
  MOD_RES (1)..(35): Xaa is C or S
  MOD_RES (13)..(14)..(15)..(16)..(17): Xaa is A or G
  MOD_RES (18)..(19)..(20)..(21): Xaa is A or G or is absent

SEQ ID NO: 21804 - protein, 38 aa, Artificial Sequence; identical to SEQ ID NO: 18700
  GFR-binding peptide
  MOD_RES (35)..(35): Xaa is C or S
  MOD_RES (11)..(12)..(13)..(14)..(15): Xaa is A or G
  MOD_RES (16)..(17)..(18)..(19): Xaa is A or G or is absent

SEQ ID NO: 21805 - protein, 40 aa, Artificial Sequence; identical to SEQ ID NO: 18701
  GFR-binding peptide
  MOD_RES (2)..(4)..(38): Xaa is C or S
  MOD_RES (16)..(17)..(18)..(19)..(20): Xaa is A or G
  MOD_RES (21)..(22)..(23)..(24): Xaa is A or G or is absent

SEQ ID NO: 21806 - protein, 38 aa, Artificial Sequence; identical to SEQ ID NO: 18702
  GFR-binding peptide
  MOD_RES (2)..(2): Xaa is C or S
  MOD_RES (15)..(16)..(17)..(18)..(19): Xaa is A or G
  MOD_RES (20)..(21)..(22)..(23): Xaa is A or G or is absent

SEQ ID NO: 21807 - protein, 42 aa, Artificial Sequence; identical to SEQ ID NO: 18703
  GFR-binding peptide
  MOD_RES (7)..(41): Xaa is C or S
  MOD_RES (21)..(22)..(23)..(24)..(25): Xaa is A or G
  MOD_RES (26)..(27)..(28)..(29): Xaa is A or G or is absent

SEQ ID NO: 21808 - protein, 37 aa, Artificial Sequence; identical to SEQ ID NO: 18704
  GFR-binding peptide
  MOD_RES (37)..(37): Xaa is C or S
  MOD_RES (16)..(17)..(18)..(19)..(20): Xaa is A or G
  MOD_RES (21)..(22)..(23)..(24): Xaa is A or G or is absent

SEQ ID NO: 21809 - protein, 36 aa, Artificial Sequence; identical to SEQ ID NO: 18705
  GFR-binding peptide
  MOD_RES (34)..(36): Xaa is C or S

SEQ ID NO: 21810 - protein, 40 aa, Artificial Sequence; identical to SEQ ID NO: 18706
  GFR-binding peptide
  MOD_RES (6)..(40): Xaa is C or S
  MOD_RES (20)..(21)..(22)..(23)..(24): Xaa is A or G
  MOD_RES (25)..(26)..(27)..(28): Xaa is A or G or is absent

SEQ ID NO: 21811 - protein, 43 aa, Artificial Sequence; identical to SEQ ID NO: 18707
  GFR-binding peptide
  MOD_RES (7)..(41)..(43): Xaa is C or S

SEQ ID NO: 21812 - protein, 35 aa, Artificial Sequence; identical to SEQ ID NO: 18708
  GFR-binding peptide
  MOD_RES (1)..(35): Xaa is C or S

SEQ ID NO: 21813 - protein, 42 aa, Artificial Sequence; identical to SEQ ID NO: 18709
  GFR-binding peptide
  MOD_RES (2)..(39)..(41): Xaa is C or S
  MOD_RES (18)..(19)..(20)..(21)..(22): Xaa is A or G
  MOD_RES (23)..(24)..(25)..(26): Xaa is A or G or is absent

SEQ ID NO: 21814 - protein, 38 aa, Artificial Sequence; identical to SEQ ID NO: 18710
  GFR-binding peptide
  MOD_RES (36)..(38): Xaa is C or S
  MOD_RES (15)..(16)..(17)..(18)..(19): Xaa is A or G
  MOD_RES (20)..(21)..(22)..(23): Xaa is A or G or is absent

SEQ ID NO: 21815 - protein, 41 aa, Artificial Sequence; identical to SEQ ID NO: 18711
  GFR-binding peptide
  MOD_RES (2)..(39)..(41): Xaa is C or S
  MOD_RES (18)..(19)..(20)..(21)..(22): Xaa is A or G
  MOD_RES (23)..(24)..(25)..(26): Xaa is A or G or is absent

SEQ ID NO: 21816 - protein, 39 aa, Artificial Sequence; identical to SEQ ID NO: 18712
  GFR-binding peptide
  MOD_RES (4)..(38): Xaa is C or S
  MOD_RES (18)..(19)..(20)..(21)..(22): Xaa is A or G
  MOD_RES (23)..(24)..(25)..(26): Xaa is A or G or is absent

SEQ ID NO: 21817 - protein, 32 aa, Artificial Sequence; identical to SEQ ID NO: 18713
  GFR-binding peptide

SEQ ID NO: 21818 - protein, 42 aa, Artificial Sequence; identical to SEQ ID NO: 18714
  GFR-binding peptide
  MOD_RES (5)..(42): Xaa is C or S

SEQ ID NO: 21819 - protein, 34 aa, Artificial Sequence; identical to SEQ ID NO: 18715
  GFR-binding peptide
  MOD_RES (2)..(2): Xaa is C or S
  MOD_RES (16)..(17)..(18)..(19)..(20): Xaa is A or G
  MOD_RES (21)..(22)..(23)..(24): Xaa is A or G or is absent

SEQ ID NO: 21820 - protein, 35 aa, Artificial Sequence; identical to SEQ ID NO: 18716
  GFR-binding peptide
  MOD_RES (1)..(1): Xaa is C or S
  MOD_RES (17)..(18)..(19)..(20)..(21): Xaa is A or G
  MOD_RES (22)..(23)..(24)..(25): Xaa is A or G or is absent

SEQ ID NO: 21821 - protein, 36 aa, Artificial Sequence; identical to SEQ ID NO: 18717
  GFR-binding peptide
  MOD_RES (2)..(2): Xaa is C or S
  MOD_RES (18)..(19)..(20)..(21)..(22): Xaa is A or G
  MOD_RES (23)..(24)..(25)..(26): Xaa is A or G or is absent

SEQ ID NO: 21822 - protein, 43 aa, Artificial Sequence; identical to SEQ ID NO: 18718
  GFR-binding peptide
  MOD_RES (7)..(41)..(43): Xaa is C or S
  MOD_RES (21)..(22)..(23)..(24)..(25): Xaa is A or G
  MOD_RES (26)..(27)..(28)..(29): Xaa is A or G or is absent

SEQ ID NO: 21823 - protein, 40 aa, Artificial Sequence; identical to SEQ ID NO: 18719
  GFR-binding peptide
  MOD_RES (7)..(7): Xaa is C or S
  MOD_RES (21)..(22)..(23)..(24)..(25): Xaa is A or G
  MOD_RES (26)..(27)..(28)..(29): Xaa is A or G or is absent

SEQ ID NO: 21824 - protein, 38 aa, Artificial Sequence; identical to SEQ ID NO: 18720
  GFR-binding peptide
  MOD_RES (2)..(2): Xaa is C or S
  MOD_RES (18)..(19)..(20)..(21)..(22): Xaa is A or G
  MOD_RES (23)..(24)..(25)..(26): Xaa is A or G or is absent

SEQ ID NO: 21825 - protein, 41 aa, Artificial Sequence; identical to SEQ ID NO: 18721
  GFR-binding peptide
  MOD_RES (4)..(38)..(40): Xaa is C or S
  MOD_RES (18)..(19)..(20)..(21)..(22): Xaa is A or G
  MOD_RES (23)..(24)..(25)..(26): Xaa is A or G or is absent

SEQ ID NO: 21826 - protein, 36 aa, Artificial Sequence; identical to SEQ ID NO: 18722
  GFR-binding peptide
  MOD_RES (1)..(35): Xaa is C or S
  MOD_RES (15)..(16)..(17)..(18)..(19): Xaa is A or G
  MOD_RES (20)..(21)..(22)..(23): Xaa is A or G or is absent

SEQ ID NO: 21827 - protein, 36 aa, Artificial Sequence; identical to SEQ ID NO: 18723
  GFR-binding peptide
  MOD_RES (1)..(35): Xaa is C or S
  MOD_RES (15)..(16)..(17)..(18)..(19): Xaa is A or G
  MOD_RES (20)..(21)..(22)..(23): Xaa is A or G or is absent

SEQ ID NO: 21828 - protein, 35 aa, Artificial Sequence; identical to SEQ ID NO: 18724
  GFR-binding peptide
  MOD_RES (34)..(34): Xaa is C or S

SEQ ID NO: 21829 - protein, 39 aa, Artificial Sequence; identical to SEQ ID NO: 18725
  GFR-binding peptide
  MOD_RES (2)..(39): Xaa is C or S

SEQ ID NO: 21830 - protein, 38 aa, Artificial Sequence; identical to SEQ ID NO: 18726
  GFR-binding peptide
  MOD_RES (4)..(38): Xaa is C or S
  MOD_RES (18)..(19)..(20)..(21)..(22): Xaa is A or G
  MOD_RES (23)..(24)..(25)..(26): Xaa is A or G or is absent

SEQ ID NO: 21831 - protein, 36 aa, Artificial Sequence; identical to SEQ ID NO: 18727
  GFR-binding peptide
  MOD_RES (34)..(36): Xaa is C or S

SEQ ID NO: 21832 - protein, 40 aa, Artificial Sequence; identical to SEQ ID NO: 18728
  GFR-binding peptide
  MOD_RES (2)..(39): Xaa is C or S
  MOD_RES (18)..(19)..(20)..(21)..(22): Xaa is A or G
  MOD_RES (23)..(24)..(25)..(26): Xaa is A or G or is absent

SEQ ID NO: 21833 - protein, 37 aa, Artificial Sequence; identical to SEQ ID NO: 18729
  GFR-binding peptide
  MOD_RES (4)..(4): Xaa is C or S
  MOD_RES (18)..(19)..(20)..(21)..(22): Xaa is A or G
  MOD_RES (23)..(24)..(25)..(26): Xaa is A or G or is absent

SEQ ID NO: 21834 - protein, 37 aa, Artificial Sequence; identical to SEQ ID NO: 18730
  GFR-binding peptide
  MOD_RES (2)..(2): Xaa is C or S
  MOD_RES (18)..(19)..(20)..(21)..(22): Xaa is A or G
  MOD_RES (23)..(24)..(25)..(26): Xaa is A or G or is absent

SEQ ID NO: 21835 - protein, 40 aa, Artificial Sequence; identical to SEQ ID NO: 18731
  GFR-binding peptide
  MOD_RES (37)..(39): Xaa is C or S
  MOD_RES (16)..(17)..(18)..(19)..(20): Xaa is A or G
  MOD_RES (21)..(22)..(23)..(24): Xaa is A or G or is absent

SEQ ID NO: 21836 - protein, 37 aa, Artificial Sequence; identical to SEQ ID NO: 18732
  GFR-binding peptide
  MOD_RES (1)..(1): Xaa is C or S

SEQ ID NO: 21837 - protein, 42 aa, Artificial Sequence; identical to SEQ ID NO: 18733
  GFR-binding peptide
  MOD_RES (5)..(42): Xaa is C or S
  MOD_RES (21)..(22)..(23)..(24)..(25): Xaa is A or G
  MOD_RES (26)..(27)..(28)..(29): Xaa is A or G or is absent

SEQ ID NO: 21838 - protein, 36 aa, Artificial Sequence; identical to SEQ ID NO: 18734
  GFR-binding peptide
  MOD_RES (35)..(35): Xaa is C or S
  MOD_RES (14)..(15)..(16)..(17)..(18): Xaa is A or G
  MOD_RES (19)..(20)..(21)..(22): Xaa is A or G or is absent

SEQ ID NO: 21839 - protein, 36 aa, Artificial Sequence; identical to SEQ ID NO: 18735
  GFR-binding peptide
  MOD_RES (1)..(1): Xaa is C or S

SEQ ID NO: 21840 - protein, 45 aa, Artificial Sequence; identical to SEQ ID NO: 18736
  GFR-binding peptide
  MOD_RES (5)..(42)..(44): Xaa is C or S

SEQ ID NO: 21841 - protein, 34 aa, Artificial Sequence; identical to SEQ ID NO: 18737
  GFR-binding peptide

SEQ ID NO: 21842 - protein, 37 aa, Artificial Sequence; identical to SEQ ID NO: 18738
  GFR-binding peptide
  MOD_RES (34)..(36): Xaa is C or S

SEQ ID NO: 21843 - protein, 35 aa, Artificial Sequence; identical to SEQ ID NO: 18739
  GFR-binding peptide
  MOD_RES (1)..(1): Xaa is C or S

SEQ ID NO: 21844 - protein, 37 aa, Artificial Sequence; identical to SEQ ID NO: 18740
  GFR-binding peptide
  MOD_RES (37)..(37): Xaa is C or S
  MOD_RES (16)..(17)..(18)..(19)..(20): Xaa is A or G
  MOD_RES (21)..(22)..(23)..(24): Xaa is A or G or is absent

SEQ ID NO: 21845 - protein, 34 aa, Artificial Sequence; identical to SEQ ID NO: 18741
  GFR-binding peptide
  MOD_RES (34)..(34): Xaa is C or S
  MOD_RES (14)..(15)..(16)..(17)..(18): Xaa is A or G
  MOD_RES (19)..(20)..(21)..(22): Xaa is A or G or is absent

SEQ ID NO: 21846 - protein, 33 aa, Artificial Sequence; identical to SEQ ID NO: 18742
  GFR-binding peptide

SEQ ID NO: 21847 - protein, 44 aa, Artificial Sequence; identical to SEQ ID NO: 18743
  GFR-binding peptide
  MOD_RES (4)..(41)..(43): Xaa is C or S

SEQ ID NO: 21848 - protein, 40 aa, Artificial Sequence; identical to SEQ ID NO: 18744
  GFR-binding peptide
  MOD_RES (4)..(38)..(40): Xaa is C or S
  MOD_RES (18)..(19)..(20)..(21)..(22): Xaa is A or G
  MOD_RES (23)..(24)..(25)..(26): Xaa is A or G or is absent

SEQ ID NO: 21849 - protein, 39 aa, Artificial Sequence; identical to SEQ ID NO: 18745
  GFR-binding peptide
  MOD_RES (4)..(38): Xaa is C or S
  MOD_RES (18)..(19)..(20)..(21)..(22): Xaa is A or G
  MOD_RES (23)..(24)..(25)..(26): Xaa is A or G or is absent

SEQ ID NO: 21850 - protein, 38 aa, Artificial Sequence; identical to SEQ ID NO: 18746
  GFR-binding peptide
  MOD_RES (2)..(36)..(38): Xaa is C or S
  MOD_RES (16)..(17)..(18)..(19)..(20): Xaa is A or G
  MOD_RES (21)..(22)..(23)..(24): Xaa is A or G or is absent

SEQ ID NO: 21851 - protein, 41 aa, Artificial Sequence; identical to SEQ ID NO: 18747
  GFR-binding peptide
  MOD_RES (7)..(41): Xaa is C or S
  MOD_RES (21)..(22)..(23)..(24)..(25): Xaa is A or G
  MOD_RES (26)..(27)..(28)..(29): Xaa is A or G or is absent

SEQ ID NO: 21852 - protein, 42 aa, Artificial Sequence; identical to SEQ ID NO: 18748
  GFR-binding peptide
  MOD_RES (4)..(41): Xaa is C or S
  MOD_RES (20)..(21)..(22)..(23)..(24): Xaa is A or G
  MOD_RES (25)..(26)..(27)..(28): Xaa is A or G or is absent

SEQ ID NO: 21853 - protein, 36 aa, Artificial Sequence; identical to SEQ ID NO: 18749
  GFR-binding peptide
  MOD_RES (4)..(4): Xaa is C or S
  MOD_RES (18)..(19)..(20)..(21)..(22): Xaa is A or G
  MOD_RES (23)..(24)..(25)..(26): Xaa is A or G or is absent

SEQ ID NO: 21854 - protein, 38 aa, Artificial Sequence; identical to SEQ ID NO: 18750
  GFR-binding peptide
  MOD_RES (3)..(37): Xaa is C or S

SEQ ID NO: 21855 - protein, 38 aa, Artificial Sequence; identical to SEQ ID NO: 18751
  GFR-binding peptide
  MOD_RES (37)..(37): Xaa is C or S

SEQ ID NO: 21856 - protein, 40 aa, Artificial Sequence; identical to SEQ ID NO: 18752
  GFR-binding peptide
  MOD_RES (6)..(40): Xaa is C or S

SEQ ID NO: 21857 - protein, 37 aa, Artificial Sequence; identical to SEQ ID NO: 18753
  GFR-binding peptide
  MOD_RES (34)..(36): Xaa is C or S
  MOD_RES (14)..(15)..(16)..(17)..(18): Xaa is A or G
  MOD_RES (19)..(20)..(21)..(22): Xaa is A or G or is absent

SEQ ID NO: 21858 - protein, 39 aa, Artificial Sequence; identical to SEQ ID NO: 18754
  GFR-binding peptide
  MOD_RES (5)..(5): Xaa is C or S
  MOD_RES (21)..(22)..(23)..(24)..(25): Xaa is A or G
  MOD_RES (26)..(27)..(28)..(29): Xaa is A or G or is absent

SEQ ID NO: 21859 - protein, 37 aa, Artificial Sequence; identical to SEQ ID NO: 18755
  GFR-binding peptide
  MOD_RES (3)..(3): Xaa is C or S

SEQ ID NO: 21860 - protein, 43 aa, Artificial Sequence; identical to SEQ ID NO: 18756
  GFR-binding peptide
  MOD_RES (5)..(42): Xaa is C or S
  MOD_RES (21)..(22)..(23)..(24)..(25): Xaa is A or G
  MOD_RES (26)..(27)..(28)..(29): Xaa is A or G or is absent

SEQ ID NO: 21861 - protein, 42 aa, Artificial Sequence; identical to SEQ ID NO: 18757
  GFR-binding peptide
  MOD_RES (6)..(40)..(42): Xaa is C or S

SEQ ID NO: 21862 - protein, 41 aa, Artificial Sequence; identical to SEQ ID NO: 18758
  GFR-binding peptide
  MOD_RES (4)..(41): Xaa is C or S

SEQ ID NO: 21863 - protein, 35 aa, Artificial Sequence; identical to SEQ ID NO: 18759
  GFR-binding peptide
  MOD_RES (15)..(16)..(17)..(18)..(19): Xaa is A or G
  MOD_RES (20)..(21)..(22)..(23): Xaa is A or G or is absent

SEQ ID NO: 21864 - protein, 38 aa, Artificial Sequence; identical to SEQ ID NO: 18760
  GFR-binding peptide
  MOD_RES (4)..(4): Xaa is C or S

SEQ ID NO: 21865 - protein, 37 aa, Artificial Sequence; identical to SEQ ID NO: 18761
  GFR-binding peptide
  MOD_RES (5)..(5): Xaa is C or S

SEQ ID NO: 21866 - protein, 38 aa, Artificial Sequence; identical to SEQ ID NO: 18762
  GFR-binding peptide
  MOD_RES (1)..(35)..(37): Xaa is C or S

SEQ ID NO: 21867 - protein, 40 aa, Artificial Sequence; identical to SEQ ID NO: 18763
  GFR-binding peptide
  MOD_RES (4)..(38)..(40): Xaa is C or S
  MOD_RES (18)..(19)..(20)..(21)..(22): Xaa is A or G
  MOD_RES (23)..(24)..(25)..(26): Xaa is A or G or is absent

SEQ ID NO: 21868 - protein, 43 aa, Artificial Sequence; identical to SEQ ID NO: 18764
  GFR-binding peptide
  MOD_RES (6)..(40)..(42): Xaa is C or S
  MOD_RES (20)..(21)..(22)..(23)..(24): Xaa is A or G
  MOD_RES (25)..(26)..(27)..(28): Xaa is A or G or is absent

SEQ ID NO: 21869 - protein, 35 aa, Artificial Sequence; identical to SEQ ID NO: 18765
  GFR-binding peptide
  MOD_RES (1)..(1): Xaa is C or S

SEQ ID NO: 21870 - protein, 39 aa, Artificial Sequence; identical to SEQ ID NO: 18766
  GFR-binding peptide
  MOD_RES (2)..(36)..(38): Xaa is C or S

SEQ ID NO: 21871 - protein, 35 aa, Artificial Sequence; identical to SEQ ID NO: 18767
  GFR-binding peptide
  MOD_RES (3)..(3): Xaa is C or S

SEQ ID NO: 21872 - protein, 40 aa, Artificial Sequence; identical to SEQ ID NO: 18768
  GFR-binding peptide
  MOD_RES (4)..(4): Xaa is C or S
  MOD_RES (20)..(21)..(22)..(23)..(24): Xaa is A or G
  MOD_RES (25)..(26)..(27)..(28): Xaa is A or G or is absent

SEQ ID NO: 21873 - protein, 34 aa, Artificial Sequence; identical to SEQ ID NO: 18769
  GFR-binding peptide
  MOD_RES (1)..(1): Xaa is C or S
  MOD_RES (15)..(16)..(17)..(18)..(19): Xaa is A or G
  MOD_RES (20)..(21)..(22)..(23): Xaa is A or G or is absent

SEQ ID NO: 21874 - protein, 40 aa, Artificial Sequence; identical to SEQ ID NO: 18770
  GFR-binding peptide
  MOD_RES (4)..(4): Xaa is C or S

SEQ ID NO: 21875 - protein, 38 aa, Artificial Sequence; identical to SEQ ID NO: 18771
  GFR-binding peptide
  MOD_RES (1)..(35)..(37): Xaa is C or S

SEQ ID NO: 21876 - protein, 42 aa, Artificial Sequence; identical to SEQ ID NO: 18772
  GFR-binding peptide
  MOD_RES (7)..(41): Xaa is C or S
  MOD_RES (21)..(22)..(23)..(24)..(25): Xaa is A or G
  MOD_RES (26)..(27)..(28)..(29): Xaa is A or G or is absent

SEQ ID NO: 21877 - protein, 45 aa, Artificial Sequence; identical to SEQ ID NO: 18773
  GFR-binding peptide
  MOD_RES (5)..(42)..(44): Xaa is C or S

SEQ ID NO: 21878 - protein, 42 aa, Artificial Sequence; identical to SEQ ID NO: 18774
  GFR-binding peptide
  MOD_RES (5)..(39)..(41): Xaa is C or S
  MOD_RES (19)..(20)..(21)..(22)..(23): Xaa is A or G
  MOD_RES (24)..(25)..(26)..(27): Xaa is A or G or is absent

SEQ ID NO: 21879 - protein, 39 aa, Artificial Sequence; identical to SEQ ID NO: 18775
  GFR-binding peptide
  MOD_RES (5)..(39): Xaa is C or S

SEQ ID NO: 21880 - protein, 36 aa, Artificial Sequence; identical to SEQ ID NO: 18776
  GFR-binding peptide
  MOD_RES (2)..(36): Xaa is C or S
  MOD_RES (16)..(17)..(18)..(19)..(20): Xaa is A or G
  MOD_RES (21)..(22)..(23)..(24): Xaa is A or G or is absent

SEQ ID NO: 21881 - protein, 42 aa, Artificial Sequence; identical to SEQ ID NO: 18777
  GFR-binding peptide
  MOD_RES (5)..(42): Xaa is C or S

SEQ ID NO: 21882 - protein, 37 aa, Artificial Sequence; identical to SEQ ID NO: 18778
  GFR-binding peptide
  MOD_RES (2)..(36): Xaa is C or S
  MOD_RES (16)..(17)..(18)..(19)..(20): Xaa is A or G
  MOD_RES (21)..(22)..(23)..(24): Xaa is A or G or is absent

SEQ ID NO: 21883 - protein, 41 aa, Artificial Sequence; identical to SEQ ID NO: 18779
  GFR-binding peptide
  MOD_RES (4)..(38)..(40): Xaa is C or S
  MOD_RES (18)..(19)..(20)..(21)..(22): Xaa is A or G
  MOD_RES (23)..(24)..(25)..(26): Xaa is A or G or is absent

SEQ ID NO: 21884 - protein, 35 aa, Artificial Sequence; identical to SEQ ID NO: 18780
  GFR-binding peptide
  MOD_RES (2)..(2): Xaa is C or S
  MOD_RES (16)..(17)..(18)..(19)..(20): Xaa is A or G
  MOD_RES (21)..(22)..(23)..(24): Xaa is A or G or is absent

SEQ ID NO: 21885 - protein, 38 aa, Artificial Sequence; identical to SEQ ID NO: 18781
  GFR-binding peptide
  MOD_RES (5)..(5): Xaa is C or S
  MOD_RES (19)..(20)..(21)..(22)..(23): Xaa is A or G
  MOD_RES (24)..(25)..(26)..(27): Xaa is A or G or is absent

SEQ ID NO: 21886 - protein, 37 aa, Artificial Sequence; identical to SEQ ID NO: 18782
  GFR-binding peptide
  MOD_RES (1)..(35)..(37): Xaa is C or S
  MOD_RES (15)..(16)..(17)..(18)..(19): Xaa is A or G
  MOD_RES (20)..(21)..(22)..(23): Xaa is A or G or is absent

SEQ ID NO: 21887 - protein, 39 aa, Artificial Sequence; identical to SEQ ID NO: 18783
  GFR-binding peptide
  MOD_RES (36)..(38): Xaa is C or S
  MOD_RES (15)..(16)..(17)..(18)..(19): Xaa is A or G
  MOD_RES (20)..(21)..(22)..(23): Xaa is A or G or is absent

SEQ ID NO: 21888 - protein, 33 aa, Artificial Sequence; identical to SEQ ID NO: 18784
  GFR-binding peptide

SEQ ID NO: 21889 - protein, 36 aa, Artificial Sequence; identical to SEQ ID NO: 18785
  GFR-binding peptide
  MOD_RES (3)..(3): Xaa is C or S
  MOD_RES (17)..(18)..(19)..(20)..(21): Xaa is A or G
  MOD_RES (22)..(23)..(24)..(25): Xaa is A or G or is absent

SEQ ID NO: 21890 - protein, 40 aa, Artificial Sequence; identical to SEQ ID NO: 18786
  GFR-binding peptide
  MOD_RES (5)..(5): Xaa is C or S

SEQ ID NO: 21891 - protein, 35 aa, Artificial Sequence; identical to SEQ ID NO: 18787
  GFR-binding peptide

SEQ ID NO: 21892 - protein, 39 aa, Artificial Sequence; identical to SEQ ID NO: 18788
  GFR-binding peptide
  MOD_RES (3)..(37)..(39): Xaa is C or S

SEQ ID NO: 21893 - protein, 41 aa, Artificial Sequence; identical to SEQ ID NO: 18789
  GFR-binding peptide
  MOD_RES (5)..(5): Xaa is C or S

SEQ ID NO: 21894 - protein, 35 aa, Artificial Sequence; identical to SEQ ID NO: 18790
  GFR-binding peptide
  MOD_RES (34)..(34): Xaa is C or S

SEQ ID NO: 21895 - protein, 37 aa, Artificial Sequence; identical to SEQ ID NO: 18791
  GFR-binding peptide
  MOD_RES (2)..(36): Xaa is C or S
  MOD_RES (16)..(17)..(18)..(19)..(20): Xaa is A or G
  MOD_RES (21)..(22)..(23)..(24): Xaa is A or G or is absent

SEQ ID NO: 21896 - protein, 38 aa, Artificial Sequence; identical to SEQ ID NO: 18792
  GFR-binding peptide
  MOD_RES (2)..(2): Xaa is C or S
  MOD_RES (18)..(19)..(20)..(21)..(22): Xaa is A or G
  MOD_RES (23)..(24)..(25)..(26): Xaa is A or G or is absent

SEQ ID NO: 21897 - protein, 39 aa, Artificial Sequence; identical to SEQ ID NO: 18793
  GFR-binding peptide
  MOD_RES (1)..(38): Xaa is C or S
  MOD_RES (17)..(18)..(19)..(20)..(21): Xaa is A or G
  MOD_RES (22)..(23)..(24)..(25): Xaa is A or G or is absent

SEQ ID NO: 21898 - protein, 34 aa, Artificial Sequence; identical to SEQ ID NO: 18794
  GFR-binding peptide
  MOD_RES (16)..(17)..(18)..(19)..(20): Xaa is A or G
  MOD_RES (21)..(22)..(23)..(24): Xaa is A or G or is absent

SEQ ID NO: 21899 - protein, 44 aa, Artificial Sequence; identical to SEQ ID NO: 18795
  GFR-binding peptide
  MOD_RES (5)..(42)..(44): Xaa is C or S
  MOD_RES (21)..(22)..(23)..(24)..(25): Xaa is A or G
  MOD_RES (26)..(27)..(28)..(29): Xaa is A or G or is absent

SEQ ID NO: 21900 - protein, 42 aa, Artificial Sequence; identical to SEQ ID NO: 18796
  GFR-binding peptide
  MOD_RES (5)..(39)..(41): Xaa is C or S
  MOD_RES (19)..(20)..(21)..(22)..(23): Xaa is A or G
  MOD_RES (24)..(25)..(26)..(27): Xaa is A or G or is absent

SEQ ID NO: 21901 - protein, 41 aa, Artificial Sequence; identical to SEQ ID NO: 18797
  GFR-binding peptide
  MOD_RES (4)..(41): Xaa is C or S

SEQ ID NO: 21902 - protein, 38 aa, Artificial Sequence; identical to SEQ ID NO: 18798
  GFR-binding peptide
  MOD_RES (6)..(6): Xaa is C or S
  MOD_RES (20)..(21)..(22)..(23)..(24): Xaa is A or G
  MOD_RES (25)..(26)..(27)..(28): Xaa is A or G or is absent

SEQ ID NO: 21903 - protein, 40 aa, Artificial Sequence; identical to SEQ ID NO: 18799
  GFR-binding peptide
  MOD_RES (37)..(39): Xaa is C or S
  MOD_RES (16)..(17)..(18)..(19)..(20): Xaa is A or G
  MOD_RES (21)..(22)..(23)..(24): Xaa is A or G or is absent

SEQ ID NO: 21904 - protein, 36 aa, Artificial Sequence; identical to SEQ ID NO: 18800
  GFR-binding peptide
  MOD_RES (16)..(17)..(18)..(19)..(20): Xaa is A or G
  MOD_RES (21)..(22)..(23)..(24): Xaa is A or G or is absent

SEQ ID NO: 21905 - protein, 36 aa, Artificial Sequence; identical to SEQ ID NO: 18801
  GFR-binding peptide
  MOD_RES (2)..(36): Xaa is C or S

SEQ ID NO: 21906 - protein, 37 aa, Artificial Sequence; identical to SEQ ID NO: 18802
  GFR-binding peptide
  MOD_RES (1)..(1): Xaa is C or S

SEQ ID NO: 21907 - protein, 40 aa, Artificial Sequence; identical to SEQ ID NO: 18803
  GFR-binding peptide
  MOD_RES (3)..(40): Xaa is C or S

SEQ ID NO: 21908 - protein, 45 aa, Artificial Sequence; identical to SEQ ID NO: 18804
  GFR-binding peptide
  MOD_RES (5)..(42)..(44): Xaa is C or S
  MOD_RES (21)..(22)..(23)..(24)..(25): Xaa is A or G
  MOD_RES (26)..(27)..(28)..(29): Xaa is A or G or is absent

SEQ ID NO: 21909 - protein, 43 aa, Artificial Sequence; identical to SEQ ID NO: 18805
  GFR-binding peptide
  MOD_RES (6)..(40)..(42): Xaa is C or S

SEQ ID NO: 21910 - protein, 39 aa, Artificial Sequence; identical to SEQ ID NO: 18806
  GFR-binding peptide
  MOD_RES (37)..(39): Xaa is C or S
  MOD_RES (16)..(17)..(18)..(19)..(20): Xaa is A or G
  MOD_RES (21)..(22)..(23)..(24): Xaa is A or G or is absent

SEQ ID NO: 21911 - protein, 33 aa, Artificial Sequence; identical to SEQ ID NO: 18807
  GFR-binding peptide
  MOD_RES (15)..(16)..(17)..(18)..(19): Xaa is A or G
  MOD_RES (20)..(21)..(22)..(23): Xaa is A or G or is absent

SEQ ID NO: 21912 - protein, 40 aa, Artificial Sequence; identical to SEQ ID NO: 18808
  GFR-binding peptide
  MOD_RES (2)..(39): Xaa is C or S

SEQ ID NO: 21913 - protein, 35 aa, Artificial Sequence; identical to SEQ ID NO: 18809
  GFR-binding peptide
  MOD_RES (2)..(2): Xaa is C or S

SEQ ID NO: 21914 - protein, 37 aa, Artificial Sequence; identical to SEQ ID NO: 18810
  GFR-binding peptide
  MOD_RES (1)..(1): Xaa is C or S

SEQ ID NO: 21915 - protein, 40 aa, Artificial Sequence; identical to SEQ ID NO: 18811
  GFR-binding peptide
  MOD_RES (37)..(39): Xaa is C or S
  MOD_RES (16)..(17)..(18)..(19)..(20): Xaa is A or G
  MOD_RES (21)..(22)..(23)..(24): Xaa is A or G or is absent

SEQ ID NO: 21916 - protein, 35 aa, Artificial Sequence; identical to SEQ ID NO: 18812
  GFR-binding peptide

SEQ ID NO: 21917 - protein, 36 aa, Artificial Sequence; identical to SEQ ID NO: 18813
  GFR-binding peptide
  MOD_RES (2)..(36): Xaa is C or S

SEQ ID NO: 21918 - protein, 38 aa, Artificial Sequence; identical to SEQ ID NO: 18814
  GFR-binding peptide
  MOD_RES (3)..(3): Xaa is C or S
  MOD_RES (19)..(20)..(21)..(22)..(23): Xaa is A or G
  MOD_RES (24)..(25)..(26)..(27): Xaa is A or G or is absent

SEQ ID NO: 21919 - protein, 40 aa, Artificial Sequence; identical to SEQ ID NO: 18815
  GFR-binding peptide
  MOD_RES (37)..(39): Xaa is C or S
  MOD_RES (16)..(17)..(18)..(19)..(20): Xaa is A or G
  MOD_RES (21)..(22)..(23)..(24): Xaa is A or G or is absent

SEQ ID NO: 21920 - protein, 36 aa, Artificial Sequence; identical to SEQ ID NO: 18816
  GFR-binding peptide
  MOD_RES (1)..(35): Xaa is C or S
  MOD_RES (15)..(16)..(17)..(18)..(19): Xaa is A or G
  MOD_RES (20)..(21)..(22)..(23): Xaa is A or G or is absent

SEQ ID NO: 21921 - protein, 44 aa, Artificial Sequence; identical to SEQ ID NO: 18817
  GFR-binding peptide
  MOD_RES (4)..(41)..(43): Xaa is C or S

SEQ ID NO: 21922 - protein, 43 aa, Artificial Sequence; identical to SEQ ID NO: 18818
  GFR-binding peptide
  MOD_RES (5)..(42): Xaa is C or S

SEQ ID NO: 21923 - protein, 34 aa, Artificial Sequence; identical to SEQ ID NO: 18819
  GFR-binding peptide
  MOD_RES (34)..(34): Xaa is C or S
  MOD_RES (14)..(15)..(16)..(17)..(18): Xaa is A or G
  MOD_RES (19)..(20)..(21)..(22): Xaa is A or G or is absent

SEQ ID NO: 21924 - protein, 38 aa, Artificial Sequence; identical to SEQ ID NO: 18820
  GFR-binding peptide
  MOD_RES (5)..(5): Xaa is C or S

SEQ ID NO: 21925 - protein, 35 aa, Artificial Sequence; identical to SEQ ID NO: 18821
  GFR-binding peptide

SEQ ID NO: 21926 - protein, 36 aa, Artificial Sequence; identical to SEQ ID NO: 18822
  GFR-binding peptide
  MOD_RES (34)..(36): Xaa is C or S
  MOD_RES (14)..(15)..(16)..(17)..(18): Xaa is A or G
  MOD_RES (19)..(20)..(21)..(22): Xaa is A or G or is absent

SEQ ID NO: 21927 - protein, 38 aa, Artificial Sequence; identical to SEQ ID NO: 18823
  GFR-binding peptide
  MOD_RES (4)..(38): Xaa is C or S

SEQ ID NO: 21928 - protein, 37 aa, Artificial Sequence; identical to SEQ ID NO: 18824
  GFR-binding peptide
  MOD_RES (3)..(3): Xaa is C or S

SEQ ID NO: 21929 - protein, 37 aa, Artificial Sequence; identical to SEQ ID NO: 18825
  GFR-binding peptide
  MOD_RES (37)..(37): Xaa is C or S
  MOD_RES (16)..(17)..(18)..(19)..(20): Xaa is A or G
  MOD_RES (21)..(22)..(23)..(24): Xaa is A or G or is absent

SEQ ID NO: 21930 - protein, 39 aa, Artificial Sequence; identical to SEQ ID NO: 18826
  GFR-binding peptide
  MOD_RES (2)..(36)..(38): Xaa is C or S
  MOD_RES (16)..(17)..(18)..(19)..(20): Xaa is A or G
  MOD_RES (21)..(22)..(23)..(24): Xaa is A or G or is absent

SEQ ID NO: 21931 - protein, 34 aa, Artificial Sequence; identical to SEQ ID NO: 18827
  GFR-binding peptide

SEQ ID NO: 21932 - protein, 38 aa, Artificial Sequence; identical to SEQ ID NO: 18828
  GFR-binding peptide
  MOD_RES (1)..(35)..(37): Xaa is C or S
  MOD_RES (15)..(16)..(17)..(18)..(19): Xaa is A or G
  MOD_RES (20)..(21)..(22)..(23): Xaa is A or G or is absent

SEQ ID NO: 21933 - protein, 39 aa, Artificial Sequence; identical to SEQ ID NO: 18829
  GFR-binding peptide
  MOD_RES (4)..(38): Xaa is C or S

SEQ ID NO: 21934 - protein, 40 aa, Artificial Sequence; identical to SEQ ID NO: 18830
  GFR-binding peptide
  MOD_RES (4)..(4): Xaa is C or S
  MOD_RES (20)..(21)..(22)..(23)..(24): Xaa is A or G
  MOD_RES (25)..(26)..(27)..(28): Xaa is A or G or is absent

SEQ ID NO: 21935 - protein, 36 aa, Artificial Sequence; identical to SEQ ID NO: 18831
  GFR-binding peptide
  MOD_RES (4)..(4): Xaa is C or S
  MOD_RES (18)..(19)..(20)..(21)..(22): Xaa is A or G
  MOD_RES (23)..(24)..(25)..(26): Xaa is A or G or is absent

SEQ ID NO: 21936 - protein, 36 aa, Artificial Sequence; identical to SEQ ID NO: 18832
  GFR-binding peptide
  MOD_RES (34)..(36): Xaa is C or S
  MOD_RES (14)..(15)..(16)..(17)..(18): Xaa is A or G
  MOD_RES (19)..(20)..(21)..(22): Xaa is A or G or is absent

SEQ ID NO: 21937 - protein, 40 aa, Artificial Sequence; identical to SEQ ID NO: 18833
  GFR-binding peptide
  MOD_RES (7)..(7): Xaa is C or S

SEQ ID NO: 21938 - protein, 36 aa, Artificial Sequence; identical to SEQ ID NO: 18834
  GFR-binding peptide
  MOD_RES (36)..(36): Xaa is C or S
  MOD_RES (15)..(16)..(17)..(18)..(19): Xaa is A or G
  MOD_RES (20)..(21)..(22)..(23): Xaa is A or G or is absent

SEQ ID NO: 21939 - protein, 35 aa, Artificial Sequence; identical to SEQ ID NO: 18835
  GFR-binding peptide
  MOD_RES (1)..(35): Xaa is C or S
  MOD_RES (15)..(16)..(17)..(18)..(19): Xaa is A or G
  MOD_RES (20)..(21)..(22)..(23): Xaa is A or G or is absent

SEQ ID NO: 21940 - protein, 41 aa, Artificial Sequence; identical to SEQ ID NO: 18836
  GFR-binding peptide
  MOD_RES (3)..(40): Xaa is C or S
  MOD_RES (19)..(20)..(21)..(22)..(23): Xaa is A or G
  MOD_RES (24)..(25)..(26)..(27): Xaa is A or G or is absent

SEQ ID NO: 21941 - protein, 40 aa, Artificial Sequence; identical to SEQ ID NO: 18837
  GFR-binding peptide
  MOD_RES (2)..(39): Xaa is C or S
  MOD_RES (18)..(19)..(20)..(21)..(22): Xaa is A or G
  MOD_RES (23)..(24)..(25)..(26): Xaa is A or G or is absent

SEQ ID NO: 21942 - protein, 43 aa, Artificial Sequence; identical to SEQ ID NO: 18838
  GFR-binding peptide
  MOD_RES (5)..(42): Xaa is C or S

SEQ ID NO: 21943 - protein, 39 aa, Artificial Sequence; identical to SEQ ID NO: 18839
  GFR-binding peptide
  MOD_RES (5)..(39): Xaa is C or S

SEQ ID NO: 21944 - protein, 35 aa, Artificial Sequence; identical to SEQ ID NO: 18840
  GFR-binding peptide
  MOD_RES (35)..(35): Xaa is C or S
  MOD_RES (14)..(15)..(16)..(17)..(18): Xaa is A or G
  MOD_RES (19)..(20)..(21)..(22): Xaa is A or G or is absent

SEQ ID NO: 21945 - protein, 38 aa, Artificial Sequence; identical to SEQ ID NO: 18841
  GFR-binding peptide
  MOD_RES (1)..(38): Xaa is C or S

SEQ ID NO: 21946 - protein, 37 aa, Artificial Sequence; identical to SEQ ID NO: 18842
  GFR-binding peptide
  MOD_RES (4)..(4): Xaa is C or S

SEQ ID NO: 21947 - protein, 34 aa, Artificial Sequence; identical to SEQ ID NO: 18843
  GFR-binding peptide
  MOD_RES (1)..(1): Xaa is C or S
  MOD_RES (15)..(16)..(17)..(18)..(19): Xaa is A or G
  MOD_RES (20)..(21)..(22)..(23): Xaa is A or G or is absent

SEQ ID NO: 21948 - protein, 41 aa, Artificial Sequence; identical to SEQ ID NO: 18844
  GFR-binding peptide
  MOD_RES (3)..(40): Xaa is C or S
  MOD_RES (19)..(20)..(21)..(22)..(23): Xaa is A or G
  MOD_RES (24)..(25)..(26)..(27): Xaa is A or G or is absent

SEQ ID NO: 21949 - protein, 36 aa, Artificial Sequence; identical to SEQ ID NO: 18845
  GFR-binding peptide
  MOD_RES (1)..(1): Xaa is C or S
  MOD_RES (17)..(18)..(19)..(20)..(21): Xaa is A or G
  MOD_RES (22)..(23)..(24)..(25): Xaa is A or G or is absent

SEQ ID NO: 21950 - protein, 35 aa, Artificial Sequence; identical to SEQ ID NO: 18846
  GFR-binding peptide
  MOD_RES (35)..(35): Xaa is C or S

SEQ ID NO: 21951 - protein, 43 aa, Artificial Sequence; identical to SEQ ID NO: 18847
  GFR-binding peptide
  MOD_RES (7)..(41)..(43): Xaa is C or S
  MOD_RES (21)..(22)..(23)..(24)..(25): Xaa is A or G
  MOD_RES (26)..(27)..(28)..(29): Xaa is A or G or is absent

SEQ ID NO: 21952 - protein, 33 aa, Artificial Sequence; identical to SEQ ID NO: 18848
  GFR-binding peptide
  MOD_RES (1)..(1): Xaa is C or S

SEQ ID NO: 21953 - protein, 37 aa, Artificial Sequence; identical to SEQ ID NO: 18849
  GFR-binding peptide
  MOD_RES (1)..(1): Xaa is C or S
  MOD_RES (17)..(18)..(19)..(20)..(21): Xaa is A or G
  MOD_RES (22)..(23)..(24)..(25): Xaa is A or G or is absent

SEQ ID NO: 21954 - protein, 34 aa, Artificial Sequence; identical to SEQ ID NO: 18850
  GFR-binding peptide
  MOD_RES (2)..(2): Xaa is C or S
  MOD_RES (16)..(17)..(18)..(19)..(20): Xaa is A or G
  MOD_RES (21)..(22)..(23)..(24): Xaa is A or G or is absent

SEQ ID NO: 21955 - protein, 41 aa, Artificial Sequence; identical to SEQ ID NO: 18851
  GFR-binding peptide
  MOD_RES (6)..(40): Xaa is C or S

SEQ ID NO: 21956 - protein, 34 aa, Artificial Sequence; identical to SEQ ID NO: 18852
  GFR-binding peptide

SEQ ID NO: 21957 - protein, 43 aa, Artificial Sequence; identical to SEQ ID NO: 18853
  GFR-binding peptide
  MOD_RES (5)..(42): Xaa is C or S

SEQ ID NO: 21958 - protein, 42 aa, Artificial Sequence; identical to SEQ ID NO: 18854
  GFR-binding peptide
  MOD_RES (7)..(41): Xaa is C or S

SEQ ID NO: 21959 - protein, 38 aa, Artificial Sequence; identical to SEQ ID NO: 18855
  GFR-binding peptide
  MOD_RES (2)..(2): Xaa is C or S
  MOD_RES (18)..(19)..(20)..(21)..(22): Xaa is A or G
  MOD_RES (23)..(24)..(25)..(26): Xaa is A or G or is absent

SEQ ID NO: 21960 - protein, 43 aa, Artificial Sequence; identical to SEQ ID NO: 18856
  GFR-binding peptide
  MOD_RES (6)..(40)..(42): Xaa is C or S
  MOD_RES (20)..(21)..(22)..(23)..(24): Xaa is A or G
  MOD_RES (25)..(26)..(27)..(28): Xaa is A or G or is absent

SEQ ID NO: 21961 - protein, 44 aa, Artificial Sequence; identical to SEQ ID NO: 18857
  GFR-binding peptide
  MOD_RES (4)..(41)..(43): Xaa is C or S
  MOD_RES (20)..(21)..(22)..(23)..(24): Xaa is A or G
  MOD_RES (25)..(26)..(27)..(28): Xaa is A or G or is absent

SEQ ID NO: 21962 - protein, 36 aa, Artificial Sequence; identical to SEQ ID NO: 18858
  GFR-binding peptide
  MOD_RES (34)..(36): Xaa is C or S

SEQ ID NO: 21963 - protein, 38 aa, Artificial Sequence; identical to SEQ ID NO: 18859
  GFR-binding peptide
  MOD_RES (2)..(2): Xaa is C or S

SEQ ID NO: 21964 - protein, 32 aa, Artificial Sequence; identical to SEQ ID NO: 18860
  GFR-binding peptide
  MOD_RES (14)..(15)..(16)..(17)..(18): Xaa is A or G
  MOD_RES (19)..(20)..(21)..(22): Xaa is A or G or is absent

SEQ ID NO: 21965 - protein, 37 aa, Artificial Sequence; identical to SEQ ID NO: 18861
  GFR-binding peptide
  MOD_RES (2)..(2): Xaa is C or S

SEQ ID NO: 21966 - protein, 43 aa, Artificial Sequence; identical to SEQ ID NO: 18862
  GFR-binding peptide
  MOD_RES (7)..(41)..(43): Xaa is C or S
  MOD_RES (21)..(22)..(23)..(24)..(25): Xaa is A or G
  MOD_RES (26)..(27)..(28)..(29): Xaa is A or G or is absent

SEQ ID NO: 21967 - protein, 35 aa, Artificial Sequence; identical to SEQ ID NO: 18863
  GFR-binding peptide
  MOD_RES (16)..(17)..(18)..(19)..(20): Xaa is A or G
  MOD_RES (21)..(22)..(23)..(24): Xaa is A or G or is absent

SEQ ID NO: 21968 - protein, 38 aa, Artificial Sequence; identical to SEQ ID NO: 18864
  GFR-binding peptide
  MOD_RES (37)..(37): Xaa is C or S
  MOD_RES (16)..(17)..(18)..(19)..(20): Xaa is A or G
  MOD_RES (21)..(22)..(23)..(24): Xaa is A or G or is absent

SEQ ID NO: 21969 - protein, 37 aa, Artificial Sequence; identical to SEQ ID NO: 18865
  GFR-binding peptide
  MOD_RES (3)..(3): Xaa is C or S
  MOD_RES (19)..(20)..(21)..(22)..(23): Xaa is A or G
  MOD_RES (24)..(25)..(26)..(27): Xaa is A or G or is absent

SEQ ID NO: 21970 - protein, 38 aa, Artificial Sequence; identical to SEQ ID NO: 18866
  GFR-binding peptide
  MOD_RES (1)..(38): Xaa is C or S

SEQ ID NO: 21971 - protein, 37 aa, Artificial Sequence; identical to SEQ ID NO: 18867
  GFR-binding peptide
  MOD_RES (3)..(3): Xaa is C or S
  MOD_RES (19)..(20)..(21)..(22)..(23): Xaa is A or G
  MOD_RES (24)..(25)..(26)..(27): Xaa is A or G or is absent

SEQ ID NO: 21972 - protein, 33 aa, Artificial Sequence; identical to SEQ ID NO: 18868
  GFR-binding peptide

SEQ ID NO: 21973 - protein, 33 aa, Artificial Sequence; identical to SEQ ID NO: 18869
  GFR-binding peptide
  MOD_RES (1)..(1): Xaa is C or S
  MOD_RES (15)..(16)..(17)..(18)..(19): Xaa is A or G
  MOD_RES (20)..(21)..(22)..(23): Xaa is A or G or is absent

SEQ ID NO: 21974 - protein, 41 aa, Artificial Sequence; identical to SEQ ID NO: 18870
  GFR-binding peptide
  MOD_RES (3)..(40): Xaa is C or S

SEQ ID NO: 21975 - protein, 34 aa, Artificial Sequence; identical to SEQ ID NO: 18871
  GFR-binding peptide
  MOD_RES (2)..(2): Xaa is C or S
  MOD_RES (16)..(17)..(18)..(19)..(20): Xaa is A or G
  MOD_RES (21)..(22)..(23)..(24): Xaa is A or G or is absent

SEQ ID NO: 21976 - protein, 36 aa, Artificial Sequence; identical to SEQ ID NO: 18872
  GFR-binding peptide
  MOD_RES (1)..(35): Xaa is C or S
  MOD_RES (15)..(16)..(17)..(18)..(19): Xaa is A or G
  MOD_RES (20)..(21)..(22)..(23): Xaa is A or G or is absent

SEQ ID NO: 21977 - protein, 36 aa, Artificial Sequence; identical to SEQ ID NO: 18873
  GFR-binding peptide
  MOD_RES (16)..(17)..(18)..(19)..(20): Xaa is A or G
  MOD_RES (21)..(22)..(23)..(24): Xaa is A or G or is absent

SEQ ID NO: 21978 - protein, 40 aa, Artificial Sequence; identical to SEQ ID NO: 18874
  GFR-binding peptide
  MOD_RES (5)..(39): Xaa is C or S

SEQ ID NO: 21979 - protein, 42 aa, Artificial Sequence; identical to SEQ ID NO: 18875
  GFR-binding peptide
  MOD_RES (3)..(40)..(42): Xaa is C or S

SEQ ID NO: 21980 - protein, 40 aa, Artificial Sequence; identical to SEQ ID NO: 18876
  GFR-binding peptide
  MOD_RES (37)..(39): Xaa is C or S

SEQ ID NO: 21981 - protein, 39 aa, Artificial Sequence; identical to SEQ ID NO: 18877
  GFR-binding peptide
  MOD_RES (6)..(6): Xaa is C or S
  MOD_RES (20)..(21)..(22)..(23)..(24): Xaa is A or G
  MOD_RES (25)..(26)..(27)..(28): Xaa is A or G or is absent

SEQ ID NO: 21982 - protein, 37 aa, Artificial Sequence; identical to SEQ ID NO: 18878
  GFR-binding peptide
  MOD_RES (3)..(37): Xaa is C or S
  MOD_RES (17)..(18)..(19)..(20)..(21): Xaa is A or G
  MOD_RES (22)..(23)..(24)..(25): Xaa is A or G or is absent

SEQ ID NO: 21983 - protein, 39 aa, Artificial Sequence; identical to SEQ ID NO: 18879
  GFR-binding peptide
  MOD_RES (3)..(3): Xaa is C or S
  MOD_RES (19)..(20)..(21)..(22)..(23): Xaa is A or G
  MOD_RES (24)..(25)..(26)..(27): Xaa is A or G or is absent

SEQ ID NO: 21984 - protein, 34 aa, Artificial Sequence; identical to SEQ ID NO: 18880
  GFR-binding peptide
  MOD_RES (34)..(34): Xaa is C or S
  MOD_RES (14)..(15)..(16)..(17)..(18): Xaa is A or G
  MOD_RES (19)..(20)..(21)..(22): Xaa is A or G or is absent

SEQ ID NO: 21985 - protein, 39 aa, Artificial Sequence; identical to SEQ ID NO: 18881
  GFR-binding peptide
  MOD_RES (5)..(39): Xaa is C or S

SEQ ID NO: 21986 - protein, 39 aa, Artificial Sequence; identical to SEQ ID NO: 18882
  GFR-binding peptide
  MOD_RES (4)..(4): Xaa is C or S

SEQ ID NO: 21987 - protein, 34 aa, Artificial Sequence; identical to SEQ ID NO: 18883
  GFR-binding peptide
  MOD_RES (2)..(2): Xaa is C or S
  MOD_RES (16)..(17)..(18)..(19)..(20): Xaa is A or G
  MOD_RES (21)..(22)..(23)..(24): Xaa is A or G or is absent

SEQ ID NO: 21988 - protein, 37 aa, Artificial Sequence; identical to SEQ ID NO: 18884
  GFR-binding peptide
  MOD_RES (2)..(36): Xaa is C or S

SEQ ID NO: 21989 - protein, 42 aa, Artificial Sequence; identical to SEQ ID NO: 18885
  GFR-binding peptide
  MOD_RES (3)..(40)..(42): Xaa is C or S
  MOD_RES (19)..(20)..(21)..(22)..(23): Xaa is A or G
  MOD_RES (24)..(25)..(26)..(27): Xaa is A or G or is absent

SEQ ID NO: 21990 - protein, 39 aa, Artificial Sequence; identical to SEQ ID NO: 18886
  GFR-binding peptide
  MOD_RES (3)..(37)..(39): Xaa is C or S
  MOD_RES (17)..(18)..(19)..(20)..(21): Xaa is A or G
  MOD_RES (22)..(23)..(24)..(25): Xaa is A or G or is absent

SEQ ID NO: 21991 - protein, 37 aa, Artificial Sequence; identical to SEQ ID NO: 18887
  GFR-binding peptide
  MOD_RES (2)..(36): Xaa is C or S
  MOD_RES (16)..(17)..(18)..(19)..(20): Xaa is A or G
  MOD_RES (21)..(22)..(23)..(24): Xaa is A or G or is absent

SEQ ID NO: 21992 - protein, 35 aa, Artificial Sequence; identical to SEQ ID NO: 18888
  GFR-binding peptide
  MOD_RES (3)..(3): Xaa is C or S

SEQ ID NO: 21993 - protein, 35 aa, Artificial Sequence; identical to SEQ ID NO: 18889
  GFR-binding peptide
  MOD_RES (3)..(3): Xaa is C or S
  MOD_RES (17)..(18)..(19)..(20)..(21): Xaa is A or G
  MOD_RES (22)..(23)..(24)..(25): Xaa is A or G or is absent

SEQ ID NO: 21994 - protein, 37 aa, Artificial Sequence; identical to SEQ ID NO: 18890
  GFR-binding peptide
  MOD_RES (1)..(35)..(37): Xaa is C or S

SEQ ID NO: 21995 - protein, 39 aa, Artificial Sequence; identical to SEQ ID NO: 18891
  GFR-binding peptide
  MOD_RES (7)..(7): Xaa is C or S
  MOD_RES (21)..(22)..(23)..(24)..(25): Xaa is A or G
  MOD_RES (26)..(27)..(28)..(29): Xaa is A or G or is absent

SEQ ID NO: 21996 - protein, 40 aa, Artificial Sequence; identical to SEQ ID NO: 18892
  GFR-binding peptide
  MOD_RES (7)..(7): Xaa is C or S
  MOD_RES (21)..(22)..(23)..(24)..(25): Xaa is A or G
  MOD_RES (26)..(27)..(28)..(29): Xaa is A or G or is absent

SEQ ID NO: 21997 - protein, 34 aa, Artificial Sequence; identical to SEQ ID NO: 18893
  GFR-binding peptide

SEQ ID NO: 21998 - protein, 37 aa, Artificial Sequence; identical to SEQ ID NO: 18894
  GFR-binding peptide
  MOD_RES (3)..(37): Xaa is C or S
  MOD_RES (17)..(18)..(19)..(20)..(21): Xaa is A or G
  MOD_RES (22)..(23)..(24)..(25): Xaa is A or G or is absent

SEQ ID NO: 21999 - protein, 40 aa, Artificial Sequence; identical to SEQ ID NO: 18895
  GFR-binding peptide
  MOD_RES (4)..(4): Xaa is C or S

SEQ ID NO: 22000 - protein, 34 aa, Artificial Sequence; identical to SEQ ID NO: 18896
  GFR-binding peptide
  MOD_RES (1)..(1): Xaa is C or S
  MOD_RES (15)..(16)..(17)..(18)..(19): Xaa is A or G
  MOD_RES (20)..(21)..(22)..(23): Xaa is A or G or is absent

SEQ ID NO: 22001 - protein, 39 aa, Artificial Sequence; identical to SEQ ID NO: 18897
  GFR-binding peptide
  MOD_RES (1)..(38): Xaa is C or S
  MOD_RES (17)..(18)..(19)..(20)..(21): Xaa is A or G
  MOD_RES (22)..(23)..(24)..(25): Xaa is A or G or is absent

SEQ ID NO: 22002 - protein, 40 aa, Artificial Sequence; identical to SEQ ID NO: 18898
  GFR-binding peptide
  MOD_RES (4)..(4): Xaa is C or S

SEQ ID NO: 22003 - protein, 37 aa, Artificial Sequence; identical to SEQ ID NO: 18899
  GFR-binding peptide
  MOD_RES (35)..(37): Xaa is C or S
  MOD_RES (14)..(15)..(16)..(17)..(18): Xaa is A or G
  MOD_RES (19)..(20)..(21)..(22): Xaa is A or G or is absent

SEQ ID NO: 22004 - protein, 35 aa, Artificial Sequence; identical to SEQ ID NO: 18900
  GFR-binding peptide
  MOD_RES (34)..(34): Xaa is C or S

SEQ ID NO: 22005 - protein, 40 aa, Artificial Sequence; identical to SEQ ID NO: 18901
  GFR-binding peptide
  MOD_RES (3)..(40): Xaa is C or S
  MOD_RES (19)..(20)..(21)..(22)..(23): Xaa is A or G
  MOD_RES (24)..(25)..(26)..(27): Xaa is A or G or is absent

SEQ ID NO: 22006 - protein, 34 aa, Artificial Sequence; identical to SEQ ID NO: 18902
  GFR-binding peptide
  MOD_RES (14)..(15)..(16)..(17)..(18): Xaa is A or G
  MOD_RES (19)..(20)..(21)..(22): Xaa is A or G or is absent

SEQ ID NO: 22007 - protein, 39 aa, Artificial Sequence; identical to SEQ ID NO: 18903
  GFR-binding peptide
  MOD_RES (3)..(37)..(39): Xaa is C or S
  MOD_RES (17)..(18)..(19)..(20)..(21): Xaa is A or G
  MOD_RES (22)..(23)..(24)..(25): Xaa is A or G or is absent

SEQ ID NO: 22008 - protein, 43 aa, Artificial Sequence; identical to SEQ ID NO: 18904
  GFR-binding peptide
  MOD_RES (3)..(40)..(42): Xaa is C or S
  MOD_RES (19)..(20)..(21)..(22)..(23): Xaa is A or G
  MOD_RES (24)..(25)..(26)..(27): Xaa is A or G or is absent

SEQ ID NO: 22009 - protein, 41 aa, Artificial Sequence; identical to SEQ ID NO: 18905
  GFR-binding peptide
  MOD_RES (5)..(39)..(41): Xaa is C or S
  MOD_RES (19)..(20)..(21)..(22)..(23): Xaa is A or G
  MOD_RES (24)..(25)..(26)..(27): Xaa is A or G or is absent

SEQ ID NO: 22010 - protein, 35 aa, Artificial Sequence; identical to SEQ ID NO: 18906
  GFR-binding peptide
  MOD_RES (1)..(1): Xaa is C or S
  MOD_RES (17)..(18)..(19)..(20)..(21): Xaa is A or G
  MOD_RES (22)..(23)..(24)..(25): Xaa is A or G or is absent

SEQ ID NO: 22011 - protein, 38 aa, Artificial Sequence; identical to SEQ ID NO: 18907
  GFR-binding peptide
  MOD_RES (35)..(37): Xaa is C or S

SEQ ID NO: 22012 - protein, 35 aa, Artificial Sequence; identical to SEQ ID NO: 18908
  GFR-binding peptide
  MOD_RES (2)..(2): Xaa is C or S
  MOD_RES (16)..(17)..(18)..(19)..(20): Xaa is A or G
  MOD_RES (21)..(22)..(23)..(24): Xaa is A or G or is absent

SEQ ID NO: 22013 - protein, 37 aa, Artificial Sequence; identical to SEQ ID NO: 18909
  GFR-binding peptide
  MOD_RES (1)..(35)..(37): Xaa is C or S
  MOD_RES (15)..(16)..(17)..(18)..(19): Xaa is A or G
  MOD_RES (20)..(21)..(22)..(23): Xaa is A or G or is absent

SEQ ID NO: 22014 - protein, 42 aa, Artificial Sequence; identical to SEQ ID NO: 18910
  GFR-binding peptide
  MOD_RES (5)..(39)..(41): Xaa is C or S

SEQ ID NO: 22015 - protein, 41 aa, Artificial Sequence; identical to SEQ ID NO: 18911
  GFR-binding peptide
  MOD_RES (2)..(39)..(41): Xaa is C or S
  MOD_RES (18)..(19)..(20)..(21)..(22): Xaa is A or G
  MOD_RES (23)..(24)..(25)..(26): Xaa is A or G or is absent

SEQ ID NO: 22016 - protein, 38 aa, Artificial Sequence; identical to SEQ ID NO: 18912
  GFR-binding peptide
  MOD_RES (37)..(37): Xaa is C or S
  MOD_RES (16)..(17)..(18)..(19)..(20): Xaa is A or G
  MOD_RES (21)..(22)..(23)..(24): Xaa is A or G or is absent

SEQ ID NO: 22017 - protein, 36 aa, Artificial Sequence; identical to SEQ ID NO: 18913
  GFR-binding peptide
  MOD_RES (2)..(2): Xaa is C or S
  MOD_RES (18)..(19)..(20)..(21)..(22): Xaa is A or G
  MOD_RES (23)..(24)..(25)..(26): Xaa is A or G or is absent

SEQ ID NO: 22018 - protein, 33 aa, Artificial Sequence; identical to SEQ ID NO: 18914
  GFR-binding peptide
  MOD_RES (1)..(1): Xaa is C or S

SEQ ID NO: 22019 - protein, 39 aa, Artificial Sequence; identical to SEQ ID NO: 18915
  GFR-binding peptide
  MOD_RES (4)..(4): Xaa is C or S

SEQ ID NO: 22020 - protein, 39 aa, Artificial Sequence; identical to SEQ ID NO: 18916
  GFR-binding peptide
  MOD_RES (2)..(39): Xaa is C or S
  MOD_RES (18)..(19)..(20)..(21)..(22): Xaa is A or G
  MOD_RES (23)..(24)..(25)..(26): Xaa is A or G or is absent

SEQ ID NO: 22021 - protein, 41 aa, Artificial Sequence; identical to SEQ ID NO: 18917
  GFR-binding peptide
  MOD_RES (4)..(38)..(40): Xaa is C or S

SEQ ID NO: 22022 - protein, 33 aa, Artificial Sequence; identical to SEQ ID NO: 18918
  GFR-binding peptide
  MOD_RES (14)..(15)..(16)..(17)..(18): Xaa is A or G
  MOD_RES (19)..(20)..(21)..(22): Xaa is A or G or is absent

SEQ ID NO: 22023 - protein, 38 aa, Artificial Sequence; identical to SEQ ID NO: 18919
  GFR-binding peptide
  MOD_RES (6)..(6): Xaa is C or S

SEQ ID NO: 22024 - protein, 43 aa, Artificial Sequence; identical to SEQ ID NO: 18920
  GFR-binding peptide
  MOD_RES (7)..(41)..(43): Xaa is C or S
  MOD_RES (21)..(22)..(23)..(24)..(25): Xaa is A or G
  MOD_RES (26)..(27)..(28)..(29): Xaa is A or G or is absent

SEQ ID NO: 22025 - protein, 41 aa, Artificial Sequence; identical to SEQ ID NO: 18921
  GFR-binding peptide
  MOD_RES (2)..(39)..(41): Xaa is C or S
  MOD_RES (18)..(19)..(20)..(21)..(22): Xaa is A or G
  MOD_RES (23)..(24)..(25)..(26): Xaa is A or G or is absent

SEQ ID NO: 22026 - protein, 39 aa, Artificial Sequence; identical to SEQ ID NO: 18922
  GFR-binding peptide
  MOD_RES (2)..(39): Xaa is C or S

SEQ ID NO: 22027 - protein, 39 aa, Artificial Sequence; identical to SEQ ID NO: 18923
  GFR-binding peptide
  MOD_RES (6)..(6): Xaa is C or S
  MOD_RES (20)..(21)..(22)..(23)..(24): Xaa is A or G
  MOD_RES (25)..(26)..(27)..(28): Xaa is A or G or is absent

SEQ ID NO: 22028 - protein, 39 aa, Artificial Sequence; identical to SEQ ID NO: 18924
  GFR-binding peptide
  MOD_RES (4)..(4): Xaa is C or S

SEQ ID NO: 22029 - protein, 38 aa, Artificial Sequence; identical to SEQ ID NO: 18925
  GFR-binding peptide
  MOD_RES (36)..(38): Xaa is C or S
  MOD_RES (15)..(16)..(17)..(18)..(19): Xaa is A or G
  MOD_RES (20)..(21)..(22)..(23): Xaa is A or G or is absent

SEQ ID NO: 22030 - protein, 35 aa, Artificial Sequence; identical to SEQ ID NO: 18926
  GFR-binding peptide
  MOD_RES (34)..(34): Xaa is C or S
  MOD_RES (14)..(15)..(16)..(17)..(18): Xaa is A or G
  MOD_RES (19)..(20)..(21)..(22): Xaa is A or G or is absent

SEQ ID NO: 22031 - protein, 40 aa, Artificial Sequence; identical to SEQ ID NO: 18927
  GFR-binding peptide
  MOD_RES (5)..(39): Xaa is C or S
  MOD_RES (19)..(20)..(21)..(22)..(23): Xaa is A or G
  MOD_RES (24)..(25)..(26)..(27): Xaa is A or G or is absent

SEQ ID NO: 22032 - protein, 42 aa, Artificial Sequence; identical to SEQ ID NO: 18928
  GFR-binding peptide
  MOD_RES (5)..(39)..(41): Xaa is C or S

SEQ ID NO: 22033 - protein, 41 aa, Artificial Sequence; identical to SEQ ID NO: 18929
  GFR-binding peptide
  MOD_RES (5)..(39)..(41): Xaa is C or S
  MOD_RES (19)..(20)..(21)..(22)..(23): Xaa is A or G
  MOD_RES (24)..(25)..(26)..(27): Xaa is A or G or is absent

SEQ ID NO: 22034 - protein, 42 aa, Artificial Sequence; identical to SEQ ID NO: 18930
  GFR-binding peptide
  MOD_RES (4)..(41): Xaa is C or S

SEQ ID NO: 22035 - protein, 43 aa, Artificial Sequence; identical to SEQ ID NO: 18931
  GFR-binding peptide
  MOD_RES (7)..(41)..(43): Xaa is C or S

SEQ ID NO: 22036 - protein, 35 aa, Artificial Sequence; identical to SEQ ID NO: 18932
  GFR-binding peptide
  MOD_RES (35)..(35): Xaa is C or S
  MOD_RES (14)..(15)..(16)..(17)..(18): Xaa is A or G
  MOD_RES (19)..(20)..(21)..(22): Xaa is A or G or is absent

SEQ ID NO: 22037 - protein, 34 aa, Artificial Sequence; identical to SEQ ID NO: 18933
  GFR-binding peptide

SEQ ID NO: 22038 - protein, 39 aa, Artificial Sequence; identical to SEQ ID NO: 18934
  GFR-binding peptide
  MOD_RES (2)..(36)..(38): Xaa is C or S
  MOD_RES (16)..(17)..(18)..(19)..(20): Xaa is A or G
  MOD_RES (21)..(22)..(23)..(24): Xaa is A or G or is absent

SEQ ID NO: 22039 - protein, 38 aa, Artificial Sequence; identical to SEQ ID NO: 18935
  GFR-binding peptide
  MOD_RES (3)..(3): Xaa is C or S

SEQ ID NO: 22040 - protein, 40 aa, Artificial Sequence; identical to SEQ ID NO: 18936
  GFR-binding peptide
  MOD_RES (4)..(4): Xaa is C or S
  MOD_RES (20)..(21)..(22)..(23)..(24): Xaa is A or G
  MOD_RES (25)..(26)..(27)..(28): Xaa is A or G or is absent

SEQ ID NO: 22041 - protein, 34 aa, Artificial Sequence; identical to SEQ ID NO: 18937
  GFR-binding peptide

SEQ ID NO: 22042 - protein, 33 aa, Artificial Sequence; identical to SEQ ID NO: 18938
  GFR-binding peptide
  MOD_RES (14)..(15)..(16)..(17)..(18): Xaa is A or G
  MOD_RES (19)..(20)..(21)..(22): Xaa is A or G or is absent

SEQ ID NO: 22043 - protein, 38 aa, Artificial Sequence; identical to SEQ ID NO: 18939
  GFR-binding peptide
  MOD_RES (5)..(5): Xaa is C or S
  MOD_RES (19)..(20)..(21)..(22)..(23): Xaa is A or G
  MOD_RES (24)..(25)..(26)..(27): Xaa is A or G or is absent

SEQ ID NO: 22044 - protein, 33 aa, Artificial Sequence; identical to SEQ ID NO: 18940
  GFR-binding peptide
  MOD_RES (14)..(15)..(16)..(17)..(18): Xaa is A or G
  MOD_RES (19)..(20)..(21)..(22): Xaa is A or G or is absent

SEQ ID NO: 22045 - protein, 39 aa, Artificial Sequence; identical to SEQ ID NO: 18941
  GFR-binding peptide
  MOD_RES (4)..(4): Xaa is C or S
  MOD_RES (20)..(21)..(22)..(23)..(24): Xaa is A or G
  MOD_RES (25)..(26)..(27)..(28): Xaa is A or G or is absent

SEQ ID NO: 22046 - protein, 41 aa, Artificial Sequence; identical to SEQ ID NO: 18942
  GFR-binding peptide
  MOD_RES (4)..(38)..(40): Xaa is C or S
  MOD_RES (18)..(19)..(20)..(21)..(22): Xaa is A or G
  MOD_RES (23)..(24)..(25)..(26): Xaa is A or G or is absent

SEQ ID NO: 22047 - protein, 38 aa, Artificial Sequence; identical to SEQ ID NO: 18943
  GFR-binding peptide
  MOD_RES (4)..(4): Xaa is C or S

SEQ ID NO: 22048 - protein, 35 aa, Artificial Sequence; identical to SEQ ID NO: 18944
  GFR-binding peptide
  MOD_RES (2)..(2): Xaa is C or S

SEQ ID NO: 22049 - protein, 37 aa, Artificial Sequence; identical to SEQ ID NO: 18945
  GFR-binding peptide
  MOD_RES (3)..(3): Xaa is C or S
  MOD_RES (19)..(20)..(21)..(22)..(23): Xaa is A or G
  MOD_RES (24)..(25)..(26)..(27): Xaa is A or G or is absent

SEQ ID NO: 22050 - protein, 37 aa, Artificial Sequence; identical to SEQ ID NO: 18946
  GFR-binding peptide
  MOD_RES (2)..(2): Xaa is C or S
  MOD_RES (18)..(19)..(20)..(21)..(22): Xaa is A or G
  MOD_RES (23)..(24)..(25)..(26): Xaa is A or G or is absent

SEQ ID NO: 22051 - protein, 36 aa, Artificial Sequence; identical to SEQ ID NO: 18947
  GFR-binding peptide
  MOD_RES (2)..(36): Xaa is C or S

SEQ ID NO: 22052 - protein, 42 aa, Artificial Sequence; identical to SEQ ID NO: 18948
  GFR-binding peptide
  MOD_RES (6)..(40)..(42): Xaa is C or S

SEQ ID NO: 22053 - protein, 38 aa, Artificial Sequence; identical to SEQ ID NO: 18949
  GFR-binding peptide
  MOD_RES (3)..(37): Xaa is C or S

SEQ ID NO: 22054 - protein, 33 aa, Artificial Sequence; identical to SEQ ID NO: 18950
  GFR-binding peptide
  MOD_RES (14)..(15)..(16)..(17)..(18): Xaa is A or G
  MOD_RES (19)..(20)..(21)..(22): Xaa is A or G or is absent

SEQ ID NO: 22055 - protein, 37 aa, Artificial Sequence; identical to SEQ ID NO: 18951
  GFR-binding peptide
  MOD_RES (5)..(5): Xaa is C or S

SEQ ID NO: 22056 - protein, 35 aa, Artificial Sequence; identical to SEQ ID NO: 18952
  GFR-binding peptide
  MOD_RES (1)..(35): Xaa is C or S
  MOD_RES (15)..(16)..(17)..(18)..(19): Xaa is A or G
  MOD_RES (20)..(21)..(22)..(23): Xaa is A or G or is absent

SEQ ID NO: 22057 - protein, 38 aa, Artificial Sequence; identical to SEQ ID NO: 18953
  GFR-binding peptide
  MOD_RES (6)..(6): Xaa is C or S
  MOD_RES (20)..(21)..(22)..(23)..(24): Xaa is A or G
  MOD_RES (25)..(26)..(27)..(28): Xaa is A or G or is absent

SEQ ID NO: 22058 - protein, 35 aa, Artificial Sequence; identical to SEQ ID NO: 18954
  GFR-binding peptide
  MOD_RES (3)..(3): Xaa is C or S

SEQ ID NO: 22059 - protein, 37 aa, Artificial Sequence; identical to SEQ ID NO: 18955
  GFR-binding peptide
  MOD_RES (5)..(5): Xaa is C or S
  MOD_RES (19)..(20)..(21)..(22)..(23): Xaa is A or G
  MOD_RES (24)..(25)..(26)..(27): Xaa is A or G or is absent

SEQ ID NO: 22060 - protein, 42 aa, Artificial Sequence; identical to SEQ ID NO: 18956
  GFR-binding peptide
  MOD_RES (7)..(41): Xaa is C or S
  MOD_RES (21)..(22)..(23)..(24)..(25): Xaa is A or G
  MOD_RES (26)..(27)..(28)..(29): Xaa is A or G or is absent

SEQ ID NO: 22061 - protein, 42 aa, Artificial Sequence; identical to SEQ ID NO: 18957
  GFR-binding peptide
  MOD_RES (6)..(40)..(42): Xaa is C or S
  MOD_RES (20)..(21)..(22)..(23)..(24): Xaa is A or G
  MOD_RES (25)..(26)..(27)..(28): Xaa is A or G or is absent

SEQ ID NO: 22062 - protein, 37 aa, Artificial Sequence; identical to SEQ ID NO: 18958
  GFR-binding peptide
  MOD_RES (36)..(36): Xaa is C or S
  MOD_RES (15)..(16)..(17)..(18)..(19): Xaa is A or G
  MOD_RES (20)..(21)..(22)..(23): Xaa is A or G or is absent

SEQ ID NO: 22063 - protein, 33 aa, Artificial Sequence; identical to SEQ ID NO: 18959
  GFR-binding peptide
  MOD_RES (15)..(16)..(17)..(18)..(19): Xaa is A or G
  MOD_RES (20)..(21)..(22)..(23): Xaa is A or G or is absent

SEQ ID NO: 22064 - protein, 33 aa, Artificial Sequence; identical to SEQ ID NO: 18960
  GFR-binding peptide
  MOD_RES (15)..(16)..(17)..(18)..(19): Xaa is A or G
  MOD_RES (20)..(21)..(22)..(23): Xaa is A or G or is absent

SEQ ID NO: 22065 - protein, 43 aa, Artificial Sequence; identical to SEQ ID NO: 18961
  GFR-binding peptide
  MOD_RES (3)..(40)..(42): Xaa is C or S
  MOD_RES (19)..(20)..(21)..(22)..(23): Xaa is A or G
  MOD_RES (24)..(25)..(26)..(27): Xaa is A or G or is absent

SEQ ID NO: 22066 - protein, 40 aa, Artificial Sequence; identical to SEQ ID NO: 18962
  GFR-binding peptide
  MOD_RES (37)..(39): Xaa is C or S

SEQ ID NO: 22067 - protein, 37 aa, Artificial Sequence; identical to SEQ ID NO: 18963
  GFR-binding peptide
  MOD_RES (36)..(36): Xaa is C or S

SEQ ID NO: 22068 - protein, 38 aa, Artificial Sequence; identical to SEQ ID NO: 18964
  GFR-binding peptide
  MOD_RES (2)..(2): Xaa is C or S

SEQ ID NO: 22069 - protein, 38 aa, Artificial Sequence; identical to SEQ ID NO: 18965
  GFR-binding peptide
  MOD_RES (5)..(5): Xaa is C or S
  MOD_RES (19)..(20)..(21)..(22)..(23): Xaa is A or G
  MOD_RES (24)..(25)..(26)..(27): Xaa is A or G or is absent

SEQ ID NO: 22070 - protein, 33 aa, Artificial Sequence; identical to SEQ ID NO: 18966
  GFR-binding peptide
  MOD_RES (1)..(1): Xaa is C or S

SEQ ID NO: 22071 - protein, 35 aa, Artificial Sequence; identical to SEQ ID NO: 18967
  GFR-binding peptide
  MOD_RES (34)..(34): Xaa is C or S

SEQ ID NO: 22072 - protein, 41 aa, Artificial Sequence; identical to SEQ ID NO: 18968
  GFR-binding peptide
  MOD_RES (7)..(41): Xaa is C or S
  MOD_RES (21)..(22)..(23)..(24)..(25): Xaa is A or G
  MOD_RES (26)..(27)..(28)..(29): Xaa is A or G or is absent

SEQ ID NO: 22073 - protein, 39 aa, Artificial Sequence; identical to SEQ ID NO: 18969
  GFR-binding peptide
  MOD_RES (5)..(5): Xaa is C or S

SEQ ID NO: 22074 - protein, 42 aa, Artificial Sequence; identical to SEQ ID NO: 18970
  GFR-binding peptide
  MOD_RES (4)..(41): Xaa is C or S
  MOD_RES (20)..(21)..(22)..(23)..(24): Xaa is A or G
  MOD_RES (25)..(26)..(27)..(28): Xaa is A or G or is absent

SEQ ID NO: 22075 - protein, 37 aa, Artificial Sequence; identical to SEQ ID NO: 18971
  GFR-binding peptide
  MOD_RES (36)..(36): Xaa is C or S
  MOD_RES (15)..(16)..(17)..(18)..(19): Xaa is A or G
  MOD_RES (20)..(21)..(22)..(23): Xaa is A or G or is absent

SEQ ID NO: 22076 - protein, 42 aa, Artificial Sequence; identical to SEQ ID NO: 18972
  GFR-binding peptide
  MOD_RES (4)..(41): Xaa is C or S

SEQ ID NO: 22077 - protein, 38 aa, Artificial Sequence; identical to SEQ ID NO: 18973
  GFR-binding peptide
  MOD_RES (5)..(5): Xaa is C or S

SEQ ID NO: 22078 - protein, 42 aa, Artificial Sequence; identical to SEQ ID NO: 18974
  GFR-binding peptide
  MOD_RES (4)..(41): Xaa is C or S
  MOD_RES (20)..(21)..(22)..(23)..(24): Xaa is A or G
  MOD_RES (25)..(26)..(27)..(28): Xaa is A or G or is absent

SEQ ID NO: 22079 - protein, 37 aa, Artificial Sequence; identical to SEQ ID NO: 18975
  GFR-binding peptide
  MOD_RES (5)..(5): Xaa is C or S
  MOD_RES (19)..(20)..(21)..(22)..(23): Xaa is A or G
  MOD_RES (24)..(25)..(26)..(27): Xaa is A or G or is absent

SEQ ID NO: 22080 - protein, 41 aa, Artificial Sequence; identical to SEQ ID NO: 18976
  GFR-binding peptide
  MOD_RES (1)..(38)..(40): Xaa is C or S
  MOD_RES (17)..(18)..(19)..(20)..(21): Xaa is A or G
  MOD_RES (22)..(23)..(24)..(25): Xaa is A or G or is absent

SEQ ID NO: 22081 - protein, 39 aa, Artificial Sequence; identical to SEQ ID NO: 18977
  GFR-binding peptide
  MOD_RES (37)..(39): Xaa is C or S

SEQ ID NO: 22082 - protein, 39 aa, Artificial Sequence; identical to SEQ ID NO: 18978
  GFR-binding peptide
  MOD_RES (3)..(3): Xaa is C or S
  MOD_RES (19)..(20)..(21)..(22)..(23): Xaa is A or G
  MOD_RES (24)..(25)..(26)..(27): Xaa is A or G or is absent

SEQ ID NO: 22083 - protein, 42 aa, Artificial Sequence; identical to SEQ ID NO: 18979
  GFR-binding peptide
  MOD_RES (2)..(39)..(41): Xaa is C or S
  MOD_RES (18)..(19)..(20)..(21)..(22): Xaa is A or G
  MOD_RES (23)..(24)..(25)..(26): Xaa is A or G or is absent

SEQ ID NO: 22084 - protein, 38 aa, Artificial Sequence; identical to SEQ ID NO: 18980
  GFR-binding peptide
  MOD_RES (1)..(38): Xaa is C or S

SEQ ID NO: 22085 - protein, 40 aa, Artificial Sequence; identical to SEQ ID NO: 18981
  GFR-binding peptide
  MOD_RES (5)..(5): Xaa is C or S
  MOD_RES (21)..(22)..(23)..(24)..(25): Xaa is A or G
  MOD_RES (26)..(27)..(28)..(29): Xaa is A or G or is absent

SEQ ID NO: 22086 - protein, 42 aa, Artificial Sequence; identical to SEQ ID NO: 18982
  GFR-binding peptide
  MOD_RES (5)..(42): Xaa is C or S
  MOD_RES (21)..(22)..(23)..(24)..(25): Xaa is A or G
  MOD_RES (26)..(27)..(28)..(29): Xaa is A or G or is absent

SEQ ID NO: 22087 - protein, 39 aa, Artificial Sequence; identical to SEQ ID NO: 18983
  GFR-binding peptide
  MOD_RES (3)..(37)..(39): Xaa is C or S

SEQ ID NO: 22088 - protein, 41 aa, Artificial Sequence; identical to SEQ ID NO: 18984
  GFR-binding peptide
  MOD_RES (5)..(5): Xaa is C or S
  MOD_RES (21)..(22)..(23)..(24)..(25): Xaa is A or G
  MOD_RES (26)..(27)..(28)..(29): Xaa is A or G or is absent

SEQ ID NO: 22089 - protein, 35 aa, Artificial Sequence; identical to SEQ ID NO: 18985
  GFR-binding peptide
  MOD_RES (1)..(35): Xaa is C or S
  MOD_RES (15)..(16)..(17)..(18)..(19): Xaa is A or G
  MOD_RES (20)..(21)..(22)..(23): Xaa is A or G or is absent

SEQ ID NO: 22090 - protein, 34 aa, Artificial Sequence; identical to SEQ ID NO: 18986
  GFR-binding peptide
  MOD_RES (1)..(1): Xaa is C or S
  MOD_RES (15)..(16)..(17)..(18)..(19): Xaa is A or G
  MOD_RES (20)..(21)..(22)..(23): Xaa is A or G or is absent

SEQ ID NO: 22091 - protein, 37 aa, Artificial Sequence; identical to SEQ ID NO: 18987
  GFR-binding peptide
  MOD_RES (1)..(1): Xaa is C or S
  MOD_RES (17)..(18)..(19)..(20)..(21): Xaa is A or G
  MOD_RES (22)..(23)..(24)..(25): Xaa is A or G or is absent

SEQ ID NO: 22092 - protein, 36 aa, Artificial Sequence; identical to SEQ ID NO: 18988
  GFR-binding peptide

SEQ ID NO: 22093 - protein, 41 aa, Artificial Sequence; identical to SEQ ID NO: 18989
  GFR-binding peptide
  MOD_RES (1)..(38)..(40): Xaa is C or S
  MOD_RES (17)..(18)..(19)..(20)..(21): Xaa is A or G
  MOD_RES (22)..(23)..(24)..(25): Xaa is A or G or is absent

SEQ ID NO: 22094 - protein, 35 aa, Artificial Sequence; identical to SEQ ID NO: 18990
  GFR-binding peptide
  MOD_RES (35)..(35): Xaa is C or S

SEQ ID NO: 22095 - protein, 36 aa, Artificial Sequence; identical to SEQ ID NO: 18991
  GFR-binding peptide
  MOD_RES (36)..(36): Xaa is C or S
  MOD_RES (15)..(16)..(17)..(18)..(19): Xaa is A or G
  MOD_RES (20)..(21)..(22)..(23): Xaa is A or G or is absent

SEQ ID NO: 22096 - protein, 44 aa, Artificial Sequence; identical to SEQ ID NO: 18992
  GFR-binding peptide
  MOD_RES (5)..(42)..(44): Xaa is C or S

SEQ ID NO: 22097 - protein, 44 aa, Artificial Sequence; identical to SEQ ID NO: 18993
  GFR-binding peptide
  MOD_RES (7)..(41)..(43): Xaa is C or S
  MOD_RES (21)..(22)..(23)..(24)..(25): Xaa is A or G
  MOD_RES (26)..(27)..(28)..(29): Xaa is A or G or is absent

SEQ ID NO: 22098 - protein, 40 aa, Artificial Sequence; identical to SEQ ID NO: 18994
  GFR-binding peptide
  MOD_RES (3)..(37)..(39): Xaa is C or S
  MOD_RES (17)..(18)..(19)..(20)..(21): Xaa is A or G
  MOD_RES (22)..(23)..(24)..(25): Xaa is A or G or is absent

SEQ ID NO: 22099 - protein, 42 aa, Artificial Sequence; identical to SEQ ID NO: 18995
  GFR-binding peptide
  MOD_RES (7)..(41): Xaa is C or S

SEQ ID NO: 22100 - protein, 34 aa, Artificial Sequence; identical to SEQ ID NO: 18996
  GFR-binding peptide

SEQ ID NO: 22101 - protein, 36 aa, Artificial Sequence; identical to SEQ ID NO: 18997
  GFR-binding peptide
  MOD_RES (2)..(36): Xaa is C or S

SEQ ID NO: 22102 - protein, 39 aa, Artificial Sequence; identical to SEQ ID NO: 18998
  GFR-binding peptide
  MOD_RES (4)..(38): Xaa is C or S

SEQ ID NO: 22103 - protein, 36 aa, Artificial Sequence; identical to SEQ ID NO: 18999
  GFR-binding peptide
  MOD_RES (2)..(2): Xaa is C or S
  MOD_RES (18)..(19)..(20)..(21)..(22): Xaa is A or G
  MOD_RES (23)..(24)..(25)..(26): Xaa is A or G or is absent

SEQ ID NO: 22104 - protein, 39 aa, Artificial Sequence; identical to SEQ ID NO: 19000
  GFR-binding peptide
  MOD_RES (7)..(7): Xaa is C or S
  MOD_RES (21)..(22)..(23)..(24)..(25): Xaa is A or G
  MOD_RES (26)..(27)..(28)..(29): Xaa is A or G or is absent

SEQ ID NO: 22105 - protein, 38 aa, Artificial Sequence; identical to SEQ ID NO: 19001
  GFR-binding peptide
  MOD_RES (4)..(38): Xaa is C or S
  MOD_RES (18)..(19)..(20)..(21)..(22): Xaa is A or G
  MOD_RES (23)..(24)..(25)..(26): Xaa is A or G or is absent

SEQ ID NO: 22106 - protein, 41 aa, Artificial Sequence; identical to SEQ ID NO: 19002
  GFR-binding peptide
  MOD_RES (4)..(41): Xaa is C or S
  MOD_RES (20)..(21)..(22)..(23)..(24): Xaa is A or G
  MOD_RES (25)..(26)..(27)..(28): Xaa is A or G or is absent

SEQ ID NO: 22107 - protein, 35 aa, Artificial Sequence; identical to SEQ ID NO: 19003
  GFR-binding peptide
  MOD_RES (3)..(3): Xaa is C or S
  MOD_RES (17)..(18)..(19)..(20)..(21): Xaa is A or G
  MOD_RES (22)..(23)..(24)..(25): Xaa is A or G or is absent

SEQ ID NO: 22108 - protein, 43 aa, Artificial Sequence; identical to SEQ ID NO: 19004
  GFR-binding peptide
  MOD_RES (6)..(40)..(42): Xaa is C or S

SEQ ID NO: 22109 - protein, 40 aa, Artificial Sequence; identical to SEQ ID NO: 19005
  GFR-binding peptide
  MOD_RES (3)..(40): Xaa is C or S

SEQ ID NO: 22110 - protein, 33 aa, Artificial Sequence; identical to SEQ ID NO: 19006
  GFR-binding peptide

SEQ ID NO: 22111 - protein, 39 aa, Artificial Sequence; identical to SEQ ID NO: 19007
  GFR-binding peptide
  MOD_RES (4)..(4): Xaa is C or S
  MOD_RES (20)..(21)..(22)..(23)..(24): Xaa is A or G
  MOD_RES (25)..(26)..(27)..(28): Xaa is A or G or is absent

SEQ ID NO: 22112 - protein, 36 aa, Artificial Sequence; identical to SEQ ID NO: 19008
  GFR-binding peptide
  MOD_RES (35)..(35): Xaa is C or S

SEQ ID NO: 22113 - protein, 38 aa, Artificial Sequence; identical to SEQ ID NO: 19009
  GFR-binding peptide
  MOD_RES (3)..(3): Xaa is C or S
  MOD_RES (19)..(20)..(21)..(22)..(23): Xaa is A or G
  MOD_RES (24)..(25)..(26)..(27): Xaa is A or G or is absent

SEQ ID NO: 22114 - protein, 40 aa, Artificial Sequence; identical to SEQ ID NO: 19010
  GFR-binding peptide
  MOD_RES (4)..(38)..(40): Xaa is C or S

SEQ ID NO: 22115 - protein, 40 aa, Artificial Sequence; identical to SEQ ID NO: 19011
  GFR-binding peptide
  MOD_RES (5)..(39): Xaa is C or S

SEQ ID NO: 22116 - protein, 36 aa, Artificial Sequence; identical to SEQ ID NO: 19012
  GFR-binding peptide
  MOD_RES (34)..(36): Xaa is C or S
  MOD_RES (14)..(15)..(16)..(17)..(18): Xaa is A or G
  MOD_RES (19)..(20)..(21)..(22): Xaa is A or G or is absent

SEQ ID NO: 22117 - protein, 36 aa, Artificial Sequence; identical to SEQ ID NO: 19013
  GFR-binding peptide
  MOD_RES (3)..(3): Xaa is C or S
  MOD_RES (17)..(18)..(19)..(20)..(21): Xaa is A or G
  MOD_RES (22)..(23)..(24)..(25): Xaa is A or G or is absent

SEQ ID NO: 22118 - protein, 39 aa, Artificial Sequence; identical to SEQ ID NO: 19014
  GFR-binding peptide
  MOD_RES (7)..(7): Xaa is C or S

SEQ ID NO: 22119 - protein, 33 aa, Artificial Sequence; identical to SEQ ID NO: 19015
  GFR-binding peptide
  MOD_RES (15)..(16)..(17)..(18)..(19): Xaa is A or G
  MOD_RES (20)..(21)..(22)..(23): Xaa is A or G or is absent

SEQ ID NO: 22120 - protein, 41 aa, Artificial Sequence; identical to SEQ ID NO: 19016
  GFR-binding peptide
  MOD_RES (5)..(5): Xaa is C or S

SEQ ID NO: 22121 - protein, 37 aa, Artificial Sequence; identical to SEQ ID NO: 19017
  GFR-binding peptide
  MOD_RES (2)..(36): Xaa is C or S

SEQ ID NO: 22122 - protein, 38 aa, Artificial Sequence; identical to SEQ ID NO: 19018
  GFR-binding peptide
  MOD_RES (3)..(3): Xaa is C or S
  MOD_RES (19)..(20)..(21)..(22)..(23): Xaa is A or G
  MOD_RES (24)..(25)..(26)..(27): Xaa is A or G or is absent

SEQ ID NO: 22123 - protein, 39 aa, Artificial Sequence; identical to SEQ ID NO: 19019
  GFR-binding peptide
  MOD_RES (7)..(7): Xaa is C or S

SEQ ID NO: 22124 - protein, 39 aa, Artificial Sequence; identical to SEQ ID NO: 19020
  GFR-binding peptide
  MOD_RES (37)..(39): Xaa is C or S

SEQ ID NO: 22125 - protein, 37 aa, Artificial Sequence; identical to SEQ ID NO: 19021
  GFR-binding peptide
  MOD_RES (1)..(1): Xaa is C or S
  MOD_RES (17)..(18)..(19)..(20)..(21): Xaa is A or G
  MOD_RES (22)..(23)..(24)..(25): Xaa is A or G or is absent

SEQ ID NO: 22126 - protein, 38 aa, Artificial Sequence; identical to SEQ ID NO: 19022
  GFR-binding peptide
  MOD_RES (6)..(6): Xaa is C or S

SEQ ID NO: 22127 - protein, 40 aa, Artificial Sequence; identical to SEQ ID NO: 19023
  GFR-binding peptide
  MOD_RES (3)..(37)..(39): Xaa is C or S
  MOD_RES (17)..(18)..(19)..(20)..(21): Xaa is A or G
  MOD_RES (22)..(23)..(24)..(25): Xaa is A or G or is absent

SEQ ID NO: 22128 - protein, 33 aa, Artificial Sequence; identical to SEQ ID NO: 19024
  GFR-binding peptide
  MOD_RES (15)..(16)..(17)..(18)..(19): Xaa is A or G
  MOD_RES (20)..(21)..(22)..(23): Xaa is A or G or is absent

SEQ ID NO: 22129 - protein, 43 aa, Artificial Sequence; identical to SEQ ID NO: 19025
  GFR-binding peptide
  MOD_RES (4)..(41)..(43): Xaa is C or S
  MOD_RES (20)..(21)..(22)..(23)..(24): Xaa is A or G
  MOD_RES (25)..(26)..(27)..(28): Xaa is A or G or is absent

SEQ ID NO: 22130 - protein, 37 aa, Artificial Sequence; identical to SEQ ID NO: 19026
  GFR-binding peptide
  MOD_RES (36)..(36): Xaa is C or S

SEQ ID NO: 22131 - protein, 38 aa, Artificial Sequence; identical to SEQ ID NO: 19027
  GFR-binding peptide
  MOD_RES (3)..(37): Xaa is C or S
  MOD_RES (17)..(18)..(19)..(20)..(21): Xaa is A or G
  MOD_RES (22)..(23)..(24)..(25): Xaa is A or G or is absent

SEQ ID NO: 22132 - protein, 36 aa, Artificial Sequence; identical to SEQ ID NO: 19028
  GFR-binding peptide
  MOD_RES (16)..(17)..(18)..(19)..(20): Xaa is A or G
  MOD_RES (21)..(22)..(23)..(24): Xaa is A or G or is absent

SEQ ID NO: 22133 - protein, 38 aa, Artificial Sequence; identical to SEQ ID NO: 19029
  GFR-binding peptide
  MOD_RES (2)..(36)..(38): Xaa is C or S
  MOD_RES (16)..(17)..(18)..(19)..(20): Xaa is A or G
  MOD_RES (21)..(22)..(23)..(24): Xaa is A or G or is absent

SEQ ID NO: 22134 - protein, 36 aa, Artificial Sequence; identical to SEQ ID NO: 19030
  GFR-binding peptide
  MOD_RES (35)..(35): Xaa is C or S
  MOD_RES (14)..(15)..(16)..(17)..(18): Xaa is A or G
  MOD_RES (19)..(20)..(21)..(22): Xaa is A or G or is absent

SEQ ID NO: 22135 - protein, 43 aa, Artificial Sequence; identical to SEQ ID NO: 19031
  GFR-binding peptide
  MOD_RES (3)..(40)..(42): Xaa is C or S

SEQ ID NO: 22136 - protein, 37 aa, Artificial Sequence; identical to SEQ ID NO: 19032
  GFR-binding peptide
  MOD_RES (36)..(36): Xaa is C or S

SEQ ID NO: 22137 - protein, 40 aa, Artificial Sequence; identical to SEQ ID NO: 19033
  GFR-binding peptide
  MOD_RES (3)..(40): Xaa is C or S

SEQ ID NO: 22138 - protein, 38 aa, Artificial Sequence; identical to SEQ ID NO: 19034
  GFR-binding peptide
  MOD_RES (1)..(35)..(37): Xaa is C or S
  MOD_RES (15)..(16)..(17)..(18)..(19): Xaa is A or G
  MOD_RES (20)..(21)..(22)..(23): Xaa is A or G or is absent

SEQ ID NO: 22139 - protein, 38 aa, Artificial Sequence; identical to SEQ ID NO: 19035
  GFR-binding peptide
  MOD_RES (6)..(6): Xaa is C or S
  MOD_RES (20)..(21)..(22)..(23)..(24): Xaa is A or G
  MOD_RES (25)..(26)..(27)..(28): Xaa is A or G or is absent

SEQ ID NO: 22140 - protein, 40 aa, Artificial Sequence; identical to SEQ ID NO: 19036
  GFR-binding peptide
  MOD_RES (4)..(38)..(40): Xaa is C or S
  MOD_RES (18)..(19)..(20)..(21)..(22): Xaa is A or G
  MOD_RES (23)..(24)..(25)..(26): Xaa is A or G or is absent

SEQ ID NO: 22141 - protein, 43 aa, Artificial Sequence; identical to SEQ ID NO: 19037
  GFR-binding peptide
  MOD_RES (6)..(40)..(42): Xaa is C or S
  MOD_RES (20)..(21)..(22)..(23)..(24): Xaa is A or G
  MOD_RES (25)..(26)..(27)..(28): Xaa is A or G or is absent

SEQ ID NO: 22142 - protein, 35 aa, Artificial Sequence; identical to SEQ ID NO: 19038
  GFR-binding peptide
  MOD_RES (35)..(35): Xaa is C or S
  MOD_RES (14)..(15)..(16)..(17)..(18): Xaa is A or G
  MOD_RES (19)..(20)..(21)..(22): Xaa is A or G or is absent

SEQ ID NO: 22143 - protein, 39 aa, Artificial Sequence; identical to SEQ ID NO: 19039
  GFR-binding peptide
  MOD_RES (5)..(5): Xaa is C or S

SEQ ID NO: 22144 - protein, 41 aa, Artificial Sequence; identical to SEQ ID NO: 19040
  GFR-binding peptide
  MOD_RES (6)..(40): Xaa is C or S

SEQ ID NO: 22145 - protein, 38 aa, Artificial Sequence; identical to SEQ ID NO: 19041
  GFR-binding peptide
  MOD_RES (6)..(6): Xaa is C or S

SEQ ID NO: 22146 - protein, 40 aa, Artificial Sequence; identical to SEQ ID NO: 19042
  GFR-binding peptide
  MOD_RES (5)..(5): Xaa is C or S
  MOD_RES (21)..(22)..(23)..(24)..(25): Xaa is A or G
  MOD_RES (26)..(27)..(28)..(29): Xaa is A or G or is absent

SEQ ID NO: 22147 - protein, 40 aa, Artificial Sequence; identical to SEQ ID NO: 19043
  GFR-binding peptide
  MOD_RES (1)..(38)..(40): Xaa is C or S
  MOD_RES (17)..(18)..(19)..(20)..(21): Xaa is A or G
  MOD_RES (22)..(23)..(24)..(25): Xaa is A or G or is absent

SEQ ID NO: 22148 - protein, 35 aa, Artificial Sequence; identical to SEQ ID NO: 19044
  GFR-binding peptide
  MOD_RES (3)..(3): Xaa is C or S

SEQ ID NO: 22149 - protein, 39 aa, Artificial Sequence; identical to SEQ ID NO: 19045
  GFR-binding peptide
  MOD_RES (5)..(39): Xaa is C or S

SEQ ID NO: 22150 - protein, 41 aa, Artificial Sequence; identical to SEQ ID NO: 19046
  GFR-binding peptide
  MOD_RES (5)..(39)..(41): Xaa is C or S

SEQ ID NO: 22151 - protein, 37 aa, Artificial Sequence; identical to SEQ ID NO: 19047
  GFR-binding peptide
  MOD_RES (1)..(1): Xaa is C or S

SEQ ID NO: 22152 - protein, 42 aa, Artificial Sequence; identical to SEQ ID NO: 19048
  GFR-binding peptide
  MOD_RES (6)..(40)..(42): Xaa is C or S

SEQ ID NO: 22153 - protein, 38 aa, Artificial Sequence; identical to SEQ ID NO: 19049
  GFR-binding peptide
  MOD_RES (4)..(4): Xaa is C or S

SEQ ID NO: 22154 - protein, 38 aa, Artificial Sequence; identical to SEQ ID NO: 19050
  GFR-binding peptide
  MOD_RES (36)..(38): Xaa is C or S

SEQ ID NO: 22155 - protein, 39 aa, Artificial Sequence; identical to SEQ ID NO: 19051
  GFR-binding peptide
  MOD_RES (7)..(7): Xaa is C or S
  MOD_RES (21)..(22)..(23)..(24)..(25): Xaa is A or G
  MOD_RES (26)..(27)..(28)..(29): Xaa is A or G or is absent

SEQ ID NO: 22156 - protein, 41 aa, Artificial Sequence; identical to SEQ ID NO: 19052
  GFR-binding peptide
  MOD_RES (3)..(40): Xaa is C or S

SEQ ID NO: 22157 - protein, 40 aa, Artificial Sequence; identical to SEQ ID NO: 19053
  GFR-binding peptide
  MOD_RES (37)..(39): Xaa is C or S

SEQ ID NO: 22158 - protein, 37 aa, Artificial Sequence; identical to SEQ ID NO: 19054
  GFR-binding peptide
  MOD_RES (37)..(37): Xaa is C or S

SEQ ID NO: 22159 - protein, 40 aa, Artificial Sequence; identical to SEQ ID NO: 19055
  GFR-binding peptide
  MOD_RES (6)..(40): Xaa is C or S

SEQ ID NO: 22160 - protein, 39 aa, Artificial Sequence; identical to SEQ ID NO: 19056
  GFR-binding peptide
  MOD_RES (3)..(3): Xaa is C or S
  MOD_RES (19)..(20)..(21)..(22)..(23): Xaa is A or G
  MOD_RES (24)..(25)..(26)..(27): Xaa is A or G or is absent

SEQ ID NO: 22161 - protein, 36 aa, Artificial Sequence; identical to SEQ ID NO: 19057
  GFR-binding peptide
  MOD_RES (1)..(1): Xaa is C or S
  MOD_RES (17)..(18)..(19)..(20)..(21): Xaa is A or G
  MOD_RES (22)..(23)..(24)..(25): Xaa is A or G or is absent

SEQ ID NO: 22162 - protein, 38 aa, Artificial Sequence; identical to SEQ ID NO: 19058
  GFR-binding peptide
  MOD_RES (2)..(36)..(38): Xaa is C or S

SEQ ID NO: 22163 - protein, 32 aa, Artificial Sequence; identical to SEQ ID NO: 19059
  GFR-binding peptide
  MOD_RES (14)..(15)..(16)..(17)..(18): Xaa is A or G
  MOD_RES (19)..(20)..(21)..(22): Xaa is A or G or is absent

SEQ ID NO: 22164 - protein, 41 aa, Artificial Sequence; identical to SEQ ID NO: 19060
  GFR-binding peptide
  MOD_RES (4)..(38)..(40): Xaa is C or S

SEQ ID NO: 22165 - protein, 42 aa, Artificial Sequence; identical to SEQ ID NO: 19061
  GFR-binding peptide
  MOD_RES (3)..(40)..(42): Xaa is C or S

SEQ ID NO: 22166 - protein, 39 aa, Artificial Sequence; identical to SEQ ID NO: 19062
  GFR-binding peptide
  MOD_RES (5)..(5): Xaa is C or S
  MOD_RES (21)..(22)..(23)..(24)..(25): Xaa is A or G
  MOD_RES (26)..(27)..(28)..(29): Xaa is A or G or is absent

SEQ ID NO: 22167 - protein, 41 aa, Artificial Sequence; identical to SEQ ID NO: 19063
  GFR-binding peptide
  MOD_RES (5)..(5): Xaa is C or S
  MOD_RES (21)..(22)..(23)..(24)..(25): Xaa is A or G
  MOD_RES (26)..(27)..(28)..(29): Xaa is A or G or is absent

SEQ ID NO: 22168 - protein, 37 aa, Artificial Sequence; identical to SEQ ID NO: 19064
  GFR-binding peptide
  MOD_RES (1)..(35)..(37): Xaa is C or S

SEQ ID NO: 22169 - protein, 39 aa, Artificial Sequence; identical to SEQ ID NO: 19065
  GFR-binding peptide
  MOD_RES (4)..(4): Xaa is C or S

SEQ ID NO: 22170 - protein, 45 aa, Artificial Sequence; identical to SEQ ID NO: 19066
  GFR-binding peptide
  MOD_RES (5)..(42)..(44): Xaa is C or S
  MOD_RES (21)..(22)..(23)..(24)..(25): Xaa is A or G
  MOD_RES (26)..(27)..(28)..(29): Xaa is A or G or is absent

SEQ ID NO: 22171 - protein, 38 aa, Artificial Sequence; identical to SEQ ID NO: 19067
  GFR-binding peptide
  MOD_RES (35)..(37): Xaa is C or S
  MOD_RES (14)..(15)..(16)..(17)..(18): Xaa is A or G
  MOD_RES (19)..(20)..(21)..(22): Xaa is A or G or is absent

SEQ ID NO: 22172 - protein, 42 aa, Artificial Sequence; identical to SEQ ID NO: 19068
  GFR-binding peptide
  MOD_RES (2)..(39)..(41): Xaa is C or S

SEQ ID NO: 22173 - protein, 44 aa, Artificial Sequence; identical to SEQ ID NO: 19069
  GFR-binding peptide
  MOD_RES (7)..(41)..(43): Xaa is C or S
  MOD_RES (21)..(22)..(23)..(24)..(25): Xaa is A or G
  MOD_RES (26)..(27)..(28)..(29): Xaa is A or G or is absent

SEQ ID NO: 22174 - protein, 42 aa, Artificial Sequence; identical to SEQ ID NO: 19070
  GFR-binding peptide
  MOD_RES (4)..(41): Xaa is C or S
  MOD_RES (20)..(21)..(22)..(23)..(24): Xaa is A or G
  MOD_RES (25)..(26)..(27)..(28): Xaa is A or G or is absent

SEQ ID NO: 22175 - protein, 42 aa, Artificial Sequence; identical to SEQ ID NO: 19071
  GFR-binding peptide
  MOD_RES (7)..(41): Xaa is C or S

SEQ ID NO: 22176 - protein, 37 aa, Artificial Sequence; identical to SEQ ID NO: 19072
  GFR-binding peptide
  MOD_RES (3)..(37): Xaa is C or S
  MOD_RES (17)..(18)..(19)..(20)..(21): Xaa is A or G
  MOD_RES (22)..(23)..(24)..(25): Xaa is A or G or is absent

SEQ ID NO: 22177 - protein, 37 aa, Artificial Sequence; identical to SEQ ID NO: 19073
  GFR-binding peptide
  MOD_RES (37)..(37): Xaa is C or S

SEQ ID NO: 22178 - protein, 37 aa, Artificial Sequence; identical to SEQ ID NO: 19074
  GFR-binding peptide
  MOD_RES (3)..(37): Xaa is C or S
  MOD_RES (17)..(18)..(19)..(20)..(21): Xaa is A or G
  MOD_RES (22)..(23)..(24)..(25): Xaa is A or G or is absent

SEQ ID NO: 22179 - protein, 38 aa, Artificial Sequence; identical to SEQ ID NO: 19075
  GFR-binding peptide
  MOD_RES (36)..(38): Xaa is C or S

SEQ ID NO: 22180 - protein, 38 aa, Artificial Sequence; identical to SEQ ID NO: 19076
  GFR-binding peptide
  MOD_RES (6)..(6): Xaa is C or S

SEQ ID NO: 22181 - protein, 39 aa, Artificial Sequence; identical to SEQ ID NO: 19077
  GFR-binding peptide
  MOD_RES (2)..(39): Xaa is C or S
  MOD_RES (18)..(19)..(20)..(21)..(22): Xaa is A or G
  MOD_RES (23)..(24)..(25)..(26): Xaa is A or G or is absent

SEQ ID NO: 22182 - protein, 40 aa, Artificial Sequence; identical to SEQ ID NO: 19078
  GFR-binding peptide
  MOD_RES (6)..(40): Xaa is C or S

SEQ ID NO: 22183 - protein, 39 aa, Artificial Sequence; identical to SEQ ID NO: 19079
  GFR-binding peptide
  MOD_RES (5)..(39): Xaa is C or S
  MOD_RES (19)..(20)..(21)..(22)..(23): Xaa is A or G
  MOD_RES (24)..(25)..(26)..(27): Xaa is A or G or is absent

SEQ ID NO: 22184 - protein, 42 aa, Artificial Sequence; identical to SEQ ID NO: 19080
  GFR-binding peptide
  MOD_RES (6)..(40)..(42): Xaa is C or S
  MOD_RES (20)..(21)..(22)..(23)..(24): Xaa is A or G
  MOD_RES (25)..(26)..(27)..(28): Xaa is A or G or is absent

SEQ ID NO: 22185 - protein, 39 aa, Artificial Sequence; identical to SEQ ID NO: 19081
  GFR-binding peptide
  MOD_RES (36)..(38): Xaa is C or S

SEQ ID NO: 22186 - protein, 39 aa, Artificial Sequence; identical to SEQ ID NO: 19082
  GFR-binding peptide
  MOD_RES (1)..(38): Xaa is C or S

SEQ ID NO: 22187 - protein, 37 aa, Artificial Sequence; identical to SEQ ID NO: 19083
  GFR-binding peptide
  MOD_RES (3)..(37): Xaa is C or S

SEQ ID NO: 22188 - protein, 43 aa, Artificial Sequence; identical to SEQ ID NO: 19084
  GFR-binding peptide
  MOD_RES (3)..(40)..(42): Xaa is C or S

SEQ ID NO: 22189 - protein, 37 aa, Artificial Sequence; identical to SEQ ID NO: 19085
  GFR-binding peptide
  MOD_RES (37)..(37): Xaa is C or S
  MOD_RES (16)..(17)..(18)..(19)..(20): Xaa is A or G
  MOD_RES (21)..(22)..(23)..(24): Xaa is A or G or is absent

SEQ ID NO: 22190 - protein, 33 aa, Artificial Sequence; identical to SEQ ID NO: 19086
  GFR-binding peptide
  MOD_RES (14)..(15)..(16)..(17)..(18): Xaa is A or G
  MOD_RES (19)..(20)..(21)..(22): Xaa is A or G or is absent

SEQ ID NO: 22191 - protein, 37 aa, Artificial Sequence; identical to SEQ ID NO: 19087
  GFR-binding peptide
  MOD_RES (5)..(5): Xaa is C or S
  MOD_RES (19)..(20)..(21)..(22)..(23): Xaa is A or G
  MOD_RES (24)..(25)..(26)..(27): Xaa is A or G or is absent

SEQ ID NO: 22192 - protein, 39 aa, Artificial Sequence; identical to SEQ ID NO: 19088
  GFR-binding peptide
  MOD_RES (5)..(39): Xaa is C or S

SEQ ID NO: 22193 - protein, 39 aa, Artificial Sequence; identical to SEQ ID NO: 19089
  GFR-binding peptide
  MOD_RES (4)..(4): Xaa is C or S

SEQ ID NO: 22194 - protein, 39 aa, Artificial Sequence; identical to SEQ ID NO: 19090
  GFR-binding peptide
  MOD_RES (2)..(39): Xaa is C or S
  MOD_RES (18)..(19)..(20)..(21)..(22): Xaa is A or G
  MOD_RES (23)..(24)..(25)..(26): Xaa is A or G or is absent

SEQ ID NO: 22195 - protein, 37 aa, Artificial Sequence; identical to SEQ ID NO: 19091
  GFR-binding peptide
  MOD_RES (3)..(37): Xaa is C or S
  MOD_RES (17)..(18)..(19)..(20)..(21): Xaa is A or G
  MOD_RES (22)..(23)..(24)..(25): Xaa is A or G or is absent

SEQ ID NO: 22196 - protein, 38 aa, Artificial Sequence; identical to SEQ ID NO: 19092
  GFR-binding peptide
  MOD_RES (2)..(36)..(38): Xaa is C or S

SEQ ID NO: 22197 - protein, 38 aa, Artificial Sequence; identical to SEQ ID NO: 19093
  GFR-binding peptide
  MOD_RES (37)..(37): Xaa is C or S

SEQ ID NO: 22198 - protein, 39 aa, Artificial Sequence; identical to SEQ ID NO: 19094
  GFR-binding peptide
  MOD_RES (4)..(38): Xaa is C or S

SEQ ID NO: 22199 - protein, 38 aa, Artificial Sequence; identical to SEQ ID NO: 19095
  GFR-binding peptide
  MOD_RES (35)..(37): Xaa is C or S

SEQ ID NO: 22200 - protein, 40 aa, Artificial Sequence; identical to SEQ ID NO: 19096
  GFR-binding peptide
  MOD_RES (3)..(40): Xaa is C or S

SEQ ID NO: 22201 - protein, 37 aa, Artificial Sequence; identical to SEQ ID NO: 19097
  GFR-binding peptide
  MOD_RES (1)..(35)..(37): Xaa is C or S

SEQ ID NO: 22202 - protein, 39 aa, Artificial Sequence; identical to SEQ ID NO: 19098
  GFR-binding peptide
  MOD_RES (6)..(6): Xaa is C or S

SEQ ID NO: 22203 - protein, 41 aa, Artificial Sequence; identical to SEQ ID NO: 19099
  GFR-binding peptide
  MOD_RES (6)..(40): Xaa is C or S
  MOD_RES (20)..(21)..(22)..(23)..(24): Xaa is A or G
  MOD_RES (25)..(26)..(27)..(28): Xaa is A or G or is absent

SEQ ID NO: 22204 - protein, 41 aa, Artificial Sequence; identical to SEQ ID NO: 19100
  GFR-binding peptide
  MOD_RES (3)..(40): Xaa is C or S

SEQ ID NO: 22205 - protein, 39 aa, Artificial Sequence; identical to SEQ ID NO: 19101
  GFR-binding peptide
  MOD_RES (3)..(37)..(39): Xaa is C or S
  MOD_RES (17)..(18)..(19)..(20)..(21): Xaa is A or G
  MOD_RES (22)..(23)..(24)..(25): Xaa is A or G or is absent

SEQ ID NO: 22206 - protein, 42 aa, Artificial Sequence; identical to SEQ ID NO: 19102
  GFR-binding peptide
  MOD_RES (5)..(42): Xaa is C or S
  MOD_RES (21)..(22)..(23)..(24)..(25): Xaa is A or G
  MOD_RES (26)..(27)..(28)..(29): Xaa is A or G or is absent

SEQ ID NO: 22207 - protein, 39 aa, Artificial Sequence; identical to SEQ ID NO: 19103
  GFR-binding peptide
  MOD_RES (37)..(39): Xaa is C or S

SEQ ID NO: 22208 - protein, 43 aa, Artificial Sequence; identical to SEQ ID NO: 19104
  GFR-binding peptide
  MOD_RES (4)..(41)..(43): Xaa is C or S

SEQ ID NO: 22209 - protein, 33 aa, Artificial Sequence; identical to SEQ ID NO: 19105
  GFR-binding peptide

SEQ ID NO: 22210 - protein, 39 aa, Artificial Sequence; identical to SEQ ID NO: 19106
  GFR-binding peptide
  MOD_RES (6)..(6): Xaa is C or S
  MOD_RES (20)..(21)..(22)..(23)..(24): Xaa is A or G
  MOD_RES (25)..(26)..(27)..(28): Xaa is A or G or is absent

SEQ ID NO: 22211 - protein, 44 aa, Artificial Sequence; identical to SEQ ID NO: 19107
  GFR-binding peptide
  MOD_RES (5)..(42)..(44): Xaa is C or S

SEQ ID NO: 22212 - protein, 44 aa, Artificial Sequence; identical to SEQ ID NO: 19108
  GFR-binding peptide
  MOD_RES (5)..(42)..(44): Xaa is C or S

SEQ ID NO: 22213 - protein, 38 aa, Artificial Sequence; identical to SEQ ID NO: 19109
  GFR-binding peptide
  MOD_RES (35)..(37): Xaa is C or S

SEQ ID NO: 22214 - protein, 38 aa, Artificial Sequence; identical to SEQ ID NO: 19110
  GFR-binding peptide
  MOD_RES (5)..(5): Xaa is C or S
  MOD_RES (19)..(20)..(21)..(22)..(23): Xaa is A or G
  MOD_RES (24)..(25)..(26)..(27): Xaa is A or G or is absent

SEQ ID NO: 22215 - protein, 35 aa, Artificial Sequence; identical to SEQ ID NO: 19111
  GFR-binding peptide
  MOD_RES (2)..(2): Xaa is C or S
  MOD_RES (16)..(17)..(18)..(19)..(20): Xaa is A or G
  MOD_RES (21)..(22)..(23)..(24): Xaa is A or G or is absent

SEQ ID NO: 22216 - protein, 32 aa, Artificial Sequence; identical to SEQ ID NO: 19112
  GFR-binding peptide
  MOD_RES (14)..(15)..(16)..(17)..(18): Xaa is A or G
  MOD_RES (19)..(20)..(21)..(22): Xaa is A or G or is absent

SEQ ID NO: 22217 - protein, 40 aa, Artificial Sequence; identical to SEQ ID NO: 19113
  GFR-binding peptide
  MOD_RES (6)..(40): Xaa is C or S
  MOD_RES (20)..(21)..(22)..(23)..(24): Xaa is A or G
  MOD_RES (25)..(26)..(27)..(28): Xaa is A or G or is absent

SEQ ID NO: 22218 - protein, 33 aa, Artificial Sequence; identical to SEQ ID NO: 19114
  GFR-binding peptide

SEQ ID NO: 22219 - protein, 35 aa, Artificial Sequence; identical to SEQ ID NO: 19115
  GFR-binding peptide
  MOD_RES (1)..(35): Xaa is C or S

SEQ ID NO: 22220 - protein, 40 aa, Artificial Sequence; identical to SEQ ID NO: 19116
  GFR-binding peptide
  MOD_RES (6)..(40): Xaa is C or S
  MOD_RES (20)..(21)..(22)..(23)..(24): Xaa is A or G
  MOD_RES (25)..(26)..(27)..(28): Xaa is A or G or is absent

SEQ ID NO: 22221 - protein, 39 aa, Artificial Sequence; identical to SEQ ID NO: 19117
  GFR-binding peptide
  MOD_RES (36)..(38): Xaa is C or S

SEQ ID NO: 22222 - protein, 43 aa, Artificial Sequence; identical to SEQ ID NO: 19118
  GFR-binding peptide
  MOD_RES (5)..(42): Xaa is C or S
  MOD_RES (21)..(22)..(23)..(24)..(25): Xaa is A or G
  MOD_RES (26)..(27)..(28)..(29): Xaa is A or G or is absent

SEQ ID NO: 22223 - protein, 37 aa, Artificial Sequence; identical to SEQ ID NO: 19119
  GFR-binding peptide
  MOD_RES (2)..(36): Xaa is C or S

SEQ ID NO: 22224 - protein, 36 aa, Artificial Sequence; identical to SEQ ID NO: 19120
  GFR-binding peptide
  MOD_RES (1)..(1): Xaa is C or S
  MOD_RES (17)..(18)..(19)..(20)..(21): Xaa is A or G
  MOD_RES (22)..(23)..(24)..(25): Xaa is A or G or is absent

SEQ ID NO: 22225 - protein, 33 aa, Artificial Sequence; identical to SEQ ID NO: 19121
  GFR-binding peptide
  MOD_RES (1)..(1): Xaa is C or S
  MOD_RES (15)..(16)..(17)..(18)..(19): Xaa is A or G
  MOD_RES (20)..(21)..(22)..(23): Xaa is A or G or is absent

SEQ ID NO: 22226 - protein, 34 aa, Artificial Sequence; identical to SEQ ID NO: 19122
  GFR-binding peptide
  MOD_RES (1)..(1): Xaa is C or S

SEQ ID NO: 22227 - protein, 33 aa, Artificial Sequence; identical to SEQ ID NO: 19123
  GFR-binding peptide
  MOD_RES (15)..(16)..(17)..(18)..(19): Xaa is A or G
  MOD_RES (20)..(21)..(22)..(23): Xaa is A or G or is absent

SEQ ID NO: 22228 - protein, 37 aa, Artificial Sequence; identical to SEQ ID NO: 19124
  GFR-binding peptide
  MOD_RES (1)..(1): Xaa is C or S
  MOD_RES (17)..(18)..(19)..(20)..(21): Xaa is A or G
  MOD_RES (22)..(23)..(24)..(25): Xaa is A or G or is absent

SEQ ID NO: 22229 - protein, 37 aa, Artificial Sequence; identical to SEQ ID NO: 19125
  GFR-binding peptide
  MOD_RES (5)..(5): Xaa is C or S

SEQ ID NO: 22230 - protein, 40 aa, Artificial Sequence; identical to SEQ ID NO: 19126
  GFR-binding peptide
  MOD_RES (3)..(37)..(39): Xaa is C or S
  MOD_RES (17)..(18)..(19)..(20)..(21): Xaa is A or G
  MOD_RES (22)..(23)..(24)..(25): Xaa is A or G or is absent

SEQ ID NO: 22231 - protein, 38 aa, Artificial Sequence; identical to SEQ ID NO: 19127
  GFR-binding peptide
  MOD_RES (35)..(37): Xaa is C or S

SEQ ID NO: 22232 - protein, 37 aa, Artificial Sequence; identical to SEQ ID NO: 19128
  GFR-binding peptide
  MOD_RES (35)..(37): Xaa is C or S
  MOD_RES (14)..(15)..(16)..(17)..(18): Xaa is A or G
  MOD_RES (19)..(20)..(21)..(22): Xaa is A or G or is absent

SEQ ID NO: 22233 - protein, 45 aa, Artificial Sequence; identical to SEQ ID NO: 19129
  GFR-binding peptide
  MOD_RES (5)..(42)..(44): Xaa is C or S
  MOD_RES (21)..(22)..(23)..(24)..(25): Xaa is A or G
  MOD_RES (26)..(27)..(28)..(29): Xaa is A or G or is absent

SEQ ID NO: 22234 - protein, 38 aa, Artificial Sequence; identical to SEQ ID NO: 19130
  GFR-binding peptide
  MOD_RES (2)..(36)..(38): Xaa is C or S

SEQ ID NO: 22235 - protein, 39 aa, Artificial Sequence; identical to SEQ ID NO: 19131
  GFR-binding peptide
  MOD_RES (3)..(3): Xaa is C or S

SEQ ID NO: 22236 - protein, 42 aa, Artificial Sequence; identical to SEQ ID NO: 19132
  GFR-binding peptide
  MOD_RES (4)..(41): Xaa is C or S
  MOD_RES (20)..(21)..(22)..(23)..(24): Xaa is A or G
  MOD_RES (25)..(26)..(27)..(28): Xaa is A or G or is absent

SEQ ID NO: 22237 - protein, 45 aa, Artificial Sequence; identical to SEQ ID NO: 19133
  GFR-binding peptide
  MOD_RES (5)..(42)..(44): Xaa is C or S
  MOD_RES (21)..(22)..(23)..(24)..(25): Xaa is A or G
  MOD_RES (26)..(27)..(28)..(29): Xaa is A or G or is absent

SEQ ID NO: 22238 - protein, 36 aa, Artificial Sequence; identical to SEQ ID NO: 19134
  GFR-binding peptide
  MOD_RES (4)..(4): Xaa is C or S

SEQ ID NO: 22239 - protein, 35 aa, Artificial Sequence; identical to SEQ ID NO: 19135
  GFR-binding peptide
  MOD_RES (34)..(34): Xaa is C or S
  MOD_RES (14)..(15)..(16)..(17)..(18): Xaa is A or G
  MOD_RES (19)..(20)..(21)..(22): Xaa is A or G or is absent

SEQ ID NO: 22240 - protein, 37 aa, Artificial Sequence; identical to SEQ ID NO: 19136
  GFR-binding peptide
  MOD_RES (1)..(35)..(37): Xaa is C or S

SEQ ID NO: 22241 - protein, 34 aa, Artificial Sequence; identical to SEQ ID NO: 19137
  GFR-binding peptide
  MOD_RES (15)..(16)..(17)..(18)..(19): Xaa is A or G
  MOD_RES (20)..(21)..(22)..(23): Xaa is A or G or is absent

SEQ ID NO: 22242 - protein, 39 aa, Artificial Sequence; identical to SEQ ID NO: 19138
  GFR-binding peptide
  MOD_RES (7)..(7): Xaa is C or S

SEQ ID NO: 22243 - protein, 36 aa, Artificial Sequence; identical to SEQ ID NO: 19139
  GFR-binding peptide
  MOD_RES (1)..(35): Xaa is C or S

SEQ ID NO: 22244 - protein, 41 aa, Artificial Sequence; identical to SEQ ID NO: 19140
  GFR-binding peptide
  MOD_RES (7)..(41): Xaa is C or S

SEQ ID NO: 22245 - protein, 36 aa, Artificial Sequence; identical to SEQ ID NO: 19141
  GFR-binding peptide
  MOD_RES (4)..(4): Xaa is C or S

SEQ ID NO: 22246 - protein, 41 aa, Artificial Sequence; identical to SEQ ID NO: 19142
  GFR-binding peptide
  MOD_RES (7)..(41): Xaa is C or S
  MOD_RES (21)..(22)..(23)..(24)..(25): Xaa is A or G
  MOD_RES (26)..(27)..(28)..(29): Xaa is A or G or is absent

SEQ ID NO: 22247 - protein, 35 aa, Artificial Sequence; identical to SEQ ID NO: 19143
  GFR-binding peptide
  MOD_RES (34)..(34): Xaa is C or S
  MOD_RES (14)..(15)..(16)..(17)..(18): Xaa is A or G
  MOD_RES (19)..(20)..(21)..(22): Xaa is A or G or is absent

SEQ ID NO: 22248 - protein, 36 aa, Artificial Sequence; identical to SEQ ID NO: 19144
  GFR-binding peptide
  MOD_RES (4)..(4): Xaa is C or S
  MOD_RES (18)..(19)..(20)..(21)..(22): Xaa is A or G
  MOD_RES (23)..(24)..(25)..(26): Xaa is A or G or is absent

SEQ ID NO: 22249 - protein, 42 aa, Artificial Sequence; identical to SEQ ID NO: 19145
  GFR-binding peptide
  MOD_RES (4)..(41): Xaa is C or S
  MOD_RES (20)..(21)..(22)..(23)..(24): Xaa is A or G
  MOD_RES (25)..(26)..(27)..(28): Xaa is A or G or is absent

SEQ ID NO: 22250 - protein, 41 aa, Artificial Sequence; identical to SEQ ID NO: 19146
  GFR-binding peptide
  MOD_RES (5)..(5): Xaa is C or S
  MOD_RES (21)..(22)..(23)..(24)..(25): Xaa is A or G
  MOD_RES (26)..(27)..(28)..(29): Xaa is A or G or is absent

SEQ ID NO: 22251 - protein, 40 aa, Artificial Sequence; identical to SEQ ID NO: 19147
  GFR-binding peptide
  MOD_RES (2)..(39): Xaa is C or S
  MOD_RES (18)..(19)..(20)..(21)..(22): Xaa is A or G
  MOD_RES (23)..(24)..(25)..(26): Xaa is A or G or is absent

SEQ ID NO: 22252 - protein, 43 aa, Artificial Sequence; identical to SEQ ID NO: 19148
  GFR-binding peptide
  MOD_RES (5)..(42): Xaa is C or S

SEQ ID NO: 22253 - protein, 37 aa, Artificial Sequence; identical to SEQ ID NO: 19149
  GFR-binding peptide
  MOD_RES (4)..(4): Xaa is C or S

SEQ ID NO: 22254 - protein, 37 aa, Artificial Sequence; identical to SEQ ID NO: 19150
  GFR-binding peptide
  MOD_RES (1)..(35)..(37): Xaa is C or S

SEQ ID NO: 22255 - protein, 38 aa, Artificial Sequence; identical to SEQ ID NO: 19151
  GFR-binding peptide
  MOD_RES (37)..(37): Xaa is C or S

SEQ ID NO: 22256 - protein, 41 aa, Artificial Sequence; identical to SEQ ID NO: 19152
  GFR-binding peptide
  MOD_RES (1)..(38)..(40): Xaa is C or S

SEQ ID NO: 22257 - protein, 37 aa, Artificial Sequence; identical to SEQ ID NO: 19153
  GFR-binding peptide
  MOD_RES (34)..(36): Xaa is C or S

SEQ ID NO: 22258 - protein, 39 aa, Artificial Sequence; identical to SEQ ID NO: 19154
  GFR-binding peptide
  MOD_RES (36)..(38): Xaa is C or S

SEQ ID NO: 22259 - protein, 35 aa, Artificial Sequence; identical to SEQ ID NO: 19155
  GFR-binding peptide
  MOD_RES (1)..(35): Xaa is C or S
  MOD_RES (15)..(16)..(17)..(18)..(19): Xaa is A or G
  MOD_RES (20)..(21)..(22)..(23): Xaa is A or G or is absent

SEQ ID NO: 22260 - protein, 44 aa, Artificial Sequence; identical to SEQ ID NO: 19156
  GFR-binding peptide
  MOD_RES (7)..(41)..(43): Xaa is C or S

SEQ ID NO: 22261 - protein, 41 aa, Artificial Sequence; identical to SEQ ID NO: 19157
  GFR-binding peptide
  MOD_RES (4)..(38)..(40): Xaa is C or S

SEQ ID NO: 22262 - protein, 39 aa, Artificial Sequence; identical to SEQ ID NO: 19158
  GFR-binding peptide
  MOD_RES (2)..(36)..(38): Xaa is C or S
  MOD_RES (16)..(17)..(18)..(19)..(20): Xaa is A or G
  MOD_RES (21)..(22)..(23)..(24): Xaa is A or G or is absent

SEQ ID NO: 22263 - protein, 36 aa, Artificial Sequence; identical to SEQ ID NO: 19159
  GFR-binding peptide
  MOD_RES (35)..(35): Xaa is C or S
  MOD_RES (14)..(15)..(16)..(17)..(18): Xaa is A or G
  MOD_RES (19)..(20)..(21)..(22): Xaa is A or G or is absent

SEQ ID NO: 22264 - protein, 41 aa, Artificial Sequence; identical to SEQ ID NO: 19160
  GFR-binding peptide
  MOD_RES (3)..(40): Xaa is C or S
  MOD_RES (19)..(20)..(21)..(22)..(23): Xaa is A or G
  MOD_RES (24)..(25)..(26)..(27): Xaa is A or G or is absent

SEQ ID NO: 22265 - protein, 38 aa, Artificial Sequence; identical to SEQ ID NO: 19161
  GFR-binding peptide
  MOD_RES (3)..(37): Xaa is C or S
  MOD_RES (17)..(18)..(19)..(20)..(21): Xaa is A or G
  MOD_RES (22)..(23)..(24)..(25): Xaa is A or G or is absent

SEQ ID NO: 22266 - protein, 35 aa, Artificial Sequence; identical to SEQ ID NO: 19162
  GFR-binding peptide
  MOD_RES (1)..(35): Xaa is C or S

SEQ ID NO: 22267 - protein, 37 aa, Artificial Sequence; identical to SEQ ID NO: 19163
  GFR-binding peptide
  MOD_RES (37)..(37): Xaa is C or S

SEQ ID NO: 22268 - protein, 44 aa, Artificial Sequence; identical to SEQ ID NO: 19164
  GFR-binding peptide
  MOD_RES (5)..(42)..(44): Xaa is C or S
  MOD_RES (21)..(22)..(23)..(24)..(25): Xaa is A or G
  MOD_RES (26)..(27)..(28)..(29): Xaa is A or G or is absent

SEQ ID NO: 22269 - protein, 40 aa, Artificial Sequence; identical to SEQ ID NO: 19165
  GFR-binding peptide
  MOD_RES (3)..(40): Xaa is C or S
  MOD_RES (19)..(20)..(21)..(22)..(23): Xaa is A or G
  MOD_RES (24)..(25)..(26)..(27): Xaa is A or G or is absent

SEQ ID NO: 22270 - protein, 40 aa, Artificial Sequence; identical to SEQ ID NO: 19166
  GFR-binding peptide
  MOD_RES (1)..(38)..(40): Xaa is C or S

SEQ ID NO: 22271 - protein, 37 aa, Artificial Sequence; identical to SEQ ID NO: 19167
  GFR-binding peptide
  MOD_RES (3)..(3): Xaa is C or S
  MOD_RES (19)..(20)..(21)..(22)..(23): Xaa is A or G
  MOD_RES (24)..(25)..(26)..(27): Xaa is A or G or is absent

SEQ ID NO: 22272 - protein, 36 aa, Artificial Sequence; identical to SEQ ID NO: 19168
  GFR-binding peptide
  MOD_RES (3)..(3): Xaa is C or S
  MOD_RES (17)..(18)..(19)..(20)..(21): Xaa is A or G
  MOD_RES (22)..(23)..(24)..(25): Xaa is A or G or is absent

SEQ ID NO: 22273 - protein, 33 aa, Artificial Sequence; identical to SEQ ID NO: 19169
  GFR-binding peptide
  MOD_RES (1)..(1): Xaa is C or S
  MOD_RES (15)..(16)..(17)..(18)..(19): Xaa is A or G
  MOD_RES (20)..(21)..(22)..(23): Xaa is A or G or is absent

SEQ ID NO: 22274 - protein, 45 aa, Artificial Sequence; identical to SEQ ID NO: 19170
  GFR-binding peptide
  MOD_RES (5)..(42)..(44): Xaa is C or S
  MOD_RES (21)..(22)..(23)..(24)..(25): Xaa is A or G
  MOD_RES (26)..(27)..(28)..(29): Xaa is A or G or is absent

SEQ ID NO: 22275 - protein, 44 aa, Artificial Sequence; identical to SEQ ID NO: 19171
  GFR-binding peptide
  MOD_RES (5)..(42)..(44): Xaa is C or S
  MOD_RES (21)..(22)..(23)..(24)..(25): Xaa is A or G
  MOD_RES (26)..(27)..(28)..(29): Xaa is A or G or is absent

SEQ ID NO: 22276 - protein, 37 aa, Artificial Sequence; identical to SEQ ID NO: 19172
  GFR-binding peptide
  MOD_RES (4)..(4): Xaa is C or S
  MOD_RES (18)..(19)..(20)..(21)..(22): Xaa is A or G
  MOD_RES (23)..(24)..(25)..(26): Xaa is A or G or is absent

SEQ ID NO: 22277 - protein, 38 aa, Artificial Sequence; identical to SEQ ID NO: 19173
  GFR-binding peptide
  MOD_RES (37)..(37): Xaa is C or S
  MOD_RES (16)..(17)..(18)..(19)..(20): Xaa is A or G
  MOD_RES (21)..(22)..(23)..(24): Xaa is A or G or is absent

SEQ ID NO: 22278 - protein, 37 aa, Artificial Sequence; identical to SEQ ID NO: 19174
  GFR-binding peptide
  MOD_RES (2)..(2): Xaa is C or S
  MOD_RES (18)..(19)..(20)..(21)..(22): Xaa is A or G
  MOD_RES (23)..(24)..(25)..(26): Xaa is A or G or is absent

SEQ ID NO: 22279 - protein, 39 aa, Artificial Sequence; identical to SEQ ID NO: 19175
  GFR-binding peptide
  MOD_RES (37)..(39): Xaa is C or S

SEQ ID NO: 22280 - protein, 38 aa, Artificial Sequence; identical to SEQ ID NO: 19176
  GFR-binding peptide
  MOD_RES (2)..(2): Xaa is C or S
  MOD_RES (18)..(19)..(20)..(21)..(22): Xaa is A or G
  MOD_RES (23)..(24)..(25)..(26): Xaa is A or G or is absent

SEQ ID NO: 22281 - protein, 38 aa, Artificial Sequence; identical to SEQ ID NO: 19177
  GFR-binding peptide
  MOD_RES (4)..(4): Xaa is C or S

SEQ ID NO: 22282 - protein, 38 aa, Artificial Sequence; identical to SEQ ID NO: 19178
  GFR-binding peptide
  MOD_RES (4)..(38): Xaa is C or S
  MOD_RES (18)..(19)..(20)..(21)..(22): Xaa is A or G
  MOD_RES (23)..(24)..(25)..(26): Xaa is A or G or is absent

SEQ ID NO: 22283 - protein, 37 aa, Artificial Sequence; identical to SEQ ID NO: 19179
  GFR-binding peptide
  MOD_RES (5)..(5): Xaa is C or S

SEQ ID NO: 22284 - protein, 40 aa, Artificial Sequence; identical to SEQ ID NO: 19180
  GFR-binding peptide
  MOD_RES (3)..(37)..(39): Xaa is C or S

SEQ ID NO: 22285 - protein, 38 aa, Artificial Sequence; identical to SEQ ID NO: 19181
  GFR-binding peptide
  MOD_RES (37)..(37): Xaa is C or S
  MOD_RES (16)..(17)..(18)..(19)..(20): Xaa is A or G
  MOD_RES (21)..(22)..(23)..(24): Xaa is A or G or is absent

SEQ ID NO: 22286 - protein, 35 aa, Artificial Sequence; identical to SEQ ID NO: 19182
  GFR-binding peptide
  MOD_RES (35)..(35): Xaa is C or S
  MOD_RES (14)..(15)..(16)..(17)..(18): Xaa is A or G
  MOD_RES (19)..(20)..(21)..(22): Xaa is A or G or is absent

SEQ ID NO: 22287 - protein, 41 aa, Artificial Sequence; identical to SEQ ID NO: 19183
  GFR-binding peptide
  MOD_RES (4)..(41): Xaa is C or S
  MOD_RES (20)..(21)..(22)..(23)..(24): Xaa is A or G
  MOD_RES (25)..(26)..(27)..(28): Xaa is A or G or is absent

SEQ ID NO: 22288 - protein, 36 aa, Artificial Sequence; identical to SEQ ID NO: 19184
  GFR-binding peptide
  MOD_RES (36)..(36): Xaa is C or S

SEQ ID NO: 22289 - protein, 40 aa, Artificial Sequence; identical to SEQ ID NO: 19185
  GFR-binding peptide
  MOD_RES (5)..(39): Xaa is C or S
  MOD_RES (19)..(20)..(21)..(22)..(23): Xaa is A or G
  MOD_RES (24)..(25)..(26)..(27): Xaa is A or G or is absent

SEQ ID NO: 22290 - protein, 39 aa, Artificial Sequence; identical to SEQ ID NO: 19186
  GFR-binding peptide
  MOD_RES (36)..(38): Xaa is C or S

SEQ ID NO: 22291 - protein, 41 aa, Artificial Sequence; identical to SEQ ID NO: 19187
  GFR-binding peptide
  MOD_RES (5)..(5): Xaa is C or S

SEQ ID NO: 22292 - protein, 42 aa, Artificial Sequence; identical to SEQ ID NO: 19188
  GFR-binding peptide
  MOD_RES (5)..(39)..(41): Xaa is C or S

SEQ ID NO: 22293 - protein, 39 aa, Artificial Sequence; identical to SEQ ID NO: 19189
  GFR-binding peptide
  MOD_RES (2)..(39): Xaa is C or S

SEQ ID NO: 22294 - protein, 36 aa, Artificial Sequence; identical to SEQ ID NO: 19190
  GFR-binding peptide
  MOD_RES (35)..(35): Xaa is C or S
  MOD_RES (14)..(15)..(16)..(17)..(18): Xaa is A or G
  MOD_RES (19)..(20)..(21)..(22): Xaa is A or G or is absent

SEQ ID NO: 22295 - protein, 36 aa, Artificial Sequence; identical to SEQ ID NO: 19191
  GFR-binding peptide
  MOD_RES (35)..(35): Xaa is C or S

SEQ ID NO: 22296 - protein, 32 aa, Artificial Sequence; identical to SEQ ID NO: 19192
  GFR-binding peptide
  MOD_RES (14)..(15)..(16)..(17)..(18): Xaa is A or G
  MOD_RES (19)..(20)..(21)..(22): Xaa is A or G or is absent

SEQ ID NO: 22297 - protein, 39 aa, Artificial Sequence; identical to SEQ ID NO: 19193
  GFR-binding peptide
  MOD_RES (1)..(38): Xaa is C or S
  MOD_RES (17)..(18)..(19)..(20)..(21): Xaa is A or G
  MOD_RES (22)..(23)..(24)..(25): Xaa is A or G or is absent

SEQ ID NO: 22298 - protein, 43 aa, Artificial Sequence; identical to SEQ ID NO: 19194
  GFR-binding peptide
  MOD_RES (7)..(41)..(43): Xaa is C or S

SEQ ID NO: 22299 - protein, 38 aa, Artificial Sequence; identical to SEQ ID NO: 19195
  GFR-binding peptide
  MOD_RES (4)..(4): Xaa is C or S

SEQ ID NO: 22300 - protein, 40 aa, Artificial Sequence; identical to SEQ ID NO: 19196
  GFR-binding peptide
  MOD_RES (5)..(5): Xaa is C or S
  MOD_RES (21)..(22)..(23)..(24)..(25): Xaa is A or G
  MOD_RES (26)..(27)..(28)..(29): Xaa is A or G or is absent

SEQ ID NO: 22301 - protein, 32 aa, Artificial Sequence; identical to SEQ ID NO: 19197
  GFR-binding peptide

SEQ ID NO: 22302 - protein, 40 aa, Artificial Sequence; identical to SEQ ID NO: 19198
  GFR-binding peptide
  MOD_RES (5)..(39): Xaa is C or S
  MOD_RES (19)..(20)..(21)..(22)..(23): Xaa is A or G
  MOD_RES (24)..(25)..(26)..(27): Xaa is A or G or is absent

SEQ ID NO: 22303 - protein, 39 aa, Artificial Sequence; identical to SEQ ID NO: 19199
  GFR-binding peptide
  MOD_RES (7)..(7): Xaa is C or S

SEQ ID NO: 22304 - protein, 42 aa, Artificial Sequence; identical to SEQ ID NO: 19200
  GFR-binding peptide
  MOD_RES (5)..(39)..(41): Xaa is C or S
  MOD_RES (19)..(20)..(21)..(22)..(23): Xaa is A or G
  MOD_RES (24)..(25)..(26)..(27): Xaa is A or G or is absent

SEQ ID NO: 22305 - protein, 37 aa, Artificial Sequence; identical to SEQ ID NO: 19201
  GFR-binding peptide
  MOD_RES (2)..(36): Xaa is C or S

SEQ ID NO: 22306 - protein, 37 aa, Artificial Sequence; identical to SEQ ID NO: 19202
  GFR-binding peptide
  MOD_RES (2)..(2): Xaa is C or S
  MOD_RES (18)..(19)..(20)..(21)..(22): Xaa is A or G
  MOD_RES (23)..(24)..(25)..(26): Xaa is A or G or is absent

SEQ ID NO: 22307 - protein, 36 aa, Artificial Sequence; identical to SEQ ID NO: 19203
  GFR-binding peptide
  MOD_RES (4)..(4): Xaa is C or S
  MOD_RES (18)..(19)..(20)..(21)..(22): Xaa is A or G
  MOD_RES (23)..(24)..(25)..(26): Xaa is A or G or is absent

SEQ ID NO: 22308 - protein, 40 aa, Artificial Sequence; identical to SEQ ID NO: 19204
  GFR-binding peptide
  MOD_RES (5)..(5): Xaa is C or S
  MOD_RES (21)..(22)..(23)..(24)..(25): Xaa is A or G
  MOD_RES (26)..(27)..(28)..(29): Xaa is A or G or is absent

SEQ ID NO: 22309 - protein, 40 aa, Artificial Sequence; identical to SEQ ID NO: 19205
  GFR-binding peptide
  MOD_RES (4)..(4): Xaa is C or S
  MOD_RES (20)..(21)..(22)..(23)..(24): Xaa is A or G
  MOD_RES (25)..(26)..(27)..(28): Xaa is A or G or is absent

SEQ ID NO: 22310 - protein, 36 aa, Artificial Sequence; identical to SEQ ID NO: 19206
  GFR-binding peptide
  MOD_RES (36)..(36): Xaa is C or S
  MOD_RES (15)..(16)..(17)..(18)..(19): Xaa is A or G
  MOD_RES (20)..(21)..(22)..(23): Xaa is A or G or is absent

SEQ ID NO: 22311 - protein, 41 aa, Artificial Sequence; identical to SEQ ID NO: 19207
  GFR-binding peptide
  MOD_RES (2)..(39)..(41): Xaa is C or S

SEQ ID NO: 22312 - protein, 39 aa, Artificial Sequence; identical to SEQ ID NO: 19208
  GFR-binding peptide
  MOD_RES (2)..(39): Xaa is C or S
  MOD_RES (18)..(19)..(20)..(21)..(22): Xaa is A or G
  MOD_RES (23)..(24)..(25)..(26): Xaa is A or G or is absent

SEQ ID NO: 22313 - protein, 38 aa, Artificial Sequence; identical to SEQ ID NO: 19209
  GFR-binding peptide
  MOD_RES (3)..(37): Xaa is C or S
  MOD_RES (17)..(18)..(19)..(20)..(21): Xaa is A or G
  MOD_RES (22)..(23)..(24)..(25): Xaa is A or G or is absent

SEQ ID NO: 22314 - protein, 41 aa, Artificial Sequence; identical to SEQ ID NO: 19210
  GFR-binding peptide
  MOD_RES (7)..(41): Xaa is C or S

SEQ ID NO: 22315 - protein, 38 aa, Artificial Sequence; identical to SEQ ID NO: 19211
  GFR-binding peptide
  MOD_RES (35)..(37): Xaa is C or S

SEQ ID NO: 22316 - protein, 41 aa, Artificial Sequence; identical to SEQ ID NO: 19212
  GFR-binding peptide
  MOD_RES (6)..(40): Xaa is C or S
  MOD_RES (20)..(21)..(22)..(23)..(24): Xaa is A or G
  MOD_RES (25)..(26)..(27)..(28): Xaa is A or G or is absent

SEQ ID NO: 22317 - protein, 39 aa, Artificial Sequence; identical to SEQ ID NO: 19213
  GFR-binding peptide
  MOD_RES (5)..(39): Xaa is C or S
  MOD_RES (19)..(20)..(21)..(22)..(23): Xaa is A or G
  MOD_RES (24)..(25)..(26)..(27): Xaa is A or G or is absent

SEQ ID NO: 22318 - protein, 37 aa, Artificial Sequence; identical to SEQ ID NO: 19214
  GFR-binding peptide
  MOD_RES (3)..(3): Xaa is C or S
  MOD_RES (19)..(20)..(21)..(22)..(23): Xaa is A or G
  MOD_RES (24)..(25)..(26)..(27): Xaa is A or G or is absent

SEQ ID NO: 22319 - protein, 43 aa, Artificial Sequence; identical to SEQ ID NO: 19215
  GFR-binding peptide
  MOD_RES (5)..(42): Xaa is C or S
  MOD_RES (21)..(22)..(23)..(24)..(25): Xaa is A or G
  MOD_RES (26)..(27)..(28)..(29): Xaa is A or G or is absent

SEQ ID NO: 22320 - protein, 37 aa, Artificial Sequence; identical to SEQ ID NO: 19216
  GFR-binding peptide
  MOD_RES (35)..(37): Xaa is C or S

SEQ ID NO: 22321 - protein, 37 aa, Artificial Sequence; identical to SEQ ID NO: 19217
  GFR-binding peptide
  MOD_RES (5)..(5): Xaa is C or S

SEQ ID NO: 22322 - protein, 34 aa, Artificial Sequence; identical to SEQ ID NO: 19218
  GFR-binding peptide
  MOD_RES (14)..(15)..(16)..(17)..(18): Xaa is A or G
  MOD_RES (19)..(20)..(21)..(22): Xaa is A or G or is absent

SEQ ID NO: 22323 - protein, 38 aa, Artificial Sequence; identical to SEQ ID NO: 19219
  GFR-binding peptide
  MOD_RES (37)..(37): Xaa is C or S
  MOD_RES (16)..(17)..(18)..(19)..(20): Xaa is A or G
  MOD_RES (21)..(22)..(23)..(24): Xaa is A or G or is absent

SEQ ID NO: 22324 - protein, 41 aa, Artificial Sequence; identical to SEQ ID NO: 19220
  GFR-binding peptide
  MOD_RES (7)..(41): Xaa is C or S

SEQ ID NO: 22325 - protein, 41 aa, Artificial Sequence; identical to SEQ ID NO: 19221
  GFR-binding peptide
  MOD_RES (1)..(38)..(40): Xaa is C or S
  MOD_RES (17)..(18)..(19)..(20)..(21): Xaa is A or G
  MOD_RES (22)..(23)..(24)..(25): Xaa is A or G or is absent

SEQ ID NO: 22326 - protein, 43 aa, Artificial Sequence; identical to SEQ ID NO: 19222
  GFR-binding peptide
  MOD_RES (6)..(40)..(42): Xaa is C or S

SEQ ID NO: 22327 - protein, 36 aa, Artificial Sequence; identical to SEQ ID NO: 19223
  GFR-binding peptide
  MOD_RES (35)..(35): Xaa is C or S

SEQ ID NO: 22328 - protein, 36 aa, Artificial Sequence; identical to SEQ ID NO: 19224
  GFR-binding peptide
  MOD_RES (3)..(3): Xaa is C or S

SEQ ID NO: 22329 - protein, 33 aa, Artificial Sequence; identical to SEQ ID NO: 19225
  GFR-binding peptide
  MOD_RES (1)..(1): Xaa is C or S

SEQ ID NO: 22330 - protein, 39 aa, Artificial Sequence; identical to SEQ ID NO: 19226
  GFR-binding peptide
  MOD_RES (4)..(4): Xaa is C or S
  MOD_RES (20)..(21)..(22)..(23)..(24): Xaa is A or G
  MOD_RES (25)..(26)..(27)..(28): Xaa is A or G or is absent

SEQ ID NO: 22331 - protein, 39 aa, Artificial Sequence; identical to SEQ ID NO: 19227
  GFR-binding peptide
  MOD_RES (37)..(39): Xaa is C or S
  MOD_RES (16)..(17)..(18)..(19)..(20): Xaa is A or G
  MOD_RES (21)..(22)..(23)..(24): Xaa is A or G or is absent

SEQ ID NO: 22332 - protein, 32 aa, Artificial Sequence; identical to SEQ ID NO: 19228
  GFR-binding peptide

SEQ ID NO: 22333 - protein, 45 aa, Artificial Sequence; identical to SEQ ID NO: 19229
  GFR-binding peptide
  MOD_RES (5)..(42)..(44): Xaa is C or S
  MOD_RES (21)..(22)..(23)..(24)..(25): Xaa is A or G
  MOD_RES (26)..(27)..(28)..(29): Xaa is A or G or is absent

SEQ ID NO: 22334 - protein, 41 aa, Artificial Sequence; identical to SEQ ID NO: 19230
  GFR-binding peptide
  MOD_RES (2)..(39)..(41): Xaa is C or S
  MOD_RES (18)..(19)..(20)..(21)..(22): Xaa is A or G
  MOD_RES (23)..(24)..(25)..(26): Xaa is A or G or is absent

SEQ ID NO: 22335 - protein, 35 aa, Artificial Sequence; identical to SEQ ID NO: 19231
  GFR-binding peptide
  MOD_RES (15)..(16)..(17)..(18)..(19): Xaa is A or G
  MOD_RES (20)..(21)..(22)..(23): Xaa is A or G or is absent

SEQ ID NO: 22336 - protein, 38 aa, Artificial Sequence; identical to SEQ ID NO: 19232
  GFR-binding peptide
  MOD_RES (2)..(2): Xaa is C or S

SEQ ID NO: 22337 - protein, 39 aa, Artificial Sequence; identical to SEQ ID NO: 19233
  GFR-binding peptide
  MOD_RES (4)..(38): Xaa is C or S
  MOD_RES (18)..(19)..(20)..(21)..(22): Xaa is A or G
  MOD_RES (23)..(24)..(25)..(26): Xaa is A or G or is absent

SEQ ID NO: 22338 - protein, 39 aa, Artificial Sequence; identical to SEQ ID NO: 19234
  GFR-binding peptide
  MOD_RES (5)..(39): Xaa is C or S

SEQ ID NO: 22339 - protein, 33 aa, Artificial Sequence; identical to SEQ ID NO: 19235
  GFR-binding peptide
  MOD_RES (1)..(1): Xaa is C or S

SEQ ID NO: 22340 - protein, 33 aa, Artificial Sequence; identical to SEQ ID NO: 19236
  GFR-binding peptide
  MOD_RES (1)..(1): Xaa is C or S
  MOD_RES (15)..(16)..(17)..(18)..(19): Xaa is A or G
  MOD_RES (20)..(21)..(22)..(23): Xaa is A or G or is absent

SEQ ID NO: 22341 - protein, 41 aa, Artificial Sequence; identical to SEQ ID NO: 19237
  GFR-binding peptide
  MOD_RES (7)..(41): Xaa is C or S
  MOD_RES (21)..(22)..(23)..(24)..(25): Xaa is A or G
  MOD_RES (26)..(27)..(28)..(29): Xaa is A or G or is absent

SEQ ID NO: 22342 - protein, 32 aa, Artificial Sequence; identical to SEQ ID NO: 19238
  GFR-binding peptide
  MOD_RES (14)..(15)..(16)..(17)..(18): Xaa is A or G
  MOD_RES (19)..(20)..(21)..(22): Xaa is A or G or is absent

SEQ ID NO: 22343 - protein, 43 aa, Artificial Sequence; identical to SEQ ID NO: 19239
  GFR-binding peptide
  MOD_RES (3)..(40)..(42): Xaa is C or S
  MOD_RES (19)..(20)..(21)..(22)..(23): Xaa is A or G
  MOD_RES (24)..(25)..(26)..(27): Xaa is A or G or is absent

SEQ ID NO: 22344 - protein, 42 aa, Artificial Sequence; identical to SEQ ID NO: 19240
  GFR-binding peptide
  MOD_RES (5)..(39)..(41): Xaa is C or S
  MOD_RES (19)..(20)..(21)..(22)..(23): Xaa is A or G
  MOD_RES (24)..(25)..(26)..(27): Xaa is A or G or is absent

SEQ ID NO: 22345 - protein, 39 aa, Artificial Sequence; identical to SEQ ID NO: 19241
  GFR-binding peptide
  MOD_RES (5)..(5): Xaa is C or S
  MOD_RES (21)..(22)..(23)..(24)..(25): Xaa is A or G
  MOD_RES (26)..(27)..(28)..(29): Xaa is A or G or is absent

SEQ ID NO: 22346 - protein, 37 aa, Artificial Sequence; identical to SEQ ID NO: 19242
  GFR-binding peptide
  MOD_RES (35)..(37): Xaa is C or S

SEQ ID NO: 22347 - protein, 35 aa, Artificial Sequence; identical to SEQ ID NO: 19243
  GFR-binding peptide
  MOD_RES (34)..(34): Xaa is C or S

SEQ ID NO: 22348 - protein, 36 aa, Artificial Sequence; identical to SEQ ID NO: 19244
  GFR-binding peptide
  MOD_RES (35)..(35): Xaa is C or S
  MOD_RES (14)..(15)..(16)..(17)..(18): Xaa is A or G
  MOD_RES (19)..(20)..(21)..(22): Xaa is A or G or is absent

SEQ ID NO: 22349 - protein, 35 aa, Artificial Sequence; identical to SEQ ID NO: 19245
  GFR-binding peptide
  MOD_RES (1)..(1): Xaa is C or S
  MOD_RES (17)..(18)..(19)..(20)..(21): Xaa is A or G
  MOD_RES (22)..(23)..(24)..(25): Xaa is A or G or is absent

SEQ ID NO: 22350 - protein, 42 aa, Artificial Sequence; identical to SEQ ID NO: 19246
  GFR-binding peptide
  MOD_RES (5)..(39)..(41): Xaa is C or S
  MOD_RES (19)..(20)..(21)..(22)..(23): Xaa is A or G
  MOD_RES (24)..(25)..(26)..(27): Xaa is A or G or is absent

SEQ ID NO: 22351 - protein, 35 aa, Artificial Sequence; identical to SEQ ID NO: 19247
  GFR-binding peptide
  MOD_RES (1)..(1): Xaa is C or S
  MOD_RES (17)..(18)..(19)..(20)..(21): Xaa is A or G
  MOD_RES (22)..(23)..(24)..(25): Xaa is A or G or is absent

SEQ ID NO: 22352 - protein, 32 aa, Artificial Sequence; identical to SEQ ID NO: 19248
  GFR-binding peptide

SEQ ID NO: 22353 - protein, 38 aa, Artificial Sequence; identical to SEQ ID NO: 19249
  GFR-binding peptide
  MOD_RES (4)..(38): Xaa is C or S
  MOD_RES (18)..(19)..(20)..(21)..(22): Xaa is A or G
  MOD_RES (23)..(24)..(25)..(26): Xaa is A or G or is absent

SEQ ID NO: 22354 - protein, 38 aa, Artificial Sequence; identical to SEQ ID NO: 19250
  GFR-binding peptide
  MOD_RES (2)..(36)..(38): Xaa is C or S

SEQ ID NO: 22355 - protein, 41 aa, Artificial Sequence; identical to SEQ ID NO: 19251
  GFR-binding peptide
  MOD_RES (1)..(38)..(40): Xaa is C or S

SEQ ID NO: 22356 - protein, 42 aa, Artificial Sequence; identical to SEQ ID NO: 19252
  GFR-binding peptide
  MOD_RES (6)..(40)..(42): Xaa is C or S

SEQ ID NO: 22357 - protein, 32 aa, Artificial Sequence; identical to SEQ ID NO: 19253
  GFR-binding peptide
  MOD_RES (14)..(15)..(16)..(17)..(18): Xaa is A or G
  MOD_RES (19)..(20)..(21)..(22): Xaa is A or G or is absent

SEQ ID NO: 22358 - protein, 33 aa, Artificial Sequence; identical to SEQ ID NO: 19254
  GFR-binding peptide

SEQ ID NO: 22359 - protein, 42 aa, Artificial Sequence; identical to SEQ ID NO: 19255
  GFR-binding peptide
  MOD_RES (2)..(39)..(41): Xaa is C or S

SEQ ID NO: 22360 - protein, 45 aa, Artificial Sequence; identical to SEQ ID NO: 19256
  GFR-binding peptide
  MOD_RES (5)..(42)..(44): Xaa is C or S
  MOD_RES (21)..(22)..(23)..(24)..(25): Xaa is A or G
  MOD_RES (26)..(27)..(28)..(29): Xaa is A or G or is absent

SEQ ID NO: 22361 - protein, 32 aa, Artificial Sequence; identical to SEQ ID NO: 19257
  GFR-binding peptide

SEQ ID NO: 22362 - protein, 39 aa, Artificial Sequence; identical to SEQ ID NO: 19258
  GFR-binding peptide
  MOD_RES (6)..(6): Xaa is C or S

SEQ ID NO: 22363 - protein, 39 aa, Artificial Sequence; identical to SEQ ID NO: 19259
  GFR-binding peptide
  MOD_RES (3)..(3): Xaa is C or S
  MOD_RES (19)..(20)..(21)..(22)..(23): Xaa is A or G
  MOD_RES (24)..(25)..(26)..(27): Xaa is A or G or is absent

SEQ ID NO: 22364 - protein, 32 aa, Artificial Sequence; identical to SEQ ID NO: 19260
  GFR-binding peptide

SEQ ID NO: 22365 - protein, 37 aa, Artificial Sequence; identical to SEQ ID NO: 19261
  GFR-binding peptide
  MOD_RES (1)..(1): Xaa is C or S
  MOD_RES (17)..(18)..(19)..(20)..(21): Xaa is A or G
  MOD_RES (22)..(23)..(24)..(25): Xaa is A or G or is absent

SEQ ID NO: 22366 - protein, 35 aa, Artificial Sequence; identical to SEQ ID NO: 19262
  GFR-binding peptide

SEQ ID NO: 22367 - protein, 40 aa, Artificial Sequence; identical to SEQ ID NO: 19263
  GFR-binding peptide
  MOD_RES (2)..(39): Xaa is C or S
  MOD_RES (18)..(19)..(20)..(21)..(22): Xaa is A or G
  MOD_RES (23)..(24)..(25)..(26): Xaa is A or G or is absent

SEQ ID NO: 22368 - protein, 37 aa, Artificial Sequence; identical to SEQ ID NO: 19264
  GFR-binding peptide
  MOD_RES (34)..(36): Xaa is C or S
  MOD_RES (14)..(15)..(16)..(17)..(18): Xaa is A or G
  MOD_RES (19)..(20)..(21)..(22): Xaa is A or G or is absent

SEQ ID NO: 22369 - protein, 41 aa, Artificial Sequence; identical to SEQ ID NO: 19265
  GFR-binding peptide
  MOD_RES (1)..(38)..(40): Xaa is C or S
  MOD_RES (17)..(18)..(19)..(20)..(21): Xaa is A or G
  MOD_RES (22)..(23)..(24)..(25): Xaa is A or G or is absent

SEQ ID NO: 22370 - protein, 43 aa, Artificial Sequence; identical to SEQ ID NO: 19266
  GFR-binding peptide
  MOD_RES (6)..(40)..(42): Xaa is C or S
  MOD_RES (20)..(21)..(22)..(23)..(24): Xaa is A or G
  MOD_RES (25)..(26)..(27)..(28): Xaa is A or G or is absent

SEQ ID NO: 22371 - protein, 40 aa, Artificial Sequence; identical to SEQ ID NO: 19267
  GFR-binding peptide
  MOD_RES (2)..(39): Xaa is C or S

SEQ ID NO: 22372 - protein, 32 aa, Artificial Sequence; identical to SEQ ID NO: 19268
  GFR-binding peptide
  MOD_RES (14)..(15)..(16)..(17)..(18): Xaa is A or G
  MOD_RES (19)..(20)..(21)..(22): Xaa is A or G or is absent

SEQ ID NO: 22373 - protein, 35 aa, Artificial Sequence; identical to SEQ ID NO: 19269
  GFR-binding peptide
  MOD_RES (15)..(16)..(17)..(18)..(19): Xaa is A or G
  MOD_RES (20)..(21)..(22)..(23): Xaa is A or G or is absent

SEQ ID NO: 22374 - protein, 37 aa, Artificial Sequence; identical to SEQ ID NO: 19270
  GFR-binding peptide
  MOD_RES (34)..(36): Xaa is C or S

SEQ ID NO: 22375 - protein, 34 aa, Artificial Sequence; identical to SEQ ID NO: 19271
  GFR-binding peptide
  MOD_RES (1)..(1): Xaa is C or S

SEQ ID NO: 22376 - protein, 38 aa, Artificial Sequence; identical to SEQ ID NO: 19272
  GFR-binding peptide
  MOD_RES (36)..(38): Xaa is C or S
  MOD_RES (15)..(16)..(17)..(18)..(19): Xaa is A or G
  MOD_RES (20)..(21)..(22)..(23): Xaa is A or G or is absent

SEQ ID NO: 22377 - protein, 34 aa, Artificial Sequence; identical to SEQ ID NO: 19273
  GFR-binding peptide
  MOD_RES (15)..(16)..(17)..(18)..(19): Xaa is A or G
  MOD_RES (20)..(21)..(22)..(23): Xaa is A or G or is absent

SEQ ID NO: 22378 - protein, 37 aa, Artificial Sequence; identical to SEQ ID NO: 19274
  GFR-binding peptide
  MOD_RES (2)..(36): Xaa is C or S
  MOD_RES (16)..(17)..(18)..(19)..(20): Xaa is A or G
  MOD_RES (21)..(22)..(23)..(24): Xaa is A or G or is absent

SEQ ID NO: 22379 - protein, 43 aa, Artificial Sequence; identical to SEQ ID NO: 19275
  GFR-binding peptide
  MOD_RES (5)..(42): Xaa is C or S
  MOD_RES (21)..(22)..(23)..(24)..(25): Xaa is A or G
  MOD_RES (26)..(27)..(28)..(29): Xaa is A or G or is absent

SEQ ID NO: 22380 - protein, 33 aa, Artificial Sequence; identical to SEQ ID NO: 19276
  GFR-binding peptide
  MOD_RES (1)..(1): Xaa is C or S

SEQ ID NO: 22381 - protein, 42 aa, Artificial Sequence; identical to SEQ ID NO: 19277
  GFR-binding peptide
  MOD_RES (2)..(39)..(41): Xaa is C or S
  MOD_RES (18)..(19)..(20)..(21)..(22): Xaa is A or G
  MOD_RES (23)..(24)..(25)..(26): Xaa is A or G or is absent

SEQ ID NO: 22382 - protein, 41 aa, Artificial Sequence; identical to SEQ ID NO: 19278
  GFR-binding peptide
  MOD_RES (4)..(38)..(40): Xaa is C or S

SEQ ID NO: 22383 - protein, 39 aa, Artificial Sequence; identical to SEQ ID NO: 19279
  GFR-binding peptide
  MOD_RES (4)..(38): Xaa is C or S
  MOD_RES (18)..(19)..(20)..(21)..(22): Xaa is A or G
  MOD_RES (23)..(24)..(25)..(26): Xaa is A or G or is absent

SEQ ID NO: 22384 - protein, 38 aa, Artificial Sequence; identical to SEQ ID NO: 19280
  GFR-binding peptide
  MOD_RES (35)..(37): Xaa is C or S
  MOD_RES (14)..(15)..(16)..(17)..(18): Xaa is A or G
  MOD_RES (19)..(20)..(21)..(22): Xaa is A or G or is absent

SEQ ID NO: 22385 - protein, 41 aa, Artificial Sequence; identical to SEQ ID NO: 19281
  GFR-binding peptide
  MOD_RES (7)..(41): Xaa is C or S

SEQ ID NO: 22386 - protein, 41 aa, Artificial Sequence; identical to SEQ ID NO: 19282
  GFR-binding peptide
  MOD_RES (7)..(41): Xaa is C or S
  MOD_RES (21)..(22)..(23)..(24)..(25): Xaa is A or G
  MOD_RES (26)..(27)..(28)..(29): Xaa is A or G or is absent

SEQ ID NO: 22387 - protein, 39 aa, Artificial Sequence; identical to SEQ ID NO: 19283
  GFR-binding peptide
  MOD_RES (36)..(38): Xaa is C or S

SEQ ID NO: 22388 - protein, 39 aa, Artificial Sequence; identical to SEQ ID NO: 19284
  GFR-binding peptide
  MOD_RES (2)..(36)..(38): Xaa is C or S
  MOD_RES (16)..(17)..(18)..(19)..(20): Xaa is A or G
  MOD_RES (21)..(22)..(23)..(24): Xaa is A or G or is absent

SEQ ID NO: 22389 - protein, 40 aa, Artificial Sequence; identical to SEQ ID NO: 19285
  GFR-binding peptide
  MOD_RES (37)..(39): Xaa is C or S
  MOD_RES (16)..(17)..(18)..(19)..(20): Xaa is A or G
  MOD_RES (21)..(22)..(23)..(24): Xaa is A or G or is absent

SEQ ID NO: 22390 - protein, 34 aa, Artificial Sequence; identical to SEQ ID NO: 19286
  GFR-binding peptide
  MOD_RES (34)..(34): Xaa is C or S
  MOD_RES (14)..(15)..(16)..(17)..(18): Xaa is A or G
  MOD_RES (19)..(20)..(21)..(22): Xaa is A or G or is absent

SEQ ID NO: 22391 - protein, 37 aa, Artificial Sequence; identical to SEQ ID NO: 19287
  GFR-binding peptide
  MOD_RES (2)..(2): Xaa is C or S
  MOD_RES (18)..(19)..(20)..(21)..(22): Xaa is A or G
  MOD_RES (23)..(24)..(25)..(26): Xaa is A or G or is absent

SEQ ID NO: 22392 - protein, 40 aa, Artificial Sequence; identical to SEQ ID NO: 19288
  GFR-binding peptide
  MOD_RES (4)..(38)..(40): Xaa is C or S

SEQ ID NO: 22393 - protein, 39 aa, Artificial Sequence; identical to SEQ ID NO: 19289
  GFR-binding peptide
  MOD_RES (3)..(37)..(39): Xaa is C or S
  MOD_RES (17)..(18)..(19)..(20)..(21): Xaa is A or G
  MOD_RES (22)..(23)..(24)..(25): Xaa is A or G or is absent

SEQ ID NO: 22394 - protein, 42 aa, Artificial Sequence; identical to SEQ ID NO: 19290
  GFR-binding peptide
  MOD_RES (4)..(41): Xaa is C or S
  MOD_RES (20)..(21)..(22)..(23)..(24): Xaa is A or G
  MOD_RES (25)..(26)..(27)..(28): Xaa is A or G or is absent

SEQ ID NO: 22395 - protein, 37 aa, Artificial Sequence; identical to SEQ ID NO: 19291
  GFR-binding peptide
  MOD_RES (2)..(2): Xaa is C or S
  MOD_RES (18)..(19)..(20)..(21)..(22): Xaa is A or G
  MOD_RES (23)..(24)..(25)..(26): Xaa is A or G or is absent

SEQ ID NO: 22396 - protein, 32 aa, Artificial Sequence; identical to SEQ ID NO: 19292
  GFR-binding peptide
  MOD_RES (14)..(15)..(16)..(17)..(18): Xaa is A or G
  MOD_RES (19)..(20)..(21)..(22): Xaa is A or G or is absent

SEQ ID NO: 22397 - protein, 32 aa, Artificial Sequence; identical to SEQ ID NO: 19293
  GFR-binding peptide
  MOD_RES (14)..(15)..(16)..(17)..(18): Xaa is A or G
  MOD_RES (19)..(20)..(21)..(22): Xaa is A or G or is absent

SEQ ID NO: 22398 - protein, 35 aa, Artificial Sequence; identical to SEQ ID NO: 19294
  GFR-binding peptide
  MOD_RES (16)..(17)..(18)..(19)..(20): Xaa is A or G
  MOD_RES (21)..(22)..(23)..(24): Xaa is A or G or is absent

SEQ ID NO: 22399 - protein, 36 aa, Artificial Sequence; identical to SEQ ID NO: 19295
  GFR-binding peptide
  MOD_RES (4)..(4): Xaa is C or S
  MOD_RES (18)..(19)..(20)..(21)..(22): Xaa is A or G
  MOD_RES (23)..(24)..(25)..(26): Xaa is A or G or is absent

SEQ ID NO: 22400 - protein, 41 aa, Artificial Sequence; identical to SEQ ID NO: 19296
  GFR-binding peptide
  MOD_RES (5)..(39)..(41): Xaa is C or S

SEQ ID NO: 22401 - protein, 36 aa, Artificial Sequence; identical to SEQ ID NO: 19297
  GFR-binding peptide
  MOD_RES (3)..(3): Xaa is C or S
  MOD_RES (17)..(18)..(19)..(20)..(21): Xaa is A or G
  MOD_RES (22)..(23)..(24)..(25): Xaa is A or G or is absent

SEQ ID NO: 22402 - protein, 36 aa, Artificial Sequence; identical to SEQ ID NO: 19298
  GFR-binding peptide
  MOD_RES (1)..(1): Xaa is C or S

SEQ ID NO: 22403 - protein, 41 aa, Artificial Sequence; identical to SEQ ID NO: 19299
  GFR-binding peptide
  MOD_RES (6)..(40): Xaa is C or S
  MOD_RES (20)..(21)..(22)..(23)..(24): Xaa is A or G
  MOD_RES (25)..(26)..(27)..(28): Xaa is A or G or is absent

SEQ ID NO: 22404 - protein, 34 aa, Artificial Sequence; identical to SEQ ID NO: 19300
  GFR-binding peptide
  MOD_RES (16)..(17)..(18)..(19)..(20): Xaa is A or G
  MOD_RES (21)..(22)..(23)..(24): Xaa is A or G or is absent

SEQ ID NO: 22405 - protein, 38 aa, Artificial Sequence; identical to SEQ ID NO: 19301
  GFR-binding peptide
  MOD_RES (35)..(37): Xaa is C or S

SEQ ID NO: 22406 - protein, 41 aa, Artificial Sequence; identical to SEQ ID NO: 19302
  GFR-binding peptide
  MOD_RES (4)..(41): Xaa is C or S
  MOD_RES (20)..(21)..(22)..(23)..(24): Xaa is A or G
  MOD_RES (25)..(26)..(27)..(28): Xaa is A or G or is absent

SEQ ID NO: 22407 - protein, 38 aa, Artificial Sequence; identical to SEQ ID NO: 19303
  GFR-binding peptide
  MOD_RES (1)..(38): Xaa is C or S
  MOD_RES (17)..(18)..(19)..(20)..(21): Xaa is A or G
  MOD_RES (22)..(23)..(24)..(25): Xaa is A or G or is absent

SEQ ID NO: 22408 - protein, 35 aa, Artificial Sequence; identical to SEQ ID NO: 19304
  GFR-binding peptide
  MOD_RES (2)..(2): Xaa is C or S
  MOD_RES (16)..(17)..(18)..(19)..(20): Xaa is A or G
  MOD_RES (21)..(22)..(23)..(24): Xaa is A or G or is absent

SEQ ID NO: 22409 - protein, 33 aa, Artificial Sequence; identical to SEQ ID NO: 19305
  GFR-binding peptide
  MOD_RES (1)..(1): Xaa is C or S
  MOD_RES (15)..(16)..(17)..(18)..(19): Xaa is A or G
  MOD_RES (20)..(21)..(22)..(23): Xaa is A or G or is absent

SEQ ID NO: 22410 - protein, 39 aa, Artificial Sequence; identical to SEQ ID NO: 19306
  GFR-binding peptide
  MOD_RES (1)..(38): Xaa is C or S
  MOD_RES (17)..(18)..(19)..(20)..(21): Xaa is A or G
  MOD_RES (22)..(23)..(24)..(25): Xaa is A or G or is absent

SEQ ID NO: 22411 - protein, 37 aa, Artificial Sequence; identical to SEQ ID NO: 19307
  GFR-binding peptide
  MOD_RES (34)..(36): Xaa is C or S
  MOD_RES (14)..(15)..(16)..(17)..(18): Xaa is A or G
  MOD_RES (19)..(20)..(21)..(22): Xaa is A or G or is absent

SEQ ID NO: 22412 - protein, 33 aa, Artificial Sequence; identical to SEQ ID NO: 19308
  GFR-binding peptide

SEQ ID NO: 22413 - protein, 43 aa, Artificial Sequence; identical to SEQ ID NO: 19309
  GFR-binding peptide
  MOD_RES (4)..(41)..(43): Xaa is C or S
  MOD_RES (20)..(21)..(22)..(23)..(24): Xaa is A or G
  MOD_RES (25)..(26)..(27)..(28): Xaa is A or G or is absent

SEQ ID NO: 22414 - protein, 39 aa, Artificial Sequence; identical to SEQ ID NO: 19310
  GFR-binding peptide
  MOD_RES (5)..(39): Xaa is C or S
  MOD_RES (19)..(20)..(21)..(22)..(23): Xaa is A or G
  MOD_RES (24)..(25)..(26)..(27): Xaa is A or G or is absent

SEQ ID NO: 22415 - protein, 41 aa, Artificial Sequence; identical to SEQ ID NO: 19311
  GFR-binding peptide
  MOD_RES (5)..(5): Xaa is C or S
  MOD_RES (21)..(22)..(23)..(24)..(25): Xaa is A or G
  MOD_RES (26)..(27)..(28)..(29): Xaa is A or G or is absent

SEQ ID NO: 22416 - protein, 44 aa, Artificial Sequence; identical to SEQ ID NO: 19312
  GFR-binding peptide
  MOD_RES (7)..(41)..(43): Xaa is C or S
  MOD_RES (21)..(22)..(23)..(24)..(25): Xaa is A or G
  MOD_RES (26)..(27)..(28)..(29): Xaa is A or G or is absent

SEQ ID NO: 22417 - protein, 36 aa, Artificial Sequence; identical to SEQ ID NO: 19313
  GFR-binding peptide
  MOD_RES (1)..(35): Xaa is C or S

SEQ ID NO: 22418 - protein, 35 aa, Artificial Sequence; identical to SEQ ID NO: 19314
  GFR-binding peptide

SEQ ID NO: 22419 - protein, 38 aa, Artificial Sequence; identical to SEQ ID NO: 19315
  GFR-binding peptide
  MOD_RES (2)..(36)..(38): Xaa is C or S
  MOD_RES (16)..(17)..(18)..(19)..(20): Xaa is A or G
  MOD_RES (21)..(22)..(23)..(24): Xaa is A or G or is absent

SEQ ID NO: 22420 - protein, 36 aa, Artificial Sequence; identical to SEQ ID NO: 19316
  GFR-binding peptide
  MOD_RES (36)..(36): Xaa is C or S
  MOD_RES (15)..(16)..(17)..(18)..(19): Xaa is A or G
  MOD_RES (20)..(21)..(22)..(23): Xaa is A or G or is absent

SEQ ID NO: 22421 - protein, 35 aa, Artificial Sequence; identical to SEQ ID NO: 19317
  GFR-binding peptide
  MOD_RES (2)..(2): Xaa is C or S
  MOD_RES (16)..(17)..(18)..(19)..(20): Xaa is A or G
  MOD_RES (21)..(22)..(23)..(24): Xaa is A or G or is absent

SEQ ID NO: 22422 - protein, 38 aa, Artificial Sequence; identical to SEQ ID NO: 19318
  GFR-binding peptide
  MOD_RES (3)..(37): Xaa is C or S
  MOD_RES (17)..(18)..(19)..(20)..(21): Xaa is A or G
  MOD_RES (22)..(23)..(24)..(25): Xaa is A or G or is absent

SEQ ID NO: 22423 - protein, 36 aa, Artificial Sequence; identical to SEQ ID NO: 19319
  GFR-binding peptide
  MOD_RES (36)..(36): Xaa is C or S
  MOD_RES (15)..(16)..(17)..(18)..(19): Xaa is A or G
  MOD_RES (20)..(21)..(22)..(23): Xaa is A or G or is absent

SEQ ID NO: 22424 - protein, 37 aa, Artificial Sequence; identical to SEQ ID NO: 19320
  GFR-binding peptide
  MOD_RES (4)..(4): Xaa is C or S
  MOD_RES (18)..(19)..(20)..(21)..(22): Xaa is A or G
  MOD_RES (23)..(24)..(25)..(26): Xaa is A or G or is absent

SEQ ID NO: 22425 - protein, 34 aa, Artificial Sequence; identical to SEQ ID NO: 19321
  GFR-binding peptide

SEQ ID NO: 22426 - protein, 38 aa, Artificial Sequence; identical to SEQ ID NO: 19322
  GFR-binding peptide
  MOD_RES (4)..(38): Xaa is C or S

SEQ ID NO: 22427 - protein, 33 aa, Artificial Sequence; identical to SEQ ID NO: 19323
  GFR-binding peptide
  MOD_RES (1)..(1): Xaa is C or S
  MOD_RES (15)..(16)..(17)..(18)..(19): Xaa is A or G
  MOD_RES (20)..(21)..(22)..(23): Xaa is A or G or is absent

SEQ ID NO: 22428 - protein, 39 aa, Artificial Sequence; identical to SEQ ID NO: 19324
  GFR-binding peptide
  MOD_RES (5)..(5): Xaa is C or S
  MOD_RES (21)..(22)..(23)..(24)..(25): Xaa is A or G
  MOD_RES (26)..(27)..(28)..(29): Xaa is A or G or is absent

SEQ ID NO: 22429 - protein, 42 aa, Artificial Sequence; identical to SEQ ID NO: 19325
  GFR-binding peptide
  MOD_RES (3)..(40)..(42): Xaa is C or S

SEQ ID NO: 22430 - protein, 36 aa, Artificial Sequence; identical to SEQ ID NO: 19326
  GFR-binding peptide
  MOD_RES (3)..(3): Xaa is C or S
  MOD_RES (17)..(18)..(19)..(20)..(21): Xaa is A or G
  MOD_RES (22)..(23)..(24)..(25): Xaa is A or G or is absent

SEQ ID NO: 22431 - protein, 43 aa, Artificial Sequence; identical to SEQ ID NO: 19327
  GFR-binding peptide
  MOD_RES (3)..(40)..(42): Xaa is C or S
  MOD_RES (19)..(20)..(21)..(22)..(23): Xaa is A or G
  MOD_RES (24)..(25)..(26)..(27): Xaa is A or G or is absent

SEQ ID NO: 22432 - protein, 42 aa, Artificial Sequence; identical to SEQ ID NO: 19328
  GFR-binding peptide
  MOD_RES (6)..(40)..(42): Xaa is C or S

SEQ ID NO: 22433 - protein, 41 aa, Artificial Sequence; identical to SEQ ID NO: 19329
  GFR-binding peptide
  MOD_RES (5)..(5): Xaa is C or S

SEQ ID NO: 22434 - protein, 38 aa, Artificial Sequence; identical to SEQ ID NO: 19330
  GFR-binding peptide
  MOD_RES (36)..(38): Xaa is C or S

SEQ ID NO: 22435 - protein, 36 aa, Artificial Sequence; identical to SEQ ID NO: 19331
  GFR-binding peptide
  MOD_RES (4)..(4): Xaa is C or S

SEQ ID NO: 22436 - protein, 37 aa, Artificial Sequence; identical to SEQ ID NO: 19332
  GFR-binding peptide
  MOD_RES (2)..(2): Xaa is C or S

SEQ ID NO: 22437 - protein, 41 aa, Artificial Sequence; identical to SEQ ID NO: 19333
  GFR-binding peptide
  MOD_RES (5)..(5): Xaa is C or S
  MOD_RES (21)..(22)..(23)..(24)..(25): Xaa is A or G
  MOD_RES (26)..(27)..(28)..(29): Xaa is A or G or is absent

SEQ ID NO: 22438 - protein, 39 aa, Artificial Sequence; identical to SEQ ID NO: 19334
  GFR-binding peptide
  MOD_RES (37)..(39): Xaa is C or S
  MOD_RES (16)..(17)..(18)..(19)..(20): Xaa is A or G
  MOD_RES (21)..(22)..(23)..(24): Xaa is A or G or is absent

SEQ ID NO: 22439 - protein, 43 aa, Artificial Sequence; identical to SEQ ID NO: 19335
  GFR-binding peptide
  MOD_RES (4)..(41)..(43): Xaa is C or S

SEQ ID NO: 22440 - protein, 41 aa, Artificial Sequence; identical to SEQ ID NO: 19336
  GFR-binding peptide
  MOD_RES (2)..(39)..(41): Xaa is C or S
  MOD_RES (18)..(19)..(20)..(21)..(22): Xaa is A or G
  MOD_RES (23)..(24)..(25)..(26): Xaa is A or G or is absent

SEQ ID NO: 22441 - protein, 36 aa, Artificial Sequence; identical to SEQ ID NO: 19337
  GFR-binding peptide
  MOD_RES (3)..(3): Xaa is C or S
  MOD_RES (17)..(18)..(19)..(20)..(21): Xaa is A or G
  MOD_RES (22)..(23)..(24)..(25): Xaa is A or G or is absent

SEQ ID NO: 22442 - protein, 35 aa, Artificial Sequence; identical to SEQ ID NO: 19338
  GFR-binding peptide
  MOD_RES (34)..(34): Xaa is C or S
  MOD_RES (14)..(15)..(16)..(17)..(18): Xaa is A or G
  MOD_RES (19)..(20)..(21)..(22): Xaa is A or G or is absent

SEQ ID NO: 22443 - protein, 36 aa, Artificial Sequence; identical to SEQ ID NO: 19339
  GFR-binding peptide
  MOD_RES (1)..(35): Xaa is C or S
  MOD_RES (15)..(16)..(17)..(18)..(19): Xaa is A or G
  MOD_RES (20)..(21)..(22)..(23): Xaa is A or G or is absent

SEQ ID NO: 22444 - protein, 39 aa, Artificial Sequence; identical to SEQ ID NO: 19340
  GFR-binding peptide
  MOD_RES (3)..(3): Xaa is C or S

SEQ ID NO: 22445 - protein, 41 aa, Artificial Sequence; identical to SEQ ID NO: 19341
  GFR-binding peptide
  MOD_RES (6)..(40): Xaa is C or S

SEQ ID NO: 22446 - protein, 38 aa, Artificial Sequence; identical to SEQ ID NO: 19342
  GFR-binding peptide
  MOD_RES (2)..(2): Xaa is C or S
  MOD_RES (18)..(19)..(20)..(21)..(22): Xaa is A or G
  MOD_RES (23)..(24)..(25)..(26): Xaa is A or G or is absent

SEQ ID NO: 22447 - protein, 36 aa, Artificial Sequence; identical to SEQ ID NO: 19343
  GFR-binding peptide
  MOD_RES (4)..(4): Xaa is C or S

SEQ ID NO: 22448 - protein, 36 aa, Artificial Sequence; identical to SEQ ID NO: 19344
  GFR-binding peptide
  MOD_RES (4)..(4): Xaa is C or S
  MOD_RES (18)..(19)..(20)..(21)..(22): Xaa is A or G
  MOD_RES (23)..(24)..(25)..(26): Xaa is A or G or is absent

SEQ ID NO: 22449 - protein, 35 aa, Artificial Sequence; identical to SEQ ID NO: 19345
  GFR-binding peptide
  MOD_RES (1)..(35): Xaa is C or S
  MOD_RES (15)..(16)..(17)..(18)..(19): Xaa is A or G
  MOD_RES (20)..(21)..(22)..(23): Xaa is A or G or is absent

SEQ ID NO: 22450 - protein, 40 aa, Artificial Sequence; identical to SEQ ID NO: 19346
  GFR-binding peptide
  MOD_RES (3)..(40): Xaa is C or S
  MOD_RES (19)..(20)..(21)..(22)..(23): Xaa is A or G
  MOD_RES (24)..(25)..(26)..(27): Xaa is A or G or is absent

SEQ ID NO: 22451 - protein, 43 aa, Artificial Sequence; identical to SEQ ID NO: 19347
  GFR-binding peptide
  MOD_RES (4)..(41)..(43): Xaa is C or S
  MOD_RES (20)..(21)..(22)..(23)..(24): Xaa is A or G
  MOD_RES (25)..(26)..(27)..(28): Xaa is A or G or is absent

SEQ ID NO: 22452 - protein, 38 aa, Artificial Sequence; identical to SEQ ID NO: 19348
  GFR-binding peptide
  MOD_RES (2)..(36)..(38): Xaa is C or S

SEQ ID NO: 22453 - protein, 34 aa, Artificial Sequence; identical to SEQ ID NO: 19349
  GFR-binding peptide
  MOD_RES (14)..(15)..(16)..(17)..(18): Xaa is A or G
  MOD_RES (19)..(20)..(21)..(22): Xaa is A or G or is absent

SEQ ID NO: 22454 - protein, 34 aa, Artificial Sequence; identical to SEQ ID NO: 19350
  GFR-binding peptide
  MOD_RES (34)..(34): Xaa is C or S

SEQ ID NO: 22455 - protein, 37 aa, Artificial Sequence; identical to SEQ ID NO: 19351
  GFR-binding peptide
  MOD_RES (2)..(2): Xaa is C or S

SEQ ID NO: 22456 - protein, 36 aa, Artificial Sequence; identical to SEQ ID NO: 19352
  GFR-binding peptide

SEQ ID NO: 22457 - protein, 35 aa, Artificial Sequence; identical to SEQ ID NO: 19353
  GFR-binding peptide
  MOD_RES (35)..(35): Xaa is C or S
  MOD_RES (14)..(15)..(16)..(17)..(18): Xaa is A or G
  MOD_RES (19)..(20)..(21)..(22): Xaa is A or G or is absent

SEQ ID NO: 22458 - protein, 44 aa, Artificial Sequence; identical to SEQ ID NO: 19354
  GFR-binding peptide
  MOD_RES (4)..(41)..(43): Xaa is C or S

SEQ ID NO: 22459 - protein, 36 aa, Artificial Sequence; identical to SEQ ID NO: 19355
  GFR-binding peptide
  MOD_RES (4)..(4): Xaa is C or S

SEQ ID NO: 22460 - protein, 40 aa, Artificial Sequence; identical to SEQ ID NO: 19356
  GFR-binding peptide
  MOD_RES (3)..(37)..(39): Xaa is C or S

SEQ ID NO: 22461 - protein, 43 aa, Artificial Sequence; identical to SEQ ID NO: 19357
  GFR-binding peptide
  MOD_RES (7)..(41)..(43): Xaa is C or S
  MOD_RES (21)..(22)..(23)..(24)..(25): Xaa is A or G
  MOD_RES (26)..(27)..(28)..(29): Xaa is A or G or is absent

SEQ ID NO: 22462 - protein, 37 aa, Artificial Sequence; identical to SEQ ID NO: 19358
  GFR-binding peptide
  MOD_RES (2)..(2): Xaa is C or S

SEQ ID NO: 22463 - protein, 37 aa, Artificial Sequence; identical to SEQ ID NO: 19359
  GFR-binding peptide
  MOD_RES (36)..(36): Xaa is C or S

SEQ ID NO: 22464 - protein, 34 aa, Artificial Sequence; identical to SEQ ID NO: 19360
  GFR-binding peptide
  MOD_RES (15)..(16)..(17)..(18)..(19): Xaa is A or G
  MOD_RES (20)..(21)..(22)..(23): Xaa is A or G or is absent

SEQ ID NO: 22465 - protein, 44 aa, Artificial Sequence; identical to SEQ ID NO: 19361
  GFR-binding peptide
  MOD_RES (7)..(41)..(43): Xaa is C or S

SEQ ID NO: 22466 - protein, 39 aa, Artificial Sequence; identical to SEQ ID NO: 19362
  GFR-binding peptide
  MOD_RES (3)..(37)..(39): Xaa is C or S
  MOD_RES (17)..(18)..(19)..(20)..(21): Xaa is A or G
  MOD_RES (22)..(23)..(24)..(25): Xaa is A or G or is absent

SEQ ID NO: 22467 - protein, 36 aa, Artificial Sequence; identical to SEQ ID NO: 19363
  GFR-binding peptide
  MOD_RES (1)..(1): Xaa is C or S

SEQ ID NO: 22468 - protein, 35 aa, Artificial Sequence; identical to SEQ ID NO: 19364
  GFR-binding peptide
  MOD_RES (1)..(1): Xaa is C or S

SEQ ID NO: 22469 - protein, 35 aa, Artificial Sequence; identical to SEQ ID NO: 19365
  GFR-binding peptide
  MOD_RES (34)..(34): Xaa is C or S
  MOD_RES (14)..(15)..(16)..(17)..(18): Xaa is A or G
  MOD_RES (19)..(20)..(21)..(22): Xaa is A or G or is absent

SEQ ID NO: 22470 - protein, 36 aa, Artificial Sequence; identical to SEQ ID NO: 19366
  GFR-binding peptide
  MOD_RES (4)..(4): Xaa is C or S
  MOD_RES (18)..(19)..(20)..(21)..(22): Xaa is A or G
  MOD_RES (23)..(24)..(25)..(26): Xaa is A or G or is absent

SEQ ID NO: 22471 - protein, 40 aa, Artificial Sequence; identical to SEQ ID NO: 19367
  GFR-binding peptide
  MOD_RES (7)..(7): Xaa is C or S
  MOD_RES (21)..(22)..(23)..(24)..(25): Xaa is A or G
  MOD_RES (26)..(27)..(28)..(29): Xaa is A or G or is absent

SEQ ID NO: 22472 - protein, 42 aa, Artificial Sequence; identical to SEQ ID NO: 19368
  GFR-binding peptide
  MOD_RES (7)..(41): Xaa is C or S
  MOD_RES (21)..(22)..(23)..(24)..(25): Xaa is A or G
  MOD_RES (26)..(27)..(28)..(29): Xaa is A or G or is absent

SEQ ID NO: 22473 - protein, 37 aa, Artificial Sequence; identical to SEQ ID NO: 19369
  GFR-binding peptide
  MOD_RES (37)..(37): Xaa is C or S

SEQ ID NO: 22474 - protein, 43 aa, Artificial Sequence; identical to SEQ ID NO: 19370
  GFR-binding peptide
  MOD_RES (3)..(40)..(42): Xaa is C or S

SEQ ID NO: 22475 - protein, 34 aa, Artificial Sequence; identical to SEQ ID NO: 19371
  GFR-binding peptide

SEQ ID NO: 22476 - protein, 37 aa, Artificial Sequence; identical to SEQ ID NO: 19372
  GFR-binding peptide
  MOD_RES (4)..(4): Xaa is C or S

SEQ ID NO: 22477 - protein, 37 aa, Artificial Sequence; identical to SEQ ID NO: 19373
  GFR-binding peptide
  MOD_RES (3)..(37): Xaa is C or S

SEQ ID NO: 22478 - protein, 37 aa, Artificial Sequence; identical to SEQ ID NO: 19374
  GFR-binding peptide
  MOD_RES (34)..(36): Xaa is C or S

SEQ ID NO: 22479 - protein, 40 aa, Artificial Sequence; identical to SEQ ID NO: 19375
  GFR-binding peptide
  MOD_RES (3)..(40): Xaa is C or S
  MOD_RES (19)..(20)..(21)..(22)..(23): Xaa is A or G
  MOD_RES (24)..(25)..(26)..(27): Xaa is A or G or is absent

SEQ ID NO: 22480 - protein, 42 aa, Artificial Sequence; identical to SEQ ID NO: 19376
  GFR-binding peptide
  MOD_RES (6)..(40)..(42): Xaa is C or S

SEQ ID NO: 22481 - protein, 39 aa, Artificial Sequence; identical to SEQ ID NO: 19377
  GFR-binding peptide
  MOD_RES (37)..(39): Xaa is C or S

SEQ ID NO: 22482 - protein, 35 aa, Artificial Sequence; identical to SEQ ID NO: 19378
  GFR-binding peptide
  MOD_RES (1)..(1): Xaa is C or S

SEQ ID NO: 22483 - protein, 36 aa, Artificial Sequence; identical to SEQ ID NO: 19379
  GFR-binding peptide
  MOD_RES (4)..(4): Xaa is C or S

SEQ ID NO: 22484 - protein, 34 aa, Artificial Sequence; identical to SEQ ID NO: 19380
  GFR-binding peptide
  MOD_RES (16)..(17)..(18)..(19)..(20): Xaa is A or G
  MOD_RES (21)..(22)..(23)..(24): Xaa is A or G or is absent

SEQ ID NO: 22485 - protein, 38 aa, Artificial Sequence; identical to SEQ ID NO: 19381
  GFR-binding peptide
  MOD_RES (1)..(35)..(37): Xaa is C or S

SEQ ID NO: 22486 - protein, 38 aa, Artificial Sequence; identical to SEQ ID NO: 19382
  GFR-binding peptide
  MOD_RES (3)..(37): Xaa is C or S
  MOD_RES (17)..(18)..(19)..(20)..(21): Xaa is A or G
  MOD_RES (22)..(23)..(24)..(25): Xaa is A or G or is absent

SEQ ID NO: 22487 - protein, 43 aa, Artificial Sequence; identical to SEQ ID NO: 19383
  GFR-binding peptide
  MOD_RES (3)..(40)..(42): Xaa is C or S

SEQ ID NO: 22488 - protein, 42 aa, Artificial Sequence; identical to SEQ ID NO: 19384
  GFR-binding peptide
  MOD_RES (2)..(39)..(41): Xaa is C or S
  MOD_RES (18)..(19)..(20)..(21)..(22): Xaa is A or G
  MOD_RES (23)..(24)..(25)..(26): Xaa is A or G or is absent

SEQ ID NO: 22489 - protein, 38 aa, Artificial Sequence; identical to SEQ ID NO: 19385
  GFR-binding peptide
  MOD_RES (3)..(3): Xaa is C or S

SEQ ID NO: 22490 - protein, 40 aa, Artificial Sequence; identical to SEQ ID NO: 19386
  GFR-binding peptide
  MOD_RES (3)..(37)..(39): Xaa is C or S
  MOD_RES (17)..(18)..(19)..(20)..(21): Xaa is A or G
  MOD_RES (22)..(23)..(24)..(25): Xaa is A or G or is absent

SEQ ID NO: 22491 - protein, 35 aa, Artificial Sequence; identical to SEQ ID NO: 19387
  GFR-binding peptide

SEQ ID NO: 22492 - protein, 42 aa, Artificial Sequence; identical to SEQ ID NO: 19388
  GFR-binding peptide
  MOD_RES (4)..(41): Xaa is C or S

SEQ ID NO: 22493 - protein, 42 aa, Artificial Sequence; identical to SEQ ID NO: 19389
  GFR-binding peptide
  MOD_RES (5)..(42): Xaa is C or S
  MOD_RES (21)..(22)..(23)..(24)..(25): Xaa is A or G
  MOD_RES (26)..(27)..(28)..(29): Xaa is A or G or is absent

SEQ ID NO: 22494 - protein, 39 aa, Artificial Sequence; identical to SEQ ID NO: 19390
  GFR-binding peptide
  MOD_RES (1)..(38): Xaa is C or S

SEQ ID NO: 22495 - protein, 38 aa, Artificial Sequence; identical to SEQ ID NO: 19391
  GFR-binding peptide
  MOD_RES (1)..(38): Xaa is C or S
  MOD_RES (17)..(18)..(19)..(20)..(21): Xaa is A or G
  MOD_RES (22)..(23)..(24)..(25): Xaa is A or G or is absent

SEQ ID NO: 22496 - protein, 43 aa, Artificial Sequence; identical to SEQ ID NO: 19392
  GFR-binding peptide
  MOD_RES (7)..(41)..(43): Xaa is C or S
  MOD_RES (21)..(22)..(23)..(24)..(25): Xaa is A or G
  MOD_RES (26)..(27)..(28)..(29): Xaa is A or G or is absent

SEQ ID NO: 22497 - protein, 41 aa, Artificial Sequence; identical to SEQ ID NO: 19393
  GFR-binding peptide
  MOD_RES (1)..(38)..(40): Xaa is C or S

SEQ ID NO: 22498 - protein, 44 aa, Artificial Sequence; identical to SEQ ID NO: 19394
  GFR-binding peptide
  MOD_RES (4)..(41)..(43): Xaa is C or S
  MOD_RES (20)..(21)..(22)..(23)..(24): Xaa is A or G
  MOD_RES (25)..(26)..(27)..(28): Xaa is A or G or is absent

SEQ ID NO: 22499 - protein, 40 aa, Artificial Sequence; identical to SEQ ID NO: 19395
  GFR-binding peptide
  MOD_RES (5)..(39): Xaa is C or S
  MOD_RES (19)..(20)..(21)..(22)..(23): Xaa is A or G
  MOD_RES (24)..(25)..(26)..(27): Xaa is A or G or is absent

SEQ ID NO: 22500 - protein, 39 aa, Artificial Sequence; identical to SEQ ID NO: 19396
  GFR-binding peptide
  MOD_RES (1)..(38): Xaa is C or S

SEQ ID NO: 22501 - protein, 38 aa, Artificial Sequence; identical to SEQ ID NO: 19397
  GFR-binding peptide
  MOD_RES (1)..(38): Xaa is C or S
  MOD_RES (17)..(18)..(19)..(20)..(21): Xaa is A or G
  MOD_RES (22)..(23)..(24)..(25): Xaa is A or G or is absent

SEQ ID NO: 22502 - protein, 42 aa, Artificial Sequence; identical to SEQ ID NO: 19398
  GFR-binding peptide
  MOD_RES (4)..(41): Xaa is C or S

SEQ ID NO: 22503 - protein, 41 aa, Artificial Sequence; identical to SEQ ID NO: 19399
  GFR-binding peptide
  MOD_RES (4)..(38)..(40): Xaa is C or S
  MOD_RES (18)..(19)..(20)..(21)..(22): Xaa is A or G
  MOD_RES (23)..(24)..(25)..(26): Xaa is A or G or is absent

SEQ ID NO: 22504 - protein, 38 aa, Artificial Sequence; identical to SEQ ID NO: 19400
  GFR-binding peptide
  MOD_RES (1)..(35)..(37): Xaa is C or S
  MOD_RES (15)..(16)..(17)..(18)..(19): Xaa is A or G
  MOD_RES (20)..(21)..(22)..(23): Xaa is A or G or is absent

SEQ ID NO: 22505 - protein, 37 aa, Artificial Sequence; identical to SEQ ID NO: 19401
  GFR-binding peptide
  MOD_RES (37)..(37): Xaa is C or S

SEQ ID NO: 22506 - protein, 39 aa, Artificial Sequence; identical to SEQ ID NO: 19402
  GFR-binding peptide
  MOD_RES (6)..(6): Xaa is C or S
  MOD_RES (20)..(21)..(22)..(23)..(24): Xaa is A or G
  MOD_RES (25)..(26)..(27)..(28): Xaa is A or G or is absent

SEQ ID NO: 22507 - protein, 39 aa, Artificial Sequence; identical to SEQ ID NO: 19403
  GFR-binding peptide
  MOD_RES (2)..(36)..(38): Xaa is C or S

SEQ ID NO: 22508 - protein, 41 aa, Artificial Sequence; identical to SEQ ID NO: 19404
  GFR-binding peptide
  MOD_RES (2)..(39)..(41): Xaa is C or S

SEQ ID NO: 22509 - protein, 34 aa, Artificial Sequence; identical to SEQ ID NO: 19405
  GFR-binding peptide
  MOD_RES (16)..(17)..(18)..(19)..(20): Xaa is A or G
  MOD_RES (21)..(22)..(23)..(24): Xaa is A or G or is absent

SEQ ID NO: 22510 - protein, 37 aa, Artificial Sequence; identical to SEQ ID NO: 19406
  GFR-binding peptide
  MOD_RES (2)..(36): Xaa is C or S
  MOD_RES (16)..(17)..(18)..(19)..(20): Xaa is A or G
  MOD_RES (21)..(22)..(23)..(24): Xaa is A or G or is absent

SEQ ID NO: 22511 - protein, 44 aa, Artificial Sequence; identical to SEQ ID NO: 19407
  GFR-binding peptide
  MOD_RES (7)..(41)..(43): Xaa is C or S
  MOD_RES (21)..(22)..(23)..(24)..(25): Xaa is A or G
  MOD_RES (26)..(27)..(28)..(29): Xaa is A or G or is absent

SEQ ID NO: 22512 - protein, 40 aa, Artificial Sequence; identical to SEQ ID NO: 19408
  GFR-binding peptide
  MOD_RES (1)..(38)..(40): Xaa is C or S
  MOD_RES (17)..(18)..(19)..(20)..(21): Xaa is A or G
  MOD_RES (22)..(23)..(24)..(25): Xaa is A or G or is absent

SEQ ID NO: 22513 - protein, 39 aa, Artificial Sequence; identical to SEQ ID NO: 19409
  GFR-binding peptide
  MOD_RES (6)..(6): Xaa is C or S
  MOD_RES (20)..(21)..(22)..(23)..(24): Xaa is A or G
  MOD_RES (25)..(26)..(27)..(28): Xaa is A or G or is absent

SEQ ID NO: 22514 - protein, 37 aa, Artificial Sequence; identical to SEQ ID NO: 19410
  GFR-binding peptide
  MOD_RES (34)..(36): Xaa is C or S
  MOD_RES (14)..(15)..(16)..(17)..(18): Xaa is A or G
  MOD_RES (19)..(20)..(21)..(22): Xaa is A or G or is absent

SEQ ID NO: 22515 - protein, 34 aa, Artificial Sequence; identical to SEQ ID NO: 19411
  GFR-binding peptide
  MOD_RES (14)..(15)..(16)..(17)..(18): Xaa is A or G
  MOD_RES (19)..(20)..(21)..(22): Xaa is A or G or is absent

SEQ ID NO: 22516 - protein, 36 aa, Artificial Sequence; identical to SEQ ID NO: 19412
  GFR-binding peptide
  MOD_RES (16)..(17)..(18)..(19)..(20): Xaa is A or G
  MOD_RES (21)..(22)..(23)..(24): Xaa is A or G or is absent

SEQ ID NO: 22517 - protein, 34 aa, Artificial Sequence; identical to SEQ ID NO: 19413
  GFR-binding peptide
  MOD_RES (1)..(1): Xaa is C or S
  MOD_RES (15)..(16)..(17)..(18)..(19): Xaa is A or G
  MOD_RES (20)..(21)..(22)..(23): Xaa is A or G or is absent

SEQ ID NO: 22518 - protein, 40 aa, Artificial Sequence; identical to SEQ ID NO: 19414
  GFR-binding peptide
  MOD_RES (1)..(38)..(40): Xaa is C or S
  MOD_RES (17)..(18)..(19)..(20)..(21): Xaa is A or G
  MOD_RES (22)..(23)..(24)..(25): Xaa is A or G or is absent

SEQ ID NO: 22519 - protein, 35 aa, Artificial Sequence; identical to SEQ ID NO: 19415
  GFR-binding peptide

SEQ ID NO: 22520 - protein, 36 aa, Artificial Sequence; identical to SEQ ID NO: 19416
  GFR-binding peptide
  MOD_RES (16)..(17)..(18)..(19)..(20): Xaa is A or G
  MOD_RES (21)..(22)..(23)..(24): Xaa is A or G or is absent

SEQ ID NO: 22521 - protein, 38 aa, Artificial Sequence; identical to SEQ ID NO: 19417
  GFR-binding peptide
  MOD_RES (36)..(38): Xaa is C or S
  MOD_RES (15)..(16)..(17)..(18)..(19): Xaa is A or G
  MOD_RES (20)..(21)..(22)..(23): Xaa is A or G or is absent

SEQ ID NO: 22522 - protein, 41 aa, Artificial Sequence; identical to SEQ ID NO: 19418
  GFR-binding peptide
  MOD_RES (2)..(39)..(41): Xaa is C or S
  MOD_RES (18)..(19)..(20)..(21)..(22): Xaa is A or G
  MOD_RES (23)..(24)..(25)..(26): Xaa is A or G or is absent

SEQ ID NO: 22523 - protein, 39 aa, Artificial Sequence; identical to SEQ ID NO: 19419
  GFR-binding peptide
  MOD_RES (4)..(4): Xaa is C or S
  MOD_RES (20)..(21)..(22)..(23)..(24): Xaa is A or G
  MOD_RES (25)..(26)..(27)..(28): Xaa is A or G or is absent

SEQ ID NO: 22524 - protein, 41 aa, Artificial Sequence; identical to SEQ ID NO: 19420
  GFR-binding peptide
  MOD_RES (5)..(39)..(41): Xaa is C or S

SEQ ID NO: 22525 - protein, 36 aa, Artificial Sequence; identical to SEQ ID NO: 19421
  GFR-binding peptide
  MOD_RES (1)..(35): Xaa is C or S
  MOD_RES (15)..(16)..(17)..(18)..(19): Xaa is A or G
  MOD_RES (20)..(21)..(22)..(23): Xaa is A or G or is absent

SEQ ID NO: 22526 - protein, 32 aa, Artificial Sequence; identical to SEQ ID NO: 19422
  GFR-binding peptide

SEQ ID NO: 22527 - protein, 36 aa, Artificial Sequence; identical to SEQ ID NO: 19423
  GFR-binding peptide
  MOD_RES (3)..(3): Xaa is C or S

SEQ ID NO: 22528 - protein, 35 aa, Artificial Sequence; identical to SEQ ID NO: 19424
  GFR-binding peptide
  MOD_RES (2)..(2): Xaa is C or S

SEQ ID NO: 22529 - protein, 33 aa, Artificial Sequence; identical to SEQ ID NO: 19425
  GFR-binding peptide
  MOD_RES (14)..(15)..(16)..(17)..(18): Xaa is A or G
  MOD_RES (19)..(20)..(21)..(22): Xaa is A or G or is absent

SEQ ID NO: 22530 - protein, 35 aa, Artificial Sequence; identical to SEQ ID NO: 19426
  GFR-binding peptide
  MOD_RES (3)..(3): Xaa is C or S
  MOD_RES (17)..(18)..(19)..(20)..(21): Xaa is A or G
  MOD_RES (22)..(23)..(24)..(25): Xaa is A or G or is absent

SEQ ID NO: 22531 - protein, 40 aa, Artificial Sequence; identical to SEQ ID NO: 19427
  GFR-binding peptide
  MOD_RES (1)..(38)..(40): Xaa is C or S
  MOD_RES (17)..(18)..(19)..(20)..(21): Xaa is A or G
  MOD_RES (22)..(23)..(24)..(25): Xaa is A or G or is absent

SEQ ID NO: 22532 - protein, 37 aa, Artificial Sequence; identical to SEQ ID NO: 19428
  GFR-binding peptide
  MOD_RES (5)..(5): Xaa is C or S
  MOD_RES (19)..(20)..(21)..(22)..(23): Xaa is A or G
  MOD_RES (24)..(25)..(26)..(27): Xaa is A or G or is absent

SEQ ID NO: 22533 - protein, 43 aa, Artificial Sequence; identical to SEQ ID NO: 19429
  GFR-binding peptide
  MOD_RES (6)..(40)..(42): Xaa is C or S

SEQ ID NO: 22534 - protein, 38 aa, Artificial Sequence; identical to SEQ ID NO: 19430
  GFR-binding peptide
  MOD_RES (6)..(6): Xaa is C or S
  MOD_RES (20)..(21)..(22)..(23)..(24): Xaa is A or G
  MOD_RES (25)..(26)..(27)..(28): Xaa is A or G or is absent

SEQ ID NO: 22535 - protein, 33 aa, Artificial Sequence; identical to SEQ ID NO: 19431
  GFR-binding peptide

SEQ ID NO: 22536 - protein, 42 aa, Artificial Sequence; identical to SEQ ID NO: 19432
  GFR-binding peptide
  MOD_RES (5)..(42): Xaa is C or S

SEQ ID NO: 22537 - protein, 40 aa, Artificial Sequence; identical to SEQ ID NO: 19433
  GFR-binding peptide
  MOD_RES (5)..(5): Xaa is C or S

SEQ ID NO: 22538 - protein, 38 aa, Artificial Sequence; identical to SEQ ID NO: 19434
  GFR-binding peptide
  MOD_RES (1)..(35)..(37): Xaa is C or S
  MOD_RES (15)..(16)..(17)..(18)..(19): Xaa is A or G
  MOD_RES (20)..(21)..(22)..(23): Xaa is A or G or is absent

SEQ ID NO: 22539 - protein, 35 aa, Artificial Sequence; identical to SEQ ID NO: 19435
  GFR-binding peptide

SEQ ID NO: 22540 - protein, 36 aa, Artificial Sequence; identical to SEQ ID NO: 19436
  GFR-binding peptide
  MOD_RES (2)..(2): Xaa is C or S

SEQ ID NO: 22541 - protein, 38 aa, Artificial Sequence; identical to SEQ ID NO: 19437
  GFR-binding peptide
  MOD_RES (1)..(35)..(37): Xaa is C or S
  MOD_RES (15)..(16)..(17)..(18)..(19): Xaa is A or G
  MOD_RES (20)..(21)..(22)..(23): Xaa is A or G or is absent

SEQ ID NO: 22542 - protein, 41 aa, Artificial Sequence; identical to SEQ ID NO: 19438
  GFR-binding peptide
  MOD_RES (4)..(41): Xaa is C or S

SEQ ID NO: 22543 - protein, 33 aa, Artificial Sequence; identical to SEQ ID NO: 19439
  GFR-binding peptide
  MOD_RES (1)..(1): Xaa is C or S
  MOD_RES (15)..(16)..(17)..(18)..(19): Xaa is A or G
  MOD_RES (20)..(21)..(22)..(23): Xaa is A or G or is absent

SEQ ID NO: 22544 - protein, 35 aa, Artificial Sequence; identical to SEQ ID NO: 19440
  GFR-binding peptide

SEQ ID NO: 22545 - protein, 38 aa, Artificial Sequence; identical to SEQ ID NO: 19441
  GFR-binding peptide
  MOD_RES (4)..(38): Xaa is C or S
  MOD_RES (18)..(19)..(20)..(21)..(22): Xaa is A or G
  MOD_RES (23)..(24)..(25)..(26): Xaa is A or G or is absent

SEQ ID NO: 22546 - protein, 39 aa, Artificial Sequence; identical to SEQ ID NO: 19442
  GFR-binding peptide
  MOD_RES (3)..(37)..(39): Xaa is C or S

SEQ ID NO: 22547 - protein, 33 aa, Artificial Sequence; identical to SEQ ID NO: 19443
  GFR-binding peptide

SEQ ID NO: 22548 - protein, 37 aa, Artificial Sequence; identical to SEQ ID NO: 19444
  GFR-binding peptide
  MOD_RES (35)..(37): Xaa is C or S

SEQ ID NO: 22549 - protein, 34 aa, Artificial Sequence; identical to SEQ ID NO: 19445
  GFR-binding peptide
  MOD_RES (2)..(2): Xaa is C or S
  MOD_RES (16)..(17)..(18)..(19)..(20): Xaa is A or G
  MOD_RES (21)..(22)..(23)..(24): Xaa is A or G or is absent

SEQ ID NO: 22550 - protein, 39 aa, Artificial Sequence; identical to SEQ ID NO: 19446
  GFR-binding peptide
  MOD_RES (1)..(38): Xaa is C or S
  MOD_RES (17)..(18)..(19)..(20)..(21): Xaa is A or G
  MOD_RES (22)..(23)..(24)..(25): Xaa is A or G or is absent

SEQ ID NO: 22551 - protein, 37 aa, Artificial Sequence; identical to SEQ ID NO: 19447
  GFR-binding peptide
  MOD_RES (36)..(36): Xaa is C or S
  MOD_RES (15)..(16)..(17)..(18)..(19): Xaa is A or G
  MOD_RES (20)..(21)..(22)..(23): Xaa is A or G or is absent

SEQ ID NO: 22552 - protein, 39 aa, Artificial Sequence; identical to SEQ ID NO: 19448
  GFR-binding peptide
  MOD_RES (2)..(39): Xaa is C or S

SEQ ID NO: 22553 - protein, 38 aa, Artificial Sequence; identical to SEQ ID NO: 19449
  GFR-binding peptide
  MOD_RES (3)..(37): Xaa is C or S

SEQ ID NO: 22554 - protein, 37 aa, Artificial Sequence; identical to SEQ ID NO: 19450
  GFR-binding peptide
  MOD_RES (35)..(37): Xaa is C or S

SEQ ID NO: 22555 - protein, 43 aa, Artificial Sequence; identical to SEQ ID NO: 19451
  GFR-binding peptide
  MOD_RES (6)..(40)..(42): Xaa is C or S

SEQ ID NO: 22556 - protein, 37 aa, Artificial Sequence; identical to SEQ ID NO: 19452
  GFR-binding peptide
  MOD_RES (1)..(1): Xaa is C or S

SEQ ID NO: 22557 - protein, 33 aa, Artificial Sequence; identical to SEQ ID NO: 19453
  GFR-binding peptide
  MOD_RES (14)..(15)..(16)..(17)..(18): Xaa is A or G
  MOD_RES (19)..(20)..(21)..(22): Xaa is A or G or is absent

SEQ ID NO: 22558 - protein, 37 aa, Artificial Sequence; identical to SEQ ID NO: 19454
  GFR-binding peptide
  MOD_RES (1)..(35)..(37): Xaa is C or S
  MOD_RES (15)..(16)..(17)..(18)..(19): Xaa is A or G
  MOD_RES (20)..(21)..(22)..(23): Xaa is A or G or is absent

SEQ ID NO: 22559 - protein, 42 aa, Artificial Sequence; identical to SEQ ID NO: 19455
  GFR-binding peptide
  MOD_RES (5)..(42): Xaa is C or S
  MOD_RES (21)..(22)..(23)..(24)..(25): Xaa is A or G
  MOD_RES (26)..(27)..(28)..(29): Xaa is A or G or is absent

SEQ ID NO: 22560 - protein, 39 aa, Artificial Sequence; identical to SEQ ID NO: 19456
  GFR-binding peptide
  MOD_RES (7)..(7): Xaa is C or S
  MOD_RES (21)..(22)..(23)..(24)..(25): Xaa is A or G
  MOD_RES (26)..(27)..(28)..(29): Xaa is A or G or is absent

SEQ ID NO: 22561 - protein, 38 aa, Artificial Sequence; identical to SEQ ID NO: 19457
  GFR-binding peptide
  MOD_RES (1)..(38): Xaa is C or S

SEQ ID NO: 22562 - protein, 37 aa, Artificial Sequence; identical to SEQ ID NO: 19458
  GFR-binding peptide
  MOD_RES (34)..(36): Xaa is C or S
  MOD_RES (14)..(15)..(16)..(17)..(18): Xaa is A or G
  MOD_RES (19)..(20)..(21)..(22): Xaa is A or G or is absent

SEQ ID NO: 22563 - protein, 32 aa, Artificial Sequence; identical to SEQ ID NO: 19459
  GFR-binding peptide
  MOD_RES (14)..(15)..(16)..(17)..(18): Xaa is A or G
  MOD_RES (19)..(20)..(21)..(22): Xaa is A or G or is absent

SEQ ID NO: 22564 - protein, 43 aa, Artificial Sequence; identical to SEQ ID NO: 19460
  GFR-binding peptide
  MOD_RES (5)..(42): Xaa is C or S

SEQ ID NO: 22565 - protein, 38 aa, Artificial Sequence; identical to SEQ ID NO: 19461
  GFR-binding peptide
  MOD_RES (3)..(3): Xaa is C or S

SEQ ID NO: 22566 - protein, 42 aa, Artificial Sequence; identical to SEQ ID NO: 19462
  GFR-binding peptide
  MOD_RES (5)..(42): Xaa is C or S
  MOD_RES (21)..(22)..(23)..(24)..(25): Xaa is A or G
  MOD_RES (26)..(27)..(28)..(29): Xaa is A or G or is absent

SEQ ID NO: 22567 - protein, 34 aa, Artificial Sequence; identical to SEQ ID NO: 19463
  GFR-binding peptide

SEQ ID NO: 22568 - protein, 38 aa, Artificial Sequence; identical to SEQ ID NO: 19464
  GFR-binding peptide
  MOD_RES (2)..(2): Xaa is C or S
  MOD_RES (18)..(19)..(20)..(21)..(22): Xaa is A or G
  MOD_RES (23)..(24)..(25)..(26): Xaa is A or G or is absent

SEQ ID NO: 22569 - protein, 35 aa, Artificial Sequence; identical to SEQ ID NO: 19465
  GFR-binding peptide
  MOD_RES (1)..(35): Xaa is C or S
  MOD_RES (15)..(16)..(17)..(18)..(19): Xaa is A or G
  MOD_RES (20)..(21)..(22)..(23): Xaa is A or G or is absent

SEQ ID NO: 22570 - protein, 44 aa, Artificial Sequence; identical to SEQ ID NO: 19466
  GFR-binding peptide
  MOD_RES (4)..(41)..(43): Xaa is C or S
  MOD_RES (20)..(21)..(22)..(23)..(24): Xaa is A or G
  MOD_RES (25)..(26)..(27)..(28): Xaa is A or G or is absent

SEQ ID NO: 22571 - protein, 39 aa, Artificial Sequence; identical to SEQ ID NO: 19467
  GFR-binding peptide
  MOD_RES (5)..(5): Xaa is C or S
  MOD_RES (21)..(22)..(23)..(24)..(25): Xaa is A or G
  MOD_RES (26)..(27)..(28)..(29): Xaa is A or G or is absent

SEQ ID NO: 22572 - protein, 40 aa, Artificial Sequence; identical to SEQ ID NO: 19468
  GFR-binding peptide
  MOD_RES (7)..(7): Xaa is C or S
  MOD_RES (21)..(22)..(23)..(24)..(25): Xaa is A or G
  MOD_RES (26)..(27)..(28)..(29): Xaa is A or G or is absent

SEQ ID NO: 22573 - protein, 34 aa, Artificial Sequence; identical to SEQ ID NO: 19469
  GFR-binding peptide
  MOD_RES (15)..(16)..(17)..(18)..(19): Xaa is A or G
  MOD_RES (20)..(21)..(22)..(23): Xaa is A or G or is absent

SEQ ID NO: 22574 - protein, 39 aa, Artificial Sequence; identical to SEQ ID NO: 19470
  GFR-binding peptide
  MOD_RES (7)..(7): Xaa is C or S

SEQ ID NO: 22575 - protein, 42 aa, Artificial Sequence; identical to SEQ ID NO: 19471
  GFR-binding peptide
  MOD_RES (4)..(41): Xaa is C or S
  MOD_RES (20)..(21)..(22)..(23)..(24): Xaa is A or G
  MOD_RES (25)..(26)..(27)..(28): Xaa is A or G or is absent

SEQ ID NO: 22576 - protein, 32 aa, Artificial Sequence; identical to SEQ ID NO: 19472
  GFR-binding peptide
  MOD_RES (14)..(15)..(16)..(17)..(18): Xaa is A or G
  MOD_RES (19)..(20)..(21)..(22): Xaa is A or G or is absent

SEQ ID NO: 22577 - protein, 40 aa, Artificial Sequence; identical to SEQ ID NO: 19473
  GFR-binding peptide
  MOD_RES (5)..(39): Xaa is C or S

SEQ ID NO: 22578 - protein, 39 aa, Artificial Sequence; identical to SEQ ID NO: 19474
  GFR-binding peptide
  MOD_RES (3)..(37)..(39): Xaa is C or S

SEQ ID NO: 22579 - protein, 37 aa, Artificial Sequence; identical to SEQ ID NO: 19475
  GFR-binding peptide
  MOD_RES (36)..(36): Xaa is C or S
  MOD_RES (15)..(16)..(17)..(18)..(19): Xaa is A or G
  MOD_RES (20)..(21)..(22)..(23): Xaa is A or G or is absent

SEQ ID NO: 22580 - protein, 33 aa, Artificial Sequence; identical to SEQ ID NO: 19476
  GFR-binding peptide
  MOD_RES (14)..(15)..(16)..(17)..(18): Xaa is A or G
  MOD_RES (19)..(20)..(21)..(22): Xaa is A or G or is absent

SEQ ID NO: 22581 - protein, 37 aa, Artificial Sequence; identical to SEQ ID NO: 19477
  GFR-binding peptide
  MOD_RES (5)..(5): Xaa is C or S
  MOD_RES (19)..(20)..(21)..(22)..(23): Xaa is A or G
  MOD_RES (24)..(25)..(26)..(27): Xaa is A or G or is absent

SEQ ID NO: 22582 - protein, 41 aa, Artificial Sequence; identical to SEQ ID NO: 19478
  GFR-binding peptide
  MOD_RES (1)..(38)..(40): Xaa is C or S
  MOD_RES (17)..(18)..(19)..(20)..(21): Xaa is A or G
  MOD_RES (22)..(23)..(24)..(25): Xaa is A or G or is absent

SEQ ID NO: 22583 - protein, 38 aa, Artificial Sequence; identical to SEQ ID NO: 19479
  GFR-binding peptide
  MOD_RES (37)..(37): Xaa is C or S
  MOD_RES (16)..(17)..(18)..(19)..(20): Xaa is A or G
  MOD_RES (21)..(22)..(23)..(24): Xaa is A or G or is absent

SEQ ID NO: 22584 - protein, 38 aa, Artificial Sequence; identical to SEQ ID NO: 19480
  GFR-binding peptide
  MOD_RES (36)..(38): Xaa is C or S
  MOD_RES (15)..(16)..(17)..(18)..(19): Xaa is A or G
  MOD_RES (20)..(21)..(22)..(23): Xaa is A or G or is absent

SEQ ID NO: 22585 - protein, 41 aa, Artificial Sequence; identical to SEQ ID NO: 19481
  GFR-binding peptide
  MOD_RES (4)..(41): Xaa is C or S
  MOD_RES (20)..(21)..(22)..(23)..(24): Xaa is A or G
  MOD_RES (25)..(26)..(27)..(28): Xaa is A or G or is absent

SEQ ID NO: 22586 - protein, 37 aa, Artificial Sequence; identical to SEQ ID NO: 19482
  GFR-binding peptide
  MOD_RES (4)..(4): Xaa is C or S
  MOD_RES (18)..(19)..(20)..(21)..(22): Xaa is A or G
  MOD_RES (23)..(24)..(25)..(26): Xaa is A or G or is absent

SEQ ID NO: 22587 - protein, 40 aa, Artificial Sequence; identical to SEQ ID NO: 19483
  GFR-binding peptide
  MOD_RES (5)..(39): Xaa is C or S

SEQ ID NO: 22588 - protein, 40 aa, Artificial Sequence; identical to SEQ ID NO: 19484
  GFR-binding peptide
  MOD_RES (4)..(4): Xaa is C or S
  MOD_RES (20)..(21)..(22)..(23)..(24): Xaa is A or G
  MOD_RES (25)..(26)..(27)..(28): Xaa is A or G or is absent

SEQ ID NO: 22589 - protein, 39 aa, Artificial Sequence; identical to SEQ ID NO: 19485
  GFR-binding peptide
  MOD_RES (3)..(37)..(39): Xaa is C or S

SEQ ID NO: 22590 - protein, 38 aa, Artificial Sequence; identical to SEQ ID NO: 19486
  GFR-binding peptide
  MOD_RES (6)..(6): Xaa is C or S

SEQ ID NO: 22591 - protein, 39 aa, Artificial Sequence; identical to SEQ ID NO: 19487
  GFR-binding peptide
  MOD_RES (3)..(3): Xaa is C or S
  MOD_RES (19)..(20)..(21)..(22)..(23): Xaa is A or G
  MOD_RES (24)..(25)..(26)..(27): Xaa is A or G or is absent

SEQ ID NO: 22592 - protein, 43 aa, Artificial Sequence; identical to SEQ ID NO: 19488
  GFR-binding peptide
  MOD_RES (6)..(40)..(42): Xaa is C or S
  MOD_RES (20)..(21)..(22)..(23)..(24): Xaa is A or G
  MOD_RES (25)..(26)..(27)..(28): Xaa is A or G or is absent

SEQ ID NO: 22593 - protein, 41 aa, Artificial Sequence; identical to SEQ ID NO: 19489
  GFR-binding peptide
  MOD_RES (6)..(40): Xaa is C or S

SEQ ID NO: 22594 - protein, 34 aa, Artificial Sequence; identical to SEQ ID NO: 19490
  GFR-binding peptide
  MOD_RES (16)..(17)..(18)..(19)..(20): Xaa is A or G
  MOD_RES (21)..(22)..(23)..(24): Xaa is A or G or is absent

SEQ ID NO: 22595 - protein, 41 aa, Artificial Sequence; identical to SEQ ID NO: 19491
  GFR-binding peptide
  MOD_RES (1)..(38)..(40): Xaa is C or S
  MOD_RES (17)..(18)..(19)..(20)..(21): Xaa is A or G
  MOD_RES (22)..(23)..(24)..(25): Xaa is A or G or is absent

SEQ ID NO: 22596 - protein, 36 aa, Artificial Sequence; identical to SEQ ID NO: 19492
  GFR-binding peptide
  MOD_RES (34)..(36): Xaa is C or S

SEQ ID NO: 22597 - protein, 40 aa, Artificial Sequence; identical to SEQ ID NO: 19493
  GFR-binding peptide
  MOD_RES (2)..(39): Xaa is C or S
  MOD_RES (18)..(19)..(20)..(21)..(22): Xaa is A or G
  MOD_RES (23)..(24)..(25)..(26): Xaa is A or G or is absent

SEQ ID NO: 22598 - protein, 40 aa, Artificial Sequence; identical to SEQ ID NO: 19494
  GFR-binding peptide
  MOD_RES (3)..(40): Xaa is C or S
  MOD_RES (19)..(20)..(21)..(22)..(23): Xaa is A or G
  MOD_RES (24)..(25)..(26)..(27): Xaa is A or G or is absent

SEQ ID NO: 22599 - protein, 39 aa, Artificial Sequence; identical to SEQ ID NO: 19495
  GFR-binding peptide
  MOD_RES (4)..(4): Xaa is C or S
  MOD_RES (20)..(21)..(22)..(23)..(24): Xaa is A or G
  MOD_RES (25)..(26)..(27)..(28): Xaa is A or G or is absent

SEQ ID NO: 22600 - protein, 32 aa, Artificial Sequence; identical to SEQ ID NO: 19496
  GFR-binding peptide
  MOD_RES (14)..(15)..(16)..(17)..(18): Xaa is A or G
  MOD_RES (19)..(20)..(21)..(22): Xaa is A or G or is absent

SEQ ID NO: 22601 - protein, 37 aa, Artificial Sequence; identical to SEQ ID NO: 19497
  GFR-binding peptide
  MOD_RES (2)..(2): Xaa is C or S

SEQ ID NO: 22602 - protein, 40 aa, Artificial Sequence; identical to SEQ ID NO: 19498
  GFR-binding peptide
  MOD_RES (4)..(4): Xaa is C or S
  MOD_RES (20)..(21)..(22)..(23)..(24): Xaa is A or G
  MOD_RES (25)..(26)..(27)..(28): Xaa is A or G or is absent

SEQ ID NO: 22603 - protein, 40 aa, Artificial Sequence; identical to SEQ ID NO: 19499
  GFR-binding peptide
  MOD_RES (4)..(38)..(40): Xaa is C or S
  MOD_RES (18)..(19)..(20)..(21)..(22): Xaa is A or G
  MOD_RES (23)..(24)..(25)..(26): Xaa is A or G or is absent

SEQ ID NO: 22604 - protein, 38 aa, Artificial Sequence; identical to SEQ ID NO: 19500
  GFR-binding peptide
  MOD_RES (2)..(2): Xaa is C or S

SEQ ID NO: 22605 - protein, 42 aa, Artificial Sequence; identical to SEQ ID NO: 19501
  GFR-binding peptide
  MOD_RES (4)..(41): Xaa is C or S

SEQ ID NO: 22606 - protein, 40 aa, Artificial Sequence; identical to SEQ ID NO: 19502
  GFR-binding peptide
  MOD_RES (5)..(39): Xaa is C or S

SEQ ID NO: 22607 - protein, 36 aa, Artificial Sequence; identical to SEQ ID NO: 19503
  GFR-binding peptide
  MOD_RES (36)..(36): Xaa is C or S

SEQ ID NO: 22608 - protein, 42 aa, Artificial Sequence; identical to SEQ ID NO: 19504
  GFR-binding peptide
  MOD_RES (2)..(39)..(41): Xaa is C or S

SEQ ID NO: 22609 - protein, 40 aa, Artificial Sequence; identical to SEQ ID NO: 19505
  GFR-binding peptide
  MOD_RES (6)..(40): Xaa is C or S
  MOD_RES (20)..(21)..(22)..(23)..(24): Xaa is A or G
  MOD_RES (25)..(26)..(27)..(28): Xaa is A or G or is absent

SEQ ID NO: 22610 - protein, 34 aa, Artificial Sequence; identical to SEQ ID NO: 19506
  GFR-binding peptide
  MOD_RES (1)..(1): Xaa is C or S

SEQ ID NO: 22611 - protein, 39 aa, Artificial Sequence; identical to SEQ ID NO: 19507
  GFR-binding peptide
  MOD_RES (36)..(38): Xaa is C or S
  MOD_RES (15)..(16)..(17)..(18)..(19): Xaa is A or G
  MOD_RES (20)..(21)..(22)..(23): Xaa is A or G or is absent

SEQ ID NO: 22612 - protein, 36 aa, Artificial Sequence; identical to SEQ ID NO: 19508
  GFR-binding peptide
  MOD_RES (16)..(17)..(18)..(19)..(20): Xaa is A or G
  MOD_RES (21)..(22)..(23)..(24): Xaa is A or G or is absent

SEQ ID NO: 22613 - protein, 39 aa, Artificial Sequence; identical to SEQ ID NO: 19509
  GFR-binding peptide
  MOD_RES (5)..(39): Xaa is C or S
  MOD_RES (19)..(20)..(21)..(22)..(23): Xaa is A or G
  MOD_RES (24)..(25)..(26)..(27): Xaa is A or G or is absent

SEQ ID NO: 22614 - protein, 44 aa, Artificial Sequence; identical to SEQ ID NO: 19510
  GFR-binding peptide
  MOD_RES (5)..(42)..(44): Xaa is C or S
  MOD_RES (21)..(22)..(23)..(24)..(25): Xaa is A or G
  MOD_RES (26)..(27)..(28)..(29): Xaa is A or G or is absent

SEQ ID NO: 22615 - protein, 44 aa, Artificial Sequence; identical to SEQ ID NO: 19511
  GFR-binding peptide
  MOD_RES (5)..(42)..(44): Xaa is C or S

SEQ ID NO: 22616 - protein, 38 aa, Artificial Sequence; identical to SEQ ID NO: 19512
  GFR-binding peptide
  MOD_RES (35)..(37): Xaa is C or S
  MOD_RES (14)..(15)..(16)..(17)..(18): Xaa is A or G
  MOD_RES (19)..(20)..(21)..(22): Xaa is A or G or is absent

SEQ ID NO: 22617 - protein, 37 aa, Artificial Sequence; identical to SEQ ID NO: 19513
  GFR-binding peptide
  MOD_RES (4)..(4): Xaa is C or S
  MOD_RES (18)..(19)..(20)..(21)..(22): Xaa is A or G
  MOD_RES (23)..(24)..(25)..(26): Xaa is A or G or is absent

SEQ ID NO: 22618 - protein, 38 aa, Artificial Sequence; identical to SEQ ID NO: 19514
  GFR-binding peptide
  MOD_RES (36)..(38): Xaa is C or S
  MOD_RES (15)..(16)..(17)..(18)..(19): Xaa is A or G
  MOD_RES (20)..(21)..(22)..(23): Xaa is A or G or is absent

SEQ ID NO: 22619 - protein, 41 aa, Artificial Sequence; identical to SEQ ID NO: 19515
  GFR-binding peptide
  MOD_RES (5)..(5): Xaa is C or S

SEQ ID NO: 22620 - protein, 34 aa, Artificial Sequence; identical to SEQ ID NO: 19516
  GFR-binding peptide
  MOD_RES (2)..(2): Xaa is C or S

SEQ ID NO: 22621 - protein, 37 aa, Artificial Sequence; identical to SEQ ID NO: 19517
  GFR-binding peptide
  MOD_RES (2)..(2): Xaa is C or S
  MOD_RES (18)..(19)..(20)..(21)..(22): Xaa is A or G
  MOD_RES (23)..(24)..(25)..(26): Xaa is A or G or is absent

SEQ ID NO: 22622 - protein, 39 aa, Artificial Sequence; identical to SEQ ID NO: 19518
  GFR-binding peptide
  MOD_RES (5)..(5): Xaa is C or S

SEQ ID NO: 22623 - protein, 42 aa, Artificial Sequence; identical to SEQ ID NO: 19519
  GFR-binding peptide
  MOD_RES (5)..(42): Xaa is C or S

SEQ ID NO: 22624 - protein, 36 aa, Artificial Sequence; identical to SEQ ID NO: 19520
  GFR-binding peptide
  MOD_RES (34)..(36): Xaa is C or S
  MOD_RES (14)..(15)..(16)..(17)..(18): Xaa is A or G
  MOD_RES (19)..(20)..(21)..(22): Xaa is A or G or is absent

SEQ ID NO: 22625 - protein, 36 aa, Artificial Sequence; identical to SEQ ID NO: 19521
  GFR-binding peptide
  MOD_RES (3)..(3): Xaa is C or S
  MOD_RES (17)..(18)..(19)..(20)..(21): Xaa is A or G
  MOD_RES (22)..(23)..(24)..(25): Xaa is A or G or is absent

SEQ ID NO: 22626 - protein, 38 aa, Artificial Sequence; identical to SEQ ID NO: 19522
  GFR-binding peptide
  MOD_RES (5)..(5): Xaa is C or S
  MOD_RES (19)..(20)..(21)..(22)..(23): Xaa is A or G
  MOD_RES (24)..(25)..(26)..(27): Xaa is A or G or is absent

SEQ ID NO: 22627 - protein, 39 aa, Artificial Sequence; identical to SEQ ID NO: 19523
  GFR-binding peptide
  MOD_RES (2)..(39): Xaa is C or S

SEQ ID NO: 22628 - protein, 43 aa, Artificial Sequence; identical to SEQ ID NO: 19524
  GFR-binding peptide
  MOD_RES (4)..(41)..(43): Xaa is C or S

SEQ ID NO: 22629 - protein, 41 aa, Artificial Sequence; identical to SEQ ID NO: 19525
  GFR-binding peptide
  MOD_RES (2)..(39)..(41): Xaa is C or S
  MOD_RES (18)..(19)..(20)..(21)..(22): Xaa is A or G
  MOD_RES (23)..(24)..(25)..(26): Xaa is A or G or is absent

SEQ ID NO: 22630 - protein, 34 aa, Artificial Sequence; identical to SEQ ID NO: 19526
  GFR-binding peptide
  MOD_RES (34)..(34): Xaa is C or S

SEQ ID NO: 22631 - protein, 41 aa, Artificial Sequence; identical to SEQ ID NO: 19527
  GFR-binding peptide
  MOD_RES (6)..(40): Xaa is C or S
  MOD_RES (20)..(21)..(22)..(23)..(24): Xaa is A or G
  MOD_RES (25)..(26)..(27)..(28): Xaa is A or G or is absent

SEQ ID NO: 22632 - protein, 37 aa, Artificial Sequence; identical to SEQ ID NO: 19528
  GFR-binding peptide
  MOD_RES (3)..(3): Xaa is C or S
  MOD_RES (19)..(20)..(21)..(22)..(23): Xaa is A or G
  MOD_RES (24)..(25)..(26)..(27): Xaa is A or G or is absent

SEQ ID NO: 22633 - protein, 43 aa, Artificial Sequence; identical to SEQ ID NO: 19529
  GFR-binding peptide
  MOD_RES (7)..(41)..(43): Xaa is C or S
  MOD_RES (21)..(22)..(23)..(24)..(25): Xaa is A or G
  MOD_RES (26)..(27)..(28)..(29): Xaa is A or G or is absent

SEQ ID NO: 22634 - protein, 41 aa, Artificial Sequence; identical to SEQ ID NO: 19530
  GFR-binding peptide
  MOD_RES (5)..(39)..(41): Xaa is C or S

SEQ ID NO: 22635 - protein, 39 aa, Artificial Sequence; identical to SEQ ID NO: 19531
  GFR-binding peptide
  MOD_RES (6)..(6): Xaa is C or S

SEQ ID NO: 22636 - protein, 39 aa, Artificial Sequence; identical to SEQ ID NO: 19532
  GFR-binding peptide
  MOD_RES (6)..(6): Xaa is C or S

SEQ ID NO: 22637 - protein, 37 aa, Artificial Sequence; identical to SEQ ID NO: 19533
  GFR-binding peptide
  MOD_RES (3)..(3): Xaa is C or S
  MOD_RES (19)..(20)..(21)..(22)..(23): Xaa is A or G
  MOD_RES (24)..(25)..(26)..(27): Xaa is A or G or is absent

SEQ ID NO: 22638 - protein, 39 aa, Artificial Sequence; identical to SEQ ID NO: 19534
  GFR-binding peptide
  MOD_RES (1)..(38): Xaa is C or S
  MOD_RES (17)..(18)..(19)..(20)..(21): Xaa is A or G
  MOD_RES (22)..(23)..(24)..(25): Xaa is A or G or is absent

SEQ ID NO: 22639 - protein, 40 aa, Artificial Sequence; identical to SEQ ID NO: 19535
  GFR-binding peptide
  MOD_RES (6)..(40): Xaa is C or S
  MOD_RES (20)..(21)..(22)..(23)..(24): Xaa is A or G
  MOD_RES (25)..(26)..(27)..(28): Xaa is A or G or is absent

SEQ ID NO: 22640 - protein, 43 aa, Artificial Sequence; identical to SEQ ID NO: 19536
  GFR-binding peptide
  MOD_RES (3)..(40)..(42): Xaa is C or S
  MOD_RES (19)..(20)..(21)..(22)..(23): Xaa is A or G
  MOD_RES (24)..(25)..(26)..(27): Xaa is A or G or is absent

SEQ ID NO: 22641 - protein, 37 aa, Artificial Sequence; identical to SEQ ID NO: 19537
  GFR-binding peptide
  MOD_RES (2)..(2): Xaa is C or S

SEQ ID NO: 22642 - protein, 41 aa, Artificial Sequence; identical to SEQ ID NO: 19538
  GFR-binding peptide
  MOD_RES (7)..(41): Xaa is C or S

SEQ ID NO: 22643 - protein, 44 aa, Artificial Sequence; identical to SEQ ID NO: 19539
  GFR-binding peptide
  MOD_RES (5)..(42)..(44): Xaa is C or S

SEQ ID NO: 22644 - protein, 42 aa, Artificial Sequence; identical to SEQ ID NO: 19540
  GFR-binding peptide
  MOD_RES (5)..(42): Xaa is C or S
  MOD_RES (21)..(22)..(23)..(24)..(25): Xaa is A or G
  MOD_RES (26)..(27)..(28)..(29): Xaa is A or G or is absent

SEQ ID NO: 22645 - protein, 38 aa, Artificial Sequence; identical to SEQ ID NO: 19541
  GFR-binding peptide
  MOD_RES (3)..(3): Xaa is C or S

SEQ ID NO: 22646 - protein, 38 aa, Artificial Sequence; identical to SEQ ID NO: 19542
  GFR-binding peptide
  MOD_RES (35)..(37): Xaa is C or S
  MOD_RES (14)..(15)..(16)..(17)..(18): Xaa is A or G
  MOD_RES (19)..(20)..(21)..(22): Xaa is A or G or is absent

SEQ ID NO: 22647 - protein, 40 aa, Artificial Sequence; identical to SEQ ID NO: 19543
  GFR-binding peptide
  MOD_RES (3)..(40): Xaa is C or S
  MOD_RES (19)..(20)..(21)..(22)..(23): Xaa is A or G
  MOD_RES (24)..(25)..(26)..(27): Xaa is A or G or is absent

SEQ ID NO: 22648 - protein, 34 aa, Artificial Sequence; identical to SEQ ID NO: 19544
  GFR-binding peptide

SEQ ID NO: 22649 - protein, 35 aa, Artificial Sequence; identical to SEQ ID NO: 19545
  GFR-binding peptide
  MOD_RES (2)..(2): Xaa is C or S
  MOD_RES (16)..(17)..(18)..(19)..(20): Xaa is A or G
  MOD_RES (21)..(22)..(23)..(24): Xaa is A or G or is absent

SEQ ID NO: 22650 - protein, 37 aa, Artificial Sequence; identical to SEQ ID NO: 19546
  GFR-binding peptide
  MOD_RES (34)..(36): Xaa is C or S

SEQ ID NO: 22651 - protein, 37 aa, Artificial Sequence; identical to SEQ ID NO: 19547
  GFR-binding peptide
  MOD_RES (34)..(36): Xaa is C or S
  MOD_RES (14)..(15)..(16)..(17)..(18): Xaa is A or G
  MOD_RES (19)..(20)..(21)..(22): Xaa is A or G or is absent

SEQ ID NO: 22652 - protein, 35 aa, Artificial Sequence; identical to SEQ ID NO: 19548
  GFR-binding peptide
  MOD_RES (1)..(1): Xaa is C or S
  MOD_RES (17)..(18)..(19)..(20)..(21): Xaa is A or G
  MOD_RES (22)..(23)..(24)..(25): Xaa is A or G or is absent

SEQ ID NO: 22653 - protein, 36 aa, Artificial Sequence; identical to SEQ ID NO: 19549
  GFR-binding peptide
  MOD_RES (35)..(35): Xaa is C or S
  MOD_RES (14)..(15)..(16)..(17)..(18): Xaa is A or G
  MOD_RES (19)..(20)..(21)..(22): Xaa is A or G or is absent

SEQ ID NO: 22654 - protein, 38 aa, Artificial Sequence; identical to SEQ ID NO: 19550
  GFR-binding peptide
  MOD_RES (3)..(3): Xaa is C or S
  MOD_RES (19)..(20)..(21)..(22)..(23): Xaa is A or G
  MOD_RES (24)..(25)..(26)..(27): Xaa is A or G or is absent

SEQ ID NO: 22655 - protein, 34 aa, Artificial Sequence; identical to SEQ ID NO: 19551
  GFR-binding peptide
  MOD_RES (15)..(16)..(17)..(18)..(19): Xaa is A or G
  MOD_RES (20)..(21)..(22)..(23): Xaa is A or G or is absent

SEQ ID NO: 22656 - protein, 35 aa, Artificial Sequence; identical to SEQ ID NO: 19552
  GFR-binding peptide
  MOD_RES (1)..(1): Xaa is C or S
  MOD_RES (17)..(18)..(19)..(20)..(21): Xaa is A or G
  MOD_RES (22)..(23)..(24)..(25): Xaa is A or G or is absent

SEQ ID NO: 22657 - protein, 33 aa, Artificial Sequence; identical to SEQ ID NO: 19553
  GFR-binding peptide

SEQ ID NO: 22658 - protein, 42 aa, Artificial Sequence; identical to SEQ ID NO: 19554
  GFR-binding peptide
  MOD_RES (3)..(40)..(42): Xaa is C or S
  MOD_RES (19)..(20)..(21)..(22)..(23): Xaa is A or G
  MOD_RES (24)..(25)..(26)..(27): Xaa is A or G or is absent

SEQ ID NO: 22659 - protein, 38 aa, Artificial Sequence; identical to SEQ ID NO: 19555
  GFR-binding peptide
  MOD_RES (1)..(38): Xaa is C or S
  MOD_RES (17)..(18)..(19)..(20)..(21): Xaa is A or G
  MOD_RES (22)..(23)..(24)..(25): Xaa is A or G or is absent

SEQ ID NO: 22660 - protein, 36 aa, Artificial Sequence; identical to SEQ ID NO: 19556
  GFR-binding peptide
  MOD_RES (4)..(4): Xaa is C or S
  MOD_RES (18)..(19)..(20)..(21)..(22): Xaa is A or G
  MOD_RES (23)..(24)..(25)..(26): Xaa is A or G or is absent

SEQ ID NO: 22661 - protein, 40 aa, Artificial Sequence; identical to SEQ ID NO: 19557
  GFR-binding peptide
  MOD_RES (37)..(39): Xaa is C or S

SEQ ID NO: 22662 - protein, 39 aa, Artificial Sequence; identical to SEQ ID NO: 19558
  GFR-binding peptide
  MOD_RES (2)..(36)..(38): Xaa is C or S
  MOD_RES (16)..(17)..(18)..(19)..(20): Xaa is A or G
  MOD_RES (21)..(22)..(23)..(24): Xaa is A or G or is absent

SEQ ID NO: 22663 - protein, 42 aa, Artificial Sequence; identical to SEQ ID NO: 19559
  GFR-binding peptide
  MOD_RES (2)..(39)..(41): Xaa is C or S
  MOD_RES (18)..(19)..(20)..(21)..(22): Xaa is A or G
  MOD_RES (23)..(24)..(25)..(26): Xaa is A or G or is absent

SEQ ID NO: 22664 - protein, 45 aa, Artificial Sequence; identical to SEQ ID NO: 19560
  GFR-binding peptide
  MOD_RES (5)..(42)..(44): Xaa is C or S

SEQ ID NO: 22665 - protein, 34 aa, Artificial Sequence; identical to SEQ ID NO: 19561
  GFR-binding peptide
  MOD_RES (34)..(34): Xaa is C or S

SEQ ID NO: 22666 - protein, 41 aa, Artificial Sequence; identical to SEQ ID NO: 19562
  GFR-binding peptide
  MOD_RES (4)..(38)..(40): Xaa is C or S
  MOD_RES (18)..(19)..(20)..(21)..(22): Xaa is A or G
  MOD_RES (23)..(24)..(25)..(26): Xaa is A or G or is absent

SEQ ID NO: 22667 - protein, 38 aa, Artificial Sequence; identical to SEQ ID NO: 19563
  GFR-binding peptide
  MOD_RES (3)..(37): Xaa is C or S

SEQ ID NO: 22668 - protein, 38 aa, Artificial Sequence; identical to SEQ ID NO: 19564
  GFR-binding peptide
  MOD_RES (1)..(35)..(37): Xaa is C or S

SEQ ID NO: 22669 - protein, 35 aa, Artificial Sequence; identical to SEQ ID NO: 19565
  GFR-binding peptide
  MOD_RES (35)..(35): Xaa is C or S
  MOD_RES (14)..(15)..(16)..(17)..(18): Xaa is A or G
  MOD_RES (19)..(20)..(21)..(22): Xaa is A or G or is absent

SEQ ID NO: 22670 - protein, 40 aa, Artificial Sequence; identical to SEQ ID NO: 19566
  GFR-binding peptide
  MOD_RES (37)..(39): Xaa is C or S
  MOD_RES (16)..(17)..(18)..(19)..(20): Xaa is A or G
  MOD_RES (21)..(22)..(23)..(24): Xaa is A or G or is absent

SEQ ID NO: 22671 - protein, 35 aa, Artificial Sequence; identical to SEQ ID NO: 19567
  GFR-binding peptide
  MOD_RES (1)..(1): Xaa is C or S

SEQ ID NO: 22672 - protein, 40 aa, Artificial Sequence; identical to SEQ ID NO: 19568
  GFR-binding peptide
  MOD_RES (4)..(38)..(40): Xaa is C or S

SEQ ID NO: 22673 - protein, 38 aa, Artificial Sequence; identical to SEQ ID NO: 19569
  GFR-binding peptide
  MOD_RES (3)..(37): Xaa is C or S

SEQ ID NO: 22674 - protein, 43 aa, Artificial Sequence; identical to SEQ ID NO: 19570
  GFR-binding peptide
  MOD_RES (7)..(41)..(43): Xaa is C or S
  MOD_RES (21)..(22)..(23)..(24)..(25): Xaa is A or G
  MOD_RES (26)..(27)..(28)..(29): Xaa is A or G or is absent

SEQ ID NO: 22675 - protein, 33 aa, Artificial Sequence; identical to SEQ ID NO: 19571
  GFR-binding peptide
  MOD_RES (1)..(1): Xaa is C or S
  MOD_RES (15)..(16)..(17)..(18)..(19): Xaa is A or G
  MOD_RES (20)..(21)..(22)..(23): Xaa is A or G or is absent

SEQ ID NO: 22676 - protein, 33 aa, Artificial Sequence; identical to SEQ ID NO: 19572
  GFR-binding peptide

SEQ ID NO: 22677 - protein, 39 aa, Artificial Sequence; identical to SEQ ID NO: 19573
  GFR-binding peptide
  MOD_RES (3)..(3): Xaa is C or S
  MOD_RES (19)..(20)..(21)..(22)..(23): Xaa is A or G
  MOD_RES (24)..(25)..(26)..(27): Xaa is A or G or is absent

SEQ ID NO: 22678 - protein, 38 aa, Artificial Sequence; identical to SEQ ID NO: 19574
  GFR-binding peptide
  MOD_RES (3)..(3): Xaa is C or S
  MOD_RES (19)..(20)..(21)..(22)..(23): Xaa is A or G
  MOD_RES (24)..(25)..(26)..(27): Xaa is A or G or is absent

SEQ ID NO: 22679 - protein, 39 aa, Artificial Sequence; identical to SEQ ID NO: 19575
  GFR-binding peptide
  MOD_RES (2)..(36)..(38): Xaa is C or S

SEQ ID NO: 22680 - protein, 40 aa, Artificial Sequence; identical to SEQ ID NO: 19576
  GFR-binding peptide
  MOD_RES (2)..(39): Xaa is C or S

SEQ ID NO: 22681 - protein, 36 aa, Artificial Sequence; identical to SEQ ID NO: 19577
  GFR-binding peptide
  MOD_RES (34)..(36): Xaa is C or S

SEQ ID NO: 22682 - protein, 35 aa, Artificial Sequence; identical to SEQ ID NO: 19578
  GFR-binding peptide

SEQ ID NO: 22683 - protein, 38 aa, Artificial Sequence; identical to SEQ ID NO: 19579
  GFR-binding peptide
  MOD_RES (4)..(4): Xaa is C or S
  MOD_RES (20)..(21)..(22)..(23)..(24): Xaa is A or G
  MOD_RES (25)..(26)..(27)..(28): Xaa is A or G or is absent

SEQ ID NO: 22684 - protein, 36 aa, Artificial Sequence; identical to SEQ ID NO: 19580
  GFR-binding peptide
  MOD_RES (2)..(2): Xaa is C or S
  MOD_RES (18)..(19)..(20)..(21)..(22): Xaa is A or G
  MOD_RES (23)..(24)..(25)..(26): Xaa is A or G or is absent

SEQ ID NO: 22685 - protein, 39 aa, Artificial Sequence; identical to SEQ ID NO: 19581
  GFR-binding peptide
  MOD_RES (3)..(3): Xaa is C or S
  MOD_RES (19)..(20)..(21)..(22)..(23): Xaa is A or G
  MOD_RES (24)..(25)..(26)..(27): Xaa is A or G or is absent

SEQ ID NO: 22686 - protein, 39 aa, Artificial Sequence; identical to SEQ ID NO: 19582
  GFR-binding peptide
  MOD_RES (5)..(39): Xaa is C or S
  MOD_RES (19)..(20)..(21)..(22)..(23): Xaa is A or G
  MOD_RES (24)..(25)..(26)..(27): Xaa is A or G or is absent

SEQ ID NO: 22687 - protein, 44 aa, Artificial Sequence; identical to SEQ ID NO: 19583
  GFR-binding peptide
  MOD_RES (7)..(41)..(43): Xaa is C or S
  MOD_RES (21)..(22)..(23)..(24)..(25): Xaa is A or G
  MOD_RES (26)..(27)..(28)..(29): Xaa is A or G or is absent

SEQ ID NO: 22688 - protein, 42 aa, Artificial Sequence; identical to SEQ ID NO: 19584
  GFR-binding peptide
  MOD_RES (7)..(41): Xaa is C or S
  MOD_RES (21)..(22)..(23)..(24)..(25): Xaa is A or G
  MOD_RES (26)..(27)..(28)..(29): Xaa is A or G or is absent

SEQ ID NO: 22689 - protein, 39 aa, Artificial Sequence; identical to SEQ ID NO: 19585
  GFR-binding peptide
  MOD_RES (2)..(39): Xaa is C or S
  MOD_RES (18)..(19)..(20)..(21)..(22): Xaa is A or G
  MOD_RES (23)..(24)..(25)..(26): Xaa is A or G or is absent

SEQ ID NO: 22690 - protein, 32 aa, Artificial Sequence; identical to SEQ ID NO: 19586
  GFR-binding peptide

SEQ ID NO: 22691 - protein, 44 aa, Artificial Sequence; identical to SEQ ID NO: 19587
  GFR-binding peptide
  MOD_RES (4)..(41)..(43): Xaa is C or S

SEQ ID NO: 22692 - protein, 36 aa, Artificial Sequence; identical to SEQ ID NO: 19588
  GFR-binding peptide
  MOD_RES (2)..(36): Xaa is C or S
  MOD_RES (16)..(17)..(18)..(19)..(20): Xaa is A or G
  MOD_RES (21)..(22)..(23)..(24): Xaa is A or G or is absent

SEQ ID NO: 22693 - protein, 33 aa, Artificial Sequence; identical to SEQ ID NO: 19589
  GFR-binding peptide
  MOD_RES (14)..(15)..(16)..(17)..(18): Xaa is A or G
  MOD_RES (19)..(20)..(21)..(22): Xaa is A or G or is absent

SEQ ID NO: 22694 - protein, 38 aa, Artificial Sequence; identical to SEQ ID NO: 19590
  GFR-binding peptide
  MOD_RES (2)..(36)..(38): Xaa is C or S
  MOD_RES (16)..(17)..(18)..(19)..(20): Xaa is A or G
  MOD_RES (21)..(22)..(23)..(24): Xaa is A or G or is absent

SEQ ID NO: 22695 - protein, 36 aa, Artificial Sequence; identical to SEQ ID NO: 19591
  GFR-binding peptide
  MOD_RES (16)..(17)..(18)..(19)..(20): Xaa is A or G
  MOD_RES (21)..(22)..(23)..(24): Xaa is A or G or is absent

SEQ ID NO: 22696 - protein, 33 aa, Artificial Sequence; identical to SEQ ID NO: 19592
  GFR-binding peptide
  MOD_RES (15)..(16)..(17)..(18)..(19): Xaa is A or G
  MOD_RES (20)..(21)..(22)..(23): Xaa is A or G or is absent

SEQ ID NO: 22697 - protein, 38 aa, Artificial Sequence; identical to SEQ ID NO: 19593
  GFR-binding peptide
  MOD_RES (1)..(38): Xaa is C or S

SEQ ID NO: 22698 - protein, 42 aa, Artificial Sequence; identical to SEQ ID NO: 19594
  GFR-binding peptide
  MOD_RES (3)..(40)..(42): Xaa is C or S

SEQ ID NO: 22699 - protein, 40 aa, Artificial Sequence; identical to SEQ ID NO: 19595
  GFR-binding peptide
  MOD_RES (6)..(40): Xaa is C or S

SEQ ID NO: 22700 - protein, 37 aa, Artificial Sequence; identical to SEQ ID NO: 19596
  GFR-binding peptide
  MOD_RES (2)..(36): Xaa is C or S
  MOD_RES (16)..(17)..(18)..(19)..(20): Xaa is A or G
  MOD_RES (21)..(22)..(23)..(24): Xaa is A or G or is absent

SEQ ID NO: 22701 - protein, 42 aa, Artificial Sequence; identical to SEQ ID NO: 19597
  GFR-binding peptide
  MOD_RES (2)..(39)..(41): Xaa is C or S
  MOD_RES (18)..(19)..(20)..(21)..(22): Xaa is A or G
  MOD_RES (23)..(24)..(25)..(26): Xaa is A or G or is absent

SEQ ID NO: 22702 - protein, 38 aa, Artificial Sequence; identical to SEQ ID NO: 19598
  GFR-binding peptide
  MOD_RES (4)..(4): Xaa is C or S
  MOD_RES (20)..(21)..(22)..(23)..(24): Xaa is A or G
  MOD_RES (25)..(26)..(27)..(28): Xaa is A or G or is absent

SEQ ID NO: 22703 - protein, 37 aa, Artificial Sequence; identical to SEQ ID NO: 19599
  GFR-binding peptide
  MOD_RES (3)..(37): Xaa is C or S

SEQ ID NO: 22704 - protein, 40 aa, Artificial Sequence; identical to SEQ ID NO: 19600
  GFR-binding peptide
  MOD_RES (3)..(37)..(39): Xaa is C or S
  MOD_RES (17)..(18)..(19)..(20)..(21): Xaa is A or G
  MOD_RES (22)..(23)..(24)..(25): Xaa is A or G or is absent

SEQ ID NO: 22705 - protein, 37 aa, Artificial Sequence; identical to SEQ ID NO: 19601
  GFR-binding peptide
  MOD_RES (5)..(5): Xaa is C or S
  MOD_RES (19)..(20)..(21)..(22)..(23): Xaa is A or G
  MOD_RES (24)..(25)..(26)..(27): Xaa is A or G or is absent

SEQ ID NO: 22706 - protein, 41 aa, Artificial Sequence; identical to SEQ ID NO: 19602
  GFR-binding peptide
  MOD_RES (4)..(41): Xaa is C or S

SEQ ID NO: 22707 - protein, 39 aa, Artificial Sequence; identical to SEQ ID NO: 19603
  GFR-binding peptide
  MOD_RES (7)..(7): Xaa is C or S
  MOD_RES (21)..(22)..(23)..(24)..(25): Xaa is A or G
  MOD_RES (26)..(27)..(28)..(29): Xaa is A or G or is absent

SEQ ID NO: 22708 - protein, 40 aa, Artificial Sequence; identical to SEQ ID NO: 19604
  GFR-binding peptide
  MOD_RES (4)..(38)..(40): Xaa is C or S

SEQ ID NO: 22709 - protein, 39 aa, Artificial Sequence; identical to SEQ ID NO: 19605
  GFR-binding peptide
  MOD_RES (5)..(39): Xaa is C or S
  MOD_RES (19)..(20)..(21)..(22)..(23): Xaa is A or G
  MOD_RES (24)..(25)..(26)..(27): Xaa is A or G or is absent

SEQ ID NO: 22710 - protein, 43 aa, Artificial Sequence; identical to SEQ ID NO: 19606
  GFR-binding peptide
  MOD_RES (6)..(40)..(42): Xaa is C or S
  MOD_RES (20)..(21)..(22)..(23)..(24): Xaa is A or G
  MOD_RES (25)..(26)..(27)..(28): Xaa is A or G or is absent

SEQ ID NO: 22711 - protein, 35 aa, Artificial Sequence; identical to SEQ ID NO: 19607
  GFR-binding peptide
  MOD_RES (1)..(35): Xaa is C or S

SEQ ID NO: 22712 - protein, 38 aa, Artificial Sequence; identical to SEQ ID NO: 19608
  GFR-binding peptide
  MOD_RES (37)..(37): Xaa is C or S

SEQ ID NO: 22713 - protein, 40 aa, Artificial Sequence; identical to SEQ ID NO: 19609
  GFR-binding peptide
  MOD_RES (2)..(39): Xaa is C or S
  MOD_RES (18)..(19)..(20)..(21)..(22): Xaa is A or G
  MOD_RES (23)..(24)..(25)..(26): Xaa is A or G or is absent

SEQ ID NO: 22714 - protein, 39 aa, Artificial Sequence; identical to SEQ ID NO: 19610
  GFR-binding peptide
  MOD_RES (7)..(7): Xaa is C or S
  MOD_RES (21)..(22)..(23)..(24)..(25): Xaa is A or G
  MOD_RES (26)..(27)..(28)..(29): Xaa is A or G or is absent

SEQ ID NO: 22715 - protein, 40 aa, Artificial Sequence; identical to SEQ ID NO: 19611
  GFR-binding peptide
  MOD_RES (37)..(39): Xaa is C or S
  MOD_RES (16)..(17)..(18)..(19)..(20): Xaa is A or G
  MOD_RES (21)..(22)..(23)..(24): Xaa is A or G or is absent

SEQ ID NO: 22716 - protein, 38 aa, Artificial Sequence; identical to SEQ ID NO: 19612
  GFR-binding peptide
  MOD_RES (36)..(38): Xaa is C or S

SEQ ID NO: 22717 - protein, 39 aa, Artificial Sequence; identical to SEQ ID NO: 19613
  GFR-binding peptide
  MOD_RES (6)..(6): Xaa is C or S
  MOD_RES (20)..(21)..(22)..(23)..(24): Xaa is A or G
  MOD_RES (25)..(26)..(27)..(28): Xaa is A or G or is absent

SEQ ID NO: 22718 - protein, 42 aa, Artificial Sequence; identical to SEQ ID NO: 19614
  GFR-binding peptide
  MOD_RES (6)..(40)..(42): Xaa is C or S
  MOD_RES (20)..(21)..(22)..(23)..(24): Xaa is A or G
  MOD_RES (25)..(26)..(27)..(28): Xaa is A or G or is absent

SEQ ID NO: 22719 - protein, 34 aa, Artificial Sequence; identical to SEQ ID NO: 19615
  GFR-binding peptide
  MOD_RES (2)..(2): Xaa is C or S

SEQ ID NO: 22720 - protein, 38 aa, Artificial Sequence; identical to SEQ ID NO: 19616
  GFR-binding peptide
  MOD_RES (36)..(38): Xaa is C or S
  MOD_RES (15)..(16)..(17)..(18)..(19): Xaa is A or G
  MOD_RES (20)..(21)..(22)..(23): Xaa is A or G or is absent

SEQ ID NO: 22721 - protein, 35 aa, Artificial Sequence; identical to SEQ ID NO: 19617
  GFR-binding peptide
  MOD_RES (34)..(34): Xaa is C or S
  MOD_RES (14)..(15)..(16)..(17)..(18): Xaa is A or G
  MOD_RES (19)..(20)..(21)..(22): Xaa is A or G or is absent

SEQ ID NO: 22722 - protein, 36 aa, Artificial Sequence; identical to SEQ ID NO: 19618
  GFR-binding peptide

SEQ ID NO: 22723 - protein, 36 aa, Artificial Sequence; identical to SEQ ID NO: 19619
  GFR-binding peptide
  MOD_RES (36)..(36): Xaa is C or S

SEQ ID NO: 22724 - protein, 38 aa, Artificial Sequence; identical to SEQ ID NO: 19620
  GFR-binding peptide
  MOD_RES (4)..(38): Xaa is C or S
  MOD_RES (18)..(19)..(20)..(21)..(22): Xaa is A or G
  MOD_RES (23)..(24)..(25)..(26): Xaa is A or G or is absent

SEQ ID NO: 22725 - protein, 33 aa, Artificial Sequence; identical to SEQ ID NO: 19621
  GFR-binding peptide

SEQ ID NO: 22726 - protein, 39 aa, Artificial Sequence; identical to SEQ ID NO: 19622
  GFR-binding peptide
  MOD_RES (6)..(6): Xaa is C or S
  MOD_RES (20)..(21)..(22)..(23)..(24): Xaa is A or G
  MOD_RES (25)..(26)..(27)..(28): Xaa is A or G or is absent

SEQ ID NO: 22727 - protein, 35 aa, Artificial Sequence; identical to SEQ ID NO: 19623
  GFR-binding peptide
  MOD_RES (3)..(3): Xaa is C or S

SEQ ID NO: 22728 - protein, 32 aa, Artificial Sequence; identical to SEQ ID NO: 19624
  GFR-binding peptide
  MOD_RES (14)..(15)..(16)..(17)..(18): Xaa is A or G
  MOD_RES (19)..(20)..(21)..(22): Xaa is A or G or is absent

SEQ ID NO: 22729 - protein, 34 aa, Artificial Sequence; identical to SEQ ID NO: 19625
  GFR-binding peptide
  MOD_RES (1)..(1): Xaa is C or S

SEQ ID NO: 22730 - protein, 35 aa, Artificial Sequence; identical to SEQ ID NO: 19626
  GFR-binding peptide
  MOD_RES (35)..(35): Xaa is C or S
  MOD_RES (14)..(15)..(16)..(17)..(18): Xaa is A or G
  MOD_RES (19)..(20)..(21)..(22): Xaa is A or G or is absent

SEQ ID NO: 22731 - protein, 36 aa, Artificial Sequence; identical to SEQ ID NO: 19627
  GFR-binding peptide

SEQ ID NO: 22732 - protein, 44 aa, Artificial Sequence; identical to SEQ ID NO: 19628
  GFR-binding peptide
  MOD_RES (4)..(41)..(43): Xaa is C or S

SEQ ID NO: 22733 - protein, 37 aa, Artificial Sequence; identical to SEQ ID NO: 19629
  GFR-binding peptide
  MOD_RES (5)..(5): Xaa is C or S
  MOD_RES (19)..(20)..(21)..(22)..(23): Xaa is A or G
  MOD_RES (24)..(25)..(26)..(27): Xaa is A or G or is absent

SEQ ID NO: 22734 - protein, 43 aa, Artificial Sequence; identical to SEQ ID NO: 19630
  GFR-binding peptide
  MOD_RES (5)..(42): Xaa is C or S
  MOD_RES (21)..(22)..(23)..(24)..(25): Xaa is A or G
  MOD_RES (26)..(27)..(28)..(29): Xaa is A or G or is absent

SEQ ID NO: 22735 - protein, 36 aa, Artificial Sequence; identical to SEQ ID NO: 19631
  GFR-binding peptide
  MOD_RES (2)..(36): Xaa is C or S
  MOD_RES (16)..(17)..(18)..(19)..(20): Xaa is A or G
  MOD_RES (21)..(22)..(23)..(24): Xaa is A or G or is absent

SEQ ID NO: 22736 - protein, 44 aa, Artificial Sequence; identical to SEQ ID NO: 19632
  GFR-binding peptide
  MOD_RES (4)..(41)..(43): Xaa is C or S

SEQ ID NO: 22737 - protein, 40 aa, Artificial Sequence; identical to SEQ ID NO: 19633
  GFR-binding peptide
  MOD_RES (4)..(4): Xaa is C or S

SEQ ID NO: 22738 - protein, 37 aa, Artificial Sequence; identical to SEQ ID NO: 19634
  GFR-binding peptide
  MOD_RES (3)..(37): Xaa is C or S
  MOD_RES (17)..(18)..(19)..(20)..(21): Xaa is A or G
  MOD_RES (22)..(23)..(24)..(25): Xaa is A or G or is absent

SEQ ID NO: 22739 - protein, 38 aa, Artificial Sequence; identical to SEQ ID NO: 19635
  GFR-binding peptide
  MOD_RES (3)..(3): Xaa is C or S
  MOD_RES (19)..(20)..(21)..(22)..(23): Xaa is A or G
  MOD_RES (24)..(25)..(26)..(27): Xaa is A or G or is absent

SEQ ID NO: 22740 - protein, 36 aa, Artificial Sequence; identical to SEQ ID NO: 19636
  GFR-binding peptide
  MOD_RES (34)..(36): Xaa is C or S
  MOD_RES (14)..(15)..(16)..(17)..(18): Xaa is A or G
  MOD_RES (19)..(20)..(21)..(22): Xaa is A or G or is absent

SEQ ID NO: 22741 - protein, 41 aa, Artificial Sequence; identical to SEQ ID NO: 19637
  GFR-binding peptide
  MOD_RES (3)..(40): Xaa is C or S

SEQ ID NO: 22742 - protein, 36 aa, Artificial Sequence; identical to SEQ ID NO: 19638
  GFR-binding peptide
  MOD_RES (2)..(2): Xaa is C or S
  MOD_RES (18)..(19)..(20)..(21)..(22): Xaa is A or G
  MOD_RES (23)..(24)..(25)..(26): Xaa is A or G or is absent

SEQ ID NO: 22743 - protein, 41 aa, Artificial Sequence; identical to SEQ ID NO: 19639
  GFR-binding peptide
  MOD_RES (1)..(38)..(40): Xaa is C or S

SEQ ID NO: 22744 - protein, 44 aa, Artificial Sequence; identical to SEQ ID NO: 19640
  GFR-binding peptide
  MOD_RES (5)..(42)..(44): Xaa is C or S
  MOD_RES (21)..(22)..(23)..(24)..(25): Xaa is A or G
  MOD_RES (26)..(27)..(28)..(29): Xaa is A or G or is absent

SEQ ID NO: 22745 - protein, 39 aa, Artificial Sequence; identical to SEQ ID NO: 19641
  GFR-binding peptide
  MOD_RES (4)..(38): Xaa is C or S
  MOD_RES (18)..(19)..(20)..(21)..(22): Xaa is A or G
  MOD_RES (23)..(24)..(25)..(26): Xaa is A or G or is absent

SEQ ID NO: 22746 - protein, 38 aa, Artificial Sequence; identical to SEQ ID NO: 19642
  GFR-binding peptide
  MOD_RES (6)..(6): Xaa is C or S

SEQ ID NO: 22747 - protein, 39 aa, Artificial Sequence; identical to SEQ ID NO: 19643
  GFR-binding peptide
  MOD_RES (7)..(7): Xaa is C or S

SEQ ID NO: 22748 - protein, 38 aa, Artificial Sequence; identical to SEQ ID NO: 19644
  GFR-binding peptide
  MOD_RES (1)..(35)..(37): Xaa is C or S
  MOD_RES (15)..(16)..(17)..(18)..(19): Xaa is A or G
  MOD_RES (20)..(21)..(22)..(23): Xaa is A or G or is absent

SEQ ID NO: 22749 - protein, 34 aa, Artificial Sequence; identical to SEQ ID NO: 19645
  GFR-binding peptide
  MOD_RES (2)..(2): Xaa is C or S

SEQ ID NO: 22750 - protein, 44 aa, Artificial Sequence; identical to SEQ ID NO: 19646
  GFR-binding peptide
  MOD_RES (4)..(41)..(43): Xaa is C or S
  MOD_RES (20)..(21)..(22)..(23)..(24): Xaa is A or G
  MOD_RES (25)..(26)..(27)..(28): Xaa is A or G or is absent

SEQ ID NO: 22751 - protein, 35 aa, Artificial Sequence; identical to SEQ ID NO: 19647
  GFR-binding peptide
  MOD_RES (3)..(3): Xaa is C or S
  MOD_RES (17)..(18)..(19)..(20)..(21): Xaa is A or G
  MOD_RES (22)..(23)..(24)..(25): Xaa is A or G or is absent

SEQ ID NO: 22752 - protein, 37 aa, Artificial Sequence; identical to SEQ ID NO: 19648
  GFR-binding peptide
  MOD_RES (35)..(37): Xaa is C or S

SEQ ID NO: 22753 - protein, 40 aa, Artificial Sequence; identical to SEQ ID NO: 19649
  GFR-binding peptide
  MOD_RES (3)..(37)..(39): Xaa is C or S
  MOD_RES (17)..(18)..(19)..(20)..(21): Xaa is A or G
  MOD_RES (22)..(23)..(24)..(25): Xaa is A or G or is absent

SEQ ID NO: 22754 - protein, 36 aa, Artificial Sequence; identical to SEQ ID NO: 19650
  GFR-binding peptide
  MOD_RES (36)..(36): Xaa is C or S
  MOD_RES (15)..(16)..(17)..(18)..(19): Xaa is A or G
  MOD_RES (20)..(21)..(22)..(23): Xaa is A or G or is absent

SEQ ID NO: 22755 - protein, 44 aa, Artificial Sequence; identical to SEQ ID NO: 19651
  GFR-binding peptide
  MOD_RES (7)..(41)..(43): Xaa is C or S
  MOD_RES (21)..(22)..(23)..(24)..(25): Xaa is A or G
  MOD_RES (26)..(27)..(28)..(29): Xaa is A or G or is absent

SEQ ID NO: 22756 - protein, 36 aa, Artificial Sequence; identical to SEQ ID NO: 19652
  GFR-binding peptide
  MOD_RES (1)..(35): Xaa is C or S
  MOD_RES (15)..(16)..(17)..(18)..(19): Xaa is A or G
  MOD_RES (20)..(21)..(22)..(23): Xaa is A or G or is absent

SEQ ID NO: 22757 - protein, 40 aa, Artificial Sequence; identical to SEQ ID NO: 19653
  GFR-binding peptide
  MOD_RES (7)..(7): Xaa is C or S

SEQ ID NO: 22758 - protein, 37 aa, Artificial Sequence; identical to SEQ ID NO: 19654
  GFR-binding peptide
  MOD_RES (5)..(5): Xaa is C or S

SEQ ID NO: 22759 - protein, 40 aa, Artificial Sequence; identical to SEQ ID NO: 19655
  GFR-binding peptide
  MOD_RES (5)..(39): Xaa is C or S

SEQ ID NO: 22760 - protein, 41 aa, Artificial Sequence; identical to SEQ ID NO: 19656
  GFR-binding peptide
  MOD_RES (6)..(40): Xaa is C or S

SEQ ID NO: 22761 - protein, 41 aa, Artificial Sequence; identical to SEQ ID NO: 19657
  GFR-binding peptide
  MOD_RES (4)..(41): Xaa is C or S

SEQ ID NO: 22762 - protein, 43 aa, Artificial Sequence; identical to SEQ ID NO: 19658
  GFR-binding peptide
  MOD_RES (4)..(41)..(43): Xaa is C or S
  MOD_RES (20)..(21)..(22)..(23)..(24): Xaa is A or G
  MOD_RES (25)..(26)..(27)..(28): Xaa is A or G or is absent

SEQ ID NO: 22763 - protein, 41 aa, Artificial Sequence; identical to SEQ ID NO: 19659
  GFR-binding peptide
  MOD_RES (4)..(41): Xaa is C or S
  MOD_RES (20)..(21)..(22)..(23)..(24): Xaa is A or G
  MOD_RES (25)..(26)..(27)..(28): Xaa is A or G or is absent

SEQ ID NO: 22764 - protein, 43 aa, Artificial Sequence; identical to SEQ ID NO: 19660
  GFR-binding peptide
  MOD_RES (6)..(40)..(42): Xaa is C or S
  MOD_RES (20)..(21)..(22)..(23)..(24): Xaa is A or G
  MOD_RES (25)..(26)..(27)..(28): Xaa is A or G or is absent

SEQ ID NO: 22765 - protein, 36 aa, Artificial Sequence; identical to SEQ ID NO: 19661
  GFR-binding peptide
  MOD_RES (1)..(1): Xaa is C or S
  MOD_RES (17)..(18)..(19)..(20)..(21): Xaa is A or G
  MOD_RES (22)..(23)..(24)..(25): Xaa is A or G or is absent

SEQ ID NO: 22766 - protein, 33 aa, Artificial Sequence; identical to SEQ ID NO: 19662
  GFR-binding peptide
  MOD_RES (15)..(16)..(17)..(18)..(19): Xaa is A or G
  MOD_RES (20)..(21)..(22)..(23): Xaa is A or G or is absent

SEQ ID NO: 22767 - protein, 38 aa, Artificial Sequence; identical to SEQ ID NO: 19663
  GFR-binding peptide
  MOD_RES (5)..(5): Xaa is C or S
  MOD_RES (19)..(20)..(21)..(22)..(23): Xaa is A or G
  MOD_RES (24)..(25)..(26)..(27): Xaa is A or G or is absent

SEQ ID NO: 22768 - protein, 36 aa, Artificial Sequence; identical to SEQ ID NO: 19664
  GFR-binding peptide
  MOD_RES (36)..(36): Xaa is C or S

SEQ ID NO: 22769 - protein, 40 aa, Artificial Sequence; identical to SEQ ID NO: 19665
  GFR-binding peptide
  MOD_RES (6)..(40): Xaa is C or S
  MOD_RES (20)..(21)..(22)..(23)..(24): Xaa is A or G
  MOD_RES (25)..(26)..(27)..(28): Xaa is A or G or is absent

SEQ ID NO: 22770 - protein, 42 aa, Artificial Sequence; identical to SEQ ID NO: 19666
  GFR-binding peptide
  MOD_RES (7)..(41): Xaa is C or S

SEQ ID NO: 22771 - protein, 40 aa, Artificial Sequence; identical to SEQ ID NO: 19667
  GFR-binding peptide
  MOD_RES (5)..(5): Xaa is C or S
  MOD_RES (21)..(22)..(23)..(24)..(25): Xaa is A or G
  MOD_RES (26)..(27)..(28)..(29): Xaa is A or G or is absent

SEQ ID NO: 22772 - protein, 39 aa, Artificial Sequence; identical to SEQ ID NO: 19668
  GFR-binding peptide
  MOD_RES (37)..(39): Xaa is C or S
  MOD_RES (16)..(17)..(18)..(19)..(20): Xaa is A or G
  MOD_RES (21)..(22)..(23)..(24): Xaa is A or G or is absent

SEQ ID NO: 22773 - protein, 38 aa, Artificial Sequence; identical to SEQ ID NO: 19669
  GFR-binding peptide
  MOD_RES (36)..(38): Xaa is C or S

SEQ ID NO: 22774 - protein, 39 aa, Artificial Sequence; identical to SEQ ID NO: 19670
  GFR-binding peptide
  MOD_RES (3)..(37)..(39): Xaa is C or S
  MOD_RES (17)..(18)..(19)..(20)..(21): Xaa is A or G
  MOD_RES (22)..(23)..(24)..(25): Xaa is A or G or is absent

SEQ ID NO: 22775 - protein, 43 aa, Artificial Sequence; identical to SEQ ID NO: 19671
  GFR-binding peptide
  MOD_RES (6)..(40)..(42): Xaa is C or S
  MOD_RES (20)..(21)..(22)..(23)..(24): Xaa is A or G
  MOD_RES (25)..(26)..(27)..(28): Xaa is A or G or is absent

SEQ ID NO: 22776 - protein, 40 aa, Artificial Sequence; identical to SEQ ID NO: 19672
  GFR-binding peptide
  MOD_RES (1)..(38)..(40): Xaa is C or S
  MOD_RES (17)..(18)..(19)..(20)..(21): Xaa is A or G
  MOD_RES (22)..(23)..(24)..(25): Xaa is A or G or is absent

SEQ ID NO: 22777 - protein, 44 aa, Artificial Sequence; identical to SEQ ID NO: 19673
  GFR-binding peptide
  MOD_RES (5)..(42)..(44): Xaa is C or S
  MOD_RES (21)..(22)..(23)..(24)..(25): Xaa is A or G
  MOD_RES (26)..(27)..(28)..(29): Xaa is A or G or is absent

SEQ ID NO: 22778 - protein, 38 aa, Artificial Sequence; identical to SEQ ID NO: 19674
  GFR-binding peptide
  MOD_RES (6)..(6): Xaa is C or S
  MOD_RES (20)..(21)..(22)..(23)..(24): Xaa is A or G
  MOD_RES (25)..(26)..(27)..(28): Xaa is A or G or is absent

SEQ ID NO: 22779 - protein, 36 aa, Artificial Sequence; identical to SEQ ID NO: 19675
  GFR-binding peptide
  MOD_RES (2)..(36): Xaa is C or S
  MOD_RES (16)..(17)..(18)..(19)..(20): Xaa is A or G
  MOD_RES (21)..(22)..(23)..(24): Xaa is A or G or is absent

SEQ ID NO: 22780 - protein, 40 aa, Artificial Sequence; identical to SEQ ID NO: 19676
  GFR-binding peptide
  MOD_RES (4)..(38)..(40): Xaa is C or S

SEQ ID NO: 22781 - protein, 33 aa, Artificial Sequence; identical to SEQ ID NO: 19677
  GFR-binding peptide
  MOD_RES (14)..(15)..(16)..(17)..(18): Xaa is A or G
  MOD_RES (19)..(20)..(21)..(22): Xaa is A or G or is absent

SEQ ID NO: 22782 - protein, 43 aa, Artificial Sequence; identical to SEQ ID NO: 19678
  GFR-binding peptide
  MOD_RES (6)..(40)..(42): Xaa is C or S

SEQ ID NO: 22783 - protein, 40 aa, Artificial Sequence; identical to SEQ ID NO: 19679
  GFR-binding peptide
  MOD_RES (7)..(7): Xaa is C or S
  MOD_RES (21)..(22)..(23)..(24)..(25): Xaa is A or G
  MOD_RES (26)..(27)..(28)..(29): Xaa is A or G or is absent

SEQ ID NO: 22784 - protein, 40 aa, Artificial Sequence; identical to SEQ ID NO: 19680
  GFR-binding peptide
  MOD_RES (7)..(7): Xaa is C or S
  MOD_RES (21)..(22)..(23)..(24)..(25): Xaa is A or G
  MOD_RES (26)..(27)..(28)..(29): Xaa is A or G or is absent

SEQ ID NO: 22785 - protein, 37 aa, Artificial Sequence; identical to SEQ ID NO: 19681
  GFR-binding peptide
  MOD_RES (2)..(36): Xaa is C or S
  MOD_RES (16)..(17)..(18)..(19)..(20): Xaa is A or G
  MOD_RES (21)..(22)..(23)..(24): Xaa is A or G or is absent

SEQ ID NO: 22786 - protein, 41 aa, Artificial Sequence; identical to SEQ ID NO: 19682
  GFR-binding peptide
  MOD_RES (7)..(41): Xaa is C or S
  MOD_RES (21)..(22)..(23)..(24)..(25): Xaa is A or G
  MOD_RES (26)..(27)..(28)..(29): Xaa is A or G or is absent

SEQ ID NO: 22787 - protein, 38 aa, Artificial Sequence; identical to SEQ ID NO: 19683
  GFR-binding peptide
  MOD_RES (4)..(4): Xaa is C or S

SEQ ID NO: 22788 - protein, 37 aa, Artificial Sequence; identical to SEQ ID NO: 19684
  GFR-binding peptide
  MOD_RES (37)..(37): Xaa is C or S
  MOD_RES (16)..(17)..(18)..(19)..(20): Xaa is A or G
  MOD_RES (21)..(22)..(23)..(24): Xaa is A or G or is absent

SEQ ID NO: 22789 - protein, 36 aa, Artificial Sequence; identical to SEQ ID NO: 19685
  GFR-binding peptide
  MOD_RES (2)..(36): Xaa is C or S
  MOD_RES (16)..(17)..(18)..(19)..(20): Xaa is A or G
  MOD_RES (21)..(22)..(23)..(24): Xaa is A or G or is absent

SEQ ID NO: 22790 - protein, 36 aa, Artificial Sequence; identical to SEQ ID NO: 19686
  GFR-binding peptide
  MOD_RES (1)..(35): Xaa is C or S
  MOD_RES (15)..(16)..(17)..(18)..(19): Xaa is A or G
  MOD_RES (20)..(21)..(22)..(23): Xaa is A or G or is absent

SEQ ID NO: 22791 - protein, 35 aa, Artificial Sequence; identical to SEQ ID NO: 19687
  GFR-binding peptide
  MOD_RES (35)..(35): Xaa is C or S

SEQ ID NO: 22792 - protein, 41 aa, Artificial Sequence; identical to SEQ ID NO: 19688
  GFR-binding peptide
  MOD_RES (5)..(39)..(41): Xaa is C or S

SEQ ID NO: 22793 - protein, 38 aa, Artificial Sequence; identical to SEQ ID NO: 19689
  GFR-binding peptide
  MOD_RES (35)..(37): Xaa is C or S
  MOD_RES (14)..(15)..(16)..(17)..(18): Xaa is A or G
  MOD_RES (19)..(20)..(21)..(22): Xaa is A or G or is absent

SEQ ID NO: 22794 - protein, 39 aa, Artificial Sequence; identical to SEQ ID NO: 19690
  GFR-binding peptide
  MOD_RES (5)..(5): Xaa is C or S

SEQ ID NO: 22795 - protein, 40 aa, Artificial Sequence; identical to SEQ ID NO: 19691
  GFR-binding peptide
  MOD_RES (2)..(39): Xaa is C or S

SEQ ID NO: 22796 - protein, 38 aa, Artificial Sequence; identical to SEQ ID NO: 19692
  GFR-binding peptide
  MOD_RES (37)..(37): Xaa is C or S

SEQ ID NO: 22797 - protein, 38 aa, Artificial Sequence; identical to SEQ ID NO: 19693
  GFR-binding peptide
  MOD_RES (2)..(36)..(38): Xaa is C or S
  MOD_RES (16)..(17)..(18)..(19)..(20): Xaa is A or G
  MOD_RES (21)..(22)..(23)..(24): Xaa is A or G or is absent

SEQ ID NO: 22798 - protein, 39 aa, Artificial Sequence; identical to SEQ ID NO: 19694
  GFR-binding peptide
  MOD_RES (2)..(39): Xaa is C or S
  MOD_RES (18)..(19)..(20)..(21)..(22): Xaa is A or G
  MOD_RES (23)..(24)..(25)..(26): Xaa is A or G or is absent

SEQ ID NO: 22799 - protein, 35 aa, Artificial Sequence; identical to SEQ ID NO: 19695
  GFR-binding peptide
  MOD_RES (1)..(35): Xaa is C or S
  MOD_RES (15)..(16)..(17)..(18)..(19): Xaa is A or G
  MOD_RES (20)..(21)..(22)..(23): Xaa is A or G or is absent

SEQ ID NO: 22800 - protein, 39 aa, Artificial Sequence; identical to SEQ ID NO: 19696
  GFR-binding peptide
  MOD_RES (5)..(5): Xaa is C or S

SEQ ID NO: 22801 - protein, 40 aa, Artificial Sequence; identical to SEQ ID NO: 19697
  GFR-binding peptide
  MOD_RES (5)..(5): Xaa is C or S

SEQ ID NO: 22802 - protein, 40 aa, Artificial Sequence; identical to SEQ ID NO: 19698
  GFR-binding peptide
  MOD_RES (1)..(38)..(40): Xaa is C or S

SEQ ID NO: 22803 - protein, 38 aa, Artificial Sequence; identical to SEQ ID NO: 19699
  GFR-binding peptide
  MOD_RES (1)..(38): Xaa is C or S
  MOD_RES (17)..(18)..(19)..(20)..(21): Xaa is A or G
  MOD_RES (22)..(23)..(24)..(25): Xaa is A or G or is absent

SEQ ID NO: 22804 - protein, 41 aa, Artificial Sequence; identical to SEQ ID NO: 19700
  GFR-binding peptide
  MOD_RES (1)..(38)..(40): Xaa is C or S

SEQ ID NO: 22805 - protein, 37 aa, Artificial Sequence; identical to SEQ ID NO: 19701
  GFR-binding peptide
  MOD_RES (1)..(35)..(37): Xaa is C or S
  MOD_RES (15)..(16)..(17)..(18)..(19): Xaa is A or G
  MOD_RES (20)..(21)..(22)..(23): Xaa is A or G or is absent

SEQ ID NO: 22806 - protein, 42 aa, Artificial Sequence; identical to SEQ ID NO: 19702
  GFR-binding peptide
  MOD_RES (5)..(39)..(41): Xaa is C or S
  MOD_RES (19)..(20)..(21)..(22)..(23): Xaa is A or G
  MOD_RES (24)..(25)..(26)..(27): Xaa is A or G or is absent

SEQ ID NO: 22807 - protein, 37 aa, Artificial Sequence; identical to SEQ ID NO: 19703
  GFR-binding peptide
  MOD_RES (1)..(1): Xaa is C or S

SEQ ID NO: 22808 - protein, 33 aa, Artificial Sequence; identical to SEQ ID NO: 19704
  GFR-binding peptide
  MOD_RES (14)..(15)..(16)..(17)..(18): Xaa is A or G
  MOD_RES (19)..(20)..(21)..(22): Xaa is A or G or is absent

SEQ ID NO: 22809 - protein, 42 aa, Artificial Sequence; identical to SEQ ID NO: 19705
  GFR-binding peptide
  MOD_RES (7)..(41): Xaa is C or S

SEQ ID NO: 22810 - protein, 39 aa, Artificial Sequence; identical to SEQ ID NO: 19706
  GFR-binding peptide
  MOD_RES (36)..(38): Xaa is C or S
  MOD_RES (15)..(16)..(17)..(18)..(19): Xaa is A or G
  MOD_RES (20)..(21)..(22)..(23): Xaa is A or G or is absent

SEQ ID NO: 22811 - protein, 36 aa, Artificial Sequence; identical to SEQ ID NO: 19707
  GFR-binding peptide
  MOD_RES (35)..(35): Xaa is C or S

SEQ ID NO: 22812 - protein, 33 aa, Artificial Sequence; identical to SEQ ID NO: 19708
  GFR-binding peptide
  MOD_RES (14)..(15)..(16)..(17)..(18): Xaa is A or G
  MOD_RES (19)..(20)..(21)..(22): Xaa is A or G or is absent

SEQ ID NO: 22813 - protein, 37 aa, Artificial Sequence; identical to SEQ ID NO: 19709
  GFR-binding peptide
  MOD_RES (4)..(4): Xaa is C or S
  MOD_RES (18)..(19)..(20)..(21)..(22): Xaa is A or G
  MOD_RES (23)..(24)..(25)..(26): Xaa is A or G or is absent

SEQ ID NO: 22814 - protein, 44 aa, Artificial Sequence; identical to SEQ ID NO: 19710
  GFR-binding peptide
  MOD_RES (4)..(41)..(43): Xaa is C or S
  MOD_RES (20)..(21)..(22)..(23)..(24): Xaa is A or G
  MOD_RES (25)..(26)..(27)..(28): Xaa is A or G or is absent

SEQ ID NO: 22815 - protein, 38 aa, Artificial Sequence; identical to SEQ ID NO: 19711
  GFR-binding peptide
  MOD_RES (2)..(2): Xaa is C or S
  MOD_RES (18)..(19)..(20)..(21)..(22): Xaa is A or G
  MOD_RES (23)..(24)..(25)..(26): Xaa is A or G or is absent

SEQ ID NO: 22816 - protein, 41 aa, Artificial Sequence; identical to SEQ ID NO: 19712
  GFR-binding peptide
  MOD_RES (2)..(39)..(41): Xaa is C or S

SEQ ID NO: 22817 - protein, 39 aa, Artificial Sequence; identical to SEQ ID NO: 19713
  GFR-binding peptide
  MOD_RES (2)..(39): Xaa is C or S
  MOD_RES (18)..(19)..(20)..(21)..(22): Xaa is A or G
  MOD_RES (23)..(24)..(25)..(26): Xaa is A or G or is absent

SEQ ID NO: 22818 - protein, 34 aa, Artificial Sequence; identical to SEQ ID NO: 19714
  GFR-binding peptide
  MOD_RES (34)..(34): Xaa is C or S

SEQ ID NO: 22819 - protein, 39 aa, Artificial Sequence; identical to SEQ ID NO: 19715
  GFR-binding peptide
  MOD_RES (5)..(5): Xaa is C or S

SEQ ID NO: 22820 - protein, 42 aa, Artificial Sequence; identical to SEQ ID NO: 19716
  GFR-binding peptide
  MOD_RES (6)..(40)..(42): Xaa is C or S
  MOD_RES (20)..(21)..(22)..(23)..(24): Xaa is A or G
  MOD_RES (25)..(26)..(27)..(28): Xaa is A or G or is absent

SEQ ID NO: 22821 - protein, 39 aa, Artificial Sequence; identical to SEQ ID NO: 19717
  GFR-binding peptide
  MOD_RES (36)..(38): Xaa is C or S

SEQ ID NO: 22822 - protein, 34 aa, Artificial Sequence; identical to SEQ ID NO: 19718
  GFR-binding peptide

SEQ ID NO: 22823 - protein, 38 aa, Artificial Sequence; identical to SEQ ID NO: 19719
  GFR-binding peptide
  MOD_RES (6)..(6): Xaa is C or S
  MOD_RES (20)..(21)..(22)..(23)..(24): Xaa is A or G
  MOD_RES (25)..(26)..(27)..(28): Xaa is A or G or is absent

SEQ ID NO: 22824 - protein, 42 aa, Artificial Sequence; identical to SEQ ID NO: 19720
  GFR-binding peptide
  MOD_RES (2)..(39)..(41): Xaa is C or S
  MOD_RES (18)..(19)..(20)..(21)..(22): Xaa is A or G
  MOD_RES (23)..(24)..(25)..(26): Xaa is A or G or is absent

SEQ ID NO: 22825 - protein, 34 aa, Artificial Sequence; identical to SEQ ID NO: 19721
  GFR-binding peptide
  MOD_RES (1)..(1): Xaa is C or S

SEQ ID NO: 22826 - protein, 38 aa, Artificial Sequence; identical to SEQ ID NO: 19722
  GFR-binding peptide
  MOD_RES (1)..(38): Xaa is C or S

SEQ ID NO: 22827 - protein, 38 aa, Artificial Sequence; identical to SEQ ID NO: 19723
  GFR-binding peptide
  MOD_RES (4)..(38): Xaa is C or S

SEQ ID NO: 22828 - protein, 40 aa, Artificial Sequence; identical to SEQ ID NO: 19724
  GFR-binding peptide
  MOD_RES (4)..(38)..(40): Xaa is C or S
  MOD_RES (18)..(19)..(20)..(21)..(22): Xaa is A or G
  MOD_RES (23)..(24)..(25)..(26): Xaa is A or G or is absent

SEQ ID NO: 22829 - protein, 39 aa, Artificial Sequence; identical to SEQ ID NO: 19725
  GFR-binding peptide
  MOD_RES (1)..(38): Xaa is C or S

SEQ ID NO: 22830 - protein, 37 aa, Artificial Sequence; identical to SEQ ID NO: 19726
  GFR-binding peptide
  MOD_RES (4)..(4): Xaa is C or S

SEQ ID NO: 22831 - protein, 34 aa, Artificial Sequence; identical to SEQ ID NO: 19727
  GFR-binding peptide
  MOD_RES (2)..(2): Xaa is C or S

SEQ ID NO: 22832 - protein, 42 aa, Artificial Sequence; identical to SEQ ID NO: 19728
  GFR-binding peptide
  MOD_RES (5)..(39)..(41): Xaa is C or S

SEQ ID NO: 22833 - protein, 36 aa, Artificial Sequence; identical to SEQ ID NO: 19729
  GFR-binding peptide
  MOD_RES (2)..(2): Xaa is C or S
  MOD_RES (18)..(19)..(20)..(21)..(22): Xaa is A or G
  MOD_RES (23)..(24)..(25)..(26): Xaa is A or G or is absent

SEQ ID NO: 22834 - protein, 40 aa, Artificial Sequence; identical to SEQ ID NO: 19730
  GFR-binding peptide
  MOD_RES (5)..(5): Xaa is C or S
  MOD_RES (21)..(22)..(23)..(24)..(25): Xaa is A or G
  MOD_RES (26)..(27)..(28)..(29): Xaa is A or G or is absent

SEQ ID NO: 22835 - protein, 39 aa, Artificial Sequence; identical to SEQ ID NO: 19731
  GFR-binding peptide
  MOD_RES (7)..(7): Xaa is C or S
  MOD_RES (21)..(22)..(23)..(24)..(25): Xaa is A or G
  MOD_RES (26)..(27)..(28)..(29): Xaa is A or G or is absent

SEQ ID NO: 22836 - protein, 41 aa, Artificial Sequence; identical to SEQ ID NO: 19732
  GFR-binding peptide
  MOD_RES (2)..(39)..(41): Xaa is C or S

SEQ ID NO: 22837 - protein, 37 aa, Artificial Sequence; identical to SEQ ID NO: 19733
  GFR-binding peptide
  MOD_RES (3)..(37): Xaa is C or S

SEQ ID NO: 22838 - protein, 35 aa, Artificial Sequence; identical to SEQ ID NO: 19734
  GFR-binding peptide
  MOD_RES (1)..(35): Xaa is C or S

SEQ ID NO: 22839 - protein, 35 aa, Artificial Sequence; identical to SEQ ID NO: 19735
  GFR-binding peptide
  MOD_RES (3)..(3): Xaa is C or S
  MOD_RES (17)..(18)..(19)..(20)..(21): Xaa is A or G
  MOD_RES (22)..(23)..(24)..(25): Xaa is A or G or is absent

SEQ ID NO: 22840 - protein, 39 aa, Artificial Sequence; identical to SEQ ID NO: 19736
  GFR-binding peptide
  MOD_RES (4)..(38): Xaa is C or S

SEQ ID NO: 22841 - protein, 34 aa, Artificial Sequence; identical to SEQ ID NO: 19737
  GFR-binding peptide
  MOD_RES (34)..(34): Xaa is C or S
  MOD_RES (14)..(15)..(16)..(17)..(18): Xaa is A or G
  MOD_RES (19)..(20)..(21)..(22): Xaa is A or G or is absent

SEQ ID NO: 22842 - protein, 41 aa, Artificial Sequence; identical to SEQ ID NO: 19738
  GFR-binding peptide
  MOD_RES (7)..(41): Xaa is C or S
  MOD_RES (21)..(22)..(23)..(24)..(25): Xaa is A or G
  MOD_RES (26)..(27)..(28)..(29): Xaa is A or G or is absent

SEQ ID NO: 22843 - protein, 37 aa, Artificial Sequence; identical to SEQ ID NO: 19739
  GFR-binding peptide
  MOD_RES (2)..(36): Xaa is C or S
  MOD_RES (16)..(17)..(18)..(19)..(20): Xaa is A or G
  MOD_RES (21)..(22)..(23)..(24): Xaa is A or G or is absent

SEQ ID NO: 22844 - protein, 38 aa, Artificial Sequence; identical to SEQ ID NO: 19740
  GFR-binding peptide
  MOD_RES (2)..(36)..(38): Xaa is C or S

SEQ ID NO: 22845 - protein, 43 aa, Artificial Sequence; identical to SEQ ID NO: 19741
  GFR-binding peptide
  MOD_RES (5)..(42): Xaa is C or S
  MOD_RES (21)..(22)..(23)..(24)..(25): Xaa is A or G
  MOD_RES (26)..(27)..(28)..(29): Xaa is A or G or is absent

SEQ ID NO: 22846 - protein, 42 aa, Artificial Sequence; identical to SEQ ID NO: 19742
  GFR-binding peptide
  MOD_RES (3)..(40)..(42): Xaa is C or S
  MOD_RES (19)..(20)..(21)..(22)..(23): Xaa is A or G
  MOD_RES (24)..(25)..(26)..(27): Xaa is A or G or is absent

SEQ ID NO: 22847 - protein, 42 aa, Artificial Sequence; identical to SEQ ID NO: 19743
  GFR-binding peptide
  MOD_RES (5)..(42): Xaa is C or S

SEQ ID NO: 22848 - protein, 45 aa, Artificial Sequence; identical to SEQ ID NO: 19744
  GFR-binding peptide
  MOD_RES (5)..(42)..(44): Xaa is C or S
  MOD_RES (21)..(22)..(23)..(24)..(25): Xaa is A or G
  MOD_RES (26)..(27)..(28)..(29): Xaa is A or G or is absent

SEQ ID NO: 22849 - protein, 37 aa, Artificial Sequence; identical to SEQ ID NO: 19745
  GFR-binding peptide
  MOD_RES (37)..(37): Xaa is C or S
  MOD_RES (16)..(17)..(18)..(19)..(20): Xaa is A or G
  MOD_RES (21)..(22)..(23)..(24): Xaa is A or G or is absent

SEQ ID NO: 22850 - protein, 41 aa, Artificial Sequence; identical to SEQ ID NO: 19746
  GFR-binding peptide
  MOD_RES (6)..(40): Xaa is C or S
  MOD_RES (20)..(21)..(22)..(23)..(24): Xaa is A or G
  MOD_RES (25)..(26)..(27)..(28): Xaa is A or G or is absent

SEQ ID NO: 22851 - protein, 42 aa, Artificial Sequence; identical to SEQ ID NO: 19747
  GFR-binding peptide
  MOD_RES (5)..(39)..(41): Xaa is C or S

SEQ ID NO: 22852 - protein, 41 aa, Artificial Sequence; identical to SEQ ID NO: 19748
  GFR-binding peptide
  MOD_RES (5)..(39)..(41): Xaa is C or S
  MOD_RES (19)..(20)..(21)..(22)..(23): Xaa is A or G
  MOD_RES (24)..(25)..(26)..(27): Xaa is A or G or is absent

SEQ ID NO: 22853 - protein, 41 aa, Artificial Sequence; identical to SEQ ID NO: 19749
  GFR-binding peptide
  MOD_RES (3)..(40): Xaa is C or S
  MOD_RES (19)..(20)..(21)..(22)..(23): Xaa is A or G
  MOD_RES (24)..(25)..(26)..(27): Xaa is A or G or is absent

SEQ ID NO: 22854 - protein, 39 aa, Artificial Sequence; identical to SEQ ID NO: 19750
  GFR-binding peptide
  MOD_RES (3)..(3): Xaa is C or S

SEQ ID NO: 22855 - protein, 35 aa, Artificial Sequence; identical to SEQ ID NO: 19751
  GFR-binding peptide
  MOD_RES (15)..(16)..(17)..(18)..(19): Xaa is A or G
  MOD_RES (20)..(21)..(22)..(23): Xaa is A or G or is absent

SEQ ID NO: 22856 - protein, 41 aa, Artificial Sequence; identical to SEQ ID NO: 19752
  GFR-binding peptide
  MOD_RES (4)..(38)..(40): Xaa is C or S
  MOD_RES (18)..(19)..(20)..(21)..(22): Xaa is A or G
  MOD_RES (23)..(24)..(25)..(26): Xaa is A or G or is absent

SEQ ID NO: 22857 - protein, 39 aa, Artificial Sequence; identical to SEQ ID NO: 19753
  GFR-binding peptide
  MOD_RES (5)..(39): Xaa is C or S
  MOD_RES (19)..(20)..(21)..(22)..(23): Xaa is A or G
  MOD_RES (24)..(25)..(26)..(27): Xaa is A or G or is absent

SEQ ID NO: 22858 - protein, 36 aa, Artificial Sequence; identical to SEQ ID NO: 19754
  GFR-binding peptide
  MOD_RES (3)..(3): Xaa is C or S

SEQ ID NO: 22859 - protein, 34 aa, Artificial Sequence; identical to SEQ ID NO: 19755
  GFR-binding peptide

SEQ ID NO: 22860 - protein, 42 aa, Artificial Sequence; identical to SEQ ID NO: 19756
  GFR-binding peptide
  MOD_RES (7)..(41): Xaa is C or S
  MOD_RES (21)..(22)..(23)..(24)..(25): Xaa is A or G
  MOD_RES (26)..(27)..(28)..(29): Xaa is A or G or is absent

SEQ ID NO: 22861 - protein, 36 aa, Artificial Sequence; identical to SEQ ID NO: 19757
  GFR-binding peptide
  MOD_RES (1)..(35): Xaa is C or S

SEQ ID NO: 22862 - protein, 40 aa, Artificial Sequence; identical to SEQ ID NO: 19758
  GFR-binding peptide
  MOD_RES (4)..(4): Xaa is C or S

SEQ ID NO: 22863 - protein, 42 aa, Artificial Sequence; identical to SEQ ID NO: 19759
  GFR-binding peptide
  MOD_RES (2)..(39)..(41): Xaa is C or S

SEQ ID NO: 22864 - protein, 35 aa, Artificial Sequence; identical to SEQ ID NO: 19760
  GFR-binding peptide
  MOD_RES (35)..(35): Xaa is C or S

SEQ ID NO: 22865 - protein, 38 aa, Artificial Sequence; identical to SEQ ID NO: 19761
  GFR-binding peptide
  MOD_RES (5)..(5): Xaa is C or S

SEQ ID NO: 22866 - protein, 35 aa, Artificial Sequence; identical to SEQ ID NO: 19762
  GFR-binding peptide
  MOD_RES (34)..(34): Xaa is C or S

SEQ ID NO: 22867 - protein, 39 aa, Artificial Sequence; identical to SEQ ID NO: 19763
  GFR-binding peptide
  MOD_RES (36)..(38): Xaa is C or S
  MOD_RES (15)..(16)..(17)..(18)..(19): Xaa is A or G
  MOD_RES (20)..(21)..(22)..(23): Xaa is A or G or is absent

SEQ ID NO: 22868 - protein, 44 aa, Artificial Sequence; identical to SEQ ID NO: 19764
  GFR-binding peptide
  MOD_RES (4)..(41)..(43): Xaa is C or S
  MOD_RES (20)..(21)..(22)..(23)..(24): Xaa is A or G
  MOD_RES (25)..(26)..(27)..(28): Xaa is A or G or is absent

SEQ ID NO: 22869 - protein, 37 aa, Artificial Sequence; identical to SEQ ID NO: 19765
  GFR-binding peptide
  MOD_RES (5)..(5): Xaa is C or S
  MOD_RES (19)..(20)..(21)..(22)..(23): Xaa is A or G
  MOD_RES (24)..(25)..(26)..(27): Xaa is A or G or is absent

SEQ ID NO: 22870 - protein, 39 aa, Artificial Sequence; identical to SEQ ID NO: 19766
  GFR-binding peptide
  MOD_RES (2)..(36)..(38): Xaa is C or S
  MOD_RES (16)..(17)..(18)..(19)..(20): Xaa is A or G
  MOD_RES (21)..(22)..(23)..(24): Xaa is A or G or is absent

SEQ ID NO: 22871 - protein, 40 aa, Artificial Sequence; identical to SEQ ID NO: 19767
  GFR-binding peptide
  MOD_RES (7)..(7): Xaa is C or S

SEQ ID NO: 22872 - protein, 37 aa, Artificial Sequence; identical to SEQ ID NO: 19768
  GFR-binding peptide
  MOD_RES (34)..(36): Xaa is C or S
  MOD_RES (14)..(15)..(16)..(17)..(18): Xaa is A or G
  MOD_RES (19)..(20)..(21)..(22): Xaa is A or G or is absent

SEQ ID NO: 22873 - protein, 35 aa, Artificial Sequence; identical to SEQ ID NO: 19769
  GFR-binding peptide
  MOD_RES (2)..(2): Xaa is C or S

SEQ ID NO: 22874 - protein, 41 aa, Artificial Sequence; identical to SEQ ID NO: 19770
  GFR-binding peptide
  MOD_RES (3)..(40): Xaa is C or S
  MOD_RES (19)..(20)..(21)..(22)..(23): Xaa is A or G
  MOD_RES (24)..(25)..(26)..(27): Xaa is A or G or is absent

SEQ ID NO: 22875 - protein, 38 aa, Artificial Sequence; identical to SEQ ID NO: 19771
  GFR-binding peptide
  MOD_RES (4)..(38): Xaa is C or S

SEQ ID NO: 22876 - protein, 38 aa, Artificial Sequence; identical to SEQ ID NO: 19772
  GFR-binding peptide
  MOD_RES (4)..(4): Xaa is C or S
  MOD_RES (20)..(21)..(22)..(23)..(24): Xaa is A or G
  MOD_RES (25)..(26)..(27)..(28): Xaa is A or G or is absent

SEQ ID NO: 22877 - protein, 38 aa, Artificial Sequence; identical to SEQ ID NO: 19773
  GFR-binding peptide
  MOD_RES (35)..(37): Xaa is C or S
  MOD_RES (14)..(15)..(16)..(17)..(18): Xaa is A or G
  MOD_RES (19)..(20)..(21)..(22): Xaa is A or G or is absent

SEQ ID NO: 22878 - protein, 35 aa, Artificial Sequence; identical to SEQ ID NO: 19774
  GFR-binding peptide
  MOD_RES (1)..(1): Xaa is C or S

SEQ ID NO: 22879 - protein, 37 aa, Artificial Sequence; identical to SEQ ID NO: 19775
  GFR-binding peptide
  MOD_RES (36)..(36): Xaa is C or S
  MOD_RES (15)..(16)..(17)..(18)..(19): Xaa is A or G
  MOD_RES (20)..(21)..(22)..(23): Xaa is A or G or is absent

SEQ ID NO: 22880 - protein, 39 aa, Artificial Sequence; identical to SEQ ID NO: 19776
  GFR-binding peptide
  MOD_RES (7)..(7): Xaa is C or S
  MOD_RES (21)..(22)..(23)..(24)..(25): Xaa is A or G
  MOD_RES (26)..(27)..(28)..(29): Xaa is A or G or is absent

SEQ ID NO: 22881 - protein, 36 aa, Artificial Sequence; identical to SEQ ID NO: 19777
  GFR-binding peptide
  MOD_RES (1)..(35): Xaa is C or S

SEQ ID NO: 22882 - protein, 35 aa, Artificial Sequence; identical to SEQ ID NO: 19778
  GFR-binding peptide
  MOD_RES (2)..(2): Xaa is C or S

SEQ ID NO: 22883 - protein, 38 aa, Artificial Sequence; identical to SEQ ID NO: 19779
  GFR-binding peptide
  MOD_RES (5)..(5): Xaa is C or S
  MOD_RES (19)..(20)..(21)..(22)..(23): Xaa is A or G
  MOD_RES (24)..(25)..(26)..(27): Xaa is A or G or is absent

SEQ ID NO: 22884 - protein, 36 aa, Artificial Sequence; identical to SEQ ID NO: 19780
  GFR-binding peptide
  MOD_RES (35)..(35): Xaa is C or S

SEQ ID NO: 22885 - protein, 41 aa, Artificial Sequence; identical to SEQ ID NO: 19781
  GFR-binding peptide
  MOD_RES (5)..(5): Xaa is C or S
  MOD_RES (21)..(22)..(23)..(24)..(25): Xaa is A or G
  MOD_RES (26)..(27)..(28)..(29): Xaa is A or G or is absent

SEQ ID NO: 22886 - protein, 39 aa, Artificial Sequence; identical to SEQ ID NO: 19782
  GFR-binding peptide
  MOD_RES (3)..(3): Xaa is C or S
  MOD_RES (19)..(20)..(21)..(22)..(23): Xaa is A or G
  MOD_RES (24)..(25)..(26)..(27): Xaa is A or G or is absent

SEQ ID NO: 22887 - protein, 38 aa, Artificial Sequence; identical to SEQ ID NO: 19783
  GFR-binding peptide
  MOD_RES (3)..(3): Xaa is C or S
  MOD_RES (19)..(20)..(21)..(22)..(23): Xaa is A or G
  MOD_RES (24)..(25)..(26)..(27): Xaa is A or G or is absent

SEQ ID NO: 22888 - protein, 38 aa, Artificial Sequence; identical to SEQ ID NO: 19784
  GFR-binding peptide
  MOD_RES (2)..(2): Xaa is C or S
  MOD_RES (18)..(19)..(20)..(21)..(22): Xaa is A or G
  MOD_RES (23)..(24)..(25)..(26): Xaa is A or G or is absent

SEQ ID NO: 22889 - protein, 35 aa, Artificial Sequence; identical to SEQ ID NO: 19785
  GFR-binding peptide
  MOD_RES (3)..(3): Xaa is C or S

SEQ ID NO: 22890 - protein, 41 aa, Artificial Sequence; identical to SEQ ID NO: 19786
  GFR-binding peptide
  MOD_RES (5)..(5): Xaa is C or S

SEQ ID NO: 22891 - protein, 35 aa, Artificial Sequence; identical to SEQ ID NO: 19787
  GFR-binding peptide
  MOD_RES (2)..(2): Xaa is C or S
  MOD_RES (16)..(17)..(18)..(19)..(20): Xaa is A or G
  MOD_RES (21)..(22)..(23)..(24): Xaa is A or G or is absent

SEQ ID NO: 22892 - protein, 32 aa, Artificial Sequence; identical to SEQ ID NO: 19788
  GFR-binding peptide
  MOD_RES (14)..(15)..(16)..(17)..(18): Xaa is A or G
  MOD_RES (19)..(20)..(21)..(22): Xaa is A or G or is absent

SEQ ID NO: 22893 - protein, 36 aa, Artificial Sequence; identical to SEQ ID NO: 19789
  GFR-binding peptide
  MOD_RES (1)..(1): Xaa is C or S

SEQ ID NO: 22894 - protein, 36 aa, Artificial Sequence; identical to SEQ ID NO: 19790
  GFR-binding peptide
  MOD_RES (35)..(35): Xaa is C or S
  MOD_RES (14)..(15)..(16)..(17)..(18): Xaa is A or G
  MOD_RES (19)..(20)..(21)..(22): Xaa is A or G or is absent

SEQ ID NO: 22895 - protein, 44 aa, Artificial Sequence; identical to SEQ ID NO: 19791
  GFR-binding peptide
  MOD_RES (4)..(41)..(43): Xaa is C or S
  MOD_RES (20)..(21)..(22)..(23)..(24): Xaa is A or G
  MOD_RES (25)..(26)..(27)..(28): Xaa is A or G or is absent

SEQ ID NO: 22896 - protein, 44 aa, Artificial Sequence; identical to SEQ ID NO: 19792
  GFR-binding peptide
  MOD_RES (7)..(41)..(43): Xaa is C or S
  MOD_RES (21)..(22)..(23)..(24)..(25): Xaa is A or G
  MOD_RES (26)..(27)..(28)..(29): Xaa is A or G or is absent

SEQ ID NO: 22897 - protein, 39 aa, Artificial Sequence; identical to SEQ ID NO: 19793
  GFR-binding peptide
  MOD_RES (2)..(36)..(38): Xaa is C or S
  MOD_RES (16)..(17)..(18)..(19)..(20): Xaa is A or G
  MOD_RES (21)..(22)..(23)..(24): Xaa is A or G or is absent

SEQ ID NO: 22898 - protein, 42 aa, Artificial Sequence; identical to SEQ ID NO: 19794
  GFR-binding peptide
  MOD_RES (3)..(40)..(42): Xaa is C or S

SEQ ID NO: 22899 - protein, 39 aa, Artificial Sequence; identical to SEQ ID NO: 19795
  GFR-binding peptide
  MOD_RES (4)..(4): Xaa is C or S
  MOD_RES (20)..(21)..(22)..(23)..(24): Xaa is A or G
  MOD_RES (25)..(26)..(27)..(28): Xaa is A or G or is absent

SEQ ID NO: 22900 - protein, 34 aa, Artificial Sequence; identical to SEQ ID NO: 19796
  GFR-binding peptide
  MOD_RES (2)..(2): Xaa is C or S
  MOD_RES (16)..(17)..(18)..(19)..(20): Xaa is A or G
  MOD_RES (21)..(22)..(23)..(24): Xaa is A or G or is absent

SEQ ID NO: 22901 - protein, 35 aa, Artificial Sequence; identical to SEQ ID NO: 19797
  GFR-binding peptide
  MOD_RES (16)..(17)..(18)..(19)..(20): Xaa is A or G
  MOD_RES (21)..(22)..(23)..(24): Xaa is A or G or is absent

SEQ ID NO: 22902 - protein, 43 aa, Artificial Sequence; identical to SEQ ID NO: 19798
  GFR-binding peptide
  MOD_RES (3)..(40)..(42): Xaa is C or S
  MOD_RES (19)..(20)..(21)..(22)..(23): Xaa is A or G
  MOD_RES (24)..(25)..(26)..(27): Xaa is A or G or is absent

SEQ ID NO: 22903 - protein, 40 aa, Artificial Sequence; identical to SEQ ID NO: 19799
  GFR-binding peptide
  MOD_RES (5)..(39): Xaa is C or S
  MOD_RES (19)..(20)..(21)..(22)..(23): Xaa is A or G
  MOD_RES (24)..(25)..(26)..(27): Xaa is A or G or is absent

SEQ ID NO: 22904 - protein, 36 aa, Artificial Sequence; identical to SEQ ID NO: 19800
  GFR-binding peptide
  MOD_RES (2)..(2): Xaa is C or S

SEQ ID NO: 22905 - protein, 40 aa, Artificial Sequence; identical to SEQ ID NO: 19801
  GFR-binding peptide
  MOD_RES (5)..(39): Xaa is C or S
  MOD_RES (19)..(20)..(21)..(22)..(23): Xaa is A or G
  MOD_RES (24)..(25)..(26)..(27): Xaa is A or G or is absent

SEQ ID NO: 22906 - protein, 35 aa, Artificial Sequence; identical to SEQ ID NO: 19802
  GFR-binding peptide
  MOD_RES (34)..(34): Xaa is C or S
  MOD_RES (14)..(15)..(16)..(17)..(18): Xaa is A or G
  MOD_RES (19)..(20)..(21)..(22): Xaa is A or G or is absent

SEQ ID NO: 22907 - protein, 40 aa, Artificial Sequence; identical to SEQ ID NO: 19803
  GFR-binding peptide
  MOD_RES (5)..(39): Xaa is C or S
  MOD_RES (19)..(20)..(21)..(22)..(23): Xaa is A or G
  MOD_RES (24)..(25)..(26)..(27): Xaa is A or G or is absent

SEQ ID NO: 22908 - protein, 39 aa, Artificial Sequence; identical to SEQ ID NO: 19804
  GFR-binding peptide
  MOD_RES (37)..(39): Xaa is C or S
  MOD_RES (16)..(17)..(18)..(19)..(20): Xaa is A or G
  MOD_RES (21)..(22)..(23)..(24): Xaa is A or G or is absent

SEQ ID NO: 22909 - protein, 36 aa, Artificial Sequence; identical to SEQ ID NO: 19805
  GFR-binding peptide
  MOD_RES (16)..(17)..(18)..(19)..(20): Xaa is A or G
  MOD_RES (21)..(22)..(23)..(24): Xaa is A or G or is absent

SEQ ID NO: 22910 - protein, 36 aa, Artificial Sequence; identical to SEQ ID NO: 19806
  GFR-binding peptide
  MOD_RES (2)..(36): Xaa is C or S
  MOD_RES (16)..(17)..(18)..(19)..(20): Xaa is A or G
  MOD_RES (21)..(22)..(23)..(24): Xaa is A or G or is absent

SEQ ID NO: 22911 - protein, 39 aa, Artificial Sequence; identical to SEQ ID NO: 19807
  GFR-binding peptide
  MOD_RES (6)..(6): Xaa is C or S

SEQ ID NO: 22912 - protein, 38 aa, Artificial Sequence; identical to SEQ ID NO: 19808
  GFR-binding peptide
  MOD_RES (1)..(35)..(37): Xaa is C or S

SEQ ID NO: 22913 - protein, 34 aa, Artificial Sequence; identical to SEQ ID NO: 19809
  GFR-binding peptide
  MOD_RES (1)..(1): Xaa is C or S
  MOD_RES (15)..(16)..(17)..(18)..(19): Xaa is A or G
  MOD_RES (20)..(21)..(22)..(23): Xaa is A or G or is absent

SEQ ID NO: 22914 - protein, 35 aa, Artificial Sequence; identical to SEQ ID NO: 19810
  GFR-binding peptide
  MOD_RES (16)..(17)..(18)..(19)..(20): Xaa is A or G
  MOD_RES (21)..(22)..(23)..(24): Xaa is A or G or is absent

SEQ ID NO: 22915 - protein, 40 aa, Artificial Sequence; identical to SEQ ID NO: 19811
  GFR-binding peptide
  MOD_RES (2)..(39): Xaa is C or S
  MOD_RES (18)..(19)..(20)..(21)..(22): Xaa is A or G
  MOD_RES (23)..(24)..(25)..(26): Xaa is A or G or is absent

SEQ ID NO: 22916 - protein, 44 aa, Artificial Sequence; identical to SEQ ID NO: 19812
  GFR-binding peptide
  MOD_RES (7)..(41)..(43): Xaa is C or S

SEQ ID NO: 22917 - protein, 36 aa, Artificial Sequence; identical to SEQ ID NO: 19813
  GFR-binding peptide
  MOD_RES (1)..(1): Xaa is C or S

SEQ ID NO: 22918 - protein, 39 aa, Artificial Sequence; identical to SEQ ID NO: 19814
  GFR-binding peptide
  MOD_RES (37)..(39): Xaa is C or S
  MOD_RES (16)..(17)..(18)..(19)..(20): Xaa is A or G
  MOD_RES (21)..(22)..(23)..(24): Xaa is A or G or is absent

SEQ ID NO: 22919 - protein, 39 aa, Artificial Sequence; identical to SEQ ID NO: 19815
  GFR-binding peptide
  MOD_RES (4)..(38): Xaa is C or S

SEQ ID NO: 22920 - protein, 43 aa, Artificial Sequence; identical to SEQ ID NO: 19816
  GFR-binding peptide
  MOD_RES (3)..(40)..(42): Xaa is C or S

SEQ ID NO: 22921 - protein, 36 aa, Artificial Sequence; identical to SEQ ID NO: 19817
  GFR-binding peptide
  MOD_RES (2)..(36): Xaa is C or S

SEQ ID NO: 22922 - protein, 42 aa, Artificial Sequence; identical to SEQ ID NO: 19818
  GFR-binding peptide
  MOD_RES (5)..(39)..(41): Xaa is C or S

SEQ ID NO: 22923 - protein, 41 aa, Artificial Sequence; identical to SEQ ID NO: 19819
  GFR-binding peptide
  MOD_RES (4)..(41): Xaa is C or S
  MOD_RES (20)..(21)..(22)..(23)..(24): Xaa is A or G
  MOD_RES (25)..(26)..(27)..(28): Xaa is A or G or is absent

SEQ ID NO: 22924 - protein, 43 aa, Artificial Sequence; identical to SEQ ID NO: 19820
  GFR-binding peptide
  MOD_RES (4)..(41)..(43): Xaa is C or S
  MOD_RES (20)..(21)..(22)..(23)..(24): Xaa is A or G
  MOD_RES (25)..(26)..(27)..(28): Xaa is A or G or is absent

SEQ ID NO: 22925 - protein, 34 aa, Artificial Sequence; identical to SEQ ID NO: 19821
  GFR-binding peptide
  MOD_RES (2)..(2): Xaa is C or S
  MOD_RES (16)..(17)..(18)..(19)..(20): Xaa is A or G
  MOD_RES (21)..(22)..(23)..(24): Xaa is A or G or is absent

SEQ ID NO: 22926 - protein, 40 aa, Artificial Sequence; identical to SEQ ID NO: 19822
  GFR-binding peptide
  MOD_RES (5)..(39): Xaa is C or S
  MOD_RES (19)..(20)..(21)..(22)..(23): Xaa is A or G
  MOD_RES (24)..(25)..(26)..(27): Xaa is A or G or is absent

SEQ ID NO: 22927 - protein, 44 aa, Artificial Sequence; identical to SEQ ID NO: 19823
  GFR-binding peptide
  MOD_RES (7)..(41)..(43): Xaa is C or S

SEQ ID NO: 22928 - protein, 39 aa, Artificial Sequence; identical to SEQ ID NO: 19824
  GFR-binding peptide
  MOD_RES (1)..(38): Xaa is C or S
  MOD_RES (17)..(18)..(19)..(20)..(21): Xaa is A or G
  MOD_RES (22)..(23)..(24)..(25): Xaa is A or G or is absent

SEQ ID NO: 22929 - protein, 37 aa, Artificial Sequence; identical to SEQ ID NO: 19825
  GFR-binding peptide
  MOD_RES (36)..(36): Xaa is C or S

SEQ ID NO: 22930 - protein, 36 aa, Artificial Sequence; identical to SEQ ID NO: 19826
  GFR-binding peptide
  MOD_RES (36)..(36): Xaa is C or S
  MOD_RES (15)..(16)..(17)..(18)..(19): Xaa is A or G
  MOD_RES (20)..(21)..(22)..(23): Xaa is A or G or is absent

SEQ ID NO: 22931 - protein, 38 aa, Artificial Sequence; identical to SEQ ID NO: 19827
  GFR-binding peptide
  MOD_RES (3)..(37): Xaa is C or S
  MOD_RES (17)..(18)..(19)..(20)..(21): Xaa is A or G
  MOD_RES (22)..(23)..(24)..(25): Xaa is A or G or is absent

SEQ ID NO: 22932 - protein, 43 aa, Artificial Sequence; identical to SEQ ID NO: 19828
  GFR-binding peptide
  MOD_RES (4)..(41)..(43): Xaa is C or S
  MOD_RES (20)..(21)..(22)..(23)..(24): Xaa is A or G
  MOD_RES (25)..(26)..(27)..(28): Xaa is A or G or is absent

SEQ ID NO: 22933 - protein, 38 aa, Artificial Sequence; identical to SEQ ID NO: 19829
  GFR-binding peptide
  MOD_RES (4)..(38): Xaa is C or S
  MOD_RES (18)..(19)..(20)..(21)..(22): Xaa is A or G
  MOD_RES (23)..(24)..(25)..(26): Xaa is A or G or is absent

SEQ ID NO: 22934 - protein, 38 aa, Artificial Sequence; identical to SEQ ID NO: 19830
  GFR-binding peptide
  MOD_RES (3)..(37): Xaa is C or S
  MOD_RES (17)..(18)..(19)..(20)..(21): Xaa is A or G
  MOD_RES (22)..(23)..(24)..(25): Xaa is A or G or is absent

SEQ ID NO: 22935 - protein, 34 aa, Artificial Sequence; identical to SEQ ID NO: 19831
  GFR-binding peptide
  MOD_RES (2)..(2): Xaa is C or S

SEQ ID NO: 22936 - protein, 39 aa, Artificial Sequence; identical to SEQ ID NO: 19832
  GFR-binding peptide
  MOD_RES (1)..(38): Xaa is C or S

SEQ ID NO: 22937 - protein, 38 aa, Artificial Sequence; identical to SEQ ID NO: 19833
  GFR-binding peptide
  MOD_RES (4)..(4): Xaa is C or S
  MOD_RES (20)..(21)..(22)..(23)..(24): Xaa is A or G
  MOD_RES (25)..(26)..(27)..(28): Xaa is A or G or is absent

SEQ ID NO: 22938 - protein, 36 aa, Artificial Sequence; identical to SEQ ID NO: 19834
  GFR-binding peptide
  MOD_RES (2)..(2): Xaa is C or S
  MOD_RES (18)..(19)..(20)..(21)..(22): Xaa is A or G
  MOD_RES (23)..(24)..(25)..(26): Xaa is A or G or is absent

SEQ ID NO: 22939 - protein, 34 aa, Artificial Sequence; identical to SEQ ID NO: 19835
  GFR-binding peptide
  MOD_RES (14)..(15)..(16)..(17)..(18): Xaa is A or G
  MOD_RES (19)..(20)..(21)..(22): Xaa is A or G or is absent

SEQ ID NO: 22940 - protein, 42 aa, Artificial Sequence; identical to SEQ ID NO: 19836
  GFR-binding peptide
  MOD_RES (6)..(40)..(42): Xaa is C or S
  MOD_RES (20)..(21)..(22)..(23)..(24): Xaa is A or G
  MOD_RES (25)..(26)..(27)..(28): Xaa is A or G or is absent

SEQ ID NO: 22941 - protein, 38 aa, Artificial Sequence; identical to SEQ ID NO: 19837
  GFR-binding peptide
  MOD_RES (5)..(5): Xaa is C or S

SEQ ID NO: 22942 - protein, 40 aa, Artificial Sequence; identical to SEQ ID NO: 19838
  GFR-binding peptide
  MOD_RES (2)..(39): Xaa is C or S
  MOD_RES (18)..(19)..(20)..(21)..(22): Xaa is A or G
  MOD_RES (23)..(24)..(25)..(26): Xaa is A or G or is absent

SEQ ID NO: 22943 - protein, 42 aa, Artificial Sequence; identical to SEQ ID NO: 19839
  GFR-binding peptide
  MOD_RES (3)..(40)..(42): Xaa is C or S
  MOD_RES (19)..(20)..(21)..(22)..(23): Xaa is A or G
  MOD_RES (24)..(25)..(26)..(27): Xaa is A or G or is absent

SEQ ID NO: 22944 - protein, 44 aa, Artificial Sequence; identical to SEQ ID NO: 19840
  GFR-binding peptide
  MOD_RES (5)..(42)..(44): Xaa is C or S
  MOD_RES (21)..(22)..(23)..(24)..(25): Xaa is A or G
  MOD_RES (26)..(27)..(28)..(29): Xaa is A or G or is absent

SEQ ID NO: 22945 - protein, 41 aa, Artificial Sequence; identical to SEQ ID NO: 19841
  GFR-binding peptide
  MOD_RES (4)..(41): Xaa is C or S
  MOD_RES (20)..(21)..(22)..(23)..(24): Xaa is A or G
  MOD_RES (25)..(26)..(27)..(28): Xaa is A or G or is absent

SEQ ID NO: 22946 - protein, 37 aa, Artificial Sequence; identical to SEQ ID NO: 19842
  GFR-binding peptide
  MOD_RES (35)..(37): Xaa is C or S
  MOD_RES (14)..(15)..(16)..(17)..(18): Xaa is A or G
  MOD_RES (19)..(20)..(21)..(22): Xaa is A or G or is absent

SEQ ID NO: 22947 - protein, 38 aa, Artificial Sequence; identical to SEQ ID NO: 19843
  GFR-binding peptide
  MOD_RES (6)..(6): Xaa is C or S
  MOD_RES (20)..(21)..(22)..(23)..(24): Xaa is A or G
  MOD_RES (25)..(26)..(27)..(28): Xaa is A or G or is absent

SEQ ID NO: 22948 - protein, 43 aa, Artificial Sequence; identical to SEQ ID NO: 19844
  GFR-binding peptide
  MOD_RES (4)..(41)..(43): Xaa is C or S

SEQ ID NO: 22949 - protein, 39 aa, Artificial Sequence; identical to SEQ ID NO: 19845
  GFR-binding peptide
  MOD_RES (2)..(36)..(38): Xaa is C or S
  MOD_RES (16)..(17)..(18)..(19)..(20): Xaa is A or G
  MOD_RES (21)..(22)..(23)..(24): Xaa is A or G or is absent

SEQ ID NO: 22950 - protein, 35 aa, Artificial Sequence; identical to SEQ ID NO: 19846
  GFR-binding peptide
  MOD_RES (3)..(3): Xaa is C or S
  MOD_RES (17)..(18)..(19)..(20)..(21): Xaa is A or G
  MOD_RES (22)..(23)..(24)..(25): Xaa is A or G or is absent

SEQ ID NO: 22951 - protein, 37 aa, Artificial Sequence; identical to SEQ ID NO: 19847
  GFR-binding peptide
  MOD_RES (1)..(35)..(37): Xaa is C or S
  MOD_RES (15)..(16)..(17)..(18)..(19): Xaa is A or G
  MOD_RES (20)..(21)..(22)..(23): Xaa is A or G or is absent

SEQ ID NO: 22952 - protein, 34 aa, Artificial Sequence; identical to SEQ ID NO: 19848
  GFR-binding peptide
  MOD_RES (1)..(1): Xaa is C or S

SEQ ID NO: 22953 - protein, 39 aa, Artificial Sequence; identical to SEQ ID NO: 19849
  GFR-binding peptide
  MOD_RES (3)..(3): Xaa is C or S

SEQ ID NO: 22954 - protein, 37 aa, Artificial Sequence; identical to SEQ ID NO: 19850
  GFR-binding peptide
  MOD_RES (3)..(3): Xaa is C or S
  MOD_RES (19)..(20)..(21)..(22)..(23): Xaa is A or G
  MOD_RES (24)..(25)..(26)..(27): Xaa is A or G or is absent

SEQ ID NO: 22955 - protein, 35 aa, Artificial Sequence; identical to SEQ ID NO: 19851
  GFR-binding peptide
  MOD_RES (2)..(2): Xaa is C or S

SEQ ID NO: 22956 - protein, 38 aa, Artificial Sequence; identical to SEQ ID NO: 19852
  GFR-binding peptide
  MOD_RES (4)..(4): Xaa is C or S
  MOD_RES (20)..(21)..(22)..(23)..(24): Xaa is A or G
  MOD_RES (25)..(26)..(27)..(28): Xaa is A or G or is absent

SEQ ID NO: 22957 - protein, 42 aa, Artificial Sequence; identical to SEQ ID NO: 19853
  GFR-binding peptide
  MOD_RES (3)..(40)..(42): Xaa is C or S
  MOD_RES (19)..(20)..(21)..(22)..(23): Xaa is A or G
  MOD_RES (24)..(25)..(26)..(27): Xaa is A or G or is absent

SEQ ID NO: 22958 - protein, 37 aa, Artificial Sequence; identical to SEQ ID NO: 19854
  GFR-binding peptide
  MOD_RES (37)..(37): Xaa is C or S

SEQ ID NO: 22959 - protein, 36 aa, Artificial Sequence; identical to SEQ ID NO: 19855
  GFR-binding peptide
  MOD_RES (1)..(35): Xaa is C or S

SEQ ID NO: 22960 - protein, 39 aa, Artificial Sequence; identical to SEQ ID NO: 19856
  GFR-binding peptide
  MOD_RES (1)..(38): Xaa is C or S
  MOD_RES (17)..(18)..(19)..(20)..(21): Xaa is A or G
  MOD_RES (22)..(23)..(24)..(25): Xaa is A or G or is absent

SEQ ID NO: 22961 - protein, 35 aa, Artificial Sequence; identical to SEQ ID NO: 19857
  GFR-binding peptide
  MOD_RES (2)..(2): Xaa is C or S
  MOD_RES (16)..(17)..(18)..(19)..(20): Xaa is A or G
  MOD_RES (21)..(22)..(23)..(24): Xaa is A or G or is absent

SEQ ID NO: 22962 - protein, 39 aa, Artificial Sequence; identical to SEQ ID NO: 19858
  GFR-binding peptide
  MOD_RES (4)..(4): Xaa is C or S
  MOD_RES (20)..(21)..(22)..(23)..(24): Xaa is A or G
  MOD_RES (25)..(26)..(27)..(28): Xaa is A or G or is absent

SEQ ID NO: 22963 - protein, 40 aa, Artificial Sequence; identical to SEQ ID NO: 19859
  GFR-binding peptide
  MOD_RES (37)..(39): Xaa is C or S

SEQ ID NO: 22964 - protein, 40 aa, Artificial Sequence; identical to SEQ ID NO: 19860
  GFR-binding peptide
  MOD_RES (3)..(40): Xaa is C or S

SEQ ID NO: 22965 - protein, 36 aa, Artificial Sequence; identical to SEQ ID NO: 19861
  GFR-binding peptide
  MOD_RES (2)..(2): Xaa is C or S

SEQ ID NO: 22966 - protein, 35 aa, Artificial Sequence; identical to SEQ ID NO: 19862
  GFR-binding peptide

SEQ ID NO: 22967 - protein, 39 aa, Artificial Sequence; identical to SEQ ID NO: 19863
  GFR-binding peptide
  MOD_RES (6)..(6): Xaa is C or S

SEQ ID NO: 22968 - protein, 38 aa, Artificial Sequence; identical to SEQ ID NO: 19864
  GFR-binding peptide
  MOD_RES (35)..(37): Xaa is C or S
  MOD_RES (14)..(15)..(16)..(17)..(18): Xaa is A or G
  MOD_RES (19)..(20)..(21)..(22): Xaa is A or G or is absent

SEQ ID NO: 22969 - protein, 43 aa, Artificial Sequence; identical to SEQ ID NO: 19865
  GFR-binding peptide
  MOD_RES (7)..(41)..(43): Xaa is C or S

SEQ ID NO: 22970 - protein, 40 aa, Artificial Sequence; identical to SEQ ID NO: 19866
  GFR-binding peptide
  MOD_RES (1)..(38)..(40): Xaa is C or S

SEQ ID NO: 22971 - protein, 40 aa, Artificial Sequence; identical to SEQ ID NO: 19867
  GFR-binding peptide
  MOD_RES (1)..(38)..(40): Xaa is C or S

SEQ ID NO: 22972 - protein, 44 aa, Artificial Sequence; identical to SEQ ID NO: 19868
  GFR-binding peptide
  MOD_RES (7)..(41)..(43): Xaa is C or S
  MOD_RES (21)..(22)..(23)..(24)..(25): Xaa is A or G
  MOD_RES (26)..(27)..(28)..(29): Xaa is A or G or is absent

SEQ ID NO: 22973 - protein, 33 aa, Artificial Sequence; identical to SEQ ID NO: 19869
  GFR-binding peptide

SEQ ID NO: 22974 - protein, 36 aa, Artificial Sequence; identical to SEQ ID NO: 19870
  GFR-binding peptide
  MOD_RES (1)..(1): Xaa is C or S

SEQ ID NO: 22975 - protein, 34 aa, Artificial Sequence; identical to SEQ ID NO: 19871
  GFR-binding peptide
  MOD_RES (14)..(15)..(16)..(17)..(18): Xaa is A or G
  MOD_RES (19)..(20)..(21)..(22): Xaa is A or G or is absent

SEQ ID NO: 22976 - protein, 33 aa, Artificial Sequence; identical to SEQ ID NO: 19872
  GFR-binding peptide

SEQ ID NO: 22977 - protein, 34 aa, Artificial Sequence; identical to SEQ ID NO: 19873
  GFR-binding peptide

SEQ ID NO: 22978 - protein, 40 aa, Artificial Sequence; identical to SEQ ID NO: 19874
  GFR-binding peptide
  MOD_RES (4)..(4): Xaa is C or S

SEQ ID NO: 22979 - protein, 35 aa, Artificial Sequence; identical to SEQ ID NO: 19875
  GFR-binding peptide
  MOD_RES (15)..(16)..(17)..(18)..(19): Xaa is A or G
  MOD_RES (20)..(21)..(22)..(23): Xaa is A or G or is absent

SEQ ID NO: 22980 - protein, 43 aa, Artificial Sequence; identical to SEQ ID NO: 19876
  GFR-binding peptide
  MOD_RES (4)..(41)..(43): Xaa is C or S
  MOD_RES (20)..(21)..(22)..(23)..(24): Xaa is A or G
  MOD_RES (25)..(26)..(27)..(28): Xaa is A or G or is absent

SEQ ID NO: 22981 - protein, 41 aa, Artificial Sequence; identical to SEQ ID NO: 19877
  GFR-binding peptide
  MOD_RES (5)..(39)..(41): Xaa is C or S
  MOD_RES (19)..(20)..(21)..(22)..(23): Xaa is A or G
  MOD_RES (24)..(25)..(26)..(27): Xaa is A or G or is absent

SEQ ID NO: 22982 - protein, 34 aa, Artificial Sequence; identical to SEQ ID NO: 19878
  GFR-binding peptide
  MOD_RES (34)..(34): Xaa is C or S

SEQ ID NO: 22983 - protein, 36 aa, Artificial Sequence; identical to SEQ ID NO: 19879
  GFR-binding peptide
  MOD_RES (2)..(2): Xaa is C or S

SEQ ID NO: 22984 - protein, 40 aa, Artificial Sequence; identical to SEQ ID NO: 19880
  GFR-binding peptide
  MOD_RES (7)..(7): Xaa is C or S

SEQ ID NO: 22985 - protein, 37 aa, Artificial Sequence; identical to SEQ ID NO: 19881
  GFR-binding peptide
  MOD_RES (36)..(36): Xaa is C or S
  MOD_RES (15)..(16)..(17)..(18)..(19): Xaa is A or G
  MOD_RES (20)..(21)..(22)..(23): Xaa is A or G or is absent

SEQ ID NO: 22986 - protein, 36 aa, Artificial Sequence; identical to SEQ ID NO: 19882
  GFR-binding peptide

SEQ ID NO: 22987 - protein, 37 aa, Artificial Sequence; identical to SEQ ID NO: 19883
  GFR-binding peptide
  MOD_RES (37)..(37): Xaa is C or S
  MOD_RES (16)..(17)..(18)..(19)..(20): Xaa is A or G
  MOD_RES (21)..(22)..(23)..(24): Xaa is A or G or is absent

SEQ ID NO: 22988 - protein, 34 aa, Artificial Sequence; identical to SEQ ID NO: 19884
  GFR-binding peptide
  MOD_RES (34)..(34): Xaa is C or S
  MOD_RES (14)..(15)..(16)..(17)..(18): Xaa is A or G
  MOD_RES (19)..(20)..(21)..(22): Xaa is A or G or is absent

SEQ ID NO: 22989 - protein, 34 aa, Artificial Sequence; identical to SEQ ID NO: 19885
  GFR-binding peptide
  MOD_RES (15)..(16)..(17)..(18)..(19): Xaa is A or G
  MOD_RES (20)..(21)..(22)..(23): Xaa is A or G or is absent

SEQ ID NO: 22990 - protein, 35 aa, Artificial Sequence; identical to SEQ ID NO: 19886
  GFR-binding peptide
  MOD_RES (3)..(3): Xaa is C or S
  MOD_RES (17)..(18)..(19)..(20)..(21): Xaa is A or G
  MOD_RES (22)..(23)..(24)..(25): Xaa is A or G or is absent

SEQ ID NO: 22991 - protein, 40 aa, Artificial Sequence; identical to SEQ ID NO: 19887
  GFR-binding peptide
  MOD_RES (2)..(39): Xaa is C or S

SEQ ID NO: 22992 - protein, 34 aa, Artificial Sequence; identical to SEQ ID NO: 19888
  GFR-binding peptide
  MOD_RES (14)..(15)..(16)..(17)..(18): Xaa is A or G
  MOD_RES (19)..(20)..(21)..(22): Xaa is A or G or is absent

SEQ ID NO: 22993 - protein, 38 aa, Artificial Sequence; identical to SEQ ID NO: 19889
  GFR-binding peptide
  MOD_RES (3)..(3): Xaa is C or S
  MOD_RES (19)..(20)..(21)..(22)..(23): Xaa is A or G
  MOD_RES (24)..(25)..(26)..(27): Xaa is A or G or is absent

SEQ ID NO: 22994 - protein, 38 aa, Artificial Sequence; identical to SEQ ID NO: 19890
  GFR-binding peptide
  MOD_RES (3)..(3): Xaa is C or S

SEQ ID NO: 22995 - protein, 40 aa, Artificial Sequence; identical to SEQ ID NO: 19891
  GFR-binding peptide
  MOD_RES (37)..(39): Xaa is C or S
  MOD_RES (16)..(17)..(18)..(19)..(20): Xaa is A or G
  MOD_RES (21)..(22)..(23)..(24): Xaa is A or G or is absent

SEQ ID NO: 22996 - protein, 44 aa, Artificial Sequence; identical to SEQ ID NO: 19892
  GFR-binding peptide
  MOD_RES (5)..(42)..(44): Xaa is C or S
  MOD_RES (21)..(22)..(23)..(24)..(25): Xaa is A or G
  MOD_RES (26)..(27)..(28)..(29): Xaa is A or G or is absent

SEQ ID NO: 22997 - protein, 38 aa, Artificial Sequence; identical to SEQ ID NO: 19893
  GFR-binding peptide
  MOD_RES (1)..(35)..(37): Xaa is C or S

SEQ ID NO: 22998 - protein, 43 aa, Artificial Sequence; identical to SEQ ID NO: 19894
  GFR-binding peptide
  MOD_RES (4)..(41)..(43): Xaa is C or S

SEQ ID NO: 22999 - protein, 40 aa, Artificial Sequence; identical to SEQ ID NO: 19895
  GFR-binding peptide
  MOD_RES (2)..(39): Xaa is C or S

SEQ ID NO: 23000 - protein, 43 aa, Artificial Sequence; identical to SEQ ID NO: 19896
  GFR-binding peptide
  MOD_RES (4)..(41)..(43): Xaa is C or S

SEQ ID NO: 23001 - protein, 34 aa, Artificial Sequence; identical to SEQ ID NO: 19897
  GFR-binding peptide
  MOD_RES (34)..(34): Xaa is C or S
  MOD_RES (14)..(15)..(16)..(17)..(18): Xaa is A or G
  MOD_RES (19)..(20)..(21)..(22): Xaa is A or G or is absent

SEQ ID NO: 23002 - protein, 37 aa, Artificial Sequence; identical to SEQ ID NO: 19898
  GFR-binding peptide
  MOD_RES (1)..(35)..(37): Xaa is C or S
  MOD_RES (15)..(16)..(17)..(18)..(19): Xaa is A or G
  MOD_RES (20)..(21)..(22)..(23): Xaa is A or G or is absent

SEQ ID NO: 23003 - protein, 43 aa, Artificial Sequence; identical to SEQ ID NO: 19899
  GFR-binding peptide
  MOD_RES (3)..(40)..(42): Xaa is C or S

SEQ ID NO: 23004 - protein, 38 aa, Artificial Sequence; identical to SEQ ID NO: 19900
  GFR-binding peptide
  MOD_RES (6)..(6): Xaa is C or S
  MOD_RES (20)..(21)..(22)..(23)..(24): Xaa is A or G
  MOD_RES (25)..(26)..(27)..(28): Xaa is A or G or is absent

SEQ ID NO: 23005 - protein, 40 aa, Artificial Sequence; identical to SEQ ID NO: 19901
  GFR-binding peptide
  MOD_RES (7)..(7): Xaa is C or S
  MOD_RES (21)..(22)..(23)..(24)..(25): Xaa is A or G
  MOD_RES (26)..(27)..(28)..(29): Xaa is A or G or is absent

SEQ ID NO: 23006 - protein, 40 aa, Artificial Sequence; identical to SEQ ID NO: 19902
  GFR-binding peptide
  MOD_RES (4)..(38)..(40): Xaa is C or S
  MOD_RES (18)..(19)..(20)..(21)..(22): Xaa is A or G
  MOD_RES (23)..(24)..(25)..(26): Xaa is A or G or is absent

SEQ ID NO: 23007 - protein, 41 aa, Artificial Sequence; identical to SEQ ID NO: 19903
  GFR-binding peptide
  MOD_RES (5)..(39)..(41): Xaa is C or S
  MOD_RES (19)..(20)..(21)..(22)..(23): Xaa is A or G
  MOD_RES (24)..(25)..(26)..(27): Xaa is A or G or is absent

SEQ ID NO: 23008 - protein, 41 aa, Artificial Sequence; identical to SEQ ID NO: 19904
  GFR-binding peptide
  MOD_RES (4)..(38)..(40): Xaa is C or S

SEQ ID NO: 23009 - protein, 38 aa, Artificial Sequence; identical to SEQ ID NO: 19905
  GFR-binding peptide
  MOD_RES (2)..(36)..(38): Xaa is C or S
  MOD_RES (16)..(17)..(18)..(19)..(20): Xaa is A or G
  MOD_RES (21)..(22)..(23)..(24): Xaa is A or G or is absent

SEQ ID NO: 23010 - protein, 35 aa, Artificial Sequence; identical to SEQ ID NO: 19906
  GFR-binding peptide
  MOD_RES (1)..(1): Xaa is C or S
  MOD_RES (17)..(18)..(19)..(20)..(21): Xaa is A or G
  MOD_RES (22)..(23)..(24)..(25): Xaa is A or G or is absent

SEQ ID NO: 23011 - protein, 37 aa, Artificial Sequence; identical to SEQ ID NO: 19907
  GFR-binding peptide
  MOD_RES (36)..(36): Xaa is C or S
  MOD_RES (15)..(16)..(17)..(18)..(19): Xaa is A or G
  MOD_RES (20)..(21)..(22)..(23): Xaa is A or G or is absent

SEQ ID NO: 23012 - protein, 36 aa, Artificial Sequence; identical to SEQ ID NO: 19908
  GFR-binding peptide
  MOD_RES (1)..(35): Xaa is C or S

SEQ ID NO: 23013 - protein, 36 aa, Artificial Sequence; identical to SEQ ID NO: 19909
  GFR-binding peptide
  MOD_RES (3)..(3): Xaa is C or S

SEQ ID NO: 23014 - protein, 39 aa, Artificial Sequence; identical to SEQ ID NO: 19910
  GFR-binding peptide
  MOD_RES (4)..(38): Xaa is C or S

SEQ ID NO: 23015 - protein, 37 aa, Artificial Sequence; identical to SEQ ID NO: 19911
  GFR-binding peptide
  MOD_RES (1)..(1): Xaa is C or S
  MOD_RES (17)..(18)..(19)..(20)..(21): Xaa is A or G
  MOD_RES (22)..(23)..(24)..(25): Xaa is A or G or is absent

SEQ ID NO: 23016 - protein, 35 aa, Artificial Sequence; identical to SEQ ID NO: 19912
  GFR-binding peptide
  MOD_RES (3)..(3): Xaa is C or S
  MOD_RES (17)..(18)..(19)..(20)..(21): Xaa is A or G
  MOD_RES (22)..(23)..(24)..(25): Xaa is A or G or is absent

SEQ ID NO: 23017 - protein, 37 aa, Artificial Sequence; identical to SEQ ID NO: 19913
  GFR-binding peptide
  MOD_RES (3)..(3): Xaa is C or S

SEQ ID NO: 23018 - protein, 33 aa, Artificial Sequence; identical to SEQ ID NO: 19914
  GFR-binding peptide
  MOD_RES (14)..(15)..(16)..(17)..(18): Xaa is A or G
  MOD_RES (19)..(20)..(21)..(22): Xaa is A or G or is absent

SEQ ID NO: 23019 - protein, 40 aa, Artificial Sequence; identical to SEQ ID NO: 19915
  GFR-binding peptide
  MOD_RES (4)..(4): Xaa is C or S
  MOD_RES (20)..(21)..(22)..(23)..(24): Xaa is A or G
  MOD_RES (25)..(26)..(27)..(28): Xaa is A or G or is absent

SEQ ID NO: 23020 - protein, 40 aa, Artificial Sequence; identical to SEQ ID NO: 19916
  GFR-binding peptide
  MOD_RES (3)..(37)..(39): Xaa is C or S

SEQ ID NO: 23021 - protein, 41 aa, Artificial Sequence; identical to SEQ ID NO: 19917
  GFR-binding peptide
  MOD_RES (5)..(39)..(41): Xaa is C or S

SEQ ID NO: 23022 - protein, 40 aa, Artificial Sequence; identical to SEQ ID NO: 19918
  GFR-binding peptide
  MOD_RES (1)..(38)..(40): Xaa is C or S
  MOD_RES (17)..(18)..(19)..(20)..(21): Xaa is A or G
  MOD_RES (22)..(23)..(24)..(25): Xaa is A or G or is absent

SEQ ID NO: 23023 - protein, 40 aa, Artificial Sequence; identical to SEQ ID NO: 19919
  GFR-binding peptide
  MOD_RES (4)..(4): Xaa is C or S
  MOD_RES (20)..(21)..(22)..(23)..(24): Xaa is A or G
  MOD_RES (25)..(26)..(27)..(28): Xaa is A or G or is absent

SEQ ID NO: 23024 - protein, 38 aa, Artificial Sequence; identical to SEQ ID NO: 19920
  GFR-binding peptide
  MOD_RES (3)..(37): Xaa is C or S
  MOD_RES (17)..(18)..(19)..(20)..(21): Xaa is A or G
  MOD_RES (22)..(23)..(24)..(25): Xaa is A or G or is absent

SEQ ID NO: 23025 - protein, 38 aa, Artificial Sequence; identical to SEQ ID NO: 19921
  GFR-binding peptide
  MOD_RES (1)..(38): Xaa is C or S
  MOD_RES (17)..(18)..(19)..(20)..(21): Xaa is A or G
  MOD_RES (22)..(23)..(24)..(25): Xaa is A or G or is absent

SEQ ID NO: 23026 - protein, 36 aa, Artificial Sequence; identical to SEQ ID NO: 19922
  GFR-binding peptide
  MOD_RES (2)..(36): Xaa is C or S

SEQ ID NO: 23027 - protein, 35 aa, Artificial Sequence; identical to SEQ ID NO: 19923
  GFR-binding peptide
  MOD_RES (15)..(16)..(17)..(18)..(19): Xaa is A or G
  MOD_RES (20)..(21)..(22)..(23): Xaa is A or G or is absent

SEQ ID NO: 23028 - protein, 37 aa, Artificial Sequence; identical to SEQ ID NO: 19924
  GFR-binding peptide
  MOD_RES (1)..(1): Xaa is C or S
  MOD_RES (17)..(18)..(19)..(20)..(21): Xaa is A or G
  MOD_RES (22)..(23)..(24)..(25): Xaa is A or G or is absent

SEQ ID NO: 23029 - protein, 40 aa, Artificial Sequence; identical to SEQ ID NO: 19925
  GFR-binding peptide
  MOD_RES (1)..(38)..(40): Xaa is C or S

SEQ ID NO: 23030 - protein, 40 aa, Artificial Sequence; identical to SEQ ID NO: 19926
  GFR-binding peptide
  MOD_RES (5)..(5): Xaa is C or S

SEQ ID NO: 23031 - protein, 37 aa, Artificial Sequence; identical to SEQ ID NO: 19927
  GFR-binding peptide
  MOD_RES (4)..(4): Xaa is C or S

SEQ ID NO: 23032 - protein, 40 aa, Artificial Sequence; identical to SEQ ID NO: 19928
  GFR-binding peptide
  MOD_RES (7)..(7): Xaa is C or S

SEQ ID NO: 23033 - protein, 37 aa, Artificial Sequence; identical to SEQ ID NO: 19929
  GFR-binding peptide
  MOD_RES (1)..(35)..(37): Xaa is C or S

SEQ ID NO: 23034 - protein, 42 aa, Artificial Sequence; identical to SEQ ID NO: 19930
  GFR-binding peptide
  MOD_RES (5)..(39)..(41): Xaa is C or S
  MOD_RES (19)..(20)..(21)..(22)..(23): Xaa is A or G
  MOD_RES (24)..(25)..(26)..(27): Xaa is A or G or is absent

SEQ ID NO: 23035 - protein, 34 aa, Artificial Sequence; identical to SEQ ID NO: 19931
  GFR-binding peptide
  MOD_RES (2)..(2): Xaa is C or S

SEQ ID NO: 23036 - protein, 35 aa, Artificial Sequence; identical to SEQ ID NO: 19932
  GFR-binding peptide
  MOD_RES (1)..(1): Xaa is C or S
  MOD_RES (17)..(18)..(19)..(20)..(21): Xaa is A or G
  MOD_RES (22)..(23)..(24)..(25): Xaa is A or G or is absent

SEQ ID NO: 23037 - protein, 38 aa, Artificial Sequence; identical to SEQ ID NO: 19933
  GFR-binding peptide
  MOD_RES (1)..(38): Xaa is C or S
  MOD_RES (17)..(18)..(19)..(20)..(21): Xaa is A or G
  MOD_RES (22)..(23)..(24)..(25): Xaa is A or G or is absent

SEQ ID NO: 23038 - protein, 42 aa, Artificial Sequence; identical to SEQ ID NO: 19934
  GFR-binding peptide
  MOD_RES (2)..(39)..(41): Xaa is C or S

SEQ ID NO: 23039 - protein, 34 aa, Artificial Sequence; identical to SEQ ID NO: 19935
  GFR-binding peptide

SEQ ID NO: 23040 - protein, 41 aa, Artificial Sequence; identical to SEQ ID NO: 19936
  GFR-binding peptide
  MOD_RES (1)..(38)..(40): Xaa is C or S

SEQ ID NO: 23041 - protein, 34 aa, Artificial Sequence; identical to SEQ ID NO: 19937
  GFR-binding peptide
  MOD_RES (1)..(1): Xaa is C or S
  MOD_RES (15)..(16)..(17)..(18)..(19): Xaa is A or G
  MOD_RES (20)..(21)..(22)..(23): Xaa is A or G or is absent

SEQ ID NO: 23042 - protein, 37 aa, Artificial Sequence; identical to SEQ ID NO: 19938
  GFR-binding peptide
  MOD_RES (1)..(35)..(37): Xaa is C or S
  MOD_RES (15)..(16)..(17)..(18)..(19): Xaa is A or G
  MOD_RES (20)..(21)..(22)..(23): Xaa is A or G or is absent

SEQ ID NO: 23043 - protein, 40 aa, Artificial Sequence; identical to SEQ ID NO: 19939
  GFR-binding peptide
  MOD_RES (3)..(37)..(39): Xaa is C or S

SEQ ID NO: 23044 - protein, 41 aa, Artificial Sequence; identical to SEQ ID NO: 19940
  GFR-binding peptide
  MOD_RES (3)..(40): Xaa is C or S
  MOD_RES (19)..(20)..(21)..(22)..(23): Xaa is A or G
  MOD_RES (24)..(25)..(26)..(27): Xaa is A or G or is absent

SEQ ID NO: 23045 - protein, 42 aa, Artificial Sequence; identical to SEQ ID NO: 19941
  GFR-binding peptide
  MOD_RES (3)..(40)..(42): Xaa is C or S
  MOD_RES (19)..(20)..(21)..(22)..(23): Xaa is A or G
  MOD_RES (24)..(25)..(26)..(27): Xaa is A or G or is absent

SEQ ID NO: 23046 - protein, 42 aa, Artificial Sequence; identical to SEQ ID NO: 19942
  GFR-binding peptide
  MOD_RES (3)..(40)..(42): Xaa is C or S
  MOD_RES (19)..(20)..(21)..(22)..(23): Xaa is A or G
  MOD_RES (24)..(25)..(26)..(27): Xaa is A or G or is absent

SEQ ID NO: 23047 - protein, 40 aa, Artificial Sequence; identical to SEQ ID NO: 19943
  GFR-binding peptide
  MOD_RES (6)..(40): Xaa is C or S
  MOD_RES (20)..(21)..(22)..(23)..(24): Xaa is A or G
  MOD_RES (25)..(26)..(27)..(28): Xaa is A or G or is absent

SEQ ID NO: 23048 - protein, 38 aa, Artificial Sequence; identical to SEQ ID NO: 19944
  GFR-binding peptide
  MOD_RES (35)..(37): Xaa is C or S
  MOD_RES (14)..(15)..(16)..(17)..(18): Xaa is A or G
  MOD_RES (19)..(20)..(21)..(22): Xaa is A or G or is absent

SEQ ID NO: 23049 - protein, 38 aa, Artificial Sequence; identical to SEQ ID NO: 19945
  GFR-binding peptide
  MOD_RES (2)..(2): Xaa is C or S

SEQ ID NO: 23050 - protein, 41 aa, Artificial Sequence; identical to SEQ ID NO: 19946
  GFR-binding peptide
  MOD_RES (2)..(39)..(41): Xaa is C or S
  MOD_RES (18)..(19)..(20)..(21)..(22): Xaa is A or G
  MOD_RES (23)..(24)..(25)..(26): Xaa is A or G or is absent

SEQ ID NO: 23051 - protein, 39 aa, Artificial Sequence; identical to SEQ ID NO: 19947
  GFR-binding peptide
  MOD_RES (37)..(39): Xaa is C or S
  MOD_RES (16)..(17)..(18)..(19)..(20): Xaa is A or G
  MOD_RES (21)..(22)..(23)..(24): Xaa is A or G or is absent

SEQ ID NO: 23052 - protein, 41 aa, Artificial Sequence; identical to SEQ ID NO: 19948
  GFR-binding peptide
  MOD_RES (5)..(39)..(41): Xaa is C or S
  MOD_RES (19)..(20)..(21)..(22)..(23): Xaa is A or G
  MOD_RES (24)..(25)..(26)..(27): Xaa is A or G or is absent

SEQ ID NO: 23053 - protein, 33 aa, Artificial Sequence; identical to SEQ ID NO: 19949
  GFR-binding peptide
  MOD_RES (14)..(15)..(16)..(17)..(18): Xaa is A or G
  MOD_RES (19)..(20)..(21)..(22): Xaa is A or G or is absent

SEQ ID NO: 23054 - protein, 40 aa, Artificial Sequence; identical to SEQ ID NO: 19950
  GFR-binding peptide
  MOD_RES (7)..(7): Xaa is C or S
  MOD_RES (21)..(22)..(23)..(24)..(25): Xaa is A or G
  MOD_RES (26)..(27)..(28)..(29): Xaa is A or G or is absent

SEQ ID NO: 23055 - protein, 37 aa, Artificial Sequence; identical to SEQ ID NO: 19951
  GFR-binding peptide
  MOD_RES (35)..(37): Xaa is C or S
  MOD_RES (14)..(15)..(16)..(17)..(18): Xaa is A or G
  MOD_RES (19)..(20)..(21)..(22): Xaa is A or G or is absent

SEQ ID NO: 23056 - protein, 40 aa, Artificial Sequence; identical to SEQ ID NO: 19952
  GFR-binding peptide
  MOD_RES (3)..(40): Xaa is C or S

SEQ ID NO: 23057 - protein, 42 aa, Artificial Sequence; identical to SEQ ID NO: 19953
  GFR-binding peptide
  MOD_RES (5)..(42): Xaa is C or S
  MOD_RES (21)..(22)..(23)..(24)..(25): Xaa is A or G
  MOD_RES (26)..(27)..(28)..(29): Xaa is A or G or is absent

SEQ ID NO: 23058 - protein, 37 aa, Artificial Sequence; identical to SEQ ID NO: 19954
  GFR-binding peptide
  MOD_RES (4)..(4): Xaa is C or S
  MOD_RES (18)..(19)..(20)..(21)..(22): Xaa is A or G
  MOD_RES (23)..(24)..(25)..(26): Xaa is A or G or is absent

SEQ ID NO: 23059 - protein, 39 aa, Artificial Sequence; identical to SEQ ID NO: 19955
  GFR-binding peptide
  MOD_RES (2)..(39): Xaa is C or S
  MOD_RES (18)..(19)..(20)..(21)..(22): Xaa is A or G
  MOD_RES (23)..(24)..(25)..(26): Xaa is A or G or is absent

SEQ ID NO: 23060 - protein, 33 aa, Artificial Sequence; identical to SEQ ID NO: 19956
  GFR-binding peptide

SEQ ID NO: 23061 - protein, 40 aa, Artificial Sequence; identical to SEQ ID NO: 19957
  GFR-binding peptide
  MOD_RES (5)..(5): Xaa is C or S

SEQ ID NO: 23062 - protein, 36 aa, Artificial Sequence; identical to SEQ ID NO: 19958
  GFR-binding peptide
  MOD_RES (36)..(36): Xaa is C or S

SEQ ID NO: 23063 - protein, 43 aa, Artificial Sequence; identical to SEQ ID NO: 19959
  GFR-binding peptide
  MOD_RES (7)..(41)..(43): Xaa is C or S

SEQ ID NO: 23064 - protein, 42 aa, Artificial Sequence; identical to SEQ ID NO: 19960
  GFR-binding peptide
  MOD_RES (3)..(40)..(42): Xaa is C or S
  MOD_RES (19)..(20)..(21)..(22)..(23): Xaa is A or G
  MOD_RES (24)..(25)..(26)..(27): Xaa is A or G or is absent

SEQ ID NO: 23065 - protein, 40 aa, Artificial Sequence; identical to SEQ ID NO: 19961
  GFR-binding peptide
  MOD_RES (6)..(40): Xaa is C or S
  MOD_RES (20)..(21)..(22)..(23)..(24): Xaa is A or G
  MOD_RES (25)..(26)..(27)..(28): Xaa is A or G or is absent

SEQ ID NO: 23066 - protein, 38 aa, Artificial Sequence; identical to SEQ ID NO: 19962
  GFR-binding peptide
  MOD_RES (4)..(4): Xaa is C or S
  MOD_RES (20)..(21)..(22)..(23)..(24): Xaa is A or G
  MOD_RES (25)..(26)..(27)..(28): Xaa is A or G or is absent

SEQ ID NO: 23067 - protein, 37 aa, Artificial Sequence; identical to SEQ ID NO: 19963
  GFR-binding peptide
  MOD_RES (4)..(4): Xaa is C or S
  MOD_RES (18)..(19)..(20)..(21)..(22): Xaa is A or G
  MOD_RES (23)..(24)..(25)..(26): Xaa is A or G or is absent

SEQ ID NO: 23068 - protein, 43 aa, Artificial Sequence; identical to SEQ ID NO: 19964
  GFR-binding peptide
  MOD_RES (5)..(42): Xaa is C or S
  MOD_RES (21)..(22)..(23)..(24)..(25): Xaa is A or G
  MOD_RES (26)..(27)..(28)..(29): Xaa is A or G or is absent

SEQ ID NO: 23069 - protein, 37 aa, Artificial Sequence; identical to SEQ ID NO: 19965
  GFR-binding peptide
  MOD_RES (35)..(37): Xaa is C or S
  MOD_RES (14)..(15)..(16)..(17)..(18): Xaa is A or G
  MOD_RES (19)..(20)..(21)..(22): Xaa is A or G or is absent

SEQ ID NO: 23070 - protein, 37 aa, Artificial Sequence; identical to SEQ ID NO: 19966
  GFR-binding peptide
  MOD_RES (35)..(37): Xaa is C or S
  MOD_RES (14)..(15)..(16)..(17)..(18): Xaa is A or G
  MOD_RES (19)..(20)..(21)..(22): Xaa is A or G or is absent

SEQ ID NO: 23071 - protein, 32 aa, Artificial Sequence; identical to SEQ ID NO: 19967
  GFR-binding peptide
  MOD_RES (14)..(15)..(16)..(17)..(18): Xaa is A or G
  MOD_RES (19)..(20)..(21)..(22): Xaa is A or G or is absent

SEQ ID NO: 23072 - protein, 41 aa, Artificial Sequence; identical to SEQ ID NO: 19968
  GFR-binding peptide
  MOD_RES (5)..(5): Xaa is C or S
  MOD_RES (21)..(22)..(23)..(24)..(25): Xaa is A or G
  MOD_RES (26)..(27)..(28)..(29): Xaa is A or G or is absent

SEQ ID NO: 23073 - protein, 37 aa, Artificial Sequence; identical to SEQ ID NO: 19969
  GFR-binding peptide
  MOD_RES (35)..(37): Xaa is C or S
  MOD_RES (14)..(15)..(16)..(17)..(18): Xaa is A or G
  MOD_RES (19)..(20)..(21)..(22): Xaa is A or G or is absent

SEQ ID NO: 23074 - protein, 36 aa, Artificial Sequence; identical to SEQ ID NO: 19970
  GFR-binding peptide
  MOD_RES (34)..(36): Xaa is C or S
  MOD_RES (14)..(15)..(16)..(17)..(18): Xaa is A or G
  MOD_RES (19)..(20)..(21)..(22): Xaa is A or G or is absent

SEQ ID NO: 23075 - protein, 38 aa, Artificial Sequence; identical to SEQ ID NO: 19971
  GFR-binding peptide
  MOD_RES (36)..(38): Xaa is C or S

SEQ ID NO: 23076 - protein, 40 aa, Artificial Sequence; identical to SEQ ID NO: 19972
  GFR-binding peptide
  MOD_RES (4)..(38)..(40): Xaa is C or S
  MOD_RES (18)..(19)..(20)..(21)..(22): Xaa is A or G
  MOD_RES (23)..(24)..(25)..(26): Xaa is A or G or is absent

SEQ ID NO: 23077 - protein, 35 aa, Artificial Sequence; identical to SEQ ID NO: 19973
  GFR-binding peptide
  MOD_RES (15)..(16)..(17)..(18)..(19): Xaa is A or G
  MOD_RES (20)..(21)..(22)..(23): Xaa is A or G or is absent

SEQ ID NO: 23078 - protein, 41 aa, Artificial Sequence; identical to SEQ ID NO: 19974
  GFR-binding peptide
  MOD_RES (6)..(40): Xaa is C or S
  MOD_RES (20)..(21)..(22)..(23)..(24): Xaa is A or G
  MOD_RES (25)..(26)..(27)..(28): Xaa is A or G or is absent

SEQ ID NO: 23079 - protein, 37 aa, Artificial Sequence; identical to SEQ ID NO: 19975
  GFR-binding peptide
  MOD_RES (3)..(3): Xaa is C or S

SEQ ID NO: 23080 - protein, 34 aa, Artificial Sequence; identical to SEQ ID NO: 19976
  GFR-binding peptide
  MOD_RES (15)..(16)..(17)..(18)..(19): Xaa is A or G
  MOD_RES (20)..(21)..(22)..(23): Xaa is A or G or is absent

SEQ ID NO: 23081 - protein, 35 aa, Artificial Sequence; identical to SEQ ID NO: 19977
  GFR-binding peptide
  MOD_RES (16)..(17)..(18)..(19)..(20): Xaa is A or G
  MOD_RES (21)..(22)..(23)..(24): Xaa is A or G or is absent

SEQ ID NO: 23082 - protein, 38 aa, Artificial Sequence; identical to SEQ ID NO: 19978
  GFR-binding peptide
  MOD_RES (5)..(5): Xaa is C or S
  MOD_RES (19)..(20)..(21)..(22)..(23): Xaa is A or G
  MOD_RES (24)..(25)..(26)..(27): Xaa is A or G or is absent

SEQ ID NO: 23083 - protein, 39 aa, Artificial Sequence; identical to SEQ ID NO: 19979
  GFR-binding peptide
  MOD_RES (36)..(38): Xaa is C or S
  MOD_RES (15)..(16)..(17)..(18)..(19): Xaa is A or G
  MOD_RES (20)..(21)..(22)..(23): Xaa is A or G or is absent

SEQ ID NO: 23084 - protein, 35 aa, Artificial Sequence; identical to SEQ ID NO: 19980
  GFR-binding peptide
  MOD_RES (35)..(35): Xaa is C or S

SEQ ID NO: 23085 - protein, 38 aa, Artificial Sequence; identical to SEQ ID NO: 19981
  GFR-binding peptide
  MOD_RES (3)..(3): Xaa is C or S

SEQ ID NO: 23086 - protein, 34 aa, Artificial Sequence; identical to SEQ ID NO: 19982
  GFR-binding peptide
  MOD_RES (2)..(2): Xaa is C or S
  MOD_RES (16)..(17)..(18)..(19)..(20): Xaa is A or G
  MOD_RES (21)..(22)..(23)..(24): Xaa is A or G or is absent

SEQ ID NO: 23087 - protein, 42 aa, Artificial Sequence; identical to SEQ ID NO: 19983
  GFR-binding peptide
  MOD_RES (6)..(40)..(42): Xaa is C or S
  MOD_RES (20)..(21)..(22)..(23)..(24): Xaa is A or G
  MOD_RES (25)..(26)..(27)..(28): Xaa is A or G or is absent

SEQ ID NO: 23088 - protein, 42 aa, Artificial Sequence; identical to SEQ ID NO: 19984
  GFR-binding peptide
  MOD_RES (4)..(41): Xaa is C or S

SEQ ID NO: 23089 - protein, 38 aa, Artificial Sequence; identical to SEQ ID NO: 19985
  GFR-binding peptide
  MOD_RES (5)..(5): Xaa is C or S

SEQ ID NO: 23090 - protein, 38 aa, Artificial Sequence; identical to SEQ ID NO: 19986
  GFR-binding peptide
  MOD_RES (36)..(38): Xaa is C or S
  MOD_RES (15)..(16)..(17)..(18)..(19): Xaa is A or G
  MOD_RES (20)..(21)..(22)..(23): Xaa is A or G or is absent

SEQ ID NO: 23091 - protein, 36 aa, Artificial Sequence; identical to SEQ ID NO: 19987
  GFR-binding peptide
  MOD_RES (36)..(36): Xaa is C or S

SEQ ID NO: 23092 - protein, 35 aa, Artificial Sequence; identical to SEQ ID NO: 19988
  GFR-binding peptide
  MOD_RES (35)..(35): Xaa is C or S

SEQ ID NO: 23093 - protein, 38 aa, Artificial Sequence; identical to SEQ ID NO: 19989
  GFR-binding peptide
  MOD_RES (5)..(5): Xaa is C or S

SEQ ID NO: 23094 - protein, 36 aa, Artificial Sequence; identical to SEQ ID NO: 19990
  GFR-binding peptide
  MOD_RES (2)..(2): Xaa is C or S

SEQ ID NO: 23095 - protein, 37 aa, Artificial Sequence; identical to SEQ ID NO: 19991
  GFR-binding peptide
  MOD_RES (36)..(36): Xaa is C or S
  MOD_RES (15)..(16)..(17)..(18)..(19): Xaa is A or G
  MOD_RES (20)..(21)..(22)..(23): Xaa is A or G or is absent

SEQ ID NO: 23096 - protein, 33 aa, Artificial Sequence; identical to SEQ ID NO: 19992
  GFR-binding peptide

SEQ ID NO: 23097 - protein, 34 aa, Artificial Sequence; identical to SEQ ID NO: 19993
  GFR-binding peptide

SEQ ID NO: 23098 - protein, 37 aa, Artificial Sequence; identical to SEQ ID NO: 19994
  GFR-binding peptide
  MOD_RES (3)..(37): Xaa is C or S

SEQ ID NO: 23099 - protein, 36 aa, Artificial Sequence; identical to SEQ ID NO: 19995
  GFR-binding peptide
  MOD_RES (2)..(2): Xaa is C or S

SEQ ID NO: 23100 - protein, 37 aa, Artificial Sequence; identical to SEQ ID NO: 19996
  GFR-binding peptide
  MOD_RES (3)..(37): Xaa is C or S
  MOD_RES (17)..(18)..(19)..(20)..(21): Xaa is A or G
  MOD_RES (22)..(23)..(24)..(25): Xaa is A or G or is absent

SEQ ID NO: 23101 - protein, 38 aa, Artificial Sequence; identical to SEQ ID NO: 19997
  GFR-binding peptide
  MOD_RES (2)..(2): Xaa is C or S

SEQ ID NO: 23102 - protein, 38 aa, Artificial Sequence; identical to SEQ ID NO: 19998
  GFR-binding peptide
  MOD_RES (4)..(4): Xaa is C or S
  MOD_RES (20)..(21)..(22)..(23)..(24): Xaa is A or G
  MOD_RES (25)..(26)..(27)..(28): Xaa is A or G or is absent

SEQ ID NO: 23103 - protein, 36 aa, Artificial Sequence; identical to SEQ ID NO: 19999
  GFR-binding peptide
  MOD_RES (34)..(36): Xaa is C or S
  MOD_RES (14)..(15)..(16)..(17)..(18): Xaa is A or G
  MOD_RES (19)..(20)..(21)..(22): Xaa is A or G or is absent

SEQ ID NO: 23104 - protein, 36 aa, Artificial Sequence; identical to SEQ ID NO: 20000
  GFR-binding peptide
  MOD_RES (1)..(1): Xaa is C or S
  MOD_RES (17)..(18)..(19)..(20)..(21): Xaa is A or G
  MOD_RES (22)..(23)..(24)..(25): Xaa is A or G or is absent

SEQ ID NO: 23105 - protein, 40 aa, Artificial Sequence; identical to SEQ ID NO: 20001
  GFR-binding peptide
  MOD_RES (6)..(40): Xaa is C or S

SEQ ID NO: 23106 - protein, 38 aa, Artificial Sequence; identical to SEQ ID NO: 20002
  GFR-binding peptide
  MOD_RES (1)..(35)..(37): Xaa is C or S
  MOD_RES (15)..(16)..(17)..(18)..(19): Xaa is A or G
  MOD_RES (20)..(21)..(22)..(23): Xaa is A or G or is absent

SEQ ID NO: 23107 - protein, 37 aa, Artificial Sequence; identical to SEQ ID NO: 20003
  GFR-binding peptide
  MOD_RES (1)..(35)..(37): Xaa is C or S
  MOD_RES (15)..(16)..(17)..(18)..(19): Xaa is A or G
  MOD_RES (20)..(21)..(22)..(23): Xaa is A or G or is absent

SEQ ID NO: 23108 - protein, 40 aa, Artificial Sequence; identical to SEQ ID NO: 20004
  GFR-binding peptide
  MOD_RES (6)..(40): Xaa is C or S

SEQ ID NO: 23109 - protein, 36 aa, Artificial Sequence; identical to SEQ ID NO: 20005
  GFR-binding peptide
  MOD_RES (2)..(2): Xaa is C or S
  MOD_RES (18)..(19)..(20)..(21)..(22): Xaa is A or G
  MOD_RES (23)..(24)..(25)..(26): Xaa is A or G or is absent

SEQ ID NO: 23110 - protein, 40 aa, Artificial Sequence; identical to SEQ ID NO: 20006
  GFR-binding peptide
  MOD_RES (3)..(37)..(39): Xaa is C or S
  MOD_RES (17)..(18)..(19)..(20)..(21): Xaa is A or G
  MOD_RES (22)..(23)..(24)..(25): Xaa is A or G or is absent

SEQ ID NO: 23111 - protein, 40 aa, Artificial Sequence; identical to SEQ ID NO: 20007
  GFR-binding peptide
  MOD_RES (3)..(40): Xaa is C or S
  MOD_RES (19)..(20)..(21)..(22)..(23): Xaa is A or G
  MOD_RES (24)..(25)..(26)..(27): Xaa is A or G or is absent

SEQ ID NO: 23112 - protein, 41 aa, Artificial Sequence; identical to SEQ ID NO: 20008
  GFR-binding peptide
  MOD_RES (4)..(38)..(40): Xaa is C or S
  MOD_RES (18)..(19)..(20)..(21)..(22): Xaa is A or G
  MOD_RES (23)..(24)..(25)..(26): Xaa is A or G or is absent

SEQ ID NO: 23113 - protein, 34 aa, Artificial Sequence; identical to SEQ ID NO: 20009
  GFR-binding peptide
  MOD_RES (16)..(17)..(18)..(19)..(20): Xaa is A or G
  MOD_RES (21)..(22)..(23)..(24): Xaa is A or G or is absent

SEQ ID NO: 23114 - protein, 41 aa, Artificial Sequence; identical to SEQ ID NO: 20010
  GFR-binding peptide
  MOD_RES (6)..(40): Xaa is C or S

SEQ ID NO: 23115 - protein, 40 aa, Artificial Sequence; identical to SEQ ID NO: 20011
  GFR-binding peptide
  MOD_RES (37)..(39): Xaa is C or S

SEQ ID NO: 23116 - protein, 36 aa, Artificial Sequence; identical to SEQ ID NO: 20012
  GFR-binding peptide
  MOD_RES (35)..(35): Xaa is C or S

SEQ ID NO: 23117 - protein, 36 aa, Artificial Sequence; identical to SEQ ID NO: 20013
  GFR-binding peptide
  MOD_RES (1)..(1): Xaa is C or S
  MOD_RES (17)..(18)..(19)..(20)..(21): Xaa is A or G
  MOD_RES (22)..(23)..(24)..(25): Xaa is A or G or is absent

SEQ ID NO: 23118 - protein, 37 aa, Artificial Sequence; identical to SEQ ID NO: 20014
  GFR-binding peptide
  MOD_RES (35)..(37): Xaa is C or S

SEQ ID NO: 23119 - protein, 33 aa, Artificial Sequence; identical to SEQ ID NO: 20015
  GFR-binding peptide

SEQ ID NO: 23120 - protein, 43 aa, Artificial Sequence; identical to SEQ ID NO: 20016
  GFR-binding peptide
  MOD_RES (7)..(41)..(43): Xaa is C or S

SEQ ID NO: 23121 - protein, 45 aa, Artificial Sequence; identical to SEQ ID NO: 20017
  GFR-binding peptide
  MOD_RES (5)..(42)..(44): Xaa is C or S

SEQ ID NO: 23122 - protein, 38 aa, Artificial Sequence; identical to SEQ ID NO: 20018
  GFR-binding peptide
  MOD_RES (1)..(38): Xaa is C or S
  MOD_RES (17)..(18)..(19)..(20)..(21): Xaa is A or G
  MOD_RES (22)..(23)..(24)..(25): Xaa is A or G or is absent

SEQ ID NO: 23123 - protein, 36 aa, Artificial Sequence; identical to SEQ ID NO: 20019
  GFR-binding peptide
  MOD_RES (36)..(36): Xaa is C or S
  MOD_RES (15)..(16)..(17)..(18)..(19): Xaa is A or G
  MOD_RES (20)..(21)..(22)..(23): Xaa is A or G or is absent

SEQ ID NO: 23124 - protein, 39 aa, Artificial Sequence; identical to SEQ ID NO: 20020
  GFR-binding peptide
  MOD_RES (4)..(38): Xaa is C or S
  MOD_RES (18)..(19)..(20)..(21)..(22): Xaa is A or G
  MOD_RES (23)..(24)..(25)..(26): Xaa is A or G or is absent

SEQ ID NO: 23125 - protein, 34 aa, Artificial Sequence; identical to SEQ ID NO: 20021
  GFR-binding peptide

SEQ ID NO: 23126 - protein, 37 aa, Artificial Sequence; identical to SEQ ID NO: 20022
  GFR-binding peptide
  MOD_RES (4)..(4): Xaa is C or S

SEQ ID NO: 23127 - protein, 41 aa, Artificial Sequence; identical to SEQ ID NO: 20023
  GFR-binding peptide
  MOD_RES (5)..(5): Xaa is C or S
  MOD_RES (21)..(22)..(23)..(24)..(25): Xaa is A or G
  MOD_RES (26)..(27)..(28)..(29): Xaa is A or G or is absent

SEQ ID NO: 23128 - protein, 42 aa, Artificial Sequence; identical to SEQ ID NO: 20024
  GFR-binding peptide
  MOD_RES (2)..(39)..(41): Xaa is C or S
  MOD_RES (18)..(19)..(20)..(21)..(22): Xaa is A or G
  MOD_RES (23)..(24)..(25)..(26): Xaa is A or G or is absent

SEQ ID NO: 23129 - protein, 42 aa, Artificial Sequence; identical to SEQ ID NO: 20025
  GFR-binding peptide
  MOD_RES (6)..(40)..(42): Xaa is C or S
  MOD_RES (20)..(21)..(22)..(23)..(24): Xaa is A or G
  MOD_RES (25)..(26)..(27)..(28): Xaa is A or G or is absent

SEQ ID NO: 23130 - protein, 39 aa, Artificial Sequence; identical to SEQ ID NO: 20026
  GFR-binding peptide
  MOD_RES (2)..(36)..(38): Xaa is C or S

SEQ ID NO: 23131 - protein, 34 aa, Artificial Sequence; identical to SEQ ID NO: 20027
  GFR-binding peptide
  MOD_RES (14)..(15)..(16)..(17)..(18): Xaa is A or G
  MOD_RES (19)..(20)..(21)..(22): Xaa is A or G or is absent

SEQ ID NO: 23132 - protein, 44 aa, Artificial Sequence; identical to SEQ ID NO: 20028
  GFR-binding peptide
  MOD_RES (4)..(41)..(43): Xaa is C or S
  MOD_RES (20)..(21)..(22)..(23)..(24): Xaa is A or G
  MOD_RES (25)..(26)..(27)..(28): Xaa is A or G or is absent

SEQ ID NO: 23133 - protein, 42 aa, Artificial Sequence; identical to SEQ ID NO: 20029
  GFR-binding peptide
  MOD_RES (6)..(40)..(42): Xaa is C or S
  MOD_RES (20)..(21)..(22)..(23)..(24): Xaa is A or G
  MOD_RES (25)..(26)..(27)..(28): Xaa is A or G or is absent

SEQ ID NO: 23134 - protein, 42 aa, Artificial Sequence; identical to SEQ ID NO: 20030
  GFR-binding peptide
  MOD_RES (7)..(41): Xaa is C or S
  MOD_RES (21)..(22)..(23)..(24)..(25): Xaa is A or G
  MOD_RES (26)..(27)..(28)..(29): Xaa is A or G or is absent

SEQ ID NO: 23135 - protein, 41 aa, Artificial Sequence; identical to SEQ ID NO: 20031
  GFR-binding peptide
  MOD_RES (6)..(40): Xaa is C or S
  MOD_RES (20)..(21)..(22)..(23)..(24): Xaa is A or G
  MOD_RES (25)..(26)..(27)..(28): Xaa is A or G or is absent

SEQ ID NO: 23136 - protein, 35 aa, Artificial Sequence; identical to SEQ ID NO: 20032
  GFR-binding peptide
  MOD_RES (16)..(17)..(18)..(19)..(20): Xaa is A or G
  MOD_RES (21)..(22)..(23)..(24): Xaa is A or G or is absent

SEQ ID NO: 23137 - protein, 39 aa, Artificial Sequence; identical to SEQ ID NO: 20033
  GFR-binding peptide
  MOD_RES (37)..(39): Xaa is C or S
  MOD_RES (16)..(17)..(18)..(19)..(20): Xaa is A or G
  MOD_RES (21)..(22)..(23)..(24): Xaa is A or G or is absent

SEQ ID NO: 23138 - protein, 39 aa, Artificial Sequence; identical to SEQ ID NO: 20034
  GFR-binding peptide
  MOD_RES (1)..(38): Xaa is C or S

SEQ ID NO: 23139 - protein, 41 aa, Artificial Sequence; identical to SEQ ID NO: 20035
  GFR-binding peptide
  MOD_RES (3)..(40): Xaa is C or S

SEQ ID NO: 23140 - protein, 39 aa, Artificial Sequence; identical to SEQ ID NO: 20036
  GFR-binding peptide
  MOD_RES (6)..(6): Xaa is C or S
  MOD_RES (20)..(21)..(22)..(23)..(24): Xaa is A or G
  MOD_RES (25)..(26)..(27)..(28): Xaa is A or G or is absent

SEQ ID NO: 23141 - protein, 39 aa, Artificial Sequence; identical to SEQ ID NO: 20037
  GFR-binding peptide
  MOD_RES (3)..(37)..(39): Xaa is C or S

SEQ ID NO: 23142 - protein, 39 aa, Artificial Sequence; identical to SEQ ID NO: 20038
  GFR-binding peptide
  MOD_RES (4)..(38): Xaa is C or S
  MOD_RES (18)..(19)..(20)..(21)..(22): Xaa is A or G
  MOD_RES (23)..(24)..(25)..(26): Xaa is A or G or is absent

SEQ ID NO: 23143 - protein, 38 aa, Artificial Sequence; identical to SEQ ID NO: 20039
  GFR-binding peptide
  MOD_RES (37)..(37): Xaa is C or S

SEQ ID NO: 23144 - protein, 35 aa, Artificial Sequence; identical to SEQ ID NO: 20040
  GFR-binding peptide
  MOD_RES (15)..(16)..(17)..(18)..(19): Xaa is A or G
  MOD_RES (20)..(21)..(22)..(23): Xaa is A or G or is absent

SEQ ID NO: 23145 - protein, 39 aa, Artificial Sequence; identical to SEQ ID NO: 20041
  GFR-binding peptide
  MOD_RES (2)..(36)..(38): Xaa is C or S

SEQ ID NO: 23146 - protein, 40 aa, Artificial Sequence; identical to SEQ ID NO: 20042
  GFR-binding peptide
  MOD_RES (1)..(38)..(40): Xaa is C or S
  MOD_RES (17)..(18)..(19)..(20)..(21): Xaa is A or G
  MOD_RES (22)..(23)..(24)..(25): Xaa is A or G or is absent

SEQ ID NO: 23147 - protein, 39 aa, Artificial Sequence; identical to SEQ ID NO: 20043
  GFR-binding peptide
  MOD_RES (36)..(38): Xaa is C or S
  MOD_RES (15)..(16)..(17)..(18)..(19): Xaa is A or G
  MOD_RES (20)..(21)..(22)..(23): Xaa is A or G or is absent

SEQ ID NO: 23148 - protein, 39 aa, Artificial Sequence; identical to SEQ ID NO: 20044
  GFR-binding peptide
  MOD_RES (5)..(5): Xaa is C or S
  MOD_RES (21)..(22)..(23)..(24)..(25): Xaa is A or G
  MOD_RES (26)..(27)..(28)..(29): Xaa is A or G or is absent

SEQ ID NO: 23149 - protein, 40 aa, Artificial Sequence; identical to SEQ ID NO: 20045
  GFR-binding peptide
  MOD_RES (4)..(38)..(40): Xaa is C or S

SEQ ID NO: 23150 - protein, 34 aa, Artificial Sequence; identical to SEQ ID NO: 20046
  GFR-binding peptide

SEQ ID NO: 23151 - protein, 38 aa, Artificial Sequence; identical to SEQ ID NO: 20047
  GFR-binding peptide
  MOD_RES (1)..(35)..(37): Xaa is C or S
  MOD_RES (15)..(16)..(17)..(18)..(19): Xaa is A or G
  MOD_RES (20)..(21)..(22)..(23): Xaa is A or G or is absent

SEQ ID NO: 23152 - protein, 34 aa, Artificial Sequence; identical to SEQ ID NO: 20048
  GFR-binding peptide
  MOD_RES (15)..(16)..(17)..(18)..(19): Xaa is A or G
  MOD_RES (20)..(21)..(22)..(23): Xaa is A or G or is absent

SEQ ID NO: 23153 - protein, 39 aa, Artificial Sequence; identical to SEQ ID NO: 20049
  GFR-binding peptide
  MOD_RES (2)..(39): Xaa is C or S

SEQ ID NO: 23154 - protein, 42 aa, Artificial Sequence; identical to SEQ ID NO: 20050
  GFR-binding peptide
  MOD_RES (5)..(42): Xaa is C or S

SEQ ID NO: 23155 - protein, 38 aa, Artificial Sequence; identical to SEQ ID NO: 20051
  GFR-binding peptide
  MOD_RES (4)..(38): Xaa is C or S

SEQ ID NO: 23156 - protein, 42 aa, Artificial Sequence; identical to SEQ ID NO: 20052
  GFR-binding peptide
  MOD_RES (3)..(40)..(42): Xaa is C or S

SEQ ID NO: 23157 - protein, 41 aa, Artificial Sequence; identical to SEQ ID NO: 20053
  GFR-binding peptide
  MOD_RES (7)..(41): Xaa is C or S

SEQ ID NO: 23158 - protein, 40 aa, Artificial Sequence; identical to SEQ ID NO: 20054
  GFR-binding peptide
  MOD_RES (5)..(5): Xaa is C or S
  MOD_RES (21)..(22)..(23)..(24)..(25): Xaa is A or G
  MOD_RES (26)..(27)..(28)..(29): Xaa is A or G or is absent

SEQ ID NO: 23159 - protein, 39 aa, Artificial Sequence; identical to SEQ ID NO: 20055
  GFR-binding peptide
  MOD_RES (4)..(4): Xaa is C or S
  MOD_RES (20)..(21)..(22)..(23)..(24): Xaa is A or G
  MOD_RES (25)..(26)..(27)..(28): Xaa is A or G or is absent

SEQ ID NO: 23160 - protein, 33 aa, Artificial Sequence; identical to SEQ ID NO: 20056
  GFR-binding peptide
  MOD_RES (14)..(15)..(16)..(17)..(18): Xaa is A or G
  MOD_RES (19)..(20)..(21)..(22): Xaa is A or G or is absent

SEQ ID NO: 23161 - protein, 36 aa, Artificial Sequence; identical to SEQ ID NO: 20057
  GFR-binding peptide
  MOD_RES (2)..(36): Xaa is C or S
  MOD_RES (16)..(17)..(18)..(19)..(20): Xaa is A or G
  MOD_RES (21)..(22)..(23)..(24): Xaa is A or G or is absent

SEQ ID NO: 23162 - protein, 40 aa, Artificial Sequence; identical to SEQ ID NO: 20058
  GFR-binding peptide
  MOD_RES (3)..(37)..(39): Xaa is C or S

SEQ ID NO: 23163 - protein, 42 aa, Artificial Sequence; identical to SEQ ID NO: 20059
  GFR-binding peptide
  MOD_RES (5)..(39)..(41): Xaa is C or S
  MOD_RES (19)..(20)..(21)..(22)..(23): Xaa is A or G
  MOD_RES (24)..(25)..(26)..(27): Xaa is A or G or is absent

SEQ ID NO: 23164 - protein, 34 aa, Artificial Sequence; identical to SEQ ID NO: 20060
  GFR-binding peptide
  MOD_RES (16)..(17)..(18)..(19)..(20): Xaa is A or G
  MOD_RES (21)..(22)..(23)..(24): Xaa is A or G or is absent

SEQ ID NO: 23165 - protein, 35 aa, Artificial Sequence; identical to SEQ ID NO: 20061
  GFR-binding peptide
  MOD_RES (16)..(17)..(18)..(19)..(20): Xaa is A or G
  MOD_RES (21)..(22)..(23)..(24): Xaa is A or G or is absent

SEQ ID NO: 23166 - protein, 43 aa, Artificial Sequence; identical to SEQ ID NO: 20062
  GFR-binding peptide
  MOD_RES (3)..(40)..(42): Xaa is C or S
  MOD_RES (19)..(20)..(21)..(22)..(23): Xaa is A or G
  MOD_RES (24)..(25)..(26)..(27): Xaa is A or G or is absent

SEQ ID NO: 23167 - protein, 35 aa, Artificial Sequence; identical to SEQ ID NO: 20063
  GFR-binding peptide
  MOD_RES (1)..(35): Xaa is C or S

SEQ ID NO: 23168 - protein, 39 aa, Artificial Sequence; identical to SEQ ID NO: 20064
  GFR-binding peptide
  MOD_RES (2)..(36)..(38): Xaa is C or S

SEQ ID NO: 23169 - protein, 36 aa, Artificial Sequence; identical to SEQ ID NO: 20065
  GFR-binding peptide
  MOD_RES (2)..(36): Xaa is C or S
  MOD_RES (16)..(17)..(18)..(19)..(20): Xaa is A or G
  MOD_RES (21)..(22)..(23)..(24): Xaa is A or G or is absent

SEQ ID NO: 23170 - protein, 41 aa, Artificial Sequence; identical to SEQ ID NO: 20066
  GFR-binding peptide
  MOD_RES (2)..(39)..(41): Xaa is C or S

SEQ ID NO: 23171 - protein, 37 aa, Artificial Sequence; identical to SEQ ID NO: 20067
  GFR-binding peptide
  MOD_RES (34)..(36): Xaa is C or S

SEQ ID NO: 23172 - protein, 37 aa, Artificial Sequence; identical to SEQ ID NO: 20068
  GFR-binding peptide
  MOD_RES (2)..(36): Xaa is C or S

SEQ ID NO: 23173 - protein, 39 aa, Artificial Sequence; identical to SEQ ID NO: 20069
  GFR-binding peptide
  MOD_RES (3)..(37)..(39): Xaa is C or S
  MOD_RES (17)..(18)..(19)..(20)..(21): Xaa is A or G
  MOD_RES (22)..(23)..(24)..(25): Xaa is A or G or is absent

SEQ ID NO: 23174 - protein, 40 aa, Artificial Sequence; identical to SEQ ID NO: 20070
  GFR-binding peptide
  MOD_RES (1)..(38)..(40): Xaa is C or S

SEQ ID NO: 23175 - protein, 33 aa, Artificial Sequence; identical to SEQ ID NO: 20071
  GFR-binding peptide
  MOD_RES (14)..(15)..(16)..(17)..(18): Xaa is A or G
  MOD_RES (19)..(20)..(21)..(22): Xaa is A or G or is absent

SEQ ID NO: 23176 - protein, 44 aa, Artificial Sequence; identical to SEQ ID NO: 20072
  GFR-binding peptide
  MOD_RES (5)..(42)..(44): Xaa is C or S

SEQ ID NO: 23177 - protein, 42 aa, Artificial Sequence; identical to SEQ ID NO: 20073
  GFR-binding peptide
  MOD_RES (7)..(41): Xaa is C or S
  MOD_RES (21)..(22)..(23)..(24)..(25): Xaa is A or G
  MOD_RES (26)..(27)..(28)..(29): Xaa is A or G or is absent

SEQ ID NO: 23178 - protein, 37 aa, Artificial Sequence; identical to SEQ ID NO: 20074
  GFR-binding peptide
  MOD_RES (3)..(3): Xaa is C or S

SEQ ID NO: 23179 - protein, 39 aa, Artificial Sequence; identical to SEQ ID NO: 20075
  GFR-binding peptide
  MOD_RES (36)..(38): Xaa is C or S
  MOD_RES (15)..(16)..(17)..(18)..(19): Xaa is A or G
  MOD_RES (20)..(21)..(22)..(23): Xaa is A or G or is absent

SEQ ID NO: 23180 - protein, 37 aa, Artificial Sequence; identical to SEQ ID NO: 20076
  GFR-binding peptide
  MOD_RES (3)..(3): Xaa is C or S

SEQ ID NO: 23181 - protein, 36 aa, Artificial Sequence; identical to SEQ ID NO: 20077
  GFR-binding peptide
  MOD_RES (35)..(35): Xaa is C or S
  MOD_RES (14)..(15)..(16)..(17)..(18): Xaa is A or G
  MOD_RES (19)..(20)..(21)..(22): Xaa is A or G or is absent

SEQ ID NO: 23182 - protein, 41 aa, Artificial Sequence; identical to SEQ ID NO: 20078
  GFR-binding peptide
  MOD_RES (2)..(39)..(41): Xaa is C or S

SEQ ID NO: 23183 - protein, 37 aa, Artificial Sequence; identical to SEQ ID NO: 20079
  GFR-binding peptide
  MOD_RES (2)..(36): Xaa is C or S

SEQ ID NO: 23184 - protein, 43 aa, Artificial Sequence; identical to SEQ ID NO: 20080
  GFR-binding peptide
  MOD_RES (3)..(40)..(42): Xaa is C or S
  MOD_RES (19)..(20)..(21)..(22)..(23): Xaa is A or G
  MOD_RES (24)..(25)..(26)..(27): Xaa is A or G or is absent

SEQ ID NO: 23185 - protein, 41 aa, Artificial Sequence; identical to SEQ ID NO: 20081
  GFR-binding peptide
  MOD_RES (3)..(40): Xaa is C or S

SEQ ID NO: 23186 - protein, 41 aa, Artificial Sequence; identical to SEQ ID NO: 20082
  GFR-binding peptide
  MOD_RES (4)..(38)..(40): Xaa is C or S

SEQ ID NO: 23187 - protein, 37 aa, Artificial Sequence; identical to SEQ ID NO: 20083
  GFR-binding peptide
  MOD_RES (2)..(2): Xaa is C or S
  MOD_RES (18)..(19)..(20)..(21)..(22): Xaa is A or G
  MOD_RES (23)..(24)..(25)..(26): Xaa is A or G or is absent

SEQ ID NO: 23188 - protein, 40 aa, Artificial Sequence; identical to SEQ ID NO: 20084
  GFR-binding peptide
  MOD_RES (3)..(37)..(39): Xaa is C or S

SEQ ID NO: 23189 - protein, 39 aa, Artificial Sequence; identical to SEQ ID NO: 20085
  GFR-binding peptide
  MOD_RES (37)..(39): Xaa is C or S

SEQ ID NO: 23190 - protein, 38 aa, Artificial Sequence; identical to SEQ ID NO: 20086
  GFR-binding peptide
  MOD_RES (4)..(38): Xaa is C or S

SEQ ID NO: 23191 - protein, 39 aa, Artificial Sequence; identical to SEQ ID NO: 20087
  GFR-binding peptide
  MOD_RES (3)..(3): Xaa is C or S

SEQ ID NO: 23192 - protein, 40 aa, Artificial Sequence; identical to SEQ ID NO: 20088
  GFR-binding peptide
  MOD_RES (7)..(7): Xaa is C or S

SEQ ID NO: 23193 - protein, 38 aa, Artificial Sequence; identical to SEQ ID NO: 20089
  GFR-binding peptide
  MOD_RES (2)..(36)..(38): Xaa is C or S
  MOD_RES (16)..(17)..(18)..(19)..(20): Xaa is A or G
  MOD_RES (21)..(22)..(23)..(24): Xaa is A or G or is absent

SEQ ID NO: 23194 - protein, 39 aa, Artificial Sequence; identical to SEQ ID NO: 20090
  GFR-binding peptide
  MOD_RES (3)..(37)..(39): Xaa is C or S
  MOD_RES (17)..(18)..(19)..(20)..(21): Xaa is A or G
  MOD_RES (22)..(23)..(24)..(25): Xaa is A or G or is absent

SEQ ID NO: 23195 - protein, 36 aa, Artificial Sequence; identical to SEQ ID NO: 20091
  GFR-binding peptide
  MOD_RES (34)..(36): Xaa is C or S
  MOD_RES (14)..(15)..(16)..(17)..(18): Xaa is A or G
  MOD_RES (19)..(20)..(21)..(22): Xaa is A or G or is absent

SEQ ID NO: 23196 - protein, 41 aa, Artificial Sequence; identical to SEQ ID NO: 20092
  GFR-binding peptide
  MOD_RES (5)..(39)..(41): Xaa is C or S
  MOD_RES (19)..(20)..(21)..(22)..(23): Xaa is A or G
  MOD_RES (24)..(25)..(26)..(27): Xaa is A or G or is absent

SEQ ID NO: 23197 - protein, 35 aa, Artificial Sequence; identical to SEQ ID NO: 20093
  GFR-binding peptide
  MOD_RES (16)..(17)..(18)..(19)..(20): Xaa is A or G
  MOD_RES (21)..(22)..(23)..(24): Xaa is A or G or is absent

SEQ ID NO: 23198 - protein, 41 aa, Artificial Sequence; identical to SEQ ID NO: 20094
  GFR-binding peptide
  MOD_RES (3)..(40): Xaa is C or S
  MOD_RES (19)..(20)..(21)..(22)..(23): Xaa is A or G
  MOD_RES (24)..(25)..(26)..(27): Xaa is A or G or is absent

SEQ ID NO: 23199 - protein, 43 aa, Artificial Sequence; identical to SEQ ID NO: 20095
  GFR-binding peptide
  MOD_RES (4)..(41)..(43): Xaa is C or S
  MOD_RES (20)..(21)..(22)..(23)..(24): Xaa is A or G
  MOD_RES (25)..(26)..(27)..(28): Xaa is A or G or is absent

SEQ ID NO: 23200 - protein, 39 aa, Artificial Sequence; identical to SEQ ID NO: 20096
  GFR-binding peptide
  MOD_RES (36)..(38): Xaa is C or S
  MOD_RES (15)..(16)..(17)..(18)..(19): Xaa is A or G
  MOD_RES (20)..(21)..(22)..(23): Xaa is A or G or is absent

SEQ ID NO: 23201 - protein, 35 aa, Artificial Sequence; identical to SEQ ID NO: 20097
  GFR-binding peptide

SEQ ID NO: 23202 - protein, 40 aa, Artificial Sequence; identical to SEQ ID NO: 20098
  GFR-binding peptide
  MOD_RES (5)..(5): Xaa is C or S
  MOD_RES (21)..(22)..(23)..(24)..(25): Xaa is A or G
  MOD_RES (26)..(27)..(28)..(29): Xaa is A or G or is absent

SEQ ID NO: 23203 - protein, 38 aa, Artificial Sequence; identical to SEQ ID NO: 20099
  GFR-binding peptide
  MOD_RES (3)..(37): Xaa is C or S

SEQ ID NO: 23204 - protein, 43 aa, Artificial Sequence; identical to SEQ ID NO: 20100
  GFR-binding peptide
  MOD_RES (5)..(42): Xaa is C or S
  MOD_RES (21)..(22)..(23)..(24)..(25): Xaa is A or G
  MOD_RES (26)..(27)..(28)..(29): Xaa is A or G or is absent

SEQ ID NO: 23205 - protein, 41 aa, Artificial Sequence; identical to SEQ ID NO: 20101
  GFR-binding peptide
  MOD_RES (4)..(41): Xaa is C or S
  MOD_RES (20)..(21)..(22)..(23)..(24): Xaa is A or G
  MOD_RES (25)..(26)..(27)..(28): Xaa is A or G or is absent

SEQ ID NO: 23206 - protein, 41 aa, Artificial Sequence; identical to SEQ ID NO: 20102
  GFR-binding peptide
  MOD_RES (1)..(38)..(40): Xaa is C or S
  MOD_RES (17)..(18)..(19)..(20)..(21): Xaa is A or G
  MOD_RES (22)..(23)..(24)..(25): Xaa is A or G or is absent

SEQ ID NO: 23207 - protein, 38 aa, Artificial Sequence; identical to SEQ ID NO: 20103
  GFR-binding peptide
  MOD_RES (37)..(37): Xaa is C or S
  MOD_RES (16)..(17)..(18)..(19)..(20): Xaa is A or G
  MOD_RES (21)..(22)..(23)..(24): Xaa is A or G or is absent

SEQ ID NO: 23208 - protein, 34 aa, Artificial Sequence; identical to SEQ ID NO: 20104
  GFR-binding peptide
  MOD_RES (1)..(1): Xaa is C or S
  MOD_RES (15)..(16)..(17)..(18)..(19): Xaa is A or G
  MOD_RES (20)..(21)..(22)..(23): Xaa is A or G or is absent

SEQ ID NO: 23209 - protein, 41 aa, Artificial Sequence; identical to SEQ ID NO: 20105
  GFR-binding peptide
  MOD_RES (4)..(38)..(40): Xaa is C or S
  MOD_RES (18)..(19)..(20)..(21)..(22): Xaa is A or G
  MOD_RES (23)..(24)..(25)..(26): Xaa is A or G or is absent

SEQ ID NO: 23210 - protein, 41 aa, Artificial Sequence; identical to SEQ ID NO: 20106
  GFR-binding peptide
  MOD_RES (3)..(40): Xaa is C or S
  MOD_RES (19)..(20)..(21)..(22)..(23): Xaa is A or G
  MOD_RES (24)..(25)..(26)..(27): Xaa is A or G or is absent

SEQ ID NO: 23211 - protein, 35 aa, Artificial Sequence; identical to SEQ ID NO: 20107
  GFR-binding peptide
  MOD_RES (1)..(35): Xaa is C or S
  MOD_RES (15)..(16)..(17)..(18)..(19): Xaa is A or G
  MOD_RES (20)..(21)..(22)..(23): Xaa is A or G or is absent

SEQ ID NO: 23212 - protein, 39 aa, Artificial Sequence; identical to SEQ ID NO: 20108
  GFR-binding peptide
  MOD_RES (4)..(4): Xaa is C or S

SEQ ID NO: 23213 - protein, 38 aa, Artificial Sequence; identical to SEQ ID NO: 20109
  GFR-binding peptide
  MOD_RES (4)..(38): Xaa is C or S
  MOD_RES (18)..(19)..(20)..(21)..(22): Xaa is A or G
  MOD_RES (23)..(24)..(25)..(26): Xaa is A or G or is absent

SEQ ID NO: 23214 - protein, 40 aa, Artificial Sequence; identical to SEQ ID NO: 20110
  GFR-binding peptide
  MOD_RES (5)..(5): Xaa is C or S

SEQ ID NO: 23215 - protein, 37 aa, Artificial Sequence; identical to SEQ ID NO: 20111
  GFR-binding peptide
  MOD_RES (36)..(36): Xaa is C or S

SEQ ID NO: 23216 - protein, 42 aa, Artificial Sequence; identical to SEQ ID NO: 20112
  GFR-binding peptide
  MOD_RES (7)..(41): Xaa is C or S

SEQ ID NO: 23217 - protein, 41 aa, Artificial Sequence; identical to SEQ ID NO: 20113
  GFR-binding peptide
  MOD_RES (1)..(38)..(40): Xaa is C or S
  MOD_RES (17)..(18)..(19)..(20)..(21): Xaa is A or G
  MOD_RES (22)..(23)..(24)..(25): Xaa is A or G or is absent

SEQ ID NO: 23218 - protein, 36 aa, Artificial Sequence; identical to SEQ ID NO: 20114
  GFR-binding peptide
  MOD_RES (34)..(36): Xaa is C or S

SEQ ID NO: 23219 - protein, 37 aa, Artificial Sequence; identical to SEQ ID NO: 20115
  GFR-binding peptide
  MOD_RES (1)..(1): Xaa is C or S
  MOD_RES (17)..(18)..(19)..(20)..(21): Xaa is A or G
  MOD_RES (22)..(23)..(24)..(25): Xaa is A or G or is absent

SEQ ID NO: 23220 - protein, 41 aa, Artificial Sequence; identical to SEQ ID NO: 20116
  GFR-binding peptide
  MOD_RES (4)..(41): Xaa is C or S

SEQ ID NO: 23221 - protein, 36 aa, Artificial Sequence; identical to SEQ ID NO: 20117
  GFR-binding peptide
  MOD_RES (3)..(3): Xaa is C or S

SEQ ID NO: 23222 - protein, 40 aa, Artificial Sequence; identical to SEQ ID NO: 20118
  GFR-binding peptide
  MOD_RES (1)..(38)..(40): Xaa is C or S
  MOD_RES (17)..(18)..(19)..(20)..(21): Xaa is A or G
  MOD_RES (22)..(23)..(24)..(25): Xaa is A or G or is absent

SEQ ID NO: 23223 - protein, 43 aa, Artificial Sequence; identical to SEQ ID NO: 20119
  GFR-binding peptide
  MOD_RES (5)..(42): Xaa is C or S

SEQ ID NO: 23224 - protein, 37 aa, Artificial Sequence; identical to SEQ ID NO: 20120
  GFR-binding peptide
  MOD_RES (34)..(36): Xaa is C or S
  MOD_RES (14)..(15)..(16)..(17)..(18): Xaa is A or G
  MOD_RES (19)..(20)..(21)..(22): Xaa is A or G or is absent

SEQ ID NO: 23225 - protein, 32 aa, Artificial Sequence; identical to SEQ ID NO: 20121
  GFR-binding peptide
  MOD_RES (14)..(15)..(16)..(17)..(18): Xaa is A or G
  MOD_RES (19)..(20)..(21)..(22): Xaa is A or G or is absent

SEQ ID NO: 23226 - protein, 37 aa, Artificial Sequence; identical to SEQ ID NO: 20122
  GFR-binding peptide
  MOD_RES (35)..(37): Xaa is C or S
  MOD_RES (14)..(15)..(16)..(17)..(18): Xaa is A or G
  MOD_RES (19)..(20)..(21)..(22): Xaa is A or G or is absent

SEQ ID NO: 23227 - protein, 40 aa, Artificial Sequence; identical to SEQ ID NO: 20123
  GFR-binding peptide
  MOD_RES (4)..(38)..(40): Xaa is C or S
  MOD_RES (18)..(19)..(20)..(21)..(22): Xaa is A or G
  MOD_RES (23)..(24)..(25)..(26): Xaa is A or G or is absent

SEQ ID NO: 23228 - protein, 39 aa, Artificial Sequence; identical to SEQ ID NO: 20124
  GFR-binding peptide
  MOD_RES (5)..(5): Xaa is C or S
  MOD_RES (21)..(22)..(23)..(24)..(25): Xaa is A or G
  MOD_RES (26)..(27)..(28)..(29): Xaa is A or G or is absent

SEQ ID NO: 23229 - protein, 34 aa, Artificial Sequence; identical to SEQ ID NO: 20125
  GFR-binding peptide
  MOD_RES (34)..(34): Xaa is C or S
  MOD_RES (14)..(15)..(16)..(17)..(18): Xaa is A or G
  MOD_RES (19)..(20)..(21)..(22): Xaa is A or G or is absent

SEQ ID NO: 23230 - protein, 36 aa, Artificial Sequence; identical to SEQ ID NO: 20126
  GFR-binding peptide
  MOD_RES (3)..(3): Xaa is C or S

SEQ ID NO: 23231 - protein, 37 aa, Artificial Sequence; identical to SEQ ID NO: 20127
  GFR-binding peptide
  MOD_RES (37)..(37): Xaa is C or S
  MOD_RES (16)..(17)..(18)..(19)..(20): Xaa is A or G
  MOD_RES (21)..(22)..(23)..(24): Xaa is A or G or is absent

SEQ ID NO: 23232 - protein, 39 aa, Artificial Sequence; identical to SEQ ID NO: 20128
  GFR-binding peptide
  MOD_RES (5)..(5): Xaa is C or S
  MOD_RES (21)..(22)..(23)..(24)..(25): Xaa is A or G
  MOD_RES (26)..(27)..(28)..(29): Xaa is A or G or is absent

SEQ ID NO: 23233 - protein, 38 aa, Artificial Sequence; identical to SEQ ID NO: 20129
  GFR-binding peptide
  MOD_RES (2)..(36)..(38): Xaa is C or S
  MOD_RES (16)..(17)..(18)..(19)..(20): Xaa is A or G
  MOD_RES (21)..(22)..(23)..(24): Xaa is A or G or is absent

SEQ ID NO: 23234 - protein, 36 aa, Artificial Sequence; identical to SEQ ID NO: 20130
  GFR-binding peptide

SEQ ID NO: 23235 - protein, 39 aa, Artificial Sequence; identical to SEQ ID NO: 20131
  GFR-binding peptide
  MOD_RES (4)..(38): Xaa is C or S
  MOD_RES (18)..(19)..(20)..(21)..(22): Xaa is A or G
  MOD_RES (23)..(24)..(25)..(26): Xaa is A or G or is absent

SEQ ID NO: 23236 - protein, 36 aa, Artificial Sequence; identical to SEQ ID NO: 20132
  GFR-binding peptide
  MOD_RES (1)..(1): Xaa is C or S
  MOD_RES (17)..(18)..(19)..(20)..(21): Xaa is A or G
  MOD_RES (22)..(23)..(24)..(25): Xaa is A or G or is absent

SEQ ID NO: 23237 - protein, 42 aa, Artificial Sequence; identical to SEQ ID NO: 20133
  GFR-binding peptide
  MOD_RES (2)..(39)..(41): Xaa is C or S

SEQ ID NO: 23238 - protein, 41 aa, Artificial Sequence; identical to SEQ ID NO: 20134
  GFR-binding peptide
  MOD_RES (6)..(40): Xaa is C or S
  MOD_RES (20)..(21)..(22)..(23)..(24): Xaa is A or G
  MOD_RES (25)..(26)..(27)..(28): Xaa is A or G or is absent

SEQ ID NO: 23239 - protein, 34 aa, Artificial Sequence; identical to SEQ ID NO: 20135
  GFR-binding peptide
  MOD_RES (16)..(17)..(18)..(19)..(20): Xaa is A or G
  MOD_RES (21)..(22)..(23)..(24): Xaa is A or G or is absent

SEQ ID NO: 23240 - protein, 34 aa, Artificial Sequence; identical to SEQ ID NO: 20136
  GFR-binding peptide
  MOD_RES (34)..(34): Xaa is C or S

SEQ ID NO: 23241 - protein, 36 aa, Artificial Sequence; identical to SEQ ID NO: 20137
  GFR-binding peptide
  MOD_RES (1)..(1): Xaa is C or S
  MOD_RES (17)..(18)..(19)..(20)..(21): Xaa is A or G
  MOD_RES (22)..(23)..(24)..(25): Xaa is A or G or is absent

SEQ ID NO: 23242 - protein, 41 aa, Artificial Sequence; identical to SEQ ID NO: 20138
  GFR-binding peptide
  MOD_RES (5)..(39)..(41): Xaa is C or S
  MOD_RES (19)..(20)..(21)..(22)..(23): Xaa is A or G
  MOD_RES (24)..(25)..(26)..(27): Xaa is A or G or is absent

SEQ ID NO: 23243 - protein, 36 aa, Artificial Sequence; identical to SEQ ID NO: 20139
  GFR-binding peptide
  MOD_RES (3)..(3): Xaa is C or S
  MOD_RES (17)..(18)..(19)..(20)..(21): Xaa is A or G
  MOD_RES (22)..(23)..(24)..(25): Xaa is A or G or is absent

SEQ ID NO: 23244 - protein, 39 aa, Artificial Sequence; identical to SEQ ID NO: 20140
  GFR-binding peptide
  MOD_RES (3)..(3): Xaa is C or S

SEQ ID NO: 23245 - protein, 40 aa, Artificial Sequence; identical to SEQ ID NO: 20141
  GFR-binding peptide
  MOD_RES (3)..(40): Xaa is C or S
  MOD_RES (19)..(20)..(21)..(22)..(23): Xaa is A or G
  MOD_RES (24)..(25)..(26)..(27): Xaa is A or G or is absent

SEQ ID NO: 23246 - protein, 35 aa, Artificial Sequence; identical to SEQ ID NO: 20142
  GFR-binding peptide
  MOD_RES (35)..(35): Xaa is C or S
  MOD_RES (14)..(15)..(16)..(17)..(18): Xaa is A or G
  MOD_RES (19)..(20)..(21)..(22): Xaa is A or G or is absent

SEQ ID NO: 23247 - protein, 37 aa, Artificial Sequence; identical to SEQ ID NO: 20143
  GFR-binding peptide
  MOD_RES (3)..(37): Xaa is C or S

SEQ ID NO: 23248 - protein, 41 aa, Artificial Sequence; identical to SEQ ID NO: 20144
  GFR-binding peptide
  MOD_RES (7)..(41): Xaa is C or S
  MOD_RES (21)..(22)..(23)..(24)..(25): Xaa is A or G
  MOD_RES (26)..(27)..(28)..(29): Xaa is A or G or is absent

SEQ ID NO: 23249 - protein, 37 aa, Artificial Sequence; identical to SEQ ID NO: 20145
  GFR-binding peptide
  MOD_RES (3)..(37): Xaa is C or S
  MOD_RES (17)..(18)..(19)..(20)..(21): Xaa is A or G
  MOD_RES (22)..(23)..(24)..(25): Xaa is A or G or is absent

SEQ ID NO: 23250 - protein, 35 aa, Artificial Sequence; identical to SEQ ID NO: 20146
  GFR-binding peptide
  MOD_RES (34)..(34): Xaa is C or S
  MOD_RES (14)..(15)..(16)..(17)..(18): Xaa is A or G
  MOD_RES (19)..(20)..(21)..(22): Xaa is A or G or is absent

SEQ ID NO: 23251 - protein, 39 aa, Artificial Sequence; identical to SEQ ID NO: 20147
  GFR-binding peptide
  MOD_RES (5)..(39): Xaa is C or S
  MOD_RES (19)..(20)..(21)..(22)..(23): Xaa is A or G
  MOD_RES (24)..(25)..(26)..(27): Xaa is A or G or is absent

SEQ ID NO: 23252 - protein, 38 aa, Artificial Sequence; identical to SEQ ID NO: 20148
  GFR-binding peptide
  MOD_RES (4)..(4): Xaa is C or S
  MOD_RES (20)..(21)..(22)..(23)..(24): Xaa is A or G
  MOD_RES (25)..(26)..(27)..(28): Xaa is A or G or is absent

SEQ ID NO: 23253 - protein, 40 aa, Artificial Sequence; identical to SEQ ID NO: 20149
  GFR-binding peptide
  MOD_RES (3)..(37)..(39): Xaa is C or S
  MOD_RES (17)..(18)..(19)..(20)..(21): Xaa is A or G
  MOD_RES (22)..(23)..(24)..(25): Xaa is A or G or is absent

SEQ ID NO: 23254 - protein, 38 aa, Artificial Sequence; identical to SEQ ID NO: 20150
  GFR-binding peptide
  MOD_RES (37)..(37): Xaa is C or S
  MOD_RES (16)..(17)..(18)..(19)..(20): Xaa is A or G
  MOD_RES (21)..(22)..(23)..(24): Xaa is A or G or is absent

SEQ ID NO: 23255 - protein, 38 aa, Artificial Sequence; identical to SEQ ID NO: 2269
  GFR-binding peptide
  MOD_RES (32)..(33): Xaa is C or S

SEQ ID NO: 23256 - protein, 40 aa, Artificial Sequence
  GFR-binding peptide
  MOD_RES (1)..(3)..(38)..(39): Xaa is C or S
  MOD_RES (16)..(17)..(18)..(19)..(20): Xaa is A or G
  MOD_RES (21)..(22)..(23)..(24): Xaa is A or G or is absent
XGXEAVSMGEEYQKYXXXXXXXXXIYLVSIPSLKTPVXXA

SEQ ID NO: 23257 - protein, 34 aa, Artificial Sequence; identical to SEQ ID NO: 2272
  GFR-binding peptide
  MOD_RES (13)..(14)..(15)..(16)..(17): Xaa is A or G
  MOD_RES (18)..(19)..(20)..(21): Xaa is A or G or is absent

SEQ ID NO: 23258 - protein, 42 aa, Artificial Sequence; identical to SEQ ID NO: 2274
  GFR-binding peptide
  MOD_RES (1)..(3)..(38)..(39): Xaa is C or S
  MOD_RES (16)..(17)..(18)..(19)..(20): Xaa is A or G
  MOD_RES (21)..(22)..(23)..(24): Xaa is A or G or is absent

SEQ ID NO: 23259 - protein, 36 aa, Artificial Sequence
  GFR-binding peptide
  MOD_RES (2)..(36): Xaa is C or S
  MOD_RES (14)..(15)..(16)..(17)..(18): Xaa is A or G
  MOD_RES (19)..(20)..(21)..(22): Xaa is A or G or is absent
GXESVAMGEYQKYXXXXXXXXXIYLISIPSLKTPVX

SEQ ID NO: 23260 - protein, 35 aa, Artificial Sequence
  GFR-binding peptide
  MOD_RES (1)..(33)..(34): Xaa is C or S
XGEVVMDEYQKYVVKENEDIYLMSIPSLETPVXXA

SEQ ID NO: 23261 - protein, 33 aa, Artificial Sequence; identical to SEQ ID NO: 2277
  GFR-binding peptide
  MOD_RES (2)..(2): Xaa is C or S

SEQ ID NO: 23262 - protein, 38 aa, Artificial Sequence; identical to SEQ ID NO: 2278
  GFR-binding peptide
  MOD_RES (1)..(3)..(36)..(37): Xaa is C or S
  MOD_RES (14)..(15)..(16)..(17)..(18): Xaa is A or G
  MOD_RES (19)..(20)..(21)..(22): Xaa is A or G or is absent

SEQ ID NO: 23263 - protein, 40 aa, Artificial Sequence
  GFR-binding peptide
  MOD_RES (2)..(4)..(36)..(37): Xaa is C or S
RXGXGEVVMEEYKFKVVKDYEDLYLMSIPELETPVXXAKP

SEQ ID NO: 23264 - protein, 41 aa, Artificial Sequence
  GFR-binding peptide
  MOD_RES (2)..(4)..(39)..(40): Xaa is C or S
  MOD_RES (17)..(18)..(19)..(20)..(21): Xaa is A or G
  MOD_RES (22)..(23)..(24)..(25): Xaa is A or G or is absent
RXGXEAVSMGEEYQKYXXXXXXXXXIYLVSIPSLKTPVXXA

SEQ ID NO: 23265 - protein, 36 aa, Artificial Sequence; identical to SEQ ID NO: 2280
  GFR-binding peptide
  MOD_RES (1)..(33)..(34): Xaa is C or S

SEQ ID NO: 23266 - protein, 32 aa, Artificial Sequence; identical to SEQ ID NO: 2282
  GFR-binding peptide
  MOD_RES (1)..(32): Xaa is C or S

SEQ ID NO: 23267 - protein, 32 aa, Artificial Sequence
  GFR-binding peptide
  MOD_RES (31)..(32): Xaa is C or S
KVVMNEYQKYIVNNSSDIYLVSIPSLKTPAXX

SEQ ID NO: 23268 - protein, 40 aa, Artificial Sequence
  GFR-binding peptide
  MOD_RES (2)..(4)..(39)..(40): Xaa is C or S
  MOD_RES (17)..(18)..(19)..(20)..(21): Xaa is A or G
  MOD_RES (22)..(23)..(24)..(25): Xaa is A or G or is absent
RXGXEAVSMGEEYQKYXXXXXXXXXIYLVSIPSLKTPVXX

SEQ ID NO: 23269 - protein, 33 aa, Artificial Sequence
  GFR-binding peptide
  MOD_RES (31)..(32): Xaa is C or S
SKVVMEYKFKVKPTRGVLYLISIPELDQPVXXP

SEQ ID NO: 23270 - protein, 35 aa, Artificial Sequence; identical to SEQ ID NO: 2288
  GFR-binding peptide
  MOD_RES (31)..(32): Xaa is C or S

SEQ ID NO: 23271 - protein, 42 aa, Artificial Sequence; identical to SEQ ID NO: 2289
  GFR-binding peptide
  MOD_RES (1)..(3)..(37)..(38): Xaa is C or S
  MOD_RES (15)..(16)..(17)..(18)..(19): Xaa is A or G
  MOD_RES (20)..(21)..(22)..(23): Xaa is A or G or is absent

SEQ ID NO: 23272 - protein, 40 aa, Artificial Sequence
  GFR-binding peptide
  MOD_RES (1)..(3)..(36)..(37): Xaa is C or S
  MOD_RES (14)..(15)..(16)..(17)..(18): Xaa is A or G
  MOD_RES (19)..(20)..(21)..(22): Xaa is A or G or is absent
XKXSKVVMEYKFKXXXXXXXXXLYLISIPELDQPVXXPSA

SEQ ID NO: 23273 - protein, 33 aa, Artificial Sequence
  GFR-binding peptide
  MOD_RES (1)..(1): Xaa is C or S
  MOD_RES (12)..(13)..(14)..(15)..(16): Xaa is A or G
  MOD_RES (17)..(18)..(19)..(20): Xaa is A or G or is absent
XSRVIMEYQKYXXXXXXXXXIYLISIPSLAQPV

SEQ ID NO: 23274 - protein, 39 aa, Artificial Sequence
  GFR-binding peptide
  MOD_RES (2)..(36): Xaa is C or S
  MOD_RES (14)..(15)..(16)..(17)..(18): Xaa is A or G
  MOD_RES (19)..(20)..(21)..(22): Xaa is A or G or is absent
GXSRVVMNEYQKYXXXXXXXXXIYLVSIPSLKTPAXTPK

SEQ ID NO: 23275 - protein, 42 aa, Artificial Sequence; identical to SEQ ID NO: 2293
  GFR-binding peptide
  MOD_RES (2)..(4)..(36)..(37): Xaa is C or S

SEQ ID NO: 23276 - protein, 38 aa, Artificial Sequence; identical to SEQ ID NO: 2294
  GFR-binding peptide
  MOD_RES (2)..(4)..(37)..(38): Xaa is C or S
  MOD_RES (15)..(16)..(17)..(18)..(19): Xaa is A or G
  MOD_RES (20)..(21)..(22)..(23): Xaa is A or G or is absent

SEQ ID NO: 23277 - protein, 37 aa, Artificial Sequence
  GFR-binding peptide
  MOD_RES (2)..(33)..(34): Xaa is C or S
KXSKVIMEYKFKIKPTKGILYLISIPELDQSVXXPSA

SEQ ID NO: 23278 - protein, 40 aa, Artificial Sequence
  GFR-binding peptide
  MOD_RES (2)..(4)..(36)..(37): Xaa is C or S
HXGXARVVMNEYKFKIVNSSDDLYLVSIPELQTPAXXPKP

SEQ ID NO: 23279 - protein, 36 aa, Artificial Sequence
  GFR-binding peptide
  MOD_RES (33)..(34): Xaa is C or S
  MOD_RES (11)..(12)..(13)..(14)..(15): Xaa is A or G
  MOD_RES (16)..(17)..(18)..(19): Xaa is A or G or is absent
KVVMNEYQKYXXXXXXXXXIYLVSIPSLKTPAXXAK

SEQ ID NO: 23280 - protein, 40 aa, Artificial Sequence
  GFR-binding peptide
  MOD_RES (1)..(3)..(35)..(36): Xaa is C or S
XGXESVAMGEYKFKYTVVGKDLYLISIPELKTPVXXAKSA

SEQ ID NO: 23281 - protein, 42 aa, Artificial Sequence
  GFR-binding peptide
  MOD_RES (1)..(3)..(37)..(38): Xaa is C or S
  MOD_RES (15)..(16)..(17)..(18)..(19): Xaa is A or G
  MOD_RES (20)..(21)..(22)..(23): Xaa is A or G or is absent
XGXAEVVMDEYQKYXXXXXXXXXIYLISIPSLRAPVXXSAPA

SEQ ID NO: 23282 - protein, 36 aa, Artificial Sequence
  GFR-binding peptide
  MOD_RES (31)..(32): Xaa is C or S
EVVMEEYQKYVVKDYEDIYLMSIPSLETPVXXAKPI

SEQ ID NO: 23283 - protein, 38 aa, Artificial Sequence
  GFR-binding peptide
  MOD_RES (33)..(34): Xaa is C or S
  MOD_RES (11)..(12)..(13)..(14)..(15): Xaa is A or G
  MOD_RES (16)..(17)..(18)..(19): Xaa is A or G or is absent
EVVMEEYQKYXXXXXXXXXIYLMSIPSLETPVXXAKPI

SEQ ID NO: 23284 - protein, 39 aa, Artificial Sequence; identical to SEQ ID NO: 2299
  GFR-binding peptide
  MOD_RES (1)..(3)..(35)..(36): Xaa is C or S

SEQ ID NO: 23285 - protein, 34 aa, Artificial Sequence
  GFR-binding peptide
  MOD_RES (1)..(33)..(34): Xaa is C or S
XAEVVMDYHYKLVVNNAADKYLISIPSLRAPVXX

SEQ ID NO: 23286 - protein, 35 aa, Artificial Sequence
  GFR-binding peptide
  MOD_RES (1)..(35): Xaa is C or S
  MOD_RES (13)..(14)..(15)..(16)..(17): Xaa is A or G
  MOD_RES (18)..(19)..(20)..(21): Xaa is A or G or is absent
XARVVMNEYKFKXXXXXXXXXLYLVSIPELQTPAX

SEQ ID NO: 23287 - protein, 35 aa, Artificial Sequence
  GFR-binding peptide
  MOD_RES (33)..(34): Xaa is C or S
  MOD_RES (11)..(12)..(13)..(14)..(15): Xaa is A or G
  MOD_RES (16)..(17)..(18)..(19): Xaa is A or G or is absent
EVVMDRYKKLXXXXXXXXXFYLISIANLRAPVXXS

SEQ ID NO: 23288 - protein, 32 aa, Artificial Sequence; identical to SEQ ID NO: 2302
  GFR-binding peptide
  MOD_RES (31)..(32): Xaa is C or S

SEQ ID NO: 23289 - protein, 41 aa, Artificial Sequence; identical to SEQ ID NO: 2304
  GFR-binding peptide
  MOD_RES (1)..(35)..(36): Xaa is C or S
  MOD_RES (13)..(14)..(15)..(16)..(17): Xaa is A or G
  MOD_RES (18)..(19)..(20)..(21): Xaa is A or G or is absent

SEQ ID NO: 23290 - protein, 36 aa, Artificial Sequence
  GFR-binding peptide
  MOD_RES (1)..(35)..(36): Xaa is C or S
  MOD_RES (13)..(14)..(15)..(16)..(17): Xaa is A or G
  MOD_RES (18)..(19)..(20)..(21): Xaa is A or G or is absent
XESVAMGYHYKLXXXXXXXXXKYLISIPSLKTPVXX

SEQ ID NO: 23291 - protein, 35 aa, Artificial Sequence
  GFR-binding peptide
  MOD_RES (1)..(3)..(35): Xaa is C or S
XGXGEVVMEEYKFKVVKDYEDLYLMSIPELETPVX

SEQ ID NO: 23292 - protein, 30 aa, Artificial Sequence; identical to SEQ ID NO: 2308
  GFR-binding peptide

SEQ ID NO: 23293 - protein, 43 aa, Artificial Sequence; identical to SEQ ID NO: 2309
  GFR-binding peptide
  MOD_RES (2)..(4)..(38)..(39): Xaa is C or S
  MOD_RES (16)..(17)..(18)..(19)..(20): Xaa is A or G
  MOD_RES (21)..(22)..(23)..(24): Xaa is A or G or is absent

SEQ ID NO: 23294 - protein, 32 aa, Artificial Sequence; identical to SEQ ID NO: 2312
  GFR-binding peptide
  MOD_RES (32)..(32): Xaa is C or S

SEQ ID NO: 23295 - protein, 35 aa, Artificial Sequence
  GFR-binding peptide
  MOD_RES (1)..(3): Xaa is C or S
  MOD_RES (14)..(15)..(16)..(17)..(18): Xaa is A or G
  MOD_RES (19)..(20)..(21)..(22): Xaa is A or G or is absent
XKXSKVVMEYKFKXXXXXXXXXLYLISIPELDQPV

SEQ ID NO: 23296 - protein, 31 aa, Artificial Sequence
  GFR-binding peptide
  MOD_RES (31)..(31): Xaa is C or S
SVAMGRYKKLYTVVGKDFYLISIANLKTPVX

SEQ ID NO: 23297 - protein, 40 aa, Artificial Sequence
  GFR-binding peptide
  MOD_RES (1)..(35)..(36): Xaa is C or S
  MOD_RES (13)..(14)..(15)..(16)..(17): Xaa is A or G
  MOD_RES (18)..(19)..(20)..(21): Xaa is A or G or is absent
XESVAMGRYKKLXXXXXXXXXFYLISIANLKTPVXXAKSA

SEQ ID NO: 23298 - protein, 32 aa, Artificial Sequence; identical to SEQ ID NO: 2317
  GFR-binding peptide
  MOD_RES (1)..(1): Xaa is C or S

SEQ ID NO: 23299 - protein, 37 aa, Artificial Sequence; identical to SEQ ID NO: 2318
  GFR-binding peptide
  MOD_RES (1)..(3)..(36)..(37): Xaa is C or S

SEQ ID NO: 23300 - protein, 34 aa, Artificial Sequence
  GFR-binding peptide
  MOD_RES (2)..(34): Xaa is C or S
GXGEVVMEEYQKYVVKDYEDIYLMSIPSLETPVX

SEQ ID NO: 23301 - protein, 37 aa, Artificial Sequence; identical to SEQ ID NO: 2323
  GFR-binding peptide
  MOD_RES (2)..(4): Xaa is C or S
  MOD_RES (16)..(17)..(18)..(19)..(20): Xaa is A or G
  MOD_RES (21)..(22)..(23)..(24): Xaa is A or G or is absent

SEQ ID NO: 23302 - protein, 30 aa, Artificial Sequence
  GFR-binding peptide
KVVMNEYKFKIVNNSSDLYLVSIPELKTPA

SEQ ID NO: 23303 - protein, 34 aa, Artificial Sequence; identical to SEQ ID NO: 2326
  GFR-binding peptide
  MOD_RES (1)..(34): Xaa is C or S
  MOD_RES (12)..(13)..(14)..(15)..(16): Xaa is A or G
  MOD_RES (17)..(18)..(19)..(20): Xaa is A or G or is absent

SEQ ID NO: 23304 - protein, 37 aa, Artificial Sequence
  GFR-binding peptide
  MOD_RES (34)..(35): Xaa is C or S
  MOD_RES (12)..(13)..(14)..(15)..(16): Xaa is A or G
  MOD_RES (17)..(18)..(19)..(20): Xaa is A or G or is absent
ESVAMGEYQKYXXXXXXXXXIYLISIPSLKTPVXXAK

SEQ ID NO: 23305 - protein, 36 aa, Artificial Sequence
  GFR-binding peptide
  MOD_RES (31)..(32): Xaa is C or S
SKVVMEYQKYVKPTRGVIYLISIPSLDQPVXXPSAS

SEQ ID NO: 23306 - protein, 35 aa, Artificial Sequence
  GFR-binding peptide
  MOD_RES (34)..(35): Xaa is C or S
  MOD_RES (12)..(13)..(14)..(15)..(16): Xaa is A or G
  MOD_RES (17)..(18)..(19)..(20): Xaa is A or G or is absent
GEVVMDEYKFKXXXXXXXXXLYLMSIPELETPVXX

SEQ ID NO: 23307 - protein, 32 aa, Artificial Sequence; identical to SEQ ID NO: 2327
  GFR-binding peptide
  MOD_RES (31)..(32): Xaa is C or S

SEQ ID NO: 23308 - protein, 40 aa, Artificial Sequence
  GFR-binding peptide
  MOD_RES (35)..(36): Xaa is C or S
  MOD_RES (13)..(14)..(15)..(16)..(17): Xaa is A or G
  MOD_RES (18)..(19)..(20)..(21): Xaa is A or G or is absent
EAVSMGEEYKFKXXXXXXXXXLYLVSIPELKTPVXXAKGV

SEQ ID NO: 23309 - protein, 38 aa, Artificial Sequence
  GFR-binding peptide
  MOD_RES (2)..(4)..(36): Xaa is C or S
HXGXSRVVMNEYQKYIVNSSDDIYLVSIPSLKTPAXTP

SEQ ID NO: 23310 - protein, 42 aa, Artificial Sequence; identical to SEQ ID NO: 2328
  GFR-binding peptide
  MOD_RES (2)..(4)..(37)..(38): Xaa is C or S
  MOD_RES (15)..(16)..(17)..(18)..(19): Xaa is A or G
  MOD_RES (20)..(21)..(22)..(23): Xaa is A or G or is absent

SEQ ID NO: 23311 - protein, 37 aa, Artificial Sequence
  GFR-binding peptide
  MOD_RES (31)..(32): Xaa is C or S
SRVIMEYQKYVKPKRGVIYLISIPSLAQPVXXPAASA

SEQ ID NO: 23312 - protein, 38 aa, Artificial Sequence
  GFR-binding peptide
  MOD_RES (2)..(4)..(38): Xaa is C or S
  MOD_RES (16)..(17)..(18)..(19)..(20): Xaa is A or G
  MOD_RES (21)..(22)..(23)..(24): Xaa is A or G or is absent
HXGXARVVMNEYQKYXXXXXXXXXIYLVSIPSLQTPAX

SEQ ID NO: 23313 - protein, 41 aa, Artificial Sequence
  GFR-binding peptide
  MOD_RES (1)..(3)..(35)..(36): Xaa is C or S
XGXSRVVMNEYQKYIVNSSDDIYLVSIPSLKTPAXXPKPVY

SEQ ID NO: 23314 - protein, 33 aa, Artificial Sequence; identical to SEQ ID NO: 2330
  GFR-binding peptide
  MOD_RES (1)..(1): Xaa is C or S
  MOD_RES (12)..(13)..(14)..(15)..(16): Xaa is A or G
  MOD_RES (17)..(18)..(19)..(20): Xaa is A or G or is absent

SEQ ID NO: 23315 - protein, 32 aa, Artificial Sequence
  GFR-binding peptide
  MOD_RES (1)..(32): Xaa is C or S
XSKVVMEYQKYVKPTRGVIYLISIPSLDQPVX

SEQ ID NO: 23316 - protein, 40 aa, Artificial Sequence
  GFR-binding peptide
  MOD_RES (1)..(3)..(35)..(36): Xaa is C or S
XGXSRVVMNEYKFKIVNSSDDLYLVSIPELKTPAXXPKPV

SEQ ID NO: 23317 - protein, 40 aa, Artificial Sequence; identical to SEQ ID NO: 2333
  GFR-binding peptide
  MOD_RES (1)..(3)..(36)..(37): Xaa is C or S

SEQ ID NO: 23318 - protein, 37 aa, Artificial Sequence
  GFR-binding peptide
  MOD_RES (1)..(33)..(34): Xaa is C or S
XESVAMGRYKKLYTVVGKDFYLISIANLKTPVXXAKS

SEQ ID NO: 23319 - protein, 36 aa, Artificial Sequence; identical to SEQ ID NO: 2335
  GFR-binding peptide
  MOD_RES (1)..(3): Xaa is C or S
  MOD_RES (15)..(16)..(17)..(18)..(19): Xaa is A or G
  MOD_RES (20)..(21)..(22)..(23): Xaa is A or G or is absent

SEQ ID NO: 23320 - protein, 43 aa, Artificial Sequence
  GFR-binding peptide
  MOD_RES (2)..(4)..(38)..(39): Xaa is C or S
  MOD_RES (16)..(17)..(18)..(19)..(20): Xaa is A or G
  MOD_RES (21)..(22)..(23)..(24): Xaa is A or G or is absent
HXGXARVVMNEYKFKXXXXXXXXXLYLVSIPELQTPAXXPKPV

SEQ ID NO: 23321 - protein, 42 aa, Artificial Sequence
  GFR-binding peptide
  MOD_RES (2)..(4)..(36)..(37): Xaa is C or S
RXGXAEVVMDYHYKLVVNNAADKYLISIPSLRAPVXXSAPAA

SEQ ID NO: 23322 - protein, 37 aa, Artificial Sequence
  GFR-binding peptide
  MOD_RES (2)..(35)..(36): Xaa is C or S
  MOD_RES (13)..(14)..(15)..(16)..(17): Xaa is A or G
  MOD_RES (18)..(19)..(20)..(21): Xaa is A or G or is absent
KXSKVVMEYKFKXXXXXXXXXLYLISIPELDQPVXXP

SEQ ID NO: 23323 - protein, 39 aa, Artificial Sequence; identical to SEQ ID NO: 2341
  GFR-binding peptide
  MOD_RES (33)..(34): Xaa is C or S
  MOD_RES (11)..(12)..(13)..(14)..(15): Xaa is A or G
  MOD_RES (16)..(17)..(18)..(19): Xaa is A or G or is absent

SEQ ID NO: 23324 - protein, 41 aa, Artificial Sequence
  GFR-binding peptide
  MOD_RES (1)..(3)..(35)..(36): Xaa is C or S
XGXGEVVMDEYQKYVVKENEDIYLMSIPSLETPVXXAKPIK

SEQ ID NO: 23325 - protein, 37 aa, Artificial Sequence
  GFR-binding peptide
  MOD_RES (2)..(34)..(35): Xaa is C or S
GXAEVVMDEYKFKVVNNAADLYLISIPELRAPVXXSA

SEQ ID NO: 23326 - protein, 36 aa, Artificial Sequence
  GFR-binding peptide
  MOD_RES (2)..(36): Xaa is C or S
  MOD_RES (14)..(15)..(16)..(17)..(18): Xaa is A or G
  MOD_RES (19)..(20)..(21)..(22): Xaa is A or G or is absent
GXSRVVMNEYQKYXXXXXXXXXIYLVSIPSLKTPAX

SEQ ID NO: 23327 - protein, 42 aa, Artificial Sequence
  GFR-binding peptide
  MOD_RES (2)..(36)..(37): Xaa is C or S
  MOD_RES (14)..(15)..(16)..(17)..(18): Xaa is A or G
  MOD_RES (19)..(20)..(21)..(22): Xaa is A or G or is absent
GXAKVVMNEYQKYXXXXXXXXXIYLVSIPSLKTPAXXAKPVA

SEQ ID NO: 23328 - protein, 36 aa, Artificial Sequence
  GFR-binding peptide
  MOD_RES (31)..(31): Xaa is C or S
RVVMNEYQKYIVNSSDDIYLVSIPSLKTPAXTPKTV

SEQ ID NO: 23329 - protein, 37 aa, Artificial Sequence
  GFR-binding peptide
  MOD_RES (1)..(33)..(34): Xaa is C or S
XGEVVMDEYKFKVVKENEDLYLMSIPELETPVXXAKP

SEQ ID NO: 23330 - protein, 36 aa, Artificial Sequence
  GFR-binding peptide
  MOD_RES (1)..(3)..(36): Xaa is C or S
  MOD_RES (14)..(15)..(16)..(17)..(18): Xaa is A or G
  MOD_RES (19)..(20)..(21)..(22): Xaa is A or G or is absent
XKXSKVVMEYKFKXXXXXXXXXLYLISIPELDQPVX

SEQ ID NO: 23331 - protein, 43 aa, Artificial Sequence; identical to SEQ ID NO: 2348
  GFR-binding peptide
  MOD_RES (2)..(4)..(38)..(39): Xaa is C or S
  MOD_RES (16)..(17)..(18)..(19)..(20): Xaa is A or G
  MOD_RES (21)..(22)..(23)..(24): Xaa is A or G or is absent

SEQ ID NO: 23332 - protein, 36 aa, Artificial Sequence
  GFR-binding peptide
  MOD_RES (34)..(35): Xaa is C or S
  MOD_RES (12)..(13)..(14)..(15)..(16): Xaa is A or G
  MOD_RES (17)..(18)..(19)..(20): Xaa is A or G or is absent
SRVVMNEYKFKXXXXXXXXXLYLVSIPELKTPAXXP

SEQ ID NO: 23333 - protein, 38 aa, Artificial Sequence; identical to SEQ ID NO: 2351
  GFR-binding peptide
  MOD_RES (1)..(3)..(35)..(36): Xaa is C or S

SEQ ID NO: 23334 - protein, 33 aa, Artificial Sequence; identical to SEQ ID NO: 2352
  GFR-binding peptide
  MOD_RES (2)..(33): Xaa is C or S

SEQ ID NO: 23335 - protein, 35 aa, Artificial Sequence
  GFR-binding peptide
  MOD_RES (1)..(32)..(33): Xaa is C or S
XSKVVMEYKFKVKPTRGVLYLISIPELDQPVXXPS

SEQ ID NO: 23336 - protein, 36 aa, Artificial Sequence
  GFR-binding peptide
  MOD_RES (34)..(35): Xaa is C or S
  MOD_RES (12)..(13)..(14)..(15)..(16): Xaa is A or G
  MOD_RES (17)..(18)..(19)..(20): Xaa is A or G or is absent
AEVVMDEYQKYXXXXXXXXXIYLISIPSLRAPVXXS

SEQ ID NO: 23337 - protein, 34 aa, Artificial Sequence; identical to SEQ ID NO: 2356
  GFR-binding peptide
  MOD_RES (1)..(34): Xaa is C or S
  MOD_RES (12)..(13)..(14)..(15)..(16): Xaa is A or G
  MOD_RES (17)..(18)..(19)..(20): Xaa is A or G or is absent

SEQ ID NO: 23338 - protein, 36 aa, Artificial Sequence
  GFR-binding peptide
  MOD_RES (31)..(32): Xaa is C or S
EVVMDEYQKYVVNNAADIYLISIPSLRAPVXXSAPA

SEQ ID NO: 23339 - protein, 43 aa, Artificial Sequence; identical to SEQ ID NO: 2357
  GFR-binding peptide
  MOD_RES (2)..(4)..(38)..(39): Xaa is C or S
  MOD_RES (16)..(17)..(18)..(19)..(20): Xaa is A or G
  MOD_RES (21)..(22)..(23)..(24): Xaa is A or G or is absent

SEQ ID NO: 23340 - protein, 33 aa, Artificial Sequence; identical to SEQ ID NO: 2358
  GFR-binding peptide
  MOD_RES (33)..(33): Xaa is C or S
  MOD_RES (11)..(12)..(13)..(14)..(15): Xaa is A or G
  MOD_RES (16)..(17)..(18)..(19): Xaa is A or G or is absent

SEQ ID NO: 23341 - protein, 38 aa, Artificial Sequence; identical to SEQ ID NO: 2359
  GFR-binding peptide
  MOD_RES (1)..(34)..(35): Xaa is C or S
  MOD_RES (12)..(13)..(14)..(15)..(16): Xaa is A or G
  MOD_RES (17)..(18)..(19)..(20): Xaa is A or G or is absent

SEQ ID NO: 23342 - protein, 36 aa, Artificial Sequence
  GFR-binding peptide
  MOD_RES (1)..(35)..(36): Xaa is C or S
  MOD_RES (13)..(14)..(15)..(16)..(17): Xaa is A or G
  MOD_RES (18)..(19)..(20)..(21): Xaa is A or G or is absent
XARVVMNEYKFKXXXXXXXXXLYLVSIPELQTPAXX

SEQ ID NO: 23343 - protein, 37 aa, Artificial Sequence; identical to SEQ ID NO: 2360
  GFR-binding peptide
  MOD_RES (1)..(3)..(37): Xaa is C or S
  MOD_RES (15)..(16)..(17)..(18)..(19): Xaa is A or G
  MOD_RES (20)..(21)..(22)..(23): Xaa is A or G or is absent

SEQ ID NO: 23344 - protein, 41 aa, Artificial Sequence
  GFR-binding peptide
  MOD_RES (2)..(4)..(36)..(37): Xaa is C or S
HXGXAKVVMNEYKFKIVNNSSDLYLVSIPELKTPAXXAKPV

SEQ ID NO: 23345 - protein, 39 aa, Artificial Sequence; identical to SEQ ID NO: 2363
  GFR-binding peptide
  MOD_RES (33)..(34): Xaa is C or S
  MOD_RES (11)..(12)..(13)..(14)..(15): Xaa is A or G
  MOD_RES (16)..(17)..(18)..(19): Xaa is A or G or is absent

SEQ ID NO: 23346 - protein, 39 aa, Artificial Sequence
  GFR-binding peptide
  MOD_RES (33)..(34): Xaa is C or S
  MOD_RES (11)..(12)..(13)..(14)..(15): Xaa is A or G
  MOD_RES (16)..(17)..(18)..(19): Xaa is A or G or is absent
EVVMDEYKFKXXXXXXXXXLYLISIPELRAPVXXSAPAA

SEQ ID NO: 23347 - protein, 33 aa, Artificial Sequence
  GFR-binding peptide
  MOD_RES (1)..(33): Xaa is C or S
XSRVVMNEYKFKIVNSSDDLYLVSIPELKTPAX

SEQ ID NO: 23348 - protein, 36 aa, Artificial Sequence
  GFR-binding peptide
  MOD_RES (2)..(4)..(35)..(36): Xaa is C or S
SXKXSKVIMEYKFKIKPTKGILYLISIPELDQSVXX

SEQ ID NO: 23349 - protein, 37 aa, Artificial Sequence; identical to SEQ ID NO: 2370
  GFR-binding peptide
  MOD_RES (32)..(33): Xaa is C or S

SEQ ID NO: 23350 - protein, 38 aa, Artificial Sequence; identical to SEQ ID NO: 2374
  GFR-binding peptide
  MOD_RES (1)..(33)..(34): Xaa is C or S

SEQ ID NO: 23351 - protein, 33 aa, Artificial Sequence
  GFR-binding peptide
  MOD_RES (2)..(2): Xaa is C or S
GXESVAMGEYQKYYTVVGKDIYLISIPSLKTPV

SEQ ID NO: 23352 - protein, 38 aa, Artificial Sequence; identical to SEQ ID NO: 2380
  GFR-binding peptide
  MOD_RES (1)..(3)..(37)..(38): Xaa is C or S
  MOD_RES (15)..(16)..(17)..(18)..(19): Xaa is A or G
  MOD_RES (20)..(21)..(22)..(23): Xaa is A or G or is absent

SEQ ID NO: 23353 - protein, 39 aa, Artificial Sequence; identical to SEQ ID NO: 2381
  GFR-binding peptide
  MOD_RES (2)..(36)..(37): Xaa is C or S
  MOD_RES (14)..(15)..(16)..(17)..(18): Xaa is A or G
  MOD_RES (19)..(20)..(21)..(22): Xaa is A or G or is absent

SEQ ID NO: 23354 - protein, 42 aa, Artificial Sequence; identical to SEQ ID NO: 2383
  GFR-binding peptide
  MOD_RES (2)..(36)..(37): Xaa is C or S
  MOD_RES (14)..(15)..(16)..(17)..(18): Xaa is A or G
  MOD_RES (19)..(20)..(21)..(22): Xaa is A or G or is absent

SEQ ID NO: 23355 - protein, 38 aa, Artificial Sequence
  GFR-binding peptide
  MOD_RES (32)..(33): Xaa is C or S
GEVVMDEYKFKVVKENEDLYLMSIPELETPVXXAKPIK

SEQ ID NO: 23356 - protein, 37 aa, Artificial Sequence; identical to SEQ ID NO: 2385
  GFR-binding peptide
  MOD_RES (31)..(32): Xaa is C or S

SEQ ID NO: 23357 - protein, 36 aa, Artificial Sequence; identical to SEQ ID NO: 2386
  GFR-binding peptide
  MOD_RES (1)..(3)..(34)..(35): Xaa is C or S

SEQ ID NO: 23358 - protein, 38 aa, Artificial Sequence
  GFR-binding peptide
  MOD_RES (34)..(35): Xaa is C or S
  MOD_RES (12)..(13)..(14)..(15)..(16): Xaa is A or G
  MOD_RES (17)..(18)..(19)..(20): Xaa is A or G or is absent
AKVVMNEYKFKXXXXXXXXXLYLVSIPELKTPAXXAKP

SEQ ID NO: 23359 - protein, 44 aa, Artificial Sequence; identical to SEQ ID NO: 2388
  GFR-binding peptide
  MOD_RES (1)..(3)..(38)..(39): Xaa is C or S
  MOD_RES (16)..(17)..(18)..(19)..(20): Xaa is A or G
  MOD_RES (21)..(22)..(23)..(24): Xaa is A or G or is absent

SEQ ID NO: 23360 - protein, 38 aa, Artificial Sequence
  GFR-binding peptide
  MOD_RES (1)..(3)..(35)..(36): Xaa is C or S
XGXGEVVMDEYKFKVVKENEDLYLMSIPELETPVXXAK

SEQ ID NO: 23361 - protein, 35 aa, Artificial Sequence; identical to SEQ ID NO: 2390
  GFR-binding peptide
  MOD_RES (1)..(32)..(33): Xaa is C or S

SEQ ID NO: 23362 - protein, 40 aa, Artificial Sequence; identical to SEQ ID NO: 2391
  GFR-binding peptide
  MOD_RES (1)..(3)..(38)..(39): Xaa is C or S
  MOD_RES (16)..(17)..(18)..(19)..(20): Xaa is A or G
  MOD_RES (21)..(22)..(23)..(24): Xaa is A or G or is absent

SEQ ID NO: 23363 - protein, 35 aa, Artificial Sequence; identical to SEQ ID NO: 2393
  GFR-binding peptide
  MOD_RES (1)..(3)..(35): Xaa is C or S

SEQ ID NO: 23364 - protein, 41 aa, Artificial Sequence; identical to SEQ ID NO: 2394
  GFR-binding peptide
  MOD_RES (2)..(36)..(37): Xaa is C or S
  MOD_RES (14)..(15)..(16)..(17)..(18): Xaa is A or G
  MOD_RES (19)..(20)..(21)..(22): Xaa is A or G or is absent

SEQ ID NO: 23365 - protein, 39 aa, Artificial Sequence
  GFR-binding peptide
  MOD_RES (2)..(4)..(36)..(37): Xaa is C or S
HXGXSRVVMNEYQKYIVNSSDDIYLVSIPSLKTPAXXPK

SEQ ID NO: 23366 - protein, 41 aa, Artificial Sequence
  GFR-binding peptide
  MOD_RES (1)..(3)..(35)..(36): Xaa is C or S
XGXESVAMGYHYKLYTVVGKDKYLISIPSLKTPVXXAKSAK

SEQ ID NO: 23367 - protein, 44 aa, Artificial Sequence
  GFR-binding peptide
  MOD_RES (1)..(3)..(38)..(39): Xaa is C or S
  MOD_RES (16)..(17)..(18)..(19)..(20): Xaa is A or G
  MOD_RES (21)..(22)..(23)..(24): Xaa is A or G or is absent
XGXEAVSMGEEYKFKXXXXXXXXXLYLVSIPELKTPVXXAKGVK

SEQ ID NO: 23368 - protein, 35 aa, Artificial Sequence
  GFR-binding peptide
  MOD_RES (1)..(3)..(35): Xaa is C or S
XGXAKVVMNEYKFKIVNNSSDLYLVSIPELKTPAX

SEQ ID NO: 23369 - protein, 36 aa, Artificial Sequence; identical to SEQ ID NO: 2398
  GFR-binding peptide
  MOD_RES (1)..(34)..(35): Xaa is C or S
  MOD_RES (12)..(13)..(14)..(15)..(16): Xaa is A or G
  MOD_RES (17)..(18)..(19)..(20): Xaa is A or G or is absent

SEQ ID NO: 23370 - protein, 36 aa, Artificial Sequence
  GFR-binding peptide
  MOD_RES (33)..(34): Xaa is C or S
  MOD_RES (11)..(12)..(13)..(14)..(15): Xaa is A or G
  MOD_RES (16)..(17)..(18)..(19): Xaa is A or G or is absent
EVVMEEYKFKXXXXXXXXXLYLMSIPELETPVXXAK

SEQ ID NO: 23371 - protein, 36 aa, Artificial Sequence
  GFR-binding peptide
  MOD_RES (33)..(34): Xaa is C or S
  MOD_RES (11)..(12)..(13)..(14)..(15): Xaa is A or G
  MOD_RES (16)..(17)..(18)..(19): Xaa is A or G or is absent
SRVIMEYQKYXXXXXXXXXIYLISIPSLAQPVXXPA

SEQ ID NO: 23372 - protein, 36 aa, Artificial Sequence
  GFR-binding peptide
  MOD_RES (34)..(35): Xaa is C or S
  MOD_RES (12)..(13)..(14)..(15)..(16): Xaa is A or G
  MOD_RES (17)..(18)..(19)..(20): Xaa is A or G or is absent
ESVAMGEYKFKXXXXXXXXXLYLISIPELKTPVXXA

SEQ ID NO: 23373 - protein, 39 aa, Artificial Sequence
  GFR-binding peptide
  MOD_RES (1)..(35)..(36): Xaa is C or S
  MOD_RES (13)..(14)..(15)..(16)..(17): Xaa is A or G
  MOD_RES (18)..(19)..(20)..(21): Xaa is A or G or is absent
XARVVMNEYQKYXXXXXXXXXIYLVSIPSLQTPAXXPKP

SEQ ID NO: 23374 - protein, 34 aa, Artificial Sequence
  GFR-binding peptide
  MOD_RES (1)..(3): Xaa is C or S
XGXESVAMGEYQKYYTVVGKDIYLISIPSLKTPV

SEQ ID NO: 23375 - protein, 35 aa, Artificial Sequence
  GFR-binding peptide
  MOD_RES (1)..(34)..(35): Xaa is C or S
  MOD_RES (12)..(13)..(14)..(15)..(16): Xaa is A or G
  MOD_RES (17)..(18)..(19)..(20): Xaa is A or G or is absent
XSKVVMEYQKYXXXXXXXXXIYLISIPSLDQPVXX

SEQ ID NO: 23376 - protein, 36 aa, Artificial Sequence
  GFR-binding peptide
  MOD_RES (2)..(34)..(35): Xaa is C or S
GXGEVVMDEYQKYVVKENEDIYLMSIPSLETPVXXA

SEQ ID NO: 23377 - protein, 41 aa, Artificial Sequence; identical to SEQ ID NO: 2401
  GFR-binding peptide
  MOD_RES (1)..(3)..(35)..(36): Xaa is C or S

SEQ ID NO: 23378 - protein, 38 aa, Artificial Sequence; identical to SEQ ID NO: 2402
  GFR-binding peptide
  MOD_RES (2)..(4)..(36)..(37): Xaa is C or S

SEQ ID NO: 23379 - protein, 38 aa, Artificial Sequence
  GFR-binding peptide
  MOD_RES (1)..(34)..(35): Xaa is C or S
  MOD_RES (12)..(13)..(14)..(15)..(16): Xaa is A or G
  MOD_RES (17)..(18)..(19)..(20): Xaa is A or G or is absent
XSRVIMEYQKYXXXXXXXXXIYLISIPSLAQPVXXPAA

SEQ ID NO: 23380 - protein, 40 aa, Artificial Sequence; identical to SEQ ID NO: 2405
  GFR-binding peptide
  MOD_RES (2)..(4)..(36)..(37): Xaa is C or S

SEQ ID NO: 23381 - protein, 39 aa, Artificial Sequence; identical to SEQ ID NO: 2406
  GFR-binding peptide
  MOD_RES (2)..(4)..(38)..(39): Xaa is C or S
  MOD_RES (16)..(17)..(18)..(19)..(20): Xaa is A or G
  MOD_RES (21)..(22)..(23)..(24): Xaa is A or G or is absent

SEQ ID NO: 23382 - protein, 39 aa, Artificial Sequence
  GFR-binding peptide
  MOD_RES (2)..(35)..(36): Xaa is C or S
  MOD_RES (13)..(14)..(15)..(16)..(17): Xaa is A or G
  MOD_RES (18)..(19)..(20)..(21): Xaa is A or G or is absent
KXSRVIMEYQKYXXXXXXXXXIYLISIPSLAQPVXXPAA

SEQ ID NO: 23383 - protein, 38 aa, Artificial Sequence; identical to SEQ ID NO: 2407
  GFR-binding peptide
  MOD_RES (33)..(34): Xaa is C or S
  MOD_RES (11)..(12)..(13)..(14)..(15): Xaa is A or G
  MOD_RES (16)..(17)..(18)..(19): Xaa is A or G or is absent

SEQ ID NO: 23384 - protein, 32 aa, Artificial Sequence
  GFR-binding peptide
  MOD_RES (11)..(12)..(13)..(14)..(15): Xaa is A or G
  MOD_RES (16)..(17)..(18)..(19): Xaa is A or G or is absent
EVVMDEYQKYXXXXXXXXXIYLISIPSLRAPV

SEQ ID NO: 23385 - protein, 34 aa, Artificial Sequence; identical to SEQ ID NO: 2411
  GFR-binding peptide
  MOD_RES (31)..(32): Xaa is C or S

SEQ ID NO: 23386 - protein, 31 aa, Artificial Sequence
  GFR-binding peptide
SRVVMNEYQKYIVNSSDDIYLVSIPSLKTPA

SEQ ID NO: 23387 - protein, 38 aa, Artificial Sequence; identical to SEQ ID NO: 2412
  GFR-binding peptide
  MOD_RES (2)..(4)..(36)..(37): Xaa is C or S

SEQ ID NO: 23388 - protein, 39 aa, Artificial Sequence
  GFR-binding peptide
  MOD_RES (2)..(4)..(38)..(39): Xaa is C or S
  MOD_RES (16)..(17)..(18)..(19)..(20): Xaa is A or G
  MOD_RES (21)..(22)..(23)..(24): Xaa is A or G or is absent
RXGXAEVVMDEYQKYXXXXXXXXXIYLISIPSLRAPVXX

SEQ ID NO: 23389 - protein, 42 aa, Artificial Sequence
  GFR-binding peptide
  MOD_RES (1)..(3)..(37)..(38): Xaa is C or S
  MOD_RES (15)..(16)..(17)..(18)..(19): Xaa is A or G
  MOD_RES (20)..(21)..(22)..(23): Xaa is A or G or is absent
XGXAEVVMDEYKFKXXXXXXXXXLYLISIPELRAPVXXSAPA

SEQ ID NO: 23390 - protein, 35 aa, Artificial Sequence
  GFR-binding peptide
  MOD_RES (1)..(35): Xaa is C or S
  MOD_RES (13)..(14)..(15)..(16)..(17): Xaa is A or G
  MOD_RES (18)..(19)..(20)..(21): Xaa is A or G or is absent
XESVAMGEYQKYXXXXXXXXXIYLISIPSLKTPVX

SEQ ID NO: 23391 - protein, 40 aa, Artificial Sequence
  GFR-binding peptide
  MOD_RES (1)..(3)..(35)..(36): Xaa is C or S
XGXGEVVMEEYKFKVVKDYEDLYLMSIPELETPVXXAKPI

SEQ ID NO: 23392 - protein, 39 aa, Artificial Sequence; identical to SEQ ID NO: 2415
  GFR-binding peptide
  MOD_RES (1)..(3)..(35)..(36): Xaa is C or S

SEQ ID NO: 23393 - protein, 38 aa, Artificial Sequence
  GFR-binding peptide
  MOD_RES (2)..(4)..(37)..(38): Xaa is C or S
  MOD_RES (15)..(16)..(17)..(18)..(19): Xaa is A or G
  MOD_RES (20)..(21)..(22)..(23): Xaa is A or G or is absent
SXKXSKVIMEYKFKXXXXXXXXXLYLISIPELDQSVXX

SEQ ID NO: 23394 - protein, 34 aa, Artificial Sequence
  GFR-binding peptide
  MOD_RES (31)..(32): Xaa is C or S
EVVMDEYQKYVVKENEDIYLMSIPSLETPVXXAK

SEQ ID NO: 23395 - protein, 37 aa, Artificial Sequence
  GFR-binding peptide
  MOD_RES (2)..(34)..(35): Xaa is C or S
GXAEVVMDRYKKLVVNNAADFYLISIANLRAPVXXSA

SEQ ID NO: 23396 - protein, 37 aa, Artificial Sequence
  GFR-binding peptide
  MOD_RES (2)..(4)..(36)..(37): Xaa is C or S
RXGXAEVVMDYHYKLVVNNAADKYLISIPSLRAPVXX

SEQ ID NO: 23397 - protein, 38 aa, Artificial Sequence; identical to SEQ ID NO: 2417
  GFR-binding peptide
  MOD_RES (1)..(33)..(34): Xaa is C or S

SEQ ID NO: 23398 - protein, 36 aa, Artificial Sequence; identical to SEQ ID NO: 2418
  GFR-binding peptide
  MOD_RES (1)..(32)..(33): Xaa is C or S

SEQ ID NO: 23399 - protein, 40 aa, Artificial Sequence; identical to SEQ ID NO: 2420
  GFR-binding peptide
  MOD_RES (2)..(4)..(36)..(37): Xaa is C or S

SEQ ID NO: 23400 - protein, 38 aa, Artificial Sequence
  GFR-binding peptide
  MOD_RES (2)..(34)..(35): Xaa is C or S
GXAEVVMDRYKKLVVNNAADFYLISIANLRAPVXXSAP

SEQ ID NO: 23401 - protein, 40 aa, Artificial Sequence
  GFR-binding peptide
  MOD_RES (2)..(36): Xaa is C or S
  MOD_RES (14)..(15)..(16)..(17)..(18): Xaa is A or G
  MOD_RES (19)..(20)..(21)..(22): Xaa is A or G or is absent
GXSRVVMNEYQKYXXXXXXXXXIYLVSIPSLKTPAXTPKT

SEQ ID NO: 23402 - protein, 35 aa, Artificial Sequence; identical to SEQ ID NO: 2426
  GFR-binding peptide
  MOD_RES (2)..(2): Xaa is C or S
  MOD_RES (14)..(15)..(16)..(17)..(18): Xaa is A or G
  MOD_RES (19)..(20)..(21)..(22): Xaa is A or G or is absent

SEQ ID NO: 23403 - protein, 41 aa, Artificial Sequence
  GFR-binding peptide
  MOD_RES (2)..(4)..(36)..(37): Xaa is C or S
RXGXGEVVMEEYKFKVVKDYEDLYLMSIPELETPVXXAKPI

SEQ ID NO: 23404 - protein, 41 aa, Artificial Sequence
  GFR-binding peptide
  MOD_RES (1)..(3)..(36)..(37): Xaa is C or S
  MOD_RES (14)..(15)..(16)..(17)..(18): Xaa is A or G
  MOD_RES (19)..(20)..(21)..(22): Xaa is A or G or is absent
XKXSRVIMEYKFKXXXXXXXXXLYLISIPELAQPVXXPAAS

SEQ ID NO: 23405 - protein, 39 aa, Artificial Sequence
  GFR-binding peptide
  MOD_RES (1)..(3)..(37)..(38): Xaa is C or S
  MOD_RES (15)..(16)..(17)..(18)..(19): Xaa is A or G
  MOD_RES (20)..(21)..(22)..(23): Xaa is A or G or is absent
XGXGEVVMDEYQKYXXXXXXXXXIYLMSIPSLETPVXXA

SEQ ID NO: 23406 - protein, 37 aa, Artificial Sequence
  GFR-binding peptide
  MOD_RES (34)..(35): Xaa is C or S
  MOD_RES (12)..(13)..(14)..(15)..(16): Xaa is A or G
  MOD_RES (17)..(18)..(19)..(20): Xaa is A or G or is absent
SRVVMNEYQKYXXXXXXXXXIYLVSIPSLKTPAXXPK

SEQ ID NO: 23407 - protein, 36 aa, Artificial Sequence; identical to SEQ ID NO: 2427
  GFR-binding peptide
  MOD_RES (1)..(33)..(34): Xaa is C or S

SEQ ID NO: 23408 - protein, 38 aa, Artificial Sequence
  GFR-binding peptide
  MOD_RES (1)..(3)..(35)..(36): Xaa is C or S
XGXSRVVMNEYQKYIVNSSDDIYLVSIPSLKTPAXXPK

SEQ ID NO: 23409 - protein, 32 aa, Artificial Sequence; identical to SEQ ID NO: 2428
  GFR-binding peptide
  MOD_RES (32)..(32): Xaa is C or S

SEQ ID NO: 23410 - protein, 35 aa, Artificial Sequence
  GFR-binding peptide
  MOD_RES (2)..(35): Xaa is C or S
  MOD_RES (13)..(14)..(15)..(16)..(17): Xaa is A or G
  MOD_RES (18)..(19)..(20)..(21): Xaa is A or G or is absent
KXSRVIMEYKFKXXXXXXXXXLYLISIPELAQPVX

SEQ ID NO: 23411 - protein, 40 aa, Artificial Sequence
  GFR-binding peptide
  MOD_RES (2)..(36)..(37): Xaa is C or S
  MOD_RES (14)..(15)..(16)..(17)..(18): Xaa is A or G
  MOD_RES (19)..(20)..(21)..(22): Xaa is A or G or is absent
GXAEVVMDEYKFKXXXXXXXXXLYLISIPELRAPVXXSAP

SEQ ID NO: 23412 - protein, 33 aa, Artificial Sequence
  GFR-binding peptide
  MOD_RES (31)..(32): Xaa is C or S
SVAMGRYKKLYTVVGKDFYLISIANLKTPVXXA

SEQ ID NO: 23413 - protein, 37 aa, Artificial Sequence; identical to SEQ ID NO: 2433
  GFR-binding peptide
  MOD_RES (2)..(36)..(37): Xaa is C or S
  MOD_RES (14)..(15)..(16)..(17)..(18): Xaa is A or G
  MOD_RES (19)..(20)..(21)..(22): Xaa is A or G or is absent

SEQ ID NO: 23414 - protein, 32 aa, Artificial Sequence
  GFR-binding peptide
  MOD_RES (11)..(12)..(13)..(14)..(15): Xaa is A or G
  MOD_RES (16)..(17)..(18)..(19): Xaa is A or G or is absent
EVVMEEYQKYXXXXXXXXXIYLMSIPSLETPV

SEQ ID NO: 23415 - protein, 43 aa, Artificial Sequence
  GFR-binding peptide
  MOD_RES (1)..(3)..(37)..(38): Xaa is C or S
  MOD_RES (15)..(16)..(17)..(18)..(19): Xaa is A or G
  MOD_RES (20)..(21)..(22)..(23): Xaa is A or G or is absent
XGXSRVVMNEYKFKXXXXXXXXXLYLVSIPELKTPAXXPKPVY

SEQ ID NO: 23416 - protein, 32 aa, Artificial Sequence
  GFR-binding peptide
  MOD_RES (31)..(32): Xaa is C or S
EVVMDEYQKYVVNNAADIYLISIPSLRAPVXX

SEQ ID NO: 23417 - protein, 33 aa, Artificial Sequence; identical to SEQ ID NO: 2439
  GFR-binding peptide
  MOD_RES (31)..(32): Xaa is C or S

SEQ ID NO: 23418 - protein, 38 aa, Artificial Sequence
  GFR-binding peptide
  MOD_RES (1)..(35)..(36): Xaa is C or S
  MOD_RES (13)..(14)..(15)..(16)..(17): Xaa is A or G
  MOD_RES (18)..(19)..(20)..(21): Xaa is A or G or is absent
XAEVVMDYHYKLXXXXXXXXXKYLISIPSLRAPVXXSA

SEQ ID NO: 23419 - protein, 37 aa, Artificial Sequence
  GFR-binding peptide
  MOD_RES (33)..(34): Xaa is C or S
  MOD_RES (11)..(12)..(13)..(14)..(15): Xaa is A or G
  MOD_RES (16)..(17)..(18)..(19): Xaa is A or G or is absent
EVVMDEYKFKXXXXXXXXXLYLISIPELRAPVXXSAP

SEQ ID NO: 23420 - protein, 36 aa, Artificial Sequence
  GFR-binding peptide
  MOD_RES (2)..(36): Xaa is C or S
  MOD_RES (14)..(15)..(16)..(17)..(18): Xaa is A or G
  MOD_RES (19)..(20)..(21)..(22): Xaa is A or G or is absent
GXAKVVMNEYKFKXXXXXXXXXLYLVSIPELKTPAX

SEQ ID NO: 23421 - protein, 35 aa, Artificial Sequence
  GFR-binding peptide
  MOD_RES (2)..(34)..(35): Xaa is C or S
GXESVAMGYHYKLYTVVGKDKYLISIPSLKTPVXX

SEQ ID NO: 23422 - protein, 37 aa, Artificial Sequence; identical to SEQ ID NO: 2445
  GFR-binding peptide
  MOD_RES (2)..(36): Xaa is C or S
  MOD_RES (14)..(15)..(16)..(17)..(18): Xaa is A or G
  MOD_RES (19)..(20)..(21)..(22): Xaa is A or G or is absent

SEQ ID NO: 23423 - protein, 39 aa, Artificial Sequence
  GFR-binding peptide
  MOD_RES (1)..(35)..(36): Xaa is C or S
  MOD_RES (13)..(14)..(15)..(16)..(17): Xaa is A or G
  MOD_RES (18)..(19)..(20)..(21): Xaa is A or G or is absent
XESVAMGEYKFKXXXXXXXXXLYLISIPELKTPVXXAKS

SEQ ID NO: 23424 - protein, 37 aa, Artificial Sequence
  GFR-binding peptide
  MOD_RES (2)..(36): Xaa is C or S
  MOD_RES (14)..(15)..(16)..(17)..(18): Xaa is A or G
  MOD_RES (19)..(20)..(21)..(22): Xaa is A or G or is absent
GXSRVVMNEYKFKXXXXXXXXXLYLVSIPELKTPAXT

SEQ ID NO: 23425 - protein, 41 aa, Artificial Sequence
  GFR-binding peptide
  MOD_RES (2)..(4)..(36)..(37): Xaa is C or S
HXGXARVVMNEYQKYIVNSSDDIYLVSIPSLQTPAXXPKPV

SEQ ID NO: 23426 - protein, 41 aa, Artificial Sequence
  GFR-binding peptide
  MOD_RES (2)..(36)..(37): Xaa is C or S
  MOD_RES (14)..(15)..(16)..(17)..(18): Xaa is A or G
  MOD_RES (19)..(20)..(21)..(22): Xaa is A or G or is absent
GXAKVVMNEYQKYXXXXXXXXXIYLVSIPSLKTPAXXAKPV

SEQ ID NO: 23427 - protein, 36 aa, Artificial Sequence
  GFR-binding peptide
  MOD_RES (33)..(34): Xaa is C or S
  MOD_RES (11)..(12)..(13)..(14)..(15): Xaa is A or G
  MOD_RES (16)..(17)..(18)..(19): Xaa is A or G or is absent
RVVMNEYQKYXXXXXXXXXIYLVSIPSLQTPAXXPK

SEQ ID NO: 23428 - protein, 31 aa, Artificial Sequence; identical to SEQ ID NO: 2448
  GFR-binding peptide
  MOD_RES (31)..(31): Xaa is C or S

SEQ ID NO: 23429 - protein, 37 aa, Artificial Sequence
  GFR-binding peptide
  MOD_RES (31)..(32): Xaa is C or S
EVVMDEYQKYVVNNAADIYLISIPSLRAPVXXSAPAA

SEQ ID NO: 23430 - protein, 36 aa, Artificial Sequence; identical to SEQ ID NO: 2449
  GFR-binding peptide
  MOD_RES (1)..(3)..(36): Xaa is C or S

SEQ ID NO: 23431 - protein, 35 aa, Artificial Sequence
  GFR-binding peptide
  MOD_RES (33)..(34): Xaa is C or S
  MOD_RES (11)..(12)..(13)..(14)..(15): Xaa is A or G
  MOD_RES (16)..(17)..(18)..(19): Xaa is A or G or is absent
KVVMNEYQKYXXXXXXXXXIYLVSIPSLKTPAXXA

SEQ ID NO: 23432 - protein, 37 aa, Artificial Sequence
  GFR-binding peptide
  MOD_RES (1)..(3)..(35): Xaa is C or S
XGXSRVVMNEYKFKIVNSSDDLYLVSIPELKTPAXTP

SEQ ID NO: 23433 - protein, 35 aa, Artificial Sequence; identical to SEQ ID NO: 2452
  GFR-binding peptide
  MOD_RES (2)..(2): Xaa is C or S
  MOD_RES (14)..(15)..(16)..(17)..(18): Xaa is A or G
  MOD_RES (19)..(20)..(21)..(22): Xaa is A or G or is absent

SEQ ID NO: 23434 - protein, 33 aa, Artificial Sequence
  GFR-binding peptide
  MOD_RES (12)..(13)..(14)..(15)..(16): Xaa is A or G
  MOD_RES (17)..(18)..(19)..(20): Xaa is A or G or is absent
ESVAMGEYQKYXXXXXXXXXIYLISIPSLKTPV

SEQ ID NO: 23435 - protein, 40 aa, Artificial Sequence; identical to SEQ ID NO: 2454
  GFR-binding peptide
  MOD_RES (2)..(4)..(36)..(37): Xaa is C or S

SEQ ID NO: 23436 - protein, 36 aa, Artificial Sequence
  GFR-binding peptide
  MOD_RES (2)..(4)..(36): Xaa is C or S
RXGXAEVVMDEYQKYVVNNAADIYLISIPSLRAPVX

SEQ ID NO: 23437 - protein, 33 aa, Artificial Sequence; identical to SEQ ID NO: 2458
  GFR-binding peptide
  MOD_RES (33)..(33): Xaa is C or S
  MOD_RES (11)..(12)..(13)..(14)..(15): Xaa is A or G
  MOD_RES (16)..(17)..(18)..(19): Xaa is A or G or is absent

SEQ ID NO: 23438 - protein, 40 aa, Artificial Sequence
  GFR-binding peptide
  MOD_RES (1)..(3)..(36)..(37): Xaa is C or S
  MOD_RES (14)..(15)..(16)..(17)..(18): Xaa is A or G
  MOD_RES (19)..(20)..(21)..(22): Xaa is A or G or is absent
XKXSRVIMEYQKYXXXXXXXXXIYLISIPSLAQPVXXPAA

SEQ ID NO: 23439 - protein, 41 aa, Artificial Sequence
  GFR-binding peptide
  MOD_RES (1)..(3)..(37)..(38): Xaa is C or S
  MOD_RES (15)..(16)..(17)..(18)..(19): Xaa is A or G
  MOD_RES (20)..(21)..(22)..(23): Xaa is A or G or is absent
XGXESVAMGRYKKLXXXXXXXXXFYLISIANLKTPVXXAKS

SEQ ID NO: 23440 - protein, 39 aa, Artificial Sequence; identical to SEQ ID NO: 2459
  GFR-binding peptide
  MOD_RES (33)..(34): Xaa is C or S
  MOD_RES (11)..(12)..(13)..(14)..(15): Xaa is A or G
  MOD_RES (16)..(17)..(18)..(19): Xaa is A or G or is absent

SEQ ID NO: 23441 - protein, 39 aa, Artificial Sequence
  GFR-binding peptide
  MOD_RES (1)..(3)..(36)..(37): Xaa is C or S
XGXEAVSMGEEYQKYTPVGMDDIYLVSIPSLKTPVXXAK

SEQ ID NO: 23442 - protein, 40 aa, Artificial Sequence
  GFR-binding peptide
  MOD_RES (1)..(35)..(36): Xaa is C or S
  MOD_RES (13)..(14)..(15)..(16)..(17): Xaa is A or G
  MOD_RES (18)..(19)..(20)..(21): Xaa is A or G or is absent
XGEVVMDEYKFKXXXXXXXXXLYLMSIPELETPVXXAKPI

SEQ ID NO: 23443 - protein, 39 aa, Artificial Sequence
  GFR-binding peptide
  MOD_RES (33)..(34): Xaa is C or S
  MOD_RES (11)..(12)..(13)..(14)..(15): Xaa is A or G
  MOD_RES (16)..(17)..(18)..(19): Xaa is A or G or is absent
RVVMNEYKFKXXXXXXXXXLYLVSIPELQTPAXXPKPVT

SEQ ID NO: 23444 - protein, 42 aa, Artificial Sequence
  GFR-binding peptide
  MOD_RES (1)..(3)..(37)..(38): Xaa is C or S
  MOD_RES (15)..(16)..(17)..(18)..(19): Xaa is A or G
  MOD_RES (20)..(21)..(22)..(23): Xaa is A or G or is absent
XGXESVAMGRYKKLXXXXXXXXXFYLISIANLKTPVXXAKSA

SEQ ID NO: 23445 - protein, 42 aa, Artificial Sequence
  GFR-binding peptide
  MOD_RES (2)..(36)..(37): Xaa is C or S
  MOD_RES (14)..(15)..(16)..(17)..(18): Xaa is A or G
  MOD_RES (19)..(20)..(21)..(22): Xaa is A or G or is absent
GXGEVVMDEYKFKXXXXXXXXXLYLMSIPELETPVXXAKPIK

SEQ ID NO: 23446 - protein, 37 aa, Artificial Sequence
  GFR-binding peptide
  MOD_RES (1)..(3)..(37): Xaa is C or S
  MOD_RES (15)..(16)..(17)..(18)..(19): Xaa is A or G
  MOD_RES (20)..(21)..(22)..(23): Xaa is A or G or is absent
XGXESVAMGRYKKLXXXXXXXXXFYLISIANLKTPVX

SEQ ID NO: 23447 - protein, 40 aa, Artificial Sequence
  GFR-binding peptide
  MOD_RES (1)..(3)..(37)..(38): Xaa is C or S
  MOD_RES (15)..(16)..(17)..(18)..(19): Xaa is A or G
  MOD_RES (20)..(21)..(22)..(23): Xaa is A or G or is absent
XGXAEVVMDRYKKLXXXXXXXXXFYLISIANLRAPVXXSA

SEQ ID NO: 23448 - protein, 39 aa, Artificial Sequence; identical to SEQ ID NO: 2468
  GFR-binding peptide
  MOD_RES (33)..(34): Xaa is C or S
  MOD_RES (11)..(12)..(13)..(14)..(15): Xaa is A or G
  MOD_RES (16)..(17)..(18)..(19): Xaa is A or G or is absent

SEQ ID NO: 23449 - protein, 32 aa, Artificial Sequence; identical to SEQ ID NO: 2470
  GFR-binding peptide
  MOD_RES (11)..(12)..(13)..(14)..(15): Xaa is A or G
  MOD_RES (16)..(17)..(18)..(19): Xaa is A or G or is absent

SEQ ID NO: 23450 - protein, 37 aa, Artificial Sequence; identical to SEQ ID NO: 2472
  GFR-binding peptide
  MOD_RES (32)..(33): Xaa is C or S

SEQ ID NO: 23451 - protein, 43 aa, Artificial Sequence; identical to SEQ ID NO: 2473
  GFR-binding peptide
  MOD_RES (2)..(4)..(39)..(40): Xaa is C or S
  MOD_RES (17)..(18)..(19)..(20)..(21): Xaa is A or G
  MOD_RES (22)..(23)..(24)..(25): Xaa is A or G or is absent

SEQ ID NO: 23452 - protein, 35 aa, Artificial Sequence
  GFR-binding peptide
  MOD_RES (2)..(2): Xaa is C or S
  MOD_RES (14)..(15)..(16)..(17)..(18): Xaa is A or G
  MOD_RES (19)..(20)..(21)..(22): Xaa is A or G or is absent
GXGEVVMEEYQKYXXXXXXXXXIYLMSIPSLETPV

SEQ ID NO: 23453 - protein, 40 aa, Artificial Sequence; identical to SEQ ID NO: 2475
  GFR-binding peptide
  MOD_RES (1)..(3)..(34)..(35): Xaa is C or S

SEQ ID NO: 23454 - protein, 39 aa, Artificial Sequence; identical to SEQ ID NO: 2476
  GFR-binding peptide
  MOD_RES (2)..(36)..(37): Xaa is C or S
  MOD_RES (14)..(15)..(16)..(17)..(18): Xaa is A or G
  MOD_RES (19)..(20)..(21)..(22): Xaa is A or G or is absent

SEQ ID NO: 23455 - protein, 38 aa, Artificial Sequence; identical to SEQ ID NO: 2477
  GFR-binding peptide
  MOD_RES (2)..(4): Xaa is C or S
  MOD_RES (17)..(18)..(19)..(20)..(21): Xaa is A or G
  MOD_RES (22)..(23)..(24)..(25): Xaa is A or G or is absent

SEQ ID NO: 23456 - protein, 35 aa, Artificial Sequence; identical to SEQ ID NO: 2478
  GFR-binding peptide
  MOD_RES (31)..(32): Xaa is C or S

SEQ ID NO: 23457 - protein, 35 aa, Artificial Sequence
  GFR-binding peptide
  MOD_RES (2)..(34): Xaa is C or S
GXSRVVMNEYQKYIVNSSDDIYLVSIPSLKTPAXT

SEQ ID NO: 23458 - protein, 38 aa, Artificial Sequence
  GFR-binding peptide
  MOD_RES (2)..(36)..(37): Xaa is C or S
  MOD_RES (14)..(15)..(16)..(17)..(18): Xaa is A or G
  MOD_RES (19)..(20)..(21)..(22): Xaa is A or G or is absent
GXESVAMGYHYKLXXXXXXXXXKYLISIPSLKTPVXXA

SEQ ID NO: 23459 - protein, 35 aa, Artificial Sequence
  GFR-binding peptide
  MOD_RES (1)..(35): Xaa is C or S
  MOD_RES (13)..(14)..(15)..(16)..(17): Xaa is A or G
  MOD_RES (18)..(19)..(20)..(21): Xaa is A or G or is absent
XESVAMGYHYKLXXXXXXXXXKYLISIPSLKTPVX

SEQ ID NO: 23460 - protein, 36 aa, Artificial Sequence; identical to SEQ ID NO: 2480
  GFR-binding peptide
  MOD_RES (33)..(34): Xaa is C or S
  MOD_RES (11)..(12)..(13)..(14)..(15): Xaa is A or G
  MOD_RES (16)..(17)..(18)..(19): Xaa is A or G or is absent

SEQ ID NO: 23461 - protein, 37 aa, Artificial Sequence; identical to SEQ ID NO: 2481
  GFR-binding peptide
  MOD_RES (1)..(3)..(35)..(36): Xaa is C or S

SEQ ID NO: 23462 - protein, 35 aa, Artificial Sequence; identical to SEQ ID NO: 2482
  GFR-binding peptide
  MOD_RES (1)..(1): Xaa is C or S
  MOD_RES (14)..(15)..(16)..(17)..(18): Xaa is A or G
  MOD_RES (19)..(20)..(21)..(22): Xaa is A or G or is absent

SEQ ID NO: 23463 - protein, 39 aa, Artificial Sequence
  GFR-binding peptide
  MOD_RES (1)..(3)..(37)..(38): Xaa is C or S
  MOD_RES (15)..(16)..(17)..(18)..(19): Xaa is A or G
  MOD_RES (20)..(21)..(22)..(23): Xaa is A or G or is absent
XGXGEVVMDEYKFKXXXXXXXXXLYLMSIPELETPVXXA

SEQ ID NO: 23464 - protein, 40 aa, Artificial Sequence
  GFR-binding peptide
  MOD_RES (1)..(3)..(36)..(37): Xaa is C or S
  MOD_RES (14)..(15)..(16)..(17)..(18): Xaa is A or G
  MOD_RES (19)..(20)..(21)..(22): Xaa is A or G or is absent
XKXSKVIMEYQKYXXXXXXXXXIYLISIPSLDQSVXXPSA

SEQ ID NO: 23465 - protein, 33 aa, Artificial Sequence
  GFR-binding peptide
  MOD_RES (2)..(2): Xaa is C or S
GXGEVVMDEYKFKVVKENEDLYLMSIPELETPV

SEQ ID NO: 23466 - protein, 39 aa, Artificial Sequence; identical to SEQ ID NO: 2487
  GFR-binding peptide
  MOD_RES (2)..(4)..(35)..(36): Xaa is C or S

SEQ ID NO: 23467 - protein, 38 aa, Artificial Sequence
  GFR-binding peptide
  MOD_RES (2)..(35)..(36): Xaa is C or S
  MOD_RES (13)..(14)..(15)..(16)..(17): Xaa is A or G
  MOD_RES (18)..(19)..(20)..(21): Xaa is A or G or is absent
KXSKVIMEYQKYXXXXXXXXXIYLISIPSLDQSVXXPS

SEQ ID NO: 23468 - protein, 39 aa, Artificial Sequence; identical to SEQ ID NO: 2489
  GFR-binding peptide
  MOD_RES (34)..(35): Xaa is C or S
  MOD_RES (12)..(13)..(14)..(15)..(16): Xaa is A or G
  MOD_RES (17)..(18)..(19)..(20): Xaa is A or G or is absent

SEQ ID NO: 23469 - protein, 40 aa, Artificial Sequence; identical to SEQ ID NO: 2491
  GFR-binding peptide
  MOD_RES (2)..(4)..(35)..(36): Xaa is C or S

SEQ ID NO: 23470 - protein, 37 aa, Artificial Sequence
  GFR-binding peptide
  MOD_RES (31)..(32): Xaa is C or S
SKVVMEYQKYVKPTRGVIYLISIPSLDQPVXXPSASA

SEQ ID NO: 23471 - protein, 39 aa, Artificial Sequence
  GFR-binding peptide
  MOD_RES (2)..(4)..(38)..(39): Xaa is C or S
  MOD_RES (16)..(17)..(18)..(19)..(20): Xaa is A or G
  MOD_RES (21)..(22)..(23)..(24): Xaa is A or G or is absent
RXGXAEVVMDYHYKLXXXXXXXXXKYLISIPSLRAPVXX

SEQ ID NO: 23472 - protein, 32 aa, Artificial Sequence
  GFR-binding peptide
  MOD_RES (31)..(32): Xaa is C or S
RVVMNEYQKYIVNSSDDIYLVSIPSLKTPAXX

SEQ ID NO: 23473 - protein, 30 aa, Artificial Sequence
  GFR-binding peptide
RVVMNEYKFKIVNSSDDLYLVSIPELKTPA

SEQ ID NO: 23474 - protein, 43 aa, Artificial Sequence
  GFR-binding peptide
  MOD_RES (1)..(3)..(37)..(38): Xaa is C or S
  MOD_RES (15)..(16)..(17)..(18)..(19): Xaa is A or G
  MOD_RES (20)..(21)..(22)..(23): Xaa is A or G or is absent
XGXSRVVMNEYQKYXXXXXXXXXIYLVSIPSLKTPAXXPKPVY

SEQ ID NO: 23475 - protein, 38 aa, Artificial Sequence; identical to SEQ ID NO: 2496
  GFR-binding peptide
  MOD_RES (34)..(35): Xaa is C or S
  MOD_RES (12)..(13)..(14)..(15)..(16): Xaa is A or G
  MOD_RES (17)..(18)..(19)..(20): Xaa is A or G or is absent

SEQ ID NO: 23476 - protein, 38 aa, Artificial Sequence; identical to SEQ ID NO: 2497
  GFR-binding peptide
  MOD_RES (2)..(34)..(35): Xaa is C or S

SEQ ID NO: 23477 - protein, 38 aa, Artificial Sequence
  GFR-binding peptide
  MOD_RES (2)..(4)..(37)..(38): Xaa is C or S
  MOD_RES (15)..(16)..(17)..(18)..(19): Xaa is A or G
  MOD_RES (20)..(21)..(22)..(23): Xaa is A or G or is absent
SXKXSKVIMEYQKYXXXXXXXXXIYLISIPSLDQSVXX

SEQ ID NO: 23478 - protein, 39 aa, Artificial Sequence
  GFR-binding peptide
  MOD_RES (1)..(3)..(35)..(36): Xaa is C or S
XGXESVAMGEYQKYYTVVGKDIYLISIPSLKTPVXXAKS

SEQ ID NO: 23479 - protein, 34 aa, Artificial Sequence; identical to SEQ ID NO: 2502
  GFR-binding peptide
  MOD_RES (2)..(4): Xaa is C or S

SEQ ID NO: 23480 - protein, 40 aa, Artificial Sequence
  GFR-binding peptide
  MOD_RES (35)..(36): Xaa is C or S
  MOD_RES (13)..(14)..(15)..(16)..(17): Xaa is A or G
  MOD_RES (18)..(19)..(20)..(21): Xaa is A or G or is absent
EAVSMGEEYQKYXXXXXXXXXIYLVSIPSLKTPVXXAKGV

SEQ ID NO: 23481 - protein, 37 aa, Artificial Sequence
  GFR-binding peptide
  MOD_RES (2)..(36)..(37): Xaa is C or S
  MOD_RES (14)..(15)..(16)..(17)..(18): Xaa is A or G
  MOD_RES (19)..(20)..(21)..(22): Xaa is A or G or is absent
GXAEVVMDRYKKLXXXXXXXXXFYLISIANLRAPVXX

SEQ ID NO: 23482 - protein, 39 aa, Artificial Sequence
  GFR-binding peptide
  MOD_RES (1)..(35)..(36): Xaa is C or S
  MOD_RES (13)..(14)..(15)..(16)..(17): Xaa is A or G
  MOD_RES (18)..(19)..(20)..(21): Xaa is A or G or is absent
XAKVVMNEYQKYXXXXXXXXXIYLVSIPSLKTPAXXAKP

SEQ ID NO: 23483 - protein, 38 aa, Artificial Sequence; identical to SEQ ID NO: 2504
  GFR-binding peptide
  MOD_RES (2)..(4)..(38): Xaa is C or S
  MOD_RES (16)..(17)..(18)..(19)..(20): Xaa is A or G
  MOD_RES (21)..(22)..(23)..(24): Xaa is A or G or is absent

SEQ ID NO: 23484 - protein, 38 aa, Artificial Sequence; identical to SEQ ID NO: 2505
  GFR-binding peptide
  MOD_RES (2)..(35)..(36): Xaa is C or S
  MOD_RES (13)..(14)..(15)..(16)..(17): Xaa is A or G
  MOD_RES (18)..(19)..(20)..(21): Xaa is A or G or is absent

SEQ ID NO: 23485 - protein, 35 aa, Artificial Sequence
  GFR-binding peptide
  MOD_RES (1)..(3)..(35): Xaa is C or S
XGXARVVMNEYKFKIVNSSDDLYLVSIPELQTPAX

SEQ ID NO: 23486 - protein, 37 aa, Artificial Sequence
  GFR-binding peptide
  MOD_RES (2)..(36)..(37): Xaa is C or S
  MOD_RES (14)..(15)..(16)..(17)..(18): Xaa is A or G
  MOD_RES (19)..(20)..(21)..(22): Xaa is A or G or is absent
GXAEVVMDEYQKYXXXXXXXXXIYLISIPSLRAPVXX

SEQ ID NO: 23487 - protein, 32 aa, Artificial Sequence; identical to SEQ ID NO: 2506
  GFR-binding peptide
  MOD_RES (31)..(31): Xaa is C or S

SEQ ID NO: 23488 - protein, 35 aa, Artificial Sequence; identical to SEQ ID NO: 2508
  GFR-binding peptide
  MOD_RES (33)..(33): Xaa is C or S
  MOD_RES (11)..(12)..(13)..(14)..(15): Xaa is A or G
  MOD_RES (16)..(17)..(18)..(19): Xaa is A or G or is absent

SEQ ID NO: 23489 - protein, 38 aa, Artificial Sequence
  GFR-binding peptide
  MOD_RES (2)..(35)..(36): Xaa is C or S
  MOD_RES (13)..(14)..(15)..(16)..(17): Xaa is A or G
  MOD_RES (18)..(19)..(20)..(21): Xaa is A or G or is absent
KXSRVIMEYKFKXXXXXXXXXLYLISIPELAQPVXXPA

SEQ ID NO: 23490 - protein, 34 aa, Artificial Sequence
  GFR-binding peptide
  MOD_RES (31)..(32): Xaa is C or S
SVAMGEYQKYYTVVGKDIYLISIPSLKTPVXXAK

SEQ ID NO: 23491 - protein, 34 aa, Artificial Sequence
  GFR-binding peptide
  MOD_RES (1)..(1): Xaa is C or S
  MOD_RES (13)..(14)..(15)..(16)..(17): Xaa is A or G
  MOD_RES (18)..(19)..(20)..(21): Xaa is A or G or is absent
XESVAMGEYKFKXXXXXXXXXLYLISIPELKTPV

SEQ ID NO: 23492 - protein, 39 aa, Artificial Sequence
  GFR-binding peptide
  MOD_RES (2)..(4)..(38)..(39): Xaa is C or S
  MOD_RES (16)..(17)..(18)..(19)..(20): Xaa is A or G
  MOD_RES (21)..(22)..(23)..(24): Xaa is A or G or is absent
HXGXARVVMNEYKFKXXXXXXXXXLYLVSIPELQTPAXX

SEQ ID NO: 23493 - protein, 35 aa, Artificial Sequence
  GFR-binding peptide
  MOD_RES (1)..(34)..(35): Xaa is C or S
XEAVSMGEEYKFKTPVGMDDLYLVSIPELKTPVXX

SEQ ID NO: 23494 - protein, 39 aa, Artificial Sequence; identical to SEQ ID NO: 2512
  GFR-binding peptide
  MOD_RES (1)..(33)..(34): Xaa is C or S

SEQ ID NO: 23495 - protein, 38 aa, Artificial Sequence; identical to SEQ ID NO: 2513
  GFR-binding peptide
  MOD_RES (1)..(3)..(35)..(36): Xaa is C or S

SEQ ID NO: 23496 - protein, 39 aa, Artificial Sequence; identical to SEQ ID NO: 2514
  GFR-binding peptide
  MOD_RES (35)..(36): Xaa is C or S
  MOD_RES (13)..(14)..(15)..(16)..(17): Xaa is A or G
  MOD_RES (18)..(19)..(20)..(21): Xaa is A or G or is absent

SEQ ID NO: 23497 - protein, 37 aa, Artificial Sequence
  GFR-binding peptide
  MOD_RES (34)..(35): Xaa is C or S
  MOD_RES (12)..(13)..(14)..(15)..(16): Xaa is A or G
  MOD_RES (17)..(18)..(19)..(20): Xaa is A or G or is absent
AEVVMDEYQKYXXXXXXXXXIYLISIPSLRAPVXXSA

SEQ ID NO: 23498 - protein, 39 aa, Artificial Sequence; identical to SEQ ID NO: 2516
  GFR-binding peptide
  MOD_RES (1)..(34)..(35): Xaa is C or S

SEQ ID NO: 23499 - protein, 42 aa, Artificial Sequence; identical to SEQ ID NO: 2517
  GFR-binding peptide
  MOD_RES (1)..(3)..(37): Xaa is C or S
  MOD_RES (15)..(16)..(17)..(18)..(19): Xaa is A or G
  MOD_RES (20)..(21)..(22)..(23): Xaa is A or G or is absent

SEQ ID NO: 23500 - protein, 41 aa, Artificial Sequence
  GFR-binding peptide
  MOD_RES (1)..(3)..(36)..(37): Xaa is C or S
  MOD_RES (14)..(15)..(16)..(17)..(18): Xaa is A or G
  MOD_RES (19)..(20)..(21)..(22): Xaa is A or G or is absent
XKXSKVIMEYKFKXXXXXXXXXLYLISIPELDQSVXXPSAS

SEQ ID NO: 23501 - protein, 32 aa, Artificial Sequence
  GFR-binding peptide
  MOD_RES (11)..(12)..(13)..(14)..(15): Xaa is A or G
  MOD_RES (16)..(17)..(18)..(19): Xaa is A or G or is absent
SRVIMEYQKYXXXXXXXXXIYLISIPSLAQPV

SEQ ID NO: 23502 - protein, 39 aa, Artificial Sequence
  GFR-binding peptide
  MOD_RES (2)..(36)..(37): Xaa is C or S
  MOD_RES (14)..(15)..(16)..(17)..(18): Xaa is A or G
  MOD_RES (19)..(20)..(21)..(22): Xaa is A or G or is absent
GXARVVMNEYQKYXXXXXXXXXIYLVSIPSLQTPAXXPK

SEQ ID NO: 23503 - protein, 34 aa, Artificial Sequence; identical to SEQ ID NO: 2521
  GFR-binding peptide
  MOD_RES (34)..(34): Xaa is C or S
  MOD_RES (12)..(13)..(14)..(15)..(16): Xaa is A or G
  MOD_RES (17)..(18)..(19)..(20): Xaa is A or G or is absent

SEQ ID NO: 23504 - protein, 40 aa, Artificial Sequence
  GFR-binding peptide
  MOD_RES (34)..(35): Xaa is C or S
  MOD_RES (12)..(13)..(14)..(15)..(16): Xaa is A or G
  MOD_RES (17)..(18)..(19)..(20): Xaa is A or G or is absent
ESVAMGEYKFKXXXXXXXXXLYLISIPELKTPVXXAKSAK

SEQ ID NO: 23505 - protein, 40 aa, Artificial Sequence
  GFR-binding peptide
  MOD_RES (1)..(35): Xaa is C or S
  MOD_RES (13)..(14)..(15)..(16)..(17): Xaa is A or G
  MOD_RES (18)..(19)..(20)..(21): Xaa is A or G or is absent
XSRVVMNEYQKYXXXXXXXXXIYLVSIPSLKTPAXTPKTV

SEQ ID NO: 23506 - protein, 36 aa, Artificial Sequence
  GFR-binding peptide
  MOD_RES (34)..(34): Xaa is C or S
  MOD_RES (12)..(13)..(14)..(15)..(16): Xaa is A or G
  MOD_RES (17)..(18)..(19)..(20): Xaa is A or G or is absent
SRVVMNEYQKYXXXXXXXXXIYLVSIPSLKTPAXTP

SEQ ID NO: 23507 - protein, 33 aa, Artificial Sequence
  GFR-binding peptide
  MOD_RES (1)..(1): Xaa is C or S
  MOD_RES (12)..(13)..(14)..(15)..(16): Xaa is A or G
  MOD_RES (17)..(18)..(19)..(20): Xaa is A or G or is absent
XSRVIMEYKFKXXXXXXXXXLYLISIPELAQPV

SEQ ID NO: 23508 - protein, 38 aa, Artificial Sequence
  GFR-binding peptide
  MOD_RES (1)..(3)..(35)..(36): Xaa is C or S
XGXAEVVMDYHYKLVVNNAADKYLISIPSLRAPVXXSA

SEQ ID NO: 23509 - protein, 40 aa, Artificial Sequence
  GFR-binding peptide
  MOD_RES (2)..(4)..(38)..(39): Xaa is C or S
  MOD_RES (16)..(17)..(18)..(19)..(20): Xaa is A or G
  MOD_RES (21)..(22)..(23)..(24): Xaa is A or G or is absent
HXGXSRVVMNEYQKYXXXXXXXXXIYLVSIPSLKTPAXXP

SEQ ID NO: 23510 - protein, 37 aa, Artificial Sequence
  GFR-binding peptide
  MOD_RES (2)..(4)..(36)..(37): Xaa is C or S
RXGXAEVVMDEYKFKVVNNAADLYLISIPELRAPVXX

SEQ ID NO: 23511 - protein, 36 aa, Artificial Sequence; identical to SEQ ID NO: 2529
  GFR-binding peptide
  MOD_RES (1)..(33)..(34): Xaa is C or S

SEQ ID NO: 23512 - protein, 40 aa, Artificial Sequence
  GFR-binding peptide
  MOD_RES (34)..(35): Xaa is C or S
  MOD_RES (12)..(13)..(14)..(15)..(16): Xaa is A or G
  MOD_RES (17)..(18)..(19)..(20): Xaa is A or G or is absent
AEVVMDEYQKYXXXXXXXXXIYLISIPSLRAPVXXSAPAA

SEQ ID NO: 23513 - protein, 41 aa, Artificial Sequence
  GFR-binding peptide
  MOD_RES (1)..(35)..(36): Xaa is C or S
  MOD_RES (13)..(14)..(15)..(16)..(17): Xaa is A or G
  MOD_RES (18)..(19)..(20)..(21): Xaa is A or G or is absent
XGEVVMDEYKFKXXXXXXXXXLYLMSIPELETPVXXAKPIK

SEQ ID NO: 23514 - protein, 36 aa, Artificial Sequence; identical to SEQ ID NO: 2532
  GFR-binding peptide
  MOD_RES (34)..(35): Xaa is C or S
  MOD_RES (12)..(13)..(14)..(15)..(16): Xaa is A or G
  MOD_RES (17)..(18)..(19)..(20): Xaa is A or G or is absent

SEQ ID NO: 23515 - protein, 35 aa, Artificial Sequence
  GFR-binding peptide
  MOD_RES (1)..(3)..(34)..(35): Xaa is C or S
XKXSKVIMEYKFKIKPTKGILYLISIPELDQSVXX

SEQ ID NO: 23516 - protein, 38 aa, Artificial Sequence
  GFR-binding peptide
  MOD_RES (1)..(3)..(35)..(36): Xaa is C or S
XGXSRVVMNEYKFKIVNSSDDLYLVSIPELKTPAXXPK

SEQ ID NO: 23517 - protein, 36 aa, Artificial Sequence
  GFR-binding peptide
  MOD_RES (2)..(35)..(36): Xaa is C or S
  MOD_RES (13)..(14)..(15)..(16)..(17): Xaa is A or G
  MOD_RES (18)..(19)..(20)..(21): Xaa is A or G or is absent
KXSRVIMEYQKYXXXXXXXXXIYLISIPSLAQPVXX

SEQ ID NO: 23518 - protein, 43 aa, Artificial Sequence
  GFR-binding peptide
  MOD_RES (2)..(4)..(37)..(38): Xaa is C or S
  MOD_RES (15)..(16)..(17)..(18)..(19): Xaa is A or G
  MOD_RES (20)..(21)..(22)..(23): Xaa is A or G or is absent
SXKXSRVIMEYKFKXXXXXXXXXLYLISIPELAQPVXXPAASA

SEQ ID NO: 23519 - protein, 33 aa, Artificial Sequence; identical to SEQ ID NO: 2537
  GFR-binding peptide
  MOD_RES (2)..(2): Xaa is C or S

SEQ ID NO: 23520 - protein, 41 aa, Artificial Sequence
  GFR-binding peptide
  MOD_RES (2)..(36)..(37): Xaa is C or S
  MOD_RES (14)..(15)..(16)..(17)..(18): Xaa is A or G
  MOD_RES (19)..(20)..(21)..(22): Xaa is A or G or is absent
GXAEVVMDEYKFKXXXXXXXXXLYLISIPELRAPVXXSAPA

SEQ ID NO: 23521 - protein, 36 aa, Artificial Sequence
  GFR-binding peptide
  MOD_RES (33)..(34): Xaa is C or S
  MOD_RES (11)..(12)..(13)..(14)..(15): Xaa is A or G
  MOD_RES (16)..(17)..(18)..(19): Xaa is A or G or is absent
RVVMNEYQKYXXXXXXXXXIYLVSIPSLKTPAXXPK

SEQ ID NO: 23522 - protein, 36 aa, Artificial Sequence; identical to SEQ ID NO: 2538
  GFR-binding peptide
  MOD_RES (1)..(3)..(35)..(36): Xaa is C or S

SEQ ID NO: 23523 - protein, 35 aa, Artificial Sequence
  GFR-binding peptide
  MOD_RES (1)..(3): Xaa is C or S
  MOD_RES (14)..(15)..(16)..(17)..(18): Xaa is A or G
  MOD_RES (19)..(20)..(21)..(22): Xaa is A or G or is absent
XKXSKVIMEYQKYXXXXXXXXXIYLISIPSLDQSV

SEQ ID NO: 23524 - protein, 41 aa, Artificial Sequence
  GFR-binding peptide
  MOD_RES (2)..(4)..(36)..(37): Xaa is C or S
RXGXAEVVMDEYQKYVVNNAADIYLISIPSLRAPVXXSAPA

SEQ ID NO: 23525 - protein, 36 aa, Artificial Sequence
  GFR-binding peptide
  MOD_RES (1)..(32)..(33): Xaa is C or S
XSKVVMEYKFKVKPTRGVLYLISIPELDQPVXXPSA

SEQ ID NO: 23526 - protein, 37 aa, Artificial Sequence; identical to SEQ ID NO: 2539
  GFR-binding peptide
  MOD_RES (2)..(33)..(34): Xaa is C or S

SEQ ID NO: 23527 - protein, 41 aa, Artificial Sequence; identical to SEQ ID NO: 2543
  GFR-binding peptide
  MOD_RES (1)..(3)..(37)..(38): Xaa is C or S
  MOD_RES (15)..(16)..(17)..(18)..(19): Xaa is A or G
  MOD_RES (20)..(21)..(22)..(23): Xaa is A or G or is absent

SEQ ID NO: 23528 - protein, 41 aa, Artificial Sequence; identical to SEQ ID NO: 2544
  GFR-binding peptide
  MOD_RES (2)..(4)..(36)..(37): Xaa is C or S

SEQ ID NO: 23529 - protein, 35 aa, Artificial Sequence
  GFR-binding peptide
  MOD_RES (31)..(32): Xaa is C or S
KVVMNEYKFKIVNNSSDLYLVSIPELKTPAXXAKP

SEQ ID NO: 23530 - protein, 39 aa, Artificial Sequence
  GFR-binding peptide
  MOD_RES (1)..(33)..(34): Xaa is C or S
XAEVVMDEYQKYVVNNAADIYLISIPSLRAPVXXSAPAA

SEQ ID NO: 23531 - protein, 40 aa, Artificial Sequence
  GFR-binding peptide
  MOD_RES (2)..(4)..(38)..(39): Xaa is C or S
  MOD_RES (16)..(17)..(18)..(19)..(20): Xaa is A or G
  MOD_RES (21)..(22)..(23)..(24): Xaa is A or G or is absent
HXGXARVVMNEYKFKXXXXXXXXXLYLVSIPELQTPAXXP

SEQ ID NO: 23532 - protein, 36 aa, Artificial Sequence
  GFR-binding peptide
  MOD_RES (2)..(4)..(36): Xaa is C or S
RXGXAEVVMDYHYKLVVNNAADKYLISIPSLRAPVX

SEQ ID NO: 23533 - protein, 36 aa, Artificial Sequence
  GFR-binding peptide
  MOD_RES (31)..(32): Xaa is C or S
SRVIMEYQKYVKPKRGVIYLISIPSLAQPVXXPAAS

SEQ ID NO: 23534 - protein, 40 aa, Artificial Sequence
  GFR-binding peptide
  MOD_RES (1)..(3)..(35)..(36): Xaa is C or S
XGXGEVVMEEYQKYVVKDYEDIYLMSIPSLETPVXXAKPI

SEQ ID NO: 23535 - protein, 42 aa, Artificial Sequence
  GFR-binding peptide
  MOD_RES (2)..(36): Xaa is C or S
  MOD_RES (14)..(15)..(16)..(17)..(18): Xaa is A or G
  MOD_RES (19)..(20)..(21)..(22): Xaa is A or G or is absent
GXSRVVMNEYQKYXXXXXXXXXIYLVSIPSLKTPAXTPKTVH

SEQ ID NO: 23536 - protein, 41 aa, Artificial Sequence; identical to SEQ ID NO: 2551
  GFR-binding peptide
  MOD_RES (2)..(4)..(38)..(39): Xaa is C or S
  MOD_RES (16)..(17)..(18)..(19)..(20): Xaa is A or G
  MOD_RES (21)..(22)..(23)..(24): Xaa is A or G or is absent

SEQ ID NO: 23537 - protein, 35 aa, Artificial Sequence; identical to SEQ ID NO: 2552
  GFR-binding peptide
  MOD_RES (2)..(34)..(35): Xaa is C or S

SEQ ID NO: 23538 - protein, 40 aa, Artificial Sequence
  GFR-binding peptide
  MOD_RES (1)..(35): Xaa is C or S
  MOD_RES (13)..(14)..(15)..(16)..(17): Xaa is A or G
  MOD_RES (18)..(19)..(20)..(21): Xaa is A or G or is absent
XSRVVMNEYKFKXXXXXXXXXLYLVSIPELKTPAXTPKTV

SEQ ID NO: 23539 - protein, 37 aa, Artificial Sequence; identical to SEQ ID NO: 2553
  GFR-binding peptide
  MOD_RES (2)..(4)..(37): Xaa is C or S

SEQ ID NO: 23540 - protein, 36 aa, Artificial Sequence; identical to SEQ ID NO: 2554
  GFR-binding peptide
  MOD_RES (32)..(33): Xaa is C or S

SEQ ID NO: 23541 - protein, 33 aa, Artificial Sequence; identical to SEQ ID NO: 2555
  GFR-binding peptide
  MOD_RES (31)..(32): Xaa is C or S

SEQ ID NO: 23542 - protein, 43 aa, Artificial Sequence
  GFR-binding peptide
  MOD_RES (1)..(3)..(38)..(39): Xaa is C or S
  MOD_RES (16)..(17)..(18)..(19)..(20): Xaa is A or G
  MOD_RES (21)..(22)..(23)..(24): Xaa is A or G or is absent
XGXEAVSMGEEYKFKXXXXXXXXXLYLVSIPELKTPVXXAKGV

SEQ ID NO: 23543 - protein, 36 aa, Artificial Sequence
  GFR-binding peptide
  MOD_RES (2)..(4): Xaa is C or S
  MOD_RES (15)..(16)..(17)..(18)..(19): Xaa is A or G
  MOD_RES (20)..(21)..(22)..(23): Xaa is A or G or is absent
SXKXSKVIMEYKFKXXXXXXXXXLYLISIPELDQSV

SEQ ID NO: 23544 - protein, 37 aa, Artificial Sequence
  GFR-binding peptide
  MOD_RES (1)..(3)..(35): Xaa is C or S
XGXSRVVMNEYQKYIVNSSDDIYLVSIPSLKTPAXTP

SEQ ID NO: 23545 - protein, 35 aa, Artificial Sequence; identical to SEQ ID NO: 2556
  GFR-binding peptide
  MOD_RES (1)..(3): Xaa is C or S
  MOD_RES (14)..(15)..(16)..(17)..(18): Xaa is A or G
  MOD_RES (19)..(20)..(21)..(22): Xaa is A or G or is absent

SEQ ID NO: 23546 - protein, 34 aa, Artificial Sequence; identical to SEQ ID NO: 2558
  GFR-binding peptide
  MOD_RES (2)..(4): Xaa is C or S

SEQ ID NO: 23547 - protein, 37 aa, Artificial Sequence
  GFR-binding peptide
  MOD_RES (2)..(4)..(36)..(37): Xaa is C or S
RXGXAEVVMDEYQKYVVNNAADIYLISIPSLRAPVXX

SEQ ID NO: 23548 - protein, 37 aa, Artificial Sequence
  GFR-binding peptide
  MOD_RES (2)..(34): Xaa is C or S
GXSRVVMNEYKFKIVNSSDDLYLVSIPELKTPAXTPK

SEQ ID NO: 23549 - protein, 34 aa, Artificial Sequence
  GFR-binding peptide
  MOD_RES (33)..(34): Xaa is C or S
  MOD_RES (11)..(12)..(13)..(14)..(15): Xaa is A or G
  MOD_RES (16)..(17)..(18)..(19): Xaa is A or G or is absent
EVVMEEYQKYXXXXXXXXXIYLMSIPSLETPVXX

SEQ ID NO: 23550 - protein, 38 aa, Artificial Sequence; identical to SEQ ID NO: 2561
  GFR-binding peptide
  MOD_RES (1)..(3)..(35)..(36): Xaa is C or S

SEQ ID NO: 23551 - protein, 37 aa, Artificial Sequence
  GFR-binding peptide
  MOD_RES (1)..(33)..(34): Xaa is C or S
XESVAMGEYKFKYTVVGKDLYLISIPELKTPVXXAKS

SEQ ID NO: 23552 - protein, 36 aa, Artificial Sequence
  GFR-binding peptide
  MOD_RES (2)..(4)..(36): Xaa is C or S
RXGXGEVVMDEYQKYVVKENEDIYLMSIPSLETPVX

SEQ ID NO: 23553 - protein, 40 aa, Artificial Sequence; identical to SEQ ID NO: 2563
  GFR-binding peptide
  MOD_RES (1)..(3)..(35)..(36): Xaa is C or S

SEQ ID NO: 23554 - protein, 36 aa, Artificial Sequence
  GFR-binding peptide
  MOD_RES (34)..(35): Xaa is C or S
  MOD_RES (12)..(13)..(14)..(15)..(16): Xaa is A or G
  MOD_RES (17)..(18)..(19)..(20): Xaa is A or G or is absent
ARVVMNEYKFKXXXXXXXXXLYLVSIPELQTPAXXP

SEQ ID NO: 23555 - protein, 38 aa, Artificial Sequence; identical to SEQ ID NO: 2564
  GFR-binding peptide
  MOD_RES (1)..(34)..(35): Xaa is C or S

SEQ ID NO: 23556 - protein, 39 aa, Artificial Sequence
  GFR-binding peptide
  MOD_RES (2)..(4)..(36)..(37): Xaa is C or S
RXGXESVAMGEYQKYYTVVGKDIYLISIPSLKTPVXXAK

SEQ ID NO: 23557 - protein, 40 aa, Artificial Sequence; identical to SEQ ID NO: 2565
  GFR-binding peptide
  MOD_RES (1)..(3)..(35)..(36): Xaa is C or S

SEQ ID NO: 23558 - protein, 35 aa, Artificial Sequence
  GFR-binding peptide
  MOD_RES (1)..(33)..(34): Xaa is C or S
XSRVVMNEYQKYIVNSSDDIYLVSIPSLKTPAXXP

SEQ ID NO: 23559 - protein, 36 aa, Artificial Sequence; identical to SEQ ID NO: 2566
  GFR-binding peptide
  MOD_RES (1)..(3)..(36): Xaa is C or S
  MOD_RES (14)..(15)..(16)..(17)..(18): Xaa is A or G
  MOD_RES (19)..(20)..(21)..(22): Xaa is A or G or is absent

SEQ ID NO: 23560 - protein, 40 aa, Artificial Sequence
  GFR-binding peptide
  MOD_RES (2)..(4)..(38)..(39): Xaa is C or S
  MOD_RES (16)..(17)..(18)..(19)..(20): Xaa is A or G
  MOD_RES (21)..(22)..(23)..(24): Xaa is A or G or is absent
RXGXESVAMGYHYKLXXXXXXXXXKYLISIPSLKTPVXXA

SEQ ID NO: 23561 - protein, 34 aa, Artificial Sequence; identical to SEQ ID NO: 2567
  GFR-binding peptide
  MOD_RES (32)..(33): Xaa is C or S

SEQ ID NO: 23562 - protein, 39 aa, Artificial Sequence
  GFR-binding peptide
  MOD_RES (2)..(4)..(38)..(39): Xaa is C or S
  MOD_RES (16)..(17)..(18)..(19)..(20): Xaa is A or G
  MOD_RES (21)..(22)..(23)..(24): Xaa is A or G or is absent
HXGXSRVVMNEYQKYXXXXXXXXXIYLVSIPSLKTPAXX

SEQ ID NO: 23563 - protein, 35 aa, Artificial Sequence; identical to SEQ ID NO: 2569
  GFR-binding peptide
  MOD_RES (1)..(33)..(34): Xaa is C or S

SEQ ID NO: 23564 - protein, 39 aa, Artificial Sequence
  GFR-binding peptide
  MOD_RES (2)..(4)..(36)..(37): Xaa is C or S
RXGXAEVVMDYHYKLVVNNAADKYLISIPSLRAPVXXSA

SEQ ID NO: 23565 - protein, 37 aa, Artificial Sequence
  GFR-binding peptide
  MOD_RES (1)..(3)..(37): Xaa is C or S
  MOD_RES (15)..(16)..(17)..(18)..(19): Xaa is A or G
  MOD_RES (20)..(21)..(22)..(23): Xaa is A or G or is absent
XGXAEVVMDRYKKLXXXXXXXXXFYLISIANLRAPVX

SEQ ID NO: 23566 - protein, 41 aa, Artificial Sequence
  GFR-binding peptide
  MOD_RES (1)..(35)..(36): Xaa is C or S
  MOD_RES (13)..(14)..(15)..(16)..(17): Xaa is A or G
  MOD_RES (18)..(19)..(20)..(21): Xaa is A or G or is absent
XGEVVMEEYQKYXXXXXXXXXIYLMSIPSLETPVXXAKPIS

SEQ ID NO: 23567 - protein, 37 aa, Artificial Sequence
  GFR-binding peptide
  MOD_RES (1)..(35): Xaa is C or S
  MOD_RES (13)..(14)..(15)..(16)..(17): Xaa is A or G
  MOD_RES (18)..(19)..(20)..(21): Xaa is A or G or is absent
XSRVVMNEYQKYXXXXXXXXXIYLVSIPSLKTPAXTP

SEQ ID NO: 23568 - protein, 34 aa, Artificial Sequence
  GFR-binding peptide
  MOD_RES (31)..(32): Xaa is C or S
EVVMDEYQKYVVNNAADIYLISIPSLRAPVXXSA

SEQ ID NO: 23569 - protein, 36 aa, Artificial Sequence
  GFR-binding peptide
  MOD_RES (2)..(4)..(36): Xaa is C or S
RXGXESVAMGEYQKYYTVVGKDIYLISIPSLKTPVX

SEQ ID NO: 23570 - protein, 40 aa, Artificial Sequence
  GFR-binding peptide
  MOD_RES (1)..(34)..(35): Xaa is C or S
  MOD_RES (12)..(13)..(14)..(15)..(16): Xaa is A or G
  MOD_RES (17)..(18)..(19)..(20): Xaa is A or G or is absent
XSKVVMEYKFKXXXXXXXXXLYLISIPELDQPVXXPSASA

SEQ ID NO: 23571 - protein, 32 aa, Artificial Sequence
  GFR-binding peptide
  MOD_RES (11)..(12)..(13)..(14)..(15): Xaa is A or G
  MOD_RES (16)..(17)..(18)..(19): Xaa is A or G or is absent
RVVMNEYKFKXXXXXXXXXLYLVSIPELQTPA

SEQ ID NO: 23572 - protein, 39 aa, Artificial Sequence; identical to SEQ ID NO: 2576
  GFR-binding peptide
  MOD_RES (1)..(35)..(36): Xaa is C or S
  MOD_RES (13)..(14)..(15)..(16)..(17): Xaa is A or G
  MOD_RES (18)..(19)..(20)..(21): Xaa is A or G or is absent

SEQ ID NO: 23573 - protein, 36 aa, Artificial Sequence
  GFR-binding peptide
  MOD_RES (33)..(34): Xaa is C or S
  MOD_RES (11)..(12)..(13)..(14)..(15): Xaa is A or G
  MOD_RES (16)..(17)..(18)..(19): Xaa is A or G or is absent
EVVMDEYQKYXXXXXXXXXIYLISIPSLRAPVXXSA

SEQ ID NO: 23574 - protein, 37 aa, Artificial Sequence
  GFR-binding peptide
  MOD_RES (34)..(35): Xaa is C or S
  MOD_RES (12)..(13)..(14)..(15)..(16): Xaa is A or G
  MOD_RES (17)..(18)..(19)..(20): Xaa is A or G or is absent
AEVVMDRYKKLXXXXXXXXXFYLISIANLRAPVXXSA

SEQ ID NO: 23575 - protein, 42 aa, Artificial Sequence; identical to SEQ ID NO: 2578
  GFR-binding peptide
  MOD_RES (2)..(4)..(38)..(39): Xaa is C or S
  MOD_RES (16)..(17)..(18)..(19)..(20): Xaa is A or G
  MOD_RES (21)..(22)..(23)..(24): Xaa is A or G or is absent

SEQ ID NO: 23576 - protein, 38 aa, Artificial Sequence; identical to SEQ ID NO: 2579
  GFR-binding peptide
  MOD_RES (1)..(3)..(36)..(37): Xaa is C or S
  MOD_RES (14)..(15)..(16)..(17)..(18): Xaa is A or G
  MOD_RES (19)..(20)..(21)..(22): Xaa is A or G or is absent

SEQ ID NO: 23577 - protein, 42 aa, Artificial Sequence; identical to SEQ ID NO: 2581
  GFR-binding peptide
  MOD_RES (1)..(3)..(37)..(38): Xaa is C or S
  MOD_RES (15)..(16)..(17)..(18)..(19): Xaa is A or G
  MOD_RES (20)..(21)..(22)..(23): Xaa is A or G or is absent

SEQ ID NO: 23578 - protein, 35 aa, Artificial Sequence
  GFR-binding peptide
  MOD_RES (1)..(35): Xaa is C or S
  MOD_RES (13)..(14)..(15)..(16)..(17): Xaa is A or G
  MOD_RES (18)..(19)..(20)..(21): Xaa is A or G or is absent
XAEVVMDRYKKLXXXXXXXXXFYLISIANLRAPVX

SEQ ID NO: 23579 - protein, 36 aa, Artificial Sequence; identical to SEQ ID NO: 2582
  GFR-binding peptide
  MOD_RES (1)..(3): Xaa is C or S
  MOD_RES (15)..(16)..(17)..(18)..(19): Xaa is A or G
  MOD_RES (20)..(21)..(22)..(23): Xaa is A or G or is absent

SEQ ID NO: 23580 - protein, 39 aa, Artificial Sequence
  GFR-binding peptide
  MOD_RES (1)..(3)..(37)..(38): Xaa is C or S
  MOD_RES (15)..(16)..(17)..(18)..(19): Xaa is A or G
  MOD_RES (20)..(21)..(22)..(23): Xaa is A or G or is absent
XGXAEVVMDRYKKLXXXXXXXXXFYLISIANLRAPVXXS

SEQ ID NO: 23581 - protein, 42 aa, Artificial Sequence
  GFR-binding peptide
  MOD_RES (2)..(36)..(37): Xaa is C or S
  MOD_RES (14)..(15)..(16)..(17)..(18): Xaa is A or G
  MOD_RES (19)..(20)..(21)..(22): Xaa is A or G or is absent
GXAEVVMDEYKFKXXXXXXXXXLYLISIPELRAPVXXSAPAA

SEQ ID NO: 23582 - protein, 39 aa, Artificial Sequence
  GFR-binding peptide
  MOD_RES (2)..(36)..(37): Xaa is C or S
  MOD_RES (14)..(15)..(16)..(17)..(18): Xaa is A or G
  MOD_RES (19)..(20)..(21)..(22): Xaa is A or G or is absent
GXAKVVMNEYQKYXXXXXXXXXIYLVSIPSLKTPAXXAK

SEQ ID NO: 23583 - protein, 38 aa, Artificial Sequence
  GFR-binding peptide
  MOD_RES (1)..(3)..(34)..(35): Xaa is C or S
XKXSRVIMEYQKYVKPKRGVIYLISIPSLAQPVXXPAA

SEQ ID NO: 23584 - protein, 37 aa, Artificial Sequence
  GFR-binding peptide
  MOD_RES (1)..(35)..(36): Xaa is C or S
  MOD_RES (13)..(14)..(15)..(16)..(17): Xaa is A or G
  MOD_RES (18)..(19)..(20)..(21): Xaa is A or G or is absent
XGEVVMEEYKFKXXXXXXXXXLYLMSIPELETPVXXA

SEQ ID NO: 23585 - protein, 38 aa, Artificial Sequence; identical to SEQ ID NO: 2587
  GFR-binding peptide
  MOD_RES (2)..(4)..(35)..(36): Xaa is C or S

SEQ ID NO: 23586 - protein, 42 aa, Artificial Sequence
  GFR-binding peptide
  MOD_RES (2)..(36)..(37): Xaa is C or S
  MOD_RES (14)..(15)..(16)..(17)..(18): Xaa is A or G
  MOD_RES (19)..(20)..(21)..(22): Xaa is A or G or is absent
GXAEVVMDYHYKLXXXXXXXXXKYLISIPSLRAPVXXSAPAA

SEQ ID NO: 23587 - protein, 41 aa, Artificial Sequence
  GFR-binding peptide
  MOD_RES (2)..(4)..(36)..(37): Xaa is C or S
RXGXAEVVMDYHYKLVVNNAADKYLISIPSLRAPVXXSAPA

SEQ ID NO: 23588 - protein, 41 aa, Artificial Sequence
  GFR-binding peptide
  MOD_RES (2)..(4)..(38)..(39): Xaa is C or S
  MOD_RES (16)..(17)..(18)..(19)..(20): Xaa is A or G
  MOD_RES (21)..(22)..(23)..(24): Xaa is A or G or is absent
RXGXGEVVMEEYKFKXXXXXXXXXLYLMSIPELETPVXXAK

SEQ ID NO: 23589 - protein, 38 aa, Artificial Sequence
  GFR-binding peptide
  MOD_RES (2)..(34)..(35): Xaa is C or S
GXESVAMGYHYKLYTVVGKDKYLISIPSLKTPVXXAKS

SEQ ID NO: 23590 - protein, 38 aa, Artificial Sequence
  GFR-binding peptide
  MOD_RES (32)..(33): Xaa is C or S
ESVAMGYHYKLYTVVGKDKYLISIPSLKTPVXXAKSAK

SEQ ID NO: 23591 - protein, 36 aa, Artificial Sequence
  GFR-binding peptide
  MOD_RES (2)..(36): Xaa is C or S
  MOD_RES (14)..(15)..(16)..(17)..(18): Xaa is A or G
  MOD_RES (19)..(20)..(21)..(22): Xaa is A or G or is absent
GXGEVVMDEYQKYXXXXXXXXXIYLMSIPSLETPVX

SEQ ID NO: 23592 - protein, 37 aa, Artificial Sequence
  GFR-binding peptide
  MOD_RES (2)..(4)..(36)..(37): Xaa is C or S
RXGXGEVVMDEYQKYVVKENEDIYLMSIPSLETPVXX

SEQ ID NO: 23593 - protein, 41 aa, Artificial Sequence
  GFR-binding peptide
  MOD_RES (2)..(4)..(36)..(37): Xaa is C or S
RXGXESVAMGEYKFKYTVVGKDLYLISIPELKTPVXXAKSA

SEQ ID NO: 23594 - protein, 43 aa, Artificial Sequence; identical to SEQ ID NO: 2591
  GFR-binding peptide
  MOD_RES (2)..(4)..(39)..(40): Xaa is C or S
  MOD_RES (17)..(18)..(19)..(20)..(21): Xaa is A or G
  MOD_RES (22)..(23)..(24)..(25): Xaa is A or G or is absent

SEQ ID NO: 23595 - protein, 37 aa, Artificial Sequence
  GFR-binding peptide
  MOD_RES (2)..(4)..(35)..(36): Xaa is C or S
SXKXSKVIMEYQKYIKPTKGIIYLISIPSLDQSVXXP

SEQ ID NO: 23596 - protein, 35 aa, Artificial Sequence
  GFR-binding peptide
  MOD_RES (1)..(34)..(35): Xaa is C or S
  MOD_RES (12)..(13)..(14)..(15)..(16): Xaa is A or G
  MOD_RES (17)..(18)..(19)..(20): Xaa is A or G or is absent
XSKVVMEYKFKXXXXXXXXXLYLISIPELDQPVXX

SEQ ID NO: 23597 - protein, 38 aa, Artificial Sequence
  GFR-binding peptide
  MOD_RES (1)..(35)..(36): Xaa is C or S
  MOD_RES (13)..(14)..(15)..(16)..(17): Xaa is A or G
  MOD_RES (18)..(19)..(20)..(21): Xaa is A or G or is absent
XGEVVMDEYQKYXXXXXXXXXIYLMSIPSLETPVXXAK

SEQ ID NO: 23598 - protein, 35 aa, Artificial Sequence
  GFR-binding peptide
  MOD_RES (32)..(33): Xaa is C or S
AEVVMDEYKFKVVNNAADLYLISIPELRAPVXXSA

SEQ ID NO: 23599 - protein, 37 aa, Artificial Sequence
  GFR-binding peptide
  MOD_RES (33)..(34): Xaa is C or S
  MOD_RES (11)..(12)..(13)..(14)..(15): Xaa is A or G
  MOD_RES (16)..(17)..(18)..(19): Xaa is A or G or is absent
SKVIMEYKFKXXXXXXXXXLYLISIPELDQSVXXPSA

SEQ ID NO: 23600 - protein, 39 aa, Artificial Sequence
  GFR-binding peptide
  MOD_RES (34)..(35): Xaa is C or S
  MOD_RES (12)..(13)..(14)..(15)..(16): Xaa is A or G
  MOD_RES (17)..(18)..(19)..(20): Xaa is A or G or is absent
ESVAMGYHYKLXXXXXXXXXKYLISIPSLKTPVXXAKSA

SEQ ID NO: 23601 - protein, 39 aa, Artificial Sequence
  GFR-binding peptide
  MOD_RES (2)..(34)..(35): Xaa is C or S
GXSRVVMNEYQKYIVNSSDDIYLVSIPSLKTPAXXPKPV

SEQ ID NO: 23602 - protein, 35 aa, Artificial Sequence
  GFR-binding peptide
  MOD_RES (33)..(34): Xaa is C or S
  MOD_RES (11)..(12)..(13)..(14)..(15): Xaa is A or G
  MOD_RES (16)..(17)..(18)..(19): Xaa is A or G or is absent
RVVMNEYQKYXXXXXXXXXIYLVSIPSLKTPAXXP

SEQ ID NO: 23603 - protein, 36 aa, Artificial Sequence
  GFR-binding peptide
  MOD_RES (2)..(34)..(35): Xaa is C or S
GXESVAMGYHYKLYTVVGKDKYLISIPSLKTPVXXA

SEQ ID NO: 23604 - protein, 37 aa, Artificial Sequence
  GFR-binding peptide
  MOD_RES (2)..(4)..(35)..(36): Xaa is C or S
SXKXSKVIMEYKFKIKPTKGILYLISIPELDQSVXXP

SEQ ID NO: 23605 - protein, 35 aa, Artificial Sequence; identical to SEQ ID NO: 2601
  GFR-binding peptide
  MOD_RES (1)..(3): Xaa is C or S

SEQ ID NO: 23606 - protein, 36 aa, Artificial Sequence
  GFR-binding peptide
  MOD_RES (32)..(32): Xaa is C or S
SRVVMNEYQKYIVNSSDDIYLVSIPSLKTPAXTPKT

SEQ ID NO: 23607 - protein, 41 aa, Artificial Sequence
  GFR-binding peptide
  MOD_RES (2)..(4)..(36)..(37): Xaa is C or S
RXGXAEVVMDEYKFKVVNNAADLYLISIPELRAPVXXSAPA

SEQ ID NO: 23608 - protein, 38 aa, Artificial Sequence
  GFR-binding peptide
  MOD_RES (1)..(3)..(36)..(37): Xaa is C or S
XGXEAVSMGEEYKFKTPVGMDDLYLVSIPELKTPVXXA

SEQ ID NO: 23609 - protein, 36 aa, Artificial Sequence
  GFR-binding peptide
  MOD_RES (2)..(35)..(36): Xaa is C or S
  MOD_RES (13)..(14)..(15)..(16)..(17): Xaa is A or G
  MOD_RES (18)..(19)..(20)..(21): Xaa is A or G or is absent
KXSRVIMEYKFKXXXXXXXXXLYLISIPELAQPVXX

SEQ ID NO: 23610 - protein, 40 aa, Artificial Sequence
  GFR-binding peptide
  MOD_RES (2)..(4)..(36)..(37): Xaa is C or S
RXGXAEVVMDYHYKLVVNNAADKYLISIPSLRAPVXXSAP

SEQ ID NO: 23611 - protein, 34 aa, Artificial Sequence
  GFR-binding peptide
  MOD_RES (32)..(33): Xaa is C or S
ARVVMNEYQKYIVNSSDDIYLVSIPSLQTPAXXP

SEQ ID NO: 23612 - protein, 33 aa, Artificial Sequence
  GFR-binding peptide
  MOD_RES (33)..(33): Xaa is C or S
  MOD_RES (11)..(12)..(13)..(14)..(15): Xaa is A or G
  MOD_RES (16)..(17)..(18)..(19): Xaa is A or G or is absent
EVVMDRYKKLXXXXXXXXXFYLISIANLRAPVX

SEQ ID NO: 23613 - protein, 43 aa, Artificial Sequence; identical to SEQ ID NO: 2607
  GFR-binding peptide
  MOD_RES (1)..(3)..(37)..(38): Xaa is C or S
  MOD_RES (15)..(16)..(17)..(18)..(19): Xaa is A or G
  MOD_RES (20)..(21)..(22)..(23): Xaa is A or G or is absent

SEQ ID NO: 23614 - protein, 41 aa, Artificial Sequence
  GFR-binding peptide
  MOD_RES (2)..(36)..(37): Xaa is C or S
  MOD_RES (14)..(15)..(16)..(17)..(18): Xaa is A or G
  MOD_RES (19)..(20)..(21)..(22): Xaa is A or G or is absent
GXGEVVMDEYQKYXXXXXXXXXIYLMSIPSLETPVXXAKPI

SEQ ID NO: 23615 - protein, 38 aa, Artificial Sequence
  GFR-binding peptide
  MOD_RES (2)..(36)..(37): Xaa is C or S
  MOD_RES (14)..(15)..(16)..(17)..(18): Xaa is A or G
  MOD_RES (19)..(20)..(21)..(22): Xaa is A or G or is absent
GXESVAMGEYKFKXXXXXXXXXLYLISIPELKTPVXXA

SEQ ID NO: 23616 - protein, 36 aa, Artificial Sequence; identical to SEQ ID NO: 2609
  GFR-binding peptide
  MOD_RES (2)..(34): Xaa is C or S

SEQ ID NO: 23617 - protein, 32 aa, Artificial Sequence; identical to SEQ ID NO: 2610
  GFR-binding peptide
  MOD_RES (11)..(12)..(13)..(14)..(15): Xaa is A or G
  MOD_RES (16)..(17)..(18)..(19): Xaa is A or G or is absent

SEQ ID NO: 23618 - protein, 33 aa, Artificial Sequence; identical to SEQ ID NO: 2612
  GFR-binding peptide
  MOD_RES (1)..(1): Xaa is C or S
  MOD_RES (12)..(13)..(14)..(15)..(16): Xaa is A or G
  MOD_RES (17)..(18)..(19)..(20): Xaa is A or G or is absent

SEQ ID NO: 23619 - protein, 41 aa, Artificial Sequence
  GFR-binding peptide
  MOD_RES (2)..(4)..(37)..(38): Xaa is C or S
RXGXEAVSMGEEYQKYTPVGMDDIYLVSIPSLKTPVXXAKG

SEQ ID NO: 23620 - protein, 35 aa, Artificial Sequence; identical to SEQ ID NO: 2614
  GFR-binding peptide
  MOD_RES (33)..(34): Xaa is C or S
  MOD_RES (11)..(12)..(13)..(14)..(15): Xaa is A or G
  MOD_RES (16)..(17)..(18)..(19): Xaa is A or G or is absent

SEQ ID NO: 23621 - protein, 35 aa, Artificial Sequence
  GFR-binding peptide
  MOD_RES (33)..(34): Xaa is C or S
  MOD_RES (11)..(12)..(13)..(14)..(15): Xaa is A or G
  MOD_RES (16)..(17)..(18)..(19): Xaa is A or G or is absent
SRVIMEYKFKXXXXXXXXXLYLISIPELAQPVXXP

SEQ ID NO: 23622 - protein, 36 aa, Artificial Sequence
  GFR-binding peptide
  MOD_RES (2)..(4)..(36): Xaa is C or S
RXGXAEVVMDEYKFKVVNNAADLYLISIPELRAPVX

SEQ ID NO: 23623 - protein, 30 aa, Artificial Sequence
  GFR-binding peptide
SVAMGYHYKLYTVVGKDKYLISIPSLKTPV

SEQ ID NO: 23624 - protein, 34 aa, Artificial Sequence; identical to SEQ ID NO: 2621
  GFR-binding peptide
  MOD_RES (31)..(32): Xaa is C or S

SEQ ID NO: 23625 - protein, 34 aa, Artificial Sequence
  GFR-binding peptide
  MOD_RES (1)..(1): Xaa is C or S
  MOD_RES (13)..(14)..(15)..(16)..(17): Xaa is A or G
  MOD_RES (18)..(19)..(20)..(21): Xaa is A or G or is absent
XESVAMGEYQKYXXXXXXXXXIYLISIPSLKTPV

SEQ ID NO: 23626 - protein, 42 aa, Artificial Sequence
  GFR-binding peptide
  MOD_RES (2)..(4)..(37)..(38): Xaa is C or S
RXGXEAVSMGEEYQKYTPVGMDDIYLVSIPSLKTPVXXAKGV

SEQ ID NO: 23627 - protein, 37 aa, Artificial Sequence
  GFR-binding peptide
  MOD_RES (1)..(35)..(36): Xaa is C or S
  MOD_RES (13)..(14)..(15)..(16)..(17): Xaa is A or G
  MOD_RES (18)..(19)..(20)..(21): Xaa is A or G or is absent
XESVAMGRYKKLXXXXXXXXXFYLISIANLKTPVXXA

SEQ ID NO: 23628 - protein, 35 aa, Artificial Sequence; identical to SEQ ID NO: 2626
  GFR-binding peptide
  MOD_RES (34)..(35): Xaa is C or S
  MOD_RES (12)..(13)..(14)..(15)..(16): Xaa is A or G
  MOD_RES (17)..(18)..(19)..(20): Xaa is A or G or is absent

SEQ ID NO: 23629 - protein, 41 aa, Artificial Sequence; identical to SEQ ID NO: 2627
  GFR-binding peptide
  MOD_RES (2)..(4)..(35)..(36): Xaa is C or S

SEQ ID NO: 23630 - protein, 31 aa, Artificial Sequence; identical to SEQ ID NO: 2628
  GFR-binding peptide
  MOD_RES (31)..(31): Xaa is C or S

SEQ ID NO: 23631 - protein, 33 aa, Artificial Sequence
  GFR-binding peptide
  MOD_RES (32)..(33): Xaa is C or S
AEVVMDYHYKLVVNNAADKYLISIPSLRAPVXX

SEQ ID NO: 23632 - protein, 39 aa, Artificial Sequence
  GFR-binding peptide
  MOD_RES (34)..(35): Xaa is C or S
  MOD_RES (12)..(13)..(14)..(15)..(16): Xaa is A or G
  MOD_RES (17)..(18)..(19)..(20): Xaa is A or G or is absent
AEVVMDEYQKYXXXXXXXXXIYLISIPSLRAPVXXSAPA

SEQ ID NO: 23633 - protein, 40 aa, Artificial Sequence
  GFR-binding peptide
  MOD_RES (1)..(3)..(35)..(36): Xaa is C or S
XGXESVAMGEYQKYYTVVGKDIYLISIPSLKTPVXXAKSA

SEQ ID NO: 23634 - protein, 39 aa, Artificial Sequence; identical to SEQ ID NO: 2636
  GFR-binding peptide
  MOD_RES (2)..(37)..(38): Xaa is C or S
  MOD_RES (15)..(16)..(17)..(18)..(19): Xaa is A or G
  MOD_RES (20)..(21)..(22)..(23): Xaa is A or G or is absent

SEQ ID NO: 23635 - protein, 31 aa, Artificial Sequence
  GFR-binding peptide
ARVVMNEYKFKIVNSSDDLYLVSIPELQTPA

SEQ ID NO: 23636 - protein, 37 aa, Artificial Sequence
  GFR-binding peptide
  MOD_RES (34)..(35): Xaa is C or S
  MOD_RES (12)..(13)..(14)..(15)..(16): Xaa is A or G
  MOD_RES (17)..(18)..(19)..(20): Xaa is A or G or is absent
ESVAMGRYKKLXXXXXXXXXFYLISIANLKTPVXXAK

SEQ ID NO: 23637 - protein, 39 aa, Artificial Sequence; identical to SEQ ID NO: 2637
  GFR-binding peptide
  MOD_RES (2)..(4)..(37)..(38): Xaa is C or S
  MOD_RES (15)..(16)..(17)..(18)..(19): Xaa is A or G
  MOD_RES (20)..(21)..(22)..(23): Xaa is A or G or is absent

SEQ ID NO: 23638 - protein, 37 aa, Artificial Sequence
  GFR-binding peptide
  MOD_RES (2)..(4)..(36): Xaa is C or S
HXGXSRVVMNEYQKYIVNSSDDIYLVSIPSLKTPAXT

SEQ ID NO: 23639 - protein, 37 aa, Artificial Sequence
  GFR-binding peptide
  MOD_RES (1)..(3)..(37): Xaa is C or S
  MOD_RES (15)..(16)..(17)..(18)..(19): Xaa is A or G
  MOD_RES (20)..(21)..(22)..(23): Xaa is A or G or is absent
XGXAKVVMNEYQKYXXXXXXXXXIYLVSIPSLKTPAX

SEQ ID NO: 23640 - protein, 34 aa, Artificial Sequence
  GFR-binding peptide
  MOD_RES (31)..(32): Xaa is C or S
RVVMNEYKFKIVNSSDDLYLVSIPELKTPAXXPK

SEQ ID NO: 23641 - protein, 37 aa, Artificial Sequence; identical to SEQ ID NO: 2641
  GFR-binding peptide
  MOD_RES (32)..(33): Xaa is C or S

SEQ ID NO: 23642 - protein, 38 aa, Artificial Sequence
  GFR-binding peptide
  MOD_RES (2)..(4)..(38): Xaa is C or S
  MOD_RES (16)..(17)..(18)..(19)..(20): Xaa is A or G
  MOD_RES (21)..(22)..(23)..(24): Xaa is A or G or is absent
HXGXAKVVMNEYKFKXXXXXXXXXLYLVSIPELKTPAX

SEQ ID NO: 23643 - protein, 33 aa, Artificial Sequence
  GFR-binding peptide
  MOD_RES (1)..(33): Xaa is C or S
XARVVMNEYKFKIVNSSDDLYLVSIPELQTPAX

SEQ ID NO: 23644 - protein, 31 aa, Artificial Sequence
  GFR-binding peptide
ESVAMGRYKKLYTVVGKDFYLISIANLKTPV

SEQ ID NO: 23645 - protein, 37 aa, Artificial Sequence
  GFR-binding peptide
  MOD_RES (32)..(33): Xaa is C or S
GEVVMDEYQKYVVKENEDIYLMSIPSLETPVXXAKPI

SEQ ID NO: 23646 - protein, 37 aa, Artificial Sequence; identical to SEQ ID NO: 2642
  GFR-binding peptide
  MOD_RES (31)..(32): Xaa is C or S

SEQ ID NO: 23647 - protein, 37 aa, Artificial Sequence
  GFR-binding peptide
  MOD_RES (1)..(33)..(34): Xaa is C or S
XSRVVMNEYKFKIVNSSDDLYLVSIPELKTPAXXPKP

SEQ ID NO: 23648 - protein, 39 aa, Artificial Sequence
  GFR-binding peptide
  MOD_RES (1)..(35)..(36): Xaa is C or S
  MOD_RES (13)..(14)..(15)..(16)..(17): Xaa is A or G
  MOD_RES (18)..(19)..(20)..(21): Xaa is A or G or is absent
XAKVVMNEYKFKXXXXXXXXXLYLVSIPELKTPAXXAKP

SEQ ID NO: 23649 - protein, 43 aa, Artificial Sequence; identical to SEQ ID NO: 2643
  GFR-binding peptide
  MOD_RES (2)..(4)..(37)..(38): Xaa is C or S
  MOD_RES (15)..(16)..(17)..(18)..(19): Xaa is A or G
  MOD_RES (20)..(21)..(22)..(23): Xaa is A or G or is absent

SEQ ID NO: 23650 - protein, 39 aa, Artificial Sequence; identical to SEQ ID NO: 2648
  GFR-binding peptide
  MOD_RES (2)..(34)..(35): Xaa is C or S

SEQ ID NO: 23651 - protein, 39 aa, Artificial Sequence; identical to SEQ ID NO: 2649
  GFR-binding peptide
  MOD_RES (2)..(4)..(38)..(39): Xaa is C or S
  MOD_RES (16)..(17)..(18)..(19)..(20): Xaa is A or G
  MOD_RES (21)..(22)..(23)..(24): Xaa is A or G or is absent

SEQ ID NO: 23652 - protein, 39 aa, Artificial Sequence
  GFR-binding peptide
  MOD_RES (2)..(36)..(37): Xaa is C or S
  MOD_RES (14)..(15)..(16)..(17)..(18): Xaa is A or G
  MOD_RES (19)..(20)..(21)..(22): Xaa is A or G or is absent
GXGEVVMDEYKFKXXXXXXXXXLYLMSIPELETPVXXAK

SEQ ID NO: 23653 - protein, 37 aa, Artificial Sequence; identical to SEQ ID NO: 2651
  GFR-binding peptide
  MOD_RES (1)..(36)..(37): Xaa is C or S
  MOD_RES (14)..(15)..(16)..(17)..(18): Xaa is A or G
  MOD_RES (19)..(20)..(21)..(22): Xaa is A or G or is absent

SEQ ID NO: 23654 - protein, 39 aa, Artificial Sequence; identical to SEQ ID NO: 2653
  GFR-binding peptide
  MOD_RES (34)..(34): Xaa is C or S
  MOD_RES (12)..(13)..(14)..(15)..(16): Xaa is A or G
  MOD_RES (17)..(18)..(19)..(20): Xaa is A or G or is absent

SEQ ID NO: 23655 - protein, 35 aa, Artificial Sequence
  GFR-binding peptide
  MOD_RES (31)..(32): Xaa is C or S
EVVMEEYKFKVVKDYEDLYLMSIPELETPVXXAKP

SEQ ID NO: 23656 - protein, 39 aa, Artificial Sequence
  GFR-binding peptide
  MOD_RES (33)..(33): Xaa is C or S
  MOD_RES (11)..(12)..(13)..(14)..(15): Xaa is A or G
  MOD_RES (16)..(17)..(18)..(19): Xaa is A or G or is absent
RVVMNEYQKYXXXXXXXXXIYLVSIPSLKTPAXTPKTVH

SEQ ID NO: 23657 - protein, 38 aa, Artificial Sequence
  GFR-binding peptide
  MOD_RES (1)..(35)..(36): Xaa is C or S
  MOD_RES (13)..(14)..(15)..(16)..(17): Xaa is A or G
  MOD_RES (18)..(19)..(20)..(21): Xaa is A or G or is absent
XGEVVMDEYKFKXXXXXXXXXLYLMSIPELETPVXXAK

SEQ ID NO: 23658 - protein, 38 aa, Artificial Sequence; identical to SEQ ID NO: 2658
  GFR-binding peptide
  MOD_RES (1)..(3)..(37)..(38): Xaa is C or S
  MOD_RES (15)..(16)..(17)..(18)..(19): Xaa is A or G
  MOD_RES (20)..(21)..(22)..(23): Xaa is A or G or is absent

SEQ ID NO: 23659 - protein, 35 aa, Artificial Sequence; identical to SEQ ID NO: 2659
  GFR-binding peptide
  MOD_RES (2)..(4)..(35): Xaa is C or S

SEQ ID NO: 23660 - protein, 38 aa, Artificial Sequence; identical to SEQ ID NO: 2662
  GFR-binding peptide
  MOD_RES (1)..(3)..(37)..(38): Xaa is C or S
  MOD_RES (15)..(16)..(17)..(18)..(19): Xaa is A or G
  MOD_RES (20)..(21)..(22)..(23): Xaa is A or G or is absent

SEQ ID NO: 23661 - protein, 41 aa, Artificial Sequence
  GFR-binding peptide
  MOD_RES (1)..(3)..(37)..(38): Xaa is C or S
  MOD_RES (15)..(16)..(17)..(18)..(19): Xaa is A or G
  MOD_RES (20)..(21)..(22)..(23): Xaa is A or G or is absent
XGXAEVVMDEYKFKXXXXXXXXXLYLISIPELRAPVXXSAP

SEQ ID NO: 23662 - protein, 37 aa, Artificial Sequence; identical to SEQ ID NO: 2663
  GFR-binding peptide
  MOD_RES (33)..(34): Xaa is C or S
  MOD_RES (11)..(12)..(13)..(14)..(15): Xaa is A or G
  MOD_RES (16)..(17)..(18)..(19): Xaa is A or G or is absent

SEQ ID NO: 23663 - protein, 36 aa, Artificial Sequence; identical to SEQ ID NO: 2664
  GFR-binding peptide
  MOD_RES (2)..(36): Xaa is C or S
  MOD_RES (14)..(15)..(16)..(17)..(18): Xaa is A or G
  MOD_RES (19)..(20)..(21)..(22): Xaa is A or G or is absent

SEQ ID NO: 23664 - protein, 36 aa, Artificial Sequence
  GFR-binding peptide
  MOD_RES (1)..(35)..(36): Xaa is C or S
  MOD_RES (13)..(14)..(15)..(16)..(17): Xaa is A or G
  MOD_RES (18)..(19)..(20)..(21): Xaa is A or G or is absent
XARVVMNEYQKYXXXXXXXXXIYLVSIPSLQTPAXX

SEQ ID NO: 23665 - protein, 37 aa, Artificial Sequence
  GFR-binding peptide
  MOD_RES (2)..(36)..(37): Xaa is C or S
  MOD_RES (14)..(15)..(16)..(17)..(18): Xaa is A or G
  MOD_RES (19)..(20)..(21)..(22): Xaa is A or G or is absent
GXGEVVMEEYKFKXXXXXXXXXLYLMSIPELETPVXX

SEQ ID NO: 23666 - protein, 42 aa, Artificial Sequence
  GFR-binding peptide
  MOD_RES (2)..(4)..(38)..(39): Xaa is C or S
  MOD_RES (16)..(17)..(18)..(19)..(20): Xaa is A or G
  MOD_RES (21)..(22)..(23)..(24): Xaa is A or G or is absent
HXGXSRVVMNEYQKYXXXXXXXXXIYLVSIPSLKTPAXXPKP

SEQ ID NO: 23667 - protein, 39 aa, Artificial Sequence
  GFR-binding peptide
  MOD_RES (33)..(34): Xaa is C or S
  MOD_RES (11)..(12)..(13)..(14)..(15): Xaa is A or G
  MOD_RES (16)..(17)..(18)..(19): Xaa is A or G or is absent
EVVMDRYKKLXXXXXXXXXFYLISIANLRAPVXXSAPAA

SEQ ID NO: 23668 - protein, 31 aa, Artificial Sequence; identical to SEQ ID NO: 2670
  GFR-binding peptide
  MOD_RES (31)..(31): Xaa is C or S

SEQ ID NO: 23669 - protein, 35 aa, Artificial Sequence
  GFR-binding peptide
  MOD_RES (1)..(35): Xaa is C or S
  MOD_RES (13)..(14)..(15)..(16)..(17): Xaa is A or G
  MOD_RES (18)..(19)..(20)..(21): Xaa is A or G or is absent
XAKVVMNEYKFKXXXXXXXXXLYLVSIPELKTPAX

SEQ ID NO: 23670 - protein, 38 aa, Artificial Sequence; identical to SEQ ID NO: 2671
  GFR-binding peptide
  MOD_RES (35)..(36): Xaa is C or S
  MOD_RES (13)..(14)..(15)..(16)..(17): Xaa is A or G
  MOD_RES (18)..(19)..(20)..(21): Xaa is A or G or is absent

SEQ ID NO: 23671 - protein, 35 aa, Artificial Sequence
  GFR-binding peptide
  MOD_RES (2)..(4): Xaa is C or S
RXGXAEVVMDEYQKYVVNNAADIYLISIPSLRAPV

SEQ ID NO: 23672 - protein, 42 aa, Artificial Sequence
  GFR-binding peptide
  MOD_RES (1)..(3)..(37)..(38): Xaa is C or S
  MOD_RES (15)..(16)..(17)..(18)..(19): Xaa is A or G
  MOD_RES (20)..(21)..(22)..(23): Xaa is A or G or is absent
XGXARVVMNEYKFKXXXXXXXXXLYLVSIPELQTPAXXPKPV

SEQ ID NO: 23673 - protein, 38 aa, Artificial Sequence; identical to SEQ ID NO: 2673
  GFR-binding peptide
  MOD_RES (2)..(36)..(37): Xaa is C or S
  MOD_RES (14)..(15)..(16)..(17)..(18): Xaa is A or G
  MOD_RES (19)..(20)..(21)..(22): Xaa is A or G or is absent

SEQ ID NO: 23674 - protein, 33 aa, Artificial Sequence; identical to SEQ ID NO: 2674
  GFR-binding peptide
  MOD_RES (1)..(1): Xaa is C or S

SEQ ID NO: 23675 - protein, 38 aa, Artificial Sequence; identical to SEQ ID NO: 2675
  GFR-binding peptide
  MOD_RES (2)..(4)..(38): Xaa is C or S
  MOD_RES (16)..(17)..(18)..(19)..(20): Xaa is A or G
  MOD_RES (21)..(22)..(23)..(24): Xaa is A or G or is absent

SEQ ID NO: 23676 - protein, 35 aa, Artificial Sequence
  GFR-binding peptide
  MOD_RES (2)..(4): Xaa is C or S
RXGXAEVVMDEYKFKVVNNAADLYLISIPELRAPV

SEQ ID NO: 23677 - protein, 40 aa, Artificial Sequence
  GFR-binding peptide
  MOD_RES (1)..(3)..(35)..(36): Xaa is C or S
XGXAEVVMDYHYKLVVNNAADKYLISIPSLRAPVXXSAPA

SEQ ID NO: 23678 - protein, 37 aa, Artificial Sequence
  GFR-binding peptide
  MOD_RES (2)..(4): Xaa is C or S
  MOD_RES (16)..(17)..(18)..(19)..(20): Xaa is A or G
  MOD_RES (21)..(22)..(23)..(24): Xaa is A or G or is absent
HXGXAKVVMNEYKFKXXXXXXXXXLYLVSIPELKTPA

SEQ ID NO: 23679 - protein, 37 aa, Artificial Sequence
  GFR-binding peptide
  MOD_RES (1)..(35)..(36): Xaa is C or S
  MOD_RES (13)..(14)..(15)..(16)..(17): Xaa is A or G
  MOD_RES (18)..(19)..(20)..(21): Xaa is A or G or is absent
XGEVVMEEYQKYXXXXXXXXXIYLMSIPSLETPVXXA

SEQ ID NO: 23680 - protein, 37 aa, Artificial Sequence
  GFR-binding peptide
  MOD_RES (33)..(34): Xaa is C or S
  MOD_RES (11)..(12)..(13)..(14)..(15): Xaa is A or G
  MOD_RES (16)..(17)..(18)..(19): Xaa is A or G or is absent
RVVMNEYKFKXXXXXXXXXLYLVSIPELKTPAXXPKP

SEQ ID NO: 23681 - protein, 36 aa, Artificial Sequence; identical to SEQ ID NO: 2685
  GFR-binding peptide
  MOD_RES (1)..(3)..(35): Xaa is C or S

SEQ ID NO: 23682 - protein, 38 aa, Artificial Sequence; identical to SEQ ID NO: 2687
  GFR-binding peptide
  MOD_RES (34)..(35): Xaa is C or S
  MOD_RES (12)..(13)..(14)..(15)..(16): Xaa is A or G
  MOD_RES (17)..(18)..(19)..(20): Xaa is A or G or is absent

SEQ ID NO: 23683 - protein, 38 aa, Artificial Sequence; identical to SEQ ID NO: 2689
  GFR-binding peptide
  MOD_RES (1)..(33)..(34): Xaa is C or S

SEQ ID NO: 23684 - protein, 38 aa, Artificial Sequence; identical to SEQ ID NO: 2691
  GFR-binding peptide
  MOD_RES (2)..(4)..(37)..(38): Xaa is C or S
  MOD_RES (15)..(16)..(17)..(18)..(19): Xaa is A or G
  MOD_RES (20)..(21)..(22)..(23): Xaa is A or G or is absent

SEQ ID NO: 23685 - protein, 35 aa, Artificial Sequence
  GFR-binding peptide
  MOD_RES (32)..(33): Xaa is C or S
SRVVMNEYKFKIVNSSDDLYLVSIPELKTPAXXPK

SEQ ID NO: 23686 - protein, 33 aa, Artificial Sequence
  GFR-binding peptide
  MOD_RES (33)..(33): Xaa is C or S
  MOD_RES (11)..(12)..(13)..(14)..(15): Xaa is A or G
  MOD_RES (16)..(17)..(18)..(19): Xaa is A or G or is absent
SVAMGEYKFKXXXXXXXXXLYLISIPELKTPVX

SEQ ID NO: 23687 - protein, 40 aa, Artificial Sequence
  GFR-binding peptide
  MOD_RES (2)..(37)..(38): Xaa is C or S
  MOD_RES (15)..(16)..(17)..(18)..(19): Xaa is A or G
  MOD_RES (20)..(21)..(22)..(23): Xaa is A or G or is absent
GXEAVSMGEEYKFKXXXXXXXXXLYLVSIPELKTPVXXAK

SEQ ID NO: 23688 - protein, 38 aa, Artificial Sequence
  GFR-binding peptide
  MOD_RES (2)..(34)..(35): Xaa is C or S
GXAEVVMDEYKFKVVNNAADLYLISIPELRAPVXXSAP

SEQ ID NO: 23689 - protein, 32 aa, Artificial Sequence; identical to SEQ ID NO: 2694
  GFR-binding peptide
  MOD_RES (31)..(32): Xaa is C or S

SEQ ID NO: 23690 - protein, 32 aa, Artificial Sequence
  GFR-binding peptide
  MOD_RES (31)..(32): Xaa is C or S
SRVIMEYKFKVKPKRGVLYLISIPELAQPVXX

SEQ ID NO: 23691 - protein, 34 aa, Artificial Sequence
  GFR-binding peptide
  MOD_RES (1)..(34): Xaa is C or S
  MOD_RES (12)..(13)..(14)..(15)..(16): Xaa is A or G
  MOD_RES (17)..(18)..(19)..(20): Xaa is A or G or is absent
XSKVVMEYKFKXXXXXXXXXLYLISIPELDQPVX

SEQ ID NO: 23692 - protein, 38 aa, Artificial Sequence
  GFR-binding peptide
  MOD_RES (2)..(4)..(36)..(37): Xaa is C or S
RXGXESVAMGYHYKLYTVVGKDKYLISIPSLKTPVXXA

SEQ ID NO: 23693 - protein, 41 aa, Artificial Sequence
  GFR-binding peptide
  MOD_RES (2)..(4)..(39)..(40): Xaa is C or S
  MOD_RES (17)..(18)..(19)..(20)..(21): Xaa is A or G
  MOD_RES (22)..(23)..(24)..(25): Xaa is A or G or is absent
RXGXEAVSMGEEYKFKXXXXXXXXXLYLVSIPELKTPVXXA

SEQ ID NO: 23694 - protein, 43 aa, Artificial Sequence
  GFR-binding peptide
  MOD_RES (2)..(4)..(38)..(39): Xaa is C or S
  MOD_RES (16)..(17)..(18)..(19)..(20): Xaa is A or G
  MOD_RES (21)..(22)..(23)..(24): Xaa is A or G or is absent
RXGXAEVVMDRYKKLXXXXXXXXXFYLISIANLRAPVXXSAPA

SEQ ID NO: 23695 - protein, 36 aa, Artificial Sequence; identical to SEQ ID NO: 2695
  GFR-binding peptide
  MOD_RES (32)..(33): Xaa is C or S

SEQ ID NO: 23696 - protein, 43 aa, Artificial Sequence; identical to SEQ ID NO: 2696
  GFR-binding peptide
  MOD_RES (1)..(3)..(38)..(39): Xaa is C or S
  MOD_RES (16)..(17)..(18)..(19)..(20): Xaa is A or G
  MOD_RES (21)..(22)..(23)..(24): Xaa is A or G or is absent

SEQ ID NO: 23697 - protein, 41 aa, Artificial Sequence
  GFR-binding peptide
  MOD_RES (2)..(4)..(37)..(38): Xaa is C or S
RXGXEAVSMGEEYKFKTPVGMDDLYLVSIPELKTPVXXAKG

SEQ ID NO: 23698 - protein, 43 aa, Artificial Sequence
  GFR-binding peptide
  MOD_RES (1)..(3)..(37)..(38): Xaa is C or S
  MOD_RES (15)..(16)..(17)..(18)..(19): Xaa is A or G
  MOD_RES (20)..(21)..(22)..(23): Xaa is A or G or is absent
XGXGEVVMDEYKFKXXXXXXXXXLYLMSIPELETPVXXAKPIK

SEQ ID NO: 23699 - protein, 35 aa, Artificial Sequence; identical to SEQ ID NO: 2700
  GFR-binding peptide
  MOD_RES (33)..(34): Xaa is C or S
  MOD_RES (11)..(12)..(13)..(14)..(15): Xaa is A or G
  MOD_RES (16)..(17)..(18)..(19): Xaa is A or G or is absent

SEQ ID NO: 23700 - protein, 39 aa, Artificial Sequence
  GFR-binding peptide
  MOD_RES (1)..(3)..(35)..(36): Xaa is C or S
XGXESVAMGEYKFKYTVVGKDLYLISIPELKTPVXXAKS

SEQ ID NO: 23701 - protein, 42 aa, Artificial Sequence
  GFR-binding peptide
  MOD_RES (1)..(3)..(38)..(39): Xaa is C or S
  MOD_RES (16)..(17)..(18)..(19)..(20): Xaa is A or G
  MOD_RES (21)..(22)..(23)..(24): Xaa is A or G or is absent
XGXEAVSMGEEYKFKXXXXXXXXXLYLVSIPELKTPVXXAKG

SEQ ID NO: 23702 - protein, 34 aa, Artificial Sequence; identical to SEQ ID NO: 2702
  GFR-binding peptide
  MOD_RES (2)..(33)..(34): Xaa is C or S

SEQ ID NO: 23703 - protein, 30 aa, Artificial Sequence; identical to SEQ ID NO: 2703
  GFR-binding peptide

SEQ ID NO: 23704 - protein, 37 aa, Artificial Sequence
  GFR-binding peptide
  MOD_RES (1)..(3)..(36)..(37): Xaa is C or S
  MOD_RES (14)..(15)..(16)..(17)..(18): Xaa is A or G
  MOD_RES (19)..(20)..(21)..(22): Xaa is A or G or is absent
XKXSKVVMEYKFKXXXXXXXXXLYLISIPELDQPVXX

SEQ ID NO: 23705 - protein, 35 aa, Artificial Sequence
  GFR-binding peptide
  MOD_RES (2)..(2): Xaa is C or S
  MOD_RES (14)..(15)..(16)..(17)..(18): Xaa is A or G
  MOD_RES (19)..(20)..(21)..(22): Xaa is A or G or is absent
GXARVVMNEYKFKXXXXXXXXXLYLVSIPELQTPA

SEQ ID NO: 23706 - protein, 35 aa, Artificial Sequence
  GFR-binding peptide
  MOD_RES (1)..(32)..(33): Xaa is C or S
XSKVVMEYQKYVKPTRGVIYLISIPSLDQPVXXPS

SEQ ID NO: 23707 - protein, 40 aa, Artificial Sequence
  GFR-binding peptide
  MOD_RES (1)..(3)..(37)..(38): Xaa is C or S
  MOD_RES (15)..(16)..(17)..(18)..(19): Xaa is A or G
  MOD_RES (20)..(21)..(22)..(23): Xaa is A or G or is absent
XGXGEVVMEEYKFKXXXXXXXXXLYLMSIPELETPVXXAK

SEQ ID NO: 23708 - protein, 37 aa, Artificial Sequence; identical to SEQ ID NO: 2708
  GFR-binding peptide
  MOD_RES (1)..(3)..(36)..(37): Xaa is C or S
  MOD_RES (14)..(15)..(16)..(17)..(18): Xaa is A or G
  MOD_RES (19)..(20)..(21)..(22): Xaa is A or G or is absent

SEQ ID NO: 23709 - protein, 43 aa, Artificial Sequence
  GFR-binding peptide
  MOD_RES (2)..(4)..(38)..(39): Xaa is C or S
  MOD_RES (16)..(17)..(18)..(19)..(20): Xaa is A or G
  MOD_RES (21)..(22)..(23)..(24): Xaa is A or G or is absent
RXGXAEVVMDEYKFKXXXXXXXXXLYLISIPELRAPVXXSAPA

SEQ ID NO: 23710 - protein, 34 aa, Artificial Sequence
  GFR-binding peptide
  MOD_RES (32)..(33): Xaa is C or S
ESVAMGEYQKYYTVVGKDIYLISIPSLKTPVXXA

SEQ ID NO: 23711 - protein, 37 aa, Artificial Sequence; identical to SEQ ID NO: 2716
  GFR-binding peptide
  MOD_RES (33)..(34): Xaa is C or S
  MOD_RES (11)..(12)..(13)..(14)..(15): Xaa is A or G
  MOD_RES (16)..(17)..(18)..(19): Xaa is A or G or is absent

SEQ ID NO: 23712 - protein, 33 aa, Artificial Sequence
  GFR-binding peptide
  MOD_RES (2)..(33): Xaa is C or S
KXSRVIMEYQKYVKPKRGVIYLISIPSLAQPVX

SEQ ID NO: 23713 - protein, 34 aa, Artificial Sequence; identical to SEQ ID NO: 2717
  GFR-binding peptide
  MOD_RES (31)..(31): Xaa is C or S

SEQ ID NO: 23714 - protein, 37 aa, Artificial Sequence
  GFR-binding peptide
  MOD_RES (1)..(32)..(33): Xaa is C or S
XSRVIMEYKFKVKPKRGVLYLISIPELAQPVXXPAAS

SEQ ID NO: 23715 - protein, 34 aa, Artificial Sequence
  GFR-binding peptide
  MOD_RES (1)..(3): Xaa is C or S
XGXARVVMNEYKFKIVNSSDDLYLVSIPELQTPA

SEQ ID NO: 23716 - protein, 43 aa, Artificial Sequence
  GFR-binding peptide
  MOD_RES (1)..(3)..(37)..(38): Xaa is C or S
  MOD_RES (15)..(16)..(17)..(18)..(19): Xaa is A or G
  MOD_RES (20)..(21)..(22)..(23): Xaa is A or G or is absent
XGXAEVVMDEYKFKXXXXXXXXXLYLISIPELRAPVXXSAPAA

SEQ ID NO: 23717 - protein, 39 aa, Artificial Sequence; identical to SEQ ID NO: 2725
  GFR-binding peptide
  MOD_RES (2)..(4)..(37)..(38): Xaa is C or S
  MOD_RES (15)..(16)..(17)..(18)..(19): Xaa is A or G
  MOD_RES (20)..(21)..(22)..(23): Xaa is A or G or is absent

SEQ ID NO: 23718 - protein, 39 aa, Artificial Sequence
  GFR-binding peptide
  MOD_RES (33)..(34): Xaa is C or S
  MOD_RES (11)..(12)..(13)..(14)..(15): Xaa is A or G
  MOD_RES (16)..(17)..(18)..(19): Xaa is A or G or is absent
SKVVMEYKFKXXXXXXXXXLYLISIPELDQPVXXPSASA

SEQ ID NO: 23719 - protein, 40 aa, Artificial Sequence
  GFR-binding peptide
  MOD_RES (1)..(3)..(34)..(35): Xaa is C or S
XKXSKVVMEYKFKVKPTRGVLYLISIPELDQPVXXPSASA

SEQ ID NO: 23720 - protein, 37 aa, Artificial Sequence
  GFR-binding peptide
  MOD_RES (33)..(34): Xaa is C or S
  MOD_RES (11)..(12)..(13)..(14)..(15): Xaa is A or G
  MOD_RES (16)..(17)..(18)..(19): Xaa is A or G or is absent
SRVIMEYQKYXXXXXXXXXIYLISIPSLAQPVXXPAA

SEQ ID NO: 23721 - protein, 36 aa, Artificial Sequence; identical to SEQ ID NO: 2731
  GFR-binding peptide
  MOD_RES (1)..(3)..(35)..(36): Xaa is C or S

SEQ ID NO: 23722 - protein, 35 aa, Artificial Sequence
  GFR-binding peptide
  MOD_RES (1)..(3)..(35): Xaa is C or S
XGXESVAMGRYKKLYTVVGKDFYLISIANLKTPVX

SEQ ID NO: 23723 - protein, 30 aa, Artificial Sequence
  GFR-binding peptide
EVVMDYHYKLVVNNAADKYLISIPSLRAPV

SEQ ID NO: 23724 - protein, 35 aa, Artificial Sequence
  GFR-binding peptide
  MOD_RES (33)..(34): Xaa is C or S
EAVSMGEEYKFKTPVGMDDLYLVSIPELKTPVXXA

SEQ ID NO: 23725 - protein, 36 aa, Artificial Sequence
  GFR-binding peptide
  MOD_RES (31)..(32): Xaa is C or S
EVVMDEYKFKVVKENEDLYLMSIPELETPVXXAKPI

SEQ ID NO: 23726 - protein, 35 aa, Artificial Sequence
  GFR-binding peptide
  MOD_RES (2)..(2): Xaa is C or S
  MOD_RES (14)..(15)..(16)..(17)..(18): Xaa is A or G
  MOD_RES (19)..(20)..(21)..(22): Xaa is A or G or is absent
GXAEVVMDYHYKLXXXXXXXXXKYLISIPSLRAPV

SEQ ID NO: 23727 - protein, 35 aa, Artificial Sequence; identical to SEQ ID NO: 2745
  GFR-binding peptide
  MOD_RES (1)..(33)..(34): Xaa is C or S

SEQ ID NO: 23728 - protein, 31 aa, Artificial Sequence; identical to SEQ ID NO: 2746
  GFR-binding peptide
  MOD_RES (1)..(1): Xaa is C or S

SEQ ID NO: 23729 - protein, 38 aa, Artificial Sequence
  GFR-binding peptide
  MOD_RES (1)..(3)..(37): Xaa is C or S
  MOD_RES (15)..(16)..(17)..(18)..(19): Xaa is A or G
  MOD_RES (20)..(21)..(22)..(23): Xaa is A or G or is absent
XGXSRVVMNEYKFKXXXXXXXXXLYLVSIPELKTPAXT

SEQ ID NO: 23730 - protein, 36 aa, Artificial Sequence
  GFR-binding peptide
  MOD_RES (1)..(3)..(35)..(36): Xaa is C or S
XGXGEVVMDEYKFKVVKENEDLYLMSIPELETPVXX

SEQ ID NO: 23731 - protein, 40 aa, Artificial Sequence
  GFR-binding peptide
  MOD_RES (1)..(3)..(37)..(38): Xaa is C or S
  MOD_RES (15)..(16)..(17)..(18)..(19): Xaa is A or G
  MOD_RES (20)..(21)..(22)..(23): Xaa is A or G or is absent
XGXGEVVMDEYKFKXXXXXXXXXLYLMSIPELETPVXXAK

SEQ ID NO: 23732 - protein, 34 aa, Artificial Sequence
  GFR-binding peptide
  MOD_RES (31)..(32): Xaa is C or S
EVVMEEYQKYVVKDYEDIYLMSIPSLETPVXXAK

SEQ ID NO: 23733 - protein, 41 aa, Artificial Sequence; identical to SEQ ID NO: 2751
  GFR-binding peptide
  MOD_RES (2)..(4)..(37)..(38): Xaa is C or S
  MOD_RES (15)..(16)..(17)..(18)..(19): Xaa is A or G
  MOD_RES (20)..(21)..(22)..(23): Xaa is A or G or is absent

SEQ ID NO: 23734 - protein, 39 aa, Artificial Sequence; identical to SEQ ID NO: 2752
  GFR-binding peptide
  MOD_RES (2)..(4)..(35)..(36): Xaa is C or S

SEQ ID NO: 23735 - protein, 33 aa, Artificial Sequence
  GFR-binding peptide
  MOD_RES (1)..(3): Xaa is C or S
XKXSRVIMEYKFKVKPKRGVLYLISIPELAQPV

SEQ ID NO: 23736 - protein, 37 aa, Artificial Sequence
  GFR-binding peptide
  MOD_RES (1)..(32)..(33): Xaa is C or S
XSRVIMEYQKYVKPKRGVIYLISIPSLAQPVXXPAAS

SEQ ID NO: 23737 - protein, 37 aa, Artificial Sequence; identical to SEQ ID NO: 2756
  GFR-binding peptide
  MOD_RES (2)..(35)..(36): Xaa is C or S

SEQ ID NO: 23738 - protein, 33 aa, Artificial Sequence; identical to SEQ ID NO: 2757
  GFR-binding peptide
  MOD_RES (1)..(33): Xaa is C or S

SEQ ID NO: 23739 - protein, 40 aa, Artificial Sequence
  GFR-binding peptide
  MOD_RES (1)..(3)..(37)..(38): Xaa is C or S
  MOD_RES (15)..(16)..(17)..(18)..(19): Xaa is A or G
  MOD_RES (20)..(21)..(22)..(23): Xaa is A or G or is absent
XGXESVAMGEYKFKXXXXXXXXXLYLISIPELKTPVXXAK

SEQ ID NO: 23740 - protein, 33 aa, Artificial Sequence
  GFR-binding peptide
  MOD_RES (1)..(33): Xaa is C or S
XGEVVMDEYKFKVVKENEDLYLMSIPELETPVX

SEQ ID NO: 23741 - protein, 35 aa, Artificial Sequence
  GFR-binding peptide
  MOD_RES (31)..(32): Xaa is C or S
RVVMNEYKFKIVNSSDDLYLVSIPELQTPAXXPKP

SEQ ID NO: 23742 - protein, 43 aa, Artificial Sequence
  GFR-binding peptide
  MOD_RES (1)..(3)..(37)..(38): Xaa is C or S
  MOD_RES (15)..(16)..(17)..(18)..(19): Xaa is A or G
  MOD_RES (20)..(21)..(22)..(23): Xaa is A or G or is absent
XGXESVAMGYHYKLXXXXXXXXXKYLISIPSLKTPVXXAKSAK

SEQ ID NO: 23743 - protein, 40 aa, Artificial Sequence; identical to SEQ ID NO: 2758
  GFR-binding peptide
  MOD_RES (1)..(3)..(37)..(38): Xaa is C or S
  MOD_RES (15)..(16)..(17)..(18)..(19): Xaa is A or G
  MOD_RES (20)..(21)..(22)..(23): Xaa is A or G or is absent

SEQ ID NO: 23744 - protein, 44 aa, Artificial Sequence
  GFR-binding peptide
  MOD_RES (2)..(4)..(39)..(40): Xaa is C or S
  MOD_RES (17)..(18)..(19)..(20)..(21): Xaa is A or G
  MOD_RES (22)..(23)..(24)..(25): Xaa is A or G or is absent
RXGXEAVSMGEEYKFKXXXXXXXXXLYLVSIPELKTPVXXAKGV

SEQ ID NO: 23745 - protein, 43 aa, Artificial Sequence
  GFR-binding peptide
  MOD_RES (2)..(4)..(38)..(39): Xaa is C or S
  MOD_RES (16)..(17)..(18)..(19)..(20): Xaa is A or G
  MOD_RES (21)..(22)..(23)..(24): Xaa is A or G or is absent
RXGXGEVVMDEYQKYXXXXXXXXXIYLMSIPSLETPVXXAKPI

SEQ ID NO: 23746 - protein, 42 aa, Artificial Sequence
  GFR-binding peptide
  MOD_RES (2)..(4)..(38)..(39): Xaa is C or S
  MOD_RES (16)..(17)..(18)..(19)..(20): Xaa is A or G
  MOD_RES (21)..(22)..(23)..(24): Xaa is A or G or is absent
HXGXARVVMNEYQKYXXXXXXXXXIYLVSIPSLQTPAXXPKP

SEQ ID NO: 23747 - protein, 37 aa, Artificial Sequence
  GFR-binding peptide
  MOD_RES (1)..(34)..(35): Xaa is C or S
  MOD_RES (12)..(13)..(14)..(15)..(16): Xaa is A or G
  MOD_RES (17)..(18)..(19)..(20): Xaa is A or G or is absent
XSKVIMEYQKYXXXXXXXXXIYLISIPSLDQSVXXPS

SEQ ID NO: 23748 - protein, 34 aa, Artificial Sequence
  GFR-binding peptide
  MOD_RES (33)..(34): Xaa is C or S
  MOD_RES (11)..(12)..(13)..(14)..(15): Xaa is A or G
  MOD_RES (16)..(17)..(18)..(19): Xaa is A or G or is absent
SRVIMEYQKYXXXXXXXXXIYLISIPSLAQPVXX

SEQ ID NO: 23749 - protein, 37 aa, Artificial Sequence; identical to SEQ ID NO: 2761
  GFR-binding peptide
  MOD_RES (1)..(35)..(36): Xaa is C or S
  MOD_RES (13)..(14)..(15)..(16)..(17): Xaa is A or G
  MOD_RES (18)..(19)..(20)..(21): Xaa is A or G or is absent

SEQ ID NO: 23750 - protein, 37 aa, Artificial Sequence
  GFR-binding peptide
  MOD_RES (34)..(35): Xaa is C or S
  MOD_RES (12)..(13)..(14)..(15)..(16): Xaa is A or G
  MOD_RES (17)..(18)..(19)..(20): Xaa is A or G or is absent
ARVVMNEYQKYXXXXXXXXXIYLVSIPSLQTPAXXPK

SEQ ID NO: 23751 - protein, 40 aa, Artificial Sequence; identical to SEQ ID NO: 2764
  GFR-binding peptide
  MOD_RES (1)..(3)..(37): Xaa is C or S
  MOD_RES (15)..(16)..(17)..(18)..(19): Xaa is A or G
  MOD_RES (20)..(21)..(22)..(23): Xaa is A or G or is absent

SEQ ID NO: 23752 - protein, 38 aa, Artificial Sequence
  GFR-binding peptide
  MOD_RES (1)..(32)..(33): Xaa is C or S
XSKVIMEYQKYIKPTKGIIYLISIPSLDQSVXXPSASA

SEQ ID NO: 23753 - protein, 34 aa, Artificial Sequence
  GFR-binding peptide
  MOD_RES (2)..(33)..(34): Xaa is C or S
KXSRVIMEYQKYVKPKRGVIYLISIPSLAQPVXX

SEQ ID NO: 23754 - protein, 41 aa, Artificial Sequence
  GFR-binding peptide
  MOD_RES (1)..(35)..(36): Xaa is C or S
  MOD_RES (13)..(14)..(15)..(16)..(17): Xaa is A or G
  MOD_RES (18)..(19)..(20)..(21): Xaa is A or G or is absent
XSRVVMNEYKFKXXXXXXXXXLYLVSIPELKTPAXXPKPVY

SEQ ID NO: 23755 - protein, 36 aa, Artificial Sequence
  GFR-binding peptide
  MOD_RES (1)..(3)..(35)..(36): Xaa is C or S
XGXAEVVMDEYQKYVVNNAADIYLISIPSLRAPVXX

SEQ ID NO: 23756 - protein, 43 aa, Artificial Sequence
  GFR-binding peptide
  MOD_RES (2)..(4)..(38)..(39): Xaa is C or S
  MOD_RES (16)..(17)..(18)..(19)..(20): Xaa is A or G
  MOD_RES (21)..(22)..(23)..(24): Xaa is A or G or is absent
HXGXSRVVMNEYQKYXXXXXXXXXIYLVSIPSLKTPAXXPKPV

SEQ ID NO: 23757 - protein, 37 aa, Artificial Sequence
  GFR-binding peptide
  MOD_RES (33)..(34): Xaa is C or S
  MOD_RES (11)..(12)..(13)..(14)..(15): Xaa is A or G
  MOD_RES (16)..(17)..(18)..(19): Xaa is A or G or is absent
EVVMDEYKFKXXXXXXXXXLYLMSIPELETPVXXAKP

SEQ ID NO: 23758 - protein, 37 aa, Artificial Sequence; identical to SEQ ID NO: 2766
  GFR-binding peptide
  MOD_RES (1)..(35)..(36): Xaa is C or S
  MOD_RES (13)..(14)..(15)..(16)..(17): Xaa is A or G
  MOD_RES (18)..(19)..(20)..(21): Xaa is A or G or is absent

SEQ ID NO: 23759 - protein, 34 aa, Artificial Sequence
  GFR-binding peptide
  MOD_RES (34)..(34): Xaa is C or S
  MOD_RES (12)..(13)..(14)..(15)..(16): Xaa is A or G
  MOD_RES (17)..(18)..(19)..(20): Xaa is A or G or is absent
SRVVMNEYKFKXXXXXXXXXLYLVSIPELKTPAX

SEQ ID NO: 23760 - protein, 39 aa, Artificial Sequence
  GFR-binding peptide
  MOD_RES (2)..(4)..(36)..(37): Xaa is C or S
HXGXARVVMNEYKFKIVNSSDDLYLVSIPELQTPAXXPK

SEQ ID NO: 23761 - protein, 35 aa, Artificial Sequence
  GFR-binding peptide
  MOD_RES (2)..(34)..(35): Xaa is C or S
GXGEVVMEEYKFKVVKDYEDLYLMSIPELETPVXX

SEQ ID NO: 23762 - protein, 41 aa, Artificial Sequence; identical to SEQ ID NO: 2768
  GFR-binding peptide
  MOD_RES (1)..(3)..(35)..(36): Xaa is C or S

SEQ ID NO: 23763 - protein, 38 aa, Artificial Sequence
  GFR-binding peptide
  MOD_RES (1)..(3)..(34)..(35): Xaa is C or S
XKXSKVIMEYKFKIKPTKGILYLISIPELDQSVXXPSA

SEQ ID NO: 23764 - protein, 40 aa, Artificial Sequence; identical to SEQ ID NO: 2769
  GFR-binding peptide
  MOD_RES (1)..(34)..(35): Xaa is C or S
  MOD_RES (12)..(13)..(14)..(15)..(16): Xaa is A or G
  MOD_RES (17)..(18)..(19)..(20): Xaa is A or G or is absent

SEQ ID NO: 23765 - protein, 33 aa, Artificial Sequence
  GFR-binding peptide
  MOD_RES (12)..(13)..(14)..(15)..(16): Xaa is A or G
  MOD_RES (17)..(18)..(19)..(20): Xaa is A or G or is absent
ESVAMGRYKKLXXXXXXXXXFYLISIANLKTPV

SEQ ID NO: 23766 - protein, 44 aa, Artificial Sequence; identical to SEQ ID NO: 2774
  GFR-binding peptide
  MOD_RES (2)..(4)..(38)..(39): Xaa is C or S
  MOD_RES (16)..(17)..(18)..(19)..(20): Xaa is A or G
  MOD_RES (21)..(22)..(23)..(24): Xaa is A or G or is absent

SEQ ID NO: 23767 - protein, 38 aa, Artificial Sequence
  GFR-binding peptide
  MOD_RES (33)..(34): Xaa is C or S
  MOD_RES (11)..(12)..(13)..(14)..(15): Xaa is A or G
  MOD_RES (16)..(17)..(18)..(19): Xaa is A or G or is absent
EVVMDEYQKYXXXXXXXXXIYLISIPSLRAPVXXSAPA

SEQ ID NO: 23768 - protein, 34 aa, Artificial Sequence
  GFR-binding peptide
  MOD_RES (31)..(32): Xaa is C or S
EVVMDEYKFKVVNNAADLYLISIPELRAPVXXSA

SEQ ID NO: 23769 - protein, 35 aa, Artificial Sequence; identical to SEQ ID NO: 2777
  GFR-binding peptide
  MOD_RES (2)..(35): Xaa is C or S
  MOD_RES (13)..(14)..(15)..(16)..(17): Xaa is A or G
  MOD_RES (18)..(19)..(20)..(21): Xaa is A or G or is absent

SEQ ID NO: 23770 - protein, 37 aa, Artificial Sequence; identical to SEQ ID NO: 2780
  GFR-binding peptide
  MOD_RES (1)..(34)..(35): Xaa is C or S
  MOD_RES (12)..(13)..(14)..(15)..(16): Xaa is A or G
  MOD_RES (17)..(18)..(19)..(20): Xaa is A or G or is absent

SEQ ID NO: 23771 - protein, 34 aa, Artificial Sequence
  GFR-binding peptide
  MOD_RES (1)..(1): Xaa is C or S
  MOD_RES (13)..(14)..(15)..(16)..(17): Xaa is A or G
  MOD_RES (18)..(19)..(20)..(21): Xaa is A or G or is absent
XSRVVMNEYQKYXXXXXXXXXIYLVSIPSLKTPA

SEQ ID NO: 23772 - protein, 34 aa, Artificial Sequence; identical to SEQ ID NO: 2781
  GFR-binding peptide
  MOD_RES (2)..(33)..(34): Xaa is C or S

SEQ ID NO: 23773 - protein, 42 aa, Artificial Sequence
  GFR-binding peptide
  MOD_RES (2)..(4)..(36)..(37): Xaa is C or S
RXGXAEVVMDEYQKYVVNNAADIYLISIPSLRAPVXXSAPAA

SEQ ID NO: 23774 - protein, 41 aa, Artificial Sequence
  GFR-binding peptide
  MOD_RES (1)..(35)..(36): Xaa is C or S
  MOD_RES (13)..(14)..(15)..(16)..(17): Xaa is A or G
  MOD_RES (18)..(19)..(20)..(21): Xaa is A or G or is absent
XSRVVMNEYQKYXXXXXXXXXIYLVSIPSLKTPAXXPKPVY

SEQ ID NO: 23775 - protein, 32 aa, Artificial Sequence; identical to SEQ ID NO: 2782
  GFR-binding peptide
  MOD_RES (32)..(32): Xaa is C or S

SEQ ID NO: 23776 - protein, 37 aa, Artificial Sequence
  GFR-binding peptide
  MOD_RES (2)..(4): Xaa is C or S
  MOD_RES (16)..(17)..(18)..(19)..(20): Xaa is A or G
  MOD_RES (21)..(22)..(23)..(24): Xaa is A or G or is absent
RXGXAEVVMDYHYKLXXXXXXXXXKYLISIPSLRAPV

SEQ ID NO: 23777 - protein, 39 aa, Artificial Sequence
  GFR-binding peptide
  MOD_RES (34)..(35): Xaa is C or S
  MOD_RES (12)..(13)..(14)..(15)..(16): Xaa is A or G
  MOD_RES (17)..(18)..(19)..(20): Xaa is A or G or is absent
ESVAMGEYKFKXXXXXXXXXLYLISIPELKTPVXXAKSA

SEQ ID NO: 23778 - protein, 35 aa, Artificial Sequence; identical to SEQ ID NO: 2789
  GFR-binding peptide
  MOD_RES (33)..(34): Xaa is C or S
  MOD_RES (11)..(12)..(13)..(14)..(15): Xaa is A or G
  MOD_RES (16)..(17)..(18)..(19): Xaa is A or G or is absent

SEQ ID NO: 23779 - protein, 34 aa, Artificial Sequence
  GFR-binding peptide
  MOD_RES (2)..(34): Xaa is C or S
GXAKVVMNEYQKYIVNNSSDIYLVSIPSLKTPAX

SEQ ID NO: 23780 - protein, 35 aa, Artificial Sequence; identical to SEQ ID NO: 2790
  GFR-binding peptide
  MOD_RES (2)..(4)..(35): Xaa is C or S

SEQ ID NO: 23781 - protein, 36 aa, Artificial Sequence; identical to SEQ ID NO: 2792
  GFR-binding peptide
  MOD_RES (32)..(33): Xaa is C or S

SEQ ID NO: 23782 - protein, 36 aa, Artificial Sequence
  GFR-binding peptide
  MOD_RES (2)..(34)..(35): Xaa is C or S
GXSRVVMNEYQKYIVNSSDDIYLVSIPSLKTPAXXP

SEQ ID NO: 23783 - protein, 43 aa, Artificial Sequence; identical to SEQ ID NO: 2795
  GFR-binding peptide
  MOD_RES (2)..(4)..(38)..(39): Xaa is C or S
  MOD_RES (16)..(17)..(18)..(19)..(20): Xaa is A or G
  MOD_RES (21)..(22)..(23)..(24): Xaa is A or G or is absent

SEQ ID NO: 23784 - protein, 36 aa, Artificial Sequence
  GFR-binding peptide
  MOD_RES (1)..(3)..(35)..(36): Xaa is C or S
XGXAEVVMDEYKFKVVNNAADLYLISIPELRAPVXX

SEQ ID NO: 23785 - protein, 39 aa, Artificial Sequence; identical to SEQ ID NO: 2798
  GFR-binding peptide
  MOD_RES (1)..(33)..(34): Xaa is C or S

SEQ ID NO: 23786 - protein, 42 aa, Artificial Sequence; identical to SEQ ID NO: 2799
  GFR-binding peptide
  MOD_RES (1)..(3)..(37)..(38): Xaa is C or S
  MOD_RES (15)..(16)..(17)..(18)..(19): Xaa is A or G
  MOD_RES (20)..(21)..(22)..(23): Xaa is A or G or is absent

SEQ ID NO: 23787 - protein, 40 aa, Artificial Sequence
  GFR-binding peptide
  MOD_RES (1)..(3)..(34)..(35): Xaa is C or S
XKXSKVIMEYQKYIKPTKGIIYLISIPSLDQSVXXPSASA

SEQ ID NO: 23788 - protein, 40 aa, Artificial Sequence; identical to SEQ ID NO: 2800
  GFR-binding peptide
  MOD_RES (2)..(4)..(37)..(38): Xaa is C or S
  MOD_RES (15)..(16)..(17)..(18)..(19): Xaa is A or G
  MOD_RES (20)..(21)..(22)..(23): Xaa is A or G or is absent

SEQ ID NO: 23789 - protein, 34 aa, Artificial Sequence; identical to SEQ ID NO: 2801
  GFR-binding peptide
  MOD_RES (2)..(34): Xaa is C or S

SEQ ID NO: 23790 - protein, 40 aa, Artificial Sequence
  GFR-binding peptide
  MOD_RES (2)..(34)..(35): Xaa is C or S
GXGEVVMDEYKFKVVKENEDLYLMSIPELETPVXXAKPIK

SEQ ID NO: 23791 - protein, 37 aa, Artificial Sequence; identical to SEQ ID NO: 2802
  GFR-binding peptide
  MOD_RES (33)..(34): Xaa is C or S

SEQ ID NO: 23792 - protein, 34 aa, Artificial Sequence; identical to SEQ ID NO: 2804
  GFR-binding peptide
  MOD_RES (1)..(33)..(34): Xaa is C or S

SEQ ID NO: 23793 - protein, 36 aa, Artificial Sequence; identical to SEQ ID NO: 2805
  GFR-binding peptide
  MOD_RES (2)..(33)..(34): Xaa is C or S

SEQ ID NO: 23794 - protein, 32 aa, Artificial Sequence
  GFR-binding peptide
  MOD_RES (31)..(32): Xaa is C or S
RVVMNEYKFKIVNSSDDLYLVSIPELKTPAXX

SEQ ID NO: 23795 - protein, 41 aa, Artificial Sequence; identical to SEQ ID NO: 2806
  GFR-binding peptide
  MOD_RES (1)..(3)..(37): Xaa is C or S
  MOD_RES (15)..(16)..(17)..(18)..(19): Xaa is A or G
  MOD_RES (20)..(21)..(22)..(23): Xaa is A or G or is absent

SEQ ID NO: 23796 - protein, 40 aa, Artificial Sequence
  GFR-binding peptide
  MOD_RES (2)..(4)..(36)..(37): Xaa is C or S
RXGXGEVVMEEYQKYVVKDYEDIYLMSIPSLETPVXXAKP

SEQ ID NO: 23797 - protein, 36 aa, Artificial Sequence; identical to SEQ ID NO: 2807
  GFR-binding peptide
  MOD_RES (1)..(33): Xaa is C or S

SEQ ID NO: 23798 - protein, 35 aa, Artificial Sequence
  GFR-binding peptide
  MOD_RES (33)..(34): Xaa is C or S
  MOD_RES (11)..(12)..(13)..(14)..(15): Xaa is A or G
  MOD_RES (16)..(17)..(18)..(19): Xaa is A or G or is absent
EVVMDEYKFKXXXXXXXXXLYLISIPELRAPVXXS

SEQ ID NO: 23799 - protein, 37 aa, Artificial Sequence
  GFR-binding peptide
  MOD_RES (2)..(35)..(36): Xaa is C or S
  MOD_RES (13)..(14)..(15)..(16)..(17): Xaa is A or G
  MOD_RES (18)..(19)..(20)..(21): Xaa is A or G or is absent
KXSKVVMEYQKYXXXXXXXXXIYLISIPSLDQPVXXP

SEQ ID NO: 23800 - protein, 36 aa, Artificial Sequence
  GFR-binding peptide
  MOD_RES (31)..(32): Xaa is C or S
EVVMDEYQKYVVKENEDIYLMSIPSLETPVXXAKPI

SEQ ID NO: 23801 - protein, 33 aa, Artificial Sequence
  GFR-binding peptide
  MOD_RES (32)..(33): Xaa is C or S
GEVVMDEYKFKVVKENEDLYLMSIPELETPVXX

SEQ ID NO: 23802 - protein, 37 aa, Artificial Sequence
  GFR-binding peptide
  MOD_RES (2)..(34)..(35): Xaa is C or S
GXESVAMGEYKFKYTVVGKDLYLISIPELKTPVXXAK

SEQ ID NO: 23803 - protein, 40 aa, Artificial Sequence; identical to SEQ ID NO: 2809
  GFR-binding peptide
  MOD_RES (1)..(35)..(36): Xaa is C or S
  MOD_RES (13)..(14)..(15)..(16)..(17): Xaa is A or G
  MOD_RES (18)..(19)..(20)..(21): Xaa is A or G or is absent

SEQ ID NO: 23804 - protein, 35 aa, Artificial Sequence; identical to SEQ ID NO: 2810
  GFR-binding peptide
  MOD_RES (32)..(33): Xaa is C or S

SEQ ID NO: 23805 - protein, 36 aa, Artificial Sequence; identical to SEQ ID NO: 2811
  GFR-binding peptide
  MOD_RES (2)..(36): Xaa is C or S
  MOD_RES (14)..(15)..(16)..(17)..(18): Xaa is A or G
  MOD_RES (19)..(20)..(21)..(22): Xaa is A or G or is absent

SEQ ID NO: 23806 - protein, 33 aa, Artificial Sequence; identical to SEQ ID NO: 2812
  GFR-binding peptide
  MOD_RES (1)..(1): Xaa is C or S
  MOD_RES (12)..(13)..(14)..(15)..(16): Xaa is A or G
  MOD_RES (17)..(18)..(19)..(20): Xaa is A or G or is absent

SEQ ID NO: 23807 - protein, 39 aa, Artificial Sequence
  GFR-binding peptide
  MOD_RES (1)..(35)..(36): Xaa is C or S
  MOD_RES (13)..(14)..(15)..(16)..(17): Xaa is A or G
  MOD_RES (18)..(19)..(20)..(21): Xaa is A or G or is absent
XAEVVMDRYKKLXXXXXXXXXFYLISIANLRAPVXXSAP

SEQ ID NO: 23808 - protein, 40 aa, Artificial Sequence
  GFR-binding peptide
  MOD_RES (2)..(36)..(37): Xaa is C or S
  MOD_RES (14)..(15)..(16)..(17)..(18): Xaa is A or G
  MOD_RES (19)..(20)..(21)..(22): Xaa is A or G or is absent
GXSRVVMNEYKFKXXXXXXXXXLYLVSIPELKTPAXXPKP

SEQ ID NO: 23809 - protein, 33 aa, Artificial Sequence; identical to SEQ ID NO: 2819
  GFR-binding peptide
  MOD_RES (32)..(33): Xaa is C or S

SEQ ID NO: 23810 - protein, 42 aa, Artificial Sequence
  GFR-binding peptide
  MOD_RES (1)..(3)..(36)..(37): Xaa is C or S
XGXEAVSMGEEYKFKTPVGMDDLYLVSIPELKTPVXXAKGVK

SEQ ID NO: 23811 - protein, 38 aa, Artificial Sequence
  GFR-binding peptide
  MOD_RES (1)..(34)..(35): Xaa is C or S
  MOD_RES (12)..(13)..(14)..(15)..(16): Xaa is A or G
  MOD_RES (17)..(18)..(19)..(20): Xaa is A or G or is absent
XSKVVMEYQKYXXXXXXXXXIYLISIPSLDQPVXXPSA

SEQ ID NO: 23812 - protein, 36 aa, Artificial Sequence; identical to SEQ ID NO: 2822
  GFR-binding peptide
  MOD_RES (1)..(3)..(34)..(35): Xaa is C or S

SEQ ID NO: 23813 - protein, 39 aa, Artificial Sequence; identical to SEQ ID NO: 2823
  GFR-binding peptide
  MOD_RES (33)..(34): Xaa is C or S
  MOD_RES (11)..(12)..(13)..(14)..(15): Xaa is A or G
  MOD_RES (16)..(17)..(18)..(19): Xaa is A or G or is absent

SEQ ID NO: 23814 - protein, 38 aa, Artificial Sequence
  GFR-binding peptide
  MOD_RES (33)..(34): Xaa is C or S
  MOD_RES (11)..(12)..(13)..(14)..(15): Xaa is A or G
  MOD_RES (16)..(17)..(18)..(19): Xaa is A or G or is absent
SVAMGEYQKYXXXXXXXXXIYLISIPSLKTPVXXAKSA

SEQ ID NO: 23815 - protein, 33 aa, Artificial Sequence; identical to SEQ ID NO: 2824
  GFR-binding peptide
  MOD_RES (31)..(32): Xaa is C or S

SEQ ID NO: 23816 - protein, 34 aa, Artificial Sequence
  GFR-binding peptide
  MOD_RES (1)..(32)..(33): Xaa is C or S
XSKVIMEYKFKIKPTKGILYLISIPELDQSVXXP

SEQ ID NO: 23817 - protein, 40 aa, Artificial Sequence; identical to SEQ ID NO: 2825
  GFR-binding peptide
  MOD_RES (1)..(35)..(36): Xaa is C or S
  MOD_RES (13)..(14)..(15)..(16)..(17): Xaa is A or G
  MOD_RES (18)..(19)..(20)..(21): Xaa is A or G or is absent

SEQ ID NO: 23818 - protein, 35 aa, Artificial Sequence
  GFR-binding peptide
  MOD_RES (1)..(33)..(34): Xaa is C or S
XARVVMNEYQKYIVNSSDDIYLVSIPSLQTPAXXP

SEQ ID NO: 23819 - protein, 32 aa, Artificial Sequence; identical to SEQ ID NO: 2828
  GFR-binding peptide
  MOD_RES (31)..(32): Xaa is C or S

SEQ ID NO: 23820 - protein, 38 aa, Artificial Sequence; identical to SEQ ID NO: 2832
  GFR-binding peptide
  MOD_RES (1)..(35)..(36): Xaa is C or S
  MOD_RES (13)..(14)..(15)..(16)..(17): Xaa is A or G
  MOD_RES (18)..(19)..(20)..(21): Xaa is A or G or is absent

SEQ ID NO: 23821 - protein, 38 aa, Artificial Sequence
  GFR-binding peptide
  MOD_RES (2)..(36)..(37): Xaa is C or S
  MOD_RES (14)..(15)..(16)..(17)..(18): Xaa is A or G
  MOD_RES (19)..(20)..(21)..(22): Xaa is A or G or is absent
GXGEVVMEEYQKYXXXXXXXXXIYLMSIPSLETPVXXA

SEQ ID NO: 23822 - protein, 40 aa, Artificial Sequence
  GFR-binding peptide
  MOD_RES (2)..(4)..(36)..(37): Xaa is C or S
HXGXSRVVMNEYQKYIVNSSDDIYLVSIPSLKTPAXXPKP

SEQ ID NO: 23823 - protein, 35 aa, Artificial Sequence
  GFR-binding peptide
  MOD_RES (1)..(33)..(34): Xaa is C or S
XGEVVMEEYKFKVVKDYEDLYLMSIPELETPVXXA

SEQ ID NO: 23824 - protein, 39 aa, Artificial Sequence; identical to SEQ ID NO: 2834
  GFR-binding peptide
  MOD_RES (2)..(4)..(36)..(37): Xaa is C or S

SEQ ID NO: 23825 - protein, 40 aa, Artificial Sequence
  GFR-binding peptide
  MOD_RES (34)..(34): Xaa is C or S
  MOD_RES (12)..(13)..(14)..(15)..(16): Xaa is A or G
  MOD_RES (17)..(18)..(19)..(20): Xaa is A or G or is absent
SRVVMNEYQKYXXXXXXXXXIYLVSIPSLKTPAXTPKTVH

SEQ ID NO: 23826 - protein, 34 aa, Artificial Sequence
  GFR-binding peptide
  MOD_RES (2)..(34): Xaa is C or S
GXESVAMGYHYKLYTVVGKDKYLISIPSLKTPVX

SEQ ID NO: 23827 - protein, 38 aa, Artificial Sequence
  GFR-binding peptide
  MOD_RES (2)..(35)..(36): Xaa is C or S
  MOD_RES (13)..(14)..(15)..(16)..(17): Xaa is A or G
  MOD_RES (18)..(19)..(20)..(21): Xaa is A or G or is absent
KXSKVIMEYKFKXXXXXXXXXLYLISIPELDQSVXXPS

SEQ ID NO: 23828 - protein, 43 aa, Artificial Sequence
  GFR-binding peptide
  MOD_RES (1)..(3)..(37)..(38): Xaa is C or S
  MOD_RES (15)..(16)..(17)..(18)..(19): Xaa is A or G
  MOD_RES (20)..(21)..(22)..(23): Xaa is A or G or is absent
XGXARVVMNEYQKYXXXXXXXXXIYLVSIPSLQTPAXXPKPVT

SEQ ID NO: 23829 - protein, 38 aa, Artificial Sequence; identical to SEQ ID NO: 2840
  GFR-binding peptide
  MOD_RES (1)..(3)..(36)..(37): Xaa is C or S

SEQ ID NO: 23830 - protein, 35 aa, Artificial Sequence
  GFR-binding peptide
  MOD_RES (34)..(35): Xaa is C or S
  MOD_RES (12)..(13)..(14)..(15)..(16): Xaa is A or G
  MOD_RES (17)..(18)..(19)..(20): Xaa is A or G or is absent
ESVAMGEYQKYXXXXXXXXXIYLISIPSLKTPVXX

SEQ ID NO: 23831 - protein, 34 aa, Artificial Sequence
  GFR-binding peptide
  MOD_RES (13)..(14)..(15)..(16)..(17): Xaa is A or G
  MOD_RES (18)..(19)..(20)..(21): Xaa is A or G or is absent
EAVSMGEEYQKYXXXXXXXXXIYLVSIPSLKTPV

SEQ ID NO: 23832 - protein, 39 aa, Artificial Sequence; identical to SEQ ID NO: 2841
  GFR-binding peptide
  MOD_RES (1)..(3)..(34)..(35): Xaa is C or S

SEQ ID NO: 23833 - protein, 33 aa, Artificial Sequence
  GFR-binding peptide
  MOD_RES (33)..(33): Xaa is C or S
  MOD_RES (11)..(12)..(13)..(14)..(15): Xaa is A or G
  MOD_RES (16)..(17)..(18)..(19): Xaa is A or G or is absent
SRVIMEYKFKXXXXXXXXXLYLISIPELAQPVX

SEQ ID NO: 23834 - protein, 34 aa, Artificial Sequence; identical to SEQ ID NO: 2843
  GFR-binding peptide
  MOD_RES (33)..(34): Xaa is C or S
  MOD_RES (11)..(12)..(13)..(14)..(15): Xaa is A or G
  MOD_RES (16)..(17)..(18)..(19): Xaa is A or G or is absent

SEQ ID NO: 23835 - protein, 34 aa, Artificial Sequence; identical to SEQ ID NO: 2844
  GFR-binding peptide
  MOD_RES (34)..(34): Xaa is C or S
  MOD_RES (12)..(13)..(14)..(15)..(16): Xaa is A or G
  MOD_RES (17)..(18)..(19)..(20): Xaa is A or G or is absent

SEQ ID NO: 23836 - protein, 37 aa, Artificial Sequence
  GFR-binding peptide
  MOD_RES (1)..(33)..(34): Xaa is C or S
XARVVMNEYKFKIVNSSDDLYLVSIPELQTPAXXPKP

SEQ ID NO: 23837 - protein, 38 aa, Artificial Sequence; identical to SEQ ID NO: 2845
  GFR-binding peptide
  MOD_RES (2)..(4)..(36): Xaa is C or S

SEQ ID NO: 23838 - protein, 34 aa, Artificial Sequence; identical to SEQ ID NO: 2849
  GFR-binding peptide
  MOD_RES (1)..(1): Xaa is C or S
  MOD_RES (13)..(14)..(15)..(16)..(17): Xaa is A or G
  MOD_RES (18)..(19)..(20)..(21): Xaa is A or G or is absent

SEQ ID NO: 23839 - protein, 40 aa, Artificial Sequence; identical to SEQ ID NO: 2850
  GFR-binding peptide
  MOD_RES (1)..(3)..(37)..(38): Xaa is C or S
  MOD_RES (15)..(16)..(17)..(18)..(19): Xaa is A or G
  MOD_RES (20)..(21)..(22)..(23): Xaa is A or G or is absent

SEQ ID NO: 23840 - protein, 39 aa, Artificial Sequence
  GFR-binding peptide
  MOD_RES (33)..(34): Xaa is C or S
  MOD_RES (11)..(12)..(13)..(14)..(15): Xaa is A or G
  MOD_RES (16)..(17)..(18)..(19): Xaa is A or G or is absent
EVVMDEYKFKXXXXXXXXXLYLMSIPELETPVXXAKPIK

SEQ ID NO: 23841 - protein, 35 aa, Artificial Sequence
  GFR-binding peptide
  MOD_RES (1)..(33)..(34): Xaa is C or S
XAEVVMDEYQKYVVNNAADIYLISIPSLRAPVXXS

SEQ ID NO: 23842 - protein, 43 aa, Artificial Sequence; identical to SEQ ID NO: 2853
  GFR-binding peptide
  MOD_RES (1)..(3)..(37)..(38): Xaa is C or S
  MOD_RES (15)..(16)..(17)..(18)..(19): Xaa is A or G
  MOD_RES (20)..(21)..(22)..(23): Xaa is A or G or is absent

SEQ ID NO: 23843 - protein, 37 aa, Artificial Sequence
  GFR-binding peptide
  MOD_RES (2)..(36)..(37): Xaa is C or S
  MOD_RES (14)..(15)..(16)..(17)..(18): Xaa is A or G
  MOD_RES (19)..(20)..(21)..(22): Xaa is A or G or is absent
GXARVVMNEYQKYXXXXXXXXXIYLVSIPSLQTPAXX

SEQ ID NO: 23844 - protein, 35 aa, Artificial Sequence
  GFR-binding peptide
  MOD_RES (1)..(33)..(34): Xaa is C or S
XESVAMGEYKFKYTVVGKDLYLISIPELKTPVXXA

SEQ ID NO: 23845 - protein, 36 aa, Artificial Sequence
  GFR-binding peptide
  MOD_RES (1)..(32)..(33): Xaa is C or S
XSRVIMEYQKYVKPKRGVIYLISIPSLAQPVXXPAA

SEQ ID NO: 23846 - protein, 38 aa, Artificial Sequence; identical to SEQ ID NO: 2855
  GFR-binding peptide
  MOD_RES (2)..(4)..(36)..(37): Xaa is C or S

SEQ ID NO: 23847 - protein, 41 aa, Artificial Sequence
  GFR-binding peptide
  MOD_RES (2)..(4)..(36)..(37): Xaa is C or S
RXGXESVAMGYHYKLYTVVGKDKYLISIPSLKTPVXXAKSA

SEQ ID NO: 23848 - protein, 40 aa, Artificial Sequence
  GFR-binding peptide
  MOD_RES (1)..(3)..(35)..(36): Xaa is C or S
XGXSRVVMNEYQKYIVNSSDDIYLVSIPSLKTPAXXPKPV

SEQ ID NO: 23849 - protein, 37 aa, Artificial Sequence
  GFR-binding peptide
  MOD_RES (2)..(35)..(36): Xaa is C or S
GXEAVSMGEEYQKYTPVGMDDIYLVSIPSLKTPVXXA

SEQ ID NO: 23850 - protein, 37 aa, Artificial Sequence
  GFR-binding peptide
  MOD_RES (32)..(33): Xaa is C or S
ARVVMNEYQKYIVNSSDDIYLVSIPSLQTPAXXPKPV

SEQ ID NO: 23851 - protein, 35 aa, Artificial Sequence
  GFR-binding peptide
  MOD_RES (1)..(33)..(34): Xaa is C or S
XARVVMNEYKFKIVNSSDDLYLVSIPELQTPAXXP

SEQ ID NO: 23852 - protein, 44 aa, Artificial Sequence; identical to SEQ ID NO: 2864
  GFR-binding peptide
  MOD_RES (2)..(4)..(38): Xaa is C or S
  MOD_RES (16)..(17)..(18)..(19)..(20): Xaa is A or G
  MOD_RES (21)..(22)..(23)..(24): Xaa is A or G or is absent

SEQ ID NO: 23853 - protein, 36 aa, Artificial Sequence; identical to SEQ ID NO: 2865
  GFR-binding peptide
  MOD_RES (2)..(35)..(36): Xaa is C or S
  MOD_RES (13)..(14)..(15)..(16)..(17): Xaa is A or G
  MOD_RES (18)..(19)..(20)..(21): Xaa is A or G or is absent

SEQ ID NO: 23854 - protein, 41 aa, Artificial Sequence
  GFR-binding peptide
  MOD_RES (2)..(4)..(36)..(37): Xaa is C or S
HXGXAKVVMNEYQKYIVNNSSDIYLVSIPSLKTPAXXAKPV

SEQ ID NO: 23855 - protein, 41 aa, Artificial Sequence
  GFR-binding peptide
  MOD_RES (1)..(3)..(36)..(37): Xaa is C or S
  MOD_RES (14)..(15)..(16)..(17)..(18): Xaa is A or G
  MOD_RES (19)..(20)..(21)..(22): Xaa is A or G or is absent
XKXSKVVMEYQKYXXXXXXXXXIYLISIPSLDQPVXXPSAS

SEQ ID NO: 23856 - protein, 31 aa, Artificial Sequence
  GFR-binding peptide
  MOD_RES (31)..(31): Xaa is C or S
RVVMNEYKFKIVNSSDDLYLVSIPELQTPAX

SEQ ID NO: 23857 - protein, 39 aa, Artificial Sequence; identical to SEQ ID NO: 2870
  GFR-binding peptide
  MOD_RES (1)..(34)..(35): Xaa is C or S
  MOD_RES (12)..(13)..(14)..(15)..(16): Xaa is A or G
  MOD_RES (17)..(18)..(19)..(20): Xaa is A or G or is absent

SEQ ID NO: 23858 - protein, 35 aa, Artificial Sequence; identical to SEQ ID NO: 2871
  GFR-binding peptide
  MOD_RES (1)..(34)..(35): Xaa is C or S
  MOD_RES (12)..(13)..(14)..(15)..(16): Xaa is A or G
  MOD_RES (17)..(18)..(19)..(20): Xaa is A or G or is absent

SEQ ID NO: 23859 - protein, 33 aa, Artificial Sequence; identical to SEQ ID NO: 2872
  GFR-binding peptide
  MOD_RES (33)..(33): Xaa is C or S
  MOD_RES (11)..(12)..(13)..(14)..(15): Xaa is A or G
  MOD_RES (16)..(17)..(18)..(19): Xaa is A or G or is absent

SEQ ID NO: 23860 - protein, 39 aa, Artificial Sequence
  GFR-binding peptide
  MOD_RES (2)..(37)..(38): Xaa is C or S
  MOD_RES (15)..(16)..(17)..(18)..(19): Xaa is A or G
  MOD_RES (20)..(21)..(22)..(23): Xaa is A or G or is absent
GXEAVSMGEEYQKYXXXXXXXXXIYLVSIPSLKTPVXXA

SEQ ID NO: 23861 - protein, 35 aa, Artificial Sequence
  GFR-binding peptide
  MOD_RES (33)..(34): Xaa is C or S
  MOD_RES (11)..(12)..(13)..(14)..(15): Xaa is A or G
  MOD_RES (16)..(17)..(18)..(19): Xaa is A or G or is absent
SKVIMEYQKYXXXXXXXXXIYLISIPSLDQSVXXP

SEQ ID NO: 23862 - protein, 34 aa, Artificial Sequence; identical to SEQ ID NO: 2875
  GFR-binding peptide
  MOD_RES (1)..(32)..(33): Xaa is C or S

SEQ ID NO: 23863 - protein, 37 aa, Artificial Sequence
  GFR-binding peptide
  MOD_RES (31)..(32): Xaa is C or S
RVVMNEYKFKIVNSSDDLYLVSIPELQTPAXXPKPVT

SEQ ID NO: 23864 - protein, 39 aa, Artificial Sequence
  GFR-binding peptide
  MOD_RES (1)..(33)..(34): Xaa is C or S
XESVAMGRYKKLYTVVGKDFYLISIANLKTPVXXAKSAK

SEQ ID NO: 23865 - protein, 34 aa, Artificial Sequence; identical to SEQ ID NO: 2876
  GFR-binding peptide
  MOD_RES (32)..(33): Xaa is C or S

SEQ ID NO: 23866 - protein, 42 aa, Artificial Sequence
  GFR-binding peptide
  MOD_RES (2)..(4)..(38)..(39): Xaa is C or S
  MOD_RES (16)..(17)..(18)..(19)..(20): Xaa is A or G
  MOD_RES (21)..(22)..(23)..(24): Xaa is A or G or is absent
RXGXAEVVMDRYKKLXXXXXXXXXFYLISIANLRAPVXXSAP

SEQ ID NO: 23867 - protein, 40 aa, Artificial Sequence
  GFR-binding peptide
  MOD_RES (34)..(35): Xaa is C or S
  MOD_RES (12)..(13)..(14)..(15)..(16): Xaa is A or G
  MOD_RES (17)..(18)..(19)..(20): Xaa is A or G or is absent
AKVVMNEYQKYXXXXXXXXXIYLVSIPSLKTPAXXAKPVA

SEQ ID NO: 23868 - protein, 36 aa, Artificial Sequence
  GFR-binding peptide
  MOD_RES (1)..(34)..(35): Xaa is C or S
  MOD_RES (12)..(13)..(14)..(15)..(16): Xaa is A or G
  MOD_RES (17)..(18)..(19)..(20): Xaa is A or G or is absent
XSKVIMEYQKYXXXXXXXXXIYLISIPSLDQSVXXP

SEQ ID NO: 23869 - protein, 33 aa, Artificial Sequence
  GFR-binding peptide
  MOD_RES (32)..(33): Xaa is C or S
SRVVMNEYKFKIVNSSDDLYLVSIPELKTPAXX

SEQ ID NO: 23870 - protein, 39 aa, Artificial Sequence
  GFR-binding peptide
  MOD_RES (1)..(3)..(34)..(35): Xaa is C or S
XKXSKVVMEYKFKVKPTRGVLYLISIPELDQPVXXPSAS

SEQ ID NO: 23871 - protein, 37 aa, Artificial Sequence; identical to SEQ ID NO: 2882
  GFR-binding peptide
  MOD_RES (2)..(33)..(34): Xaa is C or S

SEQ ID NO: 23872 - protein, 40 aa, Artificial Sequence
  GFR-binding peptide
  MOD_RES (1)..(34)..(35): Xaa is C or S
  MOD_RES (12)..(13)..(14)..(15)..(16): Xaa is A or G
  MOD_RES (17)..(18)..(19)..(20): Xaa is A or G or is absent
XSRVIMEYQKYXXXXXXXXXIYLISIPSLAQPVXXPAASA

SEQ ID NO: 23873 - protein, 37 aa, Artificial Sequence
  GFR-binding peptide
  MOD_RES (32)..(33): Xaa is C or S
GEVVMEEYQKYVVKDYEDIYLMSIPSLETPVXXAKPI

SEQ ID NO: 23874 - protein, 37 aa, Artificial Sequence
  GFR-binding peptide
  MOD_RES (31)..(32): Xaa is C or S
SKVVMEYKFKVKPTRGVLYLISIPELDQPVXXPSASA

SEQ ID NO: 23875 - protein, 33 aa, Artificial Sequence
  GFR-binding peptide
  MOD_RES (1)..(33): Xaa is C or S
XAEVVMDYHYKLVVNNAADKYLISIPSLRAPVX

SEQ ID NO: 23876 - protein, 36 aa, Artificial Sequence
  GFR-binding peptide
  MOD_RES (33)..(34): Xaa is C or S
  MOD_RES (11)..(12)..(13)..(14)..(15): Xaa is A or G
  MOD_RES (16)..(17)..(18)..(19): Xaa is A or G or is absent
EVVMDEYQKYXXXXXXXXXIYLMSIPSLETPVXXAK

SEQ ID NO: 23877 - protein, 40 aa, Artificial Sequence; identical to SEQ ID NO: 2887
  GFR-binding peptide
  MOD_RES (2)..(4)..(38)..(39): Xaa is C or S
  MOD_RES (16)..(17)..(18)..(19)..(20): Xaa is A or G
  MOD_RES (21)..(22)..(23)..(24): Xaa is A or G or is absent

SEQ ID NO: 23878 - protein, 34 aa, Artificial Sequence
  GFR-binding peptide
  MOD_RES (1)..(1): Xaa is C or S
  MOD_RES (13)..(14)..(15)..(16)..(17): Xaa is A or G
  MOD_RES (18)..(19)..(20)..(21): Xaa is A or G or is absent
XARVVMNEYKFKXXXXXXXXXLYLVSIPELQTPA

SEQ ID NO: 23879 - protein, 34 aa, Artificial Sequence; identical to SEQ ID NO: 2888
  GFR-binding peptide
  MOD_RES (1)..(3): Xaa is C or S

SEQ ID NO: 23880 - protein, 38 aa, Artificial Sequence
  GFR-binding peptide
  MOD_RES (2)..(4)..(36): Xaa is C or S
HXGXSRVVMNEYKFKIVNSSDDLYLVSIPELKTPAXTP

SEQ ID NO: 23881 - protein, 43 aa, Artificial Sequence
  GFR-binding peptide
  MOD_RES (2)..(4)..(38)..(39): Xaa is C or S
  MOD_RES (16)..(17)..(18)..(19)..(20): Xaa is A or G
  MOD_RES (21)..(22)..(23)..(24): Xaa is A or G or is absent
RXGXGEVVMEEYQKYXXXXXXXXXIYLMSIPSLETPVXXAKPI

SEQ ID NO: 23882 - protein, 37 aa, Artificial Sequence
  GFR-binding peptide
  MOD_RES (1)..(3)..(37): Xaa is C or S
  MOD_RES (15)..(16)..(17)..(18)..(19): Xaa is A or G
  MOD_RES (20)..(21)..(22)..(23): Xaa is A or G or is absent
XGXARVVMNEYKFKXXXXXXXXXLYLVSIPELQTPAX

SEQ ID NO: 23883 - protein, 41 aa, Artificial Sequence; identical to SEQ ID NO: 2890
  GFR-binding peptide
  MOD_RES (2)..(4)..(38)..(39): Xaa is C or S
  MOD_RES (16)..(17)..(18)..(19)..(20): Xaa is A or G
  MOD_RES (21)..(22)..(23)..(24): Xaa is A or G or is absent

SEQ ID NO: 23884 - protein, 37 aa, Artificial Sequence
  GFR-binding peptide
  MOD_RES (1)..(35)..(36): Xaa is C or S
  MOD_RES (13)..(14)..(15)..(16)..(17): Xaa is A or G
  MOD_RES (18)..(19)..(20)..(21): Xaa is A or G or is absent
XGEVVMDEYQKYXXXXXXXXXIYLMSIPSLETPVXXA

SEQ ID NO: 23885 - protein, 37 aa, Artificial Sequence
  GFR-binding peptide
  MOD_RES (1)..(3)..(34)..(35): Xaa is C or S
XKXSRVIMEYKFKVKPKRGVLYLISIPELAQPVXXPA

SEQ ID NO: 23886 - protein, 40 aa, Artificial Sequence
  GFR-binding peptide
  MOD_RES (34)..(35): Xaa is C or S
  MOD_RES (12)..(13)..(14)..(15)..(16): Xaa is A or G
  MOD_RES (17)..(18)..(19)..(20): Xaa is A or G or is absent
ESVAMGYHYKLXXXXXXXXXKYLISIPSLKTPVXXAKSAK

SEQ ID NO: 23887 - protein, 39 aa, Artificial Sequence; identical to SEQ ID NO: 2893
  GFR-binding peptide
  MOD_RES (2)..(35)..(36): Xaa is C or S
  MOD_RES (13)..(14)..(15)..(16)..(17): Xaa is A or G
  MOD_RES (18)..(19)..(20)..(21): Xaa is A or G or is absent

SEQ ID NO: 23888 - protein, 35 aa, Artificial Sequence
  GFR-binding peptide
  MOD_RES (32)..(33): Xaa is C or S
GEVVMEEYQKYVVKDYEDIYLMSIPSLETPVXXAK

SEQ ID NO: 23889 - protein, 37 aa, Artificial Sequence; identical to SEQ ID NO: 2894
  GFR-binding peptide
  MOD_RES (2)..(35)..(36): Xaa is C or S
  MOD_RES (13)..(14)..(15)..(16)..(17): Xaa is A or G
  MOD_RES (18)..(19)..(20)..(21): Xaa is A or G or is absent

SEQ ID NO: 23890 - protein, 39 aa, Artificial Sequence; identical to SEQ ID NO: 2895
  GFR-binding peptide
  MOD_RES (1)..(36)..(37): Xaa is C or S
  MOD_RES (14)..(15)..(16)..(17)..(18): Xaa is A or G
  MOD_RES (19)..(20)..(21)..(22): Xaa is A or G or is absent

SEQ ID NO: 23891 - protein, 40 aa, Artificial Sequence
  GFR-binding peptide
  MOD_RES (2)..(36)..(37): Xaa is C or S
  MOD_RES (14)..(15)..(16)..(17)..(18): Xaa is A or G
  MOD_RES (19)..(20)..(21)..(22): Xaa is A or G or is absent
GXESVAMGEYQKYXXXXXXXXXIYLISIPSLKTPVXXAKS

SEQ ID NO: 23892 - protein, 37 aa, Artificial Sequence; identical to SEQ ID NO: 2896
  GFR-binding peptide
  MOD_RES (2)..(4)..(35)..(36): Xaa is C or S

SEQ ID NO: 23893 - protein, 36 aa, Artificial Sequence; identical to SEQ ID NO: 2897
  GFR-binding peptide
  MOD_RES (1)..(35)..(36): Xaa is C or S
  MOD_RES (13)..(14)..(15)..(16)..(17): Xaa is A or G
  MOD_RES (18)..(19)..(20)..(21): Xaa is A or G or is absent

SEQ ID NO: 23894 - protein, 35 aa, Artificial Sequence
  GFR-binding peptide
  MOD_RES (32)..(33): Xaa is C or S
GEVVMDEYKFKVVKENEDLYLMSIPELETPVXXAK

SEQ ID NO: 23895 - protein, 39 aa, Artificial Sequence
  GFR-binding peptide
  MOD_RES (33)..(34): Xaa is C or S
  MOD_RES (11)..(12)..(13)..(14)..(15): Xaa is A or G
  MOD_RES (16)..(17)..(18)..(19): Xaa is A or G or is absent
SKVIMEYQKYXXXXXXXXXIYLISIPSLDQSVXXPSASA

SEQ ID NO: 23896 - protein, 35 aa, Artificial Sequence
  GFR-binding peptide
  MOD_RES (33)..(34): Xaa is C or S
  MOD_RES (11)..(12)..(13)..(14)..(15): Xaa is A or G
  MOD_RES (16)..(17)..(18)..(19): Xaa is A or G or is absent
EVVMDEYQKYXXXXXXXXXIYLMSIPSLETPVXXA

SEQ ID NO: 23897 - protein, 35 aa, Artificial Sequence; identical to SEQ ID NO: 2901
  GFR-binding peptide
  MOD_RES (1)..(35): Xaa is C or S
  MOD_RES (13)..(14)..(15)..(16)..(17): Xaa is A or G
  MOD_RES (18)..(19)..(20)..(21): Xaa is A or G or is absent

SEQ ID NO: 23898 - protein, 37 aa, Artificial Sequence
  GFR-binding peptide
  MOD_RES (1)..(3)..(37): Xaa is C or S
  MOD_RES (15)..(16)..(17)..(18)..(19): Xaa is A or G
  MOD_RES (20)..(21)..(22)..(23): Xaa is A or G or is absent
XGXARVVMNEYQKYXXXXXXXXXIYLVSIPSLQTPAX

SEQ ID NO: 23899 - protein, 36 aa, Artificial Sequence
  GFR-binding peptide
  MOD_RES (2)..(36): Xaa is C or S
  MOD_RES (14)..(15)..(16)..(17)..(18): Xaa is A or G
  MOD_RES (19)..(20)..(21)..(22): Xaa is A or G or is absent
GXAEVVMDYHYKLXXXXXXXXXKYLISIPSLRAPVX

SEQ ID NO: 23900 - protein, 41 aa, Artificial Sequence
  GFR-binding peptide
  MOD_RES (1)..(3)..(35)..(36): Xaa is C or S
XGXAEVVMDYHYKLVVNNAADKYLISIPSLRAPVXXSAPAA

SEQ ID NO: 23901 - protein, 39 aa, Artificial Sequence
  GFR-binding peptide
  MOD_RES (2)..(4)..(35)..(36): Xaa is C or S
SXKXSKVIMEYKFKIKPTKGILYLISIPELDQSVXXPSA

SEQ ID NO: 23902 - protein, 42 aa, Artificial Sequence
  GFR-binding peptide
  MOD_RES (2)..(4)..(38)..(39): Xaa is C or S
  MOD_RES (16)..(17)..(18)..(19)..(20): Xaa is A or G
  MOD_RES (21)..(22)..(23)..(24): Xaa is A or G or is absent
HXGXARVVMNEYKFKXXXXXXXXXLYLVSIPELQTPAXXPKP

SEQ ID NO: 23903 - protein, 38 aa, Artificial Sequence
  GFR-binding peptide
  MOD_RES (33)..(34): Xaa is C or S
  MOD_RES (11)..(12)..(13)..(14)..(15): Xaa is A or G
  MOD_RES (16)..(17)..(18)..(19): Xaa is A or G or is absent
SKVIMEYKFKXXXXXXXXXLYLISIPELDQSVXXPSAS

SEQ ID NO: 23904 - protein, 31 aa, Artificial Sequence; identical to SEQ ID NO: 2907
  GFR-binding peptide
  MOD_RES (31)..(31): Xaa is C or S

SEQ ID NO: 23905 - protein, 38 aa, Artificial Sequence; identical to SEQ ID NO: 2908
  GFR-binding peptide
  MOD_RES (2)..(4)..(36)..(37): Xaa is C or S

SEQ ID NO: 23906 - protein, 34 aa, Artificial Sequence
  GFR-binding peptide
  MOD_RES (1)..(33): Xaa is C or S
XSRVVMNEYKFKIVNSSDDLYLVSIPELKTPAXT

SEQ ID NO: 23907 - protein, 36 aa, Artificial Sequence; identical to SEQ ID NO: 2910
  GFR-binding peptide
  MOD_RES (2)..(4): Xaa is C or S
  MOD_RES (15)..(16)..(17)..(18)..(19): Xaa is A or G
  MOD_RES (20)..(21)..(22)..(23): Xaa is A or G or is absent

SEQ ID NO: 23908 - protein, 39 aa, Artificial Sequence
  GFR-binding peptide
  MOD_RES (2)..(36)..(37): Xaa is C or S
  MOD_RES (14)..(15)..(16)..(17)..(18): Xaa is A or G
  MOD_RES (19)..(20)..(21)..(22): Xaa is A or G or is absent
GXGEVVMEEYKFKXXXXXXXXXLYLMSIPELETPVXXAK

SEQ ID NO: 23909 - protein, 35 aa, Artificial Sequence
  GFR-binding peptide
  MOD_RES (32)..(33): Xaa is C or S
GEVVMEEYKFKVVKDYEDLYLMSIPELETPVXXAK

SEQ ID NO: 23910 - protein, 42 aa, Artificial Sequence; identical to SEQ ID NO: 2913
  GFR-binding peptide
  MOD_RES (2)..(4)..(37)..(38): Xaa is C or S
  MOD_RES (15)..(16)..(17)..(18)..(19): Xaa is A or G
  MOD_RES (20)..(21)..(22)..(23): Xaa is A or G or is absent

SEQ ID NO: 23911 - protein, 38 aa, Artificial Sequence
  GFR-binding peptide
  MOD_RES (1)..(33)..(34): Xaa is C or S
XAEVVMDYHYKLVVNNAADKYLISIPSLRAPVXXSAPA

SEQ ID NO: 23912 - protein, 39 aa, Artificial Sequence
  GFR-binding peptide
  MOD_RES (2)..(33)..(34): Xaa is C or S
KXSRVIMEYQKYVKPKRGVIYLISIPSLAQPVXXPAASA

SEQ ID NO: 23913 - protein, 35 aa, Artificial Sequence
  GFR-binding peptide
  MOD_RES (32)..(33): Xaa is C or S
GEVVMDEYQKYVVKENEDIYLMSIPSLETPVXXAK

SEQ ID NO: 23914 - protein, 33 aa, Artificial Sequence; identical to SEQ ID NO: 2917
  GFR-binding peptide
  MOD_RES (33)..(33): Xaa is C or S

SEQ ID NO: 23915 - protein, 39 aa, Artificial Sequence
  GFR-binding peptide
  MOD_RES (2)..(34)..(35): Xaa is C or S
GXAEVVMDEYKFKVVNNAADLYLISIPELRAPVXXSAPA

SEQ ID NO: 23916 - protein, 35 aa, Artificial Sequence; identical to SEQ ID NO: 2918
  GFR-binding peptide
  MOD_RES (33)..(34): Xaa is C or S
  MOD_RES (11)..(12)..(13)..(14)..(15): Xaa is A or G
  MOD_RES (16)..(17)..(18)..(19): Xaa is A or G or is absent

SEQ ID NO: 23917 - protein, 37 aa, Artificial Sequence
  GFR-binding peptide
  MOD_RES (1)..(35)..(36): Xaa is C or S
  MOD_RES (13)..(14)..(15)..(16)..(17): Xaa is A or G
  MOD_RES (18)..(19)..(20)..(21): Xaa is A or G or is absent
XSRVVMNEYQKYXXXXXXXXXIYLVSIPSLKTPAXXP

SEQ ID NO: 23918 - protein, 37 aa, Artificial Sequence; identical to SEQ ID NO: 2920
  GFR-binding peptide
  MOD_RES (32)..(33): Xaa is C or S

SEQ ID NO: 23919 - protein, 40 aa, Artificial Sequence
  GFR-binding peptide
  MOD_RES (2)..(4)..(36)..(37): Xaa is C or S
RXGXESVAMGYHYKLYTVVGKDKYLISIPSLKTPVXXAKS

SEQ ID NO: 23920 - protein, 39 aa, Artificial Sequence; identical to SEQ ID NO: 2922
  GFR-binding peptide
  MOD_RES (2)..(4)..(38)..(39): Xaa is C or S
  MOD_RES (16)..(17)..(18)..(19)..(20): Xaa is A or G
  MOD_RES (21)..(22)..(23)..(24): Xaa is A or G or is absent

SEQ ID NO: 23921 - protein, 39 aa, Artificial Sequence
  GFR-binding peptide
  MOD_RES (34)..(35): Xaa is C or S
  MOD_RES (12)..(13)..(14)..(15)..(16): Xaa is A or G
  MOD_RES (17)..(18)..(19)..(20): Xaa is A or G or is absent
AEVVMDRYKKLXXXXXXXXXFYLISIANLRAPVXXSAPA

SEQ ID NO: 23922 - protein, 37 aa, Artificial Sequence
  GFR-binding peptide
  MOD_RES (2)..(4): Xaa is C or S
  MOD_RES (16)..(17)..(18)..(19)..(20): Xaa is A or G
  MOD_RES (21)..(22)..(23)..(24): Xaa is A or G or is absent
HXGXAKVVMNEYQKYXXXXXXXXXIYLVSIPSLKTPA

SEQ ID NO: 23923 - protein, 37 aa, Artificial Sequence
  GFR-binding peptide
  MOD_RES (2)..(34)..(35): Xaa is C or S
GXGEVVMEEYQKYVVKDYEDIYLMSIPSLETPVXXAK

SEQ ID NO: 23924 - protein, 40 aa, Artificial Sequence; identical to SEQ ID NO: 2924
  GFR-binding peptide
  MOD_RES (2)..(4)..(37)..(38): Xaa is C or S
  MOD_RES (15)..(16)..(17)..(18)..(19): Xaa is A or G
  MOD_RES (20)..(21)..(22)..(23): Xaa is A or G or is absent

SEQ ID NO: 23925 - protein, 35 aa, Artificial Sequence
  GFR-binding peptide
  MOD_RES (1)..(3)..(35): Xaa is C or S
XGXGEVVMEEYQKYVVKDYEDIYLMSIPSLETPVX

SEQ ID NO: 23926 - protein, 39 aa, Artificial Sequence; identical to SEQ ID NO: 2926
  GFR-binding peptide
  MOD_RES (2)..(36)..(37): Xaa is C or S
  MOD_RES (14)..(15)..(16)..(17)..(18): Xaa is A or G
  MOD_RES (19)..(20)..(21)..(22): Xaa is A or G or is absent

SEQ ID NO: 23927 - protein, 35 aa, Artificial Sequence
  GFR-binding peptide
  MOD_RES (31)..(32): Xaa is C or S
RVVMNEYQKYIVNSSDDIYLVSIPSLQTPAXXPKP

SEQ ID NO: 23928 - protein, 36 aa, Artificial Sequence
  GFR-binding peptide
  MOD_RES (1)..(3)..(35)..(36): Xaa is C or S
XGXAEVVMDRYKKLVVNNAADFYLISIANLRAPVXX

SEQ ID NO: 23929 - protein, 40 aa, Artificial Sequence; identical to SEQ ID NO: 2928
  GFR-binding peptide
  MOD_RES (2)..(4)..(35)..(36): Xaa is C or S

SEQ ID NO: 23930 - protein, 36 aa, Artificial Sequence
  GFR-binding peptide
  MOD_RES (2)..(4)..(35)..(36): Xaa is C or S
SXKXSKVIMEYQKYIKPTKGIIYLISIPSLDQSVXX

SEQ ID NO: 23931 - protein, 41 aa, Artificial Sequence
  GFR-binding peptide
  MOD_RES (2)..(36)..(37): Xaa is C or S
  MOD_RES (14)..(15)..(16)..(17)..(18): Xaa is A or G
  MOD_RES (19)..(20)..(21)..(22): Xaa is A or G or is absent
GXESVAMGEYKFKXXXXXXXXXLYLISIPELKTPVXXAKSA

SEQ ID NO: 23932 - protein, 39 aa, Artificial Sequence
  GFR-binding peptide
  MOD_RES (1)..(35): Xaa is C or S
  MOD_RES (13)..(14)..(15)..(16)..(17): Xaa is A or G
  MOD_RES (18)..(19)..(20)..(21): Xaa is A or G or is absent
XSRVVMNEYQKYXXXXXXXXXIYLVSIPSLKTPAXTPKT

SEQ ID NO: 23933 - protein, 37 aa, Artificial Sequence; identical to SEQ ID NO: 2931
  GFR-binding peptide
  MOD_RES (2)..(4): Xaa is C or S
  MOD_RES (16)..(17)..(18)..(19)..(20): Xaa is A or G
  MOD_RES (21)..(22)..(23)..(24): Xaa is A or G or is absent

SEQ ID NO: 23934 - protein, 36 aa, Artificial Sequence
  GFR-binding peptide
  MOD_RES (1)..(33)..(34): Xaa is C or S
XAEVVMDEYQKYVVNNAADIYLISIPSLRAPVXXSA

SEQ ID NO: 23935 - protein, 36 aa, Artificial Sequence
  GFR-binding peptide
  MOD_RES (1)..(3)..(35)..(36): Xaa is C or S
XGXSRVVMNEYQKYIVNSSDDIYLVSIPSLKTPAXX

SEQ ID NO: 23936 - protein, 37 aa, Artificial Sequence
  GFR-binding peptide
  MOD_RES (2)..(4)..(35)..(36): Xaa is C or S
SXKXSKVVMEYQKYVKPTRGVIYLISIPSLDQPVXXP

SEQ ID NO: 23937 - protein, 39 aa, Artificial Sequence
  GFR-binding peptide
  MOD_RES (1)..(3)..(37)..(38): Xaa is C or S
  MOD_RES (15)..(16)..(17)..(18)..(19): Xaa is A or G
  MOD_RES (20)..(21)..(22)..(23): Xaa is A or G or is absent
XGXESVAMGEYQKYXXXXXXXXXIYLISIPSLKTPVXXA

SEQ ID NO: 23938 - protein, 44 aa, Artificial Sequence
  GFR-binding peptide
  MOD_RES (2)..(4)..(38)..(39): Xaa is C or S
  MOD_RES (16)..(17)..(18)..(19)..(20): Xaa is A or G
  MOD_RES (21)..(22)..(23)..(24): Xaa is A or G or is absent
RXGXGEVVMDEYQKYXXXXXXXXXIYLMSIPSLETPVXXAKPIK

SEQ ID NO: 23939 - protein, 36 aa, Artificial Sequence; identical to SEQ ID NO: 2936
  GFR-binding peptide
  MOD_RES (34)..(35): Xaa is C or S
  MOD_RES (12)..(13)..(14)..(15)..(16): Xaa is A or G
  MOD_RES (17)..(18)..(19)..(20): Xaa is A or G or is absent

SEQ ID NO: 23940 - protein, 37 aa, Artificial Sequence; identical to SEQ ID NO: 2938
  GFR-binding peptide
  MOD_RES (1)..(33)..(34): Xaa is C or S

SEQ ID NO: 23941 - protein, 38 aa, Artificial Sequence; identical to SEQ ID NO: 2940
  GFR-binding peptide
  MOD_RES (2)..(34)..(35): Xaa is C or S

SEQ ID NO: 23942 - protein, 38 aa, Artificial Sequence; identical to SEQ ID NO: 2941
  GFR-binding peptide
  MOD_RES (34)..(35): Xaa is C or S
  MOD_RES (12)..(13)..(14)..(15)..(16): Xaa is A or G
  MOD_RES (17)..(18)..(19)..(20): Xaa is A or G or is absent

SEQ ID NO: 23943 - protein, 40 aa, Artificial Sequence; identical to SEQ ID NO: 2942
  GFR-binding peptide
  MOD_RES (2)..(4)..(38)..(39): Xaa is C or S
  MOD_RES (16)..(17)..(18)..(19)..(20): Xaa is A or G
  MOD_RES (21)..(22)..(23)..(24): Xaa is A or G or is absent

SEQ ID NO: 23944 - protein, 37 aa, Artificial Sequence
  GFR-binding peptide
  MOD_RES (33)..(33): Xaa is C or S
  MOD_RES (11)..(12)..(13)..(14)..(15): Xaa is A or G
  MOD_RES (16)..(17)..(18)..(19): Xaa is A or G or is absent
RVVMNEYQKYXXXXXXXXXIYLVSIPSLKTPAXTPKT

SEQ ID NO: 23945 - protein, 34 aa, Artificial Sequence
  GFR-binding peptide
  MOD_RES (2)..(2): Xaa is C or S
  MOD_RES (13)..(14)..(15)..(16)..(17): Xaa is A or G
  MOD_RES (18)..(19)..(20)..(21): Xaa is A or G or is absent
KXSKVVMEYQKYXXXXXXXXXIYLISIPSLDQPV

SEQ ID NO: 23946 - protein, 37 aa, Artificial Sequence
  GFR-binding peptide
  MOD_RES (1)..(3)..(35)..(36): Xaa is C or S
XGXGEVVMDEYQKYVVKENEDIYLMSIPSLETPVXXA

SEQ ID NO: 23947 - protein, 38 aa, Artificial Sequence; identical to SEQ ID NO: 2945
  GFR-binding peptide
  MOD_RES (2)..(4): Xaa is C or S
  MOD_RES (17)..(18)..(19)..(20)..(21): Xaa is A or G
  MOD_RES (22)..(23)..(24)..(25): Xaa is A or G or is absent

SEQ ID NO: 23948 - protein, 34 aa, Artificial Sequence; identical to SEQ ID NO: 2947
  GFR-binding peptide
  MOD_RES (1)..(1): Xaa is C or S
  MOD_RES (13)..(14)..(15)..(16)..(17): Xaa is A or G
  MOD_RES (18)..(19)..(20)..(21): Xaa is A or G or is absent

SEQ ID NO: 23949 - protein, 42 aa, Artificial Sequence
  GFR-binding peptide
  MOD_RES (1)..(36)..(37): Xaa is C or S
  MOD_RES (14)..(15)..(16)..(17)..(18): Xaa is A or G
  MOD_RES (19)..(20)..(21)..(22): Xaa is A or G or is absent
XEAVSMGEEYQKYXXXXXXXXXIYLVSIPSLKTPVXXAKGVK

SEQ ID NO: 23950 - protein, 39 aa, Artificial Sequence
  GFR-binding peptide
  MOD_RES (1)..(3)..(36)..(37): Xaa is C or S
  MOD_RES (14)..(15)..(16)..(17)..(18): Xaa is A or G
  MOD_RES (19)..(20)..(21)..(22): Xaa is A or G or is absent
XKXSKVVMEYKFKXXXXXXXXXLYLISIPELDQPVXXPS

SEQ ID NO: 23951 - protein, 34 aa, Artificial Sequence; identical to SEQ ID NO: 2948
  GFR-binding peptide
  MOD_RES (2)..(4): Xaa is C or S

SEQ ID NO: 23952 - protein, 39 aa, Artificial Sequence
  GFR-binding peptide
  MOD_RES (1)..(3)..(38)..(39): Xaa is C or S
  MOD_RES (16)..(17)..(18)..(19)..(20): Xaa is A or G
  MOD_RES (21)..(22)..(23)..(24): Xaa is A or G or is absent
XGXEAVSMGEEYQKYXXXXXXXXXIYLVSIPSLKTPVXX

SEQ ID NO: 23953 - protein, 43 aa, Artificial Sequence
  GFR-binding peptide
  MOD_RES (2)..(4)..(37)..(38): Xaa is C or S
  MOD_RES (15)..(16)..(17)..(18)..(19): Xaa is A or G
  MOD_RES (20)..(21)..(22)..(23): Xaa is A or G or is absent
SXKXSRVIMEYQKYXXXXXXXXXIYLISIPSLAQPVXXPAASA

SEQ ID NO: 23954 - protein, 38 aa, Artificial Sequence; identical to SEQ ID NO: 2952
  GFR-binding peptide
  MOD_RES (1)..(34)..(35): Xaa is C or S
  MOD_RES (12)..(13)..(14)..(15)..(16): Xaa is A or G
  MOD_RES (17)..(18)..(19)..(20): Xaa is A or G or is absent

SEQ ID NO: 23955 - protein, 32 aa, Artificial Sequence; identical to SEQ ID NO: 2953
  GFR-binding peptide
  MOD_RES (11)..(12)..(13)..(14)..(15): Xaa is A or G
  MOD_RES (16)..(17)..(18)..(19): Xaa is A or G or is absent

SEQ ID NO: 23956 - protein, 40 aa, Artificial Sequence; identical to SEQ ID NO: 2955
  GFR-binding peptide
  MOD_RES (1)..(34)..(35): Xaa is C or S
  MOD_RES (12)..(13)..(14)..(15)..(16): Xaa is A or G
  MOD_RES (17)..(18)..(19)..(20): Xaa is A or G or is absent

SEQ ID NO: 23957 - protein, 37 aa, Artificial Sequence
  GFR-binding peptide
  MOD_RES (1)..(33)..(34): Xaa is C or S
XAEVVMDYHYKLVVNNAADKYLISIPSLRAPVXXSAP

SEQ ID NO: 23958 - protein, 41 aa, Artificial Sequence
  GFR-binding peptide
  MOD_RES (2)..(4)..(37)..(38): Xaa is C or S
  MOD_RES (15)..(16)..(17)..(18)..(19): Xaa is A or G
  MOD_RES (20)..(21)..(22)..(23): Xaa is A or G or is absent
SXKXSKVVMEYQKYXXXXXXXXXIYLISIPSLDQPVXXPSA

SEQ ID NO: 23959 - protein, 33 aa, Artificial Sequence
  GFR-binding peptide
  MOD_RES (32)..(33): Xaa is C or S
GEVVMDEYQKYVVKENEDIYLMSIPSLETPVXX

SEQ ID NO: 23960 - protein, 38 aa, Artificial Sequence
  GFR-binding peptide
  MOD_RES (1)..(3)..(35): Xaa is C or S
XGXSRVVMNEYKFKIVNSSDDLYLVSIPELKTPAXTPK

SEQ ID NO: 23961 - protein, 38 aa, Artificial Sequence
  GFR-binding peptide
  MOD_RES (1)..(35)..(36): Xaa is C or S
  MOD_RES (13)..(14)..(15)..(16)..(17): Xaa is A or G
  MOD_RES (18)..(19)..(20)..(21): Xaa is A or G or is absent
XAEVVMDEYQKYXXXXXXXXXIYLISIPSLRAPVXXSA

SEQ ID NO: 23962 - protein, 35 aa, Artificial Sequence; identical to SEQ ID NO: 2961
  GFR-binding peptide
  MOD_RES (31)..(32): Xaa is C or S

SEQ ID NO: 23963 - protein, 37 aa, Artificial Sequence; identical to SEQ ID NO: 2963
  GFR-binding peptide
  MOD_RES (1)..(35): Xaa is C or S
  MOD_RES (13)..(14)..(15)..(16)..(17): Xaa is A or G
  MOD_RES (18)..(19)..(20)..(21): Xaa is A or G or is absent

SEQ ID NO: 23964 - protein, 34 aa, Artificial Sequence
  GFR-binding peptide
  MOD_RES (1)..(32)..(33): Xaa is C or S
XSKVVMEYQKYVKPTRGVIYLISIPSLDQPVXXP

SEQ ID NO: 23965 - protein, 32 aa, Artificial Sequence; identical to SEQ ID NO: 2969
  GFR-binding peptide
  MOD_RES (11)..(12)..(13)..(14)..(15): Xaa is A or G
  MOD_RES (16)..(17)..(18)..(19): Xaa is A or G or is absent

SEQ ID NO: 23966 - protein, 33 aa, Artificial Sequence
  GFR-binding peptide
  MOD_RES (2)..(2): Xaa is C or S
GXAKVVMNEYKFKIVNNSSDLYLVSIPELKTPA

SEQ ID NO: 23967 - protein, 39 aa, Artificial Sequence
  GFR-binding peptide
  MOD_RES (34)..(35): Xaa is C or S
  MOD_RES (12)..(13)..(14)..(15)..(16): Xaa is A or G
  MOD_RES (17)..(18)..(19)..(20): Xaa is A or G or is absent
GEVVMEEYQKYXXXXXXXXXIYLMSIPSLETPVXXAKPI

SEQ ID NO: 23968 - protein, 36 aa, Artificial Sequence
  GFR-binding peptide
  MOD_RES (1)..(3)..(36): Xaa is C or S
  MOD_RES (14)..(15)..(16)..(17)..(18): Xaa is A or G
  MOD_RES (19)..(20)..(21)..(22): Xaa is A or G or is absent
XKXSKVIMEYQKYXXXXXXXXXIYLISIPSLDQSVX

SEQ ID NO: 23969 - protein, 32 aa, Artificial Sequence; identical to SEQ ID NO: 2973
  GFR-binding peptide
  MOD_RES (31)..(32): Xaa is C or S

SEQ ID NO: 23970 - protein, 39 aa, Artificial Sequence
  GFR-binding peptide
  MOD_RES (1)..(3)..(37)..(38): Xaa is C or S
  MOD_RES (15)..(16)..(17)..(18)..(19): Xaa is A or G
  MOD_RES (20)..(21)..(22)..(23): Xaa is A or G or is absent
XGXARVVMNEYQKYXXXXXXXXXIYLVSIPSLQTPAXXP

SEQ ID NO: 23971 - protein, 36 aa, Artificial Sequence
  GFR-binding peptide
  MOD_RES (34)..(35): Xaa is C or S
  MOD_RES (12)..(13)..(14)..(15)..(16): Xaa is A or G
  MOD_RES (17)..(18)..(19)..(20): Xaa is A or G or is absent
AEVVMDRYKKLXXXXXXXXXFYLISIANLRAPVXXS

SEQ ID NO: 23972 - protein, 42 aa, Artificial Sequence
  GFR-binding peptide
  MOD_RES (1)..(3)..(38)..(39): Xaa is C or S
  MOD_RES (16)..(17)..(18)..(19)..(20): Xaa is A or G
  MOD_RES (21)..(22)..(23)..(24): Xaa is A or G or is absent
XGXEAVSMGEEYQKYXXXXXXXXXIYLVSIPSLKTPVXXAKG

SEQ ID NO: 23973 - protein, 40 aa, Artificial Sequence; identical to SEQ ID NO: 2974
  GFR-binding peptide
  MOD_RES (2)..(34)..(35): Xaa is C or S

SEQ ID NO: 23974 - protein, 37 aa, Artificial Sequence
  GFR-binding peptide
  MOD_RES (1)..(3)..(36)..(37): Xaa is C or S
  MOD_RES (14)..(15)..(16)..(17)..(18): Xaa is A or G
  MOD_RES (19)..(20)..(21)..(22): Xaa is A or G or is absent
XKXSRVIMEYKFKXXXXXXXXXLYLISIPELAQPVXX

SEQ ID NO: 23975 - protein, 33 aa, Artificial Sequence; identical to SEQ ID NO: 2975
  GFR-binding peptide
  MOD_RES (33)..(33): Xaa is C or S
  MOD_RES (11)..(12)..(13)..(14)..(15): Xaa is A or G
  MOD_RES (16)..(17)..(18)..(19): Xaa is A or G or is absent

SEQ ID NO: 23976 - protein, 35 aa, Artificial Sequence; identical to SEQ ID NO: 2977
  GFR-binding peptide
  MOD_RES (33)..(34): Xaa is C or S

SEQ ID NO: 23977 - protein, 36 aa, Artificial Sequence; identical to SEQ ID NO: 2978
  GFR-binding peptide
  MOD_RES (33)..(34): Xaa is C or S
  MOD_RES (11)..(12)..(13)..(14)..(15): Xaa is A or G
  MOD_RES (16)..(17)..(18)..(19): Xaa is A or G or is absent

SEQ ID NO: 23978 - protein, 39 aa, Artificial Sequence
  GFR-binding peptide
  MOD_RES (1)..(3)..(37)..(38): Xaa is C or S
  MOD_RES (15)..(16)..(17)..(18)..(19): Xaa is A or G
  MOD_RES (20)..(21)..(22)..(23): Xaa is A or G or is absent
XGXESVAMGEYKFKXXXXXXXXXLYLISIPELKTPVXXA

SEQ ID NO: 23979 - protein, 40 aa, Artificial Sequence; identical to SEQ ID NO: 2980
  GFR-binding peptide
  MOD_RES (34)..(35): Xaa is C or S
  MOD_RES (12)..(13)..(14)..(15)..(16): Xaa is A or G
  MOD_RES (17)..(18)..(19)..(20): Xaa is A or G or is absent

SEQ ID NO: 23980 - protein, 37 aa, Artificial Sequence
  GFR-binding peptide
  MOD_RES (32)..(33): Xaa is C or S
SRVVMNEYQKYIVNSSDDIYLVSIPSLKTPAXXPKPV

SEQ ID NO: 23981 - protein, 37 aa, Artificial Sequence
  GFR-binding peptide
  MOD_RES (32)..(33): Xaa is C or S
ARVVMNEYKFKIVNSSDDLYLVSIPELQTPAXXPKPV

SEQ ID NO: 23982 - protein, 40 aa, Artificial Sequence; identical to SEQ ID NO: 2983
  GFR-binding peptide
  MOD_RES (1)..(3)..(34)..(35): Xaa is C or S

SEQ ID NO: 23983 - protein, 34 aa, Artificial Sequence; identical to SEQ ID NO: 2985
  GFR-binding peptide
  MOD_RES (2)..(2): Xaa is C or S

SEQ ID NO: 23984 - protein, 33 aa, Artificial Sequence
  GFR-binding peptide
  MOD_RES (1)..(32)..(33): Xaa is C or S
XSKVIMEYQKYIKPTKGIIYLISIPSLDQSVXX

SEQ ID NO: 23985 - protein, 30 aa, Artificial Sequence; identical to SEQ ID NO: 2986
  GFR-binding peptide

SEQ ID NO: 23986 - protein, 36 aa, Artificial Sequence; identical to SEQ ID NO: 2988
  GFR-binding peptide
  MOD_RES (1)..(32)..(33): Xaa is C or S

SEQ ID NO: 23987 - protein, 40 aa, Artificial Sequence; identical to SEQ ID NO: 2989
  GFR-binding peptide
  MOD_RES (1)..(35)..(36): Xaa is C or S
  MOD_RES (13)..(14)..(15)..(16)..(17): Xaa is A or G
  MOD_RES (18)..(19)..(20)..(21): Xaa is A or G or is absent

SEQ ID NO: 23988 - protein, 37 aa, Artificial Sequence; identical to SEQ ID NO: 2990
  GFR-binding peptide
  MOD_RES (2)..(4): Xaa is C or S
  MOD_RES (16)..(17)..(18)..(19)..(20): Xaa is A or G
  MOD_RES (21)..(22)..(23)..(24): Xaa is A or G or is absent

SEQ ID NO: 23989 - protein, 32 aa, Artificial Sequence
  GFR-binding peptide
  MOD_RES (2)..(2): Xaa is C or S
KXSRVIMEYQKYVKPKRGVIYLISIPSLAQPV

SEQ ID NO: 23990 - protein, 31 aa, Artificial Sequence
  GFR-binding peptide
  MOD_RES (31)..(31): Xaa is C or S
RVVMNEYQKYIVNSSDDIYLVSIPSLQTPAX

SEQ ID NO: 23991 - protein, 40 aa, Artificial Sequence
  GFR-binding peptide
  MOD_RES (2)..(34)..(35): Xaa is C or S
GXARVVMNEYQKYIVNSSDDIYLVSIPSLQTPAXXPKPVT

SEQ ID NO: 23992 - protein, 36 aa, Artificial Sequence
  GFR-binding peptide
  MOD_RES (33)..(34): Xaa is C or S
EAVSMGEEYKFKTPVGMDDLYLVSIPELKTPVXXAK

SEQ ID NO: 23993 - protein, 33 aa, Artificial Sequence; identical to SEQ ID NO: 2995
  GFR-binding peptide
  MOD_RES (1)..(32)..(33): Xaa is C or S

SEQ ID NO: 23994 - protein, 38 aa, Artificial Sequence; identical to SEQ ID NO: 2996
  GFR-binding peptide
  MOD_RES (33)..(34): Xaa is C or S
  MOD_RES (11)..(12)..(13)..(14)..(15): Xaa is A or G
  MOD_RES (16)..(17)..(18)..(19): Xaa is A or G or is absent

SEQ ID NO: 23995 - protein, 35 aa, Artificial Sequence
  GFR-binding peptide
  MOD_RES (33)..(34): Xaa is C or S
  MOD_RES (11)..(12)..(13)..(14)..(15): Xaa is A or G
  MOD_RES (16)..(17)..(18)..(19): Xaa is A or G or is absent
EVVMDYHYKLXXXXXXXXXKYLISIPSLRAPVXXS

SEQ ID NO: 23996 - protein, 37 aa, Artificial Sequence
  GFR-binding peptide
  MOD_RES (2)..(34)..(35): Xaa is C or S
GXESVAMGRYKKLYTVVGKDFYLISIANLKTPVXXAK

SEQ ID NO: 23997 - protein, 41 aa, Artificial Sequence
  GFR-binding peptide
  MOD_RES (2)..(4)..(36)..(37): Xaa is C or S
HXGXARVVMNEYKFKIVNSSDDLYLVSIPELQTPAXXPKPV

SEQ ID NO: 23998 - protein, 37 aa, Artificial Sequence; identical to SEQ ID NO: 3002
  GFR-binding peptide
  MOD_RES (2)..(34)..(35): Xaa is C or S

SEQ ID NO: 23999 - protein, 39 aa, Artificial Sequence; identical to SEQ ID NO: 3003
  GFR-binding peptide
  MOD_RES (2)..(34)..(35): Xaa is C or S

SEQ ID NO: 24000 - protein, 35 aa, Artificial Sequence; identical to SEQ ID NO: 3004
  GFR-binding peptide
  MOD_RES (1)..(34)..(35): Xaa is C or S
  MOD_RES (12)..(13)..(14)..(15)..(16): Xaa is A or G
  MOD_RES (17)..(18)..(19)..(20): Xaa is A or G or is absent

SEQ ID NO: 24001 - protein, 42 aa, Artificial Sequence
  GFR-binding peptide
  MOD_RES (2)..(4)..(36)..(37): Xaa is C or S
HXGXARVVMNEYQKYIVNSSDDIYLVSIPSLQTPAXXPKPVT

SEQ ID NO: 24002 - protein, 36 aa, Artificial Sequence; identical to SEQ ID NO: 3006
  GFR-binding peptide
  MOD_RES (2)..(4)..(36): Xaa is C or S

SEQ ID NO: 24003 - protein, 41 aa, Artificial Sequence
  GFR-binding peptide
  MOD_RES (2)..(36): Xaa is C or S
  MOD_RES (14)..(15)..(16)..(17)..(18): Xaa is A or G
  MOD_RES (19)..(20)..(21)..(22): Xaa is A or G or is absent
GXSRVVMNEYKFKXXXXXXXXXLYLVSIPELKTPAXTPKTV

SEQ ID NO: 24004 - protein, 41 aa, Artificial Sequence
  GFR-binding peptide
  MOD_RES (2)..(4)..(38)..(39): Xaa is C or S
  MOD_RES (16)..(17)..(18)..(19)..(20): Xaa is A or G
  MOD_RES (21)..(22)..(23)..(24): Xaa is A or G or is absent
RXGXGEVVMDEYKFKXXXXXXXXXLYLMSIPELETPVXXAK

SEQ ID NO: 24005 - protein, 38 aa, Artificial Sequence
  GFR-binding peptide
  MOD_RES (1)..(34)..(35): Xaa is C or S
  MOD_RES (12)..(13)..(14)..(15)..(16): Xaa is A or G
  MOD_RES (17)..(18)..(19)..(20): Xaa is A or G or is absent
XSRVIMEYKFKXXXXXXXXXLYLISIPELAQPVXXPAA

SEQ ID NO: 24006 - protein, 33 aa, Artificial Sequence
  GFR-binding peptide
  MOD_RES (33)..(33): Xaa is C or S
  MOD_RES (11)..(12)..(13)..(14)..(15): Xaa is A or G
  MOD_RES (16)..(17)..(18)..(19): Xaa is A or G or is absent
EVVMEEYKFKXXXXXXXXXLYLMSIPELETPVX

SEQ ID NO: 24007 - protein, 40 aa, Artificial Sequence
  GFR-binding peptide
  MOD_RES (2)..(4)..(38)..(39): Xaa is C or S
  MOD_RES (16)..(17)..(18)..(19)..(20): Xaa is A or G
  MOD_RES (21)..(22)..(23)..(24): Xaa is A or G or is absent
RXGXESVAMGEYQKYXXXXXXXXXIYLISIPSLKTPVXXA

SEQ ID NO: 24008 - protein, 39 aa, Artificial Sequence; identical to SEQ ID NO: 3012
  GFR-binding peptide
  MOD_RES (2)..(36)..(37): Xaa is C or S
  MOD_RES (14)..(15)..(16)..(17)..(18): Xaa is A or G
  MOD_RES (19)..(20)..(21)..(22): Xaa is A or G or is absent

SEQ ID NO: 24009 - protein, 33 aa, Artificial Sequence; identical to SEQ ID NO: 3013
  GFR-binding peptide
  MOD_RES (2)..(2): Xaa is C or S

SEQ ID NO: 24010 - protein, 40 aa, Artificial Sequence
  GFR-binding peptide
  MOD_RES (1)..(3)..(35)..(36): Xaa is C or S
XGXARVVMNEYQKYIVNSSDDIYLVSIPSLQTPAXXPKPV

SEQ ID NO: 24011 - protein, 35 aa, Artificial Sequence; identical to SEQ ID NO: 3016
  GFR-binding peptide
  MOD_RES (1)..(32)..(33): Xaa is C or S

SEQ ID NO: 24012 - protein, 37 aa, Artificial Sequence
  GFR-binding peptide
  MOD_RES (1)..(3)..(35)..(36): Xaa is C or S
XGXESVAMGEYQKYYTVVGKDIYLISIPSLKTPVXXA

SEQ ID NO: 24013 - protein, 39 aa, Artificial Sequence
  GFR-binding peptide
  MOD_RES (2)..(4)..(38)..(39): Xaa is C or S
  MOD_RES (16)..(17)..(18)..(19)..(20): Xaa is A or G
  MOD_RES (21)..(22)..(23)..(24): Xaa is A or G or is absent
RXGXESVAMGEYQKYXXXXXXXXXIYLISIPSLKTPVXX

SEQ ID NO: 24014 - protein, 36 aa, Artificial Sequence
  GFR-binding peptide
  MOD_RES (32)..(33): Xaa is C or S
AKVVMNEYKFKIVNNSSDLYLVSIPELKTPAXXAKP

SEQ ID NO: 24015 - protein, 37 aa, Artificial Sequence; identical to SEQ ID NO: 3019
  GFR-binding peptide
  MOD_RES (33)..(34): Xaa is C or S
  MOD_RES (11)..(12)..(13)..(14)..(15): Xaa is A or G
  MOD_RES (16)..(17)..(18)..(19): Xaa is A or G or is absent

SEQ ID NO: 24016 - protein, 34 aa, Artificial Sequence
  GFR-binding peptide
  MOD_RES (2)..(2): Xaa is C or S
  MOD_RES (13)..(14)..(15)..(16)..(17): Xaa is A or G
  MOD_RES (18)..(19)..(20)..(21): Xaa is A or G or is absent
KXSRVIMEYKFKXXXXXXXXXLYLISIPELAQPV

SEQ ID NO: 24017 - protein, 32 aa, Artificial Sequence
  GFR-binding peptide
  MOD_RES (31)..(32): Xaa is C or S
KVVMNEYKFKIVNNSSDLYLVSIPELKTPAXX

SEQ ID NO: 24018 - protein, 39 aa, Artificial Sequence
  GFR-binding peptide
  MOD_RES (1)..(33): Xaa is C or S
XSRVVMNEYQKYIVNSSDDIYLVSIPSLKTPAXTPKTVH

SEQ ID NO: 24019 - protein, 39 aa, Artificial Sequence
  GFR-binding peptide
  MOD_RES (34)..(35): Xaa is C or S
  MOD_RES (12)..(13)..(14)..(15)..(16): Xaa is A or G
  MOD_RES (17)..(18)..(19)..(20): Xaa is A or G or is absent
SRVVMNEYQKYXXXXXXXXXIYLVSIPSLKTPAXXPKPV

SEQ ID NO: 24020 - protein, 36 aa, Artificial Sequence
  GFR-binding peptide
  MOD_RES (31)..(32): Xaa is C or S
SKVVMEYKFKVKPTRGVLYLISIPELDQPVXXPSAS

SEQ ID NO: 24021 - protein, 40 aa, Artificial Sequence; identical to SEQ ID NO: 3025
  GFR-binding peptide
  MOD_RES (2)..(4)..(37)..(38): Xaa is C or S
  MOD_RES (15)..(16)..(17)..(18)..(19): Xaa is A or G
  MOD_RES (20)..(21)..(22)..(23): Xaa is A or G or is absent

SEQ ID NO: 24022 - protein, 35 aa, Artificial Sequence
  GFR-binding peptide
  MOD_RES (1)..(3)..(34)..(35): Xaa is C or S
XKXSRVIMEYKFKVKPKRGVLYLISIPELAQPVXX

SEQ ID NO: 24023 - protein, 36 aa, Artificial Sequence
  GFR-binding peptide
  MOD_RES (1)..(35)..(36): Xaa is C or S
  MOD_RES (13)..(14)..(15)..(16)..(17): Xaa is A or G
  MOD_RES (18)..(19)..(20)..(21): Xaa is A or G or is absent
XAEVVMDRYKKLXXXXXXXXXFYLISIANLRAPVXX

SEQ ID NO: 24024 - protein, 37 aa, Artificial Sequence
  GFR-binding peptide
  MOD_RES (33)..(34): Xaa is C or S
  MOD_RES (11)..(12)..(13)..(14)..(15): Xaa is A or G
  MOD_RES (16)..(17)..(18)..(19): Xaa is A or G or is absent
RVVMNEYKFKXXXXXXXXXLYLVSIPELQTPAXXPKP

SEQ ID NO: 24025 - protein, 37 aa, Artificial Sequence
  GFR-binding peptide
  MOD_RES (31)..(32): Xaa is C or S
SRVIMEYKFKVKPKRGVLYLISIPELAQPVXXPAASA

SEQ ID NO: 24026 - protein, 38 aa, Artificial Sequence
  GFR-binding peptide
  MOD_RES (1)..(3)..(37): Xaa is C or S
  MOD_RES (15)..(16)..(17)..(18)..(19): Xaa is A or G
  MOD_RES (20)..(21)..(22)..(23): Xaa is A or G or is absent
XGXSRVVMNEYQKYXXXXXXXXXIYLVSIPSLKTPAXT

SEQ ID NO: 24027 - protein, 39 aa, Artificial Sequence
  GFR-binding peptide
  MOD_RES (2)..(34): Xaa is C or S
GXSRVVMNEYKFKIVNSSDDLYLVSIPELKTPAXTPKTV

SEQ ID NO: 24028 - protein, 36 aa, Artificial Sequence
  GFR-binding peptide
  MOD_RES (1)..(34)..(35): Xaa is C or S
  MOD_RES (12)..(13)..(14)..(15)..(16): Xaa is A or G
  MOD_RES (17)..(18)..(19)..(20): Xaa is A or G or is absent
XSKVIMEYKFKXXXXXXXXXLYLISIPELDQSVXXP

SEQ ID NO: 24029 - protein, 33 aa, Artificial Sequence
  GFR-binding peptide
  MOD_RES (1)..(3): Xaa is C or S
XKXSRVIMEYQKYVKPKRGVIYLISIPSLAQPV

SEQ ID NO: 24030 - protein, 36 aa, Artificial Sequence
  GFR-binding peptide
  MOD_RES (2)..(4)..(36): Xaa is C or S
HXGXARVVMNEYQKYIVNSSDDIYLVSIPSLQTPAX

SEQ ID NO: 24031 - protein, 35 aa, Artificial Sequence
  GFR-binding peptide
  MOD_RES (2)..(2): Xaa is C or S
  MOD_RES (14)..(15)..(16)..(17)..(18): Xaa is A or G
  MOD_RES (19)..(20)..(21)..(22): Xaa is A or G or is absent
GXAEVVMDEYKFKXXXXXXXXXLYLISIPELRAPV

SEQ ID NO: 24032 - protein, 41 aa, Artificial Sequence; identical to SEQ ID NO: 3036
  GFR-binding peptide
  MOD_RES (2)..(4)..(36)..(37): Xaa is C or S

SEQ ID NO: 24033 - protein, 37 aa, Artificial Sequence
  GFR-binding peptide
  MOD_RES (1)..(3)..(35)..(36): Xaa is C or S
XGXAEVVMDYHYKLVVNNAADKYLISIPSLRAPVXXS

SEQ ID NO: 24034 - protein, 32 aa, Artificial Sequence
  GFR-binding peptide
  MOD_RES (32)..(32): Xaa is C or S
GEVVMDEYQKYVVKENEDIYLMSIPSLETPVX

SEQ ID NO: 24035 - protein, 42 aa, Artificial Sequence
  GFR-binding peptide
  MOD_RES (2)..(4)..(37)..(38): Xaa is C or S
RXGXEAVSMGEEYKFKTPVGMDDLYLVSIPELKTPVXXAKGV

SEQ ID NO: 24036 - protein, 35 aa, Artificial Sequence
  GFR-binding peptide
  MOD_RES (2)..(4): Xaa is C or S
RXGXESVAMGYHYKLYTVVGKDKYLISIPSLKTPV

SEQ ID NO: 24037 - protein, 36 aa, Artificial Sequence; identical to SEQ ID NO: 3038
  GFR-binding peptide
  MOD_RES (1)..(34)..(35): Xaa is C or S
  MOD_RES (12)..(13)..(14)..(15)..(16): Xaa is A or G
  MOD_RES (17)..(18)..(19)..(20): Xaa is A or G or is absent

SEQ ID NO: 24038 - protein, 38 aa, Artificial Sequence
  GFR-binding peptide
  MOD_RES (2)..(4)..(36)..(37): Xaa is C or S
RXGXGEVVMDEYKFKVVKENEDLYLMSIPELETPVXXA

SEQ ID NO: 24039 - protein, 35 aa, Artificial Sequence; identical to SEQ ID NO: 3042
  GFR-binding peptide
  MOD_RES (32)..(33): Xaa is C or S

SEQ ID NO: 24040 - protein, 35 aa, Artificial Sequence
  GFR-binding peptide
  MOD_RES (2)..(4): Xaa is C or S
RXGXAEVVMDYHYKLVVNNAADKYLISIPSLRAPV

SEQ ID NO: 24041 - protein, 34 aa, Artificial Sequence
  GFR-binding peptide
  MOD_RES (1)..(32)..(33): Xaa is C or S
XSRVIMEYKFKVKPKRGVLYLISIPELAQPVXXP

SEQ ID NO: 24042 - protein, 38 aa, Artificial Sequence
  GFR-binding peptide
  MOD_RES (2)..(4)..(35)..(36): Xaa is C or S
SXKXSRVIMEYQKYVKPKRGVIYLISIPSLAQPVXXPA

SEQ ID NO: 24043 - protein, 32 aa, Artificial Sequence
  GFR-binding peptide
  MOD_RES (32)..(32): Xaa is C or S
SRVVMNEYQKYIVNSSDDIYLVSIPSLKTPAX

SEQ ID NO: 24044 - protein, 35 aa, Artificial Sequence; identical to SEQ ID NO: 3047
  GFR-binding peptide
  MOD_RES (35)..(35): Xaa is C or S
  MOD_RES (13)..(14)..(15)..(16)..(17): Xaa is A or G
  MOD_RES (18)..(19)..(20)..(21): Xaa is A or G or is absent

SEQ ID NO: 24045 - protein, 33 aa, Artificial Sequence
  GFR-binding peptide
  MOD_RES (33)..(33): Xaa is C or S
  MOD_RES (11)..(12)..(13)..(14)..(15): Xaa is A or G
  MOD_RES (16)..(17)..(18)..(19): Xaa is A or G or is absent
SKVIMEYKFKXXXXXXXXXLYLISIPELDQSVX

SEQ ID NO: 24046 - protein, 39 aa, Artificial Sequence
  GFR-binding peptide
  MOD_RES (33)..(34): Xaa is C or S
EAVSMGEEYKFKTPVGMDDLYLVSIPELKTPVXXAKGVK

SEQ ID NO: 24047 - protein, 35 aa, Artificial Sequence; identical to SEQ ID NO: 3048
  GFR-binding peptide
  MOD_RES (34)..(35): Xaa is C or S
  MOD_RES (12)..(13)..(14)..(15)..(16): Xaa is A or G
  MOD_RES (17)..(18)..(19)..(20): Xaa is A or G or is absent

SEQ ID NO: 24048 - protein, 37 aa, Artificial Sequence
  GFR-binding peptide
  MOD_RES (2)..(36)..(37): Xaa is C or S
  MOD_RES (14)..(15)..(16)..(17)..(18): Xaa is A or G
  MOD_RES (19)..(20)..(21)..(22): Xaa is A or G or is absent
GXGEVVMDEYKFKXXXXXXXXXLYLMSIPELETPVXX

SEQ ID NO: 24049 - protein, 38 aa, Artificial Sequence
  GFR-binding peptide
  MOD_RES (34)..(35): Xaa is C or S
  MOD_RES (12)..(13)..(14)..(15)..(16): Xaa is A or G
  MOD_RES (17)..(18)..(19)..(20): Xaa is A or G or is absent
GEVVMEEYKFKXXXXXXXXXLYLMSIPELETPVXXAKP

SEQ ID NO: 24050 - protein, 36 aa, Artificial Sequence
  GFR-binding peptide
  MOD_RES (2)..(35)..(36): Xaa is C or S
  MOD_RES (13)..(14)..(15)..(16)..(17): Xaa is A or G
  MOD_RES (18)..(19)..(20)..(21): Xaa is A or G or is absent
KXSKVIMEYQKYXXXXXXXXXIYLISIPSLDQSVXX

SEQ ID NO: 24051 - protein, 33 aa, Artificial Sequence
  GFR-binding peptide
  MOD_RES (32)..(33): Xaa is C or S
GEVVMEEYQKYVVKDYEDIYLMSIPSLETPVXX

SEQ ID NO: 24052 - protein, 37 aa, Artificial Sequence
  GFR-binding peptide
  MOD_RES (1)..(33)..(34): Xaa is C or S
XESVAMGEYQKYYTVVGKDIYLISIPSLKTPVXXAKS

SEQ ID NO: 24053 - protein, 39 aa, Artificial Sequence
  GFR-binding peptide
  MOD_RES (1)..(35)..(36): Xaa is C or S
  MOD_RES (13)..(14)..(15)..(16)..(17): Xaa is A or G
  MOD_RES (18)..(19)..(20)..(21): Xaa is A or G or is absent
XESVAMGEYQKYXXXXXXXXXIYLISIPSLKTPVXXAKS

SEQ ID NO: 24054 - protein, 37 aa, Artificial Sequence
  GFR-binding peptide
  MOD_RES (1)..(35): Xaa is C or S
  MOD_RES (13)..(14)..(15)..(16)..(17): Xaa is A or G
  MOD_RES (18)..(19)..(20)..(21): Xaa is A or G or is absent
XSRVVMNEYKFKXXXXXXXXXLYLVSIPELKTPAXTP

SEQ ID NO: 24055 - protein, 38 aa, Artificial Sequence; identical to SEQ ID NO: 3054
  GFR-binding peptide
  MOD_RES (1)..(3)..(36)..(37): Xaa is C or S
  MOD_RES (14)..(15)..(16)..(17)..(18): Xaa is A or G
  MOD_RES (19)..(20)..(21)..(22): Xaa is A or G or is absent

SEQ ID NO: 24056 - protein, 35 aa, Artificial Sequence
  GFR-binding peptide
  MOD_RES (32)..(33): Xaa is C or S
AEVVMDRYKKLVVNNAADFYLISIANLRAPVXXSA

SEQ ID NO: 24057 - protein, 37 aa, Artificial Sequence
  GFR-binding peptide
  MOD_RES (2)..(4)..(36)..(37): Xaa is C or S
RXGXESVAMGEYQKYYTVVGKDIYLISIPSLKTPVXX

SEQ ID NO: 24058 - protein, 33 aa, Artificial Sequence; identical to SEQ ID NO: 3055
  GFR-binding peptide
  MOD_RES (32)..(33): Xaa is C or S

SEQ ID NO: 24059 - protein, 38 aa, Artificial Sequence; identical to SEQ ID NO: 3056
  GFR-binding peptide
  MOD_RES (1)..(3)..(37)..(38): Xaa is C or S
  MOD_RES (15)..(16)..(17)..(18)..(19): Xaa is A or G
  MOD_RES (20)..(21)..(22)..(23): Xaa is A or G or is absent

SEQ ID NO: 24060 - protein, 37 aa, Artificial Sequence; identical to SEQ ID NO: 3057
  GFR-binding peptide
  MOD_RES (34)..(35): Xaa is C or S
  MOD_RES (12)..(13)..(14)..(15)..(16): Xaa is A or G
  MOD_RES (17)..(18)..(19)..(20): Xaa is A or G or is absent

SEQ ID NO: 24061 - protein, 40 aa, Artificial Sequence; identical to SEQ ID NO: 3058
  GFR-binding peptide
  MOD_RES (2)..(4)..(38)..(39): Xaa is C or S
  MOD_RES (16)..(17)..(18)..(19)..(20): Xaa is A or G
  MOD_RES (21)..(22)..(23)..(24): Xaa is A or G or is absent

SEQ ID NO: 24062 - protein, 33 aa, Artificial Sequence
  GFR-binding peptide
  MOD_RES (32)..(33): Xaa is C or S
GEVVMEEYKFKVVKDYEDLYLMSIPELETPVXX

SEQ ID NO: 24063 - protein, 36 aa, Artificial Sequence
  GFR-binding peptide
  MOD_RES (2)..(34)..(35): Xaa is C or S
GXARVVMNEYQKYIVNSSDDIYLVSIPSLQTPAXXP

SEQ ID NO: 24064 - protein, 37 aa, Artificial Sequence
  GFR-binding peptide
  MOD_RES (2)..(35)..(36): Xaa is C or S
  MOD_RES (13)..(14)..(15)..(16)..(17): Xaa is A or G
  MOD_RES (18)..(19)..(20)..(21): Xaa is A or G or is absent
KXSKVIMEYQKYXXXXXXXXXIYLISIPSLDQSVXXP

SEQ ID NO: 24065 - protein, 32 aa, Artificial Sequence; identical to SEQ ID NO: 3061
  GFR-binding peptide
  MOD_RES (11)..(12)..(13)..(14)..(15): Xaa is A or G
  MOD_RES (16)..(17)..(18)..(19): Xaa is A or G or is absent

SEQ ID NO: 24066 - protein, 37 aa, Artificial Sequence; identical to SEQ ID NO: 3062
  GFR-binding peptide
  MOD_RES (33)..(34): Xaa is C or S
  MOD_RES (11)..(12)..(13)..(14)..(15): Xaa is A or G
  MOD_RES (16)..(17)..(18)..(19): Xaa is A or G or is absent

SEQ ID NO: 24067 - protein, 34 aa, Artificial Sequence
  GFR-binding peptide
  MOD_RES (34)..(34): Xaa is C or S
  MOD_RES (12)..(13)..(14)..(15)..(16): Xaa is A or G
  MOD_RES (17)..(18)..(19)..(20): Xaa is A or G or is absent
GEVVMEEYKFKXXXXXXXXXLYLMSIPELETPVX

SEQ ID NO: 24068 - protein, 42 aa, Artificial Sequence
  GFR-binding peptide
  MOD_RES (2)..(4)..(38)..(39): Xaa is C or S
  MOD_RES (16)..(17)..(18)..(19)..(20): Xaa is A or G
  MOD_RES (21)..(22)..(23)..(24): Xaa is A or G or is absent
RXGXAEVVMDEYQKYXXXXXXXXXIYLISIPSLRAPVXXSAP

SEQ ID NO: 24069 - protein, 40 aa, Artificial Sequence; identical to SEQ ID NO: 3065
  GFR-binding peptide
  MOD_RES (2)..(34)..(35): Xaa is C or S

SEQ ID NO: 24070 - protein, 40 aa, Artificial Sequence
  GFR-binding peptide
  MOD_RES (2)..(4)..(36)..(37): Xaa is C or S
RXGXAEVVMDEYQKYVVNNAADIYLISIPSLRAPVXXSAP

SEQ ID NO: 24071 - protein, 39 aa, Artificial Sequence; identical to SEQ ID NO: 3066
  GFR-binding peptide
  MOD_RES (2)..(33)..(34): Xaa is C or S

SEQ ID NO: 24072 - protein, 42 aa, Artificial Sequence
  GFR-binding peptide
  MOD_RES (2)..(4)..(36)..(37): Xaa is C or S
HXGXARVVMNEYKFKIVNSSDDLYLVSIPELQTPAXXPKPVT

SEQ ID NO: 24073 - protein, 35 aa, Artificial Sequence
  GFR-binding peptide
  MOD_RES (2)..(35): Xaa is C or S
  MOD_RES (13)..(14)..(15)..(16)..(17): Xaa is A or G
  MOD_RES (18)..(19)..(20)..(21): Xaa is A or G or is absent
KXSKVIMEYQKYXXXXXXXXXIYLISIPSLDQSVX

SEQ ID NO: 24074 - protein, 42 aa, Artificial Sequence
  GFR-binding peptide
  MOD_RES (2)..(4)..(36)..(37): Xaa is C or S
HXGXAKVVMNEYKFKIVNNSSDLYLVSIPELKTPAXXAKPVA

SEQ ID NO: 24075 - protein, 38 aa, Artificial Sequence
  GFR-binding peptide
  MOD_RES (2)..(4)..(36)..(37): Xaa is C or S
RXGXESVAMGEYKFKYTVVGKDLYLISIPELKTPVXXA

SEQ ID NO: 24076 - protein, 38 aa, Artificial Sequence
  GFR-binding peptide
  MOD_RES (2)..(35)..(36): Xaa is C or S
GXEAVSMGEEYQKYTPVGMDDIYLVSIPSLKTPVXXAK

SEQ ID NO: 24077 - protein, 39 aa, Artificial Sequence; identical to SEQ ID NO: 3072
  GFR-binding peptide
  MOD_RES (1)..(33)..(34): Xaa is C or S

SEQ ID NO: 24078 - protein, 35 aa, Artificial Sequence; identical to SEQ ID NO: 3073
  GFR-binding peptide
  MOD_RES (2)..(2): Xaa is C or S
  MOD_RES (14)..(15)..(16)..(17)..(18): Xaa is A or G
  MOD_RES (19)..(20)..(21)..(22): Xaa is A or G or is absent

SEQ ID NO: 24079 - protein, 31 aa, Artificial Sequence; identical to SEQ ID NO: 3074
  GFR-binding peptide
  MOD_RES (31)..(31): Xaa is C or S

SEQ ID NO: 24080 - protein, 41 aa, Artificial Sequence; identical to SEQ ID NO: 3075
  GFR-binding peptide
  MOD_RES (2)..(37)..(38): Xaa is C or S
  MOD_RES (15)..(16)..(17)..(18)..(19): Xaa is A or G
  MOD_RES (20)..(21)..(22)..(23): Xaa is A or G or is absent

SEQ ID NO: 24081 - protein, 34 aa, Artificial Sequence; identical to SEQ ID NO: 3078
  GFR-binding peptide
  MOD_RES (33)..(34): Xaa is C or S
  MOD_RES (11)..(12)..(13)..(14)..(15): Xaa is A or G
  MOD_RES (16)..(17)..(18)..(19): Xaa is A or G or is absent

SEQ ID NO: 24082 - protein, 34 aa, Artificial Sequence
  GFR-binding peptide
  MOD_RES (2)..(2): Xaa is C or S
  MOD_RES (13)..(14)..(15)..(16)..(17): Xaa is A or G
  MOD_RES (18)..(19)..(20)..(21): Xaa is A or G or is absent
KXSKVIMEYQKYXXXXXXXXXIYLISIPSLDQSV

SEQ ID NO: 24083 - protein, 39 aa, Artificial Sequence
  GFR-binding peptide
  MOD_RES (33)..(34): Xaa is C or S
  MOD_RES (11)..(12)..(13)..(14)..(15): Xaa is A or G
  MOD_RES (16)..(17)..(18)..(19): Xaa is A or G or is absent
KVVMNEYKFKXXXXXXXXXLYLVSIPELKTPAXXAKPVA

SEQ ID NO: 24084 - protein, 35 aa, Artificial Sequence
  GFR-binding peptide
  MOD_RES (2)..(4): Xaa is C or S
HXGXARVVMNEYQKYIVNSSDDIYLVSIPSLQTPA

SEQ ID NO: 24085 - protein, 35 aa, Artificial Sequence; identical to SEQ ID NO: 3085
  GFR-binding peptide
  MOD_RES (31)..(32): Xaa is C or S

SEQ ID NO: 24086 - protein, 43 aa, Artificial Sequence
  GFR-binding peptide
  MOD_RES (2)..(4)..(38)..(39): Xaa is C or S
  MOD_RES (16)..(17)..(18)..(19)..(20): Xaa is A or G
  MOD_RES (21)..(22)..(23)..(24): Xaa is A or G or is absent
RXGXAEVVMDYHYKLXXXXXXXXXKYLISIPSLRAPVXXSAPA

SEQ ID NO: 24087 - protein, 34 aa, Artificial Sequence
  GFR-binding peptide
  MOD_RES (1)..(33)..(34): Xaa is C or S
XSRVVMNEYKFKIVNSSDDLYLVSIPELKTPAXX

SEQ ID NO: 24088 - protein, 38 aa, Artificial Sequence
  GFR-binding peptide
  MOD_RES (34)..(35): Xaa is C or S
  MOD_RES (12)..(13)..(14)..(15)..(16): Xaa is A or G
  MOD_RES (17)..(18)..(19)..(20): Xaa is A or G or is absent
ESVAMGEYKFKXXXXXXXXXLYLISIPELKTPVXXAKS

SEQ ID NO: 24089 - protein, 40 aa, Artificial Sequence
  GFR-binding peptide
  MOD_RES (2)..(4)..(36)..(37): Xaa is C or S
RXGXAEVVMDEYKFKVVNNAADLYLISIPELRAPVXXSAP

SEQ ID NO: 24090 - protein, 34 aa, Artificial Sequence; identical to SEQ ID NO: 3087
  GFR-binding peptide
  MOD_RES (1)..(32)..(33): Xaa is C or S

SEQ ID NO: 24091 - protein, 38 aa, Artificial Sequence; identical to SEQ ID NO: 3088
  GFR-binding peptide
  MOD_RES (1)..(32)..(33): Xaa is C or S

SEQ ID NO: 24092 - protein, 40 aa, Artificial Sequence
  GFR-binding peptide
  MOD_RES (2)..(34)..(35): Xaa is C or S
GXGEVVMEEYQKYVVKDYEDIYLMSIPSLETPVXXAKPIS

SEQ ID NO: 24093 - protein, 36 aa, Artificial Sequence
  GFR-binding peptide
  MOD_RES (1)..(35)..(36): Xaa is C or S
  MOD_RES (13)..(14)..(15)..(16)..(17): Xaa is A or G
  MOD_RES (18)..(19)..(20)..(21): Xaa is A or G or is absent
XESVAMGEYQKYXXXXXXXXXIYLISIPSLKTPVXX

SEQ ID NO: 24094 - protein, 40 aa, Artificial Sequence; identical to SEQ ID NO: 3095
  GFR-binding peptide
  MOD_RES (2)..(36)..(37): Xaa is C or S
  MOD_RES (14)..(15)..(16)..(17)..(18): Xaa is A or G
  MOD_RES (19)..(20)..(21)..(22): Xaa is A or G or is absent

SEQ ID NO: 24095 - protein, 38 aa, Artificial Sequence
  GFR-binding peptide
  MOD_RES (2)..(4)..(36)..(37): Xaa is C or S
RXGXGEVVMDEYQKYVVKENEDIYLMSIPSLETPVXXA

SEQ ID NO: 24096 - protein, 32 aa, Artificial Sequence; identical to SEQ ID NO: 3097
  GFR-binding peptide
  MOD_RES (11)..(12)..(13)..(14)..(15): Xaa is A or G
  MOD_RES (16)..(17)..(18)..(19): Xaa is A or G or is absent

SEQ ID NO: 24097 - protein, 40 aa, Artificial Sequence
  GFR-binding peptide
  MOD_RES (1)..(34)..(35): Xaa is C or S
XEAVSMGEEYKFKTPVGMDDLYLVSIPELKTPVXXAKGVK

SEQ ID NO: 24098 - protein, 39 aa, Artificial Sequence; identical to SEQ ID NO: 3098
  GFR-binding peptide
  MOD_RES (2)..(35)..(36): Xaa is C or S
  MOD_RES (13)..(14)..(15)..(16)..(17): Xaa is A or G
  MOD_RES (18)..(19)..(20)..(21): Xaa is A or G or is absent

SEQ ID NO: 24099 - protein, 39 aa, Artificial Sequence
  GFR-binding peptide
  MOD_RES (2)..(4)..(36)..(37): Xaa is C or S
RXGXESVAMGYHYKLYTVVGKDKYLISIPSLKTPVXXAK

SEQ ID NO: 24100 - protein, 38 aa, Artificial Sequence
  GFR-binding peptide
  MOD_RES (2)..(37)..(38): Xaa is C or S
  MOD_RES (15)..(16)..(17)..(18)..(19): Xaa is A or G
  MOD_RES (20)..(21)..(22)..(23): Xaa is A or G or is absent
GXEAVSMGEEYKFKXXXXXXXXXLYLVSIPELKTPVXX

SEQ ID NO: 24101 - protein, 37 aa, Artificial Sequence; identical to SEQ ID NO: 3101
  GFR-binding peptide
  MOD_RES (1)..(3)..(35)..(36): Xaa is C or S

SEQ ID NO: 24102 - protein, 38 aa, Artificial Sequence
  GFR-binding peptide
  MOD_RES (2)..(35)..(36): Xaa is C or S
  MOD_RES (13)..(14)..(15)..(16)..(17): Xaa is A or G
  MOD_RES (18)..(19)..(20)..(21): Xaa is A or G or is absent
KXSKVVMEYKFKXXXXXXXXXLYLISIPELDQPVXXPS

SEQ ID NO: 24103 - protein, 32 aa, Artificial Sequence
  GFR-binding peptide
  MOD_RES (32)..(32): Xaa is C or S
SRVVMNEYKFKIVNSSDDLYLVSIPELKTPAX

SEQ ID NO: 24104 - protein, 38 aa, Artificial Sequence
  GFR-binding peptide
  MOD_RES (32)..(33): Xaa is C or S
AKVVMNEYQKYIVNNSSDIYLVSIPSLKTPAXXAKPVA

SEQ ID NO: 24105 - protein, 36 aa, Artificial Sequence
  GFR-binding peptide
  MOD_RES (2)..(34)..(35): Xaa is C or S
GXGEVVMEEYKFKVVKDYEDLYLMSIPELETPVXXA

SEQ ID NO: 24106 - protein, 37 aa, Artificial Sequence
  GFR-binding peptide
  MOD_RES (2)..(36)..(37): Xaa is C or S
  MOD_RES (14)..(15)..(16)..(17)..(18): Xaa is A or G
  MOD_RES (19)..(20)..(21)..(22): Xaa is A or G or is absent
GXAKVVMNEYQKYXXXXXXXXXIYLVSIPSLKTPAXX

SEQ ID NO: 24107 - protein, 37 aa, Artificial Sequence
  GFR-binding peptide
  MOD_RES (33)..(34): Xaa is C or S
  MOD_RES (11)..(12)..(13)..(14)..(15): Xaa is A or G
  MOD_RES (16)..(17)..(18)..(19): Xaa is A or G or is absent
EVVMDYHYKLXXXXXXXXXKYLISIPSLRAPVXXSAP

SEQ ID NO: 24108 - protein, 40 aa, Artificial Sequence
  GFR-binding peptide
  MOD_RES (2)..(36)..(37): Xaa is C or S
  MOD_RES (14)..(15)..(16)..(17)..(18): Xaa is A or G
  MOD_RES (19)..(20)..(21)..(22): Xaa is A or G or is absent
GXGEVVMEEYQKYXXXXXXXXXIYLMSIPSLETPVXXAKP

SEQ ID NO: 24109 - protein, 38 aa, Artificial Sequence
  GFR-binding peptide
  MOD_RES (1)..(34)..(35): Xaa is C or S
  MOD_RES (12)..(13)..(14)..(15)..(16): Xaa is A or G
  MOD_RES (17)..(18)..(19)..(20): Xaa is A or G or is absent
XSKVVMEYKFKXXXXXXXXXLYLISIPELDQPVXXPSA

SEQ ID NO: 24110 - protein, 36 aa, Artificial Sequence; identical to SEQ ID NO: 3111
  GFR-binding peptide
  MOD_RES (32)..(33): Xaa is C or S

SEQ ID NO: 24111 - protein, 40 aa, Artificial Sequence
  GFR-binding peptide
  MOD_RES (1)..(3)..(34)..(35): Xaa is C or S
XKXSKVVMEYQKYVKPTRGVIYLISIPSLDQPVXXPSASA

SEQ ID NO: 24112 - protein, 34 aa, Artificial Sequence
  GFR-binding peptide
  MOD_RES (13)..(14)..(15)..(16)..(17): Xaa is A or G
  MOD_RES (18)..(19)..(20)..(21): Xaa is A or G or is absent
EAVSMGEEYKFKXXXXXXXXXLYLVSIPELKTPV

SEQ ID NO: 24113 - protein, 35 aa, Artificial Sequence; identical to SEQ ID NO: 3112
  GFR-binding peptide
  MOD_RES (1)..(3): Xaa is C or S
  MOD_RES (14)..(15)..(16)..(17)..(18): Xaa is A or G
  MOD_RES (19)..(20)..(21)..(22): Xaa is A or G or is absent

SEQ ID NO: 24114 - protein, 34 aa, Artificial Sequence; identical to SEQ ID NO: 3119
  GFR-binding peptide
  MOD_RES (31)..(32): Xaa is C or S

SEQ ID NO: 24115 - protein, 37 aa, Artificial Sequence; identical to SEQ ID NO: 3120
  GFR-binding peptide
  MOD_RES (33)..(34): Xaa is C or S
  MOD_RES (11)..(12)..(13)..(14)..(15): Xaa is A or G
  MOD_RES (16)..(17)..(18)..(19): Xaa is A or G or is absent

SEQ ID NO: 24116 - protein, 37 aa, Artificial Sequence
  GFR-binding peptide
  MOD_RES (1)..(33)..(34): Xaa is C or S
XGEVVMEEYKFKVVKDYEDLYLMSIPELETPVXXAKP

SEQ ID NO: 24117 - protein, 34 aa, Artificial Sequence; identical to SEQ ID NO: 3122
  GFR-binding peptide
  MOD_RES (32)..(32): Xaa is C or S

SEQ ID NO: 24118 - protein, 37 aa, Artificial Sequence; identical to SEQ ID NO: 3124
  GFR-binding peptide
  MOD_RES (2)..(4)..(37): Xaa is C or S
  MOD_RES (15)..(16)..(17)..(18)..(19): Xaa is A or G
  MOD_RES (20)..(21)..(22)..(23): Xaa is A or G or is absent

SEQ ID NO: 24119 - protein, 36 aa, Artificial Sequence
  GFR-binding peptide
  MOD_RES (31)..(32): Xaa is C or S
RVVMNEYKFKIVNSSDDLYLVSIPELKTPAXXPKPV

SEQ ID NO: 24120 - protein, 38 aa, Artificial Sequence; identical to SEQ ID NO: 3126
  GFR-binding peptide
  MOD_RES (1)..(34)..(35): Xaa is C or S
  MOD_RES (12)..(13)..(14)..(15)..(16): Xaa is A or G
  MOD_RES (17)..(18)..(19)..(20): Xaa is A or G or is absent

SEQ ID NO: 24121 - protein, 37 aa, Artificial Sequence
  GFR-binding peptide
  MOD_RES (2)..(4)..(36)..(37): Xaa is C or S
RXGXESVAMGEYKFKYTVVGKDLYLISIPELKTPVXX

SEQ ID NO: 24122 - protein, 36 aa, Artificial Sequence
  GFR-binding peptide
  MOD_RES (2)..(4)..(35)..(36): Xaa is C or S
SXKXSKVVMEYQKYVKPTRGVIYLISIPSLDQPVXX

SEQ ID NO: 24123 - protein, 43 aa, Artificial Sequence
  GFR-binding peptide
  MOD_RES (1)..(3)..(37)..(38): Xaa is C or S
  MOD_RES (15)..(16)..(17)..(18)..(19): Xaa is A or G
  MOD_RES (20)..(21)..(22)..(23): Xaa is A or G or is absent
XGXGEVVMEEYKFKXXXXXXXXXLYLMSIPELETPVXXAKPIS

SEQ ID NO: 24124 - protein, 41 aa, Artificial Sequence; identical to SEQ ID NO: 3127
  GFR-binding peptide
  MOD_RES (2)..(36): Xaa is C or S
  MOD_RES (14)..(15)..(16)..(17)..(18): Xaa is A or G
  MOD_RES (19)..(20)..(21)..(22): Xaa is A or G or is absent

SEQ ID NO: 24125 - protein, 35 aa, Artificial Sequence
  GFR-binding peptide
  MOD_RES (2)..(2): Xaa is C or S
  MOD_RES (14)..(15)..(16)..(17)..(18): Xaa is A or G
  MOD_RES (19)..(20)..(21)..(22): Xaa is A or G or is absent
GXSRVVMNEYQKYXXXXXXXXXIYLVSIPSLKTPA

SEQ ID NO: 24126 - protein, 40 aa, Artificial Sequence; identical to SEQ ID NO: 3130
  GFR-binding peptide
  MOD_RES (1)..(3)..(36)..(37): Xaa is C or S
  MOD_RES (14)..(15)..(16)..(17)..(18): Xaa is A or G
  MOD_RES (19)..(20)..(21)..(22): Xaa is A or G or is absent

SEQ ID NO: 24127 - protein, 37 aa, Artificial Sequence; identical to SEQ ID NO: 3131
  GFR-binding peptide
  MOD_RES (2)..(34)..(35): Xaa is C or S

SEQ ID NO: 24128 - protein, 38 aa, Artificial Sequence
  GFR-binding peptide
  MOD_RES (2)..(4)..(36)..(37): Xaa is C or S
RXGXESVAMGEYQKYYTVVGKDIYLISIPSLKTPVXXA

SEQ ID NO: 24129 - protein, 35 aa, Artificial Sequence
  GFR-binding peptide
  MOD_RES (1)..(3)..(34)..(35): Xaa is C or S
XKXSRVIMEYQKYVKPKRGVIYLISIPSLAQPVXX

SEQ ID NO: 24130 - protein, 34 aa, Artificial Sequence
  GFR-binding peptide
  MOD_RES (1)..(3)..(34): Xaa is C or S
XKXSRVIMEYQKYVKPKRGVIYLISIPSLAQPVX

SEQ ID NO: 24131 - protein, 45 aa, Artificial Sequence
  GFR-binding peptide
  MOD_RES (2)..(4)..(39)..(40): Xaa is C or S
  MOD_RES (17)..(18)..(19)..(20)..(21): Xaa is A or G
  MOD_RES (22)..(23)..(24)..(25): Xaa is A or G or is absent
RXGXEAVSMGEEYQKYXXXXXXXXXIYLVSIPSLKTPVXXAKGVK

SEQ ID NO: 24132 - protein, 38 aa, Artificial Sequence; identical to SEQ ID NO: 3138
  GFR-binding peptide
  MOD_RES (34)..(35): Xaa is C or S
  MOD_RES (12)..(13)..(14)..(15)..(16): Xaa is A or G
  MOD_RES (17)..(18)..(19)..(20): Xaa is A or G or is absent

SEQ ID NO: 24133 - protein, 40 aa, Artificial Sequence
  GFR-binding peptide
  MOD_RES (2)..(35)..(36): Xaa is C or S
GXEAVSMGEEYQKYTPVGMDDIYLVSIPSLKTPVXXAKGV

SEQ ID NO: 24134 - protein, 34 aa, Artificial Sequence
  GFR-binding peptide
  MOD_RES (1)..(32)..(33): Xaa is C or S
XSKVIMEYQKYIKPTKGIIYLISIPSLDQSVXXP

SEQ ID NO: 24135 - protein, 41 aa, Artificial Sequence
  GFR-binding peptide
  MOD_RES (1)..(3)..(37)..(38): Xaa is C or S
  MOD_RES (15)..(16)..(17)..(18)..(19): Xaa is A or G
  MOD_RES (20)..(21)..(22)..(23): Xaa is A or G or is absent
XGXAEVVMDEYQKYXXXXXXXXXIYLISIPSLRAPVXXSAP

SEQ ID NO: 24136 - protein, 38 aa, Artificial Sequence; identical to SEQ ID NO: 3140
  GFR-binding peptide
  MOD_RES (2)..(33)..(34): Xaa is C or S

SEQ ID NO: 24137 - protein, 37 aa, Artificial Sequence
  GFR-binding peptide
  MOD_RES (33)..(34): Xaa is C or S
  MOD_RES (11)..(12)..(13)..(14)..(15): Xaa is A or G
  MOD_RES (16)..(17)..(18)..(19): Xaa is A or G or is absent
KVVMNEYKFKXXXXXXXXXLYLVSIPELKTPAXXAKP

SEQ ID NO: 24138 - protein, 34 aa, Artificial Sequence
  GFR-binding peptide
  MOD_RES (1)..(3): Xaa is C or S
XGXESVAMGEYKFKYTVVGKDLYLISIPELKTPV

SEQ ID NO: 24139 - protein, 38 aa, Artificial Sequence
  GFR-binding peptide
  MOD_RES (2)..(34)..(35): Xaa is C or S
GXGEVVMEEYQKYVVKDYEDIYLMSIPSLETPVXXAKP

SEQ ID NO: 24140 - protein, 31 aa, Artificial Sequence; identical to SEQ ID NO: 3149
  GFR-binding peptide
  MOD_RES (31)..(31): Xaa is C or S

SEQ ID NO: 24141 - protein, 40 aa, Artificial Sequence
  GFR-binding peptide
  MOD_RES (34)..(35): Xaa is C or S
  MOD_RES (12)..(13)..(14)..(15)..(16): Xaa is A or G
  MOD_RES (17)..(18)..(19)..(20): Xaa is A or G or is absent
AEVVMDRYKKLXXXXXXXXXFYLISIANLRAPVXXSAPAA

SEQ ID NO: 24142 - protein, 38 aa, Artificial Sequence
  GFR-binding peptide
  MOD_RES (1)..(3)..(34)..(35): Xaa is C or S
XKXSKVVMEYKFKVKPTRGVLYLISIPELDQPVXXPSA

SEQ ID NO: 24143 - protein, 37 aa, Artificial Sequence
  GFR-binding peptide
  MOD_RES (2)..(4): Xaa is C or S
  MOD_RES (16)..(17)..(18)..(19)..(20): Xaa is A or G
  MOD_RES (21)..(22)..(23)..(24): Xaa is A or G or is absent
HXGXARVVMNEYQKYXXXXXXXXXIYLVSIPSLQTPA

SEQ ID NO: 24144 - protein, 33 aa, Artificial Sequence
  GFR-binding peptide
  MOD_RES (2)..(2): Xaa is C or S
GXSRVVMNEYKFKIVNSSDDLYLVSIPELKTPA

SEQ ID NO: 24145 - protein, 39 aa, Artificial Sequence; identical to SEQ ID NO: 3150
  GFR-binding peptide
  MOD_RES (1)..(3)..(36)..(37): Xaa is C or S

SEQ ID NO: 24146 - protein, 38 aa, Artificial Sequence; identical to SEQ ID NO: 3152
  GFR-binding peptide
  MOD_RES (2)..(4)..(38): Xaa is C or S
  MOD_RES (16)..(17)..(18)..(19)..(20): Xaa is A or G
  MOD_RES (21)..(22)..(23)..(24): Xaa is A or G or is absent

SEQ ID NO: 24147 - protein, 38 aa, Artificial Sequence; identical to SEQ ID NO: 3153
  GFR-binding peptide
  MOD_RES (2)..(34)..(35): Xaa is C or S

SEQ ID NO: 24148 - protein, 38 aa, Artificial Sequence; identical to SEQ ID NO: 3154
  GFR-binding peptide
  MOD_RES (1)..(3)..(37)..(38): Xaa is C or S
  MOD_RES (15)..(16)..(17)..(18)..(19): Xaa is A or G
  MOD_RES (20)..(21)..(22)..(23): Xaa is A or G or is absent

SEQ ID NO: 24149 - protein, 40 aa, Artificial Sequence
  GFR-binding peptide
  MOD_RES (2)..(36)..(37): Xaa is C or S
  MOD_RES (14)..(15)..(16)..(17)..(18): Xaa is A or G
  MOD_RES (19)..(20)..(21)..(22): Xaa is A or G or is absent
GXAEVVMDYHYKLXXXXXXXXXKYLISIPSLRAPVXXSAP

SEQ ID NO: 24150 - protein, 38 aa, Artificial Sequence; identical to SEQ ID NO: 3156
  GFR-binding peptide
  MOD_RES (1)..(32)..(33): Xaa is C or S

SEQ ID NO: 24151 - protein, 38 aa, Artificial Sequence; identical to SEQ ID NO: 3158
  GFR-binding peptide
  MOD_RES (2)..(35)..(36): Xaa is C or S
  MOD_RES (13)..(14)..(15)..(16)..(17): Xaa is A or G
  MOD_RES (18)..(19)..(20)..(21): Xaa is A or G or is absent

SEQ ID NO: 24152 - protein, 42 aa, Artificial Sequence
  GFR-binding peptide
  MOD_RES (2)..(4)..(36)..(37): Xaa is C or S
RXGXESVAMGEYKFKYTVVGKDLYLISIPELKTPVXXAKSAK

SEQ ID NO: 24153 - protein, 37 aa, Artificial Sequence
  GFR-binding peptide
  MOD_RES (1)..(35)..(36): Xaa is C or S
  MOD_RES (13)..(14)..(15)..(16)..(17): Xaa is A or G
  MOD_RES (18)..(19)..(20)..(21): Xaa is A or G or is absent
XESVAMGEYKFKXXXXXXXXXLYLISIPELKTPVXXA

SEQ ID NO: 24154 - protein, 36 aa, Artificial Sequence; identical to SEQ ID NO: 3160
  GFR-binding peptide
  MOD_RES (1)..(3): Xaa is C or S
  MOD_RES (15)..(16)..(17)..(18)..(19): Xaa is A or G
  MOD_RES (20)..(21)..(22)..(23): Xaa is A or G or is absent

SEQ ID NO: 24155 - protein, 37 aa, Artificial Sequence
  GFR-binding peptide
  MOD_RES (1)..(3)..(36)..(37): Xaa is C or S
XGXEAVSMGEEYQKYTPVGMDDIYLVSIPSLKTPVXX

SEQ ID NO: 24156 - protein, 37 aa, Artificial Sequence; identical to SEQ ID NO: 3163
  GFR-binding peptide
  MOD_RES (33)..(34): Xaa is C or S
  MOD_RES (11)..(12)..(13)..(14)..(15): Xaa is A or G
  MOD_RES (16)..(17)..(18)..(19): Xaa is A or G or is absent

SEQ ID NO: 24157 - protein, 37 aa, Artificial Sequence
  GFR-binding peptide
  MOD_RES (1)..(3)..(36)..(37): Xaa is C or S
XGXEAVSMGEEYKFKTPVGMDDLYLVSIPELKTPVXX

SEQ ID NO: 24158 - protein, 38 aa, Artificial Sequence
  GFR-binding peptide
  MOD_RES (2)..(36)..(37): Xaa is C or S
  MOD_RES (14)..(15)..(16)..(17)..(18): Xaa is A or G
  MOD_RES (19)..(20)..(21)..(22): Xaa is A or G or is absent
GXAKVVMNEYQKYXXXXXXXXXIYLVSIPSLKTPAXXA

SEQ ID NO: 24159 - protein, 35 aa, Artificial Sequence
  GFR-binding peptide
  MOD_RES (2)..(34)..(35): Xaa is C or S
GXGEVVMDEYQKYVVKENEDIYLMSIPSLETPVXX

SEQ ID NO: 24160 - protein, 38 aa, Artificial Sequence
  GFR-binding peptide
  MOD_RES (2)..(36)..(37): Xaa is C or S
  MOD_RES (14)..(15)..(16)..(17)..(18): Xaa is A or G
  MOD_RES (19)..(20)..(21)..(22): Xaa is A or G or is absent
GXGEVVMDEYKFKXXXXXXXXXLYLMSIPELETPVXXA

SEQ ID NO: 24161 - protein, 38 aa, Artificial Sequence
  GFR-binding peptide
  MOD_RES (33)..(34): Xaa is C or S
  MOD_RES (11)..(12)..(13)..(14)..(15): Xaa is A or G
  MOD_RES (16)..(17)..(18)..(19): Xaa is A or G or is absent
SKVVMEYQKYXXXXXXXXXIYLISIPSLDQPVXXPSAS

SEQ ID NO: 24162 - protein, 39 aa, Artificial Sequence
  GFR-binding peptide
  MOD_RES (33)..(34): Xaa is C or S
  MOD_RES (11)..(12)..(13)..(14)..(15): Xaa is A or G
  MOD_RES (16)..(17)..(18)..(19): Xaa is A or G or is absent
EVVMEEYQKYXXXXXXXXXIYLMSIPSLETPVXXAKPIS

SEQ ID NO: 24163 - protein, 36 aa, Artificial Sequence
  GFR-binding peptide
  MOD_RES (2)..(4): Xaa is C or S
  MOD_RES (15)..(16)..(17)..(18)..(19): Xaa is A or G
  MOD_RES (20)..(21)..(22)..(23): Xaa is A or G or is absent
SXKXSKVIMEYQKYXXXXXXXXXIYLISIPSLDQSV

SEQ ID NO: 24164 - protein, 37 aa, Artificial Sequence; identical to SEQ ID NO: 3169
  GFR-binding peptide
  MOD_RES (2)..(4)..(36): Xaa is C or S

SEQ ID NO: 24165 - protein, 35 aa, Artificial Sequence; identical to SEQ ID NO: 3170
  GFR-binding peptide
  MOD_RES (1)..(3): Xaa is C or S
  MOD_RES (14)..(15)..(16)..(17)..(18): Xaa is A or G
  MOD_RES (19)..(20)..(21)..(22): Xaa is A or G or is absent

SEQ ID NO: 24166 - protein, 36 aa, Artificial Sequence; identical to SEQ ID NO: 3171
  GFR-binding peptide
  MOD_RES (2)..(4)..(35)..(36): Xaa is C or S

SEQ ID NO: 24167 - protein, 32 aa, Artificial Sequence
  GFR-binding peptide
  MOD_RES (32)..(32): Xaa is C or S
ARVVMNEYKFKIVNSSDDLYLVSIPELQTPAX

SEQ ID NO: 24168 - protein, 40 aa, Artificial Sequence; identical to SEQ ID NO: 3172
  GFR-binding peptide
  MOD_RES (2)..(4)..(37)..(38): Xaa is C or S

SEQ ID NO: 24169 - protein, 37 aa, Artificial Sequence
  GFR-binding peptide
  MOD_RES (2)..(33)..(34): Xaa is C or S
KXSKVVMEYKFKVKPTRGVLYLISIPELDQPVXXPSA

SEQ ID NO: 24170 - protein, 33 aa, Artificial Sequence; identical to SEQ ID NO: 3173
  GFR-binding peptide
  MOD_RES (2)..(33): Xaa is C or S

SEQ ID NO: 24171 - protein, 34 aa, Artificial Sequence
  GFR-binding peptide
  MOD_RES (1)..(33)..(34): Xaa is C or S
XESVAMGYHYKLYTVVGKDKYLISIPSLKTPVXX

SEQ ID NO: 24172 - protein, 40 aa, Artificial Sequence
  GFR-binding peptide
  MOD_RES (2)..(4)..(35)..(36): Xaa is C or S
SXKXSRVIMEYQKYVKPKRGVIYLISIPSLAQPVXXPAAS

SEQ ID NO: 24173 - protein, 34 aa, Artificial Sequence; identical to SEQ ID NO: 3180
  GFR-binding peptide
  MOD_RES (2)..(34): Xaa is C or S

SEQ ID NO: 24174 - protein, 37 aa, Artificial Sequence; identical to SEQ ID NO: 3181
  GFR-binding peptide
  MOD_RES (2)..(4)..(36)..(37): Xaa is C or S

SEQ ID NO: 24175 - protein, 36 aa, Artificial Sequence; identical to SEQ ID NO: 3182
  GFR-binding peptide
  MOD_RES (1)..(34)..(35): Xaa is C or S

SEQ ID NO: 24176 - protein, 39 aa, Artificial Sequence
  GFR-binding peptide
  MOD_RES (1)..(3)..(34)..(35): Xaa is C or S
XKXSKVIMEYQKYIKPTKGIIYLISIPSLDQSVXXPSAS

SEQ ID NO: 24177 - protein, 34 aa, Artificial Sequence
  GFR-binding peptide
  MOD_RES (2)..(34): Xaa is C or S
GXAEVVMDRYKKLVVNNAADFYLISIANLRAPVX

SEQ ID NO: 24178 - protein, 38 aa, Artificial Sequence
  GFR-binding peptide
  MOD_RES (1)..(33)..(34): Xaa is C or S
XGEVVMEEYQKYVVKDYEDIYLMSIPSLETPVXXAKPI

SEQ ID NO: 24179 - protein, 34 aa, Artificial Sequence; identical to SEQ ID NO: 3184
  GFR-binding peptide
  MOD_RES (1)..(1): Xaa is C or S
  MOD_RES (13)..(14)..(15)..(16)..(17): Xaa is A or G
  MOD_RES (18)..(19)..(20)..(21): Xaa is A or G or is absent

SEQ ID NO: 24180 - protein, 36 aa, Artificial Sequence; identical to SEQ ID NO: 3186
  GFR-binding peptide
  MOD_RES (1)..(3): Xaa is C or S
  MOD_RES (15)..(16)..(17)..(18)..(19): Xaa is A or G
  MOD_RES (20)..(21)..(22)..(23): Xaa is A or G or is absent

SEQ ID NO: 24181 - protein, 36 aa, Artificial Sequence; identical to SEQ ID NO: 3188
  GFR-binding peptide
  MOD_RES (34)..(35): Xaa is C or S
  MOD_RES (12)..(13)..(14)..(15)..(16): Xaa is A or G
  MOD_RES (17)..(18)..(19)..(20): Xaa is A or G or is absent

SEQ ID NO: 24182 - protein, 36 aa, Artificial Sequence; identical to SEQ ID NO: 3189
  GFR-binding peptide
  MOD_RES (1)..(3)..(35)..(36): Xaa is C or S

SEQ ID NO: 24183 - protein, 42 aa, Artificial Sequence; identical to SEQ ID NO: 3190
  GFR-binding peptide
  MOD_RES (2)..(4)..(38)..(39): Xaa is C or S
  MOD_RES (16)..(17)..(18)..(19)..(20): Xaa is A or G
  MOD_RES (21)..(22)..(23)..(24): Xaa is A or G or is absent

SEQ ID NO: 24184 - protein, 41 aa, Artificial Sequence; identical to SEQ ID NO: 3195
  GFR-binding peptide
  MOD_RES (1)..(3)..(36)..(37): Xaa is C or S
  MOD_RES (14)..(15)..(16)..(17)..(18): Xaa is A or G
  MOD_RES (19)..(20)..(21)..(22): Xaa is A or G or is absent

SEQ ID NO: 24185 - protein, 34 aa, Artificial Sequence
  GFR-binding peptide
  MOD_RES (1)..(3): Xaa is C or S
XGXGEVVMEEYKFKVVKDYEDLYLMSIPELETPV

SEQ ID NO: 24186 - protein, 33 aa, Artificial Sequence
  GFR-binding peptide
  MOD_RES (1)..(33): Xaa is C or S
XSRVVMNEYQKYIVNSSDDIYLVSIPSLKTPAX

SEQ ID NO: 24187 - protein, 34 aa, Artificial Sequence
  GFR-binding peptide
  MOD_RES (1)..(3): Xaa is C or S
XGXAEVVMDYHYKLVVNNAADKYLISIPSLRAPV

SEQ ID NO: 24188 - protein, 38 aa, Artificial Sequence; identical to SEQ ID NO: 3199
  GFR-binding peptide
  MOD_RES (2)..(37)..(38): Xaa is C or S
  MOD_RES (15)..(16)..(17)..(18)..(19): Xaa is A or G
  MOD_RES (20)..(21)..(22)..(23): Xaa is A or G or is absent

SEQ ID NO: 24189 - protein, 34 aa, Artificial Sequence; identical to SEQ ID NO: 3200
  GFR-binding peptide
  MOD_RES (2)..(2): Xaa is C or S
  MOD_RES (13)..(14)..(15)..(16)..(17): Xaa is A or G
  MOD_RES (18)..(19)..(20)..(21): Xaa is A or G or is absent

SEQ ID NO: 24190 - protein, 35 aa, Artificial Sequence
  GFR-binding peptide
  MOD_RES (2)..(33)..(34): Xaa is C or S
KXSRVIMEYQKYVKPKRGVIYLISIPSLAQPVXXP

SEQ ID NO: 24191 - protein, 36 aa, Artificial Sequence; identical to SEQ ID NO: 3202
  GFR-binding peptide
  MOD_RES (2)..(33)..(34): Xaa is C or S

SEQ ID NO: 24192 - protein, 38 aa, Artificial Sequence; identical to SEQ ID NO: 3203
  GFR-binding peptide
  MOD_RES (33)..(34): Xaa is C or S

SEQ ID NO: 24193 - protein, 39 aa, Artificial Sequence
  GFR-binding peptide
  MOD_RES (1)..(3)..(35)..(36): Xaa is C or S
XGXSRVVMNEYQKYIVNSSDDIYLVSIPSLKTPAXXPKP

SEQ ID NO: 24194 - protein, 32 aa, Artificial Sequence
  GFR-binding peptide
  MOD_RES (31)..(32): Xaa is C or S
EVVMEEYKFKVVKDYEDLYLMSIPELETPVXX

SEQ ID NO: 24195 - protein, 38 aa, Artificial Sequence
  GFR-binding peptide
  MOD_RES (2)..(4)..(38): Xaa is C or S
  MOD_RES (16)..(17)..(18)..(19)..(20): Xaa is A or G
  MOD_RES (21)..(22)..(23)..(24): Xaa is A or G or is absent
RXGXAEVVMDEYQKYXXXXXXXXXIYLISIPSLRAPVX

SEQ ID NO: 24196 - protein, 40 aa, Artificial Sequence; identical to SEQ ID NO: 3205
  GFR-binding peptide
  MOD_RES (2)..(4)..(36)..(37): Xaa is C or S

SEQ ID NO: 24197 - protein, 39 aa, Artificial Sequence; identical to SEQ ID NO: 3207
  GFR-binding peptide
  MOD_RES (34)..(35): Xaa is C or S
  MOD_RES (12)..(13)..(14)..(15)..(16): Xaa is A or G
  MOD_RES (17)..(18)..(19)..(20): Xaa is A or G or is absent

SEQ ID NO: 24198 - protein, 34 aa, Artificial Sequence; identical to SEQ ID NO: 3208
  GFR-binding peptide
  MOD_RES (33)..(34): Xaa is C or S
  MOD_RES (11)..(12)..(13)..(14)..(15): Xaa is A or G
  MOD_RES (16)..(17)..(18)..(19): Xaa is A or G or is absent

SEQ ID NO: 24199 - protein, 39 aa, Artificial Sequence
  GFR-binding peptide
  MOD_RES (2)..(35)..(36): Xaa is C or S
  MOD_RES (13)..(14)..(15)..(16)..(17): Xaa is A or G
  MOD_RES (18)..(19)..(20)..(21): Xaa is A or G or is absent
KXSRVIMEYKFKXXXXXXXXXLYLISIPELAQPVXXPAA

SEQ ID NO: 24200 - protein, 34 aa, Artificial Sequence; identical to SEQ ID NO: 3210
  GFR-binding peptide
  MOD_RES (33)..(34): Xaa is C or S

SEQ ID NO: 24201 - protein, 38 aa, Artificial Sequence
  GFR-binding peptide
  MOD_RES (1)..(3)..(35)..(36): Xaa is C or S
XGXARVVMNEYQKYIVNSSDDIYLVSIPSLQTPAXXPK

SEQ ID NO: 24202 - protein, 40 aa, Artificial Sequence
  GFR-binding peptide
  MOD_RES (1)..(34)..(35): Xaa is C or S
  MOD_RES (12)..(13)..(14)..(15)..(16): Xaa is A or G
  MOD_RES (17)..(18)..(19)..(20): Xaa is A or G or is absent
XSKVVMEYQKYXXXXXXXXXIYLISIPSLDQPVXXPSASA

SEQ ID NO: 24203 - protein, 36 aa, Artificial Sequence
  GFR-binding peptide
  MOD_RES (2)..(4): Xaa is C or S
  MOD_RES (15)..(16)..(17)..(18)..(19): Xaa is A or G
  MOD_RES (20)..(21)..(22)..(23): Xaa is A or G or is absent
SXKXSKVVMEYQKYXXXXXXXXXIYLISIPSLDQPV

SEQ ID NO: 24204 - protein, 41 aa, Artificial Sequence
  GFR-binding peptide
  MOD_RES (2)..(4)..(38)..(39): Xaa is C or S
  MOD_RES (16)..(17)..(18)..(19)..(20): Xaa is A or G
  MOD_RES (21)..(22)..(23)..(24): Xaa is A or G or is absent
RXGXESVAMGEYKFKXXXXXXXXXLYLISIPELKTPVXXAK

SEQ ID NO: 24205 - protein, 38 aa, Artificial Sequence
  GFR-binding peptide
  MOD_RES (1)..(35)..(36): Xaa is C or S
  MOD_RES (13)..(14)..(15)..(16)..(17): Xaa is A or G
  MOD_RES (18)..(19)..(20)..(21): Xaa is A or G or is absent
XGEVVMEEYQKYXXXXXXXXXIYLMSIPSLETPVXXAK

SEQ ID NO: 24206 - protein, 38 aa, Artificial Sequence
  GFR-binding peptide
  MOD_RES (1)..(3)..(36)..(37): Xaa is C or S
  MOD_RES (14)..(15)..(16)..(17)..(18): Xaa is A or G
  MOD_RES (19)..(20)..(21)..(22): Xaa is A or G or is absent
XKXSKVIMEYKFKXXXXXXXXXLYLISIPELDQSVXXP

SEQ ID NO: 24207 - protein, 34 aa, Artificial Sequence
  GFR-binding peptide
  MOD_RES (2)..(4): Xaa is C or S
SXKXSRVIMEYKFKVKPKRGVLYLISIPELAQPV

SEQ ID NO: 24208 - protein, 43 aa, Artificial Sequence; identical to SEQ ID NO: 3213
  GFR-binding peptide
  MOD_RES (2)..(37)..(38): Xaa is C or S
  MOD_RES (15)..(16)..(17)..(18)..(19): Xaa is A or G
  MOD_RES (20)..(21)..(22)..(23): Xaa is A or G or is absent

SEQ ID NO: 24209 - protein, 43 aa, Artificial Sequence; identical to SEQ ID NO: 3214
  GFR-binding peptide
  MOD_RES (2)..(4)..(37)..(38): Xaa is C or S
  MOD_RES (15)..(16)..(17)..(18)..(19): Xaa is A or G
  MOD_RES (20)..(21)..(22)..(23): Xaa is A or G or is absent

SEQ ID NO: 24210 - protein, 34 aa, Artificial Sequence; identical to SEQ ID NO: 3216
  GFR-binding peptide
  MOD_RES (34)..(34): Xaa is C or S
  MOD_RES (12)..(13)..(14)..(15)..(16): Xaa is A or G
  MOD_RES (17)..(18)..(19)..(20): Xaa is A or G or is absent

SEQ ID NO: 24211 - protein, 32 aa, Artificial Sequence
  GFR-binding peptide
  MOD_RES (32)..(32): Xaa is C or S
ESVAMGRYKKLYTVVGKDFYLISIANLKTPVX

SEQ ID NO: 24212 - protein, 35 aa, Artificial Sequence; identical to SEQ ID NO: 3218
  GFR-binding peptide
  MOD_RES (1)..(34)..(35): Xaa is C or S

SEQ ID NO: 24213 - protein, 40 aa, Artificial Sequence; identical to SEQ ID NO: 3219
  GFR-binding peptide
  MOD_RES (1)..(3)..(35)..(36): Xaa is C or S

SEQ ID NO: 24214 - protein, 37 aa, Artificial Sequence; identical to SEQ ID NO: 3223
  GFR-binding peptide
  MOD_RES (2)..(4)..(36)..(37): Xaa is C or S

SEQ ID NO: 24215 - protein, 36 aa, Artificial Sequence
  GFR-binding peptide
  MOD_RES (1)..(35)..(36): Xaa is C or S
  MOD_RES (13)..(14)..(15)..(16)..(17): Xaa is A or G
  MOD_RES (18)..(19)..(20)..(21): Xaa is A or G or is absent
XSRVVMNEYQKYXXXXXXXXXIYLVSIPSLKTPAXX

SEQ ID NO: 24216 - protein, 37 aa, Artificial Sequence
  GFR-binding peptide
  MOD_RES (31)..(32): Xaa is C or S
EVVMEEYQKYVVKDYEDIYLMSIPSLETPVXXAKPIS

SEQ ID NO: 24217 - protein, 39 aa, Artificial Sequence
  GFR-binding peptide
  MOD_RES (33)..(34): Xaa is C or S
EAVSMGEEYQKYTPVGMDDIYLVSIPSLKTPVXXAKGVK

SEQ ID NO: 24218 - protein, 35 aa, Artificial Sequence
  GFR-binding peptide
  MOD_RES (31)..(32): Xaa is C or S
SKVVMEYQKYVKPTRGVIYLISIPSLDQPVXXPSA

SEQ ID NO: 24219 - protein, 39 aa, Artificial Sequence; identical to SEQ ID NO: 3225
  GFR-binding peptide
  MOD_RES (2)..(35)..(36): Xaa is C or S
  MOD_RES (13)..(14)..(15)..(16)..(17): Xaa is A or G
  MOD_RES (18)..(19)..(20)..(21): Xaa is A or G or is absent

SEQ ID NO: 24220 - protein, 32 aa, Artificial Sequence
  GFR-binding peptide
  MOD_RES (32)..(32): Xaa is C or S
GEVVMEEYQKYVVKDYEDIYLMSIPSLETPVX

SEQ ID NO: 24221 - protein, 34 aa, Artificial Sequence
  GFR-binding peptide
  MOD_RES (1)..(34): Xaa is C or S
XEAVSMGEEYKFKTPVGMDDLYLVSIPELKTPVX

SEQ ID NO: 24222 - protein, 41 aa, Artificial Sequence; identical to SEQ ID NO: 3227
  GFR-binding peptide
  MOD_RES (2)..(4)..(35)..(36): Xaa is C or S

SEQ ID NO: 24223 - protein, 40 aa, Artificial Sequence
  GFR-binding peptide
  MOD_RES (2)..(4)..(37)..(38): Xaa is C or S
  MOD_RES (15)..(16)..(17)..(18)..(19): Xaa is A or G
  MOD_RES (20)..(21)..(22)..(23): Xaa is A or G or is absent
SXKXSKVVMEYKFKXXXXXXXXXLYLISIPELDQPVXXPS

SEQ ID NO: 24224 - protein, 42 aa, Artificial Sequence; identical to SEQ ID NO: 3231
  GFR-binding peptide
  MOD_RES (2)..(4)..(36)..(37): Xaa is C or S

SEQ ID NO: 24225 - protein, 39 aa, Artificial Sequence; identical to SEQ ID NO: 3232
  GFR-binding peptide
  MOD_RES (1)..(33)..(34): Xaa is C or S

SEQ ID NO: 24226 - protein, 35 aa, Artificial Sequence
  GFR-binding peptide
  MOD_RES (1)..(33)..(34): Xaa is C or S
XGEVVMEEYQKYVVKDYEDIYLMSIPSLETPVXXA

SEQ ID NO: 24227 - protein, 39 aa, Artificial Sequence; identical to SEQ ID NO: 3235
  GFR-binding peptide
  MOD_RES (1)..(3)..(36)..(37): Xaa is C or S
  MOD_RES (14)..(15)..(16)..(17)..(18): Xaa is A or G
  MOD_RES (19)..(20)..(21)..(22): Xaa is A or G or is absent

SEQ ID NO: 24228 - protein, 39 aa, Artificial Sequence; identical to SEQ ID NO: 3236
  GFR-binding peptide
  MOD_RES (2)..(4)..(38): Xaa is C or S
  MOD_RES (16)..(17)..(18)..(19)..(20): Xaa is A or G
  MOD_RES (21)..(22)..(23)..(24): Xaa is A or G or is absent

SEQ ID NO: 24229 - protein, 43 aa, Artificial Sequence
  GFR-binding peptide
  MOD_RES (2)..(37)..(38): Xaa is C or S
  MOD_RES (15)..(16)..(17)..(18)..(19): Xaa is A or G
  MOD_RES (20)..(21)..(22)..(23): Xaa is A or G or is absent
GXEAVSMGEEYQKYXXXXXXXXXIYLVSIPSLKTPVXXAKGVK

SEQ ID NO: 24230 - protein, 35 aa, Artificial Sequence
  GFR-binding peptide
  MOD_RES (33)..(34): Xaa is C or S
  MOD_RES (11)..(12)..(13)..(14)..(15): Xaa is A or G
  MOD_RES (16)..(17)..(18)..(19): Xaa is A or G or is absent
RVVMNEYQKYXXXXXXXXXIYLVSIPSLQTPAXXP

SEQ ID NO: 24231 - protein, 36 aa, Artificial Sequence
  GFR-binding peptide
  MOD_RES (2)..(33)..(34): Xaa is C or S
KXSRVIMEYQKYVKPKRGVIYLISIPSLAQPVXXPA

SEQ ID NO: 24232 - protein, 35 aa, Artificial Sequence; identical to SEQ ID NO: 3240
  GFR-binding peptide
  MOD_RES (34)..(35): Xaa is C or S
  MOD_RES (12)..(13)..(14)..(15)..(16): Xaa is A or G
  MOD_RES (17)..(18)..(19)..(20): Xaa is A or G or is absent

SEQ ID NO: 24233 - protein, 40 aa, Artificial Sequence
  GFR-binding peptide
  MOD_RES (1)..(3)..(37)..(38): Xaa is C or S
  MOD_RES (15)..(16)..(17)..(18)..(19): Xaa is A or G
  MOD_RES (20)..(21)..(22)..(23): Xaa is A or G or is absent
XGXGEVVMEEYQKYXXXXXXXXXIYLMSIPSLETPVXXAK

SEQ ID NO: 24234 - protein, 31 aa, Artificial Sequence; identical to SEQ ID NO: 3242
  GFR-binding peptide
  MOD_RES (1)..(1): Xaa is C or S

SEQ ID NO: 24235 - protein, 39 aa, Artificial Sequence
  GFR-binding peptide
  MOD_RES (2)..(36)..(37): Xaa is C or S
  MOD_RES (14)..(15)..(16)..(17)..(18): Xaa is A or G
  MOD_RES (19)..(20)..(21)..(22): Xaa is A or G or is absent
GXAEVVMDYHYKLXXXXXXXXXKYLISIPSLRAPVXXSA

SEQ ID NO: 24236 - protein, 39 aa, Artificial Sequence
  GFR-binding peptide
  MOD_RES (2)..(35)..(36): Xaa is C or S
  MOD_RES (13)..(14)..(15)..(16)..(17): Xaa is A or G
  MOD_RES (18)..(19)..(20)..(21): Xaa is A or G or is absent
KXSKVIMEYKFKXXXXXXXXXLYLISIPELDQSVXXPSA

SEQ ID NO: 24237 - protein, 36 aa, Artificial Sequence
  GFR-binding peptide
  MOD_RES (2)..(4)..(36): Xaa is C or S
RXGXESVAMGYHYKLYTVVGKDKYLISIPSLKTPVX

SEQ ID NO: 24238 - protein, 41 aa, Artificial Sequence
  GFR-binding peptide
  MOD_RES (2)..(36)..(37): Xaa is C or S
  MOD_RES (14)..(15)..(16)..(17)..(18): Xaa is A or G
  MOD_RES (19)..(20)..(21)..(22): Xaa is A or G or is absent
GXAEVVMDYHYKLXXXXXXXXXKYLISIPSLRAPVXXSAPA

SEQ ID NO: 24239 - protein, 40 aa, Artificial Sequence; identical to SEQ ID NO: 3247
  GFR-binding peptide
  MOD_RES (2)..(4)..(38)..(39): Xaa is C or S
  MOD_RES (16)..(17)..(18)..(19)..(20): Xaa is A or G
  MOD_RES (21)..(22)..(23)..(24): Xaa is A or G or is absent

SEQ ID NO: 24240 - protein, 33 aa, Artificial Sequence; identical to SEQ ID NO: 3250
  GFR-binding peptide
  MOD_RES (31)..(32): Xaa is C or S

SEQ ID NO: 24241 - protein, 32 aa, Artificial Sequence; identical to SEQ ID NO: 3253
  GFR-binding peptide
  MOD_RES (1)..(1): Xaa is C or S

SEQ ID NO: 24242 - protein, 41 aa, Artificial Sequence; identical to SEQ ID NO: 3255
  GFR-binding peptide
  MOD_RES (1)..(3)..(37)..(38): Xaa is C or S
  MOD_RES (15)..(16)..(17)..(18)..(19): Xaa is A or G
  MOD_RES (20)..(21)..(22)..(23): Xaa is A or G or is absent

SEQ ID NO: 24243 - protein, 38 aa, Artificial Sequence
  GFR-binding peptide
  MOD_RES (1)..(36)..(37): Xaa is C or S
  MOD_RES (14)..(15)..(16)..(17)..(18): Xaa is A or G
  MOD_RES (19)..(20)..(21)..(22): Xaa is A or G or is absent
XEAVSMGEEYQKYXXXXXXXXXIYLVSIPSLKTPVXXA

SEQ ID NO: 24244 - protein, 37 aa, Artificial Sequence
  GFR-binding peptide
  MOD_RES (34)..(35): Xaa is C or S
  MOD_RES (12)..(13)..(14)..(15)..(16): Xaa is A or G
  MOD_RES (17)..(18)..(19)..(20): Xaa is A or G or is absent
AKVVMNEYQKYXXXXXXXXXIYLVSIPSLKTPAXXAK

SEQ ID NO: 24245 - protein, 42 aa, Artificial Sequence
  GFR-binding peptide
  MOD_RES (1)..(3)..(36)..(37): Xaa is C or S
XGXEAVSMGEEYQKYTPVGMDDIYLVSIPSLKTPVXXAKGVK

SEQ ID NO: 24246 - protein, 40 aa, Artificial Sequence
  GFR-binding peptide
  MOD_RES (2)..(34)..(35): Xaa is C or S
GXESVAMGEYKFKYTVVGKDLYLISIPELKTPVXXAKSAK

SEQ ID NO: 24247 - protein, 35 aa, Artificial Sequence; identical to SEQ ID NO: 3257
  GFR-binding peptide
  MOD_RES (1)..(35): Xaa is C or S
  MOD_RES (13)..(14)..(15)..(16)..(17): Xaa is A or G
  MOD_RES (18)..(19)..(20)..(21): Xaa is A or G or is absent

SEQ ID NO: 24248 - protein, 38 aa, Artificial Sequence
  GFR-binding peptide
  MOD_RES (1)..(33)..(34): Xaa is C or S
XGEVVMDEYQKYVVKENEDIYLMSIPSLETPVXXAKPI

SEQ ID NO: 24249 - protein, 37 aa, Artificial Sequence; identical to SEQ ID NO: 3258
  GFR-binding peptide
  MOD_RES (2)..(4)..(37): Xaa is C or S
  MOD_RES (15)..(16)..(17)..(18)..(19): Xaa is A or G
  MOD_RES (20)..(21)..(22)..(23): Xaa is A or G or is absent

SEQ ID NO: 24250 - protein, 42 aa, Artificial Sequence
  GFR-binding peptide
  MOD_RES (2)..(4)..(39)..(40): Xaa is C or S
  MOD_RES (17)..(18)..(19)..(20)..(21): Xaa is A or G
  MOD_RES (22)..(23)..(24)..(25): Xaa is A or G or is absent
RXGXEAVSMGEEYKFKXXXXXXXXXLYLVSIPELKTPVXXAK

SEQ ID NO: 24251 - protein, 37 aa, Artificial Sequence
  GFR-binding peptide
  MOD_RES (31)..(32): Xaa is C or S
KVVMNEYQKYIVNNSSDIYLVSIPSLKTPAXXAKPVA

SEQ ID NO: 24252 - protein, 39 aa, Artificial Sequence
  GFR-binding peptide
  MOD_RES (1)..(3)..(34)..(35): Xaa is C or S
XKXSKVVMEYQKYVKPTRGVIYLISIPSLDQPVXXPSAS

SEQ ID NO: 24253 - protein, 36 aa, Artificial Sequence; identical to SEQ ID NO: 3263
  GFR-binding peptide
  MOD_RES (1)..(33)..(34): Xaa is C or S

SEQ ID NO: 24254 - protein, 39 aa, Artificial Sequence
  GFR-binding peptide
  MOD_RES (2)..(4)..(38)..(39): Xaa is C or S
  MOD_RES (16)..(17)..(18)..(19)..(20): Xaa is A or G
  MOD_RES (21)..(22)..(23)..(24): Xaa is A or G or is absent
RXGXAEVVMDEYKFKXXXXXXXXXLYLISIPELRAPVXX

SEQ ID NO: 24255 - protein, 36 aa, Artificial Sequence
  GFR-binding peptide
  MOD_RES (33)..(34): Xaa is C or S
  MOD_RES (11)..(12)..(13)..(14)..(15): Xaa is A or G
  MOD_RES (16)..(17)..(18)..(19): Xaa is A or G or is absent
SVAMGEYQKYXXXXXXXXXIYLISIPSLKTPVXXAK

SEQ ID NO: 24256 - protein, 37 aa, Artificial Sequence
  GFR-binding peptide
  MOD_RES (1)..(3)..(34)..(35): Xaa is C or S
XKXSRVIMEYQKYVKPKRGVIYLISIPSLAQPVXXPA

SEQ ID NO: 24257 - protein, 32 aa, Artificial Sequence
  GFR-binding peptide
  MOD_RES (2)..(2): Xaa is C or S
KXSRVIMEYKFKVKPKRGVLYLISIPELAQPV

SEQ ID NO: 24258 - protein, 35 aa, Artificial Sequence
  GFR-binding peptide
  MOD_RES (31)..(32): Xaa is C or S
KVVMNEYQKYIVNNSSDIYLVSIPSLKTPAXXAKP

SEQ ID NO: 24259 - protein, 37 aa, Artificial Sequence
  GFR-binding peptide
  MOD_RES (1)..(36)..(37): Xaa is C or S
  MOD_RES (14)..(15)..(16)..(17)..(18): Xaa is A or G
  MOD_RES (19)..(20)..(21)..(22): Xaa is A or G or is absent
XEAVSMGEEYKFKXXXXXXXXXLYLVSIPELKTPVXX

SEQ ID NO: 24260 - protein, 41 aa, Artificial Sequence
  GFR-binding peptide
  MOD_RES (2)..(36)..(37): Xaa is C or S
  MOD_RES (14)..(15)..(16)..(17)..(18): Xaa is A or G
  MOD_RES (19)..(20)..(21)..(22): Xaa is A or G or is absent
GXARVVMNEYQKYXXXXXXXXXIYLVSIPSLQTPAXXPKPV

SEQ ID NO: 24261 - protein, 35 aa, Artificial Sequence; identical to SEQ ID NO: 3270
  GFR-binding peptide
  MOD_RES (2)..(4): Xaa is C or S

SEQ ID NO: 24262 - protein, 42 aa, Artificial Sequence
  GFR-binding peptide
  MOD_RES (2)..(4)..(36)..(37): Xaa is C or S
HXGXAKVVMNEYQKYIVNNSSDIYLVSIPSLKTPAXXAKPVA

SEQ ID NO: 24263 - protein, 32 aa, Artificial Sequence
  GFR-binding peptide
  MOD_RES (11)..(12)..(13)..(14)..(15): Xaa is A or G
  MOD_RES (16)..(17)..(18)..(19): Xaa is A or G or is absent
SKVVMEYKFKXXXXXXXXXLYLISIPELDQPV

SEQ ID NO: 24264 - protein, 31 aa, Artificial Sequence
  GFR-binding peptide
ESVAMGEYKFKYTVVGKDLYLISIPELKTPV

SEQ ID NO: 24265 - protein, 36 aa, Artificial Sequence
  GFR-binding peptide
  MOD_RES (2)..(34)..(35): Xaa is C or S
GXAEVVMDYHYKLVVNNAADKYLISIPSLRAPVXXS

SEQ ID NO: 24266 - protein, 42 aa, Artificial Sequence; identical to SEQ ID NO: 3272
  GFR-binding peptide
  MOD_RES (2)..(4)..(36)..(37): Xaa is C or S

SEQ ID NO: 24267 - protein, 33 aa, Artificial Sequence
  GFR-binding peptide
  MOD_RES (1)..(33): Xaa is C or S
XESVAMGYHYKLYTVVGKDKYLISIPSLKTPVX

SEQ ID NO: 24268 - protein, 38 aa, Artificial Sequence
  GFR-binding peptide
  MOD_RES (2)..(4)..(38): Xaa is C or S
  MOD_RES (16)..(17)..(18)..(19)..(20): Xaa is A or G
  MOD_RES (21)..(22)..(23)..(24): Xaa is A or G or is absent
HXGXARVVMNEYKFKXXXXXXXXXLYLVSIPELQTPAX

SEQ ID NO: 24269 - protein, 37 aa, Artificial Sequence; identical to SEQ ID NO: 3273
  GFR-binding peptide
  MOD_RES (33)..(33): Xaa is C or S
  MOD_RES (11)..(12)..(13)..(14)..(15): Xaa is A or G
  MOD_RES (16)..(17)..(18)..(19): Xaa is A or G or is absent

SEQ ID NO: 24270 - protein, 39 aa, Artificial Sequence; identical to SEQ ID NO: 3277
  GFR-binding peptide
  MOD_RES (1)..(33)..(34): Xaa is C or S

SEQ ID NO: 24271 - protein, 41 aa, Artificial Sequence; identical to SEQ ID NO: 3278
  GFR-binding peptide
  MOD_RES (2)..(35)..(36): Xaa is C or S

SEQ ID NO: 24272 - protein, 39 aa, Artificial Sequence
  GFR-binding peptide
  MOD_RES (2)..(35)..(36): Xaa is C or S
GXEAVSMGEEYKFKTPVGMDDLYLVSIPELKTPVXXAKG

SEQ ID NO: 24273 - protein, 34 aa, Artificial Sequence
  GFR-binding peptide
  MOD_RES (1)..(32)..(33): Xaa is C or S
XSRVIMEYQKYVKPKRGVIYLISIPSLAQPVXXP

SEQ ID NO: 24274 - protein, 33 aa, Artificial Sequence; identical to SEQ ID NO: 3281
  GFR-binding peptide
  MOD_RES (2)..(33): Xaa is C or S

SEQ ID NO: 24275 - protein, 42 aa, Artificial Sequence
  GFR-binding peptide
  MOD_RES (2)..(36)..(37): Xaa is C or S
  MOD_RES (14)..(15)..(16)..(17)..(18): Xaa is A or G
  MOD_RES (19)..(20)..(21)..(22): Xaa is A or G or is absent
GXSRVVMNEYQKYXXXXXXXXXIYLVSIPSLKTPAXXPKPVY

SEQ ID NO: 24276 - protein, 35 aa, Artificial Sequence
  GFR-binding peptide
  MOD_RES (31)..(32): Xaa is C or S
EVVMDEYKFKVVNNAADLYLISIPELRAPVXXSAP

SEQ ID NO: 24277 - protein, 37 aa, Artificial Sequence
  GFR-binding peptide
  MOD_RES (2)..(36)..(37): Xaa is C or S
  MOD_RES (14)..(15)..(16)..(17)..(18): Xaa is A or G
  MOD_RES (19)..(20)..(21)..(22): Xaa is A or G or is absent
GXESVAMGYHYKLXXXXXXXXXKYLISIPSLKTPVXX

SEQ ID NO: 24278 - protein, 35 aa, Artificial Sequence; identical to SEQ ID NO: 3283
  GFR-binding peptide
  MOD_RES (1)..(35): Xaa is C or S
  MOD_RES (13)..(14)..(15)..(16)..(17): Xaa is A or G
  MOD_RES (18)..(19)..(20)..(21): Xaa is A or G or is absent

SEQ ID NO: 24279 - protein, 38 aa, Artificial Sequence
  GFR-binding peptide
  MOD_RES (32)..(32): Xaa is C or S
SRVVMNEYKFKIVNSSDDLYLVSIPELKTPAXTPKTVH

SEQ ID NO: 24280 - protein, 35 aa, Artificial Sequence; identical to SEQ ID NO: 3286
  GFR-binding peptide
  MOD_RES (1)..(3)..(34)..(35): Xaa is C or S

SEQ ID NO: 24281 - protein, 37 aa, Artificial Sequence
  GFR-binding peptide
  MOD_RES (33)..(33): Xaa is C or S
  MOD_RES (11)..(12)..(13)..(14)..(15): Xaa is A or G
  MOD_RES (16)..(17)..(18)..(19): Xaa is A or G or is absent
RVVMNEYKFKXXXXXXXXXLYLVSIPELKTPAXTPKT

SEQ ID NO: 24282 - protein, 34 aa, Artificial Sequence
  GFR-binding peptide
  MOD_RES (34)..(34): Xaa is C or S
  MOD_RES (12)..(13)..(14)..(15)..(16): Xaa is A or G
  MOD_RES (17)..(18)..(19)..(20): Xaa is A or G or is absent
AEVVMDYHYKLXXXXXXXXXKYLISIPSLRAPVX

SEQ ID NO: 24283 - protein, 34 aa, Artificial Sequence
  GFR-binding peptide
  MOD_RES (1)..(3): Xaa is C or S
XGXGEVVMEEYQKYVVKDYEDIYLMSIPSLETPV

SEQ ID NO: 24284 - protein, 32 aa, Artificial Sequence; identical to SEQ ID NO: 3291
  GFR-binding peptide
  MOD_RES (1)..(1): Xaa is C or S

SEQ ID NO: 24285 - protein, 41 aa, Artificial Sequence; identical to SEQ ID NO: 3292
  GFR-binding peptide
  MOD_RES (1)..(3)..(36)..(37): Xaa is C or S
  MOD_RES (14)..(15)..(16)..(17)..(18): Xaa is A or G
  MOD_RES (19)..(20)..(21)..(22): Xaa is A or G or is absent

SEQ ID NO: 24286 - protein, 33 aa, Artificial Sequence; identical to SEQ ID NO: 3294
  GFR-binding peptide
  MOD_RES (2)..(33): Xaa is C or S

SEQ ID NO: 24287 - protein, 36 aa, Artificial Sequence; identical to SEQ ID NO: 3296
  GFR-binding peptide
  MOD_RES (1)..(35)..(36): Xaa is C or S
  MOD_RES (13)..(14)..(15)..(16)..(17): Xaa is A or G
  MOD_RES (18)..(19)..(20)..(21): Xaa is A or G or is absent

SEQ ID NO: 24288 - protein, 39 aa, Artificial Sequence
  GFR-binding peptide
  MOD_RES (2)..(4)..(38)..(39): Xaa is C or S
  MOD_RES (16)..(17)..(18)..(19)..(20): Xaa is A or G
  MOD_RES (21)..(22)..(23)..(24): Xaa is A or G or is absent
HXGXSRVVMNEYKFKXXXXXXXXXLYLVSIPELKTPAXX

SEQ ID NO: 24289 - protein, 37 aa, Artificial Sequence
  GFR-binding peptide
  MOD_RES (2)..(36)..(37): Xaa is C or S
  MOD_RES (14)..(15)..(16)..(17)..(18): Xaa is A or G
  MOD_RES (19)..(20)..(21)..(22): Xaa is A or G or is absent
GXESVAMGEYKFKXXXXXXXXXLYLISIPELKTPVXX

SEQ ID NO: 24290 - protein, 40 aa, Artificial Sequence
  GFR-binding peptide
  MOD_RES (34)..(35): Xaa is C or S
  MOD_RES (12)..(13)..(14)..(15)..(16): Xaa is A or G
  MOD_RES (17)..(18)..(19)..(20): Xaa is A or G or is absent
ESVAMGRYKKLXXXXXXXXXFYLISIANLKTPVXXAKSAK

SEQ ID NO: 24291 - protein, 35 aa, Artificial Sequence
  GFR-binding peptide
  MOD_RES (1)..(34)..(35): Xaa is C or S
  MOD_RES (12)..(13)..(14)..(15)..(16): Xaa is A or G
  MOD_RES (17)..(18)..(19)..(20): Xaa is A or G or is absent
XSRVIMEYKFKXXXXXXXXXLYLISIPELAQPVXX

SEQ ID NO: 24292 - protein, 34 aa, Artificial Sequence
  GFR-binding peptide
  MOD_RES (31)..(31): Xaa is C or S
RVVMNEYKFKIVNSSDDLYLVSIPELKTPAXTPK

SEQ ID NO: 24293 - protein, 38 aa, Artificial Sequence
  GFR-binding peptide
  MOD_RES (33)..(34): Xaa is C or S
  MOD_RES (11)..(12)..(13)..(14)..(15): Xaa is A or G
  MOD_RES (16)..(17)..(18)..(19): Xaa is A or G or is absent
KVVMNEYKFKXXXXXXXXXLYLVSIPELKTPAXXAKPV

SEQ ID NO: 24294 - protein, 40 aa, Artificial Sequence
  GFR-binding peptide
  MOD_RES (2)..(36)..(37): Xaa is C or S
  MOD_RES (14)..(15)..(16)..(17)..(18): Xaa is A or G
  MOD_RES (19)..(20)..(21)..(22): Xaa is A or G or is absent
GXESVAMGEYKFKXXXXXXXXXLYLISIPELKTPVXXAKS

SEQ ID NO: 24295 - protein, 39 aa, Artificial Sequence
  GFR-binding peptide
  MOD_RES (2)..(4)..(36)..(37): Xaa is C or S
HXGXARVVMNEYQKYIVNSSDDIYLVSIPSLQTPAXXPK

SEQ ID NO: 24296 - protein, 37 aa, Artificial Sequence
  GFR-binding peptide
  MOD_RES (2)..(34)..(35): Xaa is C or S
GXSRVVMNEYQKYIVNSSDDIYLVSIPSLKTPAXXPK

SEQ ID NO: 24297 - protein, 34 aa, Artificial Sequence
  GFR-binding peptide
  MOD_RES (34)..(34): Xaa is C or S
  MOD_RES (12)..(13)..(14)..(15)..(16): Xaa is A or G
  MOD_RES (17)..(18)..(19)..(20): Xaa is A or G or is absent
ESVAMGEYQKYXXXXXXXXXIYLISIPSLKTPVX

SEQ ID NO: 24298 - protein, 39 aa, Artificial Sequence
  GFR-binding peptide
  MOD_RES (1)..(34)..(35): Xaa is C or S
  MOD_RES (12)..(13)..(14)..(15)..(16): Xaa is A or G
  MOD_RES (17)..(18)..(19)..(20): Xaa is A or G or is absent
XSKVIMEYQKYXXXXXXXXXIYLISIPSLDQSVXXPSAS

SEQ ID NO: 24299 - protein, 38 aa, Artificial Sequence
  GFR-binding peptide
  MOD_RES (2)..(4)..(37)..(38): Xaa is C or S
  MOD_RES (15)..(16)..(17)..(18)..(19): Xaa is A or G
  MOD_RES (20)..(21)..(22)..(23): Xaa is A or G or is absent
SXKXSRVIMEYKFKXXXXXXXXXLYLISIPELAQPVXX

SEQ ID NO: 24300 - protein, 31 aa, Artificial Sequence; identical to SEQ ID NO: 3305
  GFR-binding peptide
  MOD_RES (31)..(31): Xaa is C or S

SEQ ID NO: 24301 - protein, 30 aa, Artificial Sequence
  GFR-binding peptide
SVAMGRYKKLYTVVGKDFYLISIANLKTPV

SEQ ID NO: 24302 - protein, 41 aa, Artificial Sequence; identical to SEQ ID NO: 3308
  GFR-binding peptide
  MOD_RES (2)..(4)..(38)..(39): Xaa is C or S
  MOD_RES (16)..(17)..(18)..(19)..(20): Xaa is A or G
  MOD_RES (21)..(22)..(23)..(24): Xaa is A or G or is absent

SEQ ID NO: 24303 - protein, 33 aa, Artificial Sequence
  GFR-binding peptide
  MOD_RES (1)..(32)..(33): Xaa is C or S
XSKVIMEYKFKIKPTKGILYLISIPELDQSVXX

SEQ ID NO: 24304 - protein, 40 aa, Artificial Sequence; identical to SEQ ID NO: 3312
  GFR-binding peptide
  MOD_RES (1)..(35)..(36): Xaa is C or S
  MOD_RES (13)..(14)..(15)..(16)..(17): Xaa is A or G
  MOD_RES (18)..(19)..(20)..(21): Xaa is A or G or is absent

SEQ ID NO: 24305 - protein, 37 aa, Artificial Sequence; identical to SEQ ID NO: 3315
  GFR-binding peptide
  MOD_RES (32)..(33): Xaa is C or S

SEQ ID NO: 24306 - protein, 34 aa, Artificial Sequence; identical to SEQ ID NO: 3316
  GFR-binding peptide
  MOD_RES (2)..(2): Xaa is C or S

SEQ ID NO: 24307 - protein, 39 aa, Artificial Sequence
  GFR-binding peptide
  MOD_RES (1)..(34)..(35): Xaa is C or S
XEAVSMGEEYQKYTPVGMDDIYLVSIPSLKTPVXXAKGV

SEQ ID NO: 24308 - protein, 37 aa, Artificial Sequence
  GFR-binding peptide
  MOD_RES (1)..(3)..(34)..(35): Xaa is C or S
XKXSKVIMEYKFKIKPTKGILYLISIPELDQSVXXPS

SEQ ID NO: 24309 - protein, 35 aa, Artificial Sequence
  GFR-binding peptide
  MOD_RES (33)..(34): Xaa is C or S
  MOD_RES (11)..(12)..(13)..(14)..(15): Xaa is A or G
  MOD_RES (16)..(17)..(18)..(19): Xaa is A or G or is absent
SVAMGEYKFKXXXXXXXXXLYLISIPELKTPVXXA

SEQ ID NO: 24310 - protein, 35 aa, Artificial Sequence
  GFR-binding peptide
  MOD_RES (33)..(34): Xaa is C or S
  MOD_RES (11)..(12)..(13)..(14)..(15): Xaa is A or G
  MOD_RES (16)..(17)..(18)..(19): Xaa is A or G or is absent
SKVVMEYKFKXXXXXXXXXLYLISIPELDQPVXXP

SEQ ID NO: 24311 - protein, 38 aa, Artificial Sequence
  GFR-binding peptide
  MOD_RES (2)..(36)..(37): Xaa is C or S
  MOD_RES (14)..(15)..(16)..(17)..(18): Xaa is A or G
  MOD_RES (19)..(20)..(21)..(22): Xaa is A or G or is absent
GXAEVVMDEYQKYXXXXXXXXXIYLISIPSLRAPVXXS

SEQ ID NO: 24312 - protein, 34 aa, Artificial Sequence
  GFR-binding peptide
  MOD_RES (2)..(34): Xaa is C or S
GXESVAMGEYKFKYTVVGKDLYLISIPELKTPVX

SEQ ID NO: 24313 - protein, 36 aa, Artificial Sequence
  GFR-binding peptide
  MOD_RES (1)..(33)..(34): Xaa is C or S
XESVAMGEYKFKYTVVGKDLYLISIPELKTPVXXAK

SEQ ID NO: 24314 - protein, 36 aa, Artificial Sequence
  GFR-binding peptide
  MOD_RES (31)..(32): Xaa is C or S
RVVMNEYQKYIVNSSDDIYLVSIPSLQTPAXXPKPV

SEQ ID NO: 24315 - protein, 40 aa, Artificial Sequence
  GFR-binding peptide
  MOD_RES (2)..(4)..(36): Xaa is C or S
HXGXSRVVMNEYKFKIVNSSDDLYLVSIPELKTPAXTPKT

SEQ ID NO: 24316 - protein, 40 aa, Artificial Sequence; identical to SEQ ID NO: 3321
  GFR-binding peptide
  MOD_RES (1)..(3)..(37)..(38): Xaa is C or S
  MOD_RES (15)..(16)..(17)..(18)..(19): Xaa is A or G
  MOD_RES (20)..(21)..(22)..(23): Xaa is A or G or is absent

SEQ ID NO: 24317 - protein, 38 aa, Artificial Sequence
  GFR-binding peptide
  MOD_RES (2)..(37)..(38): Xaa is C or S
  MOD_RES (15)..(16)..(17)..(18)..(19): Xaa is A or G
  MOD_RES (20)..(21)..(22)..(23): Xaa is A or G or is absent
GXEAVSMGEEYQKYXXXXXXXXXIYLVSIPSLKTPVXX

SEQ ID NO: 24318 - protein, 38 aa, Artificial Sequence
  GFR-binding peptide
  MOD_RES (2)..(36)..(37): Xaa is C or S
  MOD_RES (14)..(15)..(16)..(17)..(18): Xaa is A or G
  MOD_RES (19)..(20)..(21)..(22): Xaa is A or G or is absent
GXGEVVMEEYKFKXXXXXXXXXLYLMSIPELETPVXXA

SEQ ID NO: 24319 - protein, 38 aa, Artificial Sequence; identical to SEQ ID NO: 3324
  GFR-binding peptide
  MOD_RES (2)..(36)..(37): Xaa is C or S
  MOD_RES (14)..(15)..(16)..(17)..(18): Xaa is A or G
  MOD_RES (19)..(20)..(21)..(22): Xaa is A or G or is absent

SEQ ID NO: 24320 - protein, 38 aa, Artificial Sequence
  GFR-binding peptide
  MOD_RES (2)..(33)..(34): Xaa is C or S
KXSKVVMEYKFKVKPTRGVLYLISIPELDQPVXXPSAS

SEQ ID NO: 24321 - protein, 40 aa, Artificial Sequence; identical to SEQ ID NO: 3327
  GFR-binding peptide
  MOD_RES (1)..(3)..(36)..(37): Xaa is C or S
  MOD_RES (14)..(15)..(16)..(17)..(18): Xaa is A or G
  MOD_RES (19)..(20)..(21)..(22): Xaa is A or G or is absent

SEQ ID NO: 24322 - protein, 38 aa, Artificial Sequence; identical to SEQ ID NO: 3328
  GFR-binding peptide
  MOD_RES (34)..(34): Xaa is C or S
  MOD_RES (12)..(13)..(14)..(15)..(16): Xaa is A or G
  MOD_RES (17)..(18)..(19)..(20): Xaa is A or G or is absent

SEQ ID NO: 24323 - protein, 35 aa, Artificial Sequence; identical to SEQ ID NO: 3329
  GFR-binding peptide
  MOD_RES (2)..(4): Xaa is C or S

SEQ ID NO: 24324 - protein, 39 aa, Artificial Sequence; identical to SEQ ID NO: 3330
  GFR-binding peptide
  MOD_RES (1)..(33)..(34): Xaa is C or S

SEQ ID NO: 24325 - protein, 40 aa, Artificial Sequence; identical to SEQ ID NO: 3331
  GFR-binding peptide
  MOD_RES (2)..(4)..(37)..(38): Xaa is C or S
  MOD_RES (15)..(16)..(17)..(18)..(19): Xaa is A or G
  MOD_RES (20)..(21)..(22)..(23): Xaa is A or G or is absent

SEQ ID NO: 24326 - protein, 35 aa, Artificial Sequence
  GFR-binding peptide
  MOD_RES (34)..(35): Xaa is C or S
  MOD_RES (12)..(13)..(14)..(15)..(16): Xaa is A or G
  MOD_RES (17)..(18)..(19)..(20): Xaa is A or G or is absent
AKVVMNEYKFKXXXXXXXXXLYLVSIPELKTPAXX

SEQ ID NO: 24327 - protein, 37 aa, Artificial Sequence; identical to SEQ ID NO: 3340
  GFR-binding peptide
  MOD_RES (2)..(4)..(37): Xaa is C or S
  MOD_RES (15)..(16)..(17)..(18)..(19): Xaa is A or G
  MOD_RES (20)..(21)..(22)..(23): Xaa is A or G or is absent

SEQ ID NO: 24328 - protein, 37 aa, Artificial Sequence; identical to SEQ ID NO: 3341
  GFR-binding peptide
  MOD_RES (2)..(35)..(36): Xaa is C or S
  MOD_RES (13)..(14)..(15)..(16)..(17): Xaa is A or G
  MOD_RES (18)..(19)..(20)..(21): Xaa is A or G or is absent

SEQ ID NO: 24329 - protein, 37 aa, Artificial Sequence; identical to SEQ ID NO: 3342
  GFR-binding peptide
  MOD_RES (1)..(32)..(33): Xaa is C or S

SEQ ID NO: 24330 - protein, 35 aa, Artificial Sequence
  GFR-binding peptide
  MOD_RES (1)..(33)..(34): Xaa is C or S
XGEVVMDEYKFKVVKENEDLYLMSIPELETPVXXA

SEQ ID NO: 24331 - protein, 37 aa, Artificial Sequence
  GFR-binding peptide
  MOD_RES (2)..(34)..(35): Xaa is C or S
GXAKVVMNEYQKYIVNNSSDIYLVSIPSLKTPAXXAK

SEQ ID NO: 24332 - protein, 35 aa, Artificial Sequence
  GFR-binding peptide
  MOD_RES (34)..(35): Xaa is C or S
  MOD_RES (12)..(13)..(14)..(15)..(16): Xaa is A or G
  MOD_RES (17)..(18)..(19)..(20): Xaa is A or G or is absent
ESVAMGRYKKLXXXXXXXXXFYLISIANLKTPVXX

SEQ ID NO: 24333 - protein, 38 aa, Artificial Sequence
  GFR-binding peptide
  MOD_RES (34)..(35): Xaa is C or S
  MOD_RES (12)..(13)..(14)..(15)..(16): Xaa is A or G
  MOD_RES (17)..(18)..(19)..(20): Xaa is A or G or is absent
AEVVMDEYKFKXXXXXXXXXLYLISIPELRAPVXXSAP

SEQ ID NO: 24334 - protein, 39 aa, Artificial Sequence
  GFR-binding peptide
  MOD_RES (34)..(35): Xaa is C or S
  MOD_RES (12)..(13)..(14)..(15)..(16): Xaa is A or G
  MOD_RES (17)..(18)..(19)..(20): Xaa is A or G or is absent
AKVVMNEYQKYXXXXXXXXXIYLVSIPSLKTPAXXAKPV

SEQ ID NO: 24335 - protein, 36 aa, Artificial Sequence; identical to SEQ ID NO: 3353
  GFR-binding peptide
  MOD_RES (2)..(34)..(35): Xaa is C or S

SEQ ID NO: 24336 - protein, 38 aa, Artificial Sequence; identical to SEQ ID NO: 3355
  GFR-binding peptide
  MOD_RES (2)..(4)..(37)..(38): Xaa is C or S
  MOD_RES (15)..(16)..(17)..(18)..(19): Xaa is A or G
  MOD_RES (20)..(21)..(22)..(23): Xaa is A or G or is absent

SEQ ID NO: 24337 - protein, 43 aa, Artificial Sequence; identical to SEQ ID NO: 3356
  GFR-binding peptide
  MOD_RES (1)..(3)..(37)..(38): Xaa is C or S
  MOD_RES (15)..(16)..(17)..(18)..(19): Xaa is A or G
  MOD_RES (20)..(21)..(22)..(23): Xaa is A or G or is absent

SEQ ID NO: 24338 - protein, 35 aa, Artificial Sequence
  GFR-binding peptide
  MOD_RES (31)..(32): Xaa is C or S
EVVMDRYKKLVVNNAADFYLISIANLRAPVXXSAP

SEQ ID NO: 24339 - protein, 41 aa, Artificial Sequence
  GFR-binding peptide
  MOD_RES (2)..(35)..(36): Xaa is C or S
  MOD_RES (13)..(14)..(15)..(16)..(17): Xaa is A or G
  MOD_RES (18)..(19)..(20)..(21): Xaa is A or G or is absent
KXSRVIMEYQKYXXXXXXXXXIYLISIPSLAQPVXXPAASA

SEQ ID NO: 24340 - protein, 34 aa, Artificial Sequence
  GFR-binding peptide
  MOD_RES (31)..(32): Xaa is C or S
EVVMDYHYKLVVNNAADKYLISIPSLRAPVXXSA

SEQ ID NO: 24341 - protein, 34 aa, Artificial Sequence; identical to SEQ ID NO: 3360
  GFR-binding peptide
  MOD_RES (1)..(32)..(33): Xaa is C or S

SEQ ID NO: 24342 - protein, 39 aa, Artificial Sequence
  GFR-binding peptide
  MOD_RES (1)..(33)..(34): Xaa is C or S
XAEVVMDRYKKLVVNNAADFYLISIANLRAPVXXSAPAA

SEQ ID NO: 24343 - protein, 36 aa, Artificial Sequence
  GFR-binding peptide
  MOD_RES (2)..(4): Xaa is C or S
RXGXEAVSMGEEYKFKTPVGMDDLYLVSIPELKTPV

SEQ ID NO: 24344 - protein, 42 aa, Artificial Sequence; identical to SEQ ID NO: 3362
  GFR-binding peptide
  MOD_RES (2)..(4)..(37)..(38): Xaa is C or S
  MOD_RES (15)..(16)..(17)..(18)..(19): Xaa is A or G
  MOD_RES (20)..(21)..(22)..(23): Xaa is A or G or is absent

SEQ ID NO: 24345 - protein, 31 aa, Artificial Sequence; identical to SEQ ID NO: 3363
  GFR-binding peptide

SEQ ID NO: 24346 - protein, 33 aa, Artificial Sequence; identical to SEQ ID NO: 3364
  GFR-binding peptide
  MOD_RES (31)..(32): Xaa is C or S

SEQ ID NO: 24347 - protein, 36 aa, Artificial Sequence
  GFR-binding peptide
  MOD_RES (1)..(3): Xaa is C or S
  MOD_RES (15)..(16)..(17)..(18)..(19): Xaa is A or G
  MOD_RES (20)..(21)..(22)..(23): Xaa is A or G or is absent
XGXGEVVMDEYQKYXXXXXXXXXIYLMSIPSLETPV

SEQ ID NO: 24348 - protein, 40 aa, Artificial Sequence
  GFR-binding peptide
  MOD_RES (2)..(36)..(37): Xaa is C or S
  MOD_RES (14)..(15)..(16)..(17)..(18): Xaa is A or G
  MOD_RES (19)..(20)..(21)..(22): Xaa is A or G or is absent
GXESVAMGYHYKLXXXXXXXXXKYLISIPSLKTPVXXAKS

SEQ ID NO: 24349 - protein, 37 aa, Artificial Sequence; identical to SEQ ID NO: 3368
  GFR-binding peptide
  MOD_RES (2)..(4)..(36)..(37): Xaa is C or S

SEQ ID NO: 24350 - protein, 37 aa, Artificial Sequence; identical to SEQ ID NO: 3369
  GFR-binding peptide
  MOD_RES (2)..(4)..(36)..(37): Xaa is C or S

SEQ ID NO: 24351 - protein, 36 aa, Artificial Sequence; identical to SEQ ID NO: 3370
  GFR-binding peptide
  MOD_RES (1)..(35)..(36): Xaa is C or S
  MOD_RES (13)..(14)..(15)..(16)..(17): Xaa is A or G
  MOD_RES (18)..(19)..(20)..(21): Xaa is A or G or is absent

SEQ ID NO: 24352 - protein, 41 aa, Artificial Sequence
  GFR-binding peptide
  MOD_RES (1)..(3)..(35)..(36): Xaa is C or S
XGXESVAMGRYKKLYTVVGKDFYLISIANLKTPVXXAKSAK

SEQ ID NO: 24353 - protein, 37 aa, Artificial Sequence
  GFR-binding peptide
  MOD_RES (31)..(32): Xaa is C or S
EVVMDEYQKYVVKENEDIYLMSIPSLETPVXXAKPIK

SEQ ID NO: 24354 - protein, 37 aa, Artificial Sequence; identical to SEQ ID NO: 3372
  GFR-binding peptide
  MOD_RES (1)..(3)..(37): Xaa is C or S
  MOD_RES (15)..(16)..(17)..(18)..(19): Xaa is A or G
  MOD_RES (20)..(21)..(22)..(23): Xaa is A or G or is absent

SEQ ID NO: 24355 - protein, 39 aa, Artificial Sequence
  GFR-binding peptide
  MOD_RES (1)..(35)..(36): Xaa is C or S
  MOD_RES (13)..(14)..(15)..(16)..(17): Xaa is A or G
  MOD_RES (18)..(19)..(20)..(21): Xaa is A or G or is absent
XAEVVMDEYQKYXXXXXXXXXIYLISIPSLRAPVXXSAP

SEQ ID NO: 24356 - protein, 37 aa, Artificial Sequence; identical to SEQ ID NO: 3373
  GFR-binding peptide
  MOD_RES (1)..(3)..(34)..(35): Xaa is C or S

SEQ ID NO: 24357 - protein, 30 aa, Artificial Sequence
  GFR-binding peptide
SVAMGEYKFKYTVVGKDLYLISIPELKTPV

SEQ ID NO: 24358 - protein, 42 aa, Artificial Sequence; identical to SEQ ID NO: 3378
  GFR-binding peptide
  MOD_RES (1)..(3)..(37)..(38): Xaa is C or S
  MOD_RES (15)..(16)..(17)..(18)..(19): Xaa is A or G
  MOD_RES (20)..(21)..(22)..(23): Xaa is A or G or is absent

SEQ ID NO: 24359 - protein, 40 aa, Artificial Sequence; identical to SEQ ID NO: 3379
  GFR-binding peptide
  MOD_RES (2)..(34)..(35): Xaa is C or S

SEQ ID NO: 24360 - protein, 34 aa, Artificial Sequence
  GFR-binding peptide
  MOD_RES (1)..(1): Xaa is C or S
  MOD_RES (13)..(14)..(15)..(16)..(17): Xaa is A or G
  MOD_RES (18)..(19)..(20)..(21): Xaa is A or G or is absent
XGEVVMEEYKFKXXXXXXXXXLYLMSIPELETPV

SEQ ID NO: 24361 - protein, 37 aa, Artificial Sequence
  GFR-binding peptide
  MOD_RES (31)..(32): Xaa is C or S
SKVIMEYKFKIKPTKGILYLISIPELDQSVXXPSASA

SEQ ID NO: 24362 - protein, 39 aa, Artificial Sequence
  GFR-binding peptide
  MOD_RES (2)..(34)..(35): Xaa is C or S
GXAEVVMDYHYKLVVNNAADKYLISIPSLRAPVXXSAPA

SEQ ID NO: 24363 - protein, 38 aa, Artificial Sequence
  GFR-binding peptide
  MOD_RES (33)..(34): Xaa is C or S
  MOD_RES (11)..(12)..(13)..(14)..(15): Xaa is A or G
  MOD_RES (16)..(17)..(18)..(19): Xaa is A or G or is absent
SRVIMEYQKYXXXXXXXXXIYLISIPSLAQPVXXPAAS

SEQ ID NO: 24364 - protein, 32 aa, Artificial Sequence
  GFR-binding peptide
  MOD_RES (11)..(12)..(13)..(14)..(15): Xaa is A or G
  MOD_RES (16)..(17)..(18)..(19): Xaa is A or G or is absent
SVAMGEYQKYXXXXXXXXXIYLISIPSLKTPV

SEQ ID NO: 24365 - protein, 36 aa, Artificial Sequence; identical to SEQ ID NO: 3382
  GFR-binding peptide
  MOD_RES (1)..(35)..(36): Xaa is C or S
  MOD_RES (13)..(14)..(15)..(16)..(17): Xaa is A or G
  MOD_RES (18)..(19)..(20)..(21): Xaa is A or G or is absent

SEQ ID NO: 24366 - protein, 37 aa, Artificial Sequence
  GFR-binding peptide
  MOD_RES (33)..(34): Xaa is C or S
  MOD_RES (11)..(12)..(13)..(14)..(15): Xaa is A or G
  MOD_RES (16)..(17)..(18)..(19): Xaa is A or G or is absent
EVVMEEYQKYXXXXXXXXXIYLMSIPSLETPVXXAKP

SEQ ID NO: 24367 - protein, 36 aa, Artificial Sequence; identical to SEQ ID NO: 3388
  GFR-binding peptide
  MOD_RES (2)..(4)..(36): Xaa is C or S

SEQ ID NO: 24368 - protein, 38 aa, Artificial Sequence
  GFR-binding peptide
  MOD_RES (33)..(34): Xaa is C or S
  MOD_RES (11)..(12)..(13)..(14)..(15): Xaa is A or G
  MOD_RES (16)..(17)..(18)..(19): Xaa is A or G or is absent
EVVMDEYKFKXXXXXXXXXLYLISIPELRAPVXXSAPA

SEQ ID NO: 24369 - protein, 33 aa, Artificial Sequence
  GFR-binding peptide
  MOD_RES (33)..(33): Xaa is C or S
EAVSMGEEYKFKTPVGMDDLYLVSIPELKTPVX

SEQ ID NO: 24370 - protein, 32 aa, Artificial Sequence
  GFR-binding peptide
  MOD_RES (32)..(32): Xaa is C or S
AEVVMDYHYKLVVNNAADKYLISIPSLRAPVX

SEQ ID NO: 24371 - protein, 43 aa, Artificial Sequence
  GFR-binding peptide
  MOD_RES (2)..(4)..(38)..(39): Xaa is C or S
  MOD_RES (16)..(17)..(18)..(19)..(20): Xaa is A or G
  MOD_RES (21)..(22)..(23)..(24): Xaa is A or G or is absent
RXGXESVAMGYHYKLXXXXXXXXXKYLISIPSLKTPVXXAKSA

SEQ ID NO: 24372 - protein, 41 aa, Artificial Sequence; identical to SEQ ID NO: 3395
  GFR-binding peptide
  MOD_RES (2)..(4)..(38)..(39): Xaa is C or S
  MOD_RES (16)..(17)..(18)..(19)..(20): Xaa is A or G
  MOD_RES (21)..(22)..(23)..(24): Xaa is A or G or is absent

SEQ ID NO: 24373 - protein, 41 aa, Artificial Sequence
  GFR-binding peptide
  MOD_RES (2)..(4)..(38)..(39): Xaa is C or S
  MOD_RES (16)..(17)..(18)..(19)..(20): Xaa is A or G
  MOD_RES (21)..(22)..(23)..(24): Xaa is A or G or is absent
HXGXARVVMNEYQKYXXXXXXXXXIYLVSIPSLQTPAXXPK

SEQ ID NO: 24374 - protein, 37 aa, Artificial Sequence; identical to SEQ ID NO: 3399
  GFR-binding peptide
  MOD_RES (1)..(34)..(35): Xaa is C or S
  MOD_RES (12)..(13)..(14)..(15)..(16): Xaa is A or G
  MOD_RES (17)..(18)..(19)..(20): Xaa is A or G or is absent

SEQ ID NO: 24375 - protein, 44 aa, Artificial Sequence
  GFR-binding peptide
  MOD_RES (2)..(4)..(38): Xaa is C or S
  MOD_RES (16)..(17)..(18)..(19)..(20): Xaa is A or G
  MOD_RES (21)..(22)..(23)..(24): Xaa is A or G or is absent
HXGXSRVVMNEYQKYXXXXXXXXXIYLVSIPSLKTPAXTPKTVH

SEQ ID NO: 24376 - protein, 40 aa, Artificial Sequence
  GFR-binding peptide
  MOD_RES (1)..(35)..(36): Xaa is C or S
  MOD_RES (13)..(14)..(15)..(16)..(17): Xaa is A or G
  MOD_RES (18)..(19)..(20)..(21): Xaa is A or G or is absent
XESVAMGEYKFKXXXXXXXXXLYLISIPELKTPVXXAKSA

SEQ ID NO: 24377 - protein, 42 aa, Artificial Sequence
  GFR-binding peptide
  MOD_RES (2)..(4)..(36)..(37): Xaa is C or S
RXGXGEVVMEEYKFKVVKDYEDLYLMSIPELETPVXXAKPIS

SEQ ID NO: 24378 - protein, 35 aa, Artificial Sequence; identical to SEQ ID NO: 3404
  GFR-binding peptide
  MOD_RES (2)..(34)..(35): Xaa is C or S

SEQ ID NO: 24379 - protein, 42 aa, Artificial Sequence
  GFR-binding peptide
  MOD_RES (2)..(4)..(38)..(39): Xaa is C or S
  MOD_RES (16)..(17)..(18)..(19)..(20): Xaa is A or G
  MOD_RES (21)..(22)..(23)..(24): Xaa is A or G or is absent
HXGXAKVVMNEYQKYXXXXXXXXXIYLVSIPSLKTPAXXAKP

SEQ ID NO: 24380 - protein, 44 aa, Artificial Sequence
  GFR-binding peptide
  MOD_RES (2)..(4)..(38)..(39): Xaa is C or S
  MOD_RES (16)..(17)..(18)..(19)..(20): Xaa is A or G
  MOD_RES (21)..(22)..(23)..(24): Xaa is A or G or is absent
HXGXAKVVMNEYQKYXXXXXXXXXIYLVSIPSLKTPAXXAKPVA

SEQ ID NO: 24381 - protein, 38 aa, Artificial Sequence
  GFR-binding peptide
  MOD_RES (34)..(35): Xaa is C or S
  MOD_RES (12)..(13)..(14)..(15)..(16): Xaa is A or G
  MOD_RES (17)..(18)..(19)..(20): Xaa is A or G or is absent
ESVAMGYHYKLXXXXXXXXXKYLISIPSLKTPVXXAKS

SEQ ID NO: 24382 - protein, 38 aa, Artificial Sequence
  GFR-binding peptide
  MOD_RES (34)..(35): Xaa is C or S
  MOD_RES (12)..(13)..(14)..(15)..(16): Xaa is A or G
  MOD_RES (17)..(18)..(19)..(20): Xaa is A or G or is absent
AEVVMDYHYKLXXXXXXXXXKYLISIPSLRAPVXXSAP

SEQ ID NO: 24383 - protein, 40 aa, Artificial Sequence
  GFR-binding peptide
  MOD_RES (1)..(3)..(34)..(35): Xaa is C or S
XKXSRVIMEYQKYVKPKRGVIYLISIPSLAQPVXXPAASA

SEQ ID NO: 24384 - protein, 36 aa, Artificial Sequence
  GFR-binding peptide
  MOD_RES (2)..(35)..(36): Xaa is C or S
GXEAVSMGEEYKFKTPVGMDDLYLVSIPELKTPVXX

SEQ ID NO: 24385 - protein, 34 aa, Artificial Sequence
  GFR-binding peptide
  MOD_RES (1)..(1): Xaa is C or S
  MOD_RES (13)..(14)..(15)..(16)..(17): Xaa is A or G
  MOD_RES (18)..(19)..(20)..(21): Xaa is A or G or is absent
XESVAMGRYKKLXXXXXXXXXFYLISIANLKTPV

SEQ ID NO: 24386 - protein, 43 aa, Artificial Sequence
  GFR-binding peptide
  MOD_RES (2)..(4)..(38)..(39): Xaa is C or S
  MOD_RES (16)..(17)..(18)..(19)..(20): Xaa is A or G
  MOD_RES (21)..(22)..(23)..(24): Xaa is A or G or is absent
RXGXESVAMGEYQKYXXXXXXXXXIYLISIPSLKTPVXXAKSA

SEQ ID NO: 24387 - protein, 39 aa, Artificial Sequence; identical to SEQ ID NO: 3406
  GFR-binding peptide
  MOD_RES (2)..(34)..(35): Xaa is C or S

SEQ ID NO: 24388 - protein, 38 aa, Artificial Sequence
  GFR-binding peptide
  MOD_RES (1)..(3)..(35)..(36): Xaa is C or S
XGXESVAMGYHYKLYTVVGKDKYLISIPSLKTPVXXAK

SEQ ID NO: 24389 - protein, 37 aa, Artificial Sequence
  GFR-binding peptide
  MOD_RES (1)..(33)..(34): Xaa is C or S
XGEVVMDEYQKYVVKENEDIYLMSIPSLETPVXXAKP

SEQ ID NO: 24390 - protein, 37 aa, Artificial Sequence; identical to SEQ ID NO: 3408
  GFR-binding peptide
  MOD_RES (31)..(32): Xaa is C or S

SEQ ID NO: 24391 - protein, 34 aa, Artificial Sequence; identical to SEQ ID NO: 3409
  GFR-binding peptide
  MOD_RES (1)..(33): Xaa is C or S

SEQ ID NO: 24392 - protein, 39 aa, Artificial Sequence
  GFR-binding peptide
  MOD_RES (2)..(4)..(37)..(38): Xaa is C or S
  MOD_RES (15)..(16)..(17)..(18)..(19): Xaa is A or G
  MOD_RES (20)..(21)..(22)..(23): Xaa is A or G or is absent
SXKXSKVIMEYKFKXXXXXXXXXLYLISIPELDQSVXXP

SEQ ID NO: 24393 - protein, 35 aa, Artificial Sequence; identical to SEQ ID NO: 3410
  GFR-binding peptide
  MOD_RES (2)..(2): Xaa is C or S
  MOD_RES (14)..(15)..(16)..(17)..(18): Xaa is A or G
  MOD_RES (19)..(20)..(21)..(22): Xaa is A or G or is absent

SEQ ID NO: 24394 - protein, 40 aa, Artificial Sequence; identical to SEQ ID NO: 3411
  GFR-binding peptide
  MOD_RES (1)..(34)..(35): Xaa is C or S
  MOD_RES (12)..(13)..(14)..(15)..(16): Xaa is A or G
  MOD_RES (17)..(18)..(19)..(20): Xaa is A or G or is absent

SEQ ID NO: 24395 - protein, 37 aa, Artificial Sequence
  GFR-binding peptide
  MOD_RES (2)..(33)..(34): Xaa is C or S
KXSRVIMEYKFKVKPKRGVLYLISIPELAQPVXXPAA

SEQ ID NO: 24396 - protein, 33 aa, Artificial Sequence
  GFR-binding peptide
  MOD_RES (31)..(32): Xaa is C or S
RVVMNEYQKYIVNSSDDIYLVSIPSLKTPAXXP

SEQ ID NO: 24397 - protein, 34 aa, Artificial Sequence
  GFR-binding peptide
  MOD_RES (2)..(34): Xaa is C or S
GXGEVVMEEYKFKVVKDYEDLYLMSIPELETPVX

SEQ ID NO: 24398 - protein, 38 aa, Artificial Sequence
  GFR-binding peptide
  MOD_RES (1)..(33)..(34): Xaa is C or S
XGEVVMEEYKFKVVKDYEDLYLMSIPELETPVXXAKPI

SEQ ID NO: 24399 - protein, 38 aa, Artificial Sequence
  GFR-binding peptide
  MOD_RES (1)..(3)..(36)..(37): Xaa is C or S
XGXEAVSMGEEYQKYTPVGMDDIYLVSIPSLKTPVXXA

SEQ ID NO: 24400 - protein, 36 aa, Artificial Sequence; identical to SEQ ID NO: 3418
  GFR-binding peptide
  MOD_RES (33)..(34): Xaa is C or S
  MOD_RES (11)..(12)..(13)..(14)..(15): Xaa is A or G
  MOD_RES (16)..(17)..(18)..(19): Xaa is A or G or is absent

SEQ ID NO: 24401 - protein, 38 aa, Artificial Sequence
  GFR-binding peptide
  MOD_RES (2)..(4)..(37)..(38): Xaa is C or S
  MOD_RES (15)..(16)..(17)..(18)..(19): Xaa is A or G
  MOD_RES (20)..(21)..(22)..(23): Xaa is A or G or is absent
SXKXSRVIMEYQKYXXXXXXXXXIYLISIPSLAQPVXX

SEQ ID NO: 24402 - protein, 35 aa, Artificial Sequence; identical to SEQ ID NO: 3420
  GFR-binding peptide
  MOD_RES (32)..(33): Xaa is C or S

SEQ ID NO: 24403 - protein, 31 aa, Artificial Sequence
  GFR-binding peptide
GEVVMDEYQKYVVKENEDIYLMSIPSLETPV

SEQ ID NO: 24404 - protein, 40 aa, Artificial Sequence
  GFR-binding peptide
  MOD_RES (2)..(36)..(37): Xaa is C or S
  MOD_RES (14)..(15)..(16)..(17)..(18): Xaa is A or G
  MOD_RES (19)..(20)..(21)..(22): Xaa is A or G or is absent
GXARVVMNEYQKYXXXXXXXXXIYLVSIPSLQTPAXXPKP

SEQ ID NO: 24405 - protein, 38 aa, Artificial Sequence
  GFR-binding peptide
  MOD_RES (33)..(34): Xaa is C or S
  MOD_RES (11)..(12)..(13)..(14)..(15): Xaa is A or G
  MOD_RES (16)..(17)..(18)..(19): Xaa is A or G or is absent
RVVMNEYQKYXXXXXXXXXIYLVSIPSLKTPAXXPKPV

SEQ ID NO: 24406 - protein, 31 aa, Artificial Sequence; identical to SEQ ID NO: 3421
  GFR-binding peptide

SEQ ID NO: 24407 - protein, 35 aa, Artificial Sequence
  GFR-binding peptide
  MOD_RES (32)..(32): Xaa is C or S
SRVVMNEYKFKIVNSSDDLYLVSIPELKTPAXTPK

SEQ ID NO: 24408 - protein, 37 aa, Artificial Sequence
  GFR-binding peptide
  MOD_RES (2)..(4): Xaa is C or S
  MOD_RES (16)..(17)..(18)..(19)..(20): Xaa is A or G
  MOD_RES (21)..(22)..(23)..(24): Xaa is A or G or is absent
RXGXESVAMGYHYKLXXXXXXXXXKYLISIPSLKTPV

SEQ ID NO: 24409 - protein, 35 aa, Artificial Sequence
  GFR-binding peptide
  MOD_RES (34)..(35): Xaa is C or S
  MOD_RES (12)..(13)..(14)..(15)..(16): Xaa is A or G
  MOD_RES (17)..(18)..(19)..(20): Xaa is A or G or is absent
SRVVMNEYKFKXXXXXXXXXLYLVSIPELKTPAXX

SEQ ID NO: 24410 - protein, 39 aa, Artificial Sequence
  GFR-binding peptide
  MOD_RES (2)..(36)..(37): Xaa is C or S
  MOD_RES (14)..(15)..(16)..(17)..(18): Xaa is A or G
  MOD_RES (19)..(20)..(21)..(22): Xaa is A or G or is absent
GXSRVVMNEYQKYXXXXXXXXXIYLVSIPSLKTPAXXPK

SEQ ID NO: 24411 - protein, 36 aa, Artificial Sequence
  GFR-binding peptide
  MOD_RES (2)..(36): Xaa is C or S
  MOD_RES (14)..(15)..(16)..(17)..(18): Xaa is A or G
  MOD_RES (19)..(20)..(21)..(22): Xaa is A or G or is absent
GXARVVMNEYQKYXXXXXXXXXIYLVSIPSLQTPAX

SEQ ID NO: 24412 - protein, 38 aa, Artificial Sequence
  GFR-binding peptide
  MOD_RES (33)..(34): Xaa is C or S
  MOD_RES (11)..(12)..(13)..(14)..(15): Xaa is A or G
  MOD_RES (16)..(17)..(18)..(19): Xaa is A or G or is absent
RVVMNEYKFKXXXXXXXXXLYLVSIPELQTPAXXPKPV

SEQ ID NO: 24413 - protein, 36 aa, Artificial Sequence; identical to SEQ ID NO: 3423
  GFR-binding peptide
  MOD_RES (1)..(34)..(35): Xaa is C or S
  MOD_RES (12)..(13)..(14)..(15)..(16): Xaa is A or G
  MOD_RES (17)..(18)..(19)..(20): Xaa is A or G or is absent

SEQ ID NO: 24414 - protein, 38 aa, Artificial Sequence
  GFR-binding peptide
  MOD_RES (34)..(35): Xaa is C or S
  MOD_RES (12)..(13)..(14)..(15)..(16): Xaa is A or G
  MOD_RES (17)..(18)..(19)..(20): Xaa is A or G or is absent
ESVAMGEYQKYXXXXXXXXXIYLISIPSLKTPVXXAKS

SEQ ID NO: 24415 - protein, 33 aa, Artificial Sequence; identical to SEQ ID NO: 3424
  GFR-binding peptide
  MOD_RES (12)..(13)..(14)..(15)..(16): Xaa is A or G
  MOD_RES (17)..(18)..(19)..(20): Xaa is A or G or is absent

SEQ ID NO: 24416 - protein, 35 aa, Artificial Sequence
  GFR-binding peptide
  MOD_RES (2)..(4): Xaa is C or S
RXGXGEVVMEEYKFKVVKDYEDLYLMSIPELETPV

SEQ ID NO: 24417 - protein, 35 aa, Artificial Sequence
  GFR-binding peptide
  MOD_RES (1)..(35): Xaa is C or S
  MOD_RES (13)..(14)..(15)..(16)..(17): Xaa is A or G
  MOD_RES (18)..(19)..(20)..(21): Xaa is A or G or is absent
XSRVVMNEYQKYXXXXXXXXXIYLVSIPSLKTPAX

SEQ ID NO: 24418 - protein, 32 aa, Artificial Sequence
  GFR-binding peptide
  MOD_RES (31)..(32): Xaa is C or S
SKVVMEYKFKVKPTRGVLYLISIPELDQPVXX

SEQ ID NO: 24419 - protein, 41 aa, Artificial Sequence
  GFR-binding peptide
  MOD_RES (2)..(4)..(36)..(37): Xaa is C or S
RXGXESVAMGEYQKYYTVVGKDIYLISIPSLKTPVXXAKSA

SEQ ID NO: 24420 - protein, 40 aa, Artificial Sequence; identical to SEQ ID NO: 3426
  GFR-binding peptide
  MOD_RES (2)..(4)..(36): Xaa is C or S

SEQ ID NO: 24421 - protein, 43 aa, Artificial Sequence; identical to SEQ ID NO: 3427
  GFR-binding peptide
  MOD_RES (2)..(4)..(38)..(39): Xaa is C or S
  MOD_RES (16)..(17)..(18)..(19)..(20): Xaa is A or G
  MOD_RES (21)..(22)..(23)..(24): Xaa is A or G or is absent

SEQ ID NO: 24422 - protein, 40 aa, Artificial Sequence; identical to SEQ ID NO: 3428
  GFR-binding peptide
  MOD_RES (2)..(35)..(36): Xaa is C or S

SEQ ID NO: 24423 - protein, 37 aa, Artificial Sequence; identical to SEQ ID NO: 3430
  GFR-binding peptide
  MOD_RES (1)..(33): Xaa is C or S

SEQ ID NO: 24424 - protein, 35 aa, Artificial Sequence
  GFR-binding peptide
  MOD_RES (1)..(33)..(34): Xaa is C or S
XESVAMGYHYKLYTVVGKDKYLISIPSLKTPVXXA

SEQ ID NO: 24425 - protein, 37 aa, Artificial Sequence
  GFR-binding peptide
  MOD_RES (1)..(3): Xaa is C or S
  MOD_RES (16)..(17)..(18)..(19)..(20): Xaa is A or G
  MOD_RES (21)..(22)..(23)..(24): Xaa is A or G or is absent
XGXEAVSMGEEYQKYXXXXXXXXXIYLVSIPSLKTPV

SEQ ID NO: 24426 - protein, 37 aa, Artificial Sequence
  GFR-binding peptide
  MOD_RES (2)..(4)..(37): Xaa is C or S
  MOD_RES (15)..(16)..(17)..(18)..(19): Xaa is A or G
  MOD_RES (20)..(21)..(22)..(23): Xaa is A or G or is absent
SXKXSKVIMEYKFKXXXXXXXXXLYLISIPELDQSVX

SEQ ID NO: 24427 - protein, 40 aa, Artificial Sequence
  GFR-binding peptide
  MOD_RES (1)..(3)..(35)..(36): Xaa is C or S
XGXESVAMGRYKKLYTVVGKDFYLISIANLKTPVXXAKSA

SEQ ID NO: 24428 - protein, 40 aa, Artificial Sequence; identical to SEQ ID NO: 3439
  GFR-binding peptide
  MOD_RES (2)..(4)..(35)..(36): Xaa is C or S

SEQ ID NO: 24429 - protein, 38 aa, Artificial Sequence
  GFR-binding peptide
  MOD_RES (2)..(34)..(35): Xaa is C or S
GXGEVVMDEYQKYVVKENEDIYLMSIPSLETPVXXAKP

SEQ ID NO: 24430 - protein, 40 aa, Artificial Sequence; identical to SEQ ID NO: 3440
  GFR-binding peptide
  MOD_RES (2)..(36)..(37): Xaa is C or S
  MOD_RES (14)..(15)..(16)..(17)..(18): Xaa is A or G
  MOD_RES (19)..(20)..(21)..(22): Xaa is A or G or is absent

SEQ ID NO: 24431 - protein, 37 aa, Artificial Sequence
  GFR-binding peptide
  MOD_RES (1)..(35)..(36): Xaa is C or S
  MOD_RES (13)..(14)..(15)..(16)..(17): Xaa is A or G
  MOD_RES (18)..(19)..(20)..(21): Xaa is A or G or is absent
XESVAMGEYQKYXXXXXXXXXIYLISIPSLKTPVXXA

SEQ ID NO: 24432 - protein, 32 aa, Artificial Sequence; identical to SEQ ID NO: 3446
  GFR-binding peptide
  MOD_RES (11)..(12)..(13)..(14)..(15): Xaa is A or G
  MOD_RES (16)..(17)..(18)..(19): Xaa is A or G or is absent

SEQ ID NO: 24433 - protein, 40 aa, Artificial Sequence
  GFR-binding peptide
  MOD_RES (1)..(3)..(35)..(36): Xaa is C or S
XGXAKVVMNEYQKYIVNNSSDIYLVSIPSLKTPAXXAKPV

SEQ ID NO: 24434 - protein, 38 aa, Artificial Sequence
  GFR-binding peptide
  MOD_RES (2)..(33)..(34): Xaa is C or S
KXSKVIMEYKFKIKPTKGILYLISIPELDQSVXXPSAS

SEQ ID NO: 24435 - protein, 37 aa, Artificial Sequence
  GFR-binding peptide
  MOD_RES (1)..(3)..(37): Xaa is C or S
  MOD_RES (15)..(16)..(17)..(18)..(19): Xaa is A or G
  MOD_RES (20)..(21)..(22)..(23): Xaa is A or G or is absent
XGXESVAMGEYQKYXXXXXXXXXIYLISIPSLKTPVX

SEQ ID NO: 24436 - protein, 33 aa, Artificial Sequence; identical to SEQ ID NO: 3452
  GFR-binding peptide
  MOD_RES (32)..(33): Xaa is C or S

SEQ ID NO: 24437 - protein, 43 aa, Artificial Sequence
  GFR-binding peptide
  MOD_RES (2)..(4)..(38)..(39): Xaa is C or S
  MOD_RES (16)..(17)..(18)..(19)..(20): Xaa is A or G
  MOD_RES (21)..(22)..(23)..(24): Xaa is A or G or is absent
RXGXGEVVMDEYKFKXXXXXXXXXLYLMSIPELETPVXXAKPI

SEQ ID NO: 24438 - protein, 32 aa, Artificial Sequence
  GFR-binding peptide
  MOD_RES (1)..(1): Xaa is C or S
XESVAMGRYKKLYTVVGKDFYLISIANLKTPV

SEQ ID NO: 24439 - protein, 38 aa, Artificial Sequence; identical to SEQ ID NO: 3460
  GFR-binding peptide
  MOD_RES (2)..(35)..(36): Xaa is C or S
  MOD_RES (13)..(14)..(15)..(16)..(17): Xaa is A or G
  MOD_RES (18)..(19)..(20)..(21): Xaa is A or G or is absent

SEQ ID NO: 24440 - protein, 40 aa, Artificial Sequence
  GFR-binding peptide
  MOD_RES (2)..(36)..(37): Xaa is C or S
  MOD_RES (14)..(15)..(16)..(17)..(18): Xaa is A or G
  MOD_RES (19)..(20)..(21)..(22): Xaa is A or G or is absent
GXESVAMGRYKKLXXXXXXXXXFYLISIANLKTPVXXAKS

SEQ ID NO: 24441 - protein, 33 aa, Artificial Sequence
  GFR-binding peptide
  MOD_RES (33)..(33): Xaa is C or S
  MOD_RES (11)..(12)..(13)..(14)..(15): Xaa is A or G
  MOD_RES (16)..(17)..(18)..(19): Xaa is A or G or is absent
SKVIMEYQKYXXXXXXXXXIYLISIPSLDQSVX

SEQ ID NO: 24442 - protein, 36 aa, Artificial Sequence
  GFR-binding peptide
  MOD_RES (2)..(34)..(35): Xaa is C or S
GXAEVVMDEYKFKVVNNAADLYLISIPELRAPVXXS

SEQ ID NO: 24443 - protein, 33 aa, Artificial Sequence
  GFR-binding peptide
  MOD_RES (33)..(33): Xaa is C or S
  MOD_RES (11)..(12)..(13)..(14)..(15): Xaa is A or G
  MOD_RES (16)..(17)..(18)..(19): Xaa is A or G or is absent
EVVMDYHYKLXXXXXXXXXKYLISIPSLRAPVX

SEQ ID NO: 24444 - protein, 41 aa, Artificial Sequence; identical to SEQ ID NO: 3464
  GFR-binding peptide
  MOD_RES (2)..(4)..(37)..(38): Xaa is C or S
  MOD_RES (15)..(16)..(17)..(18)..(19): Xaa is A or G
  MOD_RES (20)..(21)..(22)..(23): Xaa is A or G or is absent

SEQ ID NO: 24445 - protein, 34 aa, Artificial Sequence; identical to SEQ ID NO: 3465
  GFR-binding peptide
  MOD_RES (31)..(32): Xaa is C or S

SEQ ID NO: 24446 - protein, 41 aa, Artificial Sequence; identical to SEQ ID NO: 3466
  GFR-binding peptide
  MOD_RES (2)..(4)..(37)..(38): Xaa is C or S

SEQ ID NO: 24447 - protein, 36 aa, Artificial Sequence; identical to SEQ ID NO: 3467
  GFR-binding peptide
  MOD_RES (2)..(4)..(36): Xaa is C or S

SEQ ID NO: 24448 - protein, 39 aa, Artificial Sequence; identical to SEQ ID NO: 3468
  GFR-binding peptide
  MOD_RES (2)..(34)..(35): Xaa is C or S

SEQ ID NO: 24449 - protein, 32 aa, Artificial Sequence
  GFR-binding peptide
  MOD_RES (11)..(12)..(13)..(14)..(15): Xaa is A or G
  MOD_RES (16)..(17)..(18)..(19): Xaa is A or G or is absent
EVVMDEYKFKXXXXXXXXXLYLMSIPELETPV

SEQ ID NO: 24450 - protein, 33 aa, Artificial Sequence; identical to SEQ ID NO: 3471
  GFR-binding peptide
  MOD_RES (2)..(2): Xaa is C or S

SEQ ID NO: 24451 - protein, 36 aa, Artificial Sequence
  GFR-binding peptide
  MOD_RES (2)..(34): Xaa is C or S
GXSRVVMNEYQKYIVNSSDDIYLVSIPSLKTPAXTP

SEQ ID NO: 24452 - protein, 34 aa, Artificial Sequence
  GFR-binding peptide
  MOD_RES (32)..(33): Xaa is C or S
AEVVMDRYKKLVVNNAADFYLISIANLRAPVXXS

SEQ ID NO: 24453 - protein, 32 aa, Artificial Sequence
  GFR-binding peptide
  MOD_RES (1)..(1): Xaa is C or S
XESVAMGYHYKLYTVVGKDKYLISIPSLKTPV

SEQ ID NO: 24454 - protein, 39 aa, Artificial Sequence
  GFR-binding peptide
  MOD_RES (1)..(3)..(35)..(36): Xaa is C or S
XGXAEVVMDEYKFKVVNNAADLYLISIPELRAPVXXSAP

SEQ ID NO: 24455 - protein, 37 aa, Artificial Sequence; identical to SEQ ID NO: 3475
  GFR-binding peptide
  MOD_RES (34)..(35): Xaa is C or S
  MOD_RES (12)..(13)..(14)..(15)..(16): Xaa is A or G
  MOD_RES (17)..(18)..(19)..(20): Xaa is A or G or is absent

SEQ ID NO: 24456 - protein, 33 aa, Artificial Sequence
  GFR-binding peptide
  MOD_RES (12)..(13)..(14)..(15)..(16): Xaa is A or G
  MOD_RES (17)..(18)..(19)..(20): Xaa is A or G or is absent
AEVVMDRYKKLXXXXXXXXXFYLISIANLRAPV

SEQ ID NO: 24457 - protein, 42 aa, Artificial Sequence; identical to SEQ ID NO: 3476
  GFR-binding peptide
  MOD_RES (1)..(3)..(37)..(38): Xaa is C or S
  MOD_RES (15)..(16)..(17)..(18)..(19): Xaa is A or G
  MOD_RES (20)..(21)..(22)..(23): Xaa is A or G or is absent

SEQ ID NO: 24458 - protein, 37 aa, Artificial Sequence
  GFR-binding peptide
  MOD_RES (33)..(34): Xaa is C or S
  MOD_RES (11)..(12)..(13)..(14)..(15): Xaa is A or G
  MOD_RES (16)..(17)..(18)..(19): Xaa is A or G or is absent
SVAMGEYKFKXXXXXXXXXLYLISIPELKTPVXXAKS

SEQ ID NO: 24459 - protein, 34 aa, Artificial Sequence; identical to SEQ ID NO: 3477
  GFR-binding peptide
  MOD_RES (2)..(4): Xaa is C or S

SEQ ID NO: 24460 - protein, 39 aa, Artificial Sequence; identical to SEQ ID NO: 3478
  GFR-binding peptide
  MOD_RES (1)..(3)..(35)..(36): Xaa is C or S

SEQ ID NO: 24461 - protein, 35 aa, Artificial Sequence; identical to SEQ ID NO: 3480
  GFR-binding peptide
  MOD_RES (33)..(34): Xaa is C or S
  MOD_RES (11)..(12)..(13)..(14)..(15): Xaa is A or G
  MOD_RES (16)..(17)..(18)..(19): Xaa is A or G or is absent

SEQ ID NO: 24462 - protein, 35 aa, Artificial Sequence; identical to SEQ ID NO: 3481
  GFR-binding peptide
  MOD_RES (31)..(32): Xaa is C or S

SEQ ID NO: 24463 - protein, 36 aa, Artificial Sequence
  GFR-binding peptide
  MOD_RES (2)..(35)..(36): Xaa is C or S
  MOD_RES (13)..(14)..(15)..(16)..(17): Xaa is A or G
  MOD_RES (18)..(19)..(20)..(21): Xaa is A or G or is absent
KXSKVIMEYKFKXXXXXXXXXLYLISIPELDQSVXX

SEQ ID NO: 24464 - protein, 36 aa, Artificial Sequence
  GFR-binding peptide
  MOD_RES (1)..(33)..(34): Xaa is C or S
XAKVVMNEYQKYIVNNSSDIYLVSIPSLKTPAXXAK

SEQ ID NO: 24465 - protein, 34 aa, Artificial Sequence
  GFR-binding peptide
  MOD_RES (2)..(2): Xaa is C or S
  MOD_RES (13)..(14)..(15)..(16)..(17): Xaa is A or G
  MOD_RES (18)..(19)..(20)..(21): Xaa is A or G or is absent
KXSKVVMEYKFKXXXXXXXXXLYLISIPELDQPV

SEQ ID NO: 24466 - protein, 35 aa, Artificial Sequence; identical to SEQ ID NO: 3485
  GFR-binding peptide
  MOD_RES (2)..(34): Xaa is C or S

SEQ ID NO: 24467 - protein, 31 aa, Artificial Sequence
  GFR-binding peptide
  MOD_RES (31)..(31): Xaa is C or S
SKVVMEYKFKVKPTRGVLYLISIPELDQPVX

SEQ ID NO: 24468 - protein, 35 aa, Artificial Sequence; identical to SEQ ID NO: 3487
  GFR-binding peptide
  MOD_RES (34)..(35): Xaa is C or S
  MOD_RES (12)..(13)..(14)..(15)..(16): Xaa is A or G
  MOD_RES (17)..(18)..(19)..(20): Xaa is A or G or is absent

SEQ ID NO: 24469 - protein, 40 aa, Artificial Sequence; identical to SEQ ID NO: 3488
  GFR-binding peptide
  MOD_RES (1)..(3)..(36)..(37): Xaa is C or S
  MOD_RES (14)..(15)..(16)..(17)..(18): Xaa is A or G
  MOD_RES (19)..(20)..(21)..(22): Xaa is A or G or is absent

SEQ ID NO: 24470 - protein, 37 aa, Artificial Sequence
  GFR-binding peptide
  MOD_RES (2)..(33)..(34): Xaa is C or S
KXSKVVMEYQKYVKPTRGVIYLISIPSLDQPVXXPSA

SEQ ID NO: 24471 - protein, 39 aa, Artificial Sequence; identical to SEQ ID NO: 3490
  GFR-binding peptide
  MOD_RES (1)..(3)..(35)..(36): Xaa is C or S

SEQ ID NO: 24472 - protein, 41 aa, Artificial Sequence; identical to SEQ ID NO: 3493
  GFR-binding peptide
  MOD_RES (1)..(3)..(36)..(37): Xaa is C or S
  MOD_RES (14)..(15)..(16)..(17)..(18): Xaa is A or G
  MOD_RES (19)..(20)..(21)..(22): Xaa is A or G or is absent

SEQ ID NO: 24473 - protein, 36 aa, Artificial Sequence
  GFR-binding peptide
  MOD_RES (1)..(3): Xaa is C or S
  MOD_RES (15)..(16)..(17)..(18)..(19): Xaa is A or G
  MOD_RES (20)..(21)..(22)..(23): Xaa is A or G or is absent
XGXGEVVMDEYKFKXXXXXXXXXLYLMSIPELETPV

SEQ ID NO: 24474 - protein, 30 aa, Artificial Sequence; identical to SEQ ID NO: 3495
  GFR-binding peptide

SEQ ID NO: 24475 - protein, 34 aa, Artificial Sequence
  GFR-binding peptide
  MOD_RES (2)..(33)..(34): Xaa is C or S
KXSKVIMEYQKYIKPTKGIIYLISIPSLDQSVXX

SEQ ID NO: 24476 - protein, 34 aa, Artificial Sequence; identical to SEQ ID NO: 3496
  GFR-binding peptide
  MOD_RES (33)..(34): Xaa is C or S
  MOD_RES (11)..(12)..(13)..(14)..(15): Xaa is A or G
  MOD_RES (16)..(17)..(18)..(19): Xaa is A or G or is absent

SEQ ID NO: 24477 - protein, 41 aa, Artificial Sequence
  GFR-binding peptide
  MOD_RES (2)..(4)..(36)..(37): Xaa is C or S
HXGXSRVVMNEYQKYIVNSSDDIYLVSIPSLKTPAXXPKPV

SEQ ID NO: 24478 - protein, 42 aa, Artificial Sequence
  GFR-binding peptide
  MOD_RES (1)..(3)..(37)..(38): Xaa is C or S
  MOD_RES (15)..(16)..(17)..(18)..(19): Xaa is A or G
  MOD_RES (20)..(21)..(22)..(23): Xaa is A or G or is absent
XGXSRVVMNEYQKYXXXXXXXXXIYLVSIPSLKTPAXXPKPV

SEQ ID NO: 24479 - protein, 32 aa, Artificial Sequence; identical to SEQ ID NO: 3497
  GFR-binding peptide
  MOD_RES (11)..(12)..(13)..(14)..(15): Xaa is A or G
  MOD_RES (16)..(17)..(18)..(19): Xaa is A or G or is absent

SEQ ID NO: 24480 - protein, 33 aa, Artificial Sequence; identical to SEQ ID NO: 3498
  GFR-binding peptide
  MOD_RES (33)..(33): Xaa is C or S
  MOD_RES (11)..(12)..(13)..(14)..(15): Xaa is A or G
  MOD_RES (16)..(17)..(18)..(19): Xaa is A or G or is absent

SEQ ID NO: 24481 - protein, 35 aa, Artificial Sequence
  GFR-binding peptide
  MOD_RES (1)..(33)..(34): Xaa is C or S
XESVAMGRYKKLYTVVGKDFYLISIANLKTPVXXA

SEQ ID NO: 24482 - protein, 36 aa, Artificial Sequence; identical to SEQ ID NO: 3500
  GFR-binding peptide
  MOD_RES (34)..(35): Xaa is C or S
  MOD_RES (12)..(13)..(14)..(15)..(16): Xaa is A or G
  MOD_RES (17)..(18)..(19)..(20): Xaa is A or G or is absent

SEQ ID NO: 24483 - protein, 37 aa, Artificial Sequence; identical to SEQ ID NO: 3501
  GFR-binding peptide
  MOD_RES (1)..(3)..(34)..(35): Xaa is C or S

SEQ ID NO: 24484 - protein, 40 aa, Artificial Sequence
  GFR-binding peptide
  MOD_RES (1)..(3)..(35): Xaa is C or S
XGXSRVVMNEYKFKIVNSSDDLYLVSIPELKTPAXTPKTV

SEQ ID NO: 24485 - protein, 36 aa, Artificial Sequence
  GFR-binding peptide
  MOD_RES (1)..(33)..(34): Xaa is C or S
XARVVMNEYQKYIVNSSDDIYLVSIPSLQTPAXXPK

SEQ ID NO: 24486 - protein, 37 aa, Artificial Sequence
  GFR-binding peptide
  MOD_RES (1)..(3)..(37): Xaa is C or S
  MOD_RES (15)..(16)..(17)..(18)..(19): Xaa is A or G
  MOD_RES (20)..(21)..(22)..(23): Xaa is A or G or is absent
XGXESVAMGEYKFKXXXXXXXXXLYLISIPELKTPVX

SEQ ID NO: 24487 - protein, 37 aa, Artificial Sequence
  GFR-binding peptide
  MOD_RES (1)..(34)..(35): Xaa is C or S
  MOD_RES (12)..(13)..(14)..(15)..(16): Xaa is A or G
  MOD_RES (17)..(18)..(19)..(20): Xaa is A or G or is absent
XSRVIMEYKFKXXXXXXXXXLYLISIPELAQPVXXPA

SEQ ID NO: 24488 - protein, 35 aa, Artificial Sequence
  GFR-binding peptide
  MOD_RES (2)..(4): Xaa is C or S
RXGXGEVVMDEYKFKVVKENEDLYLMSIPELETPV

SEQ ID NO: 24489 - protein, 38 aa, Artificial Sequence; identical to SEQ ID NO: 3505
  GFR-binding peptide
  MOD_RES (1)..(3)..(34)..(35): Xaa is C or S

SEQ ID NO: 24490 - protein, 40 aa, Artificial Sequence
  GFR-binding peptide
  MOD_RES (2)..(4)..(36)..(37): Xaa is C or S
HXGXAKVVMNEYQKYIVNNSSDIYLVSIPSLKTPAXXAKP

SEQ ID NO: 24491 - protein, 40 aa, Artificial Sequence; identical to SEQ ID NO: 3506
  GFR-binding peptide
  MOD_RES (2)..(4)..(36)..(37): Xaa is C or S

SEQ ID NO: 24492 - protein, 34 aa, Artificial Sequence
  GFR-binding peptide
  MOD_RES (2)..(33)..(34): Xaa is C or S
KXSKVVMEYQKYVKPTRGVIYLISIPSLDQPVXX

SEQ ID NO: 24493 - protein, 42 aa, Artificial Sequence; identical to SEQ ID NO: 3507
  GFR-binding peptide
  MOD_RES (2)..(4)..(38)..(39): Xaa is C or S
  MOD_RES (16)..(17)..(18)..(19)..(20): Xaa is A or G
  MOD_RES (21)..(22)..(23)..(24): Xaa is A or G or is absent

SEQ ID NO: 24494 - protein, 35 aa, Artificial Sequence; identical to SEQ ID NO: 3509
  GFR-binding peptide
  MOD_RES (2)..(2): Xaa is C or S
  MOD_RES (14)..(15)..(16)..(17)..(18): Xaa is A or G
  MOD_RES (19)..(20)..(21)..(22): Xaa is A or G or is absent

SEQ ID NO: 24495 - protein, 43 aa, Artificial Sequence; identical to SEQ ID NO: 3510
  GFR-binding peptide
  MOD_RES (1)..(3)..(38)..(39): Xaa is C or S
  MOD_RES (16)..(17)..(18)..(19)..(20): Xaa is A or G
  MOD_RES (21)..(22)..(23)..(24): Xaa is A or G or is absent

SEQ ID NO: 24496 - protein, 39 aa, Artificial Sequence; identical to SEQ ID NO: 3511
  GFR-binding peptide
  MOD_RES (1)..(35): Xaa is C or S
  MOD_RES (13)..(14)..(15)..(16)..(17): Xaa is A or G
  MOD_RES (18)..(19)..(20)..(21): Xaa is A or G or is absent

SEQ ID NO: 24497 - protein, 36 aa, Artificial Sequence
  GFR-binding peptide
  MOD_RES (1)..(3): Xaa is C or S
  MOD_RES (15)..(16)..(17)..(18)..(19): Xaa is A or G
  MOD_RES (20)..(21)..(22)..(23): Xaa is A or G or is absent
XGXESVAMGRYKKLXXXXXXXXXFYLISIANLKTPV

SEQ ID NO: 24498 - protein, 39 aa, Artificial Sequence
  GFR-binding peptide
  MOD_RES (1)..(35)..(36): Xaa is C or S
  MOD_RES (13)..(14)..(15)..(16)..(17): Xaa is A or G
  MOD_RES (18)..(19)..(20)..(21): Xaa is A or G or is absent
XESVAMGRYKKLXXXXXXXXXFYLISIANLKTPVXXAKS

SEQ ID NO: 24499 - protein, 34 aa, Artificial Sequence; identical to SEQ ID NO: 3514
  GFR-binding peptide
  MOD_RES (34)..(34): Xaa is C or S
  MOD_RES (12)..(13)..(14)..(15)..(16): Xaa is A or G
  MOD_RES (17)..(18)..(19)..(20): Xaa is A or G or is absent

SEQ ID NO: 24500 - protein, 37 aa, Artificial Sequence; identical to SEQ ID NO: 3515
  GFR-binding peptide
  MOD_RES (2)..(4)..(35)..(36): Xaa is C or S

SEQ ID NO: 24501 - protein, 37 aa, Artificial Sequence
  GFR-binding peptide
  MOD_RES (1)..(35)..(36): Xaa is C or S
  MOD_RES (13)..(14)..(15)..(16)..(17): Xaa is A or G
  MOD_RES (18)..(19)..(20)..(21): Xaa is A or G or is absent
XAEVVMDEYQKYXXXXXXXXXIYLISIPSLRAPVXXS

SEQ ID NO: 24502 - protein, 35 aa, Artificial Sequence
  GFR-binding peptide
  MOD_RES (2)..(34)..(35): Xaa is C or S
GXGEVVMDEYKFKVVKENEDLYLMSIPELETPVXX

SEQ ID NO: 24503 - protein, 32 aa, Artificial Sequence; identical to SEQ ID NO: 3520
  GFR-binding peptide
  MOD_RES (1)..(1): Xaa is C or S

SEQ ID NO: 24504 - protein, 42 aa, Artificial Sequence
  GFR-binding peptide
  MOD_RES (2)..(4)..(37)..(38): Xaa is C or S
  MOD_RES (15)..(16)..(17)..(18)..(19): Xaa is A or G
  MOD_RES (20)..(21)..(22)..(23): Xaa is A or G or is absent
SXKXSKVIMEYQKYXXXXXXXXXIYLISIPSLDQSVXXPSAS

SEQ ID NO: 24505 - protein, 35 aa, Artificial Sequence
  GFR-binding peptide
  MOD_RES (2)..(2): Xaa is C or S
  MOD_RES (14)..(15)..(16)..(17)..(18): Xaa is A or G
  MOD_RES (19)..(20)..(21)..(22): Xaa is A or G or is absent
GXAKVVMNEYKFKXXXXXXXXXLYLVSIPELKTPA

SEQ ID NO: 24506 - protein, 42 aa, Artificial Sequence; identical to SEQ ID NO: 3521
  GFR-binding peptide
  MOD_RES (2)..(4)..(36): Xaa is C or S

SEQ ID NO: 24507 - protein, 41 aa, Artificial Sequence; identical to SEQ ID NO: 3522
  GFR-binding peptide
  MOD_RES (2)..(4)..(37)..(38): Xaa is C or S
  MOD_RES (15)..(16)..(17)..(18)..(19): Xaa is A or G
  MOD_RES (20)..(21)..(22)..(23): Xaa is A or G or is absent

SEQ ID NO: 24508 - protein, 40 aa, Artificial Sequence; identical to SEQ ID NO: 3523
  GFR-binding peptide
  MOD_RES (2)..(34)..(35): Xaa is C or S

SEQ ID NO: 24509 - protein, 42 aa, Artificial Sequence
  GFR-binding peptide
  MOD_RES (2)..(36)..(37): Xaa is C or S
  MOD_RES (14)..(15)..(16)..(17)..(18): Xaa is A or G
  MOD_RES (19)..(20)..(21)..(22): Xaa is A or G or is absent
GXESVAMGEYKFKXXXXXXXXXLYLISIPELKTPVXXAKSAK

SEQ ID NO: 24510 - protein, 35 aa, Artificial Sequence
  GFR-binding peptide
  MOD_RES (2)..(33)..(34): Xaa is C or S
KXSKVVMEYKFKVKPTRGVLYLISIPELDQPVXXP

SEQ ID NO: 24511 - protein, 36 aa, Artificial Sequence
  GFR-binding peptide
  MOD_RES (2)..(34)..(35): Xaa is C or S
GXAKVVMNEYKFKIVNNSSDLYLVSIPELKTPAXXA

SEQ ID NO: 24512 - protein, 32 aa, Artificial Sequence; identical to SEQ ID NO: 3526
  GFR-binding peptide
  MOD_RES (1)..(1): Xaa is C or S

SEQ ID NO: 24513 - protein, 38 aa, Artificial Sequence
  GFR-binding peptide
  MOD_RES (2)..(4)..(36)..(37): Xaa is C or S
RXGXAEVVMDRYKKLVVNNAADFYLISIANLRAPVXXS

SEQ ID NO: 24514 - protein, 32 aa, Artificial Sequence
  GFR-binding peptide
  MOD_RES (1)..(1): Xaa is C or S
XSRVVMNEYKFKIVNSSDDLYLVSIPELKTPA

SEQ ID NO: 24515 - protein, 41 aa, Artificial Sequence
  GFR-binding peptide
  MOD_RES (1)..(35): Xaa is C or S
  MOD_RES (13)..(14)..(15)..(16)..(17): Xaa is A or G
  MOD_RES (18)..(19)..(20)..(21): Xaa is A or G or is absent
XSRVVMNEYKFKXXXXXXXXXLYLVSIPELKTPAXTPKTVH

SEQ ID NO: 24516 - protein, 36 aa, Artificial Sequence; identical to SEQ ID NO: 3527
  GFR-binding peptide
  MOD_RES (1)..(3)..(34)..(35): Xaa is C or S

SEQ ID NO: 24517 - protein, 35 aa, Artificial Sequence
  GFR-binding peptide
  MOD_RES (1)..(33)..(34): Xaa is C or S
XAEVVMDRYKKLVVNNAADFYLISIANLRAPVXXS

SEQ ID NO: 24518 - protein, 40 aa, Artificial Sequence
  GFR-binding peptide
  MOD_RES (2)..(4)..(38)..(39): Xaa is C or S
  MOD_RES (16)..(17)..(18)..(19)..(20): Xaa is A or G
  MOD_RES (21)..(22)..(23)..(24): Xaa is A or G or is absent
RXGXAEVVMDEYQKYXXXXXXXXXIYLISIPSLRAPVXXS

SEQ ID NO: 24519 - protein, 39 aa, Artificial Sequence; identical to SEQ ID NO: 3531
  GFR-binding peptide
  MOD_RES (2)..(35)..(36): Xaa is C or S

SEQ ID NO: 24520 - protein, 35 aa, Artificial Sequence
  GFR-binding peptide
  MOD_RES (32)..(33): Xaa is C or S
ESVAMGYHYKLYTVVGKDKYLISIPSLKTPVXXAK

SEQ ID NO: 24521 - protein, 38 aa, Artificial Sequence; identical to SEQ ID NO: 3532
  GFR-binding peptide
  MOD_RES (34)..(35): Xaa is C or S
  MOD_RES (12)..(13)..(14)..(15)..(16): Xaa is A or G
  MOD_RES (17)..(18)..(19)..(20): Xaa is A or G or is absent

SEQ ID NO: 24522 - protein, 35 aa, Artificial Sequence; identical to SEQ ID NO: 3534
  GFR-binding peptide
  MOD_RES (1)..(34)..(35): Xaa is C or S
  MOD_RES (12)..(13)..(14)..(15)..(16): Xaa is A or G
  MOD_RES (17)..(18)..(19)..(20): Xaa is A or G or is absent

SEQ ID NO: 24523 - protein, 34 aa, Artificial Sequence
  GFR-binding peptide
  MOD_RES (31)..(32): Xaa is C or S
SVAMGRYKKLYTVVGKDFYLISIANLKTPVXXAK

SEQ ID NO: 24524 - protein, 36 aa, Artificial Sequence; identical to SEQ ID NO: 3535
  GFR-binding peptide
  MOD_RES (1)..(3)..(36): Xaa is C or S
  MOD_RES (14)..(15)..(16)..(17)..(18): Xaa is A or G
  MOD_RES (19)..(20)..(21)..(22): Xaa is A or G or is absent

SEQ ID NO: 24525 - protein, 34 aa, Artificial Sequence; identical to SEQ ID NO: 3536
  GFR-binding peptide
  MOD_RES (1)..(34): Xaa is C or S
  MOD_RES (12)..(13)..(14)..(15)..(16): Xaa is A or G
  MOD_RES (17)..(18)..(19)..(20): Xaa is A or G or is absent

SEQ ID NO: 24526 - protein, 38 aa, Artificial Sequence
  GFR-binding peptide
  MOD_RES (2)..(34)..(35): Xaa is C or S
GXESVAMGRYKKLYTVVGKDFYLISIANLKTPVXXAKS

SEQ ID NO: 24527 - protein, 39 aa, Artificial Sequence
  GFR-binding peptide
  MOD_RES (1)..(33)..(34): Xaa is C or S
XGEVVMEEYKFKVVKDYEDLYLMSIPELETPVXXAKPIS

SEQ ID NO: 24528 - protein, 39 aa, Artificial Sequence
  GFR-binding peptide
  MOD_RES (1)..(3)..(34)..(35): Xaa is C or S
XKXSRVIMEYQKYVKPKRGVIYLISIPSLAQPVXXPAAS

SEQ ID NO: 24529 - protein, 36 aa, Artificial Sequence
  GFR-binding peptide
  MOD_RES (1)..(3)..(35)..(36): Xaa is C or S
XGXARVVMNEYQKYIVNSSDDIYLVSIPSLQTPAXX

SEQ ID NO: 24530 - protein, 36 aa, Artificial Sequence
  GFR-binding peptide
  MOD_RES (34)..(35): Xaa is C or S
  MOD_RES (12)..(13)..(14)..(15)..(16): Xaa is A or G
  MOD_RES (17)..(18)..(19)..(20): Xaa is A or G or is absent
AKVVMNEYQKYXXXXXXXXXIYLVSIPSLKTPAXXA

SEQ ID NO: 24531 - protein, 38 aa, Artificial Sequence
  GFR-binding peptide
  MOD_RES (1)..(3)..(37)..(38): Xaa is C or S
  MOD_RES (15)..(16)..(17)..(18)..(19): Xaa is A or G
  MOD_RES (20)..(21)..(22)..(23): Xaa is A or G or is absent
XGXAEVVMDRYKKLXXXXXXXXXFYLISIANLRAPVXX

SEQ ID NO: 24532 - protein, 38 aa, Artificial Sequence
  GFR-binding peptide
  MOD_RES (33)..(34): Xaa is C or S
  MOD_RES (11)..(12)..(13)..(14)..(15): Xaa is A or G
  MOD_RES (16)..(17)..(18)..(19): Xaa is A or G or is absent
SKVVMEYKFKXXXXXXXXXLYLISIPELDQPVXXPSAS

SEQ ID NO: 24533 - protein, 37 aa, Artificial Sequence
  GFR-binding peptide
  MOD_RES (31)..(32): Xaa is C or S
RVVMNEYKFKIVNSSDDLYLVSIPELKTPAXXPKPVY

SEQ ID NO: 24534 - protein, 34 aa, Artificial Sequence
  GFR-binding peptide
  MOD_RES (32)..(33): Xaa is C or S
GEVVMEEYKFKVVKDYEDLYLMSIPELETPVXXA

SEQ ID NO: 24535 - protein, 41 aa, Artificial Sequence
  GFR-binding peptide
  MOD_RES (2)..(4)..(38): Xaa is C or S
  MOD_RES (16)..(17)..(18)..(19)..(20): Xaa is A or G
  MOD_RES (21)..(22)..(23)..(24): Xaa is A or G or is absent
HXGXSRVVMNEYQKYXXXXXXXXXIYLVSIPSLKTPAXTPK

SEQ ID NO: 24536 - protein, 40 aa, Artificial Sequence
  GFR-binding peptide
  MOD_RES (2)..(36)..(37): Xaa is C or S
  MOD_RES (14)..(15)..(16)..(17)..(18): Xaa is A or G
  MOD_RES (19)..(20)..(21)..(22): Xaa is A or G or is absent
GXAKVVMNEYQKYXXXXXXXXXIYLVSIPSLKTPAXXAKP

SEQ ID NO: 24537 - protein, 38 aa, Artificial Sequence; identical to SEQ ID NO: 3543
  GFR-binding peptide
  MOD_RES (1)..(3)..(35)..(36): Xaa is C or S

SEQ ID NO: 24538 - protein, 38 aa, Artificial Sequence
  GFR-binding peptide
  MOD_RES (1)..(35)..(36): Xaa is C or S
  MOD_RES (13)..(14)..(15)..(16)..(17): Xaa is A or G
  MOD_RES (18)..(19)..(20)..(21): Xaa is A or G or is absent
XAEVVMDEYKFKXXXXXXXXXLYLISIPELRAPVXXSA

SEQ ID NO: 24539 - protein, 35 aa, Artificial Sequence
  GFR-binding peptide
  MOD_RES (1)..(3)..(35): Xaa is C or S
XGXSRVVMNEYKFKIVNSSDDLYLVSIPELKTPAX

SEQ ID NO: 24540 - protein, 37 aa, Artificial Sequence
  GFR-binding peptide
  MOD_RES (2)..(4)..(36)..(37): Xaa is C or S
RXGXGEVVMDEYKFKVVKENEDLYLMSIPELETPVXX

SEQ ID NO: 24541 - protein, 32 aa, Artificial Sequence
  GFR-binding peptide
  MOD_RES (32)..(32): Xaa is C or S
ESVAMGEYKFKYTVVGKDLYLISIPELKTPVX

SEQ ID NO: 24542 - protein, 33 aa, Artificial Sequence
  GFR-binding peptide
  MOD_RES (2)..(2): Xaa is C or S
GXGEVVMEEYKFKVVKDYEDLYLMSIPELETPV

SEQ ID NO: 24543 - protein, 38 aa, Artificial Sequence
  GFR-binding peptide
  MOD_RES (2)..(36): Xaa is C or S
  MOD_RES (14)..(15)..(16)..(17)..(18): Xaa is A or G
  MOD_RES (19)..(20)..(21)..(22): Xaa is A or G or is absent
GXSRVVMNEYQKYXXXXXXXXXIYLVSIPSLKTPAXTP

SEQ ID NO: 24544 - protein, 42 aa, Artificial Sequence
  GFR-binding peptide
  MOD_RES (2)..(36)..(37): Xaa is C or S
  MOD_RES (14)..(15)..(16)..(17)..(18): Xaa is A or G
  MOD_RES (19)..(20)..(21)..(22): Xaa is A or G or is absent
GXESVAMGYHYKLXXXXXXXXXKYLISIPSLKTPVXXAKSAK

SEQ ID NO: 24545 - protein, 36 aa, Artificial Sequence
  GFR-binding peptide
  MOD_RES (1)..(3)..(34)..(35): Xaa is C or S
XKXSKVVMEYQKYVKPTRGVIYLISIPSLDQPVXXP

SEQ ID NO: 24546 - protein, 36 aa, Artificial Sequence
  GFR-binding peptide
  MOD_RES (1)..(3)..(35): Xaa is C or S
XGXSRVVMNEYQKYIVNSSDDIYLVSIPSLKTPAXT

SEQ ID NO: 24547 - protein, 34 aa, Artificial Sequence; identical to SEQ ID NO: 3549
  GFR-binding peptide
  MOD_RES (2)..(2): Xaa is C or S
  MOD_RES (13)..(14)..(15)..(16)..(17): Xaa is A or G
  MOD_RES (18)..(19)..(20)..(21): Xaa is A or G or is absent

SEQ ID NO: 24548 - protein, 35 aa, Artificial Sequence
  GFR-binding peptide
  MOD_RES (2)..(4)..(35): Xaa is C or S
SXKXSKVVMEYQKYVKPTRGVIYLISIPSLDQPVX

SEQ ID NO: 24549 - protein, 36 aa, Artificial Sequence
  GFR-binding peptide
  MOD_RES (1)..(35)..(36): Xaa is C or S
  MOD_RES (13)..(14)..(15)..(16)..(17): Xaa is A or G
  MOD_RES (18)..(19)..(20)..(21): Xaa is A or G or is absent
XAKVVMNEYQKYXXXXXXXXXIYLVSIPSLKTPAXX

SEQ ID NO: 24550 - protein, 40 aa, Artificial Sequence
  GFR-binding peptide
  MOD_RES (34)..(35): Xaa is C or S
  MOD_RES (12)..(13)..(14)..(15)..(16): Xaa is A or G
  MOD_RES (17)..(18)..(19)..(20): Xaa is A or G or is absent
AEVVMDEYKFKXXXXXXXXXLYLISIPELRAPVXXSAPAA

SEQ ID NO: 24551 - protein, 40 aa, Artificial Sequence; identical to SEQ ID NO: 3550
  GFR-binding peptide
  MOD_RES (2)..(4)..(38)..(39): Xaa is C or S
  MOD_RES (16)..(17)..(18)..(19)..(20): Xaa is A or G
  MOD_RES (21)..(22)..(23)..(24): Xaa is A or G or is absent

SEQ ID NO: 24552 - protein, 37 aa, Artificial Sequence
  GFR-binding peptide
  MOD_RES (34)..(35): Xaa is C or S
  MOD_RES (12)..(13)..(14)..(15)..(16): Xaa is A or G
  MOD_RES (17)..(18)..(19)..(20): Xaa is A or G or is absent
GEVVMEEYQKYXXXXXXXXXIYLMSIPSLETPVXXAK

SEQ ID NO: 24553 - protein, 34 aa, Artificial Sequence
  GFR-binding peptide
  MOD_RES (32)..(33): Xaa is C or S
SRVVMNEYQKYIVNSSDDIYLVSIPSLKTPAXXP

SEQ ID NO: 24554 - protein, 39 aa, Artificial Sequence
  GFR-binding peptide
  MOD_RES (2)..(36)..(37): Xaa is C or S
  MOD_RES (14)..(15)..(16)..(17)..(18): Xaa is A or G
  MOD_RES (19)..(20)..(21)..(22): Xaa is A or G or is absent
GXAEVVMDRYKKLXXXXXXXXXFYLISIANLRAPVXXSA

SEQ ID NO: 24555 - protein, 42 aa, Artificial Sequence
  GFR-binding peptide
  MOD_RES (2)..(36)..(37): Xaa is C or S
  MOD_RES (14)..(15)..(16)..(17)..(18): Xaa is A or G
  MOD_RES (19)..(20)..(21)..(22): Xaa is A or G or is absent
GXGEVVMEEYQKYXXXXXXXXXIYLMSIPSLETPVXXAKPIS

SEQ ID NO: 24556 - protein, 37 aa, Artificial Sequence; identical to SEQ ID NO: 3552
  GFR-binding peptide
  MOD_RES (2)..(4)..(37): Xaa is C or S

SEQ ID NO: 24557 - protein, 33 aa, Artificial Sequence; identical to SEQ ID NO: 3553
  GFR-binding peptide
  MOD_RES (2)..(2): Xaa is C or S

SEQ ID NO: 24558 - protein, 42 aa, Artificial Sequence
  GFR-binding peptide
  MOD_RES (1)..(3)..(37)..(38): Xaa is C or S
  MOD_RES (15)..(16)..(17)..(18)..(19): Xaa is A or G
  MOD_RES (20)..(21)..(22)..(23): Xaa is A or G or is absent
XGXSRVVMNEYKFKXXXXXXXXXLYLVSIPELKTPAXXPKPV

SEQ ID NO: 24559 - protein, 40 aa, Artificial Sequence
  GFR-binding peptide
  MOD_RES (1)..(3)..(37)..(38): Xaa is C or S
  MOD_RES (15)..(16)..(17)..(18)..(19): Xaa is A or G
  MOD_RES (20)..(21)..(22)..(23): Xaa is A or G or is absent
XGXAEVVMDYHYKLXXXXXXXXXKYLISIPSLRAPVXXSA

SEQ ID NO: 24560 - protein, 40 aa, Artificial Sequence
  GFR-binding peptide
  MOD_RES (2)..(34)..(35): Xaa is C or S
GXAKVVMNEYKFKIVNNSSDLYLVSIPELKTPAXXAKPVA

SEQ ID NO: 24561 - protein, 35 aa, Artificial Sequence
  GFR-binding peptide
  MOD_RES (1)..(33)..(34): Xaa is C or S
XAEVVMDYHYKLVVNNAADKYLISIPSLRAPVXXS

SEQ ID NO: 24562 - protein, 38 aa, Artificial Sequence
  GFR-binding peptide
  MOD_RES (2)..(34)..(35): Xaa is C or S
GXESVAMGEYKFKYTVVGKDLYLISIPELKTPVXXAKS

SEQ ID NO: 24563 - protein, 39 aa, Artificial Sequence; identical to SEQ ID NO: 3556
  GFR-binding peptide
  MOD_RES (2)..(33)..(34): Xaa is C or S

SEQ ID NO: 24564 - protein, 39 aa, Artificial Sequence
  GFR-binding peptide
  MOD_RES (1)..(3)..(35)..(36): Xaa is C or S
XGXAEVVMDYHYKLVVNNAADKYLISIPSLRAPVXXSAP

SEQ ID NO: 24565 - protein, 35 aa, Artificial Sequence; identical to SEQ ID NO: 3557
  GFR-binding peptide
  MOD_RES (32)..(33): Xaa is C or S

SEQ ID NO: 24566 - protein, 42 aa, Artificial Sequence
  GFR-binding peptide
  MOD_RES (1)..(3)..(37)..(38): Xaa is C or S
  MOD_RES (15)..(16)..(17)..(18)..(19): Xaa is A or G
  MOD_RES (20)..(21)..(22)..(23): Xaa is A or G or is absent
XGXGEVVMEEYKFKXXXXXXXXXLYLMSIPELETPVXXAKPI

SEQ ID NO: 24567 - protein, 33 aa, Artificial Sequence; identical to SEQ ID NO: 3558
  GFR-binding peptide
  MOD_RES (12)..(13)..(14)..(15)..(16): Xaa is A or G
  MOD_RES (17)..(18)..(19)..(20): Xaa is A or G or is absent

SEQ ID NO: 24568 - protein, 35 aa, Artificial Sequence
  GFR-binding peptide
  MOD_RES (34)..(35): Xaa is C or S
  MOD_RES (12)..(13)..(14)..(15)..(16): Xaa is A or G
  MOD_RES (17)..(18)..(19)..(20): Xaa is A or G or is absent
AEVVMDRYKKLXXXXXXXXXFYLISIANLRAPVXX

SEQ ID NO: 24569 - protein, 38 aa, Artificial Sequence
  GFR-binding peptide
  MOD_RES (2)..(4)..(38): Xaa is C or S
  MOD_RES (16)..(17)..(18)..(19)..(20): Xaa is A or G
  MOD_RES (21)..(22)..(23)..(24): Xaa is A or G or is absent
HXGXSRVVMNEYQKYXXXXXXXXXIYLVSIPSLKTPAX

SEQ ID NO: 24570 - protein, 33 aa, Artificial Sequence; identical to SEQ ID NO: 3561
  GFR-binding peptide
  MOD_RES (1)..(33): Xaa is C or S

SEQ ID NO: 24571 - protein, 35 aa, Artificial Sequence; identical to SEQ ID NO: 3562
  GFR-binding peptide
  MOD_RES (2)..(4): Xaa is C or S

SEQ ID NO: 24572 - protein, 35 aa, Artificial Sequence
  GFR-binding peptide
  MOD_RES (32)..(33): Xaa is C or S
ESVAMGEYQKYYTVVGKDIYLISIPSLKTPVXXAK

SEQ ID NO: 24573 - protein, 36 aa, Artificial Sequence; identical to SEQ ID NO: 3563
  GFR-binding peptide
  MOD_RES (31)..(32): Xaa is C or S

SEQ ID NO: 24574 - protein, 36 aa, Artificial Sequence
  GFR-binding peptide
  MOD_RES (1)..(36): Xaa is C or S
  MOD_RES (14)..(15)..(16)..(17)..(18): Xaa is A or G
  MOD_RES (19)..(20)..(21)..(22): Xaa is A or G or is absent
XEAVSMGEEYKFKXXXXXXXXXLYLVSIPELKTPVX

SEQ ID NO: 24575 - protein, 37 aa, Artificial Sequence
  GFR-binding peptide
  MOD_RES (32)..(33): Xaa is C or S
ESVAMGEYKFKYTVVGKDLYLISIPELKTPVXXAKSA

SEQ ID NO: 24576 - protein, 34 aa, Artificial Sequence
  GFR-binding peptide
  MOD_RES (1)..(1): Xaa is C or S
  MOD_RES (13)..(14)..(15)..(16)..(17): Xaa is A or G
  MOD_RES (18)..(19)..(20)..(21): Xaa is A or G or is absent
XGEVVMDEYQKYXXXXXXXXXIYLMSIPSLETPV

SEQ ID NO: 24577 - protein, 41 aa, Artificial Sequence
  GFR-binding peptide
  MOD_RES (2)..(4)..(38)..(39): Xaa is C or S
  MOD_RES (16)..(17)..(18)..(19)..(20): Xaa is A or G
  MOD_RES (21)..(22)..(23)..(24): Xaa is A or G or is absent
RXGXGEVVMDEYQKYXXXXXXXXXIYLMSIPSLETPVXXAK

SEQ ID NO: 24578 - protein, 39 aa, Artificial Sequence
  GFR-binding peptide
  MOD_RES (2)..(33)..(34): Xaa is C or S
KXSKVIMEYKFKIKPTKGILYLISIPELDQSVXXPSASA

SEQ ID NO: 24579 - protein, 30 aa, Artificial Sequence; identical to SEQ ID NO: 3571
  GFR-binding peptide

SEQ ID NO: 24580 - protein, 38 aa, Artificial Sequence; identical to SEQ ID NO: 3572
  GFR-binding peptide
  MOD_RES (2)..(4)..(38): Xaa is C or S
  MOD_RES (16)..(17)..(18)..(19)..(20): Xaa is A or G
  MOD_RES (21)..(22)..(23)..(24): Xaa is A or G or is absent

SEQ ID NO: 24581 - protein, 38 aa, Artificial Sequence; identical to SEQ ID NO: 3573
  GFR-binding peptide
  MOD_RES (2)..(4)..(35)..(36): Xaa is C or S

SEQ ID NO: 24582 - protein, 40 aa, Artificial Sequence
  GFR-binding peptide
  MOD_RES (2)..(34)..(35): Xaa is C or S
GXESVAMGRYKKLYTVVGKDFYLISIANLKTPVXXAKSAK

SEQ ID NO: 24583 - protein, 40 aa, Artificial Sequence; identical to SEQ ID NO: 3576
  GFR-binding peptide
  MOD_RES (2)..(36)..(37): Xaa is C or S
  MOD_RES (14)..(15)..(16)..(17)..(18): Xaa is A or G
  MOD_RES (19)..(20)..(21)..(22): Xaa is A or G or is absent

SEQ ID NO: 24584 - protein, 37 aa, Artificial Sequence; identical to SEQ ID NO: 3579
  GFR-binding peptide
  MOD_RES (2)..(36)..(37): Xaa is C or S
  MOD_RES (14)..(15)..(16)..(17)..(18): Xaa is A or G
  MOD_RES (19)..(20)..(21)..(22): Xaa is A or G or is absent

SEQ ID NO: 24585 - protein, 34 aa, Artificial Sequence
  GFR-binding peptide
  MOD_RES (31)..(32): Xaa is C or S
SKVIMEYKFKIKPTKGILYLISIPELDQSVXXPS

SEQ ID NO: 24586 - protein, 44 aa, Artificial Sequence
  GFR-binding peptide
  MOD_RES (1)..(3)..(38)..(39): Xaa is C or S
  MOD_RES (16)..(17)..(18)..(19)..(20): Xaa is A or G
  MOD_RES (21)..(22)..(23)..(24): Xaa is A or G or is absent
XGXEAVSMGEEYQKYXXXXXXXXXIYLVSIPSLKTPVXXAKGVK

SEQ ID NO: 24587 - protein, 42 aa, Artificial Sequence; identical to SEQ ID NO: 3580
  GFR-binding peptide
  MOD_RES (1)..(36)..(37): Xaa is C or S
  MOD_RES (14)..(15)..(16)..(17)..(18): Xaa is A or G
  MOD_RES (19)..(20)..(21)..(22): Xaa is A or G or is absent

SEQ ID NO: 24588 - protein, 33 aa, Artificial Sequence
  GFR-binding peptide
  MOD_RES (33)..(33): Xaa is C or S
  MOD_RES (11)..(12)..(13)..(14)..(15): Xaa is A or G
  MOD_RES (16)..(17)..(18)..(19): Xaa is A or G or is absent
EVVMDEYKFKXXXXXXXXXLYLISIPELRAPVX

SEQ ID NO: 24589 - protein, 42 aa, Artificial Sequence
  GFR-binding peptide
  MOD_RES (1)..(3)..(37)..(38): Xaa is C or S
  MOD_RES (15)..(16)..(17)..(18)..(19): Xaa is A or G
  MOD_RES (20)..(21)..(22)..(23): Xaa is A or G or is absent
XGXAEVVMDYHYKLXXXXXXXXXKYLISIPSLRAPVXXSAPA

SEQ ID NO: 24590 - protein, 34 aa, Artificial Sequence
  GFR-binding peptide
  MOD_RES (1)..(3): Xaa is C or S
XGXARVVMNEYQKYIVNSSDDIYLVSIPSLQTPA

SEQ ID NO: 24591 - protein, 40 aa, Artificial Sequence
  GFR-binding peptide
  MOD_RES (2)..(34): Xaa is C or S
GXSRVVMNEYQKYIVNSSDDIYLVSIPSLKTPAXTPKTVH

SEQ ID NO: 24592 - protein, 37 aa, Artificial Sequence; identical to SEQ ID NO: 3582
  GFR-binding peptide
  MOD_RES (34)..(35): Xaa is C or S
  MOD_RES (12)..(13)..(14)..(15)..(16): Xaa is A or G
  MOD_RES (17)..(18)..(19)..(20): Xaa is A or G or is absent

SEQ ID NO: 24593 - protein, 41 aa, Artificial Sequence
  GFR-binding peptide
  MOD_RES (1)..(35)..(36): Xaa is C or S
  MOD_RES (13)..(14)..(15)..(16)..(17): Xaa is A or G
  MOD_RES (18)..(19)..(20)..(21): Xaa is A or G or is absent
XGEVVMEEYKFKXXXXXXXXXLYLMSIPELETPVXXAKPIS

SEQ ID NO: 24594 - protein, 38 aa, Artificial Sequence
  GFR-binding peptide
  MOD_RES (32)..(33): Xaa is C or S
ESVAMGEYQKYYTVVGKDIYLISIPSLKTPVXXAKSAK

SEQ ID NO: 24595 - protein, 36 aa, Artificial Sequence
  GFR-binding peptide
  MOD_RES (33)..(34): Xaa is C or S
EAVSMGEEYQKYTPVGMDDIYLVSIPSLKTPVXXAK

SEQ ID NO: 24596 - protein, 34 aa, Artificial Sequence; identical to SEQ ID NO: 3585
  GFR-binding peptide
  MOD_RES (1)..(33)..(34): Xaa is C or S

SEQ ID NO: 24597 - protein, 36 aa, Artificial Sequence; identical to SEQ ID NO: 3589
  GFR-binding peptide
  MOD_RES (1)..(3)..(36): Xaa is C or S
  MOD_RES (14)..(15)..(16)..(17)..(18): Xaa is A or G
  MOD_RES (19)..(20)..(21)..(22): Xaa is A or G or is absent

SEQ ID NO: 24598 - protein, 39 aa, Artificial Sequence
  GFR-binding peptide
  MOD_RES (2)..(4)..(36)..(37): Xaa is C or S
RXGXESVAMGEYKFKYTVVGKDLYLISIPELKTPVXXAK

SEQ ID NO: 24599 - protein, 41 aa, Artificial Sequence
  GFR-binding peptide
  MOD_RES (1)..(35)..(36): Xaa is C or S
  MOD_RES (13)..(14)..(15)..(16)..(17): Xaa is A or G
  MOD_RES (18)..(19)..(20)..(21): Xaa is A or G or is absent
XARVVMNEYKFKXXXXXXXXXLYLVSIPELQTPAXXPKPVT

SEQ ID NO: 24600 - protein, 40 aa, Artificial Sequence; identical to SEQ ID NO: 3591
  GFR-binding peptide
  MOD_RES (1)..(3)..(37)..(38): Xaa is C or S
  MOD_RES (15)..(16)..(17)..(18)..(19): Xaa is A or G
  MOD_RES (20)..(21)..(22)..(23): Xaa is A or G or is absent

SEQ ID NO: 24601 - protein, 40 aa, Artificial Sequence; identical to SEQ ID NO: 3592
  GFR-binding peptide
  MOD_RES (1)..(3)..(34)..(35): Xaa is C or S

SEQ ID NO: 24602 - protein, 41 aa, Artificial Sequence; identical to SEQ ID NO: 3593
  GFR-binding peptide
  MOD_RES (1)..(3)..(36)..(37): Xaa is C or S

SEQ ID NO: 24603 - protein, 39 aa, Artificial Sequence
  GFR-binding peptide
  MOD_RES (2)..(4)..(37)..(38): Xaa is C or S
RXGXEAVSMGEEYQKYTPVGMDDIYLVSIPSLKTPVXXA

SEQ ID NO: 24604 - protein, 40 aa, Artificial Sequence
  GFR-binding peptide
  MOD_RES (1)..(3)..(38)..(39): Xaa is C or S
  MOD_RES (16)..(17)..(18)..(19)..(20): Xaa is A or G
  MOD_RES (21)..(22)..(23)..(24): Xaa is A or G or is absent
XGXEAVSMGEEYKFKXXXXXXXXXLYLVSIPELKTPVXXA

SEQ ID NO: 24605 - protein, 35 aa, Artificial Sequence
  GFR-binding peptide
  MOD_RES (2)..(34)..(35): Xaa is C or S
GXESVAMGEYQKYYTVVGKDIYLISIPSLKTPVXX

SEQ ID NO: 24606 - protein, 41 aa, Artificial Sequence
  GFR-binding peptide
  MOD_RES (1)..(35)..(36): Xaa is C or S
  MOD_RES (13)..(14)..(15)..(16)..(17): Xaa is A or G
  MOD_RES (18)..(19)..(20)..(21): Xaa is A or G or is absent
XGEVVMDEYQKYXXXXXXXXXIYLMSIPSLETPVXXAKPIK

SEQ ID NO: 24607 - protein, 36 aa, Artificial Sequence
  GFR-binding peptide
  MOD_RES (32)..(33): Xaa is C or S
ESVAMGRYKKLYTVVGKDFYLISIANLKTPVXXAKS

SEQ ID NO: 24608 - protein, 36 aa, Artificial Sequence; identical to SEQ ID NO: 3597
  GFR-binding peptide
  MOD_RES (1)..(3)..(35)..(36): Xaa is C or S

SEQ ID NO: 24609 - protein, 38 aa, Artificial Sequence
  GFR-binding peptide
  MOD_RES (1)..(3)..(37)..(38): Xaa is C or S
  MOD_RES (15)..(16)..(17)..(18)..(19): Xaa is A or G
  MOD_RES (20)..(21)..(22)..(23): Xaa is A or G or is absent
XGXGEVVMDEYKFKXXXXXXXXXLYLMSIPELETPVXX

SEQ ID NO: 24610 - protein, 40 aa, Artificial Sequence
  GFR-binding peptide
  MOD_RES (1)..(3)..(35): Xaa is C or S
XGXSRVVMNEYQKYIVNSSDDIYLVSIPSLKTPAXTPKTV

SEQ ID NO: 24611 - protein, 37 aa, Artificial Sequence
  GFR-binding peptide
  MOD_RES (1)..(3)..(34)..(35): Xaa is C or S
XKXSKVVMEYKFKVKPTRGVLYLISIPELDQPVXXPS

SEQ ID NO: 24612 - protein, 35 aa, Artificial Sequence
  GFR-binding peptide
  MOD_RES (1)..(3)..(35): Xaa is C or S
XGXESVAMGEYQKYYTVVGKDIYLISIPSLKTPVX

SEQ ID NO: 24613 - protein, 34 aa, Artificial Sequence
  GFR-binding peptide
  MOD_RES (1)..(1): Xaa is C or S
  MOD_RES (13)..(14)..(15)..(16)..(17): Xaa is A or G
  MOD_RES (18)..(19)..(20)..(21): Xaa is A or G or is absent
XAEVVMDRYKKLXXXXXXXXXFYLISIANLRAPV

SEQ ID NO: 24614 - protein, 37 aa, Artificial Sequence; identical to SEQ ID NO: 3606
  GFR-binding peptide
  MOD_RES (1)..(3)..(37): Xaa is C or S
  MOD_RES (15)..(16)..(17)..(18)..(19): Xaa is A or G
  MOD_RES (20)..(21)..(22)..(23): Xaa is A or G or is absent

SEQ ID NO: 24615 - protein, 34 aa, Artificial Sequence
  GFR-binding peptide
  MOD_RES (34)..(34): Xaa is C or S
  MOD_RES (12)..(13)..(14)..(15)..(16): Xaa is A or G
  MOD_RES (17)..(18)..(19)..(20): Xaa is A or G or is absent
ESVAMGRYKKLXXXXXXXXXFYLISIANLKTPVX

SEQ ID NO: 24616 - protein, 38 aa, Artificial Sequence; identical to SEQ ID NO: 3607
  GFR-binding peptide
  MOD_RES (1)..(34)..(35): Xaa is C or S

SEQ ID NO: 24617 - protein, 39 aa, Artificial Sequence; identical to SEQ ID NO: 3609
  GFR-binding peptide
  MOD_RES (1)..(3)..(34)..(35): Xaa is C or S

SEQ ID NO: 24618 - protein, 33 aa, Artificial Sequence
  GFR-binding peptide
  MOD_RES (12)..(13)..(14)..(15)..(16): Xaa is A or G
  MOD_RES (17)..(18)..(19)..(20): Xaa is A or G or is absent
SRVVMNEYKFKXXXXXXXXXLYLVSIPELKTPA

SEQ ID NO: 24619 - protein, 38 aa, Artificial Sequence
  GFR-binding peptide
  MOD_RES (2)..(4)..(36)..(37): Xaa is C or S
RXGXAEVVMDEYKFKVVNNAADLYLISIPELRAPVXXS

SEQ ID NO: 24620 - protein, 36 aa, Artificial Sequence; identical to SEQ ID NO: 3610
  GFR-binding peptide
  MOD_RES (31)..(32): Xaa is C or S

SEQ ID NO: 24621 - protein, 39 aa, Artificial Sequence
  GFR-binding peptide
  MOD_RES (2)..(4)..(35)..(36): Xaa is C or S
SXKXSKVVMEYQKYVKPTRGVIYLISIPSLDQPVXXPSA

SEQ ID NO: 24622 - protein, 34 aa, Artificial Sequence; identical to SEQ ID NO: 3615
  GFR-binding peptide
  MOD_RES (31)..(32): Xaa is C or S

SEQ ID NO: 24623 - protein, 35 aa, Artificial Sequence
  GFR-binding peptide
  MOD_RES (2)..(2): Xaa is C or S
  MOD_RES (14)..(15)..(16)..(17)..(18): Xaa is A or G
  MOD_RES (19)..(20)..(21)..(22): Xaa is A or G or is absent
GXGEVVMDEYKFKXXXXXXXXXLYLMSIPELETPV

SEQ ID NO: 24624 - protein, 42 aa, Artificial Sequence; identical to SEQ ID NO: 3617
  GFR-binding peptide
  MOD_RES (2)..(4)..(36)..(37): Xaa is C or S

SEQ ID NO: 24625 - protein, 38 aa, Artificial Sequence
  GFR-binding peptide
  MOD_RES (1)..(3)..(37)..(38): Xaa is C or S
  MOD_RES (15)..(16)..(17)..(18)..(19): Xaa is A or G
  MOD_RES (20)..(21)..(22)..(23): Xaa is A or G or is absent
XGXESVAMGRYKKLXXXXXXXXXFYLISIANLKTPVXX

SEQ ID NO: 24626 - protein, 38 aa, Artificial Sequence
  GFR-binding peptide
  MOD_RES (1)..(3)..(36)..(37): Xaa is C or S
  MOD_RES (14)..(15)..(16)..(17)..(18): Xaa is A or G
  MOD_RES (19)..(20)..(21)..(22): Xaa is A or G or is absent
XKXSKVVMEYQKYXXXXXXXXXIYLISIPSLDQPVXXP

SEQ ID NO: 24627 - protein, 37 aa, Artificial Sequence
  GFR-binding peptide
  MOD_RES (2)..(4)..(37): Xaa is C or S
  MOD_RES (15)..(16)..(17)..(18)..(19): Xaa is A or G
  MOD_RES (20)..(21)..(22)..(23): Xaa is A or G or is absent
SXKXSKVIMEYQKYXXXXXXXXXIYLISIPSLDQSVX

SEQ ID NO: 24628 - protein, 39 aa, Artificial Sequence; identical to SEQ ID NO: 3620
  GFR-binding peptide
  MOD_RES (2)..(4)..(36)..(37): Xaa is C or S

SEQ ID NO: 24629 - protein, 36 aa, Artificial Sequence
  GFR-binding peptide
  MOD_RES (31)..(32): Xaa is C or S
EVVMDRYKKLVVNNAADFYLISIANLRAPVXXSAPA

SEQ ID NO: 24630 - protein, 35 aa, Artificial Sequence; identical to SEQ ID NO: 3622
  GFR-binding peptide
  MOD_RES (2)..(35): Xaa is C or S

SEQ ID NO: 24631 - protein, 35 aa, Artificial Sequence
  GFR-binding peptide
  MOD_RES (1)..(3)..(34)..(35): Xaa is C or S
XKXSKVIMEYQKYIKPTKGIIYLISIPSLDQSVXX

SEQ ID NO: 24632 - protein, 43 aa, Artificial Sequence; identical to SEQ ID NO: 3623
  GFR-binding peptide
  MOD_RES (2)..(4)..(37)..(38): Xaa is C or S

SEQ ID NO: 24633 - protein, 37 aa, Artificial Sequence
  GFR-binding peptide
  MOD_RES (33)..(34): Xaa is C or S
  MOD_RES (11)..(12)..(13)..(14)..(15): Xaa is A or G
  MOD_RES (16)..(17)..(18)..(19): Xaa is A or G or is absent
SVAMGYHYKLXXXXXXXXXKYLISIPSLKTPVXXAKS

SEQ ID NO: 24634 - protein, 40 aa, Artificial Sequence
  GFR-binding peptide
  MOD_RES (1)..(35)..(36): Xaa is C or S
  MOD_RES (13)..(14)..(15)..(16)..(17): Xaa is A or G
  MOD_RES (18)..(19)..(20)..(21): Xaa is A or G or is absent
XSRVVMNEYQKYXXXXXXXXXIYLVSIPSLKTPAXXPKPV

SEQ ID NO: 24635 - protein, 33 aa, Artificial Sequence
  GFR-binding peptide
  MOD_RES (31)..(32): Xaa is C or S
RVVMNEYKFKIVNSSDDLYLVSIPELQTPAXXP

SEQ ID NO: 24636 - protein, 33 aa, Artificial Sequence; identical to SEQ ID NO: 3626
  GFR-binding peptide
  MOD_RES (1)..(33): Xaa is C or S

SEQ ID NO: 24637 - protein, 37 aa, Artificial Sequence; identical to SEQ ID NO: 3627
  GFR-binding peptide
  MOD_RES (1)..(3)..(36)..(37): Xaa is C or S
  MOD_RES (14)..(15)..(16)..(17)..(18): Xaa is A or G
  MOD_RES (19)..(20)..(21)..(22): Xaa is A or G or is absent

SEQ ID NO: 24638 - protein, 43 aa, Artificial Sequence; identical to SEQ ID NO: 3628
  GFR-binding peptide
  MOD_RES (1)..(3)..(37)..(38): Xaa is C or S
  MOD_RES (15)..(16)..(17)..(18)..(19): Xaa is A or G
  MOD_RES (20)..(21)..(22)..(23): Xaa is A or G or is absent

SEQ ID NO: 24639 - protein, 40 aa, Artificial Sequence
  GFR-binding peptide
  MOD_RES (2)..(36)..(37): Xaa is C or S
  MOD_RES (14)..(15)..(16)..(17)..(18): Xaa is A or G
  MOD_RES (19)..(20)..(21)..(22): Xaa is A or G or is absent
GXGEVVMDEYQKYXXXXXXXXXIYLMSIPSLETPVXXAKP

SEQ ID NO: 24640 - protein, 37 aa, Artificial Sequence
  GFR-binding peptide
  MOD_RES (1)..(33)..(34): Xaa is C or S
XARVVMNEYQKYIVNSSDDIYLVSIPSLQTPAXXPKP

SEQ ID NO: 24641 - protein, 38 aa, Artificial Sequence; identical to SEQ ID NO: 3630
  GFR-binding peptide
  MOD_RES (33)..(34): Xaa is C or S
  MOD_RES (11)..(12)..(13)..(14)..(15): Xaa is A or G
  MOD_RES (16)..(17)..(18)..(19): Xaa is A or G or is absent

SEQ ID NO: 24642 - protein, 34 aa, Artificial Sequence; identical to SEQ ID NO: 3631
  GFR-binding peptide
  MOD_RES (1)..(33)..(34): Xaa is C or S

SEQ ID NO: 24643 - protein, 39 aa, Artificial Sequence; identical to SEQ ID NO: 3632
  GFR-binding peptide
  MOD_RES (33)..(34): Xaa is C or S

SEQ ID NO: 24644 - protein, 38 aa, Artificial Sequence
  GFR-binding peptide
  MOD_RES (33)..(34): Xaa is C or S
EAVSMGEEYQKYTPVGMDDIYLVSIPSLKTPVXXAKGV

SEQ ID NO: 24645 - protein, 34 aa, Artificial Sequence
  GFR-binding peptide
  MOD_RES (32)..(33): Xaa is C or S
ESVAMGEYKFKYTVVGKDLYLISIPELKTPVXXA

SEQ ID NO: 24646 - protein, 37 aa, Artificial Sequence
  GFR-binding peptide
  MOD_RES (1)..(3)..(37): Xaa is C or S
  MOD_RES (15)..(16)..(17)..(18)..(19): Xaa is A or G
  MOD_RES (20)..(21)..(22)..(23): Xaa is A or G or is absent
XGXSRVVMNEYKFKXXXXXXXXXLYLVSIPELKTPAX

SEQ ID NO: 24647 - protein, 32 aa, Artificial Sequence
  GFR-binding peptide
  MOD_RES (11)..(12)..(13)..(14)..(15): Xaa is A or G
  MOD_RES (16)..(17)..(18)..(19): Xaa is A or G or is absent
SVAMGEYKFKXXXXXXXXXLYLISIPELKTPV

SEQ ID NO: 24648 - protein, 37 aa, Artificial Sequence; identical to SEQ ID NO: 3634
  GFR-binding peptide
  MOD_RES (1)..(3)..(34)..(35): Xaa is C or S

SEQ ID NO: 24649 - protein, 35 aa, Artificial Sequence
  GFR-binding peptide
  MOD_RES (1)..(3): Xaa is C or S
  MOD_RES (14)..(15)..(16)..(17)..(18): Xaa is A or G
  MOD_RES (19)..(20)..(21)..(22): Xaa is A or G or is absent
XKXSRVIMEYQKYXXXXXXXXXIYLISIPSLAQPV

SEQ ID NO: 24650 - protein, 41 aa, Artificial Sequence
  GFR-binding peptide
  MOD_RES (2)..(35)..(36): Xaa is C or S
  MOD_RES (13)..(14)..(15)..(16)..(17): Xaa is A or G
  MOD_RES (18)..(19)..(20)..(21): Xaa is A or G or is absent
KXSRVIMEYKFKXXXXXXXXXLYLISIPELAQPVXXPAASA

SEQ ID NO: 24651 - protein, 31 aa, Artificial Sequence
  GFR-binding peptide
  MOD_RES (1)..(1): Xaa is C or S
XSRVIMEYQKYVKPKRGVIYLISIPSLAQPV

SEQ ID NO: 24652 - protein, 40 aa, Artificial Sequence; identical to SEQ ID NO: 3636
  GFR-binding peptide
  MOD_RES (1)..(34)..(35): Xaa is C or S
  MOD_RES (12)..(13)..(14)..(15)..(16): Xaa is A or G
  MOD_RES (17)..(18)..(19)..(20): Xaa is A or G or is absent

SEQ ID NO: 24653 - protein, 34 aa, Artificial Sequence
  GFR-binding peptide
  MOD_RES (34)..(34): Xaa is C or S
  MOD_RES (12)..(13)..(14)..(15)..(16): Xaa is A or G
  MOD_RES (17)..(18)..(19)..(20): Xaa is A or G or is absent
AKVVMNEYKFKXXXXXXXXXLYLVSIPELKTPAX

SEQ ID NO: 24654 - protein, 35 aa, Artificial Sequence; identical to SEQ ID NO: 3637
  GFR-binding peptide
  MOD_RES (2)..(35): Xaa is C or S
  MOD_RES (13)..(14)..(15)..(16)..(17): Xaa is A or G
  MOD_RES (18)..(19)..(20)..(21): Xaa is A or G or is absent

SEQ ID NO: 24655 - protein, 34 aa, Artificial Sequence; identical to SEQ ID NO: 3638
  GFR-binding peptide
  MOD_RES (1)..(33)..(34): Xaa is C or S

SEQ ID NO: 24656 - protein, 36 aa, Artificial Sequence; identical to SEQ ID NO: 3639
  GFR-binding peptide
  MOD_RES (2)..(4)..(35)..(36): Xaa is C or S

SEQ ID NO: 24657 - protein, 37 aa, Artificial Sequence
  GFR-binding peptide
  MOD_RES (2)..(4)..(37): Xaa is C or S
RXGXEAVSMGEEYQKYTPVGMDDIYLVSIPSLKTPVX

SEQ ID NO: 24658 - protein, 36 aa, Artificial Sequence; identical to SEQ ID NO: 3640
  GFR-binding peptide
  MOD_RES (1)..(35)..(36): Xaa is C or S
  MOD_RES (13)..(14)..(15)..(16)..(17): Xaa is A or G
  MOD_RES (18)..(19)..(20)..(21): Xaa is A or G or is absent

SEQ ID NO: 24659 - protein, 38 aa, Artificial Sequence; identical to SEQ ID NO: 3641
  GFR-binding peptide
  MOD_RES (1)..(3)..(38): Xaa is C or S
  MOD_RES (16)..(17)..(18)..(19)..(20): Xaa is A or G
  MOD_RES (21)..(22)..(23)..(24): Xaa is A or G or is absent

SEQ ID NO: 24660 - protein, 38 aa, Artificial Sequence
  GFR-binding peptide
  MOD_RES (32)..(33): Xaa is C or S
GEVVMDEYQKYVVKENEDIYLMSIPSLETPVXXAKPIK

SEQ ID NO: 24661 - protein, 41 aa, Artificial Sequence
  GFR-binding peptide
  MOD_RES (2)..(36)..(37): Xaa is C or S
  MOD_RES (14)..(15)..(16)..(17)..(18): Xaa is A or G
  MOD_RES (19)..(20)..(21)..(22): Xaa is A or G or is absent
GXSRVVMNEYQKYXXXXXXXXXIYLVSIPSLKTPAXXPKPV

SEQ ID NO: 24662 - protein, 38 aa, Artificial Sequence; identical to SEQ ID NO: 3644
  GFR-binding peptide
  MOD_RES (1)..(33)..(34): Xaa is C or S

SEQ ID NO: 24663 - protein, 32 aa, Artificial Sequence
  GFR-binding peptide
  MOD_RES (31)..(32): Xaa is C or S
EVVMEEYQKYVVKDYEDIYLMSIPSLETPVXX

SEQ ID NO: 24664 - protein, 43 aa, Artificial Sequence; identical to SEQ ID NO: 3647
  GFR-binding peptide
  MOD_RES (2)..(4)..(38)..(39): Xaa is C or S
  MOD_RES (16)..(17)..(18)..(19)..(20): Xaa is A or G
  MOD_RES (21)..(22)..(23)..(24): Xaa is A or G or is absent

SEQ ID NO: 24665 - protein, 38 aa, Artificial Sequence; identical to SEQ ID NO: 3648
  GFR-binding peptide
  MOD_RES (2)..(36)..(37): Xaa is C or S
  MOD_RES (14)..(15)..(16)..(17)..(18): Xaa is A or G
  MOD_RES (19)..(20)..(21)..(22): Xaa is A or G or is absent

SEQ ID NO: 24666 - protein, 39 aa, Artificial Sequence; identical to SEQ ID NO: 3650
  GFR-binding peptide
  MOD_RES (1)..(3)..(35): Xaa is C or S

SEQ ID NO: 24667 - protein, 37 aa, Artificial Sequence
  GFR-binding peptide
  MOD_RES (1)..(32)..(33): Xaa is C or S
XSKVVMEYQKYVKPTRGVIYLISIPSLDQPVXXPSAS

SEQ ID NO: 24668 - protein, 32 aa, Artificial Sequence
  GFR-binding peptide
  MOD_RES (1)..(1): Xaa is C or S
XGEVVMEEYQKYVVKDYEDIYLMSIPSLETPV

SEQ ID NO: 24669 - protein, 33 aa, Artificial Sequence
  GFR-binding peptide
  MOD_RES (1)..(33): Xaa is C or S
XGEVVMEEYKFKVVKDYEDLYLMSIPELETPVX

SEQ ID NO: 24670 - protein, 33 aa, Artificial Sequence
  GFR-binding peptide
  MOD_RES (31)..(32): Xaa is C or S
KVVMNEYKFKIVNNSSDLYLVSIPELKTPAXXA

SEQ ID NO: 24671 - protein, 35 aa, Artificial Sequence; identical to SEQ ID NO: 3651
  GFR-binding peptide
  MOD_RES (1)..(3): Xaa is C or S
  MOD_RES (14)..(15)..(16)..(17)..(18): Xaa is A or G
  MOD_RES (19)..(20)..(21)..(22): Xaa is A or G or is absent

SEQ ID NO: 24672 - protein, 34 aa, Artificial Sequence
  GFR-binding peptide
  MOD_RES (33)..(34): Xaa is C or S
  MOD_RES (11)..(12)..(13)..(14)..(15): Xaa is A or G
  MOD_RES (16)..(17)..(18)..(19): Xaa is A or G or is absent
EVVMDEYQKYXXXXXXXXXIYLMSIPSLETPVXX

SEQ ID NO: 24673 - protein, 44 aa, Artificial Sequence; identical to SEQ ID NO: 3654
  GFR-binding peptide
  MOD_RES (1)..(3)..(38)..(39): Xaa is C or S
  MOD_RES (16)..(17)..(18)..(19)..(20): Xaa is A or G
  MOD_RES (21)..(22)..(23)..(24): Xaa is A or G or is absent

SEQ ID NO: 24674 - protein, 36 aa, Artificial Sequence
  GFR-binding peptide
  MOD_RES (34)..(35): Xaa is C or S
  MOD_RES (12)..(13)..(14)..(15)..(16): Xaa is A or G
  MOD_RES (17)..(18)..(19)..(20): Xaa is A or G or is absent
GEVVMEEYKFKXXXXXXXXXLYLMSIPELETPVXXA

SEQ ID NO: 24675 - protein, 39 aa, Artificial Sequence; identical to SEQ ID NO: 3655
  GFR-binding peptide
  MOD_RES (2)..(4)..(39): Xaa is C or S
  MOD_RES (17)..(18)..(19)..(20)..(21): Xaa is A or G
  MOD_RES (22)..(23)..(24)..(25): Xaa is A or G or is absent

SEQ ID NO: 24676 - protein, 42 aa, Artificial Sequence
  GFR-binding peptide
  MOD_RES (2)..(4)..(38)..(39): Xaa is C or S
  MOD_RES (16)..(17)..(18)..(19)..(20): Xaa is A or G
  MOD_RES (21)..(22)..(23)..(24): Xaa is A or G or is absent
HXGXSRVVMNEYKFKXXXXXXXXXLYLVSIPELKTPAXXPKP

SEQ ID NO: 24677 - protein, 39 aa, Artificial Sequence
  GFR-binding peptide
  MOD_RES (1)..(35)..(36): Xaa is C or S
  MOD_RES (13)..(14)..(15)..(16)..(17): Xaa is A or G
  MOD_RES (18)..(19)..(20)..(21): Xaa is A or G or is absent
XAEVVMDYHYKLXXXXXXXXXKYLISIPSLRAPVXXSAP

SEQ ID NO: 24678 - protein, 32 aa, Artificial Sequence
  GFR-binding peptide
  MOD_RES (1)..(32): Xaa is C or S
XSRVIMEYQKYVKPKRGVIYLISIPSLAQPVX

SEQ ID NO: 24679 - protein, 39 aa, Artificial Sequence; identical to SEQ ID NO: 3659
  GFR-binding peptide
  MOD_RES (1)..(3)..(34)..(35): Xaa is C or S

SEQ ID NO: 24680 - protein, 41 aa, Artificial Sequence
  GFR-binding peptide
  MOD_RES (2)..(4)..(36)..(37): Xaa is C or S
RXGXGEVVMDEYQKYVVKENEDIYLMSIPSLETPVXXAKPI

SEQ ID NO: 24681 - protein, 38 aa, Artificial Sequence
  GFR-binding peptide
  MOD_RES (33)..(33): Xaa is C or S
  MOD_RES (11)..(12)..(13)..(14)..(15): Xaa is A or G
  MOD_RES (16)..(17)..(18)..(19): Xaa is A or G or is absent
RVVMNEYQKYXXXXXXXXXIYLVSIPSLKTPAXTPKTV

SEQ ID NO: 24682 - protein, 34 aa, Artificial Sequence; identical to SEQ ID NO: 3662
  GFR-binding peptide
  MOD_RES (33)..(34): Xaa is C or S
  MOD_RES (11)..(12)..(13)..(14)..(15): Xaa is A or G
  MOD_RES (16)..(17)..(18)..(19): Xaa is A or G or is absent

SEQ ID NO: 24683 - protein, 31 aa, Artificial Sequence
  GFR-binding peptide
  MOD_RES (31)..(31): Xaa is C or S
EVVMDEYQKYVVKENEDIYLMSIPSLETPVX

SEQ ID NO: 24684 - protein, 40 aa, Artificial Sequence
  GFR-binding peptide
  MOD_RES (2)..(34)..(35): Xaa is C or S
GXAEVVMDRYKKLVVNNAADFYLISIANLRAPVXXSAPAA

SEQ ID NO: 24685 - protein, 35 aa, Artificial Sequence; identical to SEQ ID NO: 3665
  GFR-binding peptide
  MOD_RES (1)..(34)..(35): Xaa is C or S
  MOD_RES (12)..(13)..(14)..(15)..(16): Xaa is A or G
  MOD_RES (17)..(18)..(19)..(20): Xaa is A or G or is absent

SEQ ID NO: 24686 - protein, 32 aa, Artificial Sequence
  GFR-binding peptide
  MOD_RES (31)..(32): Xaa is C or S
EVVMDEYQKYVVKENEDIYLMSIPSLETPVXX

SEQ ID NO: 24687 - protein, 36 aa, Artificial Sequence; identical to SEQ ID NO: 3666
  GFR-binding peptide
  MOD_RES (32)..(32): Xaa is C or S

SEQ ID NO: 24688 - protein, 39 aa, Artificial Sequence; identical to SEQ ID NO: 3667
  GFR-binding peptide
  MOD_RES (34)..(35): Xaa is C or S
  MOD_RES (12)..(13)..(14)..(15)..(16): Xaa is A or G
  MOD_RES (17)..(18)..(19)..(20): Xaa is A or G or is absent

SEQ ID NO: 24689 - protein, 34 aa, Artificial Sequence
  GFR-binding peptide
  MOD_RES (32)..(33): Xaa is C or S
ESVAMGYHYKLYTVVGKDKYLISIPSLKTPVXXA

SEQ ID NO: 24690 - protein, 41 aa, Artificial Sequence; identical to SEQ ID NO: 3668
  GFR-binding peptide
  MOD_RES (1)..(3)..(35)..(36): Xaa is C or S

SEQ ID NO: 24691 - protein, 34 aa, Artificial Sequence
  GFR-binding peptide
  MOD_RES (33)..(34): Xaa is C or S
EAVSMGEEYQKYTPVGMDDIYLVSIPSLKTPVXX

SEQ ID NO: 24692 - protein, 35 aa, Artificial Sequence
  GFR-binding peptide
  MOD_RES (2)..(34)..(35): Xaa is C or S
GXARVVMNEYKFKIVNSSDDLYLVSIPELQTPAXX

SEQ ID NO: 24693 - protein, 37 aa, Artificial Sequence; identical to SEQ ID NO: 3673
  GFR-binding peptide
  MOD_RES (1)..(3)..(37): Xaa is C or S
  MOD_RES (15)..(16)..(17)..(18)..(19): Xaa is A or G
  MOD_RES (20)..(21)..(22)..(23): Xaa is A or G or is absent

SEQ ID NO: 24694 - protein, 39 aa, Artificial Sequence; identical to SEQ ID NO: 3677
  GFR-binding peptide
  MOD_RES (1)..(3)..(37)..(38): Xaa is C or S
  MOD_RES (15)..(16)..(17)..(18)..(19): Xaa is A or G
  MOD_RES (20)..(21)..(22)..(23): Xaa is A or G or is absent

SEQ ID NO: 24695 - protein, 41 aa, Artificial Sequence; identical to SEQ ID NO: 3678
  GFR-binding peptide
  MOD_RES (1)..(3)..(37)..(38): Xaa is C or S
  MOD_RES (15)..(16)..(17)..(18)..(19): Xaa is A or G
  MOD_RES (20)..(21)..(22)..(23): Xaa is A or G or is absent

SEQ ID NO: 24696 - protein, 39 aa, Artificial Sequence
  GFR-binding peptide
  MOD_RES (2)..(4)..(38)..(39): Xaa is C or S
  MOD_RES (16)..(17)..(18)..(19)..(20): Xaa is A or G
  MOD_RES (21)..(22)..(23)..(24): Xaa is A or G or is absent
HXGXARVVMNEYQKYXXXXXXXXXIYLVSIPSLQTPAXX

SEQ ID NO: 24697 - protein, 39 aa, Artificial Sequence
  GFR-binding peptide
  MOD_RES (1)..(34)..(35): Xaa is C or S
  MOD_RES (12)..(13)..(14)..(15)..(16): Xaa is A or G
  MOD_RES (17)..(18)..(19)..(20): Xaa is A or G or is absent
XSKVVMEYQKYXXXXXXXXXIYLISIPSLDQPVXXPSAS

SEQ ID NO: 24698 - protein, 39 aa, Artificial Sequence; identical to SEQ ID NO: 3681
  GFR-binding peptide
  MOD_RES (1)..(35)..(36): Xaa is C or S
  MOD_RES (13)..(14)..(15)..(16)..(17): Xaa is A or G
  MOD_RES (18)..(19)..(20)..(21): Xaa is A or G or is absent

SEQ ID NO: 24699 - protein, 34 aa, Artificial Sequence; identical to SEQ ID NO: 3682
  GFR-binding peptide
  MOD_RES (1)..(32)..(33): Xaa is C or S

SEQ ID NO: 24700 - protein, 37 aa, Artificial Sequence
  GFR-binding peptide
  MOD_RES (33)..(34): Xaa is C or S
  MOD_RES (11)..(12)..(13)..(14)..(15): Xaa is A or G
  MOD_RES (16)..(17)..(18)..(19): Xaa is A or G or is absent
EVVMEEYKFKXXXXXXXXXLYLMSIPELETPVXXAKP

SEQ ID NO: 24701 - protein, 36 aa, Artificial Sequence
  GFR-binding peptide
  MOD_RES (33)..(34): Xaa is C or S
  MOD_RES (11)..(12)..(13)..(14)..(15): Xaa is A or G
  MOD_RES (16)..(17)..(18)..(19): Xaa is A or G or is absent
SVAMGRYKKLXXXXXXXXXFYLISIANLKTPVXXAK

SEQ ID NO: 24702 - protein, 38 aa, Artificial Sequence
  GFR-binding peptide
  MOD_RES (2)..(4)..(35)..(36): Xaa is C or S
SXKXSKVIMEYQKYIKPTKGIIYLISIPSLDQSVXXPS

SEQ ID NO: 24703 - protein, 41 aa, Artificial Sequence
  GFR-binding peptide
  MOD_RES (2)..(37)..(38): Xaa is C or S
  MOD_RES (15)..(16)..(17)..(18)..(19): Xaa is A or G
  MOD_RES (20)..(21)..(22)..(23): Xaa is A or G or is absent
GXEAVSMGEEYKFKXXXXXXXXXLYLVSIPELKTPVXXAKG

SEQ ID NO: 24704 - protein, 37 aa, Artificial Sequence; identical to SEQ ID NO: 3686
  GFR-binding peptide
  MOD_RES (33)..(34): Xaa is C or S
  MOD_RES (11)..(12)..(13)..(14)..(15): Xaa is A or G
  MOD_RES (16)..(17)..(18)..(19): Xaa is A or G or is absent

SEQ ID NO: 24705 - protein, 37 aa, Artificial Sequence
  GFR-binding peptide
  MOD_RES (2)..(36)..(37): Xaa is C or S
  MOD_RES (14)..(15)..(16)..(17)..(18): Xaa is A or G
  MOD_RES (19)..(20)..(21)..(22): Xaa is A or G or is absent
GXSRVVMNEYQKYXXXXXXXXXIYLVSIPSLKTPAXX

SEQ ID NO: 24706 - protein, 38 aa, Artificial Sequence; identical to SEQ ID NO: 3687
  GFR-binding peptide
  MOD_RES (1)..(3)..(37)..(38): Xaa is C or S
  MOD_RES (15)..(16)..(17)..(18)..(19): Xaa is A or G
  MOD_RES (20)..(21)..(22)..(23): Xaa is A or G or is absent

SEQ ID NO: 24707 - protein, 33 aa, Artificial Sequence
  GFR-binding peptide
  MOD_RES (31)..(32): Xaa is C or S
SVAMGEYQKYYTVVGKDIYLISIPSLKTPVXXA

SEQ ID NO: 24708 - protein, 36 aa, Artificial Sequence
  GFR-binding peptide
  MOD_RES (1)..(35)..(36): Xaa is C or S
  MOD_RES (13)..(14)..(15)..(16)..(17): Xaa is A or G
  MOD_RES (18)..(19)..(20)..(21): Xaa is A or G or is absent
XGEVVMEEYQKYXXXXXXXXXIYLMSIPSLETPVXX

SEQ ID NO: 24709 - protein, 38 aa, Artificial Sequence
  GFR-binding peptide
  MOD_RES (1)..(34)..(35): Xaa is C or S
  MOD_RES (12)..(13)..(14)..(15)..(16): Xaa is A or G
  MOD_RES (17)..(18)..(19)..(20): Xaa is A or G or is absent
XSKVIMEYQKYXXXXXXXXXIYLISIPSLDQSVXXPSA

SEQ ID NO: 24710 - protein, 41 aa, Artificial Sequence; identical to SEQ ID NO: 3690
  GFR-binding peptide
  MOD_RES (1)..(35)..(36): Xaa is C or S
  MOD_RES (13)..(14)..(15)..(16)..(17): Xaa is A or G
  MOD_RES (18)..(19)..(20)..(21): Xaa is A or G or is absent

SEQ ID NO: 24711 - protein, 34 aa, Artificial Sequence; identical to SEQ ID NO: 3692
  GFR-binding peptide
  MOD_RES (2)..(34): Xaa is C or S

SEQ ID NO: 24712 - protein, 41 aa, Artificial Sequence
  GFR-binding peptide
  MOD_RES (2)..(36)..(37): Xaa is C or S
  MOD_RES (14)..(15)..(16)..(17)..(18): Xaa is A or G
  MOD_RES (19)..(20)..(21)..(22): Xaa is A or G or is absent
GXESVAMGYHYKLXXXXXXXXXKYLISIPSLKTPVXXAKSA

SEQ ID NO: 24713 - protein, 34 aa, Artificial Sequence; identical to SEQ ID NO: 3696
  GFR-binding peptide
  MOD_RES (1)..(33)..(34): Xaa is C or S

SEQ ID NO: 24714 - protein, 37 aa, Artificial Sequence; identical to SEQ ID NO: 3697
  GFR-binding peptide
  MOD_RES (31)..(32): Xaa is C or S

SEQ ID NO: 24715 - protein, 36 aa, Artificial Sequence; identical to SEQ ID NO: 3698
  GFR-binding peptide
  MOD_RES (1)..(36): Xaa is C or S
  MOD_RES (14)..(15)..(16)..(17)..(18): Xaa is A or G
  MOD_RES (19)..(20)..(21)..(22): Xaa is A or G or is absent

SEQ ID NO: 24716 - protein, 41 aa, Artificial Sequence; identical to SEQ ID NO: 3699
  GFR-binding peptide
  MOD_RES (2)..(4)..(37)..(38): Xaa is C or S

SEQ ID NO: 24717 - protein, 34 aa, Artificial Sequence
  GFR-binding peptide
  MOD_RES (1)..(3)..(34): Xaa is C or S
XKXSRVIMEYKFKVKPKRGVLYLISIPELAQPVX

SEQ ID NO: 24718 - protein, 31 aa, Artificial Sequence; identical to SEQ ID NO: 3703
  GFR-binding peptide

SEQ ID NO: 24719 - protein, 36 aa, Artificial Sequence
  GFR-binding peptide
  MOD_RES (32)..(32): Xaa is C or S
SRVVMNEYKFKIVNSSDDLYLVSIPELKTPAXTPKT

SEQ ID NO: 24720 - protein, 34 aa, Artificial Sequence
  GFR-binding peptide
  MOD_RES (32)..(33): Xaa is C or S
ARVVMNEYKFKIVNSSDDLYLVSIPELQTPAXXP

SEQ ID NO: 24721 - protein, 38 aa, Artificial Sequence
  GFR-binding peptide
  MOD_RES (1)..(3)..(37)..(38): Xaa is C or S
  MOD_RES (15)..(16)..(17)..(18)..(19): Xaa is A or G
  MOD_RES (20)..(21)..(22)..(23): Xaa is A or G or is absent
XGXAKVVMNEYKFKXXXXXXXXXLYLVSIPELKTPAXX

SEQ ID NO: 24722 - protein, 33 aa, Artificial Sequence; identical to SEQ ID NO: 3706
  GFR-binding peptide
  MOD_RES (32)..(33): Xaa is C or S

SEQ ID NO: 24723 - protein, 38 aa, Artificial Sequence
  GFR-binding peptide
  MOD_RES (1)..(3)..(38): Xaa is C or S
  MOD_RES (16)..(17)..(18)..(19)..(20): Xaa is A or G
  MOD_RES (21)..(22)..(23)..(24): Xaa is A or G or is absent
XGXEAVSMGEEYQKYXXXXXXXXXIYLVSIPSLKTPVX

SEQ ID NO: 24724 - protein, 33 aa, Artificial Sequence
  GFR-binding peptide
  MOD_RES (2)..(2): Xaa is C or S
GXAKVVMNEYQKYIVNNSSDIYLVSIPSLKTPA

SEQ ID NO: 24725 - protein, 40 aa, Artificial Sequence
  GFR-binding peptide
  MOD_RES (2)..(35)..(36): Xaa is C or S
  MOD_RES (13)..(14)..(15)..(16)..(17): Xaa is A or G
  MOD_RES (18)..(19)..(20)..(21): Xaa is A or G or is absent
KXSRVIMEYQKYXXXXXXXXXIYLISIPSLAQPVXXPAAS

SEQ ID NO: 24726 - protein, 40 aa, Artificial Sequence
  GFR-binding peptide
  MOD_RES (2)..(4)..(38)..(39): Xaa is C or S
  MOD_RES (16)..(17)..(18)..(19)..(20): Xaa is A or G
  MOD_RES (21)..(22)..(23)..(24): Xaa is A or G or is absent
HXGXARVVMNEYQKYXXXXXXXXXIYLVSIPSLQTPAXXP

SEQ ID NO: 24727 - protein, 38 aa, Artificial Sequence
  GFR-binding peptide
  MOD_RES (34)..(35): Xaa is C or S
  MOD_RES (12)..(13)..(14)..(15)..(16): Xaa is A or G
  MOD_RES (17)..(18)..(19)..(20): Xaa is A or G or is absent
GEVVMDEYKFKXXXXXXXXXLYLMSIPELETPVXXAKP

SEQ ID NO: 24728 - protein, 41 aa, Artificial Sequence
  GFR-binding peptide
  MOD_RES (1)..(3)..(37)..(38): Xaa is C or S
  MOD_RES (15)..(16)..(17)..(18)..(19): Xaa is A or G
  MOD_RES (20)..(21)..(22)..(23): Xaa is A or G or is absent
XGXAEVVMDRYKKLXXXXXXXXXFYLISIANLRAPVXXSAP

SEQ ID NO: 24729 - protein, 42 aa, Artificial Sequence; identical to SEQ ID NO: 3709
  GFR-binding peptide
  MOD_RES (2)..(4)..(39)..(40): Xaa is C or S
  MOD_RES (17)..(18)..(19)..(20)..(21): Xaa is A or G
  MOD_RES (22)..(23)..(24)..(25): Xaa is A or G or is absent

SEQ ID NO: 24730 - protein, 37 aa, Artificial Sequence; identical to SEQ ID NO: 3710
  GFR-binding peptide
  MOD_RES (2)..(4)..(36)..(37): Xaa is C or S

SEQ ID NO: 24731 - protein, 35 aa, Artificial Sequence
  GFR-binding peptide
  MOD_RES (1)..(32)..(33): Xaa is C or S
XSRVIMEYKFKVKPKRGVLYLISIPELAQPVXXPA

SEQ ID NO: 24732 - protein, 34 aa, Artificial Sequence
  GFR-binding peptide
  MOD_RES (32)..(33): Xaa is C or S
AEVVMDYHYKLVVNNAADKYLISIPSLRAPVXXS

SEQ ID NO: 24733 - protein, 45 aa, Artificial Sequence; identical to SEQ ID NO: 3713
  GFR-binding peptide
  MOD_RES (2)..(4)..(39)..(40): Xaa is C or S
  MOD_RES (17)..(18)..(19)..(20)..(21): Xaa is A or G
  MOD_RES (22)..(23)..(24)..(25): Xaa is A or G or is absent

SEQ ID NO: 24734 - protein, 36 aa, Artificial Sequence; identical to SEQ ID NO: 3716
  GFR-binding peptide
  MOD_RES (31)..(32): Xaa is C or S

SEQ ID NO: 24735 - protein, 36 aa, Artificial Sequence
  GFR-binding peptide
  MOD_RES (33)..(34): Xaa is C or S
  MOD_RES (11)..(12)..(13)..(14)..(15): Xaa is A or G
  MOD_RES (16)..(17)..(18)..(19): Xaa is A or G or is absent
EVVMDYHYKLXXXXXXXXXKYLISIPSLRAPVXXSA

SEQ ID NO: 24736 - protein, 32 aa, Artificial Sequence
  GFR-binding peptide
  MOD_RES (2)..(2): Xaa is C or S
KXSKVIMEYQKYIKPTKGIIYLISIPSLDQSV

SEQ ID NO: 24737 - protein, 40 aa, Artificial Sequence
  GFR-binding peptide
  MOD_RES (2)..(4)..(37)..(38): Xaa is C or S
  MOD_RES (15)..(16)..(17)..(18)..(19): Xaa is A or G
  MOD_RES (20)..(21)..(22)..(23): Xaa is A or G or is absent
SXKXSKVVMEYQKYXXXXXXXXXIYLISIPSLDQPVXXPS

SEQ ID NO: 24738 - protein, 36 aa, Artificial Sequence
  GFR-binding peptide
  MOD_RES (1)..(3)..(34)..(35): Xaa is C or S
XKXSKVIMEYQKYIKPTKGIIYLISIPSLDQSVXXP

SEQ ID NO: 24739 - protein, 35 aa, Artificial Sequence; identical to SEQ ID NO: 3719
  GFR-binding peptide
  MOD_RES (2)..(4)..(35): Xaa is C or S

SEQ ID NO: 24740 - protein, 39 aa, Artificial Sequence; identical to SEQ ID NO: 3720
  GFR-binding peptide
  MOD_RES (2)..(4)..(38)..(39): Xaa is C or S
  MOD_RES (16)..(17)..(18)..(19)..(20): Xaa is A or G
  MOD_RES (21)..(22)..(23)..(24): Xaa is A or G or is absent

SEQ ID NO: 24741 - protein, 37 aa, Artificial Sequence
  GFR-binding peptide
  MOD_RES (33)..(34): Xaa is C or S
  MOD_RES (11)..(12)..(13)..(14)..(15): Xaa is A or G
  MOD_RES (16)..(17)..(18)..(19): Xaa is A or G or is absent
KVVMNEYQKYXXXXXXXXXIYLVSIPSLKTPAXXAKP

SEQ ID NO: 24742 - protein, 38 aa, Artificial Sequence
  GFR-binding peptide
  MOD_RES (2)..(4)..(36)..(37): Xaa is C or S
HXGXSRVVMNEYQKYIVNSSDDIYLVSIPSLKTPAXXP

SEQ ID NO: 24743 - protein, 39 aa, Artificial Sequence; identical to SEQ ID NO: 3721
  GFR-binding peptide
  MOD_RES (1)..(3)..(34)..(35): Xaa is C or S

SEQ ID NO: 24744 - protein, 39 aa, Artificial Sequence; identical to SEQ ID NO: 3722
  GFR-binding peptide
  MOD_RES (2)..(34)..(35): Xaa is C or S

SEQ ID NO: 24745 - protein, 38 aa, Artificial Sequence
  GFR-binding peptide
  MOD_RES (1)..(32)..(33): Xaa is C or S
XSRVIMEYQKYVKPKRGVIYLISIPSLAQPVXXPAASA

SEQ ID NO: 24746 - protein, 39 aa, Artificial Sequence; identical to SEQ ID NO: 3724
  GFR-binding peptide
  MOD_RES (2)..(33)..(34): Xaa is C or S

SEQ ID NO: 24747 - protein, 36 aa, Artificial Sequence
  GFR-binding peptide
  MOD_RES (31)..(32): Xaa is C or S
RVVMNEYQKYIVNSSDDIYLVSIPSLKTPAXXPKPV

SEQ ID NO: 24748 - protein, 40 aa, Artificial Sequence; identical to SEQ ID NO: 3727
  GFR-binding peptide
  MOD_RES (1)..(3)..(35): Xaa is C or S

SEQ ID NO: 24749 - protein, 38 aa, Artificial Sequence
  GFR-binding peptide
  MOD_RES (32)..(33): Xaa is C or S
SRVVMNEYKFKIVNSSDDLYLVSIPELKTPAXXPKPVY

SEQ ID NO: 24750 - protein, 34 aa, Artificial Sequence
  GFR-binding peptide
  MOD_RES (1)..(33)..(34): Xaa is C or S
XGEVVMEEYKFKVVKDYEDLYLMSIPELETPVXX

SEQ ID NO: 24751 - protein, 36 aa, Artificial Sequence; identical to SEQ ID NO: 3728
  GFR-binding peptide
  MOD_RES (1)..(3)..(35)..(36): Xaa is C or S

SEQ ID NO: 24752 - protein, 42 aa, Artificial Sequence; identical to SEQ ID NO: 3729
  GFR-binding peptide
  MOD_RES (2)..(37)..(38): Xaa is C or S
  MOD_RES (15)..(16)..(17)..(18)..(19): Xaa is A or G
  MOD_RES (20)..(21)..(22)..(23): Xaa is A or G or is absent

SEQ ID NO: 24753 - protein, 34 aa, Artificial Sequence
  GFR-binding peptide
  MOD_RES (1)..(1): Xaa is C or S
  MOD_RES (13)..(14)..(15)..(16)..(17): Xaa is A or G
  MOD_RES (18)..(19)..(20)..(21): Xaa is A or G or is absent
XAKVVMNEYKFKXXXXXXXXXLYLVSIPELKTPA

SEQ ID NO: 24754 - protein, 38 aa, Artificial Sequence; identical to SEQ ID NO: 3731
  GFR-binding peptide
  MOD_RES (1)..(35)..(36): Xaa is C or S
  MOD_RES (13)..(14)..(15)..(16)..(17): Xaa is A or G
  MOD_RES (18)..(19)..(20)..(21): Xaa is A or G or is absent

SEQ ID NO: 24755 - protein, 34 aa, Artificial Sequence
  GFR-binding peptide
  MOD_RES (33)..(34): Xaa is C or S
  MOD_RES (11)..(12)..(13)..(14)..(15): Xaa is A or G
  MOD_RES (16)..(17)..(18)..(19): Xaa is A or G or is absent
SKVIMEYQKYXXXXXXXXXIYLISIPSLDQSVXX

SEQ ID NO: 24756 - protein, 37 aa, Artificial Sequence
  GFR-binding peptide
  MOD_RES (1)..(32)..(33): Xaa is C or S
XSKVIMEYQKYIKPTKGIIYLISIPSLDQSVXXPSAS

SEQ ID NO: 24757 - protein, 39 aa, Artificial Sequence
  GFR-binding peptide
  MOD_RES (1)..(3)..(35)..(36): Xaa is C or S
XGXAKVVMNEYKFKIVNNSSDLYLVSIPELKTPAXXAKP

SEQ ID NO: 24758 - protein, 39 aa, Artificial Sequence; identical to SEQ ID NO: 3732
  GFR-binding peptide
  MOD_RES (33)..(34): Xaa is C or S
  MOD_RES (11)..(12)..(13)..(14)..(15): Xaa is A or G
  MOD_RES (16)..(17)..(18)..(19): Xaa is A or G or is absent

SEQ ID NO: 24759 - protein, 37 aa, Artificial Sequence; identical to SEQ ID NO: 3733
  GFR-binding peptide
  MOD_RES (2)..(36)..(37): Xaa is C or S
  MOD_RES (14)..(15)..(16)..(17)..(18): Xaa is A or G
  MOD_RES (19)..(20)..(21)..(22): Xaa is A or G or is absent

SEQ ID NO: 24760 - protein, 40 aa, Artificial Sequence; identical to SEQ ID NO: 3735
  GFR-binding peptide
  MOD_RES (2)..(36)..(37): Xaa is C or S
  MOD_RES (14)..(15)..(16)..(17)..(18): Xaa is A or G
  MOD_RES (19)..(20)..(21)..(22): Xaa is A or G or is absent

SEQ ID NO: 24761 - protein, 39 aa, Artificial Sequence
  GFR-binding peptide
  MOD_RES (1)..(3)..(38)..(39): Xaa is C or S
  MOD_RES (16)..(17)..(18)..(19)..(20): Xaa is A or G
  MOD_RES (21)..(22)..(23)..(24): Xaa is A or G or is absent
XGXEAVSMGEEYKFKXXXXXXXXXLYLVSIPELKTPVXX

SEQ ID NO: 24762 - protein, 37 aa, Artificial Sequence; identical to SEQ ID NO: 3736
  GFR-binding peptide
  MOD_RES (31)..(31): Xaa is C or S

SEQ ID NO: 24763 - protein, 33 aa, Artificial Sequence; identical to SEQ ID NO: 3737
  GFR-binding peptide
  MOD_RES (1)..(1): Xaa is C or S

SEQ ID NO: 24764 - protein, 39 aa, Artificial Sequence; identical to SEQ ID NO: 3738
  GFR-binding peptide
  MOD_RES (34)..(35): Xaa is C or S
  MOD_RES (12)..(13)..(14)..(15)..(16): Xaa is A or G
  MOD_RES (17)..(18)..(19)..(20): Xaa is A or G or is absent

SEQ ID NO: 24765 - protein, 37 aa, Artificial Sequence; identical to SEQ ID NO: 3739
  GFR-binding peptide
  MOD_RES (35)..(36): Xaa is C or S
  MOD_RES (13)..(14)..(15)..(16)..(17): Xaa is A or G
  MOD_RES (18)..(19)..(20)..(21): Xaa is A or G or is absent

SEQ ID NO: 24766 - protein, 38 aa, Artificial Sequence; identical to SEQ ID NO: 3740
  GFR-binding peptide
  MOD_RES (2)..(35)..(36): Xaa is C or S

SEQ ID NO: 24767 - protein, 37 aa, Artificial Sequence
  GFR-binding peptide
  MOD_RES (1)..(3)..(35)..(36): Xaa is C or S
XGXAEVVMDEYKFKVVNNAADLYLISIPELRAPVXXS

SEQ ID NO: 24768 - protein, 32 aa, Artificial Sequence
  GFR-binding peptide
  MOD_RES (31)..(32): Xaa is C or S
SKVIMEYKFKIKPTKGILYLISIPELDQSVXX

SEQ ID NO: 24769 - protein, 37 aa, Artificial Sequence; identical to SEQ ID NO: 3744
  GFR-binding peptide
  MOD_RES (31)..(32): Xaa is C or S

SEQ ID NO: 24770 - protein, 37 aa, Artificial Sequence
  GFR-binding peptide
  MOD_RES (31)..(32): Xaa is C or S
SVAMGRYKKLYTVVGKDFYLISIANLKTPVXXAKSAK

SEQ ID NO: 24771 - protein, 38 aa, Artificial Sequence; identical to SEQ ID NO: 3746
  GFR-binding peptide
  MOD_RES (32)..(33): Xaa is C or S

SEQ ID NO: 24772 - protein, 41 aa, Artificial Sequence
  GFR-binding peptide
  MOD_RES (1)..(3)..(37)..(38): Xaa is C or S
  MOD_RES (15)..(16)..(17)..(18)..(19): Xaa is A or G
  MOD_RES (20)..(21)..(22)..(23): Xaa is A or G or is absent
XGXSRVVMNEYKFKXXXXXXXXXLYLVSIPELKTPAXXPKP

SEQ ID NO: 24773 - protein, 37 aa, Artificial Sequence
  GFR-binding peptide
  MOD_RES (1)..(3)..(35)..(36): Xaa is C or S
XGXSRVVMNEYQKYIVNSSDDIYLVSIPSLKTPAXXP

SEQ ID NO: 24774 - protein, 31 aa, Artificial Sequence
  GFR-binding peptide
AEVVMDRYKKLVVNNAADFYLISIANLRAPV

SEQ ID NO: 24775 - protein, 38 aa, Artificial Sequence; identical to SEQ ID NO: 3748
  GFR-binding peptide
  MOD_RES (35)..(36): Xaa is C or S
  MOD_RES (13)..(14)..(15)..(16)..(17): Xaa is A or G
  MOD_RES (18)..(19)..(20)..(21): Xaa is A or G or is absent

SEQ ID NO: 24776 - protein, 38 aa, Artificial Sequence
  GFR-binding peptide
  MOD_RES (2)..(4)..(36)..(37): Xaa is C or S
HXGXSRVVMNEYKFKIVNSSDDLYLVSIPELKTPAXXP

SEQ ID NO: 24777 - protein, 33 aa, Artificial Sequence
  GFR-binding peptide
  MOD_RES (1)..(1): Xaa is C or S
XEAVSMGEEYKFKTPVGMDDLYLVSIPELKTPV

SEQ ID NO: 24778 - protein, 38 aa, Artificial Sequence
  GFR-binding peptide
  MOD_RES (1)..(35)..(36): Xaa is C or S
  MOD_RES (13)..(14)..(15)..(16)..(17): Xaa is A or G
  MOD_RES (18)..(19)..(20)..(21): Xaa is A or G or is absent
XGEVVMEEYKFKXXXXXXXXXLYLMSIPELETPVXXAK

SEQ ID NO: 24779 - protein, 37 aa, Artificial Sequence; identical to SEQ ID NO: 3749
  GFR-binding peptide
  MOD_RES (2)..(4)..(37): Xaa is C or S
  MOD_RES (15)..(16)..(17)..(18)..(19): Xaa is A or G
  MOD_RES (20)..(21)..(22)..(23): Xaa is A or G or is absent

SEQ ID NO: 24780 - protein, 35 aa, Artificial Sequence
  GFR-binding peptide
  MOD_RES (33)..(34): Xaa is C or S
  MOD_RES (11)..(12)..(13)..(14)..(15): Xaa is A or G
  MOD_RES (16)..(17)..(18)..(19): Xaa is A or G or is absent
SVAMGRYKKLXXXXXXXXXFYLISIANLKTPVXXA

SEQ ID NO: 24781 - protein, 39 aa, Artificial Sequence; identical to SEQ ID NO: 3750
  GFR-binding peptide
  MOD_RES (1)..(3)..(34)..(35): Xaa is C or S

SEQ ID NO: 24782 - protein, 39 aa, Artificial Sequence
  GFR-binding peptide
  MOD_RES (1)..(3)..(37): Xaa is C or S
  MOD_RES (15)..(16)..(17)..(18)..(19): Xaa is A or G
  MOD_RES (20)..(21)..(22)..(23): Xaa is A or G or is absent
XGXSRVVMNEYQKYXXXXXXXXXIYLVSIPSLKTPAXTP

SEQ ID NO: 24783 - protein, 34 aa, Artificial Sequence; identical to SEQ ID NO: 3753
  GFR-binding peptide
  MOD_RES (1)..(3): Xaa is C or S

SEQ ID NO: 24784 - protein, 38 aa, Artificial Sequence; identical to SEQ ID NO: 3755
  GFR-binding peptide
  MOD_RES (2)..(36)..(37): Xaa is C or S
  MOD_RES (14)..(15)..(16)..(17)..(18): Xaa is A or G
  MOD_RES (19)..(20)..(21)..(22): Xaa is A or G or is absent

SEQ ID NO: 24785 - protein, 35 aa, Artificial Sequence
  GFR-binding peptide
  MOD_RES (1)..(33)..(34): Xaa is C or S
XAEVVMDEYKFKVVNNAADLYLISIPELRAPVXXS

SEQ ID NO: 24786 - protein, 37 aa, Artificial Sequence
  GFR-binding peptide
  MOD_RES (34)..(35): Xaa is C or S
  MOD_RES (12)..(13)..(14)..(15)..(16): Xaa is A or G
  MOD_RES (17)..(18)..(19)..(20): Xaa is A or G or is absent
ESVAMGEYKFKXXXXXXXXXLYLISIPELKTPVXXAK

SEQ ID NO: 24787 - protein, 40 aa, Artificial Sequence; identical to SEQ ID NO: 3757
  GFR-binding peptide
  MOD_RES (1)..(3)..(37)..(38): Xaa is C or S
  MOD_RES (15)..(16)..(17)..(18)..(19): Xaa is A or G
  MOD_RES (20)..(21)..(22)..(23): Xaa is A or G or is absent

SEQ ID NO: 24788 - protein, 37 aa, Artificial Sequence
  GFR-binding peptide
  MOD_RES (32)..(33): Xaa is C or S
AEVVMDRYKKLVVNNAADFYLISIANLRAPVXXSAPA

SEQ ID NO: 24789 - protein, 38 aa, Artificial Sequence; identical to SEQ ID NO: 3758
  GFR-binding peptide
  MOD_RES (2)..(4)..(38): Xaa is C or S
  MOD_RES (16)..(17)..(18)..(19)..(20): Xaa is A or G
  MOD_RES (21)..(22)..(23)..(24): Xaa is A or G or is absent

SEQ ID NO: 24790 - protein, 41 aa, Artificial Sequence
  GFR-binding peptide
  MOD_RES (1)..(3)..(37)..(38): Xaa is C or S
  MOD_RES (15)..(16)..(17)..(18)..(19): Xaa is A or G
  MOD_RES (20)..(21)..(22)..(23): Xaa is A or G or is absent
XGXSRVVMNEYQKYXXXXXXXXXIYLVSIPSLKTPAXXPKP

SEQ ID NO: 24791 - protein, 37 aa, Artificial Sequence; identical to SEQ ID NO: 3761
  GFR-binding peptide
  MOD_RES (31)..(32): Xaa is C or S

SEQ ID NO: 24792 - protein, 35 aa, Artificial Sequence; identical to SEQ ID NO: 3763
  GFR-binding peptide
  MOD_RES (2)..(4): Xaa is C or S

SEQ ID NO: 24793 - protein, 41 aa, Artificial Sequence; identical to SEQ ID NO: 3765
  GFR-binding peptide
  MOD_RES (2)..(36)..(37): Xaa is C or S
  MOD_RES (14)..(15)..(16)..(17)..(18): Xaa is A or G
  MOD_RES (19)..(20)..(21)..(22): Xaa is A or G or is absent

SEQ ID NO: 24794 - protein, 35 aa, Artificial Sequence
  GFR-binding peptide
  MOD_RES (35)..(35): Xaa is C or S
  MOD_RES (13)..(14)..(15)..(16)..(17): Xaa is A or G
  MOD_RES (18)..(19)..(20)..(21): Xaa is A or G or is absent
EAVSMGEEYQKYXXXXXXXXXIYLVSIPSLKTPVX

SEQ ID NO: 24795 - protein, 35 aa, Artificial Sequence; identical to SEQ ID NO: 3767
  GFR-binding peptide
  MOD_RES (2)..(35): Xaa is C or S
  MOD_RES (13)..(14)..(15)..(16)..(17): Xaa is A or G
  MOD_RES (18)..(19)..(20)..(21): Xaa is A or G or is absent

SEQ ID NO: 24796 - protein, 33 aa, Artificial Sequence
  GFR-binding peptide
  MOD_RES (1)..(32)..(33): Xaa is C or S
XSRVIMEYQKYVKPKRGVIYLISIPSLAQPVXX

SEQ ID NO: 24797 - protein, 37 aa, Artificial Sequence; identical to SEQ ID NO: 3768
  GFR-binding peptide
  MOD_RES (33)..(34): Xaa is C or S
  MOD_RES (11)..(12)..(13)..(14)..(15): Xaa is A or G
  MOD_RES (16)..(17)..(18)..(19): Xaa is A or G or is absent

SEQ ID NO: 24798 - protein, 40 aa, Artificial Sequence; identical to SEQ ID NO: 3769
  GFR-binding peptide
  MOD_RES (35)..(36): Xaa is C or S
  MOD_RES (13)..(14)..(15)..(16)..(17): Xaa is A or G
  MOD_RES (18)..(19)..(20)..(21): Xaa is A or G or is absent

SEQ ID NO: 24799 - protein, 32 aa, Artificial Sequence
  GFR-binding peptide
  MOD_RES (11)..(12)..(13)..(14)..(15): Xaa is A or G
  MOD_RES (16)..(17)..(18)..(19): Xaa is A or G or is absent
SKVIMEYQKYXXXXXXXXXIYLISIPSLDQSV

SEQ ID NO: 24800 - protein, 39 aa, Artificial Sequence
  GFR-binding peptide
  MOD_RES (34)..(35): Xaa is C or S
  MOD_RES (12)..(13)..(14)..(15)..(16): Xaa is A or G
  MOD_RES (17)..(18)..(19)..(20): Xaa is A or G or is absent
AKVVMNEYKFKXXXXXXXXXLYLVSIPELKTPAXXAKPV

SEQ ID NO: 24801 - protein, 42 aa, Artificial Sequence; identical to SEQ ID NO: 3772
  GFR-binding peptide
  MOD_RES (2)..(4)..(37)..(38): Xaa is C or S

SEQ ID NO: 24802 - protein, 38 aa, Artificial Sequence
  GFR-binding peptide
  MOD_RES (2)..(4)..(38): Xaa is C or S
  MOD_RES (16)..(17)..(18)..(19)..(20): Xaa is A or G
  MOD_RES (21)..(22)..(23)..(24): Xaa is A or G or is absent
RXGXGEVVMDEYQKYXXXXXXXXXIYLMSIPSLETPVX

SEQ ID NO: 24803 - protein, 38 aa, Artificial Sequence; identical to SEQ ID NO: 3774
  GFR-binding peptide
  MOD_RES (2)..(34)..(35): Xaa is C or S

SEQ ID NO: 24804 - protein, 37 aa, Artificial Sequence
  GFR-binding peptide
  MOD_RES (1)..(3)..(35)..(36): Xaa is C or S
XGXARVVMNEYQKYIVNSSDDIYLVSIPSLQTPAXXP

SEQ ID NO: 24805 - protein, 39 aa, Artificial Sequence
  GFR-binding peptide
  MOD_RES (1)..(35)..(36): Xaa is C or S
  MOD_RES (13)..(14)..(15)..(16)..(17): Xaa is A or G
  MOD_RES (18)..(19)..(20)..(21): Xaa is A or G or is absent
XARVVMNEYKFKXXXXXXXXXLYLVSIPELQTPAXXPKP

SEQ ID NO: 24806 - protein, 33 aa, Artificial Sequence
  GFR-binding peptide
  MOD_RES (31)..(32): Xaa is C or S
SRVIMEYKFKVKPKRGVLYLISIPELAQPVXXP

SEQ ID NO: 24807 - protein, 36 aa, Artificial Sequence
  GFR-binding peptide
  MOD_RES (2)..(4)..(35)..(36): Xaa is C or S
SXKXSKVVMEYKFKVKPTRGVLYLISIPELDQPVXX

SEQ ID NO: 24808 - protein, 37 aa, Artificial Sequence
  GFR-binding peptide
  MOD_RES (1)..(3)..(37): Xaa is C or S
  MOD_RES (15)..(16)..(17)..(18)..(19): Xaa is A or G
  MOD_RES (20)..(21)..(22)..(23): Xaa is A or G or is absent
XGXAEVVMDEYQKYXXXXXXXXXIYLISIPSLRAPVX

SEQ ID NO: 24809 - protein, 42 aa, Artificial Sequence; identical to SEQ ID NO: 3782
  GFR-binding peptide
  MOD_RES (2)..(36)..(37): Xaa is C or S
  MOD_RES (14)..(15)..(16)..(17)..(18): Xaa is A or G
  MOD_RES (19)..(20)..(21)..(22): Xaa is A or G or is absent

SEQ ID NO: 24810 - protein, 32 aa, Artificial Sequence
  GFR-binding peptide
  MOD_RES (11)..(12)..(13)..(14)..(15): Xaa is A or G
  MOD_RES (16)..(17)..(18)..(19): Xaa is A or G or is absent
EVVMDYHYKLXXXXXXXXXKYLISIPSLRAPV

SEQ ID NO: 24811 - protein, 34 aa, Artificial Sequence; identical to SEQ ID NO: 3783
  GFR-binding peptide
  MOD_RES (1)..(34): Xaa is C or S

SEQ ID NO: 24812 - protein, 41 aa, Artificial Sequence; identical to SEQ ID NO: 3784
  GFR-binding peptide
  MOD_RES (2)..(4)..(36)..(37): Xaa is C or S

SEQ ID NO: 24813 - protein, 36 aa, Artificial Sequence; identical to SEQ ID NO: 3786
  GFR-binding peptide
  MOD_RES (1)..(3): Xaa is C or S
  MOD_RES (15)..(16)..(17)..(18)..(19): Xaa is A or G
  MOD_RES (20)..(21)..(22)..(23): Xaa is A or G or is absent

SEQ ID NO: 24814 - protein, 40 aa, Artificial Sequence
  GFR-binding peptide
  MOD_RES (34)..(35): Xaa is C or S
  MOD_RES (12)..(13)..(14)..(15)..(16): Xaa is A or G
  MOD_RES (17)..(18)..(19)..(20): Xaa is A or G or is absent
AEVVMDYHYKLXXXXXXXXXKYLISIPSLRAPVXXSAPAA

SEQ ID NO: 24815 - protein, 37 aa, Artificial Sequence
  GFR-binding peptide
  MOD_RES (1)..(34)..(35): Xaa is C or S
  MOD_RES (12)..(13)..(14)..(15)..(16): Xaa is A or G
  MOD_RES (17)..(18)..(19)..(20): Xaa is A or G or is absent
XSKVIMEYKFKXXXXXXXXXLYLISIPELDQSVXXPS

SEQ ID NO: 24816 - protein, 35 aa, Artificial Sequence
  GFR-binding peptide
  MOD_RES (2)..(4)..(35): Xaa is C or S
SXKXSRVIMEYKFKVKPKRGVLYLISIPELAQPVX

SEQ ID NO: 24817 - protein, 39 aa, Artificial Sequence
  GFR-binding peptide
  MOD_RES (2)..(35)..(36): Xaa is C or S
  MOD_RES (13)..(14)..(15)..(16)..(17): Xaa is A or G
  MOD_RES (18)..(19)..(20)..(21): Xaa is A or G or is absent
KXSKVIMEYQKYXXXXXXXXXIYLISIPSLDQSVXXPSA

SEQ ID NO: 24818 - protein, 31 aa, Artificial Sequence
  GFR-binding peptide
AKVVMNEYQKYIVNNSSDIYLVSIPSLKTPA

SEQ ID NO: 24819 - protein, 33 aa, Artificial Sequence
  GFR-binding peptide
  MOD_RES (33)..(33): Xaa is C or S
  MOD_RES (11)..(12)..(13)..(14)..(15): Xaa is A or G
  MOD_RES (16)..(17)..(18)..(19): Xaa is A or G or is absent
EVVMDEYKFKXXXXXXXXXLYLMSIPELETPVX

SEQ ID NO: 24820 - protein, 37 aa, Artificial Sequence; identical to SEQ ID NO: 3791
  GFR-binding peptide
  MOD_RES (1)..(3)..(35)..(36): Xaa is C or S

SEQ ID NO: 24821 - protein, 38 aa, Artificial Sequence; identical to SEQ ID NO: 3793
  GFR-binding peptide
  MOD_RES (33)..(34): Xaa is C or S
  MOD_RES (11)..(12)..(13)..(14)..(15): Xaa is A or G
  MOD_RES (16)..(17)..(18)..(19): Xaa is A or G or is absent

SEQ ID NO: 24822 - protein, 37 aa, Artificial Sequence
  GFR-binding peptide
  MOD_RES (1)..(3)..(35)..(36): Xaa is C or S
XGXAKVVMNEYKFKIVNNSSDLYLVSIPELKTPAXXA

SEQ ID NO: 24823 - protein, 41 aa, Artificial Sequence
  GFR-binding peptide
  MOD_RES (1)..(3)..(36)..(37): Xaa is C or S
  MOD_RES (14)..(15)..(16)..(17)..(18): Xaa is A or G
  MOD_RES (19)..(20)..(21)..(22): Xaa is A or G or is absent
XKXSRVIMEYQKYXXXXXXXXXIYLISIPSLAQPVXXPAAS

SEQ ID NO: 24824 - protein, 40 aa, Artificial Sequence; identical to SEQ ID NO: 3795
  GFR-binding peptide
  MOD_RES (2)..(36)..(37): Xaa is C or S
  MOD_RES (14)..(15)..(16)..(17)..(18): Xaa is A or G
  MOD_RES (19)..(20)..(21)..(22): Xaa is A or G or is absent

SEQ ID NO: 24825 - protein, 43 aa, Artificial Sequence; identical to SEQ ID NO: 3796
  GFR-binding peptide
  MOD_RES (1)..(3)..(37)..(38): Xaa is C or S
  MOD_RES (15)..(16)..(17)..(18)..(19): Xaa is A or G
  MOD_RES (20)..(21)..(22)..(23): Xaa is A or G or is absent

SEQ ID NO: 24826 - protein, 40 aa, Artificial Sequence; identical to SEQ ID NO: 3798
  GFR-binding peptide
  MOD_RES (2)..(4)..(35)..(36): Xaa is C or S

SEQ ID NO: 24827 - protein, 33 aa, Artificial Sequence; identical to SEQ ID NO: 3799
  GFR-binding peptide
  MOD_RES (33)..(33): Xaa is C or S
  MOD_RES (11)..(12)..(13)..(14)..(15): Xaa is A or G
  MOD_RES (16)..(17)..(18)..(19): Xaa is A or G or is absent

SEQ ID NO: 24828 - protein, 42 aa, Artificial Sequence
  GFR-binding peptide
  MOD_RES (2)..(4)..(38)..(39): Xaa is C or S
  MOD_RES (16)..(17)..(18)..(19)..(20): Xaa is A or G
  MOD_RES (21)..(22)..(23)..(24): Xaa is A or G or is absent
RXGXGEVVMEEYQKYXXXXXXXXXIYLMSIPSLETPVXXAKP

SEQ ID NO: 24829 - protein, 34 aa, Artificial Sequence; identical to SEQ ID NO: 3800
  GFR-binding peptide
  MOD_RES (33)..(33): Xaa is C or S
  MOD_RES (11)..(12)..(13)..(14)..(15): Xaa is A or G
  MOD_RES (16)..(17)..(18)..(19): Xaa is A or G or is absent

SEQ ID NO: 24830 - protein, 34 aa, Artificial Sequence
  GFR-binding peptide
  MOD_RES (1)..(1): Xaa is C or S
  MOD_RES (13)..(14)..(15)..(16)..(17): Xaa is A or G
  MOD_RES (18)..(19)..(20)..(21): Xaa is A or G or is absent
XESVAMGYHYKLXXXXXXXXXKYLISIPSLKTPV

SEQ ID NO: 24831 - protein, 39 aa, Artificial Sequence; identical to SEQ ID NO: 3801
  GFR-binding peptide
  MOD_RES (33)..(34): Xaa is C or S
  MOD_RES (11)..(12)..(13)..(14)..(15): Xaa is A or G
  MOD_RES (16)..(17)..(18)..(19): Xaa is A or G or is absent

SEQ ID NO: 24832 - protein, 39 aa, Artificial Sequence
  GFR-binding peptide
  MOD_RES (2)..(36)..(37): Xaa is C or S
  MOD_RES (14)..(15)..(16)..(17)..(18): Xaa is A or G
  MOD_RES (19)..(20)..(21)..(22): Xaa is A or G or is absent
GXESVAMGEYKFKXXXXXXXXXLYLISIPELKTPVXXAK

SEQ ID NO: 24833 - protein, 38 aa, Artificial Sequence
  GFR-binding peptide
  MOD_RES (2)..(34)..(35): Xaa is C or S
GXAEVVMDYHYKLVVNNAADKYLISIPSLRAPVXXSAP

SEQ ID NO: 24834 - protein, 36 aa, Artificial Sequence
  GFR-binding peptide
  MOD_RES (2)..(2): Xaa is C or S
  MOD_RES (15)..(16)..(17)..(18)..(19): Xaa is A or G
  MOD_RES (20)..(21)..(22)..(23): Xaa is A or G or is absent
GXEAVSMGEEYKFKXXXXXXXXXLYLVSIPELKTPV

SEQ ID NO: 24835 - protein, 35 aa, Artificial Sequence
  GFR-binding peptide
  MOD_RES (1)..(1): Xaa is C or S
  MOD_RES (14)..(15)..(16)..(17)..(18): Xaa is A or G
  MOD_RES (19)..(20)..(21)..(22): Xaa is A or G or is absent
XEAVSMGEEYQKYXXXXXXXXXIYLVSIPSLKTPV

SEQ ID NO: 24836 - protein, 36 aa, Artificial Sequence; identical to SEQ ID NO: 3808
  GFR-binding peptide
  MOD_RES (1)..(3)..(34)..(35): Xaa is C or S

SEQ ID NO: 24837 - protein, 39 aa, Artificial Sequence
  GFR-binding peptide
  MOD_RES (2)..(4)..(36)..(37): Xaa is C or S
HXGXSRVVMNEYKFKIVNSSDDLYLVSIPELKTPAXXPK

SEQ ID NO: 24838 - protein, 35 aa, Artificial Sequence; identical to SEQ ID NO: 3809
  GFR-binding peptide
  MOD_RES (1)..(34)..(35): Xaa is C or S
  MOD_RES (12)..(13)..(14)..(15)..(16): Xaa is A or G
  MOD_RES (17)..(18)..(19)..(20): Xaa is A or G or is absent

SEQ ID NO: 24839 - protein, 39 aa, Artificial Sequence
  GFR-binding peptide
  MOD_RES (2)..(36)..(37): Xaa is C or S
  MOD_RES (14)..(15)..(16)..(17)..(18): Xaa is A or G
  MOD_RES (19)..(20)..(21)..(22): Xaa is A or G or is absent
GXESVAMGYHYKLXXXXXXXXXKYLISIPSLKTPVXXAK

SEQ ID NO: 24840 - protein, 35 aa, Artificial Sequence
  GFR-binding peptide
  MOD_RES (2)..(35): Xaa is C or S
  MOD_RES (13)..(14)..(15)..(16)..(17): Xaa is A or G
  MOD_RES (18)..(19)..(20)..(21): Xaa is A or G or is absent
KXSKVVMEYKFKXXXXXXXXXLYLISIPELDQPVX

SEQ ID NO: 24841 - protein, 36 aa, Artificial Sequence
  GFR-binding peptide
  MOD_RES (1)..(32)..(33): Xaa is C or S
XSKVIMEYKFKIKPTKGILYLISIPELDQSVXXPSA

SEQ ID NO: 24842 - protein, 40 aa, Artificial Sequence; identical to SEQ ID NO: 3814
  GFR-binding peptide
  MOD_RES (1)..(3)..(35)..(36): Xaa is C or S

SEQ ID NO: 24843 - protein, 41 aa, Artificial Sequence
  GFR-binding peptide
  MOD_RES (1)..(36)..(37): Xaa is C or S
  MOD_RES (14)..(15)..(16)..(17)..(18): Xaa is A or G
  MOD_RES (19)..(20)..(21)..(22): Xaa is A or G or is absent
XEAVSMGEEYQKYXXXXXXXXXIYLVSIPSLKTPVXXAKGV

SEQ ID NO: 24844 - protein, 37 aa, Artificial Sequence; identical to SEQ ID NO: 3815
  GFR-binding peptide
  MOD_RES (34)..(35): Xaa is C or S
  MOD_RES (12)..(13)..(14)..(15)..(16): Xaa is A or G
  MOD_RES (17)..(18)..(19)..(20): Xaa is A or G or is absent

SEQ ID NO: 24845 - protein, 33 aa, Artificial Sequence
  GFR-binding peptide
  MOD_RES (2)..(2): Xaa is C or S
GXAEVVMDEYQKYVVNNAADIYLISIPSLRAPV

SEQ ID NO: 24846 - protein, 41 aa, Artificial Sequence
  GFR-binding peptide
  MOD_RES (1)..(3)..(35)..(36): Xaa is C or S
XGXAKVVMNEYKFKIVNNSSDLYLVSIPELKTPAXXAKPVA

SEQ ID NO: 24847 - protein, 37 aa, Artificial Sequence
  GFR-binding peptide
  MOD_RES (31)..(32): Xaa is C or S
EVVMEEYKFKVVKDYEDLYLMSIPELETPVXXAKPIS

SEQ ID NO: 24848 - protein, 40 aa, Artificial Sequence
  GFR-binding peptide
  MOD_RES (1)..(3)..(35)..(36): Xaa is C or S
XGXAEVVMDEYKFKVVNNAADLYLISIPELRAPVXXSAPA

SEQ ID NO: 24849 - protein, 39 aa, Artificial Sequence
  GFR-binding peptide
  MOD_RES (2)..(34)..(35): Xaa is C or S
GXSRVVMNEYKFKIVNSSDDLYLVSIPELKTPAXXPKPV

SEQ ID NO: 24850 - protein, 40 aa, Artificial Sequence
  GFR-binding peptide
  MOD_RES (2)..(4)..(36)..(37): Xaa is C or S
HXGXARVVMNEYQKYIVNSSDDIYLVSIPSLQTPAXXPKP

SEQ ID NO: 24851 - protein, 37 aa, Artificial Sequence
  GFR-binding peptide
  MOD_RES (1)..(35)..(36): Xaa is C or S
  MOD_RES (13)..(14)..(15)..(16)..(17): Xaa is A or G
  MOD_RES (18)..(19)..(20)..(21): Xaa is A or G or is absent
XAEVVMDEYKFKXXXXXXXXXLYLISIPELRAPVXXS

SEQ ID NO: 24852 - protein, 36 aa, Artificial Sequence
  GFR-binding peptide
  MOD_RES (1)..(3)..(35)..(36): Xaa is C or S
XGXESVAMGEYKFKYTVVGKDLYLISIPELKTPVXX

SEQ ID NO: 24853 - protein, 35 aa, Artificial Sequence; identical to SEQ ID NO: 3820
  GFR-binding peptide
  MOD_RES (2)..(33)..(34): Xaa is C or S

SEQ ID NO: 24854 - protein, 35 aa, Artificial Sequence
  GFR-binding peptide
  MOD_RES (2)..(34)..(35): Xaa is C or S
GXAEVVMDYHYKLVVNNAADKYLISIPSLRAPVXX

SEQ ID NO: 24855 - protein, 31 aa, Artificial Sequence; identical to SEQ ID NO: 3821
  GFR-binding peptide

SEQ ID NO: 24856 - protein, 38 aa, Artificial Sequence; identical to SEQ ID NO: 3822
  GFR-binding peptide
  MOD_RES (1)..(32)..(33): Xaa is C or S

SEQ ID NO: 24857 - protein, 34 aa, Artificial Sequence; identical to SEQ ID NO: 3824
  GFR-binding peptide
  MOD_RES (1)..(3): Xaa is C or S

SEQ ID NO: 24858 - protein, 35 aa, Artificial Sequence; identical to SEQ ID NO: 3825
  GFR-binding peptide
  MOD_RES (31)..(32): Xaa is C or S

SEQ ID NO: 24859 - protein, 35 aa, Artificial Sequence; identical to SEQ ID NO: 3826
  GFR-binding peptide
  MOD_RES (2)..(33)..(34): Xaa is C or S

SEQ ID NO: 24860 - protein, 35 aa, Artificial Sequence
  GFR-binding peptide
  MOD_RES (31)..(32): Xaa is C or S
EVVMDYHYKLVVNNAADKYLISIPSLRAPVXXSAP

SEQ ID NO: 24861 - protein, 37 aa, Artificial Sequence
  GFR-binding peptide
  MOD_RES (1)..(33): Xaa is C or S
XSRVVMNEYKFKIVNSSDDLYLVSIPELKTPAXTPKT

SEQ ID NO: 24862 - protein, 38 aa, Artificial Sequence
  GFR-binding peptide
  MOD_RES (1)..(3)..(35)..(36): Xaa is C or S
XGXESVAMGEYQKYYTVVGKDIYLISIPSLKTPVXXAK

SEQ ID NO: 24863 - protein, 43 aa, Artificial Sequence
  GFR-binding peptide
  MOD_RES (2)..(4)..(38)..(39): Xaa is C or S
  MOD_RES (16)..(17)..(18)..(19)..(20): Xaa is A or G
  MOD_RES (21)..(22)..(23)..(24): Xaa is A or G or is absent
HXGXAKVVMNEYKFKXXXXXXXXXLYLVSIPELKTPAXXAKPV

SEQ ID NO: 24864 - protein, 37 aa, Artificial Sequence
  GFR-binding peptide
  MOD_RES (1)..(3)..(35)..(36): Xaa is C or S
XGXESVAMGYHYKLYTVVGKDKYLISIPSLKTPVXXA

SEQ ID NO: 24865 - protein, 36 aa, Artificial Sequence
  GFR-binding peptide
  MOD_RES (1)..(3): Xaa is C or S
  MOD_RES (15)..(16)..(17)..(18)..(19): Xaa is A or G
  MOD_RES (20)..(21)..(22)..(23): Xaa is A or G or is absent
XGXAKVVMNEYQKYXXXXXXXXXIYLVSIPSLKTPA

SEQ ID NO: 24866 - protein, 35 aa, Artificial Sequence
  GFR-binding peptide
  MOD_RES (31)..(31): Xaa is C or S
RVVMNEYQKYIVNSSDDIYLVSIPSLKTPAXTPKT

SEQ ID NO: 24867 - protein, 37 aa, Artificial Sequence; identical to SEQ ID NO: 3828
  GFR-binding peptide
  MOD_RES (33)..(34): Xaa is C or S
  MOD_RES (11)..(12)..(13)..(14)..(15): Xaa is A or G
  MOD_RES (16)..(17)..(18)..(19): Xaa is A or G or is absent

SEQ ID NO: 24868 - protein, 32 aa, Artificial Sequence; identical to SEQ ID NO: 3829
  GFR-binding peptide
  MOD_RES (1)..(1): Xaa is C or S

SEQ ID NO: 24869 - protein, 37 aa, Artificial Sequence
  GFR-binding peptide
  MOD_RES (34)..(35): Xaa is C or S
  MOD_RES (12)..(13)..(14)..(15)..(16): Xaa is A or G
  MOD_RES (17)..(18)..(19)..(20): Xaa is A or G or is absent
AEVVMDYHYKLXXXXXXXXXKYLISIPSLRAPVXXSA

SEQ ID NO: 24870 - protein, 34 aa, Artificial Sequence
  GFR-binding peptide
  MOD_RES (33)..(33): Xaa is C or S
  MOD_RES (11)..(12)..(13)..(14)..(15): Xaa is A or G
  MOD_RES (16)..(17)..(18)..(19): Xaa is A or G or is absent
RVVMNEYKFKXXXXXXXXXLYLVSIPELKTPAXT

SEQ ID NO: 24871 - protein, 35 aa, Artificial Sequence; identical to SEQ ID NO: 3831
  GFR-binding peptide
  MOD_RES (2)..(34)..(35): Xaa is C or S

SEQ ID NO: 24872 - protein, 38 aa, Artificial Sequence
  GFR-binding peptide
  MOD_RES (33)..(34): Xaa is C or S
  MOD_RES (11)..(12)..(13)..(14)..(15): Xaa is A or G
  MOD_RES (16)..(17)..(18)..(19): Xaa is A or G or is absent
EVVMEEYKFKXXXXXXXXXLYLMSIPELETPVXXAKPI

SEQ ID NO: 24873 - protein, 39 aa, Artificial Sequence
  GFR-binding peptide
  MOD_RES (34)..(35): Xaa is C or S
  MOD_RES (12)..(13)..(14)..(15)..(16): Xaa is A or G
  MOD_RES (17)..(18)..(19)..(20): Xaa is A or G or is absent
GEVVMDEYQKYXXXXXXXXXIYLMSIPSLETPVXXAKPI

SEQ ID NO: 24874 - protein, 40 aa, Artificial Sequence
  GFR-binding peptide
  MOD_RES (1)..(35)..(36): Xaa is C or S
  MOD_RES (13)..(14)..(15)..(16)..(17): Xaa is A or G
  MOD_RES (18)..(19)..(20)..(21): Xaa is A or G or is absent
XGEVVMEEYKFKXXXXXXXXXLYLMSIPELETPVXXAKPI

SEQ ID NO: 24875 - protein, 40 aa, Artificial Sequence
  GFR-binding peptide
  MOD_RES (1)..(3)..(35)..(36): Xaa is C or S
XGXAKVVMNEYKFKIVNNSSDLYLVSIPELKTPAXXAKPV

SEQ ID NO: 24876 - protein, 36 aa, Artificial Sequence
  GFR-binding peptide
  MOD_RES (31)..(32): Xaa is C or S
SKVIMEYQKYIKPTKGIIYLISIPSLDQSVXXPSAS

SEQ ID NO: 24877 - protein, 40 aa, Artificial Sequence
  GFR-binding peptide
  MOD_RES (2)..(36): Xaa is C or S
  MOD_RES (14)..(15)..(16)..(17)..(18): Xaa is A or G
  MOD_RES (19)..(20)..(21)..(22): Xaa is A or G or is absent
GXSRVVMNEYKFKXXXXXXXXXLYLVSIPELKTPAXTPKT

SEQ ID NO: 24878 - protein, 36 aa, Artificial Sequence; identical to SEQ ID NO: 3833
  GFR-binding peptide
  MOD_RES (1)..(35)..(36): Xaa is C or S
  MOD_RES (13)..(14)..(15)..(16)..(17): Xaa is A or G
  MOD_RES (18)..(19)..(20)..(21): Xaa is A or G or is absent

SEQ ID NO: 24879 - protein, 40 aa, Artificial Sequence
  GFR-binding peptide
  MOD_RES (2)..(4)..(38)..(39): Xaa is C or S
  MOD_RES (16)..(17)..(18)..(19)..(20): Xaa is A or G
  MOD_RES (21)..(22)..(23)..(24): Xaa is A or G or is absent
HXGXSRVVMNEYKFKXXXXXXXXXLYLVSIPELKTPAXXP

SEQ ID NO: 24880 - protein, 38 aa, Artificial Sequence; identical to SEQ ID NO: 3836
  GFR-binding peptide
  MOD_RES (33)..(34): Xaa is C or S

SEQ ID NO: 24881 - protein, 37 aa, Artificial Sequence
  GFR-binding peptide
  MOD_RES (33)..(34): Xaa is C or S
  MOD_RES (11)..(12)..(13)..(14)..(15): Xaa is A or G
  MOD_RES (16)..(17)..(18)..(19): Xaa is A or G or is absent
SKVIMEYQKYXXXXXXXXXIYLISIPSLDQSVXXPSA

SEQ ID NO: 24882 - protein, 42 aa, Artificial Sequence
  GFR-binding peptide
  MOD_RES (2)..(4)..(36)..(37): Xaa is C or S
RXGXESVAMGYHYKLYTVVGKDKYLISIPSLKTPVXXAKSAK

SEQ ID NO: 24883 - protein, 41 aa, Artificial Sequence
  GFR-binding peptide
  MOD_RES (2)..(35)..(36): Xaa is C or S
GXEAVSMGEEYQKYTPVGMDDIYLVSIPSLKTPVXXAKGVK

SEQ ID NO: 24884 - protein, 38 aa, Artificial Sequence; identical to SEQ ID NO: 3839
  GFR-binding peptide
  MOD_RES (1)..(33)..(34): Xaa is C or S

SEQ ID NO: 24885 - protein, 32 aa, Artificial Sequence
  GFR-binding peptide
  MOD_RES (1)..(1): Xaa is C or S
XAEVVMDYHYKLVVNNAADKYLISIPSLRAPV

SEQ ID NO: 24886 - protein, 39 aa, Artificial Sequence
  GFR-binding peptide
  MOD_RES (1)..(3)..(37)..(38): Xaa is C or S
  MOD_RES (15)..(16)..(17)..(18)..(19): Xaa is A or G
  MOD_RES (20)..(21)..(22)..(23): Xaa is A or G or is absent
XGXARVVMNEYKFKXXXXXXXXXLYLVSIPELQTPAXXP

SEQ ID NO: 24887 - protein, 38 aa, Artificial Sequence
  GFR-binding peptide
  MOD_RES (1)..(3)..(37)..(38): Xaa is C or S
  MOD_RES (15)..(16)..(17)..(18)..(19): Xaa is A or G
  MOD_RES (20)..(21)..(22)..(23): Xaa is A or G or is absent
XGXESVAMGYHYKLXXXXXXXXXKYLISIPSLKTPVXX

SEQ ID NO: 24888 - protein, 39 aa, Artificial Sequence
  GFR-binding peptide
  MOD_RES (2)..(33)..(34): Xaa is C or S
KXSKVVMEYQKYVKPTRGVIYLISIPSLDQPVXXPSASA

SEQ ID NO: 24889 - protein, 38 aa, Artificial Sequence
  GFR-binding peptide
  MOD_RES (2)..(36)..(37): Xaa is C or S
  MOD_RES (14)..(15)..(16)..(17)..(18): Xaa is A or G
  MOD_RES (19)..(20)..(21)..(22): Xaa is A or G or is absent
GXSRVVMNEYQKYXXXXXXXXXIYLVSIPSLKTPAXXP

SEQ ID NO: 24890 - protein, 42 aa, Artificial Sequence; identical to SEQ ID NO: 3843
  GFR-binding peptide
  MOD_RES (1)..(3)..(36)..(37): Xaa is C or S
  MOD_RES (14)..(15)..(16)..(17)..(18): Xaa is A or G
  MOD_RES (19)..(20)..(21)..(22): Xaa is A or G or is absent

SEQ ID NO: 24891 - protein, 40 aa, Artificial Sequence
  GFR-binding peptide
  MOD_RES (1)..(3)..(37): Xaa is C or S
  MOD_RES (15)..(16)..(17)..(18)..(19): Xaa is A or G
  MOD_RES (20)..(21)..(22)..(23): Xaa is A or G or is absent
XGXSRVVMNEYQKYXXXXXXXXXIYLVSIPSLKTPAXTPK

SEQ ID NO: 24892 - protein, 38 aa, Artificial Sequence
  GFR-binding peptide
  MOD_RES (2)..(4): Xaa is C or S
  MOD_RES (17)..(18)..(19)..(20)..(21): Xaa is A or G
  MOD_RES (22)..(23)..(24)..(25): Xaa is A or G or is absent
RXGXEAVSMGEEYKFKXXXXXXXXXLYLVSIPELKTPV

SEQ ID NO: 24893 - protein, 41 aa, Artificial Sequence
  GFR-binding peptide
  MOD_RES (1)..(35)..(36): Xaa is C or S
  MOD_RES (13)..(14)..(15)..(16)..(17): Xaa is A or G
  MOD_RES (18)..(19)..(20)..(21): Xaa is A or G or is absent
XESVAMGEYKFKXXXXXXXXXLYLISIPELKTPVXXAKSAK

SEQ ID NO: 24894 - protein, 38 aa, Artificial Sequence
  GFR-binding peptide
  MOD_RES (33)..(34): Xaa is C or S
  MOD_RES (11)..(12)..(13)..(14)..(15): Xaa is A or G
  MOD_RES (16)..(17)..(18)..(19): Xaa is A or G or is absent
SVAMGRYKKLXXXXXXXXXFYLISIANLKTPVXXAKSA

SEQ ID NO: 24895 - protein, 35 aa, Artificial Sequence; identical to SEQ ID NO: 3844
  GFR-binding peptide
  MOD_RES (1)..(33): Xaa is C or S

SEQ ID NO: 24896 - protein, 39 aa, Artificial Sequence
  GFR-binding peptide
  MOD_RES (2)..(33)..(34): Xaa is C or S
KXSKVVMEYKFKVKPTRGVLYLISIPELDQPVXXPSASA

SEQ ID NO: 24897 - protein, 40 aa, Artificial Sequence
  GFR-binding peptide
  MOD_RES (2)..(34)..(35): Xaa is C or S
GXGEVVMDEYQKYVVKENEDIYLMSIPSLETPVXXAKPIK

SEQ ID NO: 24898 - protein, 38 aa, Artificial Sequence
  GFR-binding peptide
  MOD_RES (1)..(32)..(33): Xaa is C or S
XSKVVMEYQKYVKPTRGVIYLISIPSLDQPVXXPSASA

SEQ ID NO: 24899 - protein, 38 aa, Artificial Sequence
  GFR-binding peptide
  MOD_RES (1)..(35)..(36): Xaa is C or S
  MOD_RES (13)..(14)..(15)..(16)..(17): Xaa is A or G
  MOD_RES (18)..(19)..(20)..(21): Xaa is A or G or is absent
XESVAMGRYKKLXXXXXXXXXFYLISIANLKTPVXXAK

SEQ ID NO: 24900 - protein, 34 aa, Artificial Sequence; identical to SEQ ID NO: 3846
  GFR-binding peptide
  MOD_RES (2)..(33)..(34): Xaa is C or S

SEQ ID NO: 24901 - protein, 34 aa, Artificial Sequence
  GFR-binding peptide
  MOD_RES (31)..(32): Xaa is C or S
SVAMGYHYKLYTVVGKDKYLISIPSLKTPVXXAK

SEQ ID NO: 24902 - protein, 40 aa, Artificial Sequence
  GFR-binding peptide
  MOD_RES (2)..(4)..(36): Xaa is C or S
HXGXSRVVMNEYQKYIVNSSDDIYLVSIPSLKTPAXTPKT

SEQ ID NO: 24903 - protein, 39 aa, Artificial Sequence; identical to SEQ ID NO: 3847
  GFR-binding peptide
  MOD_RES (1)..(3)..(36)..(37): Xaa is C or S
  MOD_RES (14)..(15)..(16)..(17)..(18): Xaa is A or G
  MOD_RES (19)..(20)..(21)..(22): Xaa is A or G or is absent

SEQ ID NO: 24904 - protein, 36 aa, Artificial Sequence
  GFR-binding peptide
  MOD_RES (2)..(36): Xaa is C or S
  MOD_RES (14)..(15)..(16)..(17)..(18): Xaa is A or G
  MOD_RES (19)..(20)..(21)..(22): Xaa is A or G or is absent
GXSRVVMNEYKFKXXXXXXXXXLYLVSIPELKTPAX

SEQ ID NO: 24905 - protein, 35 aa, Artificial Sequence
  GFR-binding peptide
  MOD_RES (34)..(35): Xaa is C or S
  MOD_RES (12)..(13)..(14)..(15)..(16): Xaa is A or G
  MOD_RES (17)..(18)..(19)..(20): Xaa is A or G or is absent
AEVVMDYHYKLXXXXXXXXXKYLISIPSLRAPVXX

SEQ ID NO: 24906 - protein, 42 aa, Artificial Sequence; identical to SEQ ID NO: 3848
  GFR-binding peptide
  MOD_RES (1)..(3)..(37)..(38): Xaa is C or S
  MOD_RES (15)..(16)..(17)..(18)..(19): Xaa is A or G
  MOD_RES (20)..(21)..(22)..(23): Xaa is A or G or is absent

SEQ ID NO: 24907 - protein, 36 aa, Artificial Sequence; identical to SEQ ID NO: 3849
  GFR-binding peptide
  MOD_RES (33)..(34): Xaa is C or S
  MOD_RES (11)..(12)..(13)..(14)..(15): Xaa is A or G
  MOD_RES (16)..(17)..(18)..(19): Xaa is A or G or is absent

SEQ ID NO: 24908 - protein, 31 aa, Artificial Sequence
  GFR-binding peptide
ESVAMGYHYKLYTVVGKDKYLISIPSLKTPV

SEQ ID NO: 24909 - protein, 34 aa, Artificial Sequence
  GFR-binding peptide
  MOD_RES (2)..(4): Xaa is C or S
SXKXSRVIMEYQKYVKPKRGVIYLISIPSLAQPV

SEQ ID NO: 24910 - protein, 38 aa, Artificial Sequence
  GFR-binding peptide
  MOD_RES (34)..(35): Xaa is C or S
  MOD_RES (12)..(13)..(14)..(15)..(16): Xaa is A or G
  MOD_RES (17)..(18)..(19)..(20): Xaa is A or G or is absent
ARVVMNEYKFKXXXXXXXXXLYLVSIPELQTPAXXPKP

SEQ ID NO: 24911 - protein, 44 aa, Artificial Sequence
  GFR-binding peptide
  MOD_RES (2)..(4)..(38)..(39): Xaa is C or S
  MOD_RES (16)..(17)..(18)..(19)..(20): Xaa is A or G
  MOD_RES (21)..(22)..(23)..(24): Xaa is A or G or is absent
RXGXGEVVMEEYQKYXXXXXXXXXIYLMSIPSLETPVXXAKPIS

SEQ ID NO: 24912 - protein, 38 aa, Artificial Sequence
  GFR-binding peptide
  MOD_RES (2)..(34)..(35): Xaa is C or S
GXARVVMNEYQKYIVNSSDDIYLVSIPSLQTPAXXPKP

SEQ ID NO: 24913 - protein, 36 aa, Artificial Sequence
  GFR-binding peptide
  MOD_RES (1)..(3)..(35)..(36): Xaa is C or S
XGXAEVVMDYHYKLVVNNAADKYLISIPSLRAPVXX

SEQ ID NO: 24914 - protein, 43 aa, Artificial Sequence
  GFR-binding peptide
  MOD_RES (1)..(3)..(37)..(38): Xaa is C or S
  MOD_RES (15)..(16)..(17)..(18)..(19): Xaa is A or G
  MOD_RES (20)..(21)..(22)..(23): Xaa is A or G or is absent
XGXESVAMGEYQKYXXXXXXXXXIYLISIPSLKTPVXXAKSAK

SEQ ID NO: 24915 - protein, 38 aa, Artificial Sequence
  GFR-binding peptide
  MOD_RES (2)..(4)..(36)..(37): Xaa is C or S
RXGXAEVVMDYHYKLVVNNAADKYLISIPSLRAPVXXS

SEQ ID NO: 24916 - protein, 42 aa, Artificial Sequence
  GFR-binding peptide
  MOD_RES (2)..(4)..(38)..(39): Xaa is C or S
  MOD_RES (16)..(17)..(18)..(19)..(20): Xaa is A or G
  MOD_RES (21)..(22)..(23)..(24): Xaa is A or G or is absent
RXGXAEVVMDEYKFKXXXXXXXXXLYLISIPELRAPVXXSAP

SEQ ID NO: 24917 - protein, 37 aa, Artificial Sequence; identical to SEQ ID NO: 3854
  GFR-binding peptide
  MOD_RES (1)..(35)..(36): Xaa is C or S
  MOD_RES (13)..(14)..(15)..(16)..(17): Xaa is A or G
  MOD_RES (18)..(19)..(20)..(21): Xaa is A or G or is absent

SEQ ID NO: 24918 - protein, 36 aa, Artificial Sequence; identical to SEQ ID NO: 3855
  GFR-binding peptide
  MOD_RES (1)..(3)..(34)..(35): Xaa is C or S

SEQ ID NO: 24919 - protein, 31 aa, Artificial Sequence
  GFR-binding peptide
  MOD_RES (1)..(1): Xaa is C or S
XSKVVMEYKFKVKPTRGVLYLISIPELDQPV

SEQ ID NO: 24920 - protein, 37 aa, Artificial Sequence; identical to SEQ ID NO: 3856
  GFR-binding peptide
  MOD_RES (2)..(34)..(35): Xaa is C or S

SEQ ID NO: 24921 - protein, 34 aa, Artificial Sequence
  GFR-binding peptide
  MOD_RES (2)..(2): Xaa is C or S
GXEAVSMGEEYQKYTPVGMDDIYLVSIPSLKTPV

SEQ ID NO: 24922 - protein, 38 aa, Artificial Sequence; identical to SEQ ID NO: 3857
  GFR-binding peptide
  MOD_RES (2)..(36)..(37): Xaa is C or S
  MOD_RES (14)..(15)..(16)..(17)..(18): Xaa is A or G
  MOD_RES (19)..(20)..(21)..(22): Xaa is A or G or is absent

SEQ ID NO: 24923 - protein, 35 aa, Artificial Sequence
  GFR-binding peptide
  MOD_RES (2)..(34)..(35): Xaa is C or S
GXGEVVMEEYQKYVVKDYEDIYLMSIPSLETPVXX

SEQ ID NO: 24924 - protein, 38 aa, Artificial Sequence; identical to SEQ ID NO: 3859
  GFR-binding peptide
  MOD_RES (34)..(35): Xaa is C or S
  MOD_RES (12)..(13)..(14)..(15)..(16): Xaa is A or G
  MOD_RES (17)..(18)..(19)..(20): Xaa is A or G or is absent

SEQ ID NO: 24925 - protein, 41 aa, Artificial Sequence; identical to SEQ ID NO: 3860
  GFR-binding peptide
  MOD_RES (2)..(4)..(38)..(39): Xaa is C or S
  MOD_RES (16)..(17)..(18)..(19)..(20): Xaa is A or G
  MOD_RES (21)..(22)..(23)..(24): Xaa is A or G or is absent

SEQ ID NO: 24926 - protein, 40 aa, Artificial Sequence; identical to SEQ ID NO: 3861
  GFR-binding peptide
  MOD_RES (34)..(35): Xaa is C or S
  MOD_RES (12)..(13)..(14)..(15)..(16): Xaa is A or G
  MOD_RES (17)..(18)..(19)..(20): Xaa is A or G or is absent

SEQ ID NO: 24927 - protein, 38 aa, Artificial Sequence
  GFR-binding peptide
  MOD_RES (34)..(35): Xaa is C or S
  MOD_RES (12)..(13)..(14)..(15)..(16): Xaa is A or G
  MOD_RES (17)..(18)..(19)..(20): Xaa is A or G or is absent
GEVVMDEYQKYXXXXXXXXXIYLMSIPSLETPVXXAKP

SEQ ID NO: 24928 - protein, 42 aa, Artificial Sequence; identical to SEQ ID NO: 3864
  GFR-binding peptide
  MOD_RES (2)..(36)..(37): Xaa is C or S
  MOD_RES (14)..(15)..(16)..(17)..(18): Xaa is A or G
  MOD_RES (19)..(20)..(21)..(22): Xaa is A or G or is absent

SEQ ID NO: 24929 - protein, 37 aa, Artificial Sequence
  GFR-binding peptide
  MOD_RES (1)..(3)..(37): Xaa is C or S
  MOD_RES (15)..(16)..(17)..(18)..(19): Xaa is A or G
  MOD_RES (20)..(21)..(22)..(23): Xaa is A or G or is absent
XGXAEVVMDEYKFKXXXXXXXXXLYLISIPELRAPVX

SEQ ID NO: 24930 - protein, 37 aa, Artificial Sequence
  GFR-binding peptide
  MOD_RES (1)..(3)..(35)..(36): Xaa is C or S
XGXESVAMGEYKFKYTVVGKDLYLISIPELKTPVXXA

SEQ ID NO: 24931 - protein, 33 aa, Artificial Sequence
  GFR-binding peptide
  MOD_RES (2)..(33): Xaa is C or S
KXSKVIMEYQKYIKPTKGIIYLISIPSLDQSVX

SEQ ID NO: 24932 - protein, 43 aa, Artificial Sequence
  GFR-binding peptide
  MOD_RES (1)..(3)..(37)..(38): Xaa is C or S
  MOD_RES (15)..(16)..(17)..(18)..(19): Xaa is A or G
  MOD_RES (20)..(21)..(22)..(23): Xaa is A or G or is absent
XGXESVAMGEYKFKXXXXXXXXXLYLISIPELKTPVXXAKSAK

SEQ ID NO: 24933 - protein, 38 aa, Artificial Sequence
  GFR-binding peptide
  MOD_RES (1)..(35)..(36): Xaa is C or S
  MOD_RES (13)..(14)..(15)..(16)..(17): Xaa is A or G
  MOD_RES (18)..(19)..(20)..(21): Xaa is A or G or is absent
XSRVVMNEYQKYXXXXXXXXXIYLVSIPSLKTPAXXPK

SEQ ID NO: 24934 - protein, 42 aa, Artificial Sequence; identical to SEQ ID NO: 3866
  GFR-binding peptide
  MOD_RES (2)..(4)..(37)..(38): Xaa is C or S
  MOD_RES (15)..(16)..(17)..(18)..(19): Xaa is A or G
  MOD_RES (20)..(21)..(22)..(23): Xaa is A or G or is absent

SEQ ID NO: 24935 - protein, 40 aa, Artificial Sequence
  GFR-binding peptide
  MOD_RES (2)..(4)..(38)..(39): Xaa is C or S
  MOD_RES (16)..(17)..(18)..(19)..(20): Xaa is A or G
  MOD_RES (21)..(22)..(23)..(24): Xaa is A or G or is absent
RXGXGEVVMDEYKFKXXXXXXXXXLYLMSIPELETPVXXA

SEQ ID NO: 24936 - protein, 40 aa, Artificial Sequence
  GFR-binding peptide
  MOD_RES (2)..(4)..(39)..(40): Xaa is C or S
  MOD_RES (17)..(18)..(19)..(20)..(21): Xaa is A or G
  MOD_RES (22)..(23)..(24)..(25): Xaa is A or G or is absent
RXGXEAVSMGEEYKFKXXXXXXXXXLYLVSIPELKTPVXX

SEQ ID NO: 24937 - protein, 36 aa, Artificial Sequence
  GFR-binding peptide
  MOD_RES (32)..(33): Xaa is C or S
GEVVMEEYQKYVVKDYEDIYLMSIPSLETPVXXAKP

SEQ ID NO: 24938 - protein, 36 aa, Artificial Sequence
  GFR-binding peptide
  MOD_RES (31)..(32): Xaa is C or S
EVVMDYHYKLVVNNAADKYLISIPSLRAPVXXSAPA

SEQ ID NO: 24939 - protein, 38 aa, Artificial Sequence
  GFR-binding peptide
  MOD_RES (1)..(35)..(36): Xaa is C or S
  MOD_RES (13)..(14)..(15)..(16)..(17): Xaa is A or G
  MOD_RES (18)..(19)..(20)..(21): Xaa is A or G or is absent
XAKVVMNEYKFKXXXXXXXXXLYLVSIPELKTPAXXAK

SEQ ID NO: 24940 - protein, 37 aa, Artificial Sequence
  GFR-binding peptide
  MOD_RES (33)..(34): Xaa is C or S
  MOD_RES (11)..(12)..(13)..(14)..(15): Xaa is A or G
  MOD_RES (16)..(17)..(18)..(19): Xaa is A or G or is absent
RVVMNEYQKYXXXXXXXXXIYLVSIPSLQTPAXXPKP

SEQ ID NO: 24941 - protein, 41 aa, Artificial Sequence; identical to SEQ ID NO: 3872
  GFR-binding peptide
  MOD_RES (2)..(36)..(37): Xaa is C or S
  MOD_RES (14)..(15)..(16)..(17)..(18): Xaa is A or G
  MOD_RES (19)..(20)..(21)..(22): Xaa is A or G or is absent

SEQ ID NO: 24942 - protein, 34 aa, Artificial Sequence
  GFR-binding peptide
  MOD_RES (2)..(34): Xaa is C or S
GXAEVVMDEYKFKVVNNAADLYLISIPELRAPVX

SEQ ID NO: 24943 - protein, 37 aa, Artificial Sequence; identical to SEQ ID NO: 3874
  GFR-binding peptide
  MOD_RES (1)..(3)..(36)..(37): Xaa is C or S
  MOD_RES (14)..(15)..(16)..(17)..(18): Xaa is A or G
  MOD_RES (19)..(20)..(21)..(22): Xaa is A or G or is absent

SEQ ID NO: 24944 - protein, 31 aa, Artificial Sequence
  GFR-binding peptide
AEVVMDEYQKYVVNNAADIYLISIPSLRAPV

SEQ ID NO: 24945 - protein, 35 aa, Artificial Sequence
  GFR-binding peptide
  MOD_RES (2)..(4): Xaa is C or S
HXGXSRVVMNEYKFKIVNSSDDLYLVSIPELKTPA

SEQ ID NO: 24946 - protein, 33 aa, Artificial Sequence
  GFR-binding peptide
  MOD_RES (2)..(2): Xaa is C or S
GXESVAMGYHYKLYTVVGKDKYLISIPSLKTPV

SEQ ID NO: 24947 - protein, 36 aa, Artificial Sequence
  GFR-binding peptide
  MOD_RES (32)..(33): Xaa is C or S
GEVVMDEYKFKVVKENEDLYLMSIPELETPVXXAKP

SEQ ID NO: 24948 - protein, 36 aa, Artificial Sequence; identical to SEQ ID NO: 3875
  GFR-binding peptide
  MOD_RES (2)..(4)..(36): Xaa is C or S

SEQ ID NO: 24949 - protein, 37 aa, Artificial Sequence
  GFR-binding peptide
  MOD_RES (34)..(35): Xaa is C or S
  MOD_RES (12)..(13)..(14)..(15)..(16): Xaa is A or G
  MOD_RES (17)..(18)..(19)..(20): Xaa is A or G or is absent
GEVVMDEYKFKXXXXXXXXXLYLMSIPELETPVXXAK

SEQ ID NO: 24950 - protein, 33 aa, Artificial Sequence; identical to SEQ ID NO: 3877
  GFR-binding peptide
  MOD_RES (32)..(33): Xaa is C or S

SEQ ID NO: 24951 - protein, 40 aa, Artificial Sequence
  GFR-binding peptide
  MOD_RES (1)..(3)..(37): Xaa is C or S
  MOD_RES (15)..(16)..(17)..(18)..(19): Xaa is A or G
  MOD_RES (20)..(21)..(22)..(23): Xaa is A or G or is absent
XGXSRVVMNEYKFKXXXXXXXXXLYLVSIPELKTPAXTPK

SEQ ID NO: 24952 - protein, 33 aa, Artificial Sequence
  GFR-binding peptide
  MOD_RES (33)..(33): Xaa is C or S
  MOD_RES (11)..(12)..(13)..(14)..(15): Xaa is A or G
  MOD_RES (16)..(17)..(18)..(19): Xaa is A or G or is absent
SVAMGYHYKLXXXXXXXXXKYLISIPSLKTPVX

SEQ ID NO: 24953 - protein, 36 aa, Artificial Sequence; identical to SEQ ID NO: 3882
  GFR-binding peptide
  MOD_RES (31)..(32): Xaa is C or S

SEQ ID NO: 24954 - protein, 36 aa, Artificial Sequence
  GFR-binding peptide
  MOD_RES (2)..(4): Xaa is C or S
  MOD_RES (15)..(16)..(17)..(18)..(19): Xaa is A or G
  MOD_RES (20)..(21)..(22)..(23): Xaa is A or G or is absent
SXKXSRVIMEYKFKXXXXXXXXXLYLISIPELAQPV

SEQ ID NO: 24955 - protein, 40 aa, Artificial Sequence; identical to SEQ ID NO: 3884
  GFR-binding peptide
  MOD_RES (1)..(3)..(37)..(38): Xaa is C or S
  MOD_RES (15)..(16)..(17)..(18)..(19): Xaa is A or G
  MOD_RES (20)..(21)..(22)..(23): Xaa is A or G or is absent

SEQ ID NO: 24956 - protein, 37 aa, Artificial Sequence
  GFR-binding peptide
  MOD_RES (2)..(4): Xaa is C or S
  MOD_RES (16)..(17)..(18)..(19)..(20): Xaa is A or G
  MOD_RES (21)..(22)..(23)..(24): Xaa is A or G or is absent
RXGXAEVVMDEYQKYXXXXXXXXXIYLISIPSLRAPV

SEQ ID NO: 24957 - protein, 36 aa, Artificial Sequence
  GFR-binding peptide
  MOD_RES (33)..(34): Xaa is C or S
  MOD_RES (11)..(12)..(13)..(14)..(15): Xaa is A or G
  MOD_RES (16)..(17)..(18)..(19): Xaa is A or G or is absent
SKVIMEYKFKXXXXXXXXXLYLISIPELDQSVXXPS

SEQ ID NO: 24958 - protein, 33 aa, Artificial Sequence; identical to SEQ ID NO: 3886
  GFR-binding peptide
  MOD_RES (2)..(2): Xaa is C or S

SEQ ID NO: 24959 - protein, 39 aa, Artificial Sequence
  GFR-binding peptide
  MOD_RES (1)..(36)..(37): Xaa is C or S
  MOD_RES (14)..(15)..(16)..(17)..(18): Xaa is A or G
  MOD_RES (19)..(20)..(21)..(22): Xaa is A or G or is absent
XEAVSMGEEYKFKXXXXXXXXXLYLVSIPELKTPVXXAK

SEQ ID NO: 24960 - protein, 35 aa, Artificial Sequence
  GFR-binding peptide
  MOD_RES (2)..(2): Xaa is C or S
  MOD_RES (14)..(15)..(16)..(17)..(18): Xaa is A or G
  MOD_RES (19)..(20)..(21)..(22): Xaa is A or G or is absent
GXESVAMGEYQKYXXXXXXXXXIYLISIPSLKTPV

SEQ ID NO: 24961 - protein, 40 aa, Artificial Sequence; identical to SEQ ID NO: 3887
  GFR-binding peptide
  MOD_RES (35)..(36): Xaa is C or S
  MOD_RES (13)..(14)..(15)..(16)..(17): Xaa is A or G
  MOD_RES (18)..(19)..(20)..(21): Xaa is A or G or is absent

SEQ ID NO: 24962 - protein, 38 aa, Artificial Sequence; identical to SEQ ID NO: 3888
  GFR-binding peptide
  MOD_RES (1)..(3)..(34)..(35): Xaa is C or S

SEQ ID NO: 24963 - protein, 42 aa, Artificial Sequence
  GFR-binding peptide
  MOD_RES (1)..(3)..(36)..(37): Xaa is C or S
  MOD_RES (14)..(15)..(16)..(17)..(18): Xaa is A or G
  MOD_RES (19)..(20)..(21)..(22): Xaa is A or G or is absent
XKXSKVIMEYKFKXXXXXXXXXLYLISIPELDQSVXXPSASA

SEQ ID NO: 24964 - protein, 30 aa, Artificial Sequence
  GFR-binding peptide
EVVMEEYQKYVVKDYEDIYLMSIPSLETPV

SEQ ID NO: 24965 - protein, 37 aa, Artificial Sequence; identical to SEQ ID NO: 3891
  GFR-binding peptide
  MOD_RES (2)..(4)..(35)..(36): Xaa is C or S

SEQ ID NO: 24966 - protein, 37 aa, Artificial Sequence
  GFR-binding peptide
  MOD_RES (2)..(34)..(35): Xaa is C or S
GXARVVMNEYQKYIVNSSDDIYLVSIPSLQTPAXXPK

SEQ ID NO: 24967 - protein, 39 aa, Artificial Sequence
  GFR-binding peptide
  MOD_RES (2)..(4)..(35)..(36): Xaa is C or S
SXKXSRVIMEYKFKVKPKRGVLYLISIPELAQPVXXPAA

SEQ ID NO: 24968 - protein, 35 aa, Artificial Sequence
  GFR-binding peptide
  MOD_RES (1)..(33)..(34): Xaa is C or S
XSRVVMNEYKFKIVNSSDDLYLVSIPELKTPAXXP

SEQ ID NO: 24969 - protein, 34 aa, Artificial Sequence; identical to SEQ ID NO: 3894
  GFR-binding peptide
  MOD_RES (33)..(34): Xaa is C or S
  MOD_RES (11)..(12)..(13)..(14)..(15): Xaa is A or G
  MOD_RES (16)..(17)..(18)..(19): Xaa is A or G or is absent

SEQ ID NO: 24970 - protein, 37 aa, Artificial Sequence
  GFR-binding peptide
  MOD_RES (35)..(36): Xaa is C or S
  MOD_RES (13)..(14)..(15)..(16)..(17): Xaa is A or G
  MOD_RES (18)..(19)..(20)..(21): Xaa is A or G or is absent
EAVSMGEEYKFKXXXXXXXXXLYLVSIPELKTPVXXA

SEQ ID NO: 24971 - protein, 40 aa, Artificial Sequence
  GFR-binding peptide
  MOD_RES (2)..(4)..(38): Xaa is C or S
  MOD_RES (16)..(17)..(18)..(19)..(20): Xaa is A or G
  MOD_RES (21)..(22)..(23)..(24): Xaa is A or G or is absent
HXGXSRVVMNEYQKYXXXXXXXXXIYLVSIPSLKTPAXTP

SEQ ID NO: 24972 - protein, 34 aa, Artificial Sequence; identical to SEQ ID NO: 3896
  GFR-binding peptide
  MOD_RES (1)..(3): Xaa is C or S

SEQ ID NO: 24973 - protein, 38 aa, Artificial Sequence
  GFR-binding peptide
  MOD_RES (2)..(35)..(36): Xaa is C or S
  MOD_RES (13)..(14)..(15)..(16)..(17): Xaa is A or G
  MOD_RES (18)..(19)..(20)..(21): Xaa is A or G or is absent
KXSRVIMEYQKYXXXXXXXXXIYLISIPSLAQPVXXPA

SEQ ID NO: 24974 - protein, 36 aa, Artificial Sequence
  GFR-binding peptide
  MOD_RES (2)..(36): Xaa is C or S
  MOD_RES (14)..(15)..(16)..(17)..(18): Xaa is A or G
  MOD_RES (19)..(20)..(21)..(22): Xaa is A or G or is absent
GXAEVVMDEYKFKXXXXXXXXXLYLISIPELRAPVX

SEQ ID NO: 24975 - protein, 38 aa, Artificial Sequence
  GFR-binding peptide
  MOD_RES (2)..(4)..(37)..(38): Xaa is C or S
RXGXEAVSMGEEYKFKTPVGMDDLYLVSIPELKTPVXX

SEQ ID NO: 24976 - protein, 42 aa, Artificial Sequence; identical to SEQ ID NO: 3898
  GFR-binding peptide
  MOD_RES (2)..(4)..(36)..(37): Xaa is C or S

SEQ ID NO: 24977 - protein, 35 aa, Artificial Sequence
  GFR-binding peptide
  MOD_RES (2)..(4): Xaa is C or S
RXGXGEVVMDEYQKYVVKENEDIYLMSIPSLETPV

SEQ ID NO: 24978 - protein, 44 aa, Artificial Sequence
  GFR-binding peptide
  MOD_RES (2)..(4)..(38): Xaa is C or S
  MOD_RES (16)..(17)..(18)..(19)..(20): Xaa is A or G
  MOD_RES (21)..(22)..(23)..(24): Xaa is A or G or is absent
HXGXSRVVMNEYKFKXXXXXXXXXLYLVSIPELKTPAXTPKTVH

SEQ ID NO: 24979 - protein, 42 aa, Artificial Sequence
  GFR-binding peptide
  MOD_RES (1)..(3)..(37)..(38): Xaa is C or S
  MOD_RES (15)..(16)..(17)..(18)..(19): Xaa is A or G
  MOD_RES (20)..(21)..(22)..(23): Xaa is A or G or is absent
XGXESVAMGEYKFKXXXXXXXXXLYLISIPELKTPVXXAKSA

SEQ ID NO: 24980 - protein, 36 aa, Artificial Sequence; identical to SEQ ID NO: 3899
  GFR-binding peptide
  MOD_RES (2)..(34)..(35): Xaa is C or S

SEQ ID NO: 24981 - protein, 32 aa, Artificial Sequence
  GFR-binding peptide
  MOD_RES (11)..(12)..(13)..(14)..(15): Xaa is A or G
  MOD_RES (16)..(17)..(18)..(19): Xaa is A or G or is absent
SVAMGYHYKLXXXXXXXXXKYLISIPSLKTPV

SEQ ID NO: 24982 - protein, 36 aa, Artificial Sequence; identical to SEQ ID NO: 3903
  GFR-binding peptide
  MOD_RES (31)..(32): Xaa is C or S

SEQ ID NO: 24983 - protein, 32 aa, Artificial Sequence
  GFR-binding peptide
  MOD_RES (1)..(1): Xaa is C or S
XAEVVMDRYKKLVVNNAADFYLISIANLRAPV

SEQ ID NO: 24984 - protein, 40 aa, Artificial Sequence
  GFR-binding peptide
  MOD_RES (2)..(4)..(37)..(38): Xaa is C or S
  MOD_RES (15)..(16)..(17)..(18)..(19): Xaa is A or G
  MOD_RES (20)..(21)..(22)..(23): Xaa is A or G or is absent
SXKXSRVIMEYKFKXXXXXXXXXLYLISIPELAQPVXXPA

SEQ ID NO: 24985 - protein, 34 aa, Artificial Sequence; identical to SEQ ID NO: 3904
  GFR-binding peptide
  MOD_RES (1)..(33)..(34): Xaa is C or S

SEQ ID NO: 24986 - protein, 37 aa, Artificial Sequence
  GFR-binding peptide
  MOD_RES (32)..(33): Xaa is C or S
AKVVMNEYKFKIVNNSSDLYLVSIPELKTPAXXAKPV

SEQ ID NO: 24987 - protein, 36 aa, Artificial Sequence
  GFR-binding peptide
  MOD_RES (31)..(32): Xaa is C or S
SVAMGEYQKYYTVVGKDIYLISIPSLKTPVXXAKSA

SEQ ID NO: 24988 - protein, 32 aa, Artificial Sequence; identical to SEQ ID NO: 3905
  GFR-binding peptide
  MOD_RES (1)..(1): Xaa is C or S

SEQ ID NO: 24989 - protein, 39 aa, Artificial Sequence; identical to SEQ ID NO: 3906
  GFR-binding peptide
  MOD_RES (1)..(3)..(36)..(37): Xaa is C or S
  MOD_RES (14)..(15)..(16)..(17)..(18): Xaa is A or G
  MOD_RES (19)..(20)..(21)..(22): Xaa is A or G or is absent

SEQ ID NO: 24990 - protein, 37 aa, Artificial Sequence; identical to SEQ ID NO: 3907
  GFR-binding peptide
  MOD_RES (1)..(3)..(37): Xaa is C or S
  MOD_RES (15)..(16)..(17)..(18)..(19): Xaa is A or G
  MOD_RES (20)..(21)..(22)..(23): Xaa is A or G or is absent

SEQ ID NO: 24991 - protein, 35 aa, Artificial Sequence; identical to SEQ ID NO: 3910
  GFR-binding peptide
  MOD_RES (31)..(32): Xaa is C or S

SEQ ID NO: 24992 - protein, 41 aa, Artificial Sequence; identical to SEQ ID NO: 3911
  GFR-binding peptide
  MOD_RES (2)..(35)..(36): Xaa is C or S
  MOD_RES (13)..(14)..(15)..(16)..(17): Xaa is A or G
  MOD_RES (18)..(19)..(20)..(21): Xaa is A or G or is absent

SEQ ID NO: 24993 - protein, 35 aa, Artificial Sequence
  GFR-binding peptide
  MOD_RES (1)..(35): Xaa is C or S
  MOD_RES (13)..(14)..(15)..(16)..(17): Xaa is A or G
  MOD_RES (18)..(19)..(20)..(21): Xaa is A or G or is absent
XGEVVMDEYQKYXXXXXXXXXIYLMSIPSLETPVX

SEQ ID NO: 24994 - protein, 41 aa, Artificial Sequence; identical to SEQ ID NO: 3912
  GFR-binding peptide
  MOD_RES (2)..(35)..(36): Xaa is C or S
  MOD_RES (13)..(14)..(15)..(16)..(17): Xaa is A or G
  MOD_RES (18)..(19)..(20)..(21): Xaa is A or G or is absent

SEQ ID NO: 24995 - protein, 33 aa, Artificial Sequence; identical to SEQ ID NO: 3913
  GFR-binding peptide
  MOD_RES (31)..(32): Xaa is C or S

SEQ ID NO: 24996 - protein, 40 aa, Artificial Sequence; identical to SEQ ID NO: 3914
  GFR-binding peptide
  MOD_RES (2)..(35)..(36): Xaa is C or S

SEQ ID NO: 24997 - protein, 33 aa, Artificial Sequence
  GFR-binding peptide
  MOD_RES (12)..(13)..(14)..(15)..(16): Xaa is A or G
  MOD_RES (17)..(18)..(19)..(20): Xaa is A or G or is absent
AEVVMDEYQKYXXXXXXXXXIYLISIPSLRAPV

SEQ ID NO: 24998 - protein, 39 aa, Artificial Sequence; identical to SEQ ID NO: 3918
  GFR-binding peptide
  MOD_RES (33)..(34): Xaa is C or S
  MOD_RES (11)..(12)..(13)..(14)..(15): Xaa is A or G
  MOD_RES (16)..(17)..(18)..(19): Xaa is A or G or is absent

SEQ ID NO: 24999 - protein, 34 aa, Artificial Sequence; identical to SEQ ID NO: 3919
  GFR-binding peptide
  MOD_RES (2)..(33)..(34): Xaa is C or S

SEQ ID NO: 25000 - protein, 34 aa, Artificial Sequence
  GFR-binding peptide
  MOD_RES (33)..(34): Xaa is C or S
  MOD_RES (11)..(12)..(13)..(14)..(15): Xaa is A or G
  MOD_RES (16)..(17)..(18)..(19): Xaa is A or G or is absent
SKVVMEYKFKXXXXXXXXXLYLISIPELDQPVXX

SEQ ID NO: 25001 - protein, 40 aa, Artificial Sequence; identical to SEQ ID NO: 3926
  GFR-binding peptide
  MOD_RES (2)..(4)..(38)..(39): Xaa is C or S
  MOD_RES (16)..(17)..(18)..(19)..(20): Xaa is A or G
  MOD_RES (21)..(22)..(23)..(24): Xaa is A or G or is absent

SEQ ID NO: 25002 - protein, 40 aa, Artificial Sequence
  GFR-binding peptide
  MOD_RES (1)..(35)..(36): Xaa is C or S
  MOD_RES (13)..(14)..(15)..(16)..(17): Xaa is A or G
  MOD_RES (18)..(19)..(20)..(21): Xaa is A or G or is absent
XESVAMGEYQKYXXXXXXXXXIYLISIPSLKTPVXXAKSA

SEQ ID NO: 25003 - protein, 38 aa, Artificial Sequence; identical to SEQ ID NO: 3927
  GFR-binding peptide
  MOD_RES (33)..(34): Xaa is C or S
  MOD_RES (11)..(12)..(13)..(14)..(15): Xaa is A or G
  MOD_RES (16)..(17)..(18)..(19): Xaa is A or G or is absent

SEQ ID NO: 25004 - protein, 39 aa, Artificial Sequence
  GFR-binding peptide
  MOD_RES (2)..(4)..(38)..(39): Xaa is C or S
  MOD_RES (16)..(17)..(18)..(19)..(20): Xaa is A or G
  MOD_RES (21)..(22)..(23)..(24): Xaa is A or G or is absent
RXGXESVAMGYHYKLXXXXXXXXXKYLISIPSLKTPVXX

SEQ ID NO: 25005 - protein, 38 aa, Artificial Sequence
  GFR-binding peptide
  MOD_RES (1)..(3)..(37)..(38): Xaa is C or S
  MOD_RES (15)..(16)..(17)..(18)..(19): Xaa is A or G
  MOD_RES (20)..(21)..(22)..(23): Xaa is A or G or is absent
XGXGEVVMDEYQKYXXXXXXXXXIYLMSIPSLETPVXX

SEQ ID NO: 25006 - protein, 32 aa, Artificial Sequence
  GFR-binding peptide
  MOD_RES (11)..(12)..(13)..(14)..(15): Xaa is A or G
  MOD_RES (16)..(17)..(18)..(19): Xaa is A or G or is absent
KVVMNEYQKYXXXXXXXXXIYLVSIPSLKTPA

SEQ ID NO: 25007 - protein, 42 aa, Artificial Sequence; identical to SEQ ID NO: 3929
  GFR-binding peptide
  MOD_RES (2)..(4)..(38): Xaa is C or S
  MOD_RES (16)..(17)..(18)..(19)..(20): Xaa is A or G
  MOD_RES (21)..(22)..(23)..(24): Xaa is A or G or is absent

SEQ ID NO: 25008 - protein, 35 aa, Artificial Sequence; identical to SEQ ID NO: 3930
  GFR-binding peptide
  MOD_RES (1)..(33)..(34): Xaa is C or S

SEQ ID NO: 25009 - protein, 35 aa, Artificial Sequence; identical to SEQ ID NO: 3931
  GFR-binding peptide
  MOD_RES (33)..(34): Xaa is C or S
  MOD_RES (11)..(12)..(13)..(14)..(15): Xaa is A or G
  MOD_RES (16)..(17)..(18)..(19): Xaa is A or G or is absent

SEQ ID NO: 25010 - protein, 36 aa, Artificial Sequence
  GFR-binding peptide
  MOD_RES (2)..(4)..(36): Xaa is C or S
RXGXAEVVMDRYKKLVVNNAADFYLISIANLRAPVX

SEQ ID NO: 25011 - protein, 35 aa, Artificial Sequence; identical to SEQ ID NO: 3932
  GFR-binding peptide
  MOD_RES (1)..(33)..(34): Xaa is C or S

SEQ ID NO: 25012 - protein, 33 aa, Artificial Sequence
  GFR-binding peptide
  MOD_RES (33)..(33): Xaa is C or S
  MOD_RES (11)..(12)..(13)..(14)..(15): Xaa is A or G
  MOD_RES (16)..(17)..(18)..(19): Xaa is A or G or is absent
KVVMNEYQKYXXXXXXXXXIYLVSIPSLKTPAX

SEQ ID NO: 25013 - protein, 35 aa, Artificial Sequence
  GFR-binding peptide
  MOD_RES (1)..(3)..(35): Xaa is C or S
XGXAKVVMNEYQKYIVNNSSDIYLVSIPSLKTPAX

SEQ ID NO: 25014 - protein, 32 aa, Artificial Sequence
  GFR-binding peptide
  MOD_RES (11)..(12)..(13)..(14)..(15): Xaa is A or G
  MOD_RES (16)..(17)..(18)..(19): Xaa is A or G or is absent
RVVMNEYQKYXXXXXXXXXIYLVSIPSLKTPA

SEQ ID NO: 25015 - protein, 35 aa, Artificial Sequence; identical to SEQ ID NO: 3933
  GFR-binding peptide
  MOD_RES (1)..(3)..(34)..(35): Xaa is C or S

SEQ ID NO: 25016 - protein, 33 aa, Artificial Sequence
  GFR-binding peptide
  MOD_RES (33)..(33): Xaa is C or S
  MOD_RES (11)..(12)..(13)..(14)..(15): Xaa is A or G
  MOD_RES (16)..(17)..(18)..(19): Xaa is A or G or is absent
RVVMNEYQKYXXXXXXXXXIYLVSIPSLKTPAX

SEQ ID NO: 25017 - protein, 34 aa, Artificial Sequence; identical to SEQ ID NO: 3934
  GFR-binding peptide
  MOD_RES (1)..(1): Xaa is C or S
  MOD_RES (13)..(14)..(15)..(16)..(17): Xaa is A or G
  MOD_RES (18)..(19)..(20)..(21): Xaa is A or G or is absent

SEQ ID NO: 25018 - protein, 39 aa, Artificial Sequence
  GFR-binding peptide
  MOD_RES (35)..(36): Xaa is C or S
  MOD_RES (13)..(14)..(15)..(16)..(17): Xaa is A or G
  MOD_RES (18)..(19)..(20)..(21): Xaa is A or G or is absent
EAVSMGEEYQKYXXXXXXXXXIYLVSIPSLKTPVXXAKG

SEQ ID NO: 25019 - protein, 36 aa, Artificial Sequence
  GFR-binding peptide
  MOD_RES (1)..(35): Xaa is C or S
  MOD_RES (13)..(14)..(15)..(16)..(17): Xaa is A or G
  MOD_RES (18)..(19)..(20)..(21): Xaa is A or G or is absent
XSRVVMNEYKFKXXXXXXXXXLYLVSIPELKTPAXT

SEQ ID NO: 25020 - protein, 33 aa, Artificial Sequence
  GFR-binding peptide
  MOD_RES (12)..(13)..(14)..(15)..(16): Xaa is A or G
  MOD_RES (17)..(18)..(19)..(20): Xaa is A or G or is absent
AKVVMNEYKFKXXXXXXXXXLYLVSIPELKTPA

SEQ ID NO: 25021 - protein, 37 aa, Artificial Sequence
  GFR-binding peptide
  MOD_RES (32)..(33): Xaa is C or S
AEVVMDEYQKYVVNNAADIYLISIPSLRAPVXXSAPA

SEQ ID NO: 25022 - protein, 33 aa, Artificial Sequence; identical to SEQ ID NO: 3940
  GFR-binding peptide
  MOD_RES (1)..(32)..(33): Xaa is C or S

SEQ ID NO: 25023 - protein, 39 aa, Artificial Sequence
  GFR-binding peptide
  MOD_RES (34)..(35): Xaa is C or S
  MOD_RES (12)..(13)..(14)..(15)..(16): Xaa is A or G
  MOD_RES (17)..(18)..(19)..(20): Xaa is A or G or is absent
ESVAMGRYKKLXXXXXXXXXFYLISIANLKTPVXXAKSA

SEQ ID NO: 25024 - protein, 38 aa, Artificial Sequence
  GFR-binding peptide
  MOD_RES (2)..(34)..(35): Xaa is C or S
GXAEVVMDEYQKYVVNNAADIYLISIPSLRAPVXXSAP

SEQ ID NO: 25025 - protein, 35 aa, Artificial Sequence; identical to SEQ ID NO: 3943
  GFR-binding peptide
  MOD_RES (1)..(3)..(34)..(35): Xaa is C or S

SEQ ID NO: 25026 - protein, 39 aa, Artificial Sequence
  GFR-binding peptide
  MOD_RES (2)..(34)..(35): Xaa is C or S
GXAKVVMNEYQKYIVNNSSDIYLVSIPSLKTPAXXAKPV

SEQ ID NO: 25027 - protein, 32 aa, Artificial Sequence
  GFR-binding peptide
  MOD_RES (32)..(32): Xaa is C or S
AKVVMNEYKFKIVNNSSDLYLVSIPELKTPAX

SEQ ID NO: 25028 - protein, 39 aa, Artificial Sequence
  GFR-binding peptide
  MOD_RES (2)..(36): Xaa is C or S
  MOD_RES (14)..(15)..(16)..(17)..(18): Xaa is A or G
  MOD_RES (19)..(20)..(21)..(22): Xaa is A or G or is absent
GXSRVVMNEYKFKXXXXXXXXXLYLVSIPELKTPAXTPK

SEQ ID NO: 25029 - protein, 39 aa, Artificial Sequence
  GFR-binding peptide
  MOD_RES (35)..(36): Xaa is C or S
  MOD_RES (13)..(14)..(15)..(16)..(17): Xaa is A or G
  MOD_RES (18)..(19)..(20)..(21): Xaa is A or G or is absent
EAVSMGEEYKFKXXXXXXXXXLYLVSIPELKTPVXXAKG

SEQ ID NO: 25030 - protein, 37 aa, Artificial Sequence
  GFR-binding peptide
  MOD_RES (31)..(31): Xaa is C or S
RVVMNEYKFKIVNSSDDLYLVSIPELKTPAXTPKTVH

SEQ ID NO: 25031 - protein, 39 aa, Artificial Sequence; identical to SEQ ID NO: 3949
  GFR-binding peptide
  MOD_RES (2)..(36)..(37): Xaa is C or S
  MOD_RES (14)..(15)..(16)..(17)..(18): Xaa is A or G
  MOD_RES (19)..(20)..(21)..(22): Xaa is A or G or is absent

SEQ ID NO: 25032 - protein, 34 aa, Artificial Sequence; identical to SEQ ID NO: 3950
  GFR-binding peptide
  MOD_RES (1)..(3): Xaa is C or S

SEQ ID NO: 25033 - protein, 40 aa, Artificial Sequence
  GFR-binding peptide
  MOD_RES (2)..(37)..(38): Xaa is C or S
  MOD_RES (15)..(16)..(17)..(18)..(19): Xaa is A or G
  MOD_RES (20)..(21)..(22)..(23): Xaa is A or G or is absent
GXEAVSMGEEYQKYXXXXXXXXXIYLVSIPSLKTPVXXAK

SEQ ID NO: 25034 - protein, 32 aa, Artificial Sequence
  GFR-binding peptide
  MOD_RES (31)..(32): Xaa is C or S
SRVIMEYQKYVKPKRGVIYLISIPSLAQPVXX

SEQ ID NO: 25035 - protein, 35 aa, Artificial Sequence
  GFR-binding peptide
  MOD_RES (32)..(33): Xaa is C or S
AKVVMNEYQKYIVNNSSDIYLVSIPSLKTPAXXAK

SEQ ID NO: 25036 - protein, 40 aa, Artificial Sequence
  GFR-binding peptide
  MOD_RES (2)..(34)..(35): Xaa is C or S
GXAEVVMDEYKFKVVNNAADLYLISIPELRAPVXXSAPAA

SEQ ID NO: 25037 - protein, 39 aa, Artificial Sequence; identical to SEQ ID NO: 3955
  GFR-binding peptide
  MOD_RES (2)..(4)..(36)..(37): Xaa is C or S

SEQ ID NO: 25038 - protein, 37 aa, Artificial Sequence; identical to SEQ ID NO: 3957
  GFR-binding peptide
  MOD_RES (2)..(4): Xaa is C or S
  MOD_RES (16)..(17)..(18)..(19)..(20): Xaa is A or G
  MOD_RES (21)..(22)..(23)..(24): Xaa is A or G or is absent

SEQ ID NO: 25039 - protein, 35 aa, Artificial Sequence
  GFR-binding peptide
  MOD_RES (33)..(34): Xaa is C or S
  MOD_RES (11)..(12)..(13)..(14)..(15): Xaa is A or G
  MOD_RES (16)..(17)..(18)..(19): Xaa is A or G or is absent
KVVMNEYKFKXXXXXXXXXLYLVSIPELKTPAXXA

SEQ ID NO: 25040 - protein, 40 aa, Artificial Sequence
  GFR-binding peptide
  MOD_RES (2)..(4)..(35)..(36): Xaa is C or S
SXKXSRVIMEYKFKVKPKRGVLYLISIPELAQPVXXPAAS

SEQ ID NO: 25041 - protein, 36 aa, Artificial Sequence
  GFR-binding peptide
  MOD_RES (2)..(4)..(36): Xaa is C or S
RXGXESVAMGEYKFKYTVVGKDLYLISIPELKTPVX

SEQ ID NO: 25042 - protein, 41 aa, Artificial Sequence; identical to SEQ ID NO: 3958
  GFR-binding peptide
  MOD_RES (1)..(3)..(35)..(36): Xaa is C or S

SEQ ID NO: 25043 - protein, 39 aa, Artificial Sequence
  GFR-binding peptide
  MOD_RES (1)..(35)..(36): Xaa is C or S
  MOD_RES (13)..(14)..(15)..(16)..(17): Xaa is A or G
  MOD_RES (18)..(19)..(20)..(21): Xaa is A or G or is absent
XESVAMGYHYKLXXXXXXXXXKYLISIPSLKTPVXXAKS

SEQ ID NO: 25044 - protein, 39 aa, Artificial Sequence
  GFR-binding peptide
  MOD_RES (1)..(3)..(37)..(38): Xaa is C or S
  MOD_RES (15)..(16)..(17)..(18)..(19): Xaa is A or G
  MOD_RES (20)..(21)..(22)..(23): Xaa is A or G or is absent
XGXGEVVMEEYQKYXXXXXXXXXIYLMSIPSLETPVXXA

SEQ ID NO: 25045 - protein, 37 aa, Artificial Sequence; identical to SEQ ID NO: 3963
  GFR-binding peptide
  MOD_RES (2)..(34)..(35): Xaa is C or S

SEQ ID NO: 25046 - protein, 32 aa, Artificial Sequence
  GFR-binding peptide
  MOD_RES (2)..(2): Xaa is C or S
KXSKVVMEYKFKVKPTRGVLYLISIPELDQPV

SEQ ID NO: 25047 - protein, 35 aa, Artificial Sequence; identical to SEQ ID NO: 3966
  GFR-binding peptide
  MOD_RES (1)..(35): Xaa is C or S
  MOD_RES (13)..(14)..(15)..(16)..(17): Xaa is A or G
  MOD_RES (18)..(19)..(20)..(21): Xaa is A or G or is absent

SEQ ID NO: 25048 - protein, 38 aa, Artificial Sequence
  GFR-binding peptide
  MOD_RES (34)..(35): Xaa is C or S
  MOD_RES (12)..(13)..(14)..(15)..(16): Xaa is A or G
  MOD_RES (17)..(18)..(19)..(20): Xaa is A or G or is absent
ESVAMGRYKKLXXXXXXXXXFYLISIANLKTPVXXAKS

SEQ ID NO: 25049 - protein, 43 aa, Artificial Sequence
  GFR-binding peptide
  MOD_RES (2)..(4)..(38)..(39): Xaa is C or S
  MOD_RES (16)..(17)..(18)..(19)..(20): Xaa is A or G
  MOD_RES (21)..(22)..(23)..(24): Xaa is A or G or is absent
RXGXAEVVMDEYQKYXXXXXXXXXIYLISIPSLRAPVXXSAPA

SEQ ID NO: 25050 - protein, 39 aa, Artificial Sequence
  GFR-binding peptide
  MOD_RES (2)..(4)..(38)..(39): Xaa is C or S
  MOD_RES (16)..(17)..(18)..(19)..(20): Xaa is A or G
  MOD_RES (21)..(22)..(23)..(24): Xaa is A or G or is absent
RXGXGEVVMDEYKFKXXXXXXXXXLYLMSIPELETPVXX

SEQ ID NO: 25051 - protein, 36 aa, Artificial Sequence
  GFR-binding peptide
  MOD_RES (31)..(32): Xaa is C or S
KVVMNEYKFKIVNNSSDLYLVSIPELKTPAXXAKPV

SEQ ID NO: 25052 - protein, 36 aa, Artificial Sequence
  GFR-binding peptide
  MOD_RES (33)..(34): Xaa is C or S
  MOD_RES (11)..(12)..(13)..(14)..(15): Xaa is A or G
  MOD_RES (16)..(17)..(18)..(19): Xaa is A or G or is absent
RVVMNEYKFKXXXXXXXXXLYLVSIPELQTPAXXPK

SEQ ID NO: 25053 - protein, 42 aa, Artificial Sequence
  GFR-binding peptide
  MOD_RES (1)..(3)..(36)..(37): Xaa is C or S
  MOD_RES (14)..(15)..(16)..(17)..(18): Xaa is A or G
  MOD_RES (19)..(20)..(21)..(22): Xaa is A or G or is absent
XKXSRVIMEYKFKXXXXXXXXXLYLISIPELAQPVXXPAASA

SEQ ID NO: 25054 - protein, 39 aa, Artificial Sequence; identical to SEQ ID NO: 3970
  GFR-binding peptide
  MOD_RES (1)..(3)..(37)..(38): Xaa is C or S
  MOD_RES (15)..(16)..(17)..(18)..(19): Xaa is A or G
  MOD_RES (20)..(21)..(22)..(23): Xaa is A or G or is absent

SEQ ID NO: 25055 - protein, 41 aa, Artificial Sequence
  GFR-binding peptide
  MOD_RES (2)..(4)..(38)..(39): Xaa is C or S
  MOD_RES (16)..(17)..(18)..(19)..(20): Xaa is A or G
  MOD_RES (21)..(22)..(23)..(24): Xaa is A or G or is absent
RXGXAEVVMDEYQKYXXXXXXXXXIYLISIPSLRAPVXXSA

SEQ ID NO: 25056 - protein, 39 aa, Artificial Sequence
  GFR-binding peptide
  MOD_RES (2)..(4)..(38)..(39): Xaa is C or S
  MOD_RES (16)..(17)..(18)..(19)..(20): Xaa is A or G
  MOD_RES (21)..(22)..(23)..(24): Xaa is A or G or is absent
RXGXGEVVMEEYQKYXXXXXXXXXIYLMSIPSLETPVXX

SEQ ID NO: 25057 - protein, 40 aa, Artificial Sequence
  GFR-binding peptide
  MOD_RES (1)..(35)..(36): Xaa is C or S
  MOD_RES (13)..(14)..(15)..(16)..(17): Xaa is A or G
  MOD_RES (18)..(19)..(20)..(21): Xaa is A or G or is absent
XGEVVMDEYQKYXXXXXXXXXIYLMSIPSLETPVXXAKPI

SEQ ID NO: 25058 - protein, 34 aa, Artificial Sequence; identical to SEQ ID NO: 3976
  GFR-binding peptide
  MOD_RES (31)..(32): Xaa is C or S

SEQ ID NO: 25059 - protein, 38 aa, Artificial Sequence
  GFR-binding peptide
  MOD_RES (2)..(34)..(35): Xaa is C or S
GXSRVVMNEYQKYIVNSSDDIYLVSIPSLKTPAXXPKP

SEQ ID NO: 25060 - protein, 40 aa, Artificial Sequence
  GFR-binding peptide
  MOD_RES (1)..(36)..(37): Xaa is C or S
  MOD_RES (14)..(15)..(16)..(17)..(18): Xaa is A or G
  MOD_RES (19)..(20)..(21)..(22): Xaa is A or G or is absent
XEAVSMGEEYQKYXXXXXXXXXIYLVSIPSLKTPVXXAKG

SEQ ID NO: 25061 - protein, 36 aa, Artificial Sequence; identical to SEQ ID NO: 3978
  GFR-binding peptide
  MOD_RES (1)..(3)..(34)..(35): Xaa is C or S

SEQ ID NO: 25062 - protein, 41 aa, Artificial Sequence; identical to SEQ ID NO: 3981
  GFR-binding peptide
  MOD_RES (1)..(3)..(37)..(38): Xaa is C or S
  MOD_RES (15)..(16)..(17)..(18)..(19): Xaa is A or G
  MOD_RES (20)..(21)..(22)..(23): Xaa is A or G or is absent

SEQ ID NO: 25063 - protein, 39 aa, Artificial Sequence; identical to SEQ ID NO: 3982
  GFR-binding peptide
  MOD_RES (2)..(35)..(36): Xaa is C or S
  MOD_RES (13)..(14)..(15)..(16)..(17): Xaa is A or G
  MOD_RES (18)..(19)..(20)..(21): Xaa is A or G or is absent

SEQ ID NO: 25064 - protein, 36 aa, Artificial Sequence
  GFR-binding peptide
  MOD_RES (32)..(33): Xaa is C or S
ARVVMNEYQKYIVNSSDDIYLVSIPSLQTPAXXPKP

SEQ ID NO: 25065 - protein, 38 aa, Artificial Sequence; identical to SEQ ID NO: 3984
  GFR-binding peptide
  MOD_RES (33)..(34): Xaa is C or S
  MOD_RES (11)..(12)..(13)..(14)..(15): Xaa is A or G
  MOD_RES (16)..(17)..(18)..(19): Xaa is A or G or is absent

SEQ ID NO: 25066 - protein, 42 aa, Artificial Sequence
  GFR-binding peptide
  MOD_RES (1)..(3)..(37)..(38): Xaa is C or S
  MOD_RES (15)..(16)..(17)..(18)..(19): Xaa is A or G
  MOD_RES (20)..(21)..(22)..(23): Xaa is A or G or is absent
XGXESVAMGEYQKYXXXXXXXXXIYLISIPSLKTPVXXAKSA

SEQ ID NO: 25067 - protein, 36 aa, Artificial Sequence; identical to SEQ ID NO: 3985
  GFR-binding peptide
  MOD_RES (1)..(34)..(35): Xaa is C or S
  MOD_RES (12)..(13)..(14)..(15)..(16): Xaa is A or G
  MOD_RES (17)..(18)..(19)..(20): Xaa is A or G or is absent

SEQ ID NO: 25068 - protein, 32 aa, Artificial Sequence; identical to SEQ ID NO: 3987
  GFR-binding peptide
  MOD_RES (32)..(32): Xaa is C or S

SEQ ID NO: 25069 - protein, 39 aa, Artificial Sequence
  GFR-binding peptide
  MOD_RES (34)..(35): Xaa is C or S
  MOD_RES (12)..(13)..(14)..(15)..(16): Xaa is A or G
  MOD_RES (17)..(18)..(19)..(20): Xaa is A or G or is absent
AEVVMDEYKFKXXXXXXXXXLYLISIPELRAPVXXSAPA

SEQ ID NO: 25070 - protein, 33 aa, Artificial Sequence
  GFR-binding peptide
  MOD_RES (2)..(33): Xaa is C or S
KXSKVVMEYQKYVKPTRGVIYLISIPSLDQPVX

SEQ ID NO: 25071 - protein, 37 aa, Artificial Sequence
  GFR-binding peptide
  MOD_RES (1)..(33)..(34): Xaa is C or S
XAKVVMNEYQKYIVNNSSDIYLVSIPSLKTPAXXAKP

SEQ ID NO: 25072 - protein, 34 aa, Artificial Sequence
  GFR-binding peptide
  MOD_RES (2)..(33)..(34): Xaa is C or S
KXSKVVMEYKFKVKPTRGVLYLISIPELDQPVXX

SEQ ID NO: 25073 - protein, 36 aa, Artificial Sequence
  GFR-binding peptide
  MOD_RES (2)..(4): Xaa is C or S
  MOD_RES (15)..(16)..(17)..(18)..(19): Xaa is A or G
  MOD_RES (20)..(21)..(22)..(23): Xaa is A or G or is absent
SXKXSRVIMEYQKYXXXXXXXXXIYLISIPSLAQPV

SEQ ID NO: 25074 - protein, 38 aa, Artificial Sequence; identical to SEQ ID NO: 3991
  GFR-binding peptide
  MOD_RES (2)..(4)..(35)..(36): Xaa is C or S

SEQ ID NO: 25075 - protein, 41 aa, Artificial Sequence
  GFR-binding peptide
  MOD_RES (2)..(4)..(36): Xaa is C or S
HXGXSRVVMNEYKFKIVNSSDDLYLVSIPELKTPAXTPKTV

SEQ ID NO: 25076 - protein, 42 aa, Artificial Sequence
  GFR-binding peptide
  MOD_RES (2)..(4)..(36)..(37): Xaa is C or S
RXGXESVAMGRYKKLYTVVGKDFYLISIANLKTPVXXAKSAK

SEQ ID NO: 25077 - protein, 37 aa, Artificial Sequence
  GFR-binding peptide
  MOD_RES (33)..(34): Xaa is C or S
  MOD_RES (11)..(12)..(13)..(14)..(15): Xaa is A or G
  MOD_RES (16)..(17)..(18)..(19): Xaa is A or G or is absent
EVVMDEYQKYXXXXXXXXXIYLISIPSLRAPVXXSAP

SEQ ID NO: 25078 - protein, 38 aa, Artificial Sequence
  GFR-binding peptide
  MOD_RES (2)..(33)..(34): Xaa is C or S
KXSKVIMEYQKYIKPTKGIIYLISIPSLDQSVXXPSAS

SEQ ID NO: 25079 - protein, 36 aa, Artificial Sequence
  GFR-binding peptide
  MOD_RES (1)..(3): Xaa is C or S
  MOD_RES (15)..(16)..(17)..(18)..(19): Xaa is A or G
  MOD_RES (20)..(21)..(22)..(23): Xaa is A or G or is absent
XGXAEVVMDYHYKLXXXXXXXXXKYLISIPSLRAPV

SEQ ID NO: 25080 - protein, 32 aa, Artificial Sequence; identical to SEQ ID NO: 3995
  GFR-binding peptide
  MOD_RES (32)..(32): Xaa is C or S

SEQ ID NO: 25081 - protein, 39 aa, Artificial Sequence
  GFR-binding peptide
  MOD_RES (33)..(34): Xaa is C or S
  MOD_RES (11)..(12)..(13)..(14)..(15): Xaa is A or G
  MOD_RES (16)..(17)..(18)..(19): Xaa is A or G or is absent
SVAMGEYQKYXXXXXXXXXIYLISIPSLKTPVXXAKSAK

SEQ ID NO: 25082 - protein, 38 aa, Artificial Sequence; identical to SEQ ID NO: 3999
  GFR-binding peptide
  MOD_RES (1)..(3)..(34)..(35): Xaa is C or S

SEQ ID NO: 25083 - protein, 36 aa, Artificial Sequence; identical to SEQ ID NO: 4000
  GFR-binding peptide
  MOD_RES (31)..(32): Xaa is C or S

SEQ ID NO: 25084 - protein, 37 aa, Artificial Sequence
  GFR-binding peptide
  MOD_RES (2)..(35)..(36): Xaa is C or S
  MOD_RES (13)..(14)..(15)..(16)..(17): Xaa is A or G
  MOD_RES (18)..(19)..(20)..(21): Xaa is A or G or is absent
KXSRVIMEYQKYXXXXXXXXXIYLISIPSLAQPVXXP

SEQ ID NO: 25085 - protein, 39 aa, Artificial Sequence
  GFR-binding peptide
  MOD_RES (1)..(3)..(36)..(37): Xaa is C or S
XGXEAVSMGEEYKFKTPVGMDDLYLVSIPELKTPVXXAK

SEQ ID NO: 25086 - protein, 37 aa, Artificial Sequence; identical to SEQ ID NO: 4006
  GFR-binding peptide
  MOD_RES (1)..(3)..(34)..(35): Xaa is C or S

SEQ ID NO: 25087 - protein, 39 aa, Artificial Sequence
  GFR-binding peptide
  MOD_RES (2)..(34)..(35): Xaa is C or S
GXESVAMGRYKKLYTVVGKDFYLISIANLKTPVXXAKSA

SEQ ID NO: 25088 - protein, 36 aa, Artificial Sequence; identical to SEQ ID NO: 4007
  GFR-binding peptide
  MOD_RES (1)..(32)..(33): Xaa is C or S

SEQ ID NO: 25089 - protein, 34 aa, Artificial Sequence
  GFR-binding peptide
  MOD_RES (31)..(32): Xaa is C or S
SKVVMEYKFKVKPTRGVLYLISIPELDQPVXXPS

SEQ ID NO: 25090 - protein, 41 aa, Artificial Sequence; identical to SEQ ID NO: 4010
  GFR-binding peptide
  MOD_RES (2)..(4)..(39)..(40): Xaa is C or S
  MOD_RES (17)..(18)..(19)..(20)..(21): Xaa is A or G
  MOD_RES (22)..(23)..(24)..(25): Xaa is A or G or is absent

SEQ ID NO: 25091 - protein, 36 aa, Artificial Sequence; identical to SEQ ID NO: 4011
  GFR-binding peptide
  MOD_RES (2)..(34)..(35): Xaa is C or S

SEQ ID NO: 25092 - protein, 38 aa, Artificial Sequence; identical to SEQ ID NO: 4012
  GFR-binding peptide
  MOD_RES (2)..(33)..(34): Xaa is C or S

SEQ ID NO: 25093 - protein, 34 aa, Artificial Sequence
  GFR-binding peptide
  MOD_RES (34)..(34): Xaa is C or S
  MOD_RES (12)..(13)..(14)..(15)..(16): Xaa is A or G
  MOD_RES (17)..(18)..(19)..(20): Xaa is A or G or is absent
AEVVMDEYQKYXXXXXXXXXIYLISIPSLRAPVX

SEQ ID NO: 25094 - protein, 41 aa, Artificial Sequence
  GFR-binding peptide
  MOD_RES (2)..(4)..(38)..(39): Xaa is C or S
  MOD_RES (16)..(17)..(18)..(19)..(20): Xaa is A or G
  MOD_RES (21)..(22)..(23)..(24): Xaa is A or G or is absent
RXGXESVAMGRYKKLXXXXXXXXXFYLISIANLKTPVXXAK

SEQ ID NO: 25095 - protein, 40 aa, Artificial Sequence
  GFR-binding peptide
  MOD_RES (2)..(4)..(36)..(37): Xaa is C or S
HXGXAKVVMNEYKFKIVNNSSDLYLVSIPELKTPAXXAKP

SEQ ID NO: 25096 - protein, 41 aa, Artificial Sequence
  GFR-binding peptide
  MOD_RES (1)..(3)..(37)..(38): Xaa is C or S
  MOD_RES (15)..(16)..(17)..(18)..(19): Xaa is A or G
  MOD_RES (20)..(21)..(22)..(23): Xaa is A or G or is absent
XGXESVAMGYHYKLXXXXXXXXXKYLISIPSLKTPVXXAKS

SEQ ID NO: 25097 - protein, 38 aa, Artificial Sequence; identical to SEQ ID NO: 4023
  GFR-binding peptide
  MOD_RES (2)..(4)..(37)..(38): Xaa is C or S

SEQ ID NO: 25098 - protein, 37 aa, Artificial Sequence; identical to SEQ ID NO: 4024
  GFR-binding peptide
  MOD_RES (1)..(3)..(35)..(36): Xaa is C or S

SEQ ID NO: 25099 - protein, 36 aa, Artificial Sequence
  GFR-binding peptide
  MOD_RES (1)..(3)..(36): Xaa is C or S
XGXEAVSMGEEYKFKTPVGMDDLYLVSIPELKTPVX

SEQ ID NO: 25100 - protein, 39 aa, Artificial Sequence
  GFR-binding peptide
  MOD_RES (2)..(34)..(35): Xaa is C or S
GXAEVVMDEYQKYVVNNAADIYLISIPSLRAPVXXSAPA

SEQ ID NO: 25101 - protein, 37 aa, Artificial Sequence; identical to SEQ ID NO: 4025
  GFR-binding peptide
  MOD_RES (2)..(36)..(37): Xaa is C or S
  MOD_RES (14)..(15)..(16)..(17)..(18): Xaa is A or G
  MOD_RES (19)..(20)..(21)..(22): Xaa is A or G or is absent

SEQ ID NO: 25102 - protein, 40 aa, Artificial Sequence
  GFR-binding peptide
  MOD_RES (1)..(3)..(37)..(38): Xaa is C or S
  MOD_RES (15)..(16)..(17)..(18)..(19): Xaa is A or G
  MOD_RES (20)..(21)..(22)..(23): Xaa is A or G or is absent
XGXESVAMGEYQKYXXXXXXXXXIYLISIPSLKTPVXXAK

SEQ ID NO: 25103 - protein, 33 aa, Artificial Sequence
  GFR-binding peptide
  MOD_RES (31)..(32): Xaa is C or S
SKVVMEYQKYVKPTRGVIYLISIPSLDQPVXXP

SEQ ID NO: 25104 - protein, 36 aa, Artificial Sequence; identical to SEQ ID NO: 4029
  GFR-binding peptide
  MOD_RES (33)..(34): Xaa is C or S

SEQ ID NO: 25105 - protein, 36 aa, Artificial Sequence
  GFR-binding peptide
  MOD_RES (31)..(32): Xaa is C or S
EVVMDEYKFKVVNNAADLYLISIPELRAPVXXSAPA

SEQ ID NO: 25106 - protein, 36 aa, Artificial Sequence; identical to SEQ ID NO: 4030
  GFR-binding peptide
  MOD_RES (1)..(36): Xaa is C or S
  MOD_RES (14)..(15)..(16)..(17)..(18): Xaa is A or G
  MOD_RES (19)..(20)..(21)..(22): Xaa is A or G or is absent

SEQ ID NO: 25107 - protein, 39 aa, Artificial Sequence
  GFR-binding peptide
  MOD_RES (1)..(3)..(37)..(38): Xaa is C or S
  MOD_RES (15)..(16)..(17)..(18)..(19): Xaa is A or G
  MOD_RES (20)..(21)..(22)..(23): Xaa is A or G or is absent
XGXGEVVMEEYKFKXXXXXXXXXLYLMSIPELETPVXXA

SEQ ID NO: 25108 - protein, 41 aa, Artificial Sequence
  GFR-binding peptide
  MOD_RES (2)..(4)..(36)..(37): Xaa is C or S
HXGXSRVVMNEYKFKIVNSSDDLYLVSIPELKTPAXXPKPV

SEQ ID NO: 25109 - protein, 41 aa, Artificial Sequence; identical to SEQ ID NO: 4033
  GFR-binding peptide
  MOD_RES (1)..(3)..(37)..(38): Xaa is C or S
  MOD_RES (15)..(16)..(17)..(18)..(19): Xaa is A or G
  MOD_RES (20)..(21)..(22)..(23): Xaa is A or G or is absent

SEQ ID NO: 25110 - protein, 40 aa, Artificial Sequence
  GFR-binding peptide
  MOD_RES (1)..(35)..(36): Xaa is C or S
  MOD_RES (13)..(14)..(15)..(16)..(17): Xaa is A or G
  MOD_RES (18)..(19)..(20)..(21): Xaa is A or G or is absent
XAEVVMDEYKFKXXXXXXXXXLYLISIPELRAPVXXSAPA

SEQ ID NO: 25111 - protein, 33 aa, Artificial Sequence; identical to SEQ ID NO: 4034
  GFR-binding peptide
  MOD_RES (1)..(1): Xaa is C or S
  MOD_RES (12)..(13)..(14)..(15)..(16): Xaa is A or G
  MOD_RES (17)..(18)..(19)..(20): Xaa is A or G or is absent

SEQ ID NO: 25112 - protein, 40 aa, Artificial Sequence; identical to SEQ ID NO: 4035
  GFR-binding peptide
  MOD_RES (1)..(34)..(35): Xaa is C or S

SEQ ID NO: 25113 - protein, 35 aa, Artificial Sequence; identical to SEQ ID NO: 4036
  GFR-binding peptide
  MOD_RES (33)..(34): Xaa is C or S
  MOD_RES (11)..(12)..(13)..(14)..(15): Xaa is A or G
  MOD_RES (16)..(17)..(18)..(19): Xaa is A or G or is absent

SEQ ID NO: 25114 - protein, 37 aa, Artificial Sequence; identical to SEQ ID NO: 4037
  GFR-binding peptide
  MOD_RES (2)..(35)..(36): Xaa is C or S
  MOD_RES (13)..(14)..(15)..(16)..(17): Xaa is A or G
  MOD_RES (18)..(19)..(20)..(21): Xaa is A or G or is absent

SEQ ID NO: 25115 - protein, 39 aa, Artificial Sequence
  GFR-binding peptide
  MOD_RES (1)..(34)..(35): Xaa is C or S
  MOD_RES (12)..(13)..(14)..(15)..(16): Xaa is A or G
  MOD_RES (17)..(18)..(19)..(20): Xaa is A or G or is absent
XSKVIMEYKFKXXXXXXXXXLYLISIPELDQSVXXPSAS

SEQ ID NO: 25116 - protein, 37 aa, Artificial Sequence
  GFR-binding peptide
  MOD_RES (2)..(4): Xaa is C or S
  MOD_RES (16)..(17)..(18)..(19)..(20): Xaa is A or G
  MOD_RES (21)..(22)..(23)..(24): Xaa is A or G or is absent
HXGXSRVVMNEYQKYXXXXXXXXXIYLVSIPSLKTPA

SEQ ID NO: 25117 - protein, 37 aa, Artificial Sequence
  GFR-binding peptide
  MOD_RES (2)..(4)..(36)..(37): Xaa is C or S
HXGXARVVMNEYKFKIVNSSDDLYLVSIPELQTPAXX

SEQ ID NO: 25118 - protein, 36 aa, Artificial Sequence
  GFR-binding peptide
  MOD_RES (2)..(36): Xaa is C or S
  MOD_RES (14)..(15)..(16)..(17)..(18): Xaa is A or G
  MOD_RES (19)..(20)..(21)..(22): Xaa is A or G or is absent
GXESVAMGRYKKLXXXXXXXXXFYLISIANLKTPVX

SEQ ID NO: 25119 - protein, 34 aa, Artificial Sequence
  GFR-binding peptide
  MOD_RES (31)..(32): Xaa is C or S
SVAMGEYKFKYTVVGKDLYLISIPELKTPVXXAK

SEQ ID NO: 25120 - protein, 38 aa, Artificial Sequence; identical to SEQ ID NO: 4041
  GFR-binding peptide
  MOD_RES (1)..(34)..(35): Xaa is C or S
  MOD_RES (12)..(13)..(14)..(15)..(16): Xaa is A or G
  MOD_RES (17)..(18)..(19)..(20): Xaa is A or G or is absent

SEQ ID NO: 25121 - protein, 39 aa, Artificial Sequence
  GFR-binding peptide
  MOD_RES (1)..(3)..(35)..(36): Xaa is C or S
XGXESVAMGRYKKLYTVVGKDFYLISIANLKTPVXXAKS

SEQ ID NO: 25122 - protein, 36 aa, Artificial Sequence; identical to SEQ ID NO: 4045
  GFR-binding peptide
  MOD_RES (2)..(2): Xaa is C or S
  MOD_RES (15)..(16)..(17)..(18)..(19): Xaa is A or G
  MOD_RES (20)..(21)..(22)..(23): Xaa is A or G or is absent

SEQ ID NO: 25123 - protein, 33 aa, Artificial Sequence
  GFR-binding peptide
  MOD_RES (31)..(32): Xaa is C or S
SKVIMEYQKYIKPTKGIIYLISIPSLDQSVXXP

SEQ ID NO: 25124 - protein, 40 aa, Artificial Sequence; identical to SEQ ID NO: 4050
  GFR-binding peptide
  MOD_RES (2)..(35)..(36): Xaa is C or S
  MOD_RES (13)..(14)..(15)..(16)..(17): Xaa is A or G
  MOD_RES (18)..(19)..(20)..(21): Xaa is A or G or is absent

SEQ ID NO: 25125 - protein, 34 aa, Artificial Sequence
  GFR-binding peptide
  MOD_RES (33)..(34): Xaa is C or S
  MOD_RES (11)..(12)..(13)..(14)..(15): Xaa is A or G
  MOD_RES (16)..(17)..(18)..(19): Xaa is A or G or is absent
SVAMGEYQKYXXXXXXXXXIYLISIPSLKTPVXX

SEQ ID NO: 25126 - protein, 37 aa, Artificial Sequence
  GFR-binding peptide
  MOD_RES (2)..(34)..(35): Xaa is C or S
GXAEVVMDYHYKLVVNNAADKYLISIPSLRAPVXXSA

SEQ ID NO: 25127 - protein, 32 aa, Artificial Sequence
  GFR-binding peptide
  MOD_RES (31)..(32): Xaa is C or S
SVAMGEYKFKYTVVGKDLYLISIPELKTPVXX

SEQ ID NO: 25128 - protein, 39 aa, Artificial Sequence; identical to SEQ ID NO: 4054
  GFR-binding peptide
  MOD_RES (33)..(34): Xaa is C or S
  MOD_RES (11)..(12)..(13)..(14)..(15): Xaa is A or G
  MOD_RES (16)..(17)..(18)..(19): Xaa is A or G or is absent

SEQ ID NO: 25129 - protein, 42 aa, Artificial Sequence; identical to SEQ ID NO: 4055
  GFR-binding peptide
  MOD_RES (1)..(36)..(37): Xaa is C or S
  MOD_RES (14)..(15)..(16)..(17)..(18): Xaa is A or G
  MOD_RES (19)..(20)..(21)..(22): Xaa is A or G or is absent

SEQ ID NO: 25130 - protein, 37 aa, Artificial Sequence
  GFR-binding peptide
  MOD_RES (2)..(35)..(36): Xaa is C or S
  MOD_RES (13)..(14)..(15)..(16)..(17): Xaa is A or G
  MOD_RES (18)..(19)..(20)..(21): Xaa is A or G or is absent
KXSKVIMEYKFKXXXXXXXXXLYLISIPELDQSVXXP

SEQ ID NO: 25131 - protein, 38 aa, Artificial Sequence; identical to SEQ ID NO: 4058
  GFR-binding peptide
  MOD_RES (2)..(4)..(36)..(37): Xaa is C or S

SEQ ID NO: 25132 - protein, 39 aa, Artificial Sequence
  GFR-binding peptide
  MOD_RES (1)..(35)..(36): Xaa is C or S
  MOD_RES (13)..(14)..(15)..(16)..(17): Xaa is A or G
  MOD_RES (18)..(19)..(20)..(21): Xaa is A or G or is absent
XGEVVMEEYQKYXXXXXXXXXIYLMSIPSLETPVXXAKP

SEQ ID NO: 25133 - protein, 40 aa, Artificial Sequence
  GFR-binding peptide
  MOD_RES (2)..(4)..(37)..(38): Xaa is C or S
RXGXEAVSMGEEYQKYTPVGMDDIYLVSIPSLKTPVXXAK

SEQ ID NO: 25134 - protein, 40 aa, Artificial Sequence; identical to SEQ ID NO: 4062
  GFR-binding peptide
  MOD_RES (1)..(3)..(37)..(38): Xaa is C or S
  MOD_RES (15)..(16)..(17)..(18)..(19): Xaa is A or G
  MOD_RES (20)..(21)..(22)..(23): Xaa is A or G or is absent

SEQ ID NO: 25135 - protein, 36 aa, Artificial Sequence
  GFR-binding peptide
  MOD_RES (34)..(35): Xaa is C or S
  MOD_RES (12)..(13)..(14)..(15)..(16): Xaa is A or G
  MOD_RES (17)..(18)..(19)..(20): Xaa is A or G or is absent
AKVVMNEYKFKXXXXXXXXXLYLVSIPELKTPAXXA

SEQ ID NO: 25136 - protein, 37 aa, Artificial Sequence
  GFR-binding peptide
  MOD_RES (31)..(32): Xaa is C or S
SVAMGYHYKLYTVVGKDKYLISIPSLKTPVXXAKSAK

SEQ ID NO: 25137 - protein, 37 aa, Artificial Sequence; identical to SEQ ID NO: 4063
  GFR-binding peptide
  MOD_RES (1)..(34)..(35): Xaa is C or S
  MOD_RES (12)..(13)..(14)..(15)..(16): Xaa is A or G
  MOD_RES (17)..(18)..(19)..(20): Xaa is A or G or is absent

SEQ ID NO: 25138 - protein, 39 aa, Artificial Sequence
  GFR-binding peptide
  MOD_RES (2)..(4)..(37)..(38): Xaa is C or S
  MOD_RES (15)..(16)..(17)..(18)..(19): Xaa is A or G
  MOD_RES (20)..(21)..(22)..(23): Xaa is A or G or is absent
SXKXSRVIMEYQKYXXXXXXXXXIYLISIPSLAQPVXXP

SEQ ID NO: 25139 - protein, 32 aa, Artificial Sequence; identical to SEQ ID NO: 4064
  GFR-binding peptide
  MOD_RES (2)..(2): Xaa is C or S

SEQ ID NO: 25140 - protein, 35 aa, Artificial Sequence; identical to SEQ ID NO: 4066
  GFR-binding peptide
  MOD_RES (1)..(32)..(33): Xaa is C or S

SEQ ID NO: 25141 - protein, 36 aa, Artificial Sequence
  GFR-binding peptide
  MOD_RES (1)..(3)..(36): Xaa is C or S
XGXEAVSMGEEYQKYTPVGMDDIYLVSIPSLKTPVX

SEQ ID NO: 25142 - protein, 35 aa, Artificial Sequence
  GFR-binding peptide
  MOD_RES (33)..(34): Xaa is C or S
  MOD_RES (11)..(12)..(13)..(14)..(15): Xaa is A or G
  MOD_RES (16)..(17)..(18)..(19): Xaa is A or G or is absent
EVVMEEYKFKXXXXXXXXXLYLMSIPELETPVXXA

SEQ ID NO: 25143 - protein, 35 aa, Artificial Sequence; identical to SEQ ID NO: 4069
  GFR-binding peptide
  MOD_RES (33)..(34): Xaa is C or S
  MOD_RES (11)..(12)..(13)..(14)..(15): Xaa is A or G
  MOD_RES (16)..(17)..(18)..(19): Xaa is A or G or is absent

SEQ ID NO: 25144 - protein, 38 aa, Artificial Sequence
  GFR-binding peptide
  MOD_RES (34)..(34): Xaa is C or S
  MOD_RES (12)..(13)..(14)..(15)..(16): Xaa is A or G
  MOD_RES (17)..(18)..(19)..(20): Xaa is A or G or is absent
SRVVMNEYKFKXXXXXXXXXLYLVSIPELKTPAXTPKT

SEQ ID NO: 25145 - protein, 39 aa, Artificial Sequence
  GFR-binding peptide
  MOD_RES (2)..(4)..(38): Xaa is C or S
  MOD_RES (16)..(17)..(18)..(19)..(20): Xaa is A or G
  MOD_RES (21)..(22)..(23)..(24): Xaa is A or G or is absent
HXGXSRVVMNEYQKYXXXXXXXXXIYLVSIPSLKTPAXT

SEQ ID NO: 25146 - protein, 39 aa, Artificial Sequence; identical to SEQ ID NO: 4073
  GFR-binding peptide
  MOD_RES (1)..(35)..(36): Xaa is C or S
  MOD_RES (13)..(14)..(15)..(16)..(17): Xaa is A or G
  MOD_RES (18)..(19)..(20)..(21): Xaa is A or G or is absent

SEQ ID NO: 25147 - protein, 37 aa, Artificial Sequence
  GFR-binding peptide
  MOD_RES (2)..(4): Xaa is C or S
  MOD_RES (16)..(17)..(18)..(19)..(20): Xaa is A or G
  MOD_RES (21)..(22)..(23)..(24): Xaa is A or G or is absent
RXGXGEVVMDEYKFKXXXXXXXXXLYLMSIPELETPV

SEQ ID NO: 25148 - protein, 32 aa, Artificial Sequence
  GFR-binding peptide
  MOD_RES (1)..(32): Xaa is C or S
XSKVVMEYKFKVKPTRGVLYLISIPELDQPVX

SEQ ID NO: 25149 - protein, 37 aa, Artificial Sequence; identical to SEQ ID NO: 4077
  GFR-binding peptide
  MOD_RES (1)..(32)..(33): Xaa is C or S

SEQ ID NO: 25150 - protein, 38 aa, Artificial Sequence
  GFR-binding peptide
  MOD_RES (32)..(33): Xaa is C or S
AEVVMDYHYKLVVNNAADKYLISIPSLRAPVXXSAPAA

SEQ ID NO: 25151 - protein, 36 aa, Artificial Sequence
  GFR-binding peptide
  MOD_RES (32)..(33): Xaa is C or S
SRVVMNEYKFKIVNSSDDLYLVSIPELKTPAXXPKP

SEQ ID NO: 25152 - protein, 33 aa, Artificial Sequence
  GFR-binding peptide
  MOD_RES (2)..(2): Xaa is C or S
GXAEVVMDYHYKLVVNNAADKYLISIPSLRAPV

SEQ ID NO: 25153 - protein, 38 aa, Artificial Sequence
  GFR-binding peptide
  MOD_RES (2)..(4)..(35)..(36): Xaa is C or S
SXKXSKVVMEYKFKVKPTRGVLYLISIPELDQPVXXPS

SEQ ID NO: 25154 - protein, 38 aa, Artificial Sequence
  GFR-binding peptide
  MOD_RES (2)..(36)..(37): Xaa is C or S
  MOD_RES (14)..(15)..(16)..(17)..(18): Xaa is A or G
  MOD_RES (19)..(20)..(21)..(22): Xaa is A or G or is absent
GXAEVVMDRYKKLXXXXXXXXXFYLISIANLRAPVXXS

SEQ ID NO: 25155 - protein, 39 aa, Artificial Sequence
  GFR-binding peptide
  MOD_RES (1)..(3)..(35): Xaa is C or S
XGXSRVVMNEYKFKIVNSSDDLYLVSIPELKTPAXTPKT

SEQ ID NO: 25156 - protein, 36 aa, Artificial Sequence
  GFR-binding peptide
  MOD_RES (33)..(34): Xaa is C or S
  MOD_RES (11)..(12)..(13)..(14)..(15): Xaa is A or G
  MOD_RES (16)..(17)..(18)..(19): Xaa is A or G or is absent
EVVMDEYKFKXXXXXXXXXLYLISIPELRAPVXXSA

SEQ ID NO: 25157 - protein, 41 aa, Artificial Sequence
  GFR-binding peptide
  MOD_RES (2)..(36)..(37): Xaa is C or S
  MOD_RES (14)..(15)..(16)..(17)..(18): Xaa is A or G
  MOD_RES (19)..(20)..(21)..(22): Xaa is A or G or is absent
GXESVAMGRYKKLXXXXXXXXXFYLISIANLKTPVXXAKSA

SEQ ID NO: 25158 - protein, 34 aa, Artificial Sequence
  GFR-binding peptide
  MOD_RES (32)..(32): Xaa is C or S
SRVVMNEYQKYIVNSSDDIYLVSIPSLKTPAXTP

SEQ ID NO: 25159 - protein, 39 aa, Artificial Sequence; identical to SEQ ID NO: 4079
  GFR-binding peptide
  MOD_RES (2)..(4)..(38)..(39): Xaa is C or S
  MOD_RES (16)..(17)..(18)..(19)..(20): Xaa is A or G
  MOD_RES (21)..(22)..(23)..(24): Xaa is A or G or is absent

SEQ ID NO: 25160 - protein, 41 aa, Artificial Sequence; identical to SEQ ID NO: 4080
  GFR-binding peptide
  MOD_RES (35)..(36): Xaa is C or S
  MOD_RES (13)..(14)..(15)..(16)..(17): Xaa is A or G
  MOD_RES (18)..(19)..(20)..(21): Xaa is A or G or is absent

SEQ ID NO: 25161 - protein, 37 aa, Artificial Sequence; identical to SEQ ID NO: 4084
  GFR-binding peptide
  MOD_RES (2)..(4): Xaa is C or S
  MOD_RES (16)..(17)..(18)..(19)..(20): Xaa is A or G
  MOD_RES (21)..(22)..(23)..(24): Xaa is A or G or is absent

SEQ ID NO: 25162 - protein, 35 aa, Artificial Sequence
  GFR-binding peptide
  MOD_RES (31)..(32): Xaa is C or S
EVVMDEYQKYVVKENEDIYLMSIPSLETPVXXAKP

SEQ ID NO: 25163 - protein, 36 aa, Artificial Sequence; identical to SEQ ID NO: 4090
  GFR-binding peptide
  MOD_RES (33)..(34): Xaa is C or S
  MOD_RES (11)..(12)..(13)..(14)..(15): Xaa is A or G
  MOD_RES (16)..(17)..(18)..(19): Xaa is A or G or is absent

SEQ ID NO: 25164 - protein, 39 aa, Artificial Sequence; identical to SEQ ID NO: 4091
  GFR-binding peptide
  MOD_RES (2)..(34): Xaa is C or S

SEQ ID NO: 25165 - protein, 40 aa, Artificial Sequence; identical to SEQ ID NO: 4098
  GFR-binding peptide
  MOD_RES (1)..(3)..(34)..(35): Xaa is C or S

SEQ ID NO: 25166 - protein, 34 aa, Artificial Sequence; identical to SEQ ID NO: 4100
  GFR-binding peptide
  MOD_RES (1)..(34): Xaa is C or S
  MOD_RES (12)..(13)..(14)..(15)..(16): Xaa is A or G
  MOD_RES (17)..(18)..(19)..(20): Xaa is A or G or is absent

SEQ ID NO: 25167 - protein, 38 aa, Artificial Sequence; identical to SEQ ID NO: 4101
  GFR-binding peptide
  MOD_RES (1)..(32)..(33): Xaa is C or S

SEQ ID NO: 25168 - protein, 37 aa, Artificial Sequence; identical to SEQ ID NO: 4102
  GFR-binding peptide
  MOD_RES (2)..(37): Xaa is C or S
  MOD_RES (15)..(16)..(17)..(18)..(19): Xaa is A or G
  MOD_RES (20)..(21)..(22)..(23): Xaa is A or G or is absent

SEQ ID NO: 25169 - protein, 39 aa, Artificial Sequence; identical to SEQ ID NO: 4104
  GFR-binding peptide
  MOD_RES (1)..(3)..(34)..(35): Xaa is C or S

SEQ ID NO: 25170 - protein, 38 aa, Artificial Sequence; identical to SEQ ID NO: 4105
  GFR-binding peptide
  MOD_RES (2)..(35)..(36): Xaa is C or S

SEQ ID NO: 25171 - protein, 38 aa, Artificial Sequence
  GFR-binding peptide
  MOD_RES (1)..(3)..(37)..(38): Xaa is C or S
  MOD_RES (15)..(16)..(17)..(18)..(19): Xaa is A or G
  MOD_RES (20)..(21)..(22)..(23): Xaa is A or G or is absent
XGXAEVVMDYHYKLXXXXXXXXXKYLISIPSLRAPVXX

SEQ ID NO: 25172 - protein, 36 aa, Artificial Sequence
  GFR-binding peptide
  MOD_RES (1)..(35)..(36): Xaa is C or S
  MOD_RES (13)..(14)..(15)..(16)..(17): Xaa is A or G
  MOD_RES (18)..(19)..(20)..(21): Xaa is A or G or is absent
XSRVVMNEYKFKXXXXXXXXXLYLVSIPELKTPAXX

SEQ ID NO: 25173 - protein, 44 aa, Artificial Sequence
  GFR-binding peptide
  MOD_RES (2)..(4)..(38)..(39): Xaa is C or S
  MOD_RES (16)..(17)..(18)..(19)..(20): Xaa is A or G
  MOD_RES (21)..(22)..(23)..(24): Xaa is A or G or is absent
HXGXARVVMNEYQKYXXXXXXXXXIYLVSIPSLQTPAXXPKPVT

SEQ ID NO: 25174 - protein, 44 aa, Artificial Sequence
  GFR-binding peptide
  MOD_RES (2)..(4)..(38)..(39): Xaa is C or S
  MOD_RES (16)..(17)..(18)..(19)..(20): Xaa is A or G
  MOD_RES (21)..(22)..(23)..(24): Xaa is A or G or is absent
RXGXESVAMGEYQKYXXXXXXXXXIYLISIPSLKTPVXXAKSAK

SEQ ID NO: 25175 - protein, 37 aa, Artificial Sequence; identical to SEQ ID NO: 4110
  GFR-binding peptide
  MOD_RES (1)..(34)..(35): Xaa is C or S

SEQ ID NO: 25176 - protein, 41 aa, Artificial Sequence; identical to SEQ ID NO: 4111
  GFR-binding peptide
  MOD_RES (2)..(36)..(37): Xaa is C or S
  MOD_RES (14)..(15)..(16)..(17)..(18): Xaa is A or G
  MOD_RES (19)..(20)..(21)..(22): Xaa is A or G or is absent

SEQ ID NO: 25177 - protein, 37 aa, Artificial Sequence
  GFR-binding peptide
  MOD_RES (2)..(37): Xaa is C or S
  MOD_RES (15)..(16)..(17)..(18)..(19): Xaa is A or G
  MOD_RES (20)..(21)..(22)..(23): Xaa is A or G or is absent
GXEAVSMGEEYQKYXXXXXXXXXIYLVSIPSLKTPVX

SEQ ID NO: 25178 - protein, 38 aa, Artificial Sequence; identical to SEQ ID NO: 4112
  GFR-binding peptide
  MOD_RES (1)..(3)..(34)..(35): Xaa is C or S

SEQ ID NO: 25179 - protein, 37 aa, Artificial Sequence; identical to SEQ ID NO: 4115
  GFR-binding peptide
  MOD_RES (1)..(33)..(34): Xaa is C or S

SEQ ID NO: 25180 - protein, 35 aa, Artificial Sequence
  GFR-binding peptide
  MOD_RES (34)..(35): Xaa is C or S
  MOD_RES (12)..(13)..(14)..(15)..(16): Xaa is A or G
  MOD_RES (17)..(18)..(19)..(20): Xaa is A or G or is absent
AEVVMDEYQKYXXXXXXXXXIYLISIPSLRAPVXX

SEQ ID NO: 25181 - protein, 40 aa, Artificial Sequence
  GFR-binding peptide
  MOD_RES (2)..(4)..(38)..(39): Xaa is C or S
  MOD_RES (16)..(17)..(18)..(19)..(20): Xaa is A or G
  MOD_RES (21)..(22)..(23)..(24): Xaa is A or G or is absent
RXGXGEVVMEEYQKYXXXXXXXXXIYLMSIPSLETPVXXA

SEQ ID NO: 25182 - protein, 36 aa, Artificial Sequence; identical to SEQ ID NO: 4120
  GFR-binding peptide
  MOD_RES (1)..(33)..(34): Xaa is C or S

SEQ ID NO: 25183 - protein, 32 aa, Artificial Sequence
  GFR-binding peptide
  MOD_RES (2)..(2): Xaa is C or S
KXSKVVMEYQKYVKPTRGVIYLISIPSLDQPV

SEQ ID NO: 25184 - protein, 37 aa, Artificial Sequence; identical to SEQ ID NO: 4124
  GFR-binding peptide
  MOD_RES (2)..(4)..(36)..(37): Xaa is C or S

SEQ ID NO: 25185 - protein, 35 aa, Artificial Sequence; identical to SEQ ID NO: 4125
  GFR-binding peptide
  MOD_RES (1)..(32)..(33): Xaa is C or S

SEQ ID NO: 25186 - protein, 37 aa, Artificial Sequence
  GFR-binding peptide
  MOD_RES (1)..(34)..(35): Xaa is C or S
XEAVSMGEEYQKYTPVGMDDIYLVSIPSLKTPVXXAK

SEQ ID NO: 25187 - protein, 38 aa, Artificial Sequence; identical to SEQ ID NO: 4128
  GFR-binding peptide
  MOD_RES (34)..(35): Xaa is C or S
  MOD_RES (12)..(13)..(14)..(15)..(16): Xaa is A or G
  MOD_RES (17)..(18)..(19)..(20): Xaa is A or G or is absent

SEQ ID NO: 25188 - protein, 37 aa, Artificial Sequence; identical to SEQ ID NO: 4129
  GFR-binding peptide
  MOD_RES (1)..(32)..(33): Xaa is C or S

SEQ ID NO: 25189 - protein, 37 aa, Artificial Sequence; identical to SEQ ID NO: 4134
  GFR-binding peptide
  MOD_RES (1)..(33)..(34): Xaa is C or S

SEQ ID NO: 25190 - protein, 35 aa, Artificial Sequence
  GFR-binding peptide
  MOD_RES (2)..(34)..(35): Xaa is C or S
GXAKVVMNEYQKYIVNNSSDIYLVSIPSLKTPAXX

SEQ ID NO: 25191 - protein, 37 aa, Artificial Sequence; identical to SEQ ID NO: 4136
  GFR-binding peptide
  MOD_RES (2)..(36)..(37): Xaa is C or S
  MOD_RES (14)..(15)..(16)..(17)..(18): Xaa is A or G
  MOD_RES (19)..(20)..(21)..(22): Xaa is A or G or is absent

SEQ ID NO: 25192 - protein, 38 aa, Artificial Sequence; identical to SEQ ID NO: 4137
  GFR-binding peptide
  MOD_RES (2)..(34)..(35): Xaa is C or S

SEQ ID NO: 25193 - protein, 43 aa, Artificial Sequence
  GFR-binding peptide
  MOD_RES (2)..(4)..(39)..(40): Xaa is C or S
  MOD_RES (17)..(18)..(19)..(20)..(21): Xaa is A or G
  MOD_RES (22)..(23)..(24)..(25): Xaa is A or G or is absent
RXGXEAVSMGEEYQKYXXXXXXXXXIYLVSIPSLKTPVXXAKG

SEQ ID NO: 25194 - protein, 31 aa, Artificial Sequence
  GFR-binding peptide
  MOD_RES (31)..(31): Xaa is C or S
SVAMGYHYKLYTVVGKDKYLISIPSLKTPVX

SEQ ID NO: 25195 - protein, 37 aa, Artificial Sequence
  GFR-binding peptide
  MOD_RES (1)..(35)..(36): Xaa is C or S
  MOD_RES (13)..(14)..(15)..(16)..(17): Xaa is A or G
  MOD_RES (18)..(19)..(20)..(21): Xaa is A or G or is absent
XSRVVMNEYKFKXXXXXXXXXLYLVSIPELKTPAXXP

SEQ ID NO: 25196 - protein, 40 aa, Artificial Sequence; identical to SEQ ID NO: 4140
  GFR-binding peptide
  MOD_RES (2)..(37)..(38): Xaa is C or S
  MOD_RES (15)..(16)..(17)..(18)..(19): Xaa is A or G
  MOD_RES (20)..(21)..(22)..(23): Xaa is A or G or is absent

SEQ ID NO: 25197 - protein, 37 aa, Artificial Sequence
  GFR-binding peptide
  MOD_RES (31)..(32): Xaa is C or S
SVAMGEYKFKYTVVGKDLYLISIPELKTPVXXAKSAK

SEQ ID NO: 25198 - protein, 35 aa, Artificial Sequence
  GFR-binding peptide
  MOD_RES (2)..(2): Xaa is C or S
  MOD_RES (14)..(15)..(16)..(17)..(18): Xaa is A or G
  MOD_RES (19)..(20)..(21)..(22): Xaa is A or G or is absent
GXAEVVMDRYKKLXXXXXXXXXFYLISIANLRAPV

SEQ ID NO: 25199 - protein, 36 aa, Artificial Sequence
  GFR-binding peptide
  MOD_RES (1)..(3)..(36): Xaa is C or S
  MOD_RES (14)..(15)..(16)..(17)..(18): Xaa is A or G
  MOD_RES (19)..(20)..(21)..(22): Xaa is A or G or is absent
XKXSRVIMEYKFKXXXXXXXXXLYLISIPELAQPVX

SEQ ID NO: 25200 - protein, 38 aa, Artificial Sequence; identical to SEQ ID NO: 4146
  GFR-binding peptide
  MOD_RES (34)..(35): Xaa is C or S
  MOD_RES (12)..(13)..(14)..(15)..(16): Xaa is A or G
  MOD_RES (17)..(18)..(19)..(20): Xaa is A or G or is absent

SEQ ID NO: 25201 - protein, 37 aa, Artificial Sequence
  GFR-binding peptide
  MOD_RES (2)..(4)..(36)..(37): Xaa is C or S
HXGXARVVMNEYQKYIVNSSDDIYLVSIPSLQTPAXX

SEQ ID NO: 25202 - protein, 35 aa, Artificial Sequence
  GFR-binding peptide
  MOD_RES (1)..(3)..(35): Xaa is C or S
XGXGEVVMDEYKFKVVKENEDLYLMSIPELETPVX

SEQ ID NO: 25203 - protein, 44 aa, Artificial Sequence
  GFR-binding peptide
  MOD_RES (2)..(4)..(38)..(39): Xaa is C or S
  MOD_RES (16)..(17)..(18)..(19)..(20): Xaa is A or G
  MOD_RES (21)..(22)..(23)..(24): Xaa is A or G or is absent
RXGXAEVVMDYHYKLXXXXXXXXXKYLISIPSLRAPVXXSAPAA

SEQ ID NO: 25204 - protein, 37 aa, Artificial Sequence
  GFR-binding peptide
  MOD_RES (2)..(33)..(34): Xaa is C or S
KXSRVIMEYQKYVKPKRGVIYLISIPSLAQPVXXPAA

SEQ ID NO: 25205 - protein, 38 aa, Artificial Sequence
  GFR-binding peptide
  MOD_RES (2)..(4)..(38): Xaa is C or S
  MOD_RES (16)..(17)..(18)..(19)..(20): Xaa is A or G
  MOD_RES (21)..(22)..(23)..(24): Xaa is A or G or is absent
RXGXAEVVMDYHYKLXXXXXXXXXKYLISIPSLRAPVX

SEQ ID NO: 25206 - protein, 34 aa, Artificial Sequence
  GFR-binding peptide
  MOD_RES (1)..(3)..(34): Xaa is C or S
XKXSKVVMEYKFKVKPTRGVLYLISIPELDQPVX

SEQ ID NO: 25207 - protein, 32 aa, Artificial Sequence
  GFR-binding peptide
  MOD_RES (31)..(32): Xaa is C or S
SVAMGYHYKLYTVVGKDKYLISIPSLKTPVXX

SEQ ID NO: 25208 - protein, 40 aa, Artificial Sequence; identical to SEQ ID NO: 4150
  GFR-binding peptide
  MOD_RES (1)..(34)..(35): Xaa is C or S
  MOD_RES (12)..(13)..(14)..(15)..(16): Xaa is A or G
  MOD_RES (17)..(18)..(19)..(20): Xaa is A or G or is absent

SEQ ID NO: 25209 - protein, 35 aa, Artificial Sequence; identical to SEQ ID NO: 4151
  GFR-binding peptide
  MOD_RES (1)..(3)..(35): Xaa is C or S

SEQ ID NO: 25210 - protein, 34 aa, Artificial Sequence; identical to SEQ ID NO: 4152
  GFR-binding peptide
  MOD_RES (2)..(2): Xaa is C or S
  MOD_RES (13)..(14)..(15)..(16)..(17): Xaa is A or G
  MOD_RES (18)..(19)..(20)..(21): Xaa is A or G or is absent

SEQ ID NO: 25211 - protein, 32 aa, Artificial Sequence; identical to SEQ ID NO: 4153
  GFR-binding peptide
  MOD_RES (2)..(2): Xaa is C or S

SEQ ID NO: 25212 - protein, 37 aa, Artificial Sequence
  GFR-binding peptide
  MOD_RES (1)..(33)..(34): Xaa is C or S
XAKVVMNEYKFKIVNNSSDLYLVSIPELKTPAXXAKP

SEQ ID NO: 25213 - protein, 34 aa, Artificial Sequence
  GFR-binding peptide
  MOD_RES (2)..(34): Xaa is C or S
GXAKVVMNEYKFKIVNNSSDLYLVSIPELKTPAX

SEQ ID NO: 25214 - protein, 34 aa, Artificial Sequence
  GFR-binding peptide
  MOD_RES (33)..(34): Xaa is C or S
  MOD_RES (11)..(12)..(13)..(14)..(15): Xaa is A or G
  MOD_RES (16)..(17)..(18)..(19): Xaa is A or G or is absent
RVVMNEYKFKXXXXXXXXXLYLVSIPELQTPAXX

SEQ ID NO: 25215 - protein, 36 aa, Artificial Sequence
  GFR-binding peptide
  MOD_RES (1)..(3)..(35)..(36): Xaa is C or S
XGXESVAMGYHYKLYTVVGKDKYLISIPSLKTPVXX

SEQ ID NO: 25216 - protein, 36 aa, Artificial Sequence
  GFR-binding peptide
  MOD_RES (1)..(33)..(34): Xaa is C or S
XAKVVMNEYKFKIVNNSSDLYLVSIPELKTPAXXAK

SEQ ID NO: 25217 - protein, 42 aa, Artificial Sequence
  GFR-binding peptide
  MOD_RES (2)..(4)..(36)..(37): Xaa is C or S
RXGXGEVVMEEYQKYVVKDYEDIYLMSIPSLETPVXXAKPIS

SEQ ID NO: 25218 - protein, 33 aa, Artificial Sequence; identical to SEQ ID NO: 4158
  GFR-binding peptide
  MOD_RES (31)..(32): Xaa is C or S

SEQ ID NO: 25219 - protein, 38 aa, Artificial Sequence; identical to SEQ ID NO: 4160
  GFR-binding peptide
  MOD_RES (2)..(36)..(37): Xaa is C or S
  MOD_RES (14)..(15)..(16)..(17)..(18): Xaa is A or G
  MOD_RES (19)..(20)..(21)..(22): Xaa is A or G or is absent

SEQ ID NO: 25220 - protein, 36 aa, Artificial Sequence
  GFR-binding peptide
  MOD_RES (1)..(3)..(35)..(36): Xaa is C or S
XGXAKVVMNEYKFKIVNNSSDLYLVSIPELKTPAXX

SEQ ID NO: 25221 - protein, 40 aa, Artificial Sequence; identical to SEQ ID NO: 4161
  GFR-binding peptide
  MOD_RES (2)..(34)..(35): Xaa is C or S

SEQ ID NO: 25222 - protein, 37 aa, Artificial Sequence; identical to SEQ ID NO: 4162
  GFR-binding peptide
  MOD_RES (2)..(4)..(36)..(37): Xaa is C or S

SEQ ID NO: 25223 - protein, 36 aa, Artificial Sequence
  GFR-binding peptide
  MOD_RES (33)..(34): Xaa is C or S
  MOD_RES (11)..(12)..(13)..(14)..(15): Xaa is A or G
  MOD_RES (16)..(17)..(18)..(19): Xaa is A or G or is absent
SKVVMEYQKYXXXXXXXXXIYLISIPSLDQPVXXPS

SEQ ID NO: 25224 - protein, 35 aa, Artificial Sequence; identical to SEQ ID NO: 4163
  GFR-binding peptide
  MOD_RES (31)..(32): Xaa is C or S

SEQ ID NO: 25225 - protein, 40 aa, Artificial Sequence; identical to SEQ ID NO: 4164
  GFR-binding peptide
  MOD_RES (2)..(36): Xaa is C or S
  MOD_RES (14)..(15)..(16)..(17)..(18): Xaa is A or G
  MOD_RES (19)..(20)..(21)..(22): Xaa is A or G or is absent

SEQ ID NO: 25226 - protein, 37 aa, Artificial Sequence
  GFR-binding peptide
  MOD_RES (2)..(34)..(35): Xaa is C or S
GXAEVVMDEYQKYVVNNAADIYLISIPSLRAPVXXSA

SEQ ID NO: 25227 - protein, 41 aa, Artificial Sequence
  GFR-binding peptide
  MOD_RES (1)..(3)..(35)..(36): Xaa is C or S
XGXARVVMNEYKFKIVNSSDDLYLVSIPELQTPAXXPKPVT

SEQ ID NO: 25228 - protein, 34 aa, Artificial Sequence; identical to SEQ ID NO: 4170
  GFR-binding peptide
  MOD_RES (33)..(34): Xaa is C or S

SEQ ID NO: 25229 - protein, 35 aa, Artificial Sequence; identical to SEQ ID NO: 4171
  GFR-binding peptide
  MOD_RES (32)..(33): Xaa is C or S

SEQ ID NO: 25230 - protein, 34 aa, Artificial Sequence
  GFR-binding peptide
  MOD_RES (1)..(3)..(34): Xaa is C or S
XKXSKVIMEYKFKIKPTKGILYLISIPELDQSVX

SEQ ID NO: 25231 - protein, 38 aa, Artificial Sequence; identical to SEQ ID NO: 4174
  GFR-binding peptide
  MOD_RES (2)..(4)..(38): Xaa is C or S
  MOD_RES (16)..(17)..(18)..(19)..(20): Xaa is A or G
  MOD_RES (21)..(22)..(23)..(24): Xaa is A or G or is absent

SEQ ID NO: 25232 - protein, 36 aa, Artificial Sequence; identical to SEQ ID NO: 4175
  GFR-binding peptide
  MOD_RES (2)..(4): Xaa is C or S

SEQ ID NO: 25233 - protein, 43 aa, Artificial Sequence; identical to SEQ ID NO: 4179
  GFR-binding peptide
  MOD_RES (2)..(4)..(38)..(39): Xaa is C or S
  MOD_RES (16)..(17)..(18)..(19)..(20): Xaa is A or G
  MOD_RES (21)..(22)..(23)..(24): Xaa is A or G or is absent

SEQ ID NO: 25234 - protein, 39 aa, Artificial Sequence; identical to SEQ ID NO: 4181
  GFR-binding peptide
  MOD_RES (1)..(34)..(35): Xaa is C or S
  MOD_RES (12)..(13)..(14)..(15)..(16): Xaa is A or G
  MOD_RES (17)..(18)..(19)..(20): Xaa is A or G or is absent

SEQ ID NO: 25235 - protein, 40 aa, Artificial Sequence
  GFR-binding peptide
  MOD_RES (2)..(4)..(36)..(37): Xaa is C or S
RXGXESVAMGEYKFKYTVVGKDLYLISIPELKTPVXXAKS

SEQ ID NO: 25236 - protein, 35 aa, Artificial Sequence; identical to SEQ ID NO: 4183
  GFR-binding peptide
  MOD_RES (1)..(33)..(34): Xaa is C or S

SEQ ID NO: 25237 - protein, 36 aa, Artificial Sequence
  GFR-binding peptide
  MOD_RES (1)..(33)..(34): Xaa is C or S
XESVAMGEYQKYYTVVGKDIYLISIPSLKTPVXXAK

SEQ ID NO: 25238 - protein, 38 aa, Artificial Sequence; identical to SEQ ID NO: 4186
  GFR-binding peptide
  MOD_RES (1)..(32)..(33): Xaa is C or S

SEQ ID NO: 25239 - protein, 44 aa, Artificial Sequence; identical to SEQ ID NO: 4188
  GFR-binding peptide
  MOD_RES (2)..(4)..(39)..(40): Xaa is C or S
  MOD_RES (17)..(18)..(19)..(20)..(21): Xaa is A or G
  MOD_RES (22)..(23)..(24)..(25): Xaa is A or G or is absent

SEQ ID NO: 25240 - protein, 33 aa, Artificial Sequence
  GFR-binding peptide
  MOD_RES (32)..(33): Xaa is C or S
AKVVMNEYKFKIVNNSSDLYLVSIPELKTPAXX

SEQ ID NO: 25241 - protein, 41 aa, Artificial Sequence
  GFR-binding peptide
  MOD_RES (1)..(35)..(36): Xaa is C or S
  MOD_RES (13)..(14)..(15)..(16)..(17): Xaa is A or G
  MOD_RES (18)..(19)..(20)..(21): Xaa is A or G or is absent
XAEVVMDEYKFKXXXXXXXXXLYLISIPELRAPVXXSAPAA

SEQ ID NO: 25242 - protein, 34 aa, Artificial Sequence; identical to SEQ ID NO: 4189
  GFR-binding peptide
  MOD_RES (32)..(33): Xaa is C or S

SEQ ID NO: 25243 - protein, 38 aa, Artificial Sequence
  GFR-binding peptide
  MOD_RES (1)..(3)..(37)..(38): Xaa is C or S
  MOD_RES (15)..(16)..(17)..(18)..(19): Xaa is A or G
  MOD_RES (20)..(21)..(22)..(23): Xaa is A or G or is absent
XGXAKVVMNEYQKYXXXXXXXXXIYLVSIPSLKTPAXX

SEQ ID NO: 25244 - protein, 31 aa, Artificial Sequence
  GFR-binding peptide
  MOD_RES (1)..(1): Xaa is C or S
XSKVIMEYKFKIKPTKGILYLISIPELDQSV

SEQ ID NO: 25245 - protein, 36 aa, Artificial Sequence; identical to SEQ ID NO: 4191
  GFR-binding peptide
  MOD_RES (31)..(32): Xaa is C or S

SEQ ID NO: 25246 - protein, 33 aa, Artificial Sequence
  GFR-binding peptide
  MOD_RES (1)..(3): Xaa is C or S
XKXSKVVMEYKFKVKPTRGVLYLISIPELDQPV

SEQ ID NO: 25247 - protein, 41 aa, Artificial Sequence; identical to SEQ ID NO: 4193
  GFR-binding peptide
  MOD_RES (1)..(3)..(37)..(38): Xaa is C or S
  MOD_RES (15)..(16)..(17)..(18)..(19): Xaa is A or G
  MOD_RES (20)..(21)..(22)..(23): Xaa is A or G or is absent

SEQ ID NO: 25248 - protein, 37 aa, Artificial Sequence; identical to SEQ ID NO: 4194
  GFR-binding peptide
  MOD_RES (2)..(34)..(35): Xaa is C or S

SEQ ID NO: 25249 - protein, 42 aa, Artificial Sequence; identical to SEQ ID NO: 4195
  GFR-binding peptide
  MOD_RES (1)..(3)..(36)..(37): Xaa is C or S
  MOD_RES (14)..(15)..(16)..(17)..(18): Xaa is A or G
  MOD_RES (19)..(20)..(21)..(22): Xaa is A or G or is absent

SEQ ID NO: 25250 - protein, 37 aa, Artificial Sequence
  GFR-binding peptide
  MOD_RES (1)..(35)..(36): Xaa is C or S
  MOD_RES (13)..(14)..(15)..(16)..(17): Xaa is A or G
  MOD_RES (18)..(19)..(20)..(21): Xaa is A or G or is absent
XGEVVMDEYKFKXXXXXXXXXLYLMSIPELETPVXXA

SEQ ID NO: 25251 - protein, 38 aa, Artificial Sequence
  GFR-binding peptide
  MOD_RES (1)..(34)..(35): Xaa is C or S
  MOD_RES (12)..(13)..(14)..(15)..(16): Xaa is A or G
  MOD_RES (17)..(18)..(19)..(20): Xaa is A or G or is absent
XSKVIMEYKFKXXXXXXXXXLYLISIPELDQSVXXPSA

SEQ ID NO: 25252 - protein, 43 aa, Artificial Sequence
  GFR-binding peptide
  MOD_RES (1)..(3)..(37)..(38): Xaa is C or S
  MOD_RES (15)..(16)..(17)..(18)..(19): Xaa is A or G
  MOD_RES (20)..(21)..(22)..(23): Xaa is A or G or is absent
XGXAEVVMDEYQKYXXXXXXXXXIYLISIPSLRAPVXXSAPAA

SEQ ID NO: 25253 - protein, 36 aa, Artificial Sequence
  GFR-binding peptide
  MOD_RES (2)..(36): Xaa is C or S
  MOD_RES (14)..(15)..(16)..(17)..(18): Xaa is A or G
  MOD_RES (19)..(20)..(21)..(22): Xaa is A or G or is absent
GXGEVVMEEYQKYXXXXXXXXXIYLMSIPSLETPVX

SEQ ID NO: 25254 - protein, 35 aa, Artificial Sequence; identical to SEQ ID NO: 4199
  GFR-binding peptide
  MOD_RES (1)..(33)..(34): Xaa is C or S

SEQ ID NO: 25255 - protein, 34 aa, Artificial Sequence
  GFR-binding peptide
  MOD_RES (1)..(3): Xaa is C or S
XGXGEVVMDEYQKYVVKENEDIYLMSIPSLETPV

SEQ ID NO: 25256 - protein, 41 aa, Artificial Sequence; identical to SEQ ID NO: 4201
  GFR-binding peptide
  MOD_RES (2)..(4)..(35)..(36): Xaa is C or S

SEQ ID NO: 25257 - protein, 32 aa, Artificial Sequence; identical to SEQ ID NO: 4202
  GFR-binding peptide
  MOD_RES (11)..(12)..(13)..(14)..(15): Xaa is A or G
  MOD_RES (16)..(17)..(18)..(19): Xaa is A or G or is absent

SEQ ID NO: 25258 - protein, 38 aa, Artificial Sequence
  GFR-binding peptide
  MOD_RES (33)..(34): Xaa is C or S
  MOD_RES (11)..(12)..(13)..(14)..(15): Xaa is A or G
  MOD_RES (16)..(17)..(18)..(19): Xaa is A or G or is absent
EVVMDYHYKLXXXXXXXXXKYLISIPSLRAPVXXSAPA

SEQ ID NO: 25259 - protein, 44 aa, Artificial Sequence
  GFR-binding peptide
  MOD_RES (2)..(4)..(38)..(39): Xaa is C or S
  MOD_RES (16)..(17)..(18)..(19)..(20): Xaa is A or G
  MOD_RES (21)..(22)..(23)..(24): Xaa is A or G or is absent
RXGXGEVVMDEYKFKXXXXXXXXXLYLMSIPELETPVXXAKPIK

SEQ ID NO: 25260 - protein, 37 aa, Artificial Sequence
  GFR-binding peptide
  MOD_RES (2)..(4)..(35)..(36): Xaa is C or S
SXKXSKVVMEYKFKVKPTRGVLYLISIPELDQPVXXP

SEQ ID NO: 25261 - protein, 36 aa, Artificial Sequence
  GFR-binding peptide
  MOD_RES (32)..(33): Xaa is C or S
AEVVMDEYKFKVVNNAADLYLISIPELRAPVXXSAP

SEQ ID NO: 25262 - protein, 34 aa, Artificial Sequence; identical to SEQ ID NO: 4204
  GFR-binding peptide
  MOD_RES (31)..(32): Xaa is C or S

SEQ ID NO: 25263 - protein, 33 aa, Artificial Sequence
  GFR-binding peptide
  MOD_RES (1)..(3): Xaa is C or S
XKXSKVIMEYKFKIKPTKGILYLISIPELDQSV

SEQ ID NO: 25264 - protein, 37 aa, Artificial Sequence; identical to SEQ ID NO: 4205
  GFR-binding peptide
  MOD_RES (1)..(3)..(37): Xaa is C or S
  MOD_RES (15)..(16)..(17)..(18)..(19): Xaa is A or G
  MOD_RES (20)..(21)..(22)..(23): Xaa is A or G or is absent

SEQ ID NO: 25265 - protein, 38 aa, Artificial Sequence; identical to SEQ ID NO: 4207
  GFR-binding peptide
  MOD_RES (2)..(36)..(37): Xaa is C or S
  MOD_RES (14)..(15)..(16)..(17)..(18): Xaa is A or G
  MOD_RES (19)..(20)..(21)..(22): Xaa is A or G or is absent

SEQ ID NO: 25266 - protein, 40 aa, Artificial Sequence
  GFR-binding peptide
  MOD_RES (2)..(4)..(36)..(37): Xaa is C or S
RXGXESVAMGEYQKYYTVVGKDIYLISIPSLKTPVXXAKS

SEQ ID NO: 25267 - protein, 33 aa, Artificial Sequence
  GFR-binding peptide
  MOD_RES (32)..(32): Xaa is C or S
SRVVMNEYKFKIVNSSDDLYLVSIPELKTPAXT

SEQ ID NO: 25268 - protein, 32 aa, Artificial Sequence
  GFR-binding peptide
  MOD_RES (1)..(32): Xaa is C or S
XSKVIMEYKFKIKPTKGILYLISIPELDQSVX

SEQ ID NO: 25269 - protein, 37 aa, Artificial Sequence
  GFR-binding peptide
  MOD_RES (34)..(35): Xaa is C or S
  MOD_RES (12)..(13)..(14)..(15)..(16): Xaa is A or G
  MOD_RES (17)..(18)..(19)..(20): Xaa is A or G or is absent
AEVVMDEYKFKXXXXXXXXXLYLISIPELRAPVXXSA

SEQ ID NO: 25270 - protein, 33 aa, Artificial Sequence; identical to SEQ ID NO: 4211
  GFR-binding peptide
  MOD_RES (33)..(33): Xaa is C or S
  MOD_RES (11)..(12)..(13)..(14)..(15): Xaa is A or G
  MOD_RES (16)..(17)..(18)..(19): Xaa is A or G or is absent

SEQ ID NO: 25271 - protein, 37 aa, Artificial Sequence
  GFR-binding peptide
  MOD_RES (2)..(34)..(35): Xaa is C or S
GXGEVVMDEYQKYVVKENEDIYLMSIPSLETPVXXAK

SEQ ID NO: 25272 - protein, 33 aa, Artificial Sequence
  GFR-binding peptide
  MOD_RES (2)..(33): Xaa is C or S
KXSKVVMEYKFKVKPTRGVLYLISIPELDQPVX

SEQ ID NO: 25273 - protein, 36 aa, Artificial Sequence; identical to SEQ ID NO: 4213
  GFR-binding peptide
  MOD_RES (2)..(35)..(36): Xaa is C or S
  MOD_RES (13)..(14)..(15)..(16)..(17): Xaa is A or G
  MOD_RES (18)..(19)..(20)..(21): Xaa is A or G or is absent

SEQ ID NO: 25274 - protein, 39 aa, Artificial Sequence
  GFR-binding peptide
  MOD_RES (2)..(34): Xaa is C or S
GXSRVVMNEYQKYIVNSSDDIYLVSIPSLKTPAXTPKTV

SEQ ID NO: 25275 - protein, 37 aa, Artificial Sequence; identical to SEQ ID NO: 4215
  GFR-binding peptide
  MOD_RES (1)..(35)..(36): Xaa is C or S
  MOD_RES (13)..(14)..(15)..(16)..(17): Xaa is A or G
  MOD_RES (18)..(19)..(20)..(21): Xaa is A or G or is absent

SEQ ID NO: 25276 - protein, 36 aa, Artificial Sequence
  GFR-binding peptide
  MOD_RES (1)..(35)..(36): Xaa is C or S
  MOD_RES (13)..(14)..(15)..(16)..(17): Xaa is A or G
  MOD_RES (18)..(19)..(20)..(21): Xaa is A or G or is absent
XESVAMGEYKFKXXXXXXXXXLYLISIPELKTPVXX

SEQ ID NO: 25277 - protein, 30 aa, Artificial Sequence; identical to SEQ ID NO: 4217
  GFR-binding peptide

SEQ ID NO: 25278 - protein, 32 aa, Artificial Sequence; identical to SEQ ID NO: 4220
  GFR-binding peptide
  MOD_RES (1)..(32): Xaa is C or S

SEQ ID NO: 25279 - protein, 31 aa, Artificial Sequence; identical to SEQ ID NO: 4221
  GFR-binding peptide
  MOD_RES (1)..(1): Xaa is C or S

SEQ ID NO: 25280 - protein, 37 aa, Artificial Sequence; identical to SEQ ID NO: 4223
  GFR-binding peptide
  MOD_RES (2)..(36)..(37): Xaa is C or S
  MOD_RES (14)..(15)..(16)..(17)..(18): Xaa is A or G
  MOD_RES (19)..(20)..(21)..(22): Xaa is A or G or is absent

SEQ ID NO: 25281 - protein, 36 aa, Artificial Sequence
  GFR-binding peptide
  MOD_RES (1)..(3): Xaa is C or S
  MOD_RES (15)..(16)..(17)..(18)..(19): Xaa is A or G
  MOD_RES (20)..(21)..(22)..(23): Xaa is A or G or is absent
XGXESVAMGYHYKLXXXXXXXXXKYLISIPSLKTPV

SEQ ID NO: 25282 - protein, 36 aa, Artificial Sequence; identical to SEQ ID NO: 4224
  GFR-binding peptide
  MOD_RES (2)..(4)..(35)..(36): Xaa is C or S

SEQ ID NO: 25283 - protein, 34 aa, Artificial Sequence
  GFR-binding peptide
  MOD_RES (33)..(34): Xaa is C or S
  MOD_RES (11)..(12)..(13)..(14)..(15): Xaa is A or G
  MOD_RES (16)..(17)..(18)..(19): Xaa is A or G or is absent
EVVMDEYQKYXXXXXXXXXIYLISIPSLRAPVXX

SEQ ID NO: 25284 - protein, 39 aa, Artificial Sequence
  GFR-binding peptide
  MOD_RES (33)..(34): Xaa is C or S
  MOD_RES (11)..(12)..(13)..(14)..(15): Xaa is A or G
  MOD_RES (16)..(17)..(18)..(19): Xaa is A or G or is absent
EVVMDYHYKLXXXXXXXXXKYLISIPSLRAPVXXSAPAA

SEQ ID NO: 25285 - protein, 40 aa, Artificial Sequence; identical to SEQ ID NO: 4226
  GFR-binding peptide
  MOD_RES (1)..(3)..(34)..(35): Xaa is C or S

SEQ ID NO: 25286 - protein, 38 aa, Artificial Sequence; identical to SEQ ID NO: 4227
  GFR-binding peptide
  MOD_RES (1)..(34)..(35): Xaa is C or S
  MOD_RES (12)..(13)..(14)..(15)..(16): Xaa is A or G
  MOD_RES (17)..(18)..(19)..(20): Xaa is A or G or is absent

SEQ ID NO: 25287 - protein, 39 aa, Artificial Sequence; identical to SEQ ID NO: 4229
  GFR-binding peptide
  MOD_RES (1)..(33)..(34): Xaa is C or S

SEQ ID NO: 25288 - protein, 37 aa, Artificial Sequence
  GFR-binding peptide
  MOD_RES (2)..(4): Xaa is C or S
  MOD_RES (16)..(17)..(18)..(19)..(20): Xaa is A or G
  MOD_RES (21)..(22)..(23)..(24): Xaa is A or G or is absent
RXGXESVAMGEYKFKXXXXXXXXXLYLISIPELKTPV

SEQ ID NO: 25289 - protein, 38 aa, Artificial Sequence
  GFR-binding peptide
  MOD_RES (2)..(4)..(38): Xaa is C or S
  MOD_RES (16)..(17)..(18)..(19)..(20): Xaa is A or G
  MOD_RES (21)..(22)..(23)..(24): Xaa is A or G or is absent
RXGXESVAMGRYKKLXXXXXXXXXFYLISIANLKTPVX

SEQ ID NO: 25290 - protein, 37 aa, Artificial Sequence; identical to SEQ ID NO: 4230
  GFR-binding peptide
  MOD_RES (2)..(4)..(35)..(36): Xaa is C or S

SEQ ID NO: 25291 - protein, 35 aa, Artificial Sequence
  GFR-binding peptide
  MOD_RES (31)..(32): Xaa is C or S
RVVMNEYQKYIVNSSDDIYLVSIPSLKTPAXXPKP

SEQ ID NO: 25292 - protein, 39 aa, Artificial Sequence
  GFR-binding peptide
  MOD_RES (1)..(34)..(35): Xaa is C or S
  MOD_RES (12)..(13)..(14)..(15)..(16): Xaa is A or G
  MOD_RES (17)..(18)..(19)..(20): Xaa is A or G or is absent
XSRVIMEYKFKXXXXXXXXXLYLISIPELAQPVXXPAAS

SEQ ID NO: 25293 - protein, 40 aa, Artificial Sequence
  GFR-binding peptide
  MOD_RES (34)..(35): Xaa is C or S
  MOD_RES (12)..(13)..(14)..(15)..(16): Xaa is A or G
  MOD_RES (17)..(18)..(19)..(20): Xaa is A or G or is absent
AKVVMNEYKFKXXXXXXXXXLYLVSIPELKTPAXXAKPVA

SEQ ID NO: 25294 - protein, 35 aa, Artificial Sequence; identical to SEQ ID NO: 4233
  GFR-binding peptide
  MOD_RES (1)..(3)..(34)..(35): Xaa is C or S

SEQ ID NO: 25295 - protein, 42 aa, Artificial Sequence; identical to SEQ ID NO: 4234
  GFR-binding peptide
  MOD_RES (2)..(4)..(37)..(38): Xaa is C or S
  MOD_RES (15)..(16)..(17)..(18)..(19): Xaa is A or G
  MOD_RES (20)..(21)..(22)..(23): Xaa is A or G or is absent

SEQ ID NO: 25296 - protein, 38 aa, Artificial Sequence; identical to SEQ ID NO: 4236
  GFR-binding peptide
  MOD_RES (1)..(33)..(34): Xaa is C or S

SEQ ID NO: 25297 - protein, 41 aa, Artificial Sequence
  GFR-binding peptide
  MOD_RES (2)..(4)..(38): Xaa is C or S
  MOD_RES (16)..(17)..(18)..(19)..(20): Xaa is A or G
  MOD_RES (21)..(22)..(23)..(24): Xaa is A or G or is absent
HXGXSRVVMNEYKFKXXXXXXXXXLYLVSIPELKTPAXTPK

SEQ ID NO: 25298 - protein, 37 aa, Artificial Sequence; identical to SEQ ID NO: 4246
  GFR-binding peptide
  MOD_RES (2)..(35)..(36): Xaa is C or S
  MOD_RES (13)..(14)..(15)..(16)..(17): Xaa is A or G
  MOD_RES (18)..(19)..(20)..(21): Xaa is A or G or is absent

SEQ ID NO: 25299 - protein, 38 aa, Artificial Sequence; identical to SEQ ID NO: 4249
  GFR-binding peptide
  MOD_RES (1)..(33): Xaa is C or S

SEQ ID NO: 25300 - protein, 37 aa, Artificial Sequence
  GFR-binding peptide
  MOD_RES (1)..(3)..(34)..(35): Xaa is C or S
XKXSKVIMEYQKYIKPTKGIIYLISIPSLDQSVXXPS

SEQ ID NO: 25301 - protein, 35 aa, Artificial Sequence
  GFR-binding peptide
  MOD_RES (1)..(3)..(35): Xaa is C or S
XGXAEVVMDRYKKLVVNNAADFYLISIANLRAPVX

SEQ ID NO: 25302 - protein, 35 aa, Artificial Sequence; identical to SEQ ID NO: 4251
  GFR-binding peptide
  MOD_RES (2)..(4)..(35): Xaa is C or S

SEQ ID NO: 25303 - protein, 34 aa, Artificial Sequence
  GFR-binding peptide
  MOD_RES (1)..(33)..(34): Xaa is C or S
XAEVVMDRYKKLVVNNAADFYLISIANLRAPVXX

SEQ ID NO: 25304 - protein, 35 aa, Artificial Sequence; identical to SEQ ID NO: 4252
  GFR-binding peptide
  MOD_RES (1)..(3)..(35): Xaa is C or S

SEQ ID NO: 25305 - protein, 39 aa, Artificial Sequence
  GFR-binding peptide
  MOD_RES (1)..(3)..(37)..(38): Xaa is C or S
  MOD_RES (15)..(16)..(17)..(18)..(19): Xaa is A or G
  MOD_RES (20)..(21)..(22)..(23): Xaa is A or G or is absent
XGXESVAMGRYKKLXXXXXXXXXFYLISIANLKTPVXXA

SEQ ID NO: 25306 - protein, 33 aa, Artificial Sequence
  GFR-binding peptide
  MOD_RES (1)..(33): Xaa is C or S
XESVAMGEYKFKYTVVGKDLYLISIPELKTPVX

SEQ ID NO: 25307 - protein, 33 aa, Artificial Sequence
  GFR-binding peptide
  MOD_RES (12)..(13)..(14)..(15)..(16): Xaa is A or G
  MOD_RES (17)..(18)..(19)..(20): Xaa is A or G or is absent
AEVVMDEYKFKXXXXXXXXXLYLISIPELRAPV

SEQ ID NO: 25308 - protein, 38 aa, Artificial Sequence
  GFR-binding peptide
  MOD_RES (32)..(32): Xaa is C or S
SRVVMNEYQKYIVNSSDDIYLVSIPSLKTPAXTPKTVH

SEQ ID NO: 25309 - protein, 37 aa, Artificial Sequence
  GFR-binding peptide
  MOD_RES (1)..(35)..(36): Xaa is C or S
  MOD_RES (13)..(14)..(15)..(16)..(17): Xaa is A or G
  MOD_RES (18)..(19)..(20)..(21): Xaa is A or G or is absent
XAKVVMNEYQKYXXXXXXXXXIYLVSIPSLKTPAXXA

SEQ ID NO: 25310 - protein, 41 aa, Artificial Sequence; identical to SEQ ID NO: 4256
  GFR-binding peptide
  MOD_RES (2)..(4)..(36)..(37): Xaa is C or S

SEQ ID NO: 25311 - protein, 33 aa, Artificial Sequence
  GFR-binding peptide
  MOD_RES (1)..(32)..(33): Xaa is C or S
XSKVVMEYQKYVKPTRGVIYLISIPSLDQPVXX

SEQ ID NO: 25312 - protein, 32 aa, Artificial Sequence
  GFR-binding peptide
  MOD_RES (11)..(12)..(13)..(14)..(15): Xaa is A or G
  MOD_RES (16)..(17)..(18)..(19): Xaa is A or G or is absent
EVVMDRYKKLXXXXXXXXXFYLISIANLRAPV

SEQ ID NO: 25313 - protein, 39 aa, Artificial Sequence; identical to SEQ ID NO: 4258
  GFR-binding peptide
  MOD_RES (34)..(35): Xaa is C or S
  MOD_RES (12)..(13)..(14)..(15)..(16): Xaa is A or G
  MOD_RES (17)..(18)..(19)..(20): Xaa is A or G or is absent

SEQ ID NO: 25314 - protein, 39 aa, Artificial Sequence
  GFR-binding peptide
  MOD_RES (34)..(35): Xaa is C or S
  MOD_RES (12)..(13)..(14)..(15)..(16): Xaa is A or G
  MOD_RES (17)..(18)..(19)..(20): Xaa is A or G or is absent
ESVAMGEYQKYXXXXXXXXXIYLISIPSLKTPVXXAKSA

SEQ ID NO: 25315 - protein, 43 aa, Artificial Sequence
  GFR-binding peptide
  MOD_RES (2)..(4)..(37)..(38): Xaa is C or S
  MOD_RES (15)..(16)..(17)..(18)..(19): Xaa is A or G
  MOD_RES (20)..(21)..(22)..(23): Xaa is A or G or is absent
SXKXSKVVMEYQKYXXXXXXXXXIYLISIPSLDQPVXXPSASA

SEQ ID NO: 25316 - protein, 40 aa, Artificial Sequence
  GFR-binding peptide
  MOD_RES (2)..(4)..(38)..(39): Xaa is C or S
  MOD_RES (16)..(17)..(18)..(19)..(20): Xaa is A or G
  MOD_RES (21)..(22)..(23)..(24): Xaa is A or G or is absent
RXGXAEVVMDEYKFKXXXXXXXXXLYLISIPELRAPVXXS

SEQ ID NO: 25317 - protein, 39 aa, Artificial Sequence; identical to SEQ ID NO: 4262
  GFR-binding peptide
  MOD_RES (33)..(33): Xaa is C or S
  MOD_RES (11)..(12)..(13)..(14)..(15): Xaa is A or G
  MOD_RES (16)..(17)..(18)..(19): Xaa is A or G or is absent

SEQ ID NO: 25318 - protein, 34 aa, Artificial Sequence; identical to SEQ ID NO: 4264
  GFR-binding peptide
  MOD_RES (1)..(3)..(34): Xaa is C or S

SEQ ID NO: 25319 - protein, 37 aa, Artificial Sequence
  GFR-binding peptide
  MOD_RES (33)..(34): Xaa is C or S
  MOD_RES (11)..(12)..(13)..(14)..(15): Xaa is A or G
  MOD_RES (16)..(17)..(18)..(19): Xaa is A or G or is absent
EVVMDEYQKYXXXXXXXXXIYLMSIPSLETPVXXAKP

SEQ ID NO: 25320 - protein, 35 aa, Artificial Sequence
  GFR-binding peptide
  MOD_RES (2)..(33)..(34): Xaa is C or S
KXSKVIMEYQKYIKPTKGIIYLISIPSLDQSVXXP

SEQ ID NO: 25321 - protein, 33 aa, Artificial Sequence
  GFR-binding peptide
  MOD_RES (12)..(13)..(14)..(15)..(16): Xaa is A or G
  MOD_RES (17)..(18)..(19)..(20): Xaa is A or G or is absent
GEVVMDEYQKYXXXXXXXXXIYLMSIPSLETPV

SEQ ID NO: 25322 - protein, 40 aa, Artificial Sequence
  GFR-binding peptide
  MOD_RES (2)..(4)..(38)..(39): Xaa is C or S
  MOD_RES (16)..(17)..(18)..(19)..(20): Xaa is A or G
  MOD_RES (21)..(22)..(23)..(24): Xaa is A or G or is absent
RXGXAEVVMDRYKKLXXXXXXXXXFYLISIANLRAPVXXS

SEQ ID NO: 25323 - protein, 42 aa, Artificial Sequence; identical to SEQ ID NO: 4274
  GFR-binding peptide
  MOD_RES (2)..(4)..(37)..(38): Xaa is C or S

SEQ ID NO: 25324 - protein, 38 aa, Artificial Sequence
  GFR-binding peptide
  MOD_RES (2)..(34)..(35): Xaa is C or S
GXAKVVMNEYKFKIVNNSSDLYLVSIPELKTPAXXAKP

SEQ ID NO: 25325 - protein, 36 aa, Artificial Sequence; identical to SEQ ID NO: 4276
  GFR-binding peptide
  MOD_RES (1)..(35): Xaa is C or S
  MOD_RES (13)..(14)..(15)..(16)..(17): Xaa is A or G
  MOD_RES (18)..(19)..(20)..(21): Xaa is A or G or is absent

SEQ ID NO: 25326 - protein, 34 aa, Artificial Sequence; identical to SEQ ID NO: 4277
  GFR-binding peptide
  MOD_RES (1)..(1): Xaa is C or S
  MOD_RES (13)..(14)..(15)..(16)..(17): Xaa is A or G
  MOD_RES (18)..(19)..(20)..(21): Xaa is A or G or is absent

SEQ ID NO: 25327 - protein, 38 aa, Artificial Sequence
  GFR-binding peptide
  MOD_RES (32)..(33): Xaa is C or S
SRVVMNEYQKYIVNSSDDIYLVSIPSLKTPAXXPKPVY

SEQ ID NO: 25328 - protein, 33 aa, Artificial Sequence; identical to SEQ ID NO: 4281
  GFR-binding peptide
  MOD_RES (31)..(31): Xaa is C or S

SEQ ID NO: 25329 - protein, 34 aa, Artificial Sequence
  GFR-binding peptide
  MOD_RES (1)..(3): Xaa is C or S
XGXAEVVMDEYQKYVVNNAADIYLISIPSLRAPV

SEQ ID NO: 25330 - protein, 44 aa, Artificial Sequence; identical to SEQ ID NO: 4282
  GFR-binding peptide
  MOD_RES (2)..(4)..(38)..(39): Xaa is C or S
  MOD_RES (16)..(17)..(18)..(19)..(20): Xaa is A or G
  MOD_RES (21)..(22)..(23)..(24): Xaa is A or G or is absent

SEQ ID NO: 25331 - protein, 38 aa, Artificial Sequence
  GFR-binding peptide
  MOD_RES (32)..(33): Xaa is C or S
ESVAMGRYKKLYTVVGKDFYLISIANLKTPVXXAKSAK

SEQ ID NO: 25332 - protein, 41 aa, Artificial Sequence
  GFR-binding peptide
  MOD_RES (1)..(3)..(35)..(36): Xaa is C or S
XGXGEVVMEEYQKYVVKDYEDIYLMSIPSLETPVXXAKPIS

SEQ ID NO: 25333 - protein, 32 aa, Artificial Sequence
  GFR-binding peptide
  MOD_RES (1)..(1): Xaa is C or S
XARVVMNEYQKYIVNSSDDIYLVSIPSLQTPA

SEQ ID NO: 25334 - protein, 39 aa, Artificial Sequence
  GFR-binding peptide
  MOD_RES (1)..(33)..(34): Xaa is C or S
XGEVVMDEYKFKVVKENEDLYLMSIPELETPVXXAKPIK

SEQ ID NO: 25335 - protein, 42 aa, Artificial Sequence
  GFR-binding peptide
  MOD_RES (2)..(4)..(36)..(37): Xaa is C or S
RXGXGEVVMDEYQKYVVKENEDIYLMSIPSLETPVXXAKPIK

SEQ ID NO: 25336 - protein, 43 aa, Artificial Sequence; identical to SEQ ID NO: 4288
  GFR-binding peptide
  MOD_RES (1)..(3)..(37)..(38): Xaa is C or S
  MOD_RES (15)..(16)..(17)..(18)..(19): Xaa is A or G
  MOD_RES (20)..(21)..(22)..(23): Xaa is A or G or is absent

SEQ ID NO: 25337 - protein, 35 aa, Artificial Sequence
  GFR-binding peptide
  MOD_RES (32)..(32): Xaa is C or S
SRVVMNEYQKYIVNSSDDIYLVSIPSLKTPAXTPK

SEQ ID NO: 25338 - protein, 38 aa, Artificial Sequence
  GFR-binding peptide
  MOD_RES (2)..(33)..(34): Xaa is C or S
KXSKVVMEYQKYVKPTRGVIYLISIPSLDQPVXXPSAS

SEQ ID NO: 25339 - protein, 40 aa, Artificial Sequence; identical to SEQ ID NO: 4290
  GFR-binding peptide
  MOD_RES (2)..(35)..(36): Xaa is C or S
  MOD_RES (13)..(14)..(15)..(16)..(17): Xaa is A or G
  MOD_RES (18)..(19)..(20)..(21): Xaa is A or G or is absent

SEQ ID NO: 25340 - protein, 44 aa, Artificial Sequence
  GFR-binding peptide
  MOD_RES (2)..(4)..(38)..(39): Xaa is C or S
  MOD_RES (16)..(17)..(18)..(19)..(20): Xaa is A or G
  MOD_RES (21)..(22)..(23)..(24): Xaa is A or G or is absent
HXGXAKVVMNEYKFKXXXXXXXXXLYLVSIPELKTPAXXAKPVA

SEQ ID NO: 25341 - protein, 37 aa, Artificial Sequence
  GFR-binding peptide
  MOD_RES (33)..(34): Xaa is C or S
  MOD_RES (11)..(12)..(13)..(14)..(15): Xaa is A or G
  MOD_RES (16)..(17)..(18)..(19): Xaa is A or G or is absent
SKVVMEYKFKXXXXXXXXXLYLISIPELDQPVXXPSA

SEQ ID NO: 25342 - protein, 35 aa, Artificial Sequence
  GFR-binding peptide
  MOD_RES (31)..(32): Xaa is C or S
SKVIMEYKFKIKPTKGILYLISIPELDQSVXXPSA

SEQ ID NO: 25343 - protein, 37 aa, Artificial Sequence; identical to SEQ ID NO: 4292
  GFR-binding peptide
  MOD_RES (34)..(35): Xaa is C or S
  MOD_RES (12)..(13)..(14)..(15)..(16): Xaa is A or G
  MOD_RES (17)..(18)..(19)..(20): Xaa is A or G or is absent

SEQ ID NO: 25344 - protein, 41 aa, Artificial Sequence; identical to SEQ ID NO: 4293
  GFR-binding peptide
  MOD_RES (2)..(37)..(38): Xaa is C or S
  MOD_RES (15)..(16)..(17)..(18)..(19): Xaa is A or G
  MOD_RES (20)..(21)..(22)..(23): Xaa is A or G or is absent

SEQ ID NO: 25345 - protein, 36 aa, Artificial Sequence
  GFR-binding peptide
  MOD_RES (2)..(34)..(35): Xaa is C or S
GXESVAMGEYKFKYTVVGKDLYLISIPELKTPVXXA

SEQ ID NO: 25346 - protein, 36 aa, Artificial Sequence
  GFR-binding peptide
  MOD_RES (32)..(33): Xaa is C or S
ESVAMGEYQKYYTVVGKDIYLISIPSLKTPVXXAKS

SEQ ID NO: 25347 - protein, 38 aa, Artificial Sequence; identical to SEQ ID NO: 4294
  GFR-binding peptide
  MOD_RES (33)..(34): Xaa is C or S
  MOD_RES (11)..(12)..(13)..(14)..(15): Xaa is A or G
  MOD_RES (16)..(17)..(18)..(19): Xaa is A or G or is absent

SEQ ID NO: 25348 - protein, 33 aa, Artificial Sequence; identical to SEQ ID NO: 4295
  GFR-binding peptide
  MOD_RES (2)..(33): Xaa is C or S

SEQ ID NO: 25349 - protein, 40 aa, Artificial Sequence
  GFR-binding peptide
  MOD_RES (1)..(3)..(35)..(36): Xaa is C or S
XGXAEVVMDEYQKYVVNNAADIYLISIPSLRAPVXXSAPA

SEQ ID NO: 25350 - protein, 39 aa, Artificial Sequence; identical to SEQ ID NO: 4297
  GFR-binding peptide
  MOD_RES (2)..(4)..(38)..(39): Xaa is C or S
  MOD_RES (16)..(17)..(18)..(19)..(20): Xaa is A or G
  MOD_RES (21)..(22)..(23)..(24): Xaa is A or G or is absent

SEQ ID NO: 25351 - protein, 43 aa, Artificial Sequence
  GFR-binding peptide
  MOD_RES (2)..(4)..(38)..(39): Xaa is C or S
  MOD_RES (16)..(17)..(18)..(19)..(20): Xaa is A or G
  MOD_RES (21)..(22)..(23)..(24): Xaa is A or G or is absent
RXGXESVAMGEYKFKXXXXXXXXXLYLISIPELKTPVXXAKSA

SEQ ID NO: 25352 - protein, 38 aa, Artificial Sequence
  GFR-binding peptide
  MOD_RES (1)..(3)..(34)..(35): Xaa is C or S
XKXSKVVMEYQKYVKPTRGVIYLISIPSLDQPVXXPSA

SEQ ID NO: 25353 - protein, 37 aa, Artificial Sequence
  GFR-binding peptide
  MOD_RES (1)..(3)..(36)..(37): Xaa is C or S
  MOD_RES (14)..(15)..(16)..(17)..(18): Xaa is A or G
  MOD_RES (19)..(20)..(21)..(22): Xaa is A or G or is absent
XKXSKVIMEYKFKXXXXXXXXXLYLISIPELDQSVXX

SEQ ID NO: 25354 - protein, 33 aa, Artificial Sequence; identical to SEQ ID NO: 4298
  GFR-binding peptide
  MOD_RES (2)..(33): Xaa is C or S

SEQ ID NO: 25355 - protein, 37 aa, Artificial Sequence; identical to SEQ ID NO: 4299
  GFR-binding peptide
  MOD_RES (2)..(36)..(37): Xaa is C or S
  MOD_RES (14)..(15)..(16)..(17)..(18): Xaa is A or G
  MOD_RES (19)..(20)..(21)..(22): Xaa is A or G or is absent

SEQ ID NO: 25356 - protein, 33 aa, Artificial Sequence
  GFR-binding peptide
  MOD_RES (2)..(2): Xaa is C or S
GXGEVVMEEYQKYVVKDYEDIYLMSIPSLETPV

SEQ ID NO: 25357 - protein, 33 aa, Artificial Sequence
  GFR-binding peptide
  MOD_RES (31)..(32): Xaa is C or S
EVVMDEYKFKVVKENEDLYLMSIPELETPVXXA

SEQ ID NO: 25358 - protein, 34 aa, Artificial Sequence
  GFR-binding peptide
  MOD_RES (31)..(32): Xaa is C or S
SKVVMEYQKYVKPTRGVIYLISIPSLDQPVXXPS

SEQ ID NO: 25359 - protein, 40 aa, Artificial Sequence; identical to SEQ ID NO: 4301
  GFR-binding peptide
  MOD_RES (2)..(34): Xaa is C or S

SEQ ID NO: 25360 - protein, 36 aa, Artificial Sequence; identical to SEQ ID NO: 4302
  GFR-binding peptide
  MOD_RES (34)..(35): Xaa is C or S
  MOD_RES (12)..(13)..(14)..(15)..(16): Xaa is A or G
  MOD_RES (17)..(18)..(19)..(20): Xaa is A or G or is absent

SEQ ID NO: 25361 - protein, 40 aa, Artificial Sequence; identical to SEQ ID NO: 4305
  GFR-binding peptide
  MOD_RES (2)..(4)..(36)..(37): Xaa is C or S

SEQ ID NO: 25362 - protein, 31 aa, Artificial Sequence
  GFR-binding peptide
  MOD_RES (31)..(31): Xaa is C or S
SVAMGEYKFKYTVVGKDLYLISIPELKTPVX

SEQ ID NO: 25363 - protein, 32 aa, Artificial Sequence; identical to SEQ ID NO: 4308
  GFR-binding peptide
  MOD_RES (31)..(32): Xaa is C or S

SEQ ID NO: 25364 - protein, 41 aa, Artificial Sequence; identical to SEQ ID NO: 4311
  GFR-binding peptide
  MOD_RES (1)..(35)..(36): Xaa is C or S
  MOD_RES (13)..(14)..(15)..(16)..(17): Xaa is A or G
  MOD_RES (18)..(19)..(20)..(21): Xaa is A or G or is absent

SEQ ID NO: 25365 - protein, 32 aa, Artificial Sequence; identical to SEQ ID NO: 4313
  GFR-binding peptide
  MOD_RES (1)..(1): Xaa is C or S

SEQ ID NO: 25366 - protein, 34 aa, Artificial Sequence
  GFR-binding peptide
  MOD_RES (34)..(34): Xaa is C or S
  MOD_RES (12)..(13)..(14)..(15)..(16): Xaa is A or G
  MOD_RES (17)..(18)..(19)..(20): Xaa is A or G or is absent
SRVVMNEYQKYXXXXXXXXXIYLVSIPSLKTPAX

SEQ ID NO: 25367 - protein, 39 aa, Artificial Sequence
  GFR-binding peptide
  MOD_RES (2)..(4)..(38)..(39): Xaa is C or S
  MOD_RES (16)..(17)..(18)..(19)..(20): Xaa is A or G
  MOD_RES (21)..(22)..(23)..(24): Xaa is A or G or is absent
RXGXGEVVMEEYKFKXXXXXXXXXLYLMSIPELETPVXX

SEQ ID NO: 25368 - protein, 38 aa, Artificial Sequence; identical to SEQ ID NO: 4316
  GFR-binding peptide
  MOD_RES (1)..(3)..(35)..(36): Xaa is C or S

SEQ ID NO: 25369 - protein, 42 aa, Artificial Sequence
  GFR-binding peptide
  MOD_RES (2)..(4)..(38)..(39): Xaa is C or S
  MOD_RES (16)..(17)..(18)..(19)..(20): Xaa is A or G
  MOD_RES (21)..(22)..(23)..(24): Xaa is A or G or is absent
RXGXGEVVMDEYKFKXXXXXXXXXLYLMSIPELETPVXXAKP

SEQ ID NO: 25370 - protein, 39 aa, Artificial Sequence; identical to SEQ ID NO: 4317
  GFR-binding peptide
  MOD_RES (35)..(36): Xaa is C or S
  MOD_RES (13)..(14)..(15)..(16)..(17): Xaa is A or G
  MOD_RES (18)..(19)..(20)..(21): Xaa is A or G or is absent

SEQ ID NO: 25371 - protein, 32 aa, Artificial Sequence
  GFR-binding peptide
  MOD_RES (11)..(12)..(13)..(14)..(15): Xaa is A or G
  MOD_RES (16)..(17)..(18)..(19): Xaa is A or G or is absent
RVVMNEYQKYXXXXXXXXXIYLVSIPSLQTPA

SEQ ID NO: 25372 - protein, 39 aa, Artificial Sequence
  GFR-binding peptide
  MOD_RES (2)..(34)..(35): Xaa is C or S
GXARVVMNEYKFKIVNSSDDLYLVSIPELQTPAXXPKPV

SEQ ID NO: 25373 - protein, 41 aa, Artificial Sequence; identical to SEQ ID NO: 4318
  GFR-binding peptide
  MOD_RES (1)..(35): Xaa is C or S
  MOD_RES (13)..(14)..(15)..(16)..(17): Xaa is A or G
  MOD_RES (18)..(19)..(20)..(21): Xaa is A or G or is absent

SEQ ID NO: 25374 - protein, 38 aa, Artificial Sequence
  GFR-binding peptide
  MOD_RES (1)..(35)..(36): Xaa is C or S
  MOD_RES (13)..(14)..(15)..(16)..(17): Xaa is A or G
  MOD_RES (18)..(19)..(20)..(21): Xaa is A or G or is absent
XESVAMGYHYKLXXXXXXXXXKYLISIPSLKTPVXXAK

SEQ ID NO: 25375 - protein, 38 aa, Artificial Sequence
  GFR-binding peptide
  MOD_RES (2)..(4)..(36)..(37): Xaa is C or S
HXGXARVVMNEYQKYIVNSSDDIYLVSIPSLQTPAXXP

SEQ ID NO: 25376 - protein, 36 aa, Artificial Sequence; identical to SEQ ID NO: 4320
  GFR-binding peptide
  MOD_RES (2)..(36): Xaa is C or S
  MOD_RES (14)..(15)..(16)..(17)..(18): Xaa is A or G
  MOD_RES (19)..(20)..(21)..(22): Xaa is A or G or is absent

SEQ ID NO: 25377 - protein, 32 aa, Artificial Sequence
  GFR-binding peptide
  MOD_RES (31)..(32): Xaa is C or S
RVVMNEYKFKIVNSSDDLYLVSIPELQTPAXX

SEQ ID NO: 25378 - protein, 39 aa, Artificial Sequence
  GFR-binding peptide
  MOD_RES (2)..(4)..(35)..(36): Xaa is C or S
SXKXSRVIMEYQKYVKPKRGVIYLISIPSLAQPVXXPAA

SEQ ID NO: 25379 - protein, 38 aa, Artificial Sequence; identical to SEQ ID NO: 4321
  GFR-binding peptide
  MOD_RES (1)..(35): Xaa is C or S
  MOD_RES (13)..(14)..(15)..(16)..(17): Xaa is A or G
  MOD_RES (18)..(19)..(20)..(21): Xaa is A or G or is absent

SEQ ID NO: 25380 - protein, 39 aa, Artificial Sequence
  GFR-binding peptide
  MOD_RES (34)..(35): Xaa is C or S
  MOD_RES (12)..(13)..(14)..(15)..(16): Xaa is A or G
  MOD_RES (17)..(18)..(19)..(20): Xaa is A or G or is absent
ARVVMNEYKFKXXXXXXXXXLYLVSIPELQTPAXXPKPV

SEQ ID NO: 25381 - protein, 40 aa, Artificial Sequence
  GFR-binding peptide
  MOD_RES (1)..(34)..(35): Xaa is C or S
XEAVSMGEEYQKYTPVGMDDIYLVSIPSLKTPVXXAKGVK

SEQ ID NO: 25382 - protein, 39 aa, Artificial Sequence
  GFR-binding peptide
  MOD_RES (2)..(36)..(37): Xaa is C or S
  MOD_RES (14)..(15)..(16)..(17)..(18): Xaa is A or G
  MOD_RES (19)..(20)..(21)..(22): Xaa is A or G or is absent
GXGEVVMDEYQKYXXXXXXXXXIYLMSIPSLETPVXXAK

SEQ ID NO: 25383 - protein, 38 aa, Artificial Sequence; identical to SEQ ID NO: 4324
  GFR-binding peptide
  MOD_RES (2)..(34)..(35): Xaa is C or S

SEQ ID NO: 25384 - protein, 37 aa, Artificial Sequence
  GFR-binding peptide
  MOD_RES (1)..(33)..(34): Xaa is C or S
XESVAMGYHYKLYTVVGKDKYLISIPSLKTPVXXAKS

SEQ ID NO: 25385 - protein, 37 aa, Artificial Sequence; identical to SEQ ID NO: 4325
  GFR-binding peptide
  MOD_RES (31)..(32): Xaa is C or S

SEQ ID NO: 25386 - protein, 33 aa, Artificial Sequence; identical to SEQ ID NO: 4326
  GFR-binding peptide
  MOD_RES (31)..(32): Xaa is C or S

SEQ ID NO: 25387 - protein, 38 aa, Artificial Sequence
  GFR-binding peptide
  MOD_RES (2)..(33)..(34): Xaa is C or S
KXSRVIMEYKFKVKPKRGVLYLISIPELAQPVXXPAAS

SEQ ID NO: 25388 - protein, 38 aa, Artificial Sequence; identical to SEQ ID NO: 4328
  GFR-binding peptide
  MOD_RES (1)..(3)..(36)..(37): Xaa is C or S
  MOD_RES (14)..(15)..(16)..(17)..(18): Xaa is A or G
  MOD_RES (19)..(20)..(21)..(22): Xaa is A or G or is absent

SEQ ID NO: 25389 - protein, 37 aa, Artificial Sequence
  GFR-binding peptide
  MOD_RES (31)..(32): Xaa is C or S
RVVMNEYQKYIVNSSDDIYLVSIPSLKTPAXXPKPVY

SEQ ID NO: 25390 - protein, 38 aa, Artificial Sequence
  GFR-binding peptide
  MOD_RES (33)..(34): Xaa is C or S
  MOD_RES (11)..(12)..(13)..(14)..(15): Xaa is A or G
  MOD_RES (16)..(17)..(18)..(19): Xaa is A or G or is absent
SVAMGEYKFKXXXXXXXXXLYLISIPELKTPVXXAKSA

SEQ ID NO: 25391 - protein, 38 aa, Artificial Sequence; identical to SEQ ID NO: 4329
  GFR-binding peptide
  MOD_RES (1)..(33)..(34): Xaa is C or S

SEQ ID NO: 25392 - protein, 37 aa, Artificial Sequence; identical to SEQ ID NO: 4330
  GFR-binding peptide
  MOD_RES (2)..(4)..(35)..(36): Xaa is C or S

SEQ ID NO: 25393 - protein, 35 aa, Artificial Sequence; identical to SEQ ID NO: 4331
  GFR-binding peptide
  MOD_RES (34)..(35): Xaa is C or S
  MOD_RES (12)..(13)..(14)..(15)..(16): Xaa is A or G
  MOD_RES (17)..(18)..(19)..(20): Xaa is A or G or is absent

SEQ ID NO: 25394 - protein, 39 aa, Artificial Sequence
  GFR-binding peptide
  MOD_RES (34)..(35): Xaa is C or S
  MOD_RES (12)..(13)..(14)..(15)..(16): Xaa is A or G
  MOD_RES (17)..(18)..(19)..(20): Xaa is A or G or is absent
GEVVMDEYKFKXXXXXXXXXLYLMSIPELETPVXXAKPI

SEQ ID NO: 25395 - protein, 38 aa, Artificial Sequence
  GFR-binding peptide
  MOD_RES (34)..(35): Xaa is C or S
  MOD_RES (12)..(13)..(14)..(15)..(16): Xaa is A or G
  MOD_RES (17)..(18)..(19)..(20): Xaa is A or G or is absent
ARVVMNEYQKYXXXXXXXXXIYLVSIPSLQTPAXXPKP

SEQ ID NO: 25396 - protein, 37 aa, Artificial Sequence
  GFR-binding peptide
  MOD_RES (34)..(35): Xaa is C or S
  MOD_RES (12)..(13)..(14)..(15)..(16): Xaa is A or G
  MOD_RES (17)..(18)..(19)..(20): Xaa is A or G or is absent
ARVVMNEYKFKXXXXXXXXXLYLVSIPELQTPAXXPK

SEQ ID NO: 25397 - protein, 35 aa, Artificial Sequence
  GFR-binding peptide
  MOD_RES (1)..(35): Xaa is C or S
  MOD_RES (13)..(14)..(15)..(16)..(17): Xaa is A or G
  MOD_RES (18)..(19)..(20)..(21): Xaa is A or G or is absent
XGEVVMDEYKFKXXXXXXXXXLYLMSIPELETPVX

SEQ ID NO: 25398 - protein, 33 aa, Artificial Sequence; identical to SEQ ID NO: 4335
  GFR-binding peptide
  MOD_RES (1)..(1): Xaa is C or S
  MOD_RES (12)..(13)..(14)..(15)..(16): Xaa is A or G
  MOD_RES (17)..(18)..(19)..(20): Xaa is A or G or is absent

SEQ ID NO: 25399 - protein, 36 aa, Artificial Sequence
  GFR-binding peptide
  MOD_RES (1)..(33)..(34): Xaa is C or S
XGEVVMEEYKFKVVKDYEDLYLMSIPELETPVXXAK

SEQ ID NO: 25400 - protein, 34 aa, Artificial Sequence; identical to SEQ ID NO: 4338
  GFR-binding peptide
  MOD_RES (1)..(34): Xaa is C or S
  MOD_RES (12)..(13)..(14)..(15)..(16): Xaa is A or G
  MOD_RES (17)..(18)..(19)..(20): Xaa is A or G or is absent

SEQ ID NO: 25401 - protein, 36 aa, Artificial Sequence; identical to SEQ ID NO: 4339
  GFR-binding peptide
  MOD_RES (32)..(33): Xaa is C or S

SEQ ID NO: 25402 - protein, 36 aa, Artificial Sequence; identical to SEQ ID NO: 4342
  GFR-binding peptide
  MOD_RES (2)..(34)..(35): Xaa is C or S

SEQ ID NO: 25403 - protein, 36 aa, Artificial Sequence; identical to SEQ ID NO: 4344
  GFR-binding peptide
  MOD_RES (1)..(32)..(33): Xaa is C or S

SEQ ID NO: 25404 - protein, 38 aa, Artificial Sequence
  GFR-binding peptide
  MOD_RES (2)..(34)..(35): Xaa is C or S
GXSRVVMNEYKFKIVNSSDDLYLVSIPELKTPAXXPKP

SEQ ID NO: 25405 - protein, 31 aa, Artificial Sequence
  GFR-binding peptide
AEVVMDYHYKLVVNNAADKYLISIPSLRAPV

SEQ ID NO: 25406 - protein, 40 aa, Artificial Sequence; identical to SEQ ID NO: 4347
  GFR-binding peptide
  MOD_RES (2)..(4)..(37)..(38): Xaa is C or S
  MOD_RES (15)..(16)..(17)..(18)..(19): Xaa is A or G
  MOD_RES (20)..(21)..(22)..(23): Xaa is A or G or is absent

SEQ ID NO: 25407 - protein, 31 aa, Artificial Sequence
  GFR-binding peptide
  MOD_RES (31)..(31): Xaa is C or S
EVVMDEYKFKVVKENEDLYLMSIPELETPVX

SEQ ID NO: 25408 - protein, 33 aa, Artificial Sequence; identical to SEQ ID NO: 4350
  GFR-binding peptide
  MOD_RES (33)..(33): Xaa is C or S
  MOD_RES (11)..(12)..(13)..(14)..(15): Xaa is A or G
  MOD_RES (16)..(17)..(18)..(19): Xaa is A or G or is absent

SEQ ID NO: 25409 - protein, 34 aa, Artificial Sequence; identical to SEQ ID NO: 4351
  GFR-binding peptide
  MOD_RES (1)..(32)..(33): Xaa is C or S

SEQ ID NO: 25410 - protein, 37 aa, Artificial Sequence; identical to SEQ ID NO: 4353
  GFR-binding peptide
  MOD_RES (2)..(4)..(36)..(37): Xaa is C or S

SEQ ID NO: 25411 - protein, 40 aa, Artificial Sequence
  GFR-binding peptide
  MOD_RES (2)..(4)..(35)..(36): Xaa is C or S
SXKXSKVVMEYQKYVKPTRGVIYLISIPSLDQPVXXPSAS

SEQ ID NO: 25412 - protein, 37 aa, Artificial Sequence
  GFR-binding peptide
  MOD_RES (32)..(33): Xaa is C or S
AEVVMDYHYKLVVNNAADKYLISIPSLRAPVXXSAPA

SEQ ID NO: 25413 - protein, 37 aa, Artificial Sequence; identical to SEQ ID NO: 4357
  GFR-binding peptide
  MOD_RES (2)..(4): Xaa is C or S
  MOD_RES (16)..(17)..(18)..(19)..(20): Xaa is A or G
  MOD_RES (21)..(22)..(23)..(24): Xaa is A or G or is absent

SEQ ID NO: 25414 - protein, 39 aa, Artificial Sequence
  GFR-binding peptide
  MOD_RES (33)..(34): Xaa is C or S
  MOD_RES (11)..(12)..(13)..(14)..(15): Xaa is A or G
  MOD_RES (16)..(17)..(18)..(19): Xaa is A or G or is absent
SRVIMEYQKYXXXXXXXXXIYLISIPSLAQPVXXPAASA

SEQ ID NO: 25415 - protein, 42 aa, Artificial Sequence; identical to SEQ ID NO: 4359
  GFR-binding peptide
  MOD_RES (2)..(4)..(38)..(39): Xaa is C or S
  MOD_RES (16)..(17)..(18)..(19)..(20): Xaa is A or G
  MOD_RES (21)..(22)..(23)..(24): Xaa is A or G or is absent

SEQ ID NO: 25416 - protein, 42 aa, Artificial Sequence; identical to SEQ ID NO: 4360
  GFR-binding peptide
  MOD_RES (2)..(36)..(37): Xaa is C or S
  MOD_RES (14)..(15)..(16)..(17)..(18): Xaa is A or G
  MOD_RES (19)..(20)..(21)..(22): Xaa is A or G or is absent

SEQ ID NO: 25417 - protein, 35 aa, Artificial Sequence; identical to SEQ ID NO: 4361
  GFR-binding peptide
  MOD_RES (31)..(32): Xaa is C or S

SEQ ID NO: 25418 - protein, 32 aa, Artificial Sequence; identical to SEQ ID NO: 4362
  GFR-binding peptide
  MOD_RES (32)..(32): Xaa is C or S

SEQ ID NO: 25419 - protein, 40 aa, Artificial Sequence; identical to SEQ ID NO: 4363
  GFR-binding peptide
  MOD_RES (1)..(3)..(35)..(36): Xaa is C or S

SEQ ID NO: 25420 - protein, 31 aa, Artificial Sequence
  GFR-binding peptide
GEVVMDEYKFKVVKENEDLYLMSIPELETPV

SEQ ID NO: 25421 - protein, 36 aa, Artificial Sequence
  GFR-binding peptide
  MOD_RES (2)..(34)..(35): Xaa is C or S
GXESVAMGRYKKLYTVVGKDFYLISIANLKTPVXXA

SEQ ID NO: 25422 - protein, 38 aa, Artificial Sequence
  GFR-binding peptide
  MOD_RES (32)..(33): Xaa is C or S
ARVVMNEYKFKIVNSSDDLYLVSIPELQTPAXXPKPVT

SEQ ID NO: 25423 - protein, 41 aa, Artificial Sequence
  GFR-binding peptide
  MOD_RES (2)..(36)..(37): Xaa is C or S
  MOD_RES (14)..(15)..(16)..(17)..(18): Xaa is A or G
  MOD_RES (19)..(20)..(21)..(22): Xaa is A or G or is absent
GXGEVVMDEYKFKXXXXXXXXXLYLMSIPELETPVXXAKPI

SEQ ID NO: 25424 - protein, 38 aa, Artificial Sequence
  GFR-binding peptide
  MOD_RES (1)..(35)..(36): Xaa is C or S
  MOD_RES (13)..(14)..(15)..(16)..(17): Xaa is A or G
  MOD_RES (18)..(19)..(20)..(21): Xaa is A or G or is absent
XESVAMGEYQKYXXXXXXXXXIYLISIPSLKTPVXXAK

SEQ ID NO: 25425 - protein, 38 aa, Artificial Sequence
  GFR-binding peptide
  MOD_RES (1)..(3)..(35)..(36): Xaa is C or S
XGXESVAMGRYKKLYTVVGKDFYLISIANLKTPVXXAK

SEQ ID NO: 25426 - protein, 37 aa, Artificial Sequence
  GFR-binding peptide
  MOD_RES (1)..(3)..(35)..(36): Xaa is C or S
XGXAKVVMNEYQKYIVNNSSDIYLVSIPSLKTPAXXA

SEQ ID NO: 25427 - protein, 40 aa, Artificial Sequence
  GFR-binding peptide
  MOD_RES (1)..(3)..(37)..(38): Xaa is C or S
  MOD_RES (15)..(16)..(17)..(18)..(19): Xaa is A or G
  MOD_RES (20)..(21)..(22)..(23): Xaa is A or G or is absent
XGXSRVVMNEYKFKXXXXXXXXXLYLVSIPELKTPAXXPK

SEQ ID NO: 25428 - protein, 42 aa, Artificial Sequence
  GFR-binding peptide
  MOD_RES (2)..(36)..(37): Xaa is C or S
  MOD_RES (14)..(15)..(16)..(17)..(18): Xaa is A or G
  MOD_RES (19)..(20)..(21)..(22): Xaa is A or G or is absent
GXAEVVMDEYQKYXXXXXXXXXIYLISIPSLRAPVXXSAPAA

SEQ ID NO: 25429 - protein, 40 aa, Artificial Sequence
  GFR-binding peptide
  MOD_RES (1)..(3)..(35)..(36): Xaa is C or S
XGXGEVVMDEYQKYVVKENEDIYLMSIPSLETPVXXAKPI

SEQ ID NO: 25430 - protein, 42 aa, Artificial Sequence
  GFR-binding peptide
  MOD_RES (2)..(4)..(36)..(37): Xaa is C or S
RXGXAEVVMDRYKKLVVNNAADFYLISIANLRAPVXXSAPAA

SEQ ID NO: 25431 - protein, 31 aa, Artificial Sequence
  GFR-binding peptide
  MOD_RES (31)..(31): Xaa is C or S
RVVMNEYQKYIVNSSDDIYLVSIPSLKTPAX

SEQ ID NO: 25432 - protein, 35 aa, Artificial Sequence
  GFR-binding peptide
  MOD_RES (34)..(35): Xaa is C or S
  MOD_RES (12)..(13)..(14)..(15)..(16): Xaa is A or G
  MOD_RES (17)..(18)..(19)..(20): Xaa is A or G or is absent
ESVAMGEYKFKXXXXXXXXXLYLISIPELKTPVXX

SEQ ID NO: 25433 - protein, 38 aa, Artificial Sequence
  GFR-binding peptide
  MOD_RES (32)..(33): Xaa is C or S
ESVAMGEYKFKYTVVGKDLYLISIPELKTPVXXAKSAK

SEQ ID NO: 25434 - protein, 39 aa, Artificial Sequence
  GFR-binding peptide
  MOD_RES (2)..(36)..(37): Xaa is C or S
  MOD_RES (14)..(15)..(16)..(17)..(18): Xaa is A or G
  MOD_RES (19)..(20)..(21)..(22): Xaa is A or G or is absent
GXESVAMGEYQKYXXXXXXXXXIYLISIPSLKTPVXXAK

SEQ ID NO: 25435 - protein, 41 aa, Artificial Sequence
  GFR-binding peptide
  MOD_RES (2)..(4)..(38)..(39): Xaa is C or S
  MOD_RES (16)..(17)..(18)..(19)..(20): Xaa is A or G
  MOD_RES (21)..(22)..(23)..(24): Xaa is A or G or is absent
HXGXARVVMNEYKFKXXXXXXXXXLYLVSIPELQTPAXXPK

SEQ ID NO: 25436 - protein, 35 aa, Artificial Sequence; identical to SEQ ID NO: 4372
  GFR-binding peptide
  MOD_RES (35)..(35): Xaa is C or S
  MOD_RES (13)..(14)..(15)..(16)..(17): Xaa is A or G
  MOD_RES (18)..(19)..(20)..(21): Xaa is A or G or is absent

SEQ ID NO: 25437 - protein, 31 aa, Artificial Sequence
  GFR-binding peptide
  MOD_RES (31)..(31): Xaa is C or S
EVVMDEYQKYVVNNAADIYLISIPSLRAPVX

SEQ ID NO: 25438 - protein, 35 aa, Artificial Sequence
  GFR-binding peptide
  MOD_RES (1)..(35): Xaa is C or S
  MOD_RES (13)..(14)..(15)..(16)..(17): Xaa is A or G
  MOD_RES (18)..(19)..(20)..(21): Xaa is A or G or is absent
XAEVVMDYHYKLXXXXXXXXXKYLISIPSLRAPVX

SEQ ID NO: 25439 - protein, 33 aa, Artificial Sequence
  GFR-binding peptide
  MOD_RES (33)..(33): Xaa is C or S
  MOD_RES (11)..(12)..(13)..(14)..(15): Xaa is A or G
  MOD_RES (16)..(17)..(18)..(19): Xaa is A or G or is absent
EVVMEEYQKYXXXXXXXXXIYLMSIPSLETPVX

SEQ ID NO: 25440 - protein, 35 aa, Artificial Sequence
  GFR-binding peptide
  MOD_RES (1)..(1): Xaa is C or S
  MOD_RES (14)..(15)..(16)..(17)..(18): Xaa is A or G
  MOD_RES (19)..(20)..(21)..(22): Xaa is A or G or is absent
XEAVSMGEEYKFKXXXXXXXXXLYLVSIPELKTPV

SEQ ID NO: 25441 - protein, 40 aa, Artificial Sequence; identical to SEQ ID NO: 4376
  GFR-binding peptide
  MOD_RES (2)..(34)..(35): Xaa is C or S

SEQ ID NO: 25442 - protein, 36 aa, Artificial Sequence
  GFR-binding peptide
  MOD_RES (1)..(3)..(34)..(35): Xaa is C or S
XKXSKVVMEYKFKVKPTRGVLYLISIPELDQPVXXP

SEQ ID NO: 25443 - protein, 40 aa, Artificial Sequence
  GFR-binding peptide
  MOD_RES (1)..(3)..(34)..(35): Xaa is C or S
XKXSRVIMEYKFKVKPKRGVLYLISIPELAQPVXXPAASA

SEQ ID NO: 25444 - protein, 41 aa, Artificial Sequence
  GFR-binding peptide
  MOD_RES (1)..(3)..(38)..(39): Xaa is C or S
  MOD_RES (16)..(17)..(18)..(19)..(20): Xaa is A or G
  MOD_RES (21)..(22)..(23)..(24): Xaa is A or G or is absent
XGXEAVSMGEEYQKYXXXXXXXXXIYLVSIPSLKTPVXXAK

SEQ ID NO: 25445 - protein, 36 aa, Artificial Sequence
  GFR-binding peptide
  MOD_RES (1)..(3): Xaa is C or S
  MOD_RES (15)..(16)..(17)..(18)..(19): Xaa is A or G
  MOD_RES (20)..(21)..(22)..(23): Xaa is A or G or is absent
XGXARVVMNEYKFKXXXXXXXXXLYLVSIPELQTPA

SEQ ID NO: 25446 - protein, 30 aa, Artificial Sequence
  GFR-binding peptide
EVVMDRYKKLVVNNAADFYLISIANLRAPV

SEQ ID NO: 25447 - protein, 41 aa, Artificial Sequence
  GFR-binding peptide
  MOD_RES (2)..(35)..(36): Xaa is C or S
  MOD_RES (13)..(14)..(15)..(16)..(17): Xaa is A or G
  MOD_RES (18)..(19)..(20)..(21): Xaa is A or G or is absent
KXSKVVMEYQKYXXXXXXXXXIYLISIPSLDQPVXXPSASA

SEQ ID NO: 25448 - protein, 36 aa, Artificial Sequence; identical to SEQ ID NO: 4386
  GFR-binding peptide
  MOD_RES (2)..(4): Xaa is C or S
  MOD_RES (15)..(16)..(17)..(18)..(19): Xaa is A or G
  MOD_RES (20)..(21)..(22)..(23): Xaa is A or G or is absent

SEQ ID NO: 25449 - protein, 36 aa, Artificial Sequence
  GFR-binding peptide
  MOD_RES (1)..(3)..(35)..(36): Xaa is C or S
XGXESVAMGEYQKYYTVVGKDIYLISIPSLKTPVXX

SEQ ID NO: 25450 - protein, 42 aa, Artificial Sequence; identical to SEQ ID NO: 4388
  GFR-binding peptide
  MOD_RES (2)..(4)..(38)..(39): Xaa is C or S
  MOD_RES (16)..(17)..(18)..(19)..(20): Xaa is A or G
  MOD_RES (21)..(22)..(23)..(24): Xaa is A or G or is absent

SEQ ID NO: 25451 - protein, 40 aa, Artificial Sequence
  GFR-binding peptide
  MOD_RES (1)..(3)..(36)..(37): Xaa is C or S
XGXEAVSMGEEYKFKTPVGMDDLYLVSIPELKTPVXXAKG

SEQ ID NO: 25452 - protein, 38 aa, Artificial Sequence
  GFR-binding peptide
  MOD_RES (1)..(3)..(35)..(36): Xaa is C or S
XGXAEVVMDEYKFKVVNNAADLYLISIPELRAPVXXSA

SEQ ID NO: 25453 - protein, 37 aa, Artificial Sequence
  GFR-binding peptide
  MOD_RES (2)..(36)..(37): Xaa is C or S
  MOD_RES (14)..(15)..(16)..(17)..(18): Xaa is A or G
  MOD_RES (19)..(20)..(21)..(22): Xaa is A or G or is absent
GXAEVVMDEYKFKXXXXXXXXXLYLISIPELRAPVXX

SEQ ID NO: 25454 - protein, 35 aa, Artificial Sequence
  GFR-binding peptide
  MOD_RES (33)..(34): Xaa is C or S
  MOD_RES (11)..(12)..(13)..(14)..(15): Xaa is A or G
  MOD_RES (16)..(17)..(18)..(19): Xaa is A or G or is absent
EVVMDEYQKYXXXXXXXXXIYLISIPSLRAPVXXS

SEQ ID NO: 25455 - protein, 33 aa, Artificial Sequence; identical to SEQ ID NO: 4393
  GFR-binding peptide
  MOD_RES (32)..(33): Xaa is C or S

SEQ ID NO: 25456 - protein, 40 aa, Artificial Sequence; identical to SEQ ID NO: 4396
  GFR-binding peptide
  MOD_RES (34)..(35): Xaa is C or S
  MOD_RES (12)..(13)..(14)..(15)..(16): Xaa is A or G
  MOD_RES (17)..(18)..(19)..(20): Xaa is A or G or is absent

SEQ ID NO: 25457 - protein, 35 aa, Artificial Sequence
  GFR-binding peptide
  MOD_RES (33)..(33): Xaa is C or S
  MOD_RES (11)..(12)..(13)..(14)..(15): Xaa is A or G
  MOD_RES (16)..(17)..(18)..(19): Xaa is A or G or is absent
RVVMNEYQKYXXXXXXXXXIYLVSIPSLKTPAXTP

SEQ ID NO: 25458 - protein, 36 aa, Artificial Sequence
  GFR-binding peptide
  MOD_RES (1)..(3): Xaa is C or S
  MOD_RES (15)..(16)..(17)..(18)..(19): Xaa is A or G
  MOD_RES (20)..(21)..(22)..(23): Xaa is A or G or is absent
XGXARVVMNEYQKYXXXXXXXXXIYLVSIPSLQTPA

SEQ ID NO: 25459 - protein, 33 aa, Artificial Sequence; identical to SEQ ID NO: 4399
  GFR-binding peptide
  MOD_RES (1)..(33): Xaa is C or S

SEQ ID NO: 25460 - protein, 33 aa, Artificial Sequence
  GFR-binding peptide
  MOD_RES (1)..(33): Xaa is C or S
XGEVVMEEYQKYVVKDYEDIYLMSIPSLETPVX

SEQ ID NO: 25461 - protein, 34 aa, Artificial Sequence; identical to SEQ ID NO: 4402
  GFR-binding peptide
  MOD_RES (1)..(3): Xaa is C or S

SEQ ID NO: 25462 - protein, 34 aa, Artificial Sequence
  GFR-binding peptide
  MOD_RES (2)..(4): Xaa is C or S
SXKXSKVVMEYQKYVKPTRGVIYLISIPSLDQPV

SEQ ID NO: 25463 - protein, 39 aa, Artificial Sequence
  GFR-binding peptide
  MOD_RES (34)..(35): Xaa is C or S
  MOD_RES (12)..(13)..(14)..(15)..(16): Xaa is A or G
  MOD_RES (17)..(18)..(19)..(20): Xaa is A or G or is absent
AEVVMDYHYKLXXXXXXXXXKYLISIPSLRAPVXXSAPA

SEQ ID NO: 25464 - protein, 35 aa, Artificial Sequence; identical to SEQ ID NO: 4404
  GFR-binding peptide
  MOD_RES (1)..(1): Xaa is C or S
  MOD_RES (14)..(15)..(16)..(17)..(18): Xaa is A or G
  MOD_RES (19)..(20)..(21)..(22): Xaa is A or G or is absent

SEQ ID NO: 25465 - protein, 40 aa, Artificial Sequence; identical to SEQ ID NO: 4406
  GFR-binding peptide
  MOD_RES (2)..(4)..(36)..(37): Xaa is C or S

SEQ ID NO: 25466 - protein, 39 aa, Artificial Sequence
  GFR-binding peptide
  MOD_RES (2)..(4)..(37)..(38): Xaa is C or S
  MOD_RES (15)..(16)..(17)..(18)..(19): Xaa is A or G
  MOD_RES (20)..(21)..(22)..(23): Xaa is A or G or is absent
SXKXSRVIMEYKFKXXXXXXXXXLYLISIPELAQPVXXP

SEQ ID NO: 25467 - protein, 43 aa, Artificial Sequence; identical to SEQ ID NO: 4407
  GFR-binding peptide
  MOD_RES (2)..(37)..(38): Xaa is C or S
  MOD_RES (15)..(16)..(17)..(18)..(19): Xaa is A or G
  MOD_RES (20)..(21)..(22)..(23): Xaa is A or G or is absent

SEQ ID NO: 25468 - protein, 34 aa, Artificial Sequence
  GFR-binding peptide
  MOD_RES (32)..(33): Xaa is C or S
GEVVMEEYQKYVVKDYEDIYLMSIPSLETPVXXA

SEQ ID NO: 25469 - protein, 42 aa, Artificial Sequence
  GFR-binding peptide
  MOD_RES (2)..(37)..(38): Xaa is C or S
  MOD_RES (15)..(16)..(17)..(18)..(19): Xaa is A or G
  MOD_RES (20)..(21)..(22)..(23): Xaa is A or G or is absent
GXEAVSMGEEYKFKXXXXXXXXXLYLVSIPELKTPVXXAKGV

SEQ ID NO: 25470 - protein, 35 aa, Artificial Sequence
  GFR-binding peptide
  MOD_RES (2)..(33)..(34): Xaa is C or S
KXSRVIMEYKFKVKPKRGVLYLISIPELAQPVXXP

SEQ ID NO: 25471 - protein, 34 aa, Artificial Sequence; identical to SEQ ID NO: 4409
  GFR-binding peptide
  MOD_RES (2)..(34): Xaa is C or S

SEQ ID NO: 25472 - protein, 40 aa, Artificial Sequence
  GFR-binding peptide
  MOD_RES (2)..(36)..(37): Xaa is C or S
  MOD_RES (14)..(15)..(16)..(17)..(18): Xaa is A or G
  MOD_RES (19)..(20)..(21)..(22): Xaa is A or G or is absent
GXSRVVMNEYQKYXXXXXXXXXIYLVSIPSLKTPAXXPKP

SEQ ID NO: 25473 - protein, 38 aa, Artificial Sequence
  GFR-binding peptide
  MOD_RES (2)..(34): Xaa is C or S
GXSRVVMNEYKFKIVNSSDDLYLVSIPELKTPAXTPKT

SEQ ID NO: 25474 - protein, 33 aa, Artificial Sequence; identical to SEQ ID NO: 4413
  GFR-binding peptide
  MOD_RES (1)..(32)..(33): Xaa is C or S

SEQ ID NO: 25475 - protein, 41 aa, Artificial Sequence
  GFR-binding peptide
  MOD_RES (2)..(4)..(36)..(37): Xaa is C or S
RXGXESVAMGRYKKLYTVVGKDFYLISIANLKTPVXXAKSA

SEQ ID NO: 25476 - protein, 35 aa, Artificial Sequence; identical to SEQ ID NO: 4414
  GFR-binding peptide
  MOD_RES (1)..(3)..(34)..(35): Xaa is C or S

SEQ ID NO: 25477 - protein, 35 aa, Artificial Sequence
  GFR-binding peptide
  MOD_RES (2)..(2): Xaa is C or S
  MOD_RES (14)..(15)..(16)..(17)..(18): Xaa is A or G
  MOD_RES (19)..(20)..(21)..(22): Xaa is A or G or is absent
GXGEVVMEEYKFKXXXXXXXXXLYLMSIPELETPV

SEQ ID NO: 25478 - protein, 31 aa, Artificial Sequence
  GFR-binding peptide
  MOD_RES (31)..(31): Xaa is C or S
SRVIMEYQKYVKPKRGVIYLISIPSLAQPVX

SEQ ID NO: 25479 - protein, 35 aa, Artificial Sequence; identical to SEQ ID NO: 4415
  GFR-binding peptide
  MOD_RES (31)..(32): Xaa is C or S

SEQ ID NO: 25480 - protein, 37 aa, Artificial Sequence
  GFR-binding peptide
  MOD_RES (2)..(4)..(37): Xaa is C or S
  MOD_RES (15)..(16)..(17)..(18)..(19): Xaa is A or G
  MOD_RES (20)..(21)..(22)..(23): Xaa is A or G or is absent
SXKXSRVIMEYKFKXXXXXXXXXLYLISIPELAQPVX

SEQ ID NO: 25481 - protein, 34 aa, Artificial Sequence
  GFR-binding peptide
  MOD_RES (1)..(33)..(34): Xaa is C or S
XGEVVMDEYQKYVVKENEDIYLMSIPSLETPVXX

SEQ ID NO: 25482 - protein, 40 aa, Artificial Sequence
  GFR-binding peptide
  MOD_RES (1)..(35)..(36): Xaa is C or S
  MOD_RES (13)..(14)..(15)..(16)..(17): Xaa is A or G
  MOD_RES (18)..(19)..(20)..(21): Xaa is A or G or is absent
XARVVMNEYQKYXXXXXXXXXIYLVSIPSLQTPAXXPKPV

SEQ ID NO: 25483 - protein, 33 aa, Artificial Sequence
  GFR-binding peptide
  MOD_RES (31)..(32): Xaa is C or S
SVAMGEYKFKYTVVGKDLYLISIPELKTPVXXA

SEQ ID NO: 25484 - protein, 33 aa, Artificial Sequence; identical to SEQ ID NO: 4417
  GFR-binding peptide
  MOD_RES (31)..(32): Xaa is C or S

SEQ ID NO: 25485 - protein, 36 aa, Artificial Sequence; identical to SEQ ID NO: 4418
  GFR-binding peptide
  MOD_RES (2)..(35)..(36): Xaa is C or S
  MOD_RES (13)..(14)..(15)..(16)..(17): Xaa is A or G
  MOD_RES (18)..(19)..(20)..(21): Xaa is A or G or is absent

SEQ ID NO: 25486 - protein, 38 aa, Artificial Sequence
  GFR-binding peptide
  MOD_RES (1)..(3)..(37)..(38): Xaa is C or S
  MOD_RES (15)..(16)..(17)..(18)..(19): Xaa is A or G
  MOD_RES (20)..(21)..(22)..(23): Xaa is A or G or is absent
XGXESVAMGEYQKYXXXXXXXXXIYLISIPSLKTPVXX

SEQ ID NO: 25487 - protein, 34 aa, Artificial Sequence
  GFR-binding peptide
  MOD_RES (32)..(33): Xaa is C or S
GEVVMDEYQKYVVKENEDIYLMSIPSLETPVXXA

SEQ ID NO: 25488 - protein, 39 aa, Artificial Sequence
  GFR-binding peptide
  MOD_RES (33)..(34): Xaa is C or S
  MOD_RES (11)..(12)..(13)..(14)..(15): Xaa is A or G
  MOD_RES (16)..(17)..(18)..(19): Xaa is A or G or is absent
SKVIMEYKFKXXXXXXXXXLYLISIPELDQSVXXPSASA

SEQ ID NO: 25489 - protein, 37 aa, Artificial Sequence
  GFR-binding peptide
  MOD_RES (31)..(32): Xaa is C or S
SVAMGEYQKYYTVVGKDIYLISIPSLKTPVXXAKSAK

SEQ ID NO: 25490 - protein, 34 aa, Artificial Sequence; identical to SEQ ID NO: 4423
  GFR-binding peptide
  MOD_RES (1)..(34): Xaa is C or S
  MOD_RES (12)..(13)..(14)..(15)..(16): Xaa is A or G
  MOD_RES (17)..(18)..(19)..(20): Xaa is A or G or is absent

SEQ ID NO: 25491 - protein, 38 aa, Artificial Sequence
  GFR-binding peptide
  MOD_RES (2)..(4)..(38): Xaa is C or S
  MOD_RES (16)..(17)..(18)..(19)..(20): Xaa is A or G
  MOD_RES (21)..(22)..(23)..(24): Xaa is A or G or is absent
RXGXESVAMGEYKFKXXXXXXXXXLYLISIPELKTPVX

SEQ ID NO: 25492 - protein, 41 aa, Artificial Sequence; identical to SEQ ID NO: 4424
  GFR-binding peptide
  MOD_RES (1)..(3)..(37)..(38): Xaa is C or S
  MOD_RES (15)..(16)..(17)..(18)..(19): Xaa is A or G
  MOD_RES (20)..(21)..(22)..(23): Xaa is A or G or is absent

SEQ ID NO: 25493 - protein, 36 aa, Artificial Sequence; identical to SEQ ID NO: 4425
  GFR-binding peptide
  MOD_RES (2)..(4): Xaa is C or S

SEQ ID NO: 25494 - protein, 34 aa, Artificial Sequence
  GFR-binding peptide
  MOD_RES (31)..(32): Xaa is C or S
KVVMNEYKFKIVNNSSDLYLVSIPELKTPAXXAK

SEQ ID NO: 25495 - protein, 38 aa, Artificial Sequence
  GFR-binding peptide
  MOD_RES (2)..(4)..(35)..(36): Xaa is C or S
SXKXSKVIMEYKFKIKPTKGILYLISIPELDQSVXXPS

SEQ ID NO: 25496 - protein, 38 aa, Artificial Sequence; identical to SEQ ID NO: 4428
  GFR-binding peptide
  MOD_RES (2)..(33)..(34): Xaa is C or S

SEQ ID NO: 25497 - protein, 36 aa, Artificial Sequence; identical to SEQ ID NO: 4429
  GFR-binding peptide
  MOD_RES (1)..(34)..(35): Xaa is C or S
  MOD_RES (12)..(13)..(14)..(15)..(16): Xaa is A or G
  MOD_RES (17)..(18)..(19)..(20): Xaa is A or G or is absent

SEQ ID NO: 25498 - protein, 39 aa, Artificial Sequence
  GFR-binding peptide
  MOD_RES (34)..(34): Xaa is C or S
  MOD_RES (12)..(13)..(14)..(15)..(16): Xaa is A or G
  MOD_RES (17)..(18)..(19)..(20): Xaa is A or G or is absent
SRVVMNEYQKYXXXXXXXXXIYLVSIPSLKTPAXTPKTV

SEQ ID NO: 25499 - protein, 35 aa, Artificial Sequence
  GFR-binding peptide
  MOD_RES (2)..(35): Xaa is C or S
GXEAVSMGEEYQKYTPVGMDDIYLVSIPSLKTPVX

SEQ ID NO: 25500 - protein, 34 aa, Artificial Sequence
  GFR-binding peptide
  MOD_RES (34)..(34): Xaa is C or S
  MOD_RES (12)..(13)..(14)..(15)..(16): Xaa is A or G
  MOD_RES (17)..(18)..(19)..(20): Xaa is A or G or is absent
AKVVMNEYQKYXXXXXXXXXIYLVSIPSLKTPAX

SEQ ID NO: 25501 - protein, 44 aa, Artificial Sequence
  GFR-binding peptide
  MOD_RES (2)..(4)..(38)..(39): Xaa is C or S
  MOD_RES (16)..(17)..(18)..(19)..(20): Xaa is A or G
  MOD_RES (21)..(22)..(23)..(24): Xaa is A or G or is absent
RXGXESVAMGEYKFKXXXXXXXXXLYLISIPELKTPVXXAKSAK

SEQ ID NO: 25502 - protein, 36 aa, Artificial Sequence; identical to SEQ ID NO: 4430
  GFR-binding peptide
  MOD_RES (33)..(34): Xaa is C or S
  MOD_RES (11)..(12)..(13)..(14)..(15): Xaa is A or G
  MOD_RES (16)..(17)..(18)..(19): Xaa is A or G or is absent

SEQ ID NO: 25503 - protein, 34 aa, Artificial Sequence; identical to SEQ ID NO: 4432
  GFR-binding peptide
  MOD_RES (2)..(2): Xaa is C or S
  MOD_RES (13)..(14)..(15)..(16)..(17): Xaa is A or G
  MOD_RES (18)..(19)..(20)..(21): Xaa is A or G or is absent

SEQ ID NO: 25504 - protein, 43 aa, Artificial Sequence
  GFR-binding peptide
  MOD_RES (2)..(4)..(37)..(38): Xaa is C or S
RXGXEAVSMGEEYKFKTPVGMDDLYLVSIPELKTPVXXAKGVK

SEQ ID NO: 25505 - protein, 40 aa, Artificial Sequence
  GFR-binding peptide
  MOD_RES (2)..(34)..(35): Xaa is C or S
GXSRVVMNEYQKYIVNSSDDIYLVSIPSLKTPAXXPKPVY

SEQ ID NO: 25506 - protein, 35 aa, Artificial Sequence; identical to SEQ ID NO: 4434
  GFR-binding peptide
  MOD_RES (2)..(34)..(35): Xaa is C or S

SEQ ID NO: 25507 - protein, 40 aa, Artificial Sequence
  GFR-binding peptide
  MOD_RES (2)..(34)..(35): Xaa is C or S
GXESVAMGEYQKYYTVVGKDIYLISIPSLKTPVXXAKSAK

SEQ ID NO: 25508 - protein, 33 aa, Artificial Sequence; identical to SEQ ID NO: 4435
  GFR-binding peptide
  MOD_RES (1)..(32)..(33): Xaa is C or S

SEQ ID NO: 25509 - protein, 36 aa, Artificial Sequence
  GFR-binding peptide
  MOD_RES (34)..(35): Xaa is C or S
  MOD_RES (12)..(13)..(14)..(15)..(16): Xaa is A or G
  MOD_RES (17)..(18)..(19)..(20): Xaa is A or G or is absent
GEVVMDEYKFKXXXXXXXXXLYLMSIPELETPVXXA

SEQ ID NO: 25510 - protein, 38 aa, Artificial Sequence; identical to SEQ ID NO: 4437
  GFR-binding peptide
  MOD_RES (1)..(3)..(36)..(37): Xaa is C or S

SEQ ID NO: 25511 - protein, 34 aa, Artificial Sequence
  GFR-binding peptide
  MOD_RES (1)..(33)..(34): Xaa is C or S
XGEVVMEEYQKYVVKDYEDIYLMSIPSLETPVXX

SEQ ID NO: 25512 - protein, 36 aa, Artificial Sequence; identical to SEQ ID NO: 4439
  GFR-binding peptide
  MOD_RES (32)..(33): Xaa is C or S

SEQ ID NO: 25513 - protein, 33 aa, Artificial Sequence
  GFR-binding peptide
  MOD_RES (33)..(33): Xaa is C or S
  MOD_RES (11)..(12)..(13)..(14)..(15): Xaa is A or G
  MOD_RES (16)..(17)..(18)..(19): Xaa is A or G or is absent
SRVIMEYQKYXXXXXXXXXIYLISIPSLAQPVX

SEQ ID NO: 25514 - protein, 38 aa, Artificial Sequence
  GFR-binding peptide
  MOD_RES (33)..(34): Xaa is C or S
  MOD_RES (11)..(12)..(13)..(14)..(15): Xaa is A or G
  MOD_RES (16)..(17)..(18)..(19): Xaa is A or G or is absent
SKVIMEYQKYXXXXXXXXXIYLISIPSLDQSVXXPSAS

SEQ ID NO: 25515 - protein, 35 aa, Artificial Sequence
  GFR-binding peptide
  MOD_RES (2)..(4): Xaa is C or S
HXGXSRVVMNEYQKYIVNSSDDIYLVSIPSLKTPA

SEQ ID NO: 25516 - protein, 42 aa, Artificial Sequence
  GFR-binding peptide
  MOD_RES (2)..(36)..(37): Xaa is C or S
  MOD_RES (14)..(15)..(16)..(17)..(18): Xaa is A or G
  MOD_RES (19)..(20)..(21)..(22): Xaa is A or G or is absent
GXAEVVMDRYKKLXXXXXXXXXFYLISIANLRAPVXXSAPAA

SEQ ID NO: 25517 - protein, 34 aa, Artificial Sequence; identical to SEQ ID NO: 4441
  GFR-binding peptide
  MOD_RES (1)..(34): Xaa is C or S

SEQ ID NO: 25518 - protein, 41 aa, Artificial Sequence
  GFR-binding peptide
  MOD_RES (2)..(4)..(38)..(39): Xaa is C or S
  MOD_RES (16)..(17)..(18)..(19)..(20): Xaa is A or G
  MOD_RES (21)..(22)..(23)..(24): Xaa is A or G or is absent
RXGXAEVVMDRYKKLXXXXXXXXXFYLISIANLRAPVXXSA

SEQ ID NO: 25519 - protein, 44 aa, Artificial Sequence
  GFR-binding peptide
  MOD_RES (2)..(4)..(38)..(39): Xaa is C or S
  MOD_RES (16)..(17)..(18)..(19)..(20): Xaa is A or G
  MOD_RES (21)..(22)..(23)..(24): Xaa is A or G or is absent
RXGXESVAMGRYKKLXXXXXXXXXFYLISIANLKTPVXXAKSAK

SEQ ID NO: 25520 - protein, 40 aa, Artificial Sequence
  GFR-binding peptide
  MOD_RES (2)..(4)..(37)..(38): Xaa is C or S
  MOD_RES (15)..(16)..(17)..(18)..(19): Xaa is A or G
  MOD_RES (20)..(21)..(22)..(23): Xaa is A or G or is absent
SXKXSRVIMEYQKYXXXXXXXXXIYLISIPSLAQPVXXPA

SEQ ID NO: 25521 - protein, 40 aa, Artificial Sequence
  GFR-binding peptide
  MOD_RES (1)..(3)..(35)..(36): Xaa is C or S
XGXESVAMGYHYKLYTVVGKDKYLISIPSLKTPVXXAKSA

SEQ ID NO: 25522 - protein, 35 aa, Artificial Sequence
  GFR-binding peptide
  MOD_RES (1)..(3)..(35): Xaa is C or S
XGXGEVVMDEYQKYVVKENEDIYLMSIPSLETPVX

SEQ ID NO: 25523 - protein, 41 aa, Artificial Sequence; identical to SEQ ID NO: 4449
  GFR-binding peptide
  MOD_RES (1)..(3)..(38)..(39): Xaa is C or S
  MOD_RES (16)..(17)..(18)..(19)..(20): Xaa is A or G
  MOD_RES (21)..(22)..(23)..(24): Xaa is A or G or is absent

SEQ ID NO: 25524 - protein, 44 aa, Artificial Sequence
  GFR-binding peptide
  MOD_RES (2)..(4)..(38)..(39): Xaa is C or S
  MOD_RES (16)..(17)..(18)..(19)..(20): Xaa is A or G
  MOD_RES (21)..(22)..(23)..(24): Xaa is A or G or is absent
HXGXSRVVMNEYQKYXXXXXXXXXIYLVSIPSLKTPAXXPKPVY

SEQ ID NO: 25525 - protein, 35 aa, Artificial Sequence; identical to SEQ ID NO: 4451
  GFR-binding peptide
  MOD_RES (33)..(34): Xaa is C or S
  MOD_RES (11)..(12)..(13)..(14)..(15): Xaa is A or G
  MOD_RES (16)..(17)..(18)..(19): Xaa is A or G or is absent

SEQ ID NO: 25526 - protein, 41 aa, Artificial Sequence
  GFR-binding peptide
  MOD_RES (2)..(4)..(38)..(39): Xaa is C or S
  MOD_RES (16)..(17)..(18)..(19)..(20): Xaa is A or G
  MOD_RES (21)..(22)..(23)..(24): Xaa is A or G or is absent
RXGXAEVVMDEYKFKXXXXXXXXXLYLISIPELRAPVXXSA

SEQ ID NO: 25527 - protein, 35 aa, Artificial Sequence
  GFR-binding peptide
  MOD_RES (1)..(3): Xaa is C or S
  MOD_RES (14)..(15)..(16)..(17)..(18): Xaa is A or G
  MOD_RES (19)..(20)..(21)..(22): Xaa is A or G or is absent
XKXSKVIMEYKFKXXXXXXXXXLYLISIPELDQSV

SEQ ID NO: 25528 - protein, 36 aa, Artificial Sequence
  GFR-binding peptide
  MOD_RES (1)..(34)..(35): Xaa is C or S
  MOD_RES (12)..(13)..(14)..(15)..(16): Xaa is A or G
  MOD_RES (17)..(18)..(19)..(20): Xaa is A or G or is absent
XSKVVMEYKFKXXXXXXXXXLYLISIPELDQPVXXP

SEQ ID NO: 25529 - protein, 39 aa, Artificial Sequence
  GFR-binding peptide
  MOD_RES (1)..(35)..(36): Xaa is C or S
  MOD_RES (13)..(14)..(15)..(16)..(17): Xaa is A or G
  MOD_RES (18)..(19)..(20)..(21): Xaa is A or G or is absent
XGEVVMEEYKFKXXXXXXXXXLYLMSIPELETPVXXAKP

SEQ ID NO: 25530 - protein, 41 aa, Artificial Sequence
  GFR-binding peptide
  MOD_RES (1)..(3)..(35)..(36): Xaa is C or S
XGXESVAMGEYQKYYTVVGKDIYLISIPSLKTPVXXAKSAK

SEQ ID NO: 25531 - protein, 32 aa, Artificial Sequence; identical to SEQ ID NO: 4453
  GFR-binding peptide
  MOD_RES (11)..(12)..(13)..(14)..(15): Xaa is A or G
  MOD_RES (16)..(17)..(18)..(19): Xaa is A or G or is absent

SEQ ID NO: 25532 - protein, 41 aa, Artificial Sequence
  GFR-binding peptide
  MOD_RES (2)..(36): Xaa is C or S
  MOD_RES (14)..(15)..(16)..(17)..(18): Xaa is A or G
  MOD_RES (19)..(20)..(21)..(22): Xaa is A or G or is absent
GXSRVVMNEYQKYXXXXXXXXXIYLVSIPSLKTPAXTPKTV

SEQ ID NO: 25533 - protein, 35 aa, Artificial Sequence
  GFR-binding peptide
  MOD_RES (31)..(32): Xaa is C or S
EVVMDEYQKYVVNNAADIYLISIPSLRAPVXXSAP

SEQ ID NO: 25534 - protein, 43 aa, Artificial Sequence; identical to SEQ ID NO: 4454
  GFR-binding peptide
  MOD_RES (2)..(4)..(37)..(38): Xaa is C or S
  MOD_RES (15)..(16)..(17)..(18)..(19): Xaa is A or G
  MOD_RES (20)..(21)..(22)..(23): Xaa is A or G or is absent

SEQ ID NO: 25535 - protein, 39 aa, Artificial Sequence
  GFR-binding peptide
  MOD_RES (1)..(3)..(36)..(37): Xaa is C or S
  MOD_RES (14)..(15)..(16)..(17)..(18): Xaa is A or G
  MOD_RES (19)..(20)..(21)..(22): Xaa is A or G or is absent
XKXSRVIMEYKFKXXXXXXXXXLYLISIPELAQPVXXPA

SEQ ID NO: 25536 - protein, 38 aa, Artificial Sequence
  GFR-binding peptide
  MOD_RES (1)..(3)..(36)..(37): Xaa is C or S
  MOD_RES (14)..(15)..(16)..(17)..(18): Xaa is A or G
  MOD_RES (19)..(20)..(21)..(22): Xaa is A or G or is absent
XKXSRVIMEYQKYXXXXXXXXXIYLISIPSLAQPVXXP

SEQ ID NO: 25537 - protein, 35 aa, Artificial Sequence
  GFR-binding peptide
  MOD_RES (31)..(32): Xaa is C or S
SRVIMEYKFKVKPKRGVLYLISIPELAQPVXXPAA

SEQ ID NO: 25538 - protein, 38 aa, Artificial Sequence
  GFR-binding peptide
  MOD_RES (34)..(35): Xaa is C or S
  MOD_RES (12)..(13)..(14)..(15)..(16): Xaa is A or G
  MOD_RES (17)..(18)..(19)..(20): Xaa is A or G or is absent
GEVVMEEYQKYXXXXXXXXXIYLMSIPSLETPVXXAKP

SEQ ID NO: 25539 - protein, 36 aa, Artificial Sequence; identical to SEQ ID NO: 4459
  GFR-binding peptide
  MOD_RES (2)..(4): Xaa is C or S
  MOD_RES (15)..(16)..(17)..(18)..(19): Xaa is A or G
  MOD_RES (20)..(21)..(22)..(23): Xaa is A or G or is absent

SEQ ID NO: 25540 - protein, 31 aa, Artificial Sequence
  GFR-binding peptide
  MOD_RES (31)..(31): Xaa is C or S
SKVIMEYKFKIKPTKGILYLISIPELDQSVX

SEQ ID NO: 25541 - protein, 32 aa, Artificial Sequence
  GFR-binding peptide
  MOD_RES (11)..(12)..(13)..(14)..(15): Xaa is A or G
  MOD_RES (16)..(17)..(18)..(19): Xaa is A or G or is absent
EVVMEEYKFKXXXXXXXXXLYLMSIPELETPV

SEQ ID NO: 25542 - protein, 34 aa, Artificial Sequence
  GFR-binding peptide
  MOD_RES (31)..(31): Xaa is C or S
RVVMNEYQKYIVNSSDDIYLVSIPSLKTPAXTPK

SEQ ID NO: 25543 - protein, 36 aa, Artificial Sequence
  GFR-binding peptide
  MOD_RES (33)..(34): Xaa is C or S
  MOD_RES (11)..(12)..(13)..(14)..(15): Xaa is A or G
  MOD_RES (16)..(17)..(18)..(19): Xaa is A or G or is absent
SKVVMEYKFKXXXXXXXXXLYLISIPELDQPVXXPS

SEQ ID NO: 25544 - protein, 33 aa, Artificial Sequence
  GFR-binding peptide
  MOD_RES (32)..(33): Xaa is C or S
AEVVMDEYKFKVVNNAADLYLISIPELRAPVXX

SEQ ID NO: 25545 - protein, 37 aa, Artificial Sequence
  GFR-binding peptide
  MOD_RES (32)..(33): Xaa is C or S
ESVAMGYHYKLYTVVGKDKYLISIPSLKTPVXXAKSA

SEQ ID NO: 25546 - protein, 34 aa, Artificial Sequence; identical to SEQ ID NO: 4461
  GFR-binding peptide
  MOD_RES (1)..(3)..(34): Xaa is C or S

SEQ ID NO: 25547 - protein, 37 aa, Artificial Sequence
  GFR-binding peptide
  MOD_RES (2)..(4)..(36)..(37): Xaa is C or S
HXGXSRVVMNEYKFKIVNSSDDLYLVSIPELKTPAXX

SEQ ID NO: 25548 - protein, 35 aa, Artificial Sequence
  GFR-binding peptide
  MOD_RES (34)..(35): Xaa is C or S
  MOD_RES (12)..(13)..(14)..(15)..(16): Xaa is A or G
  MOD_RES (17)..(18)..(19)..(20): Xaa is A or G or is absent
ARVVMNEYQKYXXXXXXXXXIYLVSIPSLQTPAXX

SEQ ID NO: 25549 - protein, 38 aa, Artificial Sequence
  GFR-binding peptide
  MOD_RES (32)..(33): Xaa is C or S
AEVVMDRYKKLVVNNAADFYLISIANLRAPVXXSAPAA

SEQ ID NO: 25550 - protein, 41 aa, Artificial Sequence
  GFR-binding peptide
  MOD_RES (2)..(4)..(37)..(38): Xaa is C or S
  MOD_RES (15)..(16)..(17)..(18)..(19): Xaa is A or G
  MOD_RES (20)..(21)..(22)..(23): Xaa is A or G or is absent
SXKXSKVIMEYKFKXXXXXXXXXLYLISIPELDQSVXXPSA

SEQ ID NO: 25551 - protein, 35 aa, Artificial Sequence; identical to SEQ ID NO: 4464
  GFR-binding peptide
  MOD_RES (1)..(33)..(34): Xaa is C or S

SEQ ID NO: 25552 - protein, 39 aa, Artificial Sequence
  GFR-binding peptide
  MOD_RES (2)..(33)..(34): Xaa is C or S
KXSKVIMEYQKYIKPTKGIIYLISIPSLDQSVXXPSASA

SEQ ID NO: 25553 - protein, 41 aa, Artificial Sequence
  GFR-binding peptide
  MOD_RES (2)..(4)..(36): Xaa is C or S
HXGXSRVVMNEYQKYIVNSSDDIYLVSIPSLKTPAXTPKTV

SEQ ID NO: 25554 - protein, 39 aa, Artificial Sequence
  GFR-binding peptide
  MOD_RES (1)..(3)..(36)..(37): Xaa is C or S
  MOD_RES (14)..(15)..(16)..(17)..(18): Xaa is A or G
  MOD_RES (19)..(20)..(21)..(22): Xaa is A or G or is absent
XKXSKVIMEYKFKXXXXXXXXXLYLISIPELDQSVXXPS

SEQ ID NO: 25555 - protein, 35 aa, Artificial Sequence
  GFR-binding peptide
  MOD_RES (1)..(34)..(35): Xaa is C or S
  MOD_RES (12)..(13)..(14)..(15)..(16): Xaa is A or G
  MOD_RES (17)..(18)..(19)..(20): Xaa is A or G or is absent
XSKVIMEYKFKXXXXXXXXXLYLISIPELDQSVXX

SEQ ID NO: 25556 - protein, 38 aa, Artificial Sequence; identical to SEQ ID NO: 4470
  GFR-binding peptide
  MOD_RES (2)..(35)..(36): Xaa is C or S
  MOD_RES (13)..(14)..(15)..(16)..(17): Xaa is A or G
  MOD_RES (18)..(19)..(20)..(21): Xaa is A or G or is absent

SEQ ID NO: 25557 - protein, 39 aa, Artificial Sequence
  GFR-binding peptide
  MOD_RES (1)..(33)..(34): Xaa is C or S
XAKVVMNEYKFKIVNNSSDLYLVSIPELKTPAXXAKPVA

SEQ ID NO: 25558 - protein, 34 aa, Artificial Sequence
  GFR-binding peptide
  MOD_RES (1)..(3): Xaa is C or S
XGXSRVVMNEYQKYIVNSSDDIYLVSIPSLKTPA

SEQ ID NO: 25559 - protein, 40 aa, Artificial Sequence; identical to SEQ ID NO: 4474
  GFR-binding peptide
  MOD_RES (2)..(4)..(39)..(40): Xaa is C or S
  MOD_RES (17)..(18)..(19)..(20)..(21): Xaa is A or G
  MOD_RES (22)..(23)..(24)..(25): Xaa is A or G or is absent

SEQ ID NO: 25560 - protein, 42 aa, Artificial Sequence
  GFR-binding peptide
  MOD_RES (2)..(4)..(38)..(39): Xaa is C or S
  MOD_RES (16)..(17)..(18)..(19)..(20): Xaa is A or G
  MOD_RES (21)..(22)..(23)..(24): Xaa is A or G or is absent
RXGXGEVVMEEYKFKXXXXXXXXXLYLMSIPELETPVXXAKP

SEQ ID NO: 25561 - protein, 38 aa, Artificial Sequence
  GFR-binding peptide
  MOD_RES (2)..(34)..(35): Xaa is C or S
GXGEVVMDEYKFKVVKENEDLYLMSIPELETPVXXAKP

SEQ ID NO: 25562 - protein, 39 aa, Artificial Sequence; identical to SEQ ID NO: 4475
  GFR-binding peptide
  MOD_RES (1)..(34)..(35): Xaa is C or S
  MOD_RES (12)..(13)..(14)..(15)..(16): Xaa is A or G
  MOD_RES (17)..(18)..(19)..(20): Xaa is A or G or is absent

SEQ ID NO: 25563 - protein, 32 aa, Artificial Sequence
  GFR-binding peptide
  MOD_RES (31)..(32): Xaa is C or S
SVAMGRYKKLYTVVGKDFYLISIANLKTPVXX

SEQ ID NO: 25564 - protein, 36 aa, Artificial Sequence; identical to SEQ ID NO: 4476
  GFR-binding peptide
  MOD_RES (33)..(34): Xaa is C or S
  MOD_RES (11)..(12)..(13)..(14)..(15): Xaa is A or G
  MOD_RES (16)..(17)..(18)..(19): Xaa is A or G or is absent

SEQ ID NO: 25565 - protein, 33 aa, Artificial Sequence
  GFR-binding peptide
  MOD_RES (1)..(3): Xaa is C or S
XKXSKVIMEYQKYIKPTKGIIYLISIPSLDQSV

SEQ ID NO: 25566 - protein, 40 aa, Artificial Sequence
  GFR-binding peptide
  MOD_RES (1)..(35)..(36): Xaa is C or S
  MOD_RES (13)..(14)..(15)..(16)..(17): Xaa is A or G
  MOD_RES (18)..(19)..(20)..(21): Xaa is A or G or is absent
XAKVVMNEYKFKXXXXXXXXXLYLVSIPELKTPAXXAKPV

SEQ ID NO: 25567 - protein, 38 aa, Artificial Sequence; identical to SEQ ID NO: 4477
  GFR-binding peptide
  MOD_RES (2)..(4)..(38): Xaa is C or S
  MOD_RES (16)..(17)..(18)..(19)..(20): Xaa is A or G
  MOD_RES (21)..(22)..(23)..(24): Xaa is A or G or is absent

SEQ ID NO: 25568 - protein, 34 aa, Artificial Sequence
  GFR-binding peptide
  MOD_RES (33)..(34): Xaa is C or S
  MOD_RES (11)..(12)..(13)..(14)..(15): Xaa is A or G
  MOD_RES (16)..(17)..(18)..(19): Xaa is A or G or is absent
SVAMGEYKFKXXXXXXXXXLYLISIPELKTPVXX

SEQ ID NO: 25569 - protein, 39 aa, Artificial Sequence
  GFR-binding peptide
  MOD_RES (34)..(35): Xaa is C or S
  MOD_RES (12)..(13)..(14)..(15)..(16): Xaa is A or G
  MOD_RES (17)..(18)..(19)..(20): Xaa is A or G or is absent
SRVVMNEYKFKXXXXXXXXXLYLVSIPELKTPAXXPKPV

SEQ ID NO: 25570 - protein, 34 aa, Artificial Sequence
  GFR-binding peptide
  MOD_RES (1)..(3)..(34): Xaa is C or S
XKXSKVVMEYQKYVKPTRGVIYLISIPSLDQPVX

SEQ ID NO: 25571 - protein, 42 aa, Artificial Sequence
  GFR-binding peptide
  MOD_RES (2)..(4)..(38)..(39): Xaa is C or S
  MOD_RES (16)..(17)..(18)..(19)..(20): Xaa is A or G
  MOD_RES (21)..(22)..(23)..(24): Xaa is A or G or is absent
RXGXESVAMGEYKFKXXXXXXXXXLYLISIPELKTPVXXAKS

SEQ ID NO: 25572 - protein, 40 aa, Artificial Sequence; identical to SEQ ID NO: 4482
  GFR-binding peptide
  MOD_RES (2)..(35)..(36): Xaa is C or S
  MOD_RES (13)..(14)..(15)..(16)..(17): Xaa is A or G
  MOD_RES (18)..(19)..(20)..(21): Xaa is A or G or is absent

SEQ ID NO: 25573 - protein, 39 aa, Artificial Sequence; identical to SEQ ID NO: 4483
  GFR-binding peptide
  MOD_RES (1)..(34)..(35): Xaa is C or S
  MOD_RES (12)..(13)..(14)..(15)..(16): Xaa is A or G
  MOD_RES (17)..(18)..(19)..(20): Xaa is A or G or is absent

SEQ ID NO: 25574 - protein, 39 aa, Artificial Sequence; identical to SEQ ID NO: 4484
  GFR-binding peptide
  MOD_RES (33)..(34): Xaa is C or S
  MOD_RES (11)..(12)..(13)..(14)..(15): Xaa is A or G
  MOD_RES (16)..(17)..(18)..(19): Xaa is A or G or is absent

SEQ ID NO: 25575 - protein, 37 aa, Artificial Sequence; identical to SEQ ID NO: 4485
  GFR-binding peptide
  MOD_RES (2)..(33)..(34): Xaa is C or S

SEQ ID NO: 25576 - protein, 40 aa, Artificial Sequence
  GFR-binding peptide
  MOD_RES (2)..(4)..(35)..(36): Xaa is C or S
SXKXSKVIMEYKFKIKPTKGILYLISIPELDQSVXXPSAS

SEQ ID NO: 25577 - protein, 40 aa, Artificial Sequence
  GFR-binding peptide
  MOD_RES (2)..(35)..(36): Xaa is C or S
  MOD_RES (13)..(14)..(15)..(16)..(17): Xaa is A or G
  MOD_RES (18)..(19)..(20)..(21): Xaa is A or G or is absent
KXSKVVMEYQKYXXXXXXXXXIYLISIPSLDQPVXXPSAS

SEQ ID NO: 25578 - protein, 39 aa, Artificial Sequence
  GFR-binding peptide
  MOD_RES (2)..(4)..(36)..(37): Xaa is C or S
HXGXAKVVMNEYQKYIVNNSSDIYLVSIPSLKTPAXXAK

SEQ ID NO: 25579 - protein, 41 aa, Artificial Sequence
  GFR-binding peptide
  MOD_RES (2)..(4)..(37)..(38): Xaa is C or S
  MOD_RES (15)..(16)..(17)..(18)..(19): Xaa is A or G
  MOD_RES (20)..(21)..(22)..(23): Xaa is A or G or is absent
SXKXSRVIMEYQKYXXXXXXXXXIYLISIPSLAQPVXXPAA

SEQ ID NO: 25580 - protein, 40 aa, Artificial Sequence
  GFR-binding peptide
  MOD_RES (2)..(36)..(37): Xaa is C or S
  MOD_RES (14)..(15)..(16)..(17)..(18): Xaa is A or G
  MOD_RES (19)..(20)..(21)..(22): Xaa is A or G or is absent
GXAEVVMDRYKKLXXXXXXXXXFYLISIANLRAPVXXSAP

SEQ ID NO: 25581 - protein, 35 aa, Artificial Sequence
  GFR-binding peptide
  MOD_RES (32)..(33): Xaa is C or S
ARVVMNEYQKYIVNSSDDIYLVSIPSLQTPAXXPK

SEQ ID NO: 25582 - protein, 35 aa, Artificial Sequence; identical to SEQ ID NO: 4491
  GFR-binding peptide
  MOD_RES (1)..(33)..(34): Xaa is C or S

SEQ ID NO: 25583 - protein, 41 aa, Artificial Sequence
  GFR-binding peptide
  MOD_RES (1)..(3)..(36)..(37): Xaa is C or S
  MOD_RES (14)..(15)..(16)..(17)..(18): Xaa is A or G
  MOD_RES (19)..(20)..(21)..(22): Xaa is A or G or is absent
XKXSKVVMEYKFKXXXXXXXXXLYLISIPELDQPVXXPSAS

SEQ ID NO: 25584 - protein, 38 aa, Artificial Sequence
  GFR-binding peptide
  MOD_RES (2)..(36)..(37): Xaa is C or S
  MOD_RES (14)..(15)..(16)..(17)..(18): Xaa is A or G
  MOD_RES (19)..(20)..(21)..(22): Xaa is A or G or is absent
GXESVAMGRYKKLXXXXXXXXXFYLISIANLKTPVXXA

SEQ ID NO: 25585 - protein, 41 aa, Artificial Sequence; identical to SEQ ID NO: 4493
  GFR-binding peptide
  MOD_RES (1)..(3)..(35)..(36): Xaa is C or S

SEQ ID NO: 25586 - protein, 40 aa, Artificial Sequence
  GFR-binding peptide
  MOD_RES (2)..(35)..(36): Xaa is C or S
  MOD_RES (13)..(14)..(15)..(16)..(17): Xaa is A or G
  MOD_RES (18)..(19)..(20)..(21): Xaa is A or G or is absent
KXSRVIMEYKFKXXXXXXXXXLYLISIPELAQPVXXPAAS

SEQ ID NO: 25587 - protein, 36 aa, Artificial Sequence
  GFR-binding peptide
  MOD_RES (34)..(35): Xaa is C or S
  MOD_RES (12)..(13)..(14)..(15)..(16): Xaa is A or G
  MOD_RES (17)..(18)..(19)..(20): Xaa is A or G or is absent
AEVVMDYHYKLXXXXXXXXXKYLISIPSLRAPVXXS

SEQ ID NO: 25588 - protein, 42 aa, Artificial Sequence; identical to SEQ ID NO: 4496
  GFR-binding peptide
  MOD_RES (1)..(3)..(36)..(37): Xaa is C or S
  MOD_RES (14)..(15)..(16)..(17)..(18): Xaa is A or G
  MOD_RES (19)..(20)..(21)..(22): Xaa is A or G or is absent

SEQ ID NO: 25589 - protein, 35 aa, Artificial Sequence
  GFR-binding peptide
  MOD_RES (32)..(33): Xaa is C or S
ESVAMGEYKFKYTVVGKDLYLISIPELKTPVXXAK

SEQ ID NO: 25590 - protein, 41 aa, Artificial Sequence
  GFR-binding peptide
  MOD_RES (1)..(35)..(36): Xaa is C or S
  MOD_RES (13)..(14)..(15)..(16)..(17): Xaa is A or G
  MOD_RES (18)..(19)..(20)..(21): Xaa is A or G or is absent
XARVVMNEYQKYXXXXXXXXXIYLVSIPSLQTPAXXPKPVT

SEQ ID NO: 25591 - protein, 34 aa, Artificial Sequence
  GFR-binding peptide
  MOD_RES (32)..(33): Xaa is C or S
SRVVMNEYKFKIVNSSDDLYLVSIPELKTPAXXP

SEQ ID NO: 25592 - protein, 37 aa, Artificial Sequence
  GFR-binding peptide
  MOD_RES (2)..(4): Xaa is C or S
  MOD_RES (16)..(17)..(18)..(19)..(20): Xaa is A or G
  MOD_RES (21)..(22)..(23)..(24): Xaa is A or G or is absent
RXGXGEVVMEEYQKYXXXXXXXXXIYLMSIPSLETPV

SEQ ID NO: 25593 - protein, 37 aa, Artificial Sequence; identical to SEQ ID NO: 4499
  GFR-binding peptide
  MOD_RES (2)..(34)..(35): Xaa is C or S

SEQ ID NO: 25594 - protein, 37 aa, Artificial Sequence
  GFR-binding peptide
  MOD_RES (2)..(36)..(37): Xaa is C or S
  MOD_RES (14)..(15)..(16)..(17)..(18): Xaa is A or G
  MOD_RES (19)..(20)..(21)..(22): Xaa is A or G or is absent
GXGEVVMEEYQKYXXXXXXXXXIYLMSIPSLETPVXX

SEQ ID NO: 25595 - protein, 39 aa, Artificial Sequence; identical to SEQ ID NO: 4500
  GFR-binding peptide
  MOD_RES (34)..(35): Xaa is C or S
  MOD_RES (12)..(13)..(14)..(15)..(16): Xaa is A or G
  MOD_RES (17)..(18)..(19)..(20): Xaa is A or G or is absent

SEQ ID NO: 25596 - protein, 38 aa, Artificial Sequence
  GFR-binding peptide
  MOD_RES (1)..(32)..(33): Xaa is C or S
XSKVVMEYKFKVKPTRGVLYLISIPELDQPVXXPSASA

SEQ ID NO: 25597 - protein, 34 aa, Artificial Sequence; identical to SEQ ID NO: 4501
  GFR-binding peptide
  MOD_RES (2)..(2): Xaa is C or S
  MOD_RES (13)..(14)..(15)..(16)..(17): Xaa is A or G
  MOD_RES (18)..(19)..(20)..(21): Xaa is A or G or is absent

SEQ ID NO: 25598 - protein, 37 aa, Artificial Sequence
  GFR-binding peptide
  MOD_RES (32)..(33): Xaa is C or S
ESVAMGEYQKYYTVVGKDIYLISIPSLKTPVXXAKSA

SEQ ID NO: 25599 - protein, 35 aa, Artificial Sequence
  GFR-binding peptide
  MOD_RES (2)..(34)..(35): Xaa is C or S
GXESVAMGEYKFKYTVVGKDLYLISIPELKTPVXX

SEQ ID NO: 25600 - protein, 40 aa, Artificial Sequence
  GFR-binding peptide
  MOD_RES (2)..(4)..(36)..(37): Xaa is C or S
RXGXGEVVMDEYKFKVVKENEDLYLMSIPELETPVXXAKP

SEQ ID NO: 25601 - protein, 39 aa, Artificial Sequence
  GFR-binding peptide
  MOD_RES (1)..(34)..(35): Xaa is C or S
  MOD_RES (12)..(13)..(14)..(15)..(16): Xaa is A or G
  MOD_RES (17)..(18)..(19)..(20): Xaa is A or G or is absent
XSRVIMEYQKYXXXXXXXXXIYLISIPSLAQPVXXPAAS

SEQ ID NO: 25602 - protein, 38 aa, Artificial Sequence
  GFR-binding peptide
  MOD_RES (1)..(3)..(37)..(38): Xaa is C or S
  MOD_RES (15)..(16)..(17)..(18)..(19): Xaa is A or G
  MOD_RES (20)..(21)..(22)..(23): Xaa is A or G or is absent
XGXSRVVMNEYQKYXXXXXXXXXIYLVSIPSLKTPAXX

SEQ ID NO: 25603 - protein, 35 aa, Artificial Sequence
  GFR-binding peptide
  MOD_RES (2)..(33)..(34): Xaa is C or S
KXSKVVMEYQKYVKPTRGVIYLISIPSLDQPVXXP

SEQ ID NO: 25604 - protein, 41 aa, Artificial Sequence
  GFR-binding peptide
  MOD_RES (1)..(35): Xaa is C or S
  MOD_RES (13)..(14)..(15)..(16)..(17): Xaa is A or G
  MOD_RES (18)..(19)..(20)..(21): Xaa is A or G or is absent
XSRVVMNEYQKYXXXXXXXXXIYLVSIPSLKTPAXTPKTVH

SEQ ID NO: 25605 - protein, 35 aa, Artificial Sequence; identical to SEQ ID NO: 4513
  GFR-binding peptide
  MOD_RES (34)..(35): Xaa is C or S
  MOD_RES (12)..(13)..(14)..(15)..(16): Xaa is A or G
  MOD_RES (17)..(18)..(19)..(20): Xaa is A or G or is absent

SEQ ID NO: 25606 - protein, 41 aa, Artificial Sequence
  GFR-binding peptide
  MOD_RES (1)..(3)..(37)..(38): Xaa is C or S
  MOD_RES (15)..(16)..(17)..(18)..(19): Xaa is A or G
  MOD_RES (20)..(21)..(22)..(23): Xaa is A or G or is absent
XGXAKVVMNEYKFKXXXXXXXXXLYLVSIPELKTPAXXAKP

SEQ ID NO: 25607 - protein, 38 aa, Artificial Sequence
  GFR-binding peptide
  MOD_RES (2)..(4)..(38): Xaa is C or S
  MOD_RES (16)..(17)..(18)..(19)..(20): Xaa is A or G
  MOD_RES (21)..(22)..(23)..(24): Xaa is A or G or is absent
RXGXGEVVMEEYQKYXXXXXXXXXIYLMSIPSLETPVX

SEQ ID NO: 25608 - protein, 37 aa, Artificial Sequence
  GFR-binding peptide
  MOD_RES (2)..(4)..(37): Xaa is C or S
  MOD_RES (15)..(16)..(17)..(18)..(19): Xaa is A or G
  MOD_RES (20)..(21)..(22)..(23): Xaa is A or G or is absent
SXKXSRVIMEYQKYXXXXXXXXXIYLISIPSLAQPVX

SEQ ID NO: 25609 - protein, 35 aa, Artificial Sequence
  GFR-binding peptide
  MOD_RES (2)..(34)..(35): Xaa is C or S
GXARVVMNEYQKYIVNSSDDIYLVSIPSLQTPAXX

SEQ ID NO: 25610 - protein, 39 aa, Artificial Sequence; identical to SEQ ID NO: 4514
  GFR-binding peptide
  MOD_RES (2)..(36)..(37): Xaa is C or S
  MOD_RES (14)..(15)..(16)..(17)..(18): Xaa is A or G
  MOD_RES (19)..(20)..(21)..(22): Xaa is A or G or is absent

SEQ ID NO: 25611 - protein, 34 aa, Artificial Sequence
  GFR-binding peptide
  MOD_RES (1)..(33)..(34): Xaa is C or S
XAKVVMNEYQKYIVNNSSDIYLVSIPSLKTPAXX

SEQ ID NO: 25612 - protein, 36 aa, Artificial Sequence
  GFR-binding peptide
  MOD_RES (1)..(3): Xaa is C or S
  MOD_RES (15)..(16)..(17)..(18)..(19): Xaa is A or G
  MOD_RES (20)..(21)..(22)..(23): Xaa is A or G or is absent
XGXAKVVMNEYKFKXXXXXXXXXLYLVSIPELKTPA

SEQ ID NO: 25613 - protein, 41 aa, Artificial Sequence
  GFR-binding peptide
  MOD_RES (1)..(3)..(35)..(36): Xaa is C or S
XGXESVAMGEYKFKYTVVGKDLYLISIPELKTPVXXAKSAK

SEQ ID NO: 25614 - protein, 36 aa, Artificial Sequence
  GFR-binding peptide
  MOD_RES (2)..(36): Xaa is C or S
  MOD_RES (14)..(15)..(16)..(17)..(18): Xaa is A or G
  MOD_RES (19)..(20)..(21)..(22): Xaa is A or G or is absent
GXAKVVMNEYQKYXXXXXXXXXIYLVSIPSLKTPAX

SEQ ID NO: 25615 - protein, 35 aa, Artificial Sequence; identical to SEQ ID NO: 4523
  GFR-binding peptide
  MOD_RES (33)..(34): Xaa is C or S
  MOD_RES (11)..(12)..(13)..(14)..(15): Xaa is A or G
  MOD_RES (16)..(17)..(18)..(19): Xaa is A or G or is absent

SEQ ID NO: 25616 - protein, 38 aa, Artificial Sequence
  GFR-binding peptide
  MOD_RES (1)..(35): Xaa is C or S
  MOD_RES (13)..(14)..(15)..(16)..(17): Xaa is A or G
  MOD_RES (18)..(19)..(20)..(21): Xaa is A or G or is absent
XSRVVMNEYQKYXXXXXXXXXIYLVSIPSLKTPAXTPK

SEQ ID NO: 25617 - protein, 37 aa, Artificial Sequence; identical to SEQ ID NO: 4527
  GFR-binding peptide
  MOD_RES (1)..(3)..(37): Xaa is C or S
  MOD_RES (15)..(16)..(17)..(18)..(19): Xaa is A or G
  MOD_RES (20)..(21)..(22)..(23): Xaa is A or G or is absent

SEQ ID NO: 25618 - protein, 36 aa, Artificial Sequence
  GFR-binding peptide
  MOD_RES (2)..(36): Xaa is C or S
  MOD_RES (14)..(15)..(16)..(17)..(18): Xaa is A or G
  MOD_RES (19)..(20)..(21)..(22): Xaa is A or G or is absent
GXGEVVMDEYKFKXXXXXXXXXLYLMSIPELETPVX

SEQ ID NO: 25619 - protein, 34 aa, Artificial Sequence
  GFR-binding peptide
  MOD_RES (34)..(34): Xaa is C or S
  MOD_RES (12)..(13)..(14)..(15)..(16): Xaa is A or G
  MOD_RES (17)..(18)..(19)..(20): Xaa is A or G or is absent
ARVVMNEYQKYXXXXXXXXXIYLVSIPSLQTPAX

SEQ ID NO: 25620 - protein, 36 aa, Artificial Sequence
  GFR-binding peptide
  MOD_RES (31)..(32): Xaa is C or S
RVVMNEYKFKIVNSSDDLYLVSIPELQTPAXXPKPV

SEQ ID NO: 25621 - protein, 38 aa, Artificial Sequence; identical to SEQ ID NO: 4528
  GFR-binding peptide
  MOD_RES (2)..(4)..(36)..(37): Xaa is C or S

SEQ ID NO: 25622 - protein, 39 aa, Artificial Sequence
  GFR-binding peptide
  MOD_RES (33)..(34): Xaa is C or S
  MOD_RES (11)..(12)..(13)..(14)..(15): Xaa is A or G
  MOD_RES (16)..(17)..(18)..(19): Xaa is A or G or is absent
KVVMNEYQKYXXXXXXXXXIYLVSIPSLKTPAXXAKPVA

SEQ ID NO: 25623 - protein, 36 aa, Artificial Sequence
  GFR-binding peptide
  MOD_RES (1)..(33): Xaa is C or S
XSRVVMNEYKFKIVNSSDDLYLVSIPELKTPAXTPK

SEQ ID NO: 25624 - protein, 35 aa, Artificial Sequence
  GFR-binding peptide
  MOD_RES (35)..(35): Xaa is C or S
  MOD_RES (13)..(14)..(15)..(16)..(17): Xaa is A or G
  MOD_RES (18)..(19)..(20)..(21): Xaa is A or G or is absent
EAVSMGEEYKFKXXXXXXXXXLYLVSIPELKTPVX

SEQ ID NO: 25625 - protein, 39 aa, Artificial Sequence
  GFR-binding peptide
  MOD_RES (2)..(4)..(37)..(38): Xaa is C or S
  MOD_RES (15)..(16)..(17)..(18)..(19): Xaa is A or G
  MOD_RES (20)..(21)..(22)..(23): Xaa is A or G or is absent
SXKXSKVVMEYKFKXXXXXXXXXLYLISIPELDQPVXXP

SEQ ID NO: 25626 - protein, 41 aa, Artificial Sequence
  GFR-binding peptide
  MOD_RES (1)..(3)..(37): Xaa is C or S
  MOD_RES (15)..(16)..(17)..(18)..(19): Xaa is A or G
  MOD_RES (20)..(21)..(22)..(23): Xaa is A or G or is absent
XGXSRVVMNEYKFKXXXXXXXXXLYLVSIPELKTPAXTPKT

SEQ ID NO: 25627 - protein, 38 aa, Artificial Sequence
  GFR-binding peptide
  MOD_RES (1)..(33)..(34): Xaa is C or S
XAEVVMDEYKFKVVNNAADLYLISIPELRAPVXXSAPA

SEQ ID NO: 25628 - protein, 39 aa, Artificial Sequence; identical to SEQ ID NO: 4533
  GFR-binding peptide
  MOD_RES (1)..(35)..(36): Xaa is C or S
  MOD_RES (13)..(14)..(15)..(16)..(17): Xaa is A or G
  MOD_RES (18)..(19)..(20)..(21): Xaa is A or G or is absent

SEQ ID NO: 25629 - protein, 36 aa, Artificial Sequence; identical to SEQ ID NO: 4534
  GFR-binding peptide
  MOD_RES (32)..(33): Xaa is C or S

SEQ ID NO: 25630 - protein, 39 aa, Artificial Sequence
  GFR-binding peptide
  MOD_RES (33)..(34): Xaa is C or S
  MOD_RES (11)..(12)..(13)..(14)..(15): Xaa is A or G
  MOD_RES (16)..(17)..(18)..(19): Xaa is A or G or is absent
EVVMDEYQKYXXXXXXXXXIYLMSIPSLETPVXXAKPIK

SEQ ID NO: 25631 - protein, 38 aa, Artificial Sequence
  GFR-binding peptide
  MOD_RES (1)..(3)..(35)..(36): Xaa is C or S
XGXAKVVMNEYKFKIVNNSSDLYLVSIPELKTPAXXAK

SEQ ID NO: 25632 - protein, 36 aa, Artificial Sequence
  GFR-binding peptide
  MOD_RES (2)..(33)..(34): Xaa is C or S
KXSKVVMEYQKYVKPTRGVIYLISIPSLDQPVXXPS

SEQ ID NO: 25633 - protein, 35 aa, Artificial Sequence; identical to SEQ ID NO: 4537
  GFR-binding peptide
  MOD_RES (2)..(4): Xaa is C or S

SEQ ID NO: 25634 - protein, 34 aa, Artificial Sequence; identical to SEQ ID NO: 4538
  GFR-binding peptide
  MOD_RES (2)..(33)..(34): Xaa is C or S

SEQ ID NO: 25635 - protein, 34 aa, Artificial Sequence; identical to SEQ ID NO: 4539
  GFR-binding peptide
  MOD_RES (32)..(33): Xaa is C or S

SEQ ID NO: 25636 - protein, 34 aa, Artificial Sequence; identical to SEQ ID NO: 4540
  GFR-binding peptide
  MOD_RES (2)..(34): Xaa is C or S

SEQ ID NO: 25637 - protein, 37 aa, Artificial Sequence
  GFR-binding peptide
  MOD_RES (2)..(4)..(36)..(37): Xaa is C or S
RXGXAEVVMDRYKKLVVNNAADFYLISIANLRAPVXX

SEQ ID NO: 25638 - protein, 38 aa, Artificial Sequence
  GFR-binding peptide
  MOD_RES (2)..(4)..(36)..(37): Xaa is C or S
HXGXAKVVMNEYKFKIVNNSSDLYLVSIPELKTPAXXA

SEQ ID NO: 25639 - protein, 34 aa, Artificial Sequence
  GFR-binding peptide
  MOD_RES (32)..(33): Xaa is C or S
AKVVMNEYQKYIVNNSSDIYLVSIPSLKTPAXXA

SEQ ID NO: 25640 - protein, 36 aa, Artificial Sequence
  GFR-binding peptide
  MOD_RES (1)..(32)..(33): Xaa is C or S
XSKVIMEYQKYIKPTKGIIYLISIPSLDQSVXXPSA

SEQ ID NO: 25641 - protein, 38 aa, Artificial Sequence
  GFR-binding peptide
  MOD_RES (1)..(3)..(37)..(38): Xaa is C or S
  MOD_RES (15)..(16)..(17)..(18)..(19): Xaa is A or G
  MOD_RES (20)..(21)..(22)..(23): Xaa is A or G or is absent
XGXESVAMGEYKFKXXXXXXXXXLYLISIPELKTPVXX

SEQ ID NO: 25642 - protein, 33 aa, Artificial Sequence
  GFR-binding peptide
  MOD_RES (12)..(13)..(14)..(15)..(16): Xaa is A or G
  MOD_RES (17)..(18)..(19)..(20): Xaa is A or G or is absent
AEVVMDYHYKLXXXXXXXXXKYLISIPSLRAPV

SEQ ID NO: 25643 - protein, 37 aa, Artificial Sequence
  GFR-binding peptide
  MOD_RES (2)..(4)..(36)..(37): Xaa is C or S
HXGXSRVVMNEYQKYIVNSSDDIYLVSIPSLKTPAXX

SEQ ID NO: 25644 - protein, 39 aa, Artificial Sequence
  GFR-binding peptide
  MOD_RES (1)..(3)..(35)..(36): Xaa is C or S
XGXAEVVMDRYKKLVVNNAADFYLISIANLRAPVXXSAP

SEQ ID NO: 25645 - protein, 39 aa, Artificial Sequence
  GFR-binding peptide
  MOD_RES (2)..(34)..(35): Xaa is C or S
GXESVAMGEYKFKYTVVGKDLYLISIPELKTPVXXAKSA

SEQ ID NO: 25646 - protein, 34 aa, Artificial Sequence; identical to SEQ ID NO: 4552
  GFR-binding peptide
  MOD_RES (31)..(32): Xaa is C or S

SEQ ID NO: 25647 - protein, 40 aa, Artificial Sequence; identical to SEQ ID NO: 4553
  GFR-binding peptide
  MOD_RES (34)..(35): Xaa is C or S
  MOD_RES (12)..(13)..(14)..(15)..(16): Xaa is A or G
  MOD_RES (17)..(18)..(19)..(20): Xaa is A or G or is absent

SEQ ID NO: 25648 - protein, 36 aa, Artificial Sequence
  GFR-binding peptide
  MOD_RES (34)..(35): Xaa is C or S
  MOD_RES (12)..(13)..(14)..(15)..(16): Xaa is A or G
  MOD_RES (17)..(18)..(19)..(20): Xaa is A or G or is absent
ESVAMGEYQKYXXXXXXXXXIYLISIPSLKTPVXXA

SEQ ID NO: 25649 - protein, 36 aa, Artificial Sequence; identical to SEQ ID NO: 4556
  GFR-binding peptide
  MOD_RES (1)..(33)..(34): Xaa is C or S

SEQ ID NO: 25650 - protein, 36 aa, Artificial Sequence
  GFR-binding peptide
  MOD_RES (1)..(35)..(36): Xaa is C or S
  MOD_RES (13)..(14)..(15)..(16)..(17): Xaa is A or G
  MOD_RES (18)..(19)..(20)..(21): Xaa is A or G or is absent
XAEVVMDEYQKYXXXXXXXXXIYLISIPSLRAPVXX

SEQ ID NO: 25651 - protein, 35 aa, Artificial Sequence; identical to SEQ ID NO: 4558
  GFR-binding peptide
  MOD_RES (2)..(2): Xaa is C or S
  MOD_RES (14)..(15)..(16)..(17)..(18): Xaa is A or G
  MOD_RES (19)..(20)..(21)..(22): Xaa is A or G or is absent

SEQ ID NO: 25652 - protein, 37 aa, Artificial Sequence
  GFR-binding peptide
  MOD_RES (33)..(34): Xaa is C or S
EAVSMGEEYQKYTPVGMDDIYLVSIPSLKTPVXXAKG

SEQ ID NO: 25653 - protein, 42 aa, Artificial Sequence
  GFR-binding peptide
  MOD_RES (1)..(3)..(37)..(38): Xaa is C or S
  MOD_RES (15)..(16)..(17)..(18)..(19): Xaa is A or G
  MOD_RES (20)..(21)..(22)..(23): Xaa is A or G or is absent
XGXAKVVMNEYQKYXXXXXXXXXIYLVSIPSLKTPAXXAKPV

SEQ ID NO: 25654 - protein, 41 aa, Artificial Sequence
  GFR-binding peptide
  MOD_RES (1)..(35)..(36): Xaa is C or S
  MOD_RES (13)..(14)..(15)..(16)..(17): Xaa is A or G
  MOD_RES (18)..(19)..(20)..(21): Xaa is A or G or is absent
XAKVVMNEYKFKXXXXXXXXXLYLVSIPELKTPAXXAKPVA

SEQ ID NO: 25655 - protein, 37 aa, Artificial Sequence; identical to SEQ ID NO: 4562
  GFR-binding peptide
  MOD_RES (1)..(35)..(36): Xaa is C or S
  MOD_RES (13)..(14)..(15)..(16)..(17): Xaa is A or G
  MOD_RES (18)..(19)..(20)..(21): Xaa is A or G or is absent

SEQ ID NO: 25656 - protein, 40 aa, Artificial Sequence
  GFR-binding peptide
  MOD_RES (1)..(35)..(36): Xaa is C or S
  MOD_RES (13)..(14)..(15)..(16)..(17): Xaa is A or G
  MOD_RES (18)..(19)..(20)..(21): Xaa is A or G or is absent
XAKVVMNEYQKYXXXXXXXXXIYLVSIPSLKTPAXXAKPV

SEQ ID NO: 25657 - protein, 38 aa, Artificial Sequence; identical to SEQ ID NO: 4566
  GFR-binding peptide
  MOD_RES (1)..(3)..(36)..(37): Xaa is C or S
  MOD_RES (14)..(15)..(16)..(17)..(18): Xaa is A or G
  MOD_RES (19)..(20)..(21)..(22): Xaa is A or G or is absent

SEQ ID NO: 25658 - protein, 39 aa, Artificial Sequence
  GFR-binding peptide
  MOD_RES (1)..(35)..(36): Xaa is C or S
  MOD_RES (13)..(14)..(15)..(16)..(17): Xaa is A or G
  MOD_RES (18)..(19)..(20)..(21): Xaa is A or G or is absent
XSRVVMNEYKFKXXXXXXXXXLYLVSIPELKTPAXXPKP

SEQ ID NO: 25659 - protein, 39 aa, Artificial Sequence; identical to SEQ ID NO: 4570
  GFR-binding peptide
  MOD_RES (1)..(3)..(35)..(36): Xaa is C or S

SEQ ID NO: 25660 - protein, 35 aa, Artificial Sequence
  GFR-binding peptide
  MOD_RES (2)..(34)..(35): Xaa is C or S
GXAEVVMDEYQKYVVNNAADIYLISIPSLRAPVXX

SEQ ID NO: 25661 - protein, 34 aa, Artificial Sequence
  GFR-binding peptide
  MOD_RES (33)..(34): Xaa is C or S
  MOD_RES (11)..(12)..(13)..(14)..(15): Xaa is A or G
  MOD_RES (16)..(17)..(18)..(19): Xaa is A or G or is absent
RVVMNEYQKYXXXXXXXXXIYLVSIPSLQTPAXX

SEQ ID NO: 25662 - protein, 37 aa, Artificial Sequence; identical to SEQ ID NO: 4572
  GFR-binding peptide
  MOD_RES (2)..(4): Xaa is C or S
  MOD_RES (16)..(17)..(18)..(19)..(20): Xaa is A or G
  MOD_RES (21)..(22)..(23)..(24): Xaa is A or G or is absent

SEQ ID NO: 25663 - protein, 36 aa, Artificial Sequence
  GFR-binding peptide
  MOD_RES (33)..(34): Xaa is C or S
  MOD_RES (11)..(12)..(13)..(14)..(15): Xaa is A or G
  MOD_RES (16)..(17)..(18)..(19): Xaa is A or G or is absent
KVVMNEYKFKXXXXXXXXXLYLVSIPELKTPAXXAK

SEQ ID NO: 25664 - protein, 33 aa, Artificial Sequence
  GFR-binding peptide
  MOD_RES (1)..(3): Xaa is C or S
XKXSKVVMEYQKYVKPTRGVIYLISIPSLDQPV

SEQ ID NO: 25665 - protein, 41 aa, Artificial Sequence; identical to SEQ ID NO: 4575
  GFR-binding peptide
  MOD_RES (1)..(3)..(35)..(36): Xaa is C or S

SEQ ID NO: 25666 - protein, 36 aa, Artificial Sequence
  GFR-binding peptide
  MOD_RES (31)..(32): Xaa is C or S
SVAMGYHYKLYTVVGKDKYLISIPSLKTPVXXAKSA

SEQ ID NO: 25667 - protein, 38 aa, Artificial Sequence; identical to SEQ ID NO: 4579
  GFR-binding peptide
  MOD_RES (32)..(33): Xaa is C or S

SEQ ID NO: 25668 - protein, 38 aa, Artificial Sequence
  GFR-binding peptide
  MOD_RES (1)..(33)..(34): Xaa is C or S
XARVVMNEYKFKIVNSSDDLYLVSIPELQTPAXXPKPV

SEQ ID NO: 25669 - protein, 37 aa, Artificial Sequence
  GFR-binding peptide
  MOD_RES (32)..(33): Xaa is C or S
GEVVMEEYKFKVVKDYEDLYLMSIPELETPVXXAKPI

SEQ ID NO: 25670 - protein, 42 aa, Artificial Sequence
  GFR-binding peptide
  MOD_RES (2)..(4)..(38)..(39): Xaa is C or S
  MOD_RES (16)..(17)..(18)..(19)..(20): Xaa is A or G
  MOD_RES (21)..(22)..(23)..(24): Xaa is A or G or is absent
RXGXESVAMGRYKKLXXXXXXXXXFYLISIANLKTPVXXAKS

SEQ ID NO: 25671 - protein, 41 aa, Artificial Sequence
  GFR-binding peptide
  MOD_RES (2)..(4)..(36)..(37): Xaa is C or S
RXGXGEVVMDEYKFKVVKENEDLYLMSIPELETPVXXAKPI

SEQ ID NO: 25672 - protein, 34 aa, Artificial Sequence
  GFR-binding peptide
  MOD_RES (34)..(34): Xaa is C or S
  MOD_RES (12)..(13)..(14)..(15)..(16): Xaa is A or G
  MOD_RES (17)..(18)..(19)..(20): Xaa is A or G or is absent
AEVVMDRYKKLXXXXXXXXXFYLISIANLRAPVX

SEQ ID NO: 25673 - protein, 35 aa, Artificial Sequence
  GFR-binding peptide
  MOD_RES (1)..(32)..(33): Xaa is C or S
XSKVIMEYQKYIKPTKGIIYLISIPSLDQSVXXPS

SEQ ID NO: 25674 - protein, 43 aa, Artificial Sequence
  GFR-binding peptide
  MOD_RES (2)..(4)..(37)..(38): Xaa is C or S
RXGXEAVSMGEEYQKYTPVGMDDIYLVSIPSLKTPVXXAKGVK

SEQ ID NO: 25675 - protein, 38 aa, Artificial Sequence
  GFR-binding peptide
  MOD_RES (2)..(4): Xaa is C or S
  MOD_RES (17)..(18)..(19)..(20)..(21): Xaa is A or G
  MOD_RES (22)..(23)..(24)..(25): Xaa is A or G or is absent
RXGXEAVSMGEEYQKYXXXXXXXXXIYLVSIPSLKTPV

SEQ ID NO: 25676 - protein, 39 aa, Artificial Sequence
  GFR-binding peptide
  MOD_RES (1)..(3)..(37)..(38): Xaa is C or S
  MOD_RES (15)..(16)..(17)..(18)..(19): Xaa is A or G
  MOD_RES (20)..(21)..(22)..(23): Xaa is A or G or is absent
XGXAKVVMNEYQKYXXXXXXXXXIYLVSIPSLKTPAXXA

SEQ ID NO: 25677 - protein, 36 aa, Artificial Sequence
  GFR-binding peptide
  MOD_RES (1)..(35)..(36): Xaa is C or S
  MOD_RES (13)..(14)..(15)..(16)..(17): Xaa is A or G
  MOD_RES (18)..(19)..(20)..(21): Xaa is A or G or is absent
XAEVVMDYHYKLXXXXXXXXXKYLISIPSLRAPVXX

SEQ ID NO: 25678 - protein, 35 aa, Artificial Sequence; identical to SEQ ID NO: 4588
  GFR-binding peptide
  MOD_RES (2)..(35): Xaa is C or S
  MOD_RES (13)..(14)..(15)..(16)..(17): Xaa is A or G
  MOD_RES (18)..(19)..(20)..(21): Xaa is A or G or is absent

SEQ ID NO: 25679 - protein, 38 aa, Artificial Sequence
  GFR-binding peptide
  MOD_RES (2)..(4)..(36)..(37): Xaa is C or S
RXGXAEVVMDEYQKYVVNNAADIYLISIPSLRAPVXXS

SEQ ID NO: 25680 - protein, 43 aa, Artificial Sequence
  GFR-binding peptide
  MOD_RES (2)..(4)..(38): Xaa is C or S
  MOD_RES (16)..(17)..(18)..(19)..(20): Xaa is A or G
  MOD_RES (21)..(22)..(23)..(24): Xaa is A or G or is absent
HXGXSRVVMNEYQKYXXXXXXXXXIYLVSIPSLKTPAXTPKTV

SEQ ID NO: 25681 - protein, 32 aa, Artificial Sequence
  GFR-binding peptide
  MOD_RES (1)..(1): Xaa is C or S
XAEVVMDEYKFKVVNNAADLYLISIPELRAPV

SEQ ID NO: 25682 - protein, 37 aa, Artificial Sequence; identical to SEQ ID NO: 4589
  GFR-binding peptide
  MOD_RES (1)..(35)..(36): Xaa is C or S
  MOD_RES (13)..(14)..(15)..(16)..(17): Xaa is A or G
  MOD_RES (18)..(19)..(20)..(21): Xaa is A or G or is absent

SEQ ID NO: 25683 - protein, 41 aa, Artificial Sequence
  GFR-binding peptide
  MOD_RES (2)..(36)..(37): Xaa is C or S
  MOD_RES (14)..(15)..(16)..(17)..(18): Xaa is A or G
  MOD_RES (19)..(20)..(21)..(22): Xaa is A or G or is absent
GXAEVVMDEYQKYXXXXXXXXXIYLISIPSLRAPVXXSAPA

SEQ ID NO: 25684 - protein, 39 aa, Artificial Sequence
  GFR-binding peptide
  MOD_RES (2)..(34)..(35): Xaa is C or S
GXGEVVMDEYQKYVVKENEDIYLMSIPSLETPVXXAKPI

SEQ ID NO: 25685 - protein, 37 aa, Artificial Sequence
  GFR-binding peptide
  MOD_RES (1)..(33)..(34): Xaa is C or S
XAEVVMDEYQKYVVNNAADIYLISIPSLRAPVXXSAP

SEQ ID NO: 25686 - protein, 40 aa, Artificial Sequence
  GFR-binding peptide
  MOD_RES (1)..(3)..(36)..(37): Xaa is C or S
  MOD_RES (14)..(15)..(16)..(17)..(18): Xaa is A or G
  MOD_RES (19)..(20)..(21)..(22): Xaa is A or G or is absent
XKXSRVIMEYKFKXXXXXXXXXLYLISIPELAQPVXXPAA

SEQ ID NO: 25687 - protein, 37 aa, Artificial Sequence; identical to SEQ ID NO: 4594
  GFR-binding peptide
  MOD_RES (1)..(35)..(36): Xaa is C or S
  MOD_RES (13)..(14)..(15)..(16)..(17): Xaa is A or G
  MOD_RES (18)..(19)..(20)..(21): Xaa is A or G or is absent

SEQ ID NO: 25688 - protein, 33 aa, Artificial Sequence
  GFR-binding peptide
  MOD_RES (12)..(13)..(14)..(15)..(16): Xaa is A or G
  MOD_RES (17)..(18)..(19)..(20): Xaa is A or G or is absent
ESVAMGYHYKLXXXXXXXXXKYLISIPSLKTPV

SEQ ID NO: 25689 - protein, 38 aa, Artificial Sequence
  GFR-binding peptide
  MOD_RES (2)..(36)..(37): Xaa is C or S
  MOD_RES (14)..(15)..(16)..(17)..(18): Xaa is A or G
  MOD_RES (19)..(20)..(21)..(22): Xaa is A or G or is absent
GXARVVMNEYKFKXXXXXXXXXLYLVSIPELQTPAXXP

SEQ ID NO: 25690 - protein, 36 aa, Artificial Sequence; identical to SEQ ID NO: 4597
  GFR-binding peptide
  MOD_RES (33)..(34): Xaa is C or S
  MOD_RES (11)..(12)..(13)..(14)..(15): Xaa is A or G
  MOD_RES (16)..(17)..(18)..(19): Xaa is A or G or is absent

SEQ ID NO: 25691 - protein, 40 aa, Artificial Sequence
  GFR-binding peptide
  MOD_RES (1)..(34)..(35): Xaa is C or S
  MOD_RES (12)..(13)..(14)..(15)..(16): Xaa is A or G
  MOD_RES (17)..(18)..(19)..(20): Xaa is A or G or is absent
XSKVIMEYKFKXXXXXXXXXLYLISIPELDQSVXXPSASA

SEQ ID NO: 25692 - protein, 41 aa, Artificial Sequence
  GFR-binding peptide
  MOD_RES (2)..(35)..(36): Xaa is C or S
  MOD_RES (13)..(14)..(15)..(16)..(17): Xaa is A or G
  MOD_RES (18)..(19)..(20)..(21): Xaa is A or G or is absent
KXSKVIMEYQKYXXXXXXXXXIYLISIPSLDQSVXXPSASA

SEQ ID NO: 25693 - protein, 40 aa, Artificial Sequence
  GFR-binding peptide
  MOD_RES (2)..(34)..(35): Xaa is C or S
GXAEVVMDYHYKLVVNNAADKYLISIPSLRAPVXXSAPAA

SEQ ID NO: 25694 - protein, 37 aa, Artificial Sequence
  GFR-binding peptide
  MOD_RES (2)..(4)..(37): Xaa is C or S
  MOD_RES (15)..(16)..(17)..(18)..(19): Xaa is A or G
  MOD_RES (20)..(21)..(22)..(23): Xaa is A or G or is absent
SXKXSKVVMEYQKYXXXXXXXXXIYLISIPSLDQPVX

SEQ ID NO: 25695 - protein, 34 aa, Artificial Sequence; identical to SEQ ID NO: 4601
  GFR-binding peptide
  MOD_RES (1)..(3)..(34): Xaa is C or S

SEQ ID NO: 25696 - protein, 38 aa, Artificial Sequence; identical to SEQ ID NO: 4602
  GFR-binding peptide
  MOD_RES (1)..(35)..(36): Xaa is C or S
  MOD_RES (13)..(14)..(15)..(16)..(17): Xaa is A or G
  MOD_RES (18)..(19)..(20)..(21): Xaa is A or G or is absent

SEQ ID NO: 25697 - protein, 37 aa, Artificial Sequence
  GFR-binding peptide
  MOD_RES (34)..(35): Xaa is C or S
  MOD_RES (12)..(13)..(14)..(15)..(16): Xaa is A or G
  MOD_RES (17)..(18)..(19)..(20): Xaa is A or G or is absent
GEVVMDEYQKYXXXXXXXXXIYLMSIPSLETPVXXAK

SEQ ID NO: 25698 - protein, 39 aa, Artificial Sequence; identical to SEQ ID NO: 4606
  GFR-binding peptide
  MOD_RES (2)..(34)..(35): Xaa is C or S

SEQ ID NO: 25699 - protein, 36 aa, Artificial Sequence; identical to SEQ ID NO: 4607
  GFR-binding peptide
  MOD_RES (2)..(4)..(35)..(36): Xaa is C or S

SEQ ID NO: 25700 - protein, 34 aa, Artificial Sequence; identical to SEQ ID NO: 4610
  GFR-binding peptide
  MOD_RES (31)..(32): Xaa is C or S

SEQ ID NO: 25701 - protein, 40 aa, Artificial Sequence
  GFR-binding peptide
  MOD_RES (2)..(4)..(37)..(38): Xaa is C or S
  MOD_RES (15)..(16)..(17)..(18)..(19): Xaa is A or G
  MOD_RES (20)..(21)..(22)..(23): Xaa is A or G or is absent
SXKXSKVIMEYQKYXXXXXXXXXIYLISIPSLDQSVXXPS

SEQ ID NO: 25702 - protein, 37 aa, Artificial Sequence
  GFR-binding peptide
  MOD_RES (1)..(35)..(36): Xaa is C or S
  MOD_RES (13)..(14)..(15)..(16)..(17): Xaa is A or G
  MOD_RES (18)..(19)..(20)..(21): Xaa is A or G or is absent
XARVVMNEYQKYXXXXXXXXXIYLVSIPSLQTPAXXP

SEQ ID NO: 25703 - protein, 34 aa, Artificial Sequence
  GFR-binding peptide
  MOD_RES (2)..(4): Xaa is C or S
SXKXSKVIMEYKFKIKPTKGILYLISIPELDQSV

SEQ ID NO: 25704 - protein, 35 aa, Artificial Sequence
  GFR-binding peptide
  MOD_RES (2)..(34)..(35): Xaa is C or S
GXSRVVMNEYKFKIVNSSDDLYLVSIPELKTPAXX

SEQ ID NO: 25705 - protein, 37 aa, Artificial Sequence
  GFR-binding peptide
  MOD_RES (1)..(34)..(35): Xaa is C or S
  MOD_RES (12)..(13)..(14)..(15)..(16): Xaa is A or G
  MOD_RES (17)..(18)..(19)..(20): Xaa is A or G or is absent
XSKVVMEYQKYXXXXXXXXXIYLISIPSLDQPVXXPS

SEQ ID NO: 25706 - protein, 43 aa, Artificial Sequence; identical to SEQ ID NO: 4615
  GFR-binding peptide
  MOD_RES (1)..(3)..(37): Xaa is C or S
  MOD_RES (15)..(16)..(17)..(18)..(19): Xaa is A or G
  MOD_RES (20)..(21)..(22)..(23): Xaa is A or G or is absent

SEQ ID NO: 25707 - protein, 37 aa, Artificial Sequence
  GFR-binding peptide
  MOD_RES (2)..(4): Xaa is C or S
  MOD_RES (16)..(17)..(18)..(19)..(20): Xaa is A or G
  MOD_RES (21)..(22)..(23)..(24): Xaa is A or G or is absent
RXGXESVAMGRYKKLXXXXXXXXXFYLISIANLKTPV

SEQ ID NO: 25708 - protein, 36 aa, Artificial Sequence
  GFR-binding peptide
  MOD_RES (2)..(4)..(36): Xaa is C or S
HXGXSRVVMNEYKFKIVNSSDDLYLVSIPELKTPAX

SEQ ID NO: 25709 - protein, 35 aa, Artificial Sequence
  GFR-binding peptide
  MOD_RES (2)..(2): Xaa is C or S
  MOD_RES (14)..(15)..(16)..(17)..(18): Xaa is A or G
  MOD_RES (19)..(20)..(21)..(22): Xaa is A or G or is absent
GXAKVVMNEYQKYXXXXXXXXXIYLVSIPSLKTPA

SEQ ID NO: 25710 - protein, 40 aa, Artificial Sequence; identical to SEQ ID NO: 4618
  GFR-binding peptide
  MOD_RES (1)..(35)..(36): Xaa is C or S
  MOD_RES (13)..(14)..(15)..(16)..(17): Xaa is A or G
  MOD_RES (18)..(19)..(20)..(21): Xaa is A or G or is absent

SEQ ID NO: 25711 - protein, 33 aa, Artificial Sequence; identical to SEQ ID NO: 4619
  GFR-binding peptide
  MOD_RES (1)..(33): Xaa is C or S

SEQ ID NO: 25712 - protein, 37 aa, Artificial Sequence
  GFR-binding peptide
  MOD_RES (1)..(3)..(37): Xaa is C or S
  MOD_RES (15)..(16)..(17)..(18)..(19): Xaa is A or G
  MOD_RES (20)..(21)..(22)..(23): Xaa is A or G or is absent
XGXESVAMGYHYKLXXXXXXXXXKYLISIPSLKTPVX

SEQ ID NO: 25713 - protein, 31 aa, Artificial Sequence
  GFR-binding peptide
  MOD_RES (31)..(31): Xaa is C or S
EVVMEEYQKYVVKDYEDIYLMSIPSLETPVX

SEQ ID NO: 25714 - protein, 34 aa, Artificial Sequence
  GFR-binding peptide
  MOD_RES (1)..(34): Xaa is C or S
  MOD_RES (12)..(13)..(14)..(15)..(16): Xaa is A or G
  MOD_RES (17)..(18)..(19)..(20): Xaa is A or G or is absent
XSRVIMEYKFKXXXXXXXXXLYLISIPELAQPVX

SEQ ID NO: 25715 - protein, 41 aa, Artificial Sequence; identical to SEQ ID NO: 4623
  GFR-binding peptide
  MOD_RES (2)..(4)..(38)..(39): Xaa is C or S
  MOD_RES (16)..(17)..(18)..(19)..(20): Xaa is A or G
  MOD_RES (21)..(22)..(23)..(24): Xaa is A or G or is absent

SEQ ID NO: 25716 - protein, 33 aa, Artificial Sequence; identical to SEQ ID NO: 4627
  GFR-binding peptide
  MOD_RES (1)..(3): Xaa is C or S

SEQ ID NO: 25717 - protein, 39 aa, Artificial Sequence; identical to SEQ ID NO: 4630
  GFR-binding peptide
  MOD_RES (1)..(34)..(35): Xaa is C or S
  MOD_RES (12)..(13)..(14)..(15)..(16): Xaa is A or G
  MOD_RES (17)..(18)..(19)..(20): Xaa is A or G or is absent

SEQ ID NO: 25718 - protein, 39 aa, Artificial Sequence
  GFR-binding peptide
  MOD_RES (1)..(3)..(37)..(38): Xaa is C or S
  MOD_RES (15)..(16)..(17)..(18)..(19): Xaa is A or G
  MOD_RES (20)..(21)..(22)..(23): Xaa is A or G or is absent
XGXAEVVMDYHYKLXXXXXXXXXKYLISIPSLRAPVXXS

SEQ ID NO: 25719 - protein, 42 aa, Artificial Sequence; identical to SEQ ID NO: 4632
  GFR-binding peptide
  MOD_RES (1)..(3)..(37)..(38): Xaa is C or S
  MOD_RES (15)..(16)..(17)..(18)..(19): Xaa is A or G
  MOD_RES (20)..(21)..(22)..(23): Xaa is A or G or is absent

SEQ ID NO: 25720 - protein, 41 aa, Artificial Sequence
  GFR-binding peptide
  MOD_RES (2)..(36)..(37): Xaa is C or S
  MOD_RES (14)..(15)..(16)..(17)..(18): Xaa is A or G
  MOD_RES (19)..(20)..(21)..(22): Xaa is A or G or is absent
GXAEVVMDRYKKLXXXXXXXXXFYLISIANLRAPVXXSAPA

SEQ ID NO: 25721 - protein, 34 aa, Artificial Sequence
  GFR-binding peptide
  MOD_RES (33)..(34): Xaa is C or S
  MOD_RES (11)..(12)..(13)..(14)..(15): Xaa is A or G
  MOD_RES (16)..(17)..(18)..(19): Xaa is A or G or is absent
EVVMDRYKKLXXXXXXXXXFYLISIANLRAPVXX

SEQ ID NO: 25722 - protein, 37 aa, Artificial Sequence
  GFR-binding peptide
  MOD_RES (1)..(32)..(33): Xaa is C or S
XSKVIMEYKFKIKPTKGILYLISIPELDQSVXXPSAS

SEQ ID NO: 25723 - protein, 35 aa, Artificial Sequence; identical to SEQ ID NO: 4635
  GFR-binding peptide
  MOD_RES (32)..(33): Xaa is C or S

SEQ ID NO: 25724 - protein, 39 aa, Artificial Sequence
  GFR-binding peptide
  MOD_RES (1)..(35)..(36): Xaa is C or S
  MOD_RES (13)..(14)..(15)..(16)..(17): Xaa is A or G
  MOD_RES (18)..(19)..(20)..(21): Xaa is A or G or is absent
XGEVVMDEYQKYXXXXXXXXXIYLMSIPSLETPVXXAKP

SEQ ID NO: 25725 - protein, 38 aa, Artificial Sequence; identical to SEQ ID NO: 4636
  GFR-binding peptide
  MOD_RES (33)..(33): Xaa is C or S
  MOD_RES (11)..(12)..(13)..(14)..(15): Xaa is A or G
  MOD_RES (16)..(17)..(18)..(19): Xaa is A or G or is absent

SEQ ID NO: 25726 - protein, 35 aa, Artificial Sequence
  GFR-binding peptide
  MOD_RES (33)..(34): Xaa is C or S
  MOD_RES (11)..(12)..(13)..(14)..(15): Xaa is A or G
  MOD_RES (16)..(17)..(18)..(19): Xaa is A or G or is absent
RVVMNEYKFKXXXXXXXXXLYLVSIPELQTPAXXP

SEQ ID NO: 25727 - protein, 39 aa, Artificial Sequence
  GFR-binding peptide
  MOD_RES (2)..(36)..(37): Xaa is C or S
  MOD_RES (14)..(15)..(16)..(17)..(18): Xaa is A or G
  MOD_RES (19)..(20)..(21)..(22): Xaa is A or G or is absent
GXAKVVMNEYKFKXXXXXXXXXLYLVSIPELKTPAXXAK

SEQ ID NO: 25728 - protein, 34 aa, Artificial Sequence
  GFR-binding peptide
  MOD_RES (32)..(33): Xaa is C or S
AEVVMDEYQKYVVNNAADIYLISIPSLRAPVXXS

SEQ ID NO: 25729 - protein, 41 aa, Artificial Sequence; identical to SEQ ID NO: 4639
  GFR-binding peptide
  MOD_RES (2)..(4)..(36)..(37): Xaa is C or S

SEQ ID NO: 25730 - protein, 33 aa, Artificial Sequence; identical to SEQ ID NO: 4640
  GFR-binding peptide
  MOD_RES (2)..(2): Xaa is C or S

SEQ ID NO: 25731 - protein, 36 aa, Artificial Sequence
  GFR-binding peptide
  MOD_RES (2)..(4)..(36): Xaa is C or S
HXGXSRVVMNEYQKYIVNSSDDIYLVSIPSLKTPAX

SEQ ID NO: 25732 - protein, 38 aa, Artificial Sequence; identical to SEQ ID NO: 4641
  GFR-binding peptide
  MOD_RES (1)..(3)..(34)..(35): Xaa is C or S

SEQ ID NO: 25733 - protein, 39 aa, Artificial Sequence; identical to SEQ ID NO: 4643
  GFR-binding peptide
  MOD_RES (2)..(35)..(36): Xaa is C or S
  MOD_RES (13)..(14)..(15)..(16)..(17): Xaa is A or G
  MOD_RES (18)..(19)..(20)..(21): Xaa is A or G or is absent

SEQ ID NO: 25734 - protein, 34 aa, Artificial Sequence
  GFR-binding peptide
  MOD_RES (31)..(32): Xaa is C or S
EVVMDRYKKLVVNNAADFYLISIANLRAPVXXSA

SEQ ID NO: 25735 - protein, 40 aa, Artificial Sequence; identical to SEQ ID NO: 4644
  GFR-binding peptide
  MOD_RES (1)..(3)..(35)..(36): Xaa is C or S

SEQ ID NO: 25736 - protein, 33 aa, Artificial Sequence
  GFR-binding peptide
  MOD_RES (2)..(33): Xaa is C or S
KXSKVIMEYKFKIKPTKGILYLISIPELDQSVX

SEQ ID NO: 25737 - protein, 37 aa, Artificial Sequence
  GFR-binding peptide
  MOD_RES (33)..(34): Xaa is C or S
EAVSMGEEYKFKTPVGMDDLYLVSIPELKTPVXXAKG

SEQ ID NO: 25738 - protein, 33 aa, Artificial Sequence
  GFR-binding peptide
  MOD_RES (1)..(33): Xaa is C or S
XAEVVMDRYKKLVVNNAADFYLISIANLRAPVX

SEQ ID NO: 25739 - protein, 41 aa, Artificial Sequence
  GFR-binding peptide
  MOD_RES (1)..(3)..(35)..(36): Xaa is C or S
XGXGEVVMEEYKFKVVKDYEDLYLMSIPELETPVXXAKPIS

SEQ ID NO: 25740 - protein, 38 aa, Artificial Sequence; identical to SEQ ID NO: 4649
  GFR-binding peptide
  MOD_RES (1)..(3)..(34)..(35): Xaa is C or S

SEQ ID NO: 25741 - protein, 37 aa, Artificial Sequence; identical to SEQ ID NO: 4651
  GFR-binding peptide
  MOD_RES (32)..(32): Xaa is C or S

SEQ ID NO: 25742 - protein, 37 aa, Artificial Sequence
  GFR-binding peptide
  MOD_RES (34)..(35): Xaa is C or S
  MOD_RES (12)..(13)..(14)..(15)..(16): Xaa is A or G
  MOD_RES (17)..(18)..(19)..(20): Xaa is A or G or is absent
ESVAMGYHYKLXXXXXXXXXKYLISIPSLKTPVXXAK

SEQ ID NO: 25743 - protein, 35 aa, Artificial Sequence; identical to SEQ ID NO: 4652
  GFR-binding peptide
  MOD_RES (33)..(34): Xaa is C or S
  MOD_RES (11)..(12)..(13)..(14)..(15): Xaa is A or G
  MOD_RES (16)..(17)..(18)..(19): Xaa is A or G or is absent

SEQ ID NO: 25744 - protein, 31 aa, Artificial Sequence
  GFR-binding peptide
  MOD_RES (31)..(31): Xaa is C or S
KVVMNEYQKYIVNNSSDIYLVSIPSLKTPAX

SEQ ID NO: 25745 - protein, 37 aa, Artificial Sequence; identical to SEQ ID NO: 4654
  GFR-binding peptide
  MOD_RES (1)..(3)..(35): Xaa is C or S

SEQ ID NO: 25746 - protein, 31 aa, Artificial Sequence; identical to SEQ ID NO: 4655
  GFR-binding peptide
  MOD_RES (1)..(1): Xaa is C or S

SEQ ID NO: 25747 - protein, 38 aa, Artificial Sequence
  GFR-binding peptide
  MOD_RES (1)..(3)..(37)..(38): Xaa is C or S
  MOD_RES (15)..(16)..(17)..(18)..(19): Xaa is A or G
  MOD_RES (20)..(21)..(22)..(23): Xaa is A or G or is absent
XGXARVVMNEYKFKXXXXXXXXXLYLVSIPELQTPAXX

SEQ ID NO: 25748 - protein, 33 aa, Artificial Sequence
  GFR-binding peptide
  MOD_RES (1)..(33): Xaa is C or S
XAKVVMNEYQKYIVNNSSDIYLVSIPSLKTPAX

SEQ ID NO: 25749 - protein, 36 aa, Artificial Sequence
  GFR-binding peptide
  MOD_RES (1)..(35)..(36): Xaa is C or S
  MOD_RES (13)..(14)..(15)..(16)..(17): Xaa is A or G
  MOD_RES (18)..(19)..(20)..(21): Xaa is A or G or is absent
XESVAMGRYKKLXXXXXXXXXFYLISIANLKTPVXX

SEQ ID NO: 25750 - protein, 37 aa, Artificial Sequence
  GFR-binding peptide
  MOD_RES (34)..(35): Xaa is C or S
  MOD_RES (12)..(13)..(14)..(15)..(16): Xaa is A or G
  MOD_RES (17)..(18)..(19)..(20): Xaa is A or G or is absent
SRVVMNEYKFKXXXXXXXXXLYLVSIPELKTPAXXPK

SEQ ID NO: 25751 - protein, 38 aa, Artificial Sequence
  GFR-binding peptide
  MOD_RES (33)..(34): Xaa is C or S
  MOD_RES (11)..(12)..(13)..(14)..(15): Xaa is A or G
  MOD_RES (16)..(17)..(18)..(19): Xaa is A or G or is absent
SVAMGYHYKLXXXXXXXXXKYLISIPSLKTPVXXAKSA

SEQ ID NO: 25752 - protein, 41 aa, Artificial Sequence
  GFR-binding peptide
  MOD_RES (2)..(36)..(37): Xaa is C or S
  MOD_RES (14)..(15)..(16)..(17)..(18): Xaa is A or G
  MOD_RES (19)..(20)..(21)..(22): Xaa is A or G or is absent
GXSRVVMNEYKFKXXXXXXXXXLYLVSIPELKTPAXXPKPV

SEQ ID NO: 25753 - protein, 41 aa, Artificial Sequence
  GFR-binding peptide
  MOD_RES (1)..(3)..(36)..(37): Xaa is C or S
XGXEAVSMGEEYQKYTPVGMDDIYLVSIPSLKTPVXXAKGV

SEQ ID NO: 25754 - protein, 34 aa, Artificial Sequence; identical to SEQ ID NO: 4658
  GFR-binding peptide
  MOD_RES (34)..(34): Xaa is C or S
  MOD_RES (12)..(13)..(14)..(15)..(16): Xaa is A or G
  MOD_RES (17)..(18)..(19)..(20): Xaa is A or G or is absent

SEQ ID NO: 25755 - protein, 39 aa, Artificial Sequence; identical to SEQ ID NO: 4659
  GFR-binding peptide
  MOD_RES (2)..(37)..(38): Xaa is C or S
  MOD_RES (15)..(16)..(17)..(18)..(19): Xaa is A or G
  MOD_RES (20)..(21)..(22)..(23): Xaa is A or G or is absent

SEQ ID NO: 25756 - protein, 43 aa, Artificial Sequence; identical to SEQ ID NO: 4661
  GFR-binding peptide
  MOD_RES (2)..(4)..(38): Xaa is C or S
  MOD_RES (16)..(17)..(18)..(19)..(20): Xaa is A or G
  MOD_RES (21)..(22)..(23)..(24): Xaa is A or G or is absent

SEQ ID NO: 25757 - protein, 31 aa, Artificial Sequence; identical to SEQ ID NO: 4662
  GFR-binding peptide

SEQ ID NO: 25758 - protein, 38 aa, Artificial Sequence; identical to SEQ ID NO: 4664
  GFR-binding peptide
  MOD_RES (2)..(36)..(37): Xaa is C or S
  MOD_RES (14)..(15)..(16)..(17)..(18): Xaa is A or G
  MOD_RES (19)..(20)..(21)..(22): Xaa is A or G or is absent

SEQ ID NO: 25759 - protein, 40 aa, Artificial Sequence; identical to SEQ ID NO: 4665
  GFR-binding peptide
  MOD_RES (34)..(35): Xaa is C or S
  MOD_RES (12)..(13)..(14)..(15)..(16): Xaa is A or G
  MOD_RES (17)..(18)..(19)..(20): Xaa is A or G or is absent

SEQ ID NO: 25760 - protein, 38 aa, Artificial Sequence; identical to SEQ ID NO: 4667
  GFR-binding peptide
  MOD_RES (33)..(34): Xaa is C or S
  MOD_RES (11)..(12)..(13)..(14)..(15): Xaa is A or G
  MOD_RES (16)..(17)..(18)..(19): Xaa is A or G or is absent

SEQ ID NO: 25761 - protein, 41 aa, Artificial Sequence
  GFR-binding peptide
  MOD_RES (2)..(4)..(38)..(39): Xaa is C or S
  MOD_RES (16)..(17)..(18)..(19)..(20): Xaa is A or G
  MOD_RES (21)..(22)..(23)..(24): Xaa is A or G or is absent
HXGXSRVVMNEYQKYXXXXXXXXXIYLVSIPSLKTPAXXPK

SEQ ID NO: 25762 - protein, 34 aa, Artificial Sequence
  GFR-binding peptide
  MOD_RES (2)..(33)..(34): Xaa is C or S
KXSKVIMEYKFKIKPTKGILYLISIPELDQSVXX

SEQ ID NO: 25763 - protein, 37 aa, Artificial Sequence; identical to SEQ ID NO: 4670
  GFR-binding peptide
  MOD_RES (2)..(36)..(37): Xaa is C or S
  MOD_RES (14)..(15)..(16)..(17)..(18): Xaa is A or G
  MOD_RES (19)..(20)..(21)..(22): Xaa is A or G or is absent

SEQ ID NO: 25764 - protein, 39 aa, Artificial Sequence
  GFR-binding peptide
  MOD_RES (1)..(34)..(35): Xaa is C or S
XEAVSMGEEYKFKTPVGMDDLYLVSIPELKTPVXXAKGV

SEQ ID NO: 25765 - protein, 36 aa, Artificial Sequence
  GFR-binding peptide
  MOD_RES (1)..(33)..(34): Xaa is C or S
XARVVMNEYKFKIVNSSDDLYLVSIPELQTPAXXPK

SEQ ID NO: 25766 - protein, 36 aa, Artificial Sequence
  GFR-binding peptide
  MOD_RES (1)..(33)..(34): Xaa is C or S
XGEVVMDEYQKYVVKENEDIYLMSIPSLETPVXXAK

SEQ ID NO: 25767 - protein, 37 aa, Artificial Sequence
  GFR-binding peptide
  MOD_RES (1)..(3)..(35)..(36): Xaa is C or S
XGXARVVMNEYKFKIVNSSDDLYLVSIPELQTPAXXP

SEQ ID NO: 25768 - protein, 38 aa, Artificial Sequence
  GFR-binding peptide
  MOD_RES (2)..(34)..(35): Xaa is C or S
GXESVAMGEYQKYYTVVGKDIYLISIPSLKTPVXXAKS

SEQ ID NO: 25769 - protein, 37 aa, Artificial Sequence
  GFR-binding peptide
  MOD_RES (32)..(32): Xaa is C or S
SRVVMNEYQKYIVNSSDDIYLVSIPSLKTPAXTPKTV

SEQ ID NO: 25770 - protein, 36 aa, Artificial Sequence; identical to SEQ ID NO: 4682
  GFR-binding peptide
  MOD_RES (2)..(33)..(34): Xaa is C or S

SEQ ID NO: 25771 - protein, 32 aa, Artificial Sequence; identical to SEQ ID NO: 4685
  GFR-binding peptide
  MOD_RES (1)..(32): Xaa is C or S

SEQ ID NO: 25772 - protein, 36 aa, Artificial Sequence
  GFR-binding peptide
  MOD_RES (2)..(35)..(36): Xaa is C or S
GXEAVSMGEEYQKYTPVGMDDIYLVSIPSLKTPVXX

SEQ ID NO: 25773 - protein, 36 aa, Artificial Sequence; identical to SEQ ID NO: 4686
  GFR-binding peptide
  MOD_RES (2)..(35)..(36): Xaa is C or S
  MOD_RES (13)..(14)..(15)..(16)..(17): Xaa is A or G
  MOD_RES (18)..(19)..(20)..(21): Xaa is A or G or is absent

SEQ ID NO: 25774 - protein, 43 aa, Artificial Sequence
  GFR-binding peptide
  MOD_RES (2)..(4)..(37)..(38): Xaa is C or S
  MOD_RES (15)..(16)..(17)..(18)..(19): Xaa is A or G
  MOD_RES (20)..(21)..(22)..(23): Xaa is A or G or is absent
SXKXSKVVMEYKFKXXXXXXXXXLYLISIPELDQPVXXPSASA

SEQ ID NO: 25775 - protein, 40 aa, Artificial Sequence
  GFR-binding peptide
  MOD_RES (2)..(35)..(36): Xaa is C or S
  MOD_RES (13)..(14)..(15)..(16)..(17): Xaa is A or G
  MOD_RES (18)..(19)..(20)..(21): Xaa is A or G or is absent
KXSKVIMEYQKYXXXXXXXXXIYLISIPSLDQSVXXPSAS

SEQ ID NO: 25776 - protein, 41 aa, Artificial Sequence
  GFR-binding peptide
  MOD_RES (2)..(35)..(36): Xaa is C or S
  MOD_RES (13)..(14)..(15)..(16)..(17): Xaa is A or G
  MOD_RES (18)..(19)..(20)..(21): Xaa is A or G or is absent
KXSKVIMEYKFKXXXXXXXXXLYLISIPELDQSVXXPSASA

SEQ ID NO: 25777 - protein, 32 aa, Artificial Sequence
  GFR-binding peptide
  MOD_RES (1)..(1): Xaa is C or S
XGEVVMDEYQKYVVKENEDIYLMSIPSLETPV

SEQ ID NO: 25778 - protein, 36 aa, Artificial Sequence; identical to SEQ ID NO: 4690
  GFR-binding peptide
  MOD_RES (2)..(36): Xaa is C or S
  MOD_RES (14)..(15)..(16)..(17)..(18): Xaa is A or G
  MOD_RES (19)..(20)..(21)..(22): Xaa is A or G or is absent

SEQ ID NO: 25779 - protein, 40 aa, Artificial Sequence
  GFR-binding peptide
  MOD_RES (1)..(3)..(36)..(37): Xaa is C or S
  MOD_RES (14)..(15)..(16)..(17)..(18): Xaa is A or G
  MOD_RES (19)..(20)..(21)..(22): Xaa is A or G or is absent
XKXSKVIMEYKFKXXXXXXXXXLYLISIPELDQSVXXPSA

SEQ ID NO: 25780 - protein, 40 aa, Artificial Sequence
  GFR-binding peptide
  MOD_RES (2)..(4)..(38)..(39): Xaa is C or S
  MOD_RES (16)..(17)..(18)..(19)..(20): Xaa is A or G
  MOD_RES (21)..(22)..(23)..(24): Xaa is A or G or is absent
HXGXAKVVMNEYQKYXXXXXXXXXIYLVSIPSLKTPAXXA

SEQ ID NO: 25781 - protein, 41 aa, Artificial Sequence; identical to SEQ ID NO: 4692
  GFR-binding peptide
  MOD_RES (1)..(3)..(36)..(37): Xaa is C or S

SEQ ID NO: 25782 - protein, 35 aa, Artificial Sequence
  GFR-binding peptide
  MOD_RES (1)..(35): Xaa is C or S
  MOD_RES (13)..(14)..(15)..(16)..(17): Xaa is A or G
  MOD_RES (18)..(19)..(20)..(21): Xaa is A or G or is absent
XGEVVMEEYKFKXXXXXXXXXLYLMSIPELETPVX

SEQ ID NO: 25783 - protein, 38 aa, Artificial Sequence
  GFR-binding peptide
  MOD_RES (2)..(36)..(37): Xaa is C or S
  MOD_RES (14)..(15)..(16)..(17)..(18): Xaa is A or G
  MOD_RES (19)..(20)..(21)..(22): Xaa is A or G or is absent
GXAKVVMNEYKFKXXXXXXXXXLYLVSIPELKTPAXXA

SEQ ID NO: 25784 - protein, 41 aa, Artificial Sequence; identical to SEQ ID NO: 4694
  GFR-binding peptide
  MOD_RES (2)..(36)..(37): Xaa is C or S
  MOD_RES (14)..(15)..(16)..(17)..(18): Xaa is A or G
  MOD_RES (19)..(20)..(21)..(22): Xaa is A or G or is absent

SEQ ID NO: 25785 - protein, 39 aa, Artificial Sequence; identical to SEQ ID NO: 4698
  GFR-binding peptide
  MOD_RES (1)..(33)..(34): Xaa is C or S

SEQ ID NO: 25786 - protein, 34 aa, Artificial Sequence; identical to SEQ ID NO: 4699
  GFR-binding peptide
  MOD_RES (2)..(33)..(34): Xaa is C or S

SEQ ID NO: 25787 - protein, 34 aa, Artificial Sequence
  GFR-binding peptide
  MOD_RES (2)..(34): Xaa is C or S
GXAEVVMDEYQKYVVNNAADIYLISIPSLRAPVX

SEQ ID NO: 25788 - protein, 39 aa, Artificial Sequence
  GFR-binding peptide
  MOD_RES (2)..(36)..(37): Xaa is C or S
  MOD_RES (14)..(15)..(16)..(17)..(18): Xaa is A or G
  MOD_RES (19)..(20)..(21)..(22): Xaa is A or G or is absent
GXSRVVMNEYKFKXXXXXXXXXLYLVSIPELKTPAXXPK

SEQ ID NO: 25789 - protein, 36 aa, Artificial Sequence; identical to SEQ ID NO: 4708
  GFR-binding peptide
  MOD_RES (1)..(35)..(36): Xaa is C or S
  MOD_RES (13)..(14)..(15)..(16)..(17): Xaa is A or G
  MOD_RES (18)..(19)..(20)..(21): Xaa is A or G or is absent

SEQ ID NO: 25790 - protein, 36 aa, Artificial Sequence
  GFR-binding peptide
  MOD_RES (2)..(4)..(36): Xaa is C or S
RXGXGEVVMEEYQKYVVKDYEDIYLMSIPSLETPVX

SEQ ID NO: 25791 - protein, 38 aa, Artificial Sequence; identical to SEQ ID NO: 4711
  GFR-binding peptide
  MOD_RES (2)..(4)..(35)..(36): Xaa is C or S

SEQ ID NO: 25792 - protein, 37 aa, Artificial Sequence
  GFR-binding peptide
  MOD_RES (1)..(33): Xaa is C or S
XSRVVMNEYQKYIVNSSDDIYLVSIPSLKTPAXTPKT

SEQ ID NO: 25793 - protein, 34 aa, Artificial Sequence; identical to SEQ ID NO: 4712
  GFR-binding peptide
  MOD_RES (1)..(33)..(34): Xaa is C or S

SEQ ID NO: 25794 - protein, 42 aa, Artificial Sequence
  GFR-binding peptide
  MOD_RES (1)..(3)..(36)..(37): Xaa is C or S
  MOD_RES (14)..(15)..(16)..(17)..(18): Xaa is A or G
  MOD_RES (19)..(20)..(21)..(22): Xaa is A or G or is absent
XKXSKVVMEYKFKXXXXXXXXXLYLISIPELDQPVXXPSASA

SEQ ID NO: 25795 - protein, 37 aa, Artificial Sequence
  GFR-binding peptide
  MOD_RES (32)..(33): Xaa is C or S
SRVVMNEYKFKIVNSSDDLYLVSIPELKTPAXXPKPV

SEQ ID NO: 25796 - protein, 38 aa, Artificial Sequence; identical to SEQ ID NO: 4716
  GFR-binding peptide
  MOD_RES (2)..(37)..(38): Xaa is C or S
  MOD_RES (15)..(16)..(17)..(18)..(19): Xaa is A or G
  MOD_RES (20)..(21)..(22)..(23): Xaa is A or G or is absent

SEQ ID NO: 25797 - protein, 35 aa, Artificial Sequence
  GFR-binding peptide
  MOD_RES (2)..(4): Xaa is C or S
RXGXESVAMGRYKKLYTVVGKDFYLISIANLKTPV

SEQ ID NO: 25798 - protein, 32 aa, Artificial Sequence
  GFR-binding peptide
  MOD_RES (31)..(32): Xaa is C or S
EVVMDRYKKLVVNNAADFYLISIANLRAPVXX

SEQ ID NO: 25799 - protein, 36 aa, Artificial Sequence; identical to SEQ ID NO: 4719
  GFR-binding peptide
  MOD_RES (1)..(3)..(35)..(36): Xaa is C or S

SEQ ID NO: 25800 - protein, 39 aa, Artificial Sequence
  GFR-binding peptide
  MOD_RES (1)..(3)..(35)..(36): Xaa is C or S
XGXAKVVMNEYQKYIVNNSSDIYLVSIPSLKTPAXXAKP

SEQ ID NO: 25801 - protein, 41 aa, Artificial Sequence; identical to SEQ ID NO: 4720
  GFR-binding peptide
  MOD_RES (1)..(3)..(37)..(38): Xaa is C or S
  MOD_RES (15)..(16)..(17)..(18)..(19): Xaa is A or G
  MOD_RES (20)..(21)..(22)..(23): Xaa is A or G or is absent

SEQ ID NO: 25802 - protein, 37 aa, Artificial Sequence
  GFR-binding peptide
  MOD_RES (31)..(32): Xaa is C or S
EVVMDRYKKLVVNNAADFYLISIANLRAPVXXSAPAA

SEQ ID NO: 25803 - protein, 41 aa, Artificial Sequence
  GFR-binding peptide
  MOD_RES (1)..(3)..(36)..(37): Xaa is C or S
  MOD_RES (14)..(15)..(16)..(17)..(18): Xaa is A or G
  MOD_RES (19)..(20)..(21)..(22): Xaa is A or G or is absent
XKXSKVIMEYQKYXXXXXXXXXIYLISIPSLDQSVXXPSAS

SEQ ID NO: 25804 - protein, 37 aa, Artificial Sequence; identical to SEQ ID NO: 4723
  GFR-binding peptide
  MOD_RES (1)..(32)..(33): Xaa is C or S

SEQ ID NO: 25805 - protein, 33 aa, Artificial Sequence; identical to SEQ ID NO: 4724
  GFR-binding peptide
  MOD_RES (33)..(33): Xaa is C or S
  MOD_RES (11)..(12)..(13)..(14)..(15): Xaa is A or G
  MOD_RES (16)..(17)..(18)..(19): Xaa is A or G or is absent

SEQ ID NO: 25806 - protein, 37 aa, Artificial Sequence
  GFR-binding peptide
  MOD_RES (1)..(3)..(35)..(36): Xaa is C or S
XGXESVAMGRYKKLYTVVGKDFYLISIANLKTPVXXA

SEQ ID NO: 25807 - protein, 33 aa, Artificial Sequence
  GFR-binding peptide
  MOD_RES (31)..(31): Xaa is C or S
RVVMNEYKFKIVNSSDDLYLVSIPELKTPAXTP

SEQ ID NO: 25808 - protein, 39 aa, Artificial Sequence
  GFR-binding peptide
  MOD_RES (1)..(3)..(37)..(38): Xaa is C or S
  MOD_RES (15)..(16)..(17)..(18)..(19): Xaa is A or G
  MOD_RES (20)..(21)..(22)..(23): Xaa is A or G or is absent
XGXAKVVMNEYKFKXXXXXXXXXLYLVSIPELKTPAXXA

SEQ ID NO: 25809 - protein, 36 aa, Artificial Sequence
  GFR-binding peptide
  MOD_RES (2)..(36): Xaa is C or S
  MOD_RES (14)..(15)..(16)..(17)..(18): Xaa is A or G
  MOD_RES (19)..(20)..(21)..(22): Xaa is A or G or is absent
GXAEVVMDRYKKLXXXXXXXXXFYLISIANLRAPVX

SEQ ID NO: 25810 - protein, 34 aa, Artificial Sequence
  GFR-binding peptide
  MOD_RES (1)..(3): Xaa is C or S
XGXGEVVMDEYKFKVVKENEDLYLMSIPELETPV

SEQ ID NO: 25811 - protein, 38 aa, Artificial Sequence; identical to SEQ ID NO: 4733
  GFR-binding peptide
  MOD_RES (2)..(4)..(37)..(38): Xaa is C or S
  MOD_RES (15)..(16)..(17)..(18)..(19): Xaa is A or G
  MOD_RES (20)..(21)..(22)..(23): Xaa is A or G or is absent

SEQ ID NO: 25812 - protein, 40 aa, Artificial Sequence
  GFR-binding peptide
  MOD_RES (2)..(36)..(37): Xaa is C or S
  MOD_RES (14)..(15)..(16)..(17)..(18): Xaa is A or G
  MOD_RES (19)..(20)..(21)..(22): Xaa is A or G or is absent
GXAEVVMDEYQKYXXXXXXXXXIYLISIPSLRAPVXXSAP

SEQ ID NO: 25813 - protein, 33 aa, Artificial Sequence
  GFR-binding peptide
  MOD_RES (32)..(33): Xaa is C or S
ESVAMGRYKKLYTVVGKDFYLISIANLKTPVXX

SEQ ID NO: 25814 - protein, 33 aa, Artificial Sequence; identical to SEQ ID NO: 4734
  GFR-binding peptide
  MOD_RES (31)..(32): Xaa is C or S

SEQ ID NO: 25815 - protein, 32 aa, Artificial Sequence; identical to SEQ ID NO: 4735
  GFR-binding peptide
  MOD_RES (31)..(32): Xaa is C or S

SEQ ID NO: 25816 - protein, 34 aa, Artificial Sequence; identical to SEQ ID NO: 4737
  GFR-binding peptide
  MOD_RES (1)..(3): Xaa is C or S

SEQ ID NO: 25817 - protein, 37 aa, Artificial Sequence
  GFR-binding peptide
  MOD_RES (1)..(3)..(37): Xaa is C or S
  MOD_RES (15)..(16)..(17)..(18)..(19): Xaa is A or G
  MOD_RES (20)..(21)..(22)..(23): Xaa is A or G or is absent
XGXGEVVMEEYKFKXXXXXXXXXLYLMSIPELETPVX

SEQ ID NO: 25818 - protein, 34 aa, Artificial Sequence; identical to SEQ ID NO: 4738
  GFR-binding peptide
  MOD_RES (34)..(34): Xaa is C or S
  MOD_RES (12)..(13)..(14)..(15)..(16): Xaa is A or G
  MOD_RES (17)..(18)..(19)..(20): Xaa is A or G or is absent

SEQ ID NO: 25819 - protein, 41 aa, Artificial Sequence; identical to SEQ ID NO: 4739
  GFR-binding peptide
  MOD_RES (2)..(36)..(37): Xaa is C or S
  MOD_RES (14)..(15)..(16)..(17)..(18): Xaa is A or G
  MOD_RES (19)..(20)..(21)..(22): Xaa is A or G or is absent

SEQ ID NO: 25820 - protein, 40 aa, Artificial Sequence; identical to SEQ ID NO: 4743
  GFR-binding peptide
  MOD_RES (1)..(3)..(34)..(35): Xaa is C or S

SEQ ID NO: 25821 - protein, 41 aa, Artificial Sequence
  GFR-binding peptide
  MOD_RES (2)..(36)..(37): Xaa is C or S
  MOD_RES (14)..(15)..(16)..(17)..(18): Xaa is A or G
  MOD_RES (19)..(20)..(21)..(22): Xaa is A or G or is absent
GXAKVVMNEYKFKXXXXXXXXXLYLVSIPELKTPAXXAKPV

SEQ ID NO: 25822 - protein, 39 aa, Artificial Sequence
  GFR-binding peptide
  MOD_RES (1)..(3)..(35)..(36): Xaa is C or S
XGXAEVVMDEYQKYVVNNAADIYLISIPSLRAPVXXSAP

SEQ ID NO: 25823 - protein, 36 aa, Artificial Sequence
  GFR-binding peptide
  MOD_RES (2)..(4)..(35)..(36): Xaa is C or S
SXKXSRVIMEYQKYVKPKRGVIYLISIPSLAQPVXX

SEQ ID NO: 25824 - protein, 35 aa, Artificial Sequence
  GFR-binding peptide
  MOD_RES (2)..(4)..(35): Xaa is C or S
SXKXSKVIMEYKFKIKPTKGILYLISIPELDQSVX

SEQ ID NO: 25825 - protein, 41 aa, Artificial Sequence
  GFR-binding peptide
  MOD_RES (2)..(36)..(37): Xaa is C or S
  MOD_RES (14)..(15)..(16)..(17)..(18): Xaa is A or G
  MOD_RES (19)..(20)..(21)..(22): Xaa is A or G or is absent
GXGEVVMEEYKFKXXXXXXXXXLYLMSIPELETPVXXAKPI

SEQ ID NO: 25826 - protein, 43 aa, Artificial Sequence
  GFR-binding peptide
  MOD_RES (1)..(3)..(37)..(38): Xaa is C or S
  MOD_RES (15)..(16)..(17)..(18)..(19): Xaa is A or G
  MOD_RES (20)..(21)..(22)..(23): Xaa is A or G or is absent
XGXAKVVMNEYQKYXXXXXXXXXIYLVSIPSLKTPAXXAKPVA

SEQ ID NO: 25827 - protein, 39 aa, Artificial Sequence
  GFR-binding peptide
  MOD_RES (2)..(4)..(38)..(39): Xaa is C or S
  MOD_RES (16)..(17)..(18)..(19)..(20): Xaa is A or G
  MOD_RES (21)..(22)..(23)..(24): Xaa is A or G or is absent
RXGXESVAMGRYKKLXXXXXXXXXFYLISIANLKTPVXX

SEQ ID NO: 25828 - protein, 34 aa, Artificial Sequence; identical to SEQ ID NO: 4750
  GFR-binding peptide
  MOD_RES (33)..(34): Xaa is C or S
  MOD_RES (11)..(12)..(13)..(14)..(15): Xaa is A or G
  MOD_RES (16)..(17)..(18)..(19): Xaa is A or G or is absent

SEQ ID NO: 25829 - protein, 38 aa, Artificial Sequence
  GFR-binding peptide
  MOD_RES (2)..(4)..(36)..(37): Xaa is C or S
HXGXARVVMNEYKFKIVNSSDDLYLVSIPELQTPAXXP

SEQ ID NO: 25830 - protein, 32 aa, Artificial Sequence
  GFR-binding peptide
  MOD_RES (11)..(12)..(13)..(14)..(15): Xaa is A or G
  MOD_RES (16)..(17)..(18)..(19): Xaa is A or G or is absent
EVVMDEYKFKXXXXXXXXXLYLISIPELRAPV

SEQ ID NO: 25831 - protein, 38 aa, Artificial Sequence
  GFR-binding peptide
  MOD_RES (1)..(3)..(35)..(36): Xaa is C or S
XGXAKVVMNEYQKYIVNNSSDIYLVSIPSLKTPAXXAK

SEQ ID NO: 25832 - protein, 39 aa, Artificial Sequence; identical to SEQ ID NO: 4751
  GFR-binding peptide
  MOD_RES (1)..(3)..(37)..(38): Xaa is C or S
  MOD_RES (15)..(16)..(17)..(18)..(19): Xaa is A or G
  MOD_RES (20)..(21)..(22)..(23): Xaa is A or G or is absent

SEQ ID NO: 25833 - protein, 37 aa, Artificial Sequence; identical to SEQ ID NO: 4752
  GFR-binding peptide
  MOD_RES (31)..(32): Xaa is C or S

SEQ ID NO: 25834 - protein, 39 aa, Artificial Sequence
  GFR-binding peptide
  MOD_RES (2)..(33)..(34): Xaa is C or S
KXSRVIMEYKFKVKPKRGVLYLISIPELAQPVXXPAASA

SEQ ID NO: 25835 - protein, 33 aa, Artificial Sequence
  GFR-binding peptide
  MOD_RES (31)..(32): Xaa is C or S
EVVMEEYKFKVVKDYEDLYLMSIPELETPVXXA

SEQ ID NO: 25836 - protein, 33 aa, Artificial Sequence; identical to SEQ ID NO: 4755
  GFR-binding peptide
  MOD_RES (31)..(32): Xaa is C or S

SEQ ID NO: 25837 - protein, 35 aa, Artificial Sequence
  GFR-binding peptide
  MOD_RES (34)..(35): Xaa is C or S
  MOD_RES (12)..(13)..(14)..(15)..(16): Xaa is A or G
  MOD_RES (17)..(18)..(19)..(20): Xaa is A or G or is absent
AKVVMNEYQKYXXXXXXXXXIYLVSIPSLKTPAXX

SEQ ID NO: 25838 - protein, 36 aa, Artificial Sequence; identical to SEQ ID NO: 4756
  GFR-binding peptide
  MOD_RES (2)..(4): Xaa is C or S
  MOD_RES (15)..(16)..(17)..(18)..(19): Xaa is A or G
  MOD_RES (20)..(21)..(22)..(23): Xaa is A or G or is absent

SEQ ID NO: 25839 - protein, 37 aa, Artificial Sequence; identical to SEQ ID NO: 4757
  GFR-binding peptide
  MOD_RES (1)..(3)..(35)..(36): Xaa is C or S

SEQ ID NO: 25840 - protein, 38 aa, Artificial Sequence
  GFR-binding peptide
  MOD_RES (1)..(3)..(37)..(38): Xaa is C or S
  MOD_RES (15)..(16)..(17)..(18)..(19): Xaa is A or G
  MOD_RES (20)..(21)..(22)..(23): Xaa is A or G or is absent
XGXARVVMNEYQKYXXXXXXXXXIYLVSIPSLQTPAXX

SEQ ID NO: 25841 - protein, 36 aa, Artificial Sequence
  GFR-binding peptide
  MOD_RES (2)..(4)..(36): Xaa is C or S
RXGXESVAMGRYKKLYTVVGKDFYLISIANLKTPVX

SEQ ID NO: 25842 - protein, 38 aa, Artificial Sequence
  GFR-binding peptide
  MOD_RES (33)..(34): Xaa is C or S
  MOD_RES (11)..(12)..(13)..(14)..(15): Xaa is A or G
  MOD_RES (16)..(17)..(18)..(19): Xaa is A or G or is absent
EVVMDRYKKLXXXXXXXXXFYLISIANLRAPVXXSAPA

SEQ ID NO: 25843 - protein, 43 aa, Artificial Sequence
  GFR-binding peptide
  MOD_RES (2)..(4)..(39)..(40): Xaa is C or S
  MOD_RES (17)..(18)..(19)..(20)..(21): Xaa is A or G
  MOD_RES (22)..(23)..(24)..(25): Xaa is A or G or is absent
RXGXEAVSMGEEYKFKXXXXXXXXXLYLVSIPELKTPVXXAKG

SEQ ID NO: 25844 - protein, 34 aa, Artificial Sequence; identical to SEQ ID NO: 4761
  GFR-binding peptide
  MOD_RES (31)..(32): Xaa is C or S

SEQ ID NO: 25845 - protein, 37 aa, Artificial Sequence; identical to SEQ ID NO: 4762
  GFR-binding peptide
  MOD_RES (1)..(3)..(37): Xaa is C or S
  MOD_RES (15)..(16)..(17)..(18)..(19): Xaa is A or G
  MOD_RES (20)..(21)..(22)..(23): Xaa is A or G or is absent

SEQ ID NO: 25846 - protein, 38 aa, Artificial Sequence
  GFR-binding peptide
  MOD_RES (32)..(33): Xaa is C or S
GEVVMEEYKFKVVKDYEDLYLMSIPELETPVXXAKPIS

SEQ ID NO: 25847 - protein, 35 aa, Artificial Sequence
  GFR-binding peptide
  MOD_RES (34)..(35): Xaa is C or S
  MOD_RES (12)..(13)..(14)..(15)..(16): Xaa is A or G
  MOD_RES (17)..(18)..(19)..(20): Xaa is A or G or is absent
SRVVMNEYQKYXXXXXXXXXIYLVSIPSLKTPAXX

SEQ ID NO: 25848 - protein, 42 aa, Artificial Sequence
  GFR-binding peptide
  MOD_RES (2)..(4)..(38)..(39): Xaa is C or S
  MOD_RES (16)..(17)..(18)..(19)..(20): Xaa is A or G
  MOD_RES (21)..(22)..(23)..(24): Xaa is A or G or is absent
RXGXESVAMGEYQKYXXXXXXXXXIYLISIPSLKTPVXXAKS

SEQ ID NO: 25849 - protein, 37 aa, Artificial Sequence; identical to SEQ ID NO: 4764
  GFR-binding peptide
  MOD_RES (34)..(35): Xaa is C or S
  MOD_RES (12)..(13)..(14)..(15)..(16): Xaa is A or G
  MOD_RES (17)..(18)..(19)..(20): Xaa is A or G or is absent

SEQ ID NO: 25850 - protein, 38 aa, Artificial Sequence
  GFR-binding peptide
  MOD_RES (1)..(3)..(35)..(36): Xaa is C or S
XGXAEVVMDEYQKYVVNNAADIYLISIPSLRAPVXXSA

SEQ ID NO: 25851 - protein, 38 aa, Artificial Sequence
  GFR-binding peptide
  MOD_RES (2)..(34)..(35): Xaa is C or S
GXARVVMNEYKFKIVNSSDDLYLVSIPELQTPAXXPKP

SEQ ID NO: 25852 - protein, 38 aa, Artificial Sequence; identical to SEQ ID NO: 4767
  GFR-binding peptide
  MOD_RES (32)..(33): Xaa is C or S

SEQ ID NO: 25853 - protein, 40 aa, Artificial Sequence
  GFR-binding peptide
  MOD_RES (2)..(35)..(36): Xaa is C or S
  MOD_RES (13)..(14)..(15)..(16)..(17): Xaa is A or G
  MOD_RES (18)..(19)..(20)..(21): Xaa is A or G or is absent
KXSKVIMEYKFKXXXXXXXXXLYLISIPELDQSVXXPSAS

SEQ ID NO: 25854 - protein, 39 aa, Artificial Sequence; identical to SEQ ID NO: 4768
  GFR-binding peptide
  MOD_RES (2)..(36): Xaa is C or S
  MOD_RES (14)..(15)..(16)..(17)..(18): Xaa is A or G
  MOD_RES (19)..(20)..(21)..(22): Xaa is A or G or is absent

SEQ ID NO: 25855 - protein, 33 aa, Artificial Sequence
  GFR-binding peptide
  MOD_RES (2)..(2): Xaa is C or S
GXARVVMNEYKFKIVNSSDDLYLVSIPELQTPA

SEQ ID NO: 25856 - protein, 32 aa, Artificial Sequence
  GFR-binding peptide
  MOD_RES (32)..(32): Xaa is C or S
AEVVMDEYQKYVVNNAADIYLISIPSLRAPVX

SEQ ID NO: 25857 - protein, 36 aa, Artificial Sequence
  GFR-binding peptide
  MOD_RES (1)..(34)..(35): Xaa is C or S
XEAVSMGEEYQKYTPVGMDDIYLVSIPSLKTPVXXA

SEQ ID NO: 25858 - protein, 38 aa, Artificial Sequence
  GFR-binding peptide
  MOD_RES (1)..(33)..(34): Xaa is C or S
XSRVVMNEYQKYIVNSSDDIYLVSIPSLKTPAXXPKPV

SEQ ID NO: 25859 - protein, 37 aa, Artificial Sequence; identical to SEQ ID NO: 4772
  GFR-binding peptide
  MOD_RES (34)..(35): Xaa is C or S
  MOD_RES (12)..(13)..(14)..(15)..(16): Xaa is A or G
  MOD_RES (17)..(18)..(19)..(20): Xaa is A or G or is absent

SEQ ID NO: 25860 - protein, 33 aa, Artificial Sequence; identical to SEQ ID NO: 4775
  GFR-binding peptide
  MOD_RES (1)..(3): Xaa is C or S

SEQ ID NO: 25861 - protein, 41 aa, Artificial Sequence
  GFR-binding peptide
  MOD_RES (2)..(4)..(38)..(39): Xaa is C or S
  MOD_RES (16)..(17)..(18)..(19)..(20): Xaa is A or G
  MOD_RES (21)..(22)..(23)..(24): Xaa is A or G or is absent
HXGXAKVVMNEYKFKXXXXXXXXXLYLVSIPELKTPAXXAK

SEQ ID NO: 25862 - protein, 40 aa, Artificial Sequence; identical to SEQ ID NO: 4777
  GFR-binding peptide
  MOD_RES (2)..(4)..(35)..(36): Xaa is C or S

SEQ ID NO: 25863 - protein, 40 aa, Artificial Sequence
  GFR-binding peptide
  MOD_RES (2)..(4)..(38): Xaa is C or S
  MOD_RES (16)..(17)..(18)..(19)..(20): Xaa is A or G
  MOD_RES (21)..(22)..(23)..(24): Xaa is A or G or is absent
HXGXSRVVMNEYKFKXXXXXXXXXLYLVSIPELKTPAXTP

SEQ ID NO: 25864 - protein, 35 aa, Artificial Sequence
  GFR-binding peptide
  MOD_RES (33)..(34): Xaa is C or S
  MOD_RES (11)..(12)..(13)..(14)..(15): Xaa is A or G
  MOD_RES (16)..(17)..(18)..(19): Xaa is A or G or is absent
RVVMNEYKFKXXXXXXXXXLYLVSIPELKTPAXXP

SEQ ID NO: 25865 - protein, 35 aa, Artificial Sequence; identical to SEQ ID NO: 4780
  GFR-binding peptide
  MOD_RES (32)..(32): Xaa is C or S

SEQ ID NO: 25866 - protein, 33 aa, Artificial Sequence
  GFR-binding peptide
  MOD_RES (32)..(33): Xaa is C or S
ARVVMNEYQKYIVNSSDDIYLVSIPSLQTPAXX

SEQ ID NO: 25867 - protein, 34 aa, Artificial Sequence
  GFR-binding peptide
  MOD_RES (1)..(3): Xaa is C or S
XGXAEVVMDEYKFKVVNNAADLYLISIPELRAPV

SEQ ID NO: 25868 - protein, 32 aa, Artificial Sequence
  GFR-binding peptide
  MOD_RES (32)..(32): Xaa is C or S
GEVVMEEYKFKVVKDYEDLYLMSIPELETPVX

SEQ ID NO: 25869 - protein, 36 aa, Artificial Sequence; identical to SEQ ID NO: 4788
  GFR-binding peptide
  MOD_RES (34)..(34): Xaa is C or S
  MOD_RES (12)..(13)..(14)..(15)..(16): Xaa is A or G
  MOD_RES (17)..(18)..(19)..(20): Xaa is A or G or is absent

SEQ ID NO: 25870 - protein, 35 aa, Artificial Sequence; identical to SEQ ID NO: 4789
  GFR-binding peptide
  MOD_RES (1)..(35): Xaa is C or S
  MOD_RES (13)..(14)..(15)..(16)..(17): Xaa is A or G
  MOD_RES (18)..(19)..(20)..(21): Xaa is A or G or is absent

SEQ ID NO: 25871 - protein, 35 aa, Artificial Sequence; identical to SEQ ID NO: 4790
  GFR-binding peptide
  MOD_RES (1)..(34)..(35): Xaa is C or S
  MOD_RES (12)..(13)..(14)..(15)..(16): Xaa is A or G
  MOD_RES (17)..(18)..(19)..(20): Xaa is A or G or is absent

SEQ ID NO: 25872 - protein, 42 aa, Artificial Sequence; identical to SEQ ID NO: 4792
  GFR-binding peptide
  MOD_RES (2)..(4)..(36)..(37): Xaa is C or S

SEQ ID NO: 25873 - protein, 42 aa, Artificial Sequence
  GFR-binding peptide
  MOD_RES (2)..(36)..(37): Xaa is C or S
  MOD_RES (14)..(15)..(16)..(17)..(18): Xaa is A or G
  MOD_RES (19)..(20)..(21)..(22): Xaa is A or G or is absent
GXAKVVMNEYKFKXXXXXXXXXLYLVSIPELKTPAXXAKPVA

SEQ ID NO: 25874 - protein, 38 aa, Artificial Sequence
  GFR-binding peptide
  MOD_RES (34)..(35): Xaa is C or S
  MOD_RES (12)..(13)..(14)..(15)..(16): Xaa is A or G
  MOD_RES (17)..(18)..(19)..(20): Xaa is A or G or is absent
AEVVMDEYQKYXXXXXXXXXIYLISIPSLRAPVXXSAP

SEQ ID NO: 25875 - protein, 42 aa, Artificial Sequence
  GFR-binding peptide
  MOD_RES (2)..(4)..(38): Xaa is C or S
  MOD_RES (16)..(17)..(18)..(19)..(20): Xaa is A or G
  MOD_RES (21)..(22)..(23)..(24): Xaa is A or G or is absent
HXGXSRVVMNEYQKYXXXXXXXXXIYLVSIPSLKTPAXTPKT

SEQ ID NO: 25876 - protein, 38 aa, Artificial Sequence
  GFR-binding peptide
  MOD_RES (2)..(4)..(38): Xaa is C or S
  MOD_RES (16)..(17)..(18)..(19)..(20): Xaa is A or G
  MOD_RES (21)..(22)..(23)..(24): Xaa is A or G or is absent
RXGXGEVVMEEYKFKXXXXXXXXXLYLMSIPELETPVX

SEQ ID NO: 25877 - protein, 39 aa, Artificial Sequence
  GFR-binding peptide
  MOD_RES (33)..(34): Xaa is C or S
  MOD_RES (11)..(12)..(13)..(14)..(15): Xaa is A or G
  MOD_RES (16)..(17)..(18)..(19): Xaa is A or G or is absent
SKVVMEYQKYXXXXXXXXXIYLISIPSLDQPVXXPSASA

SEQ ID NO: 25878 - protein, 40 aa, Artificial Sequence
  GFR-binding peptide
  MOD_RES (1)..(3)..(36)..(37): Xaa is C or S
XGXEAVSMGEEYQKYTPVGMDDIYLVSIPSLKTPVXXAKG

SEQ ID NO: 25879 - protein, 33 aa, Artificial Sequence; identical to SEQ ID NO: 4800
  GFR-binding peptide
  MOD_RES (33)..(33): Xaa is C or S
  MOD_RES (11)..(12)..(13)..(14)..(15): Xaa is A or G
  MOD_RES (16)..(17)..(18)..(19): Xaa is A or G or is absent

SEQ ID NO: 25880 - protein, 38 aa, Artificial Sequence
  GFR-binding peptide
  MOD_RES (1)..(3)..(34)..(35): Xaa is C or S
XKXSKVIMEYQKYIKPTKGIIYLISIPSLDQSVXXPSA

SEQ ID NO: 25881 - protein, 33 aa, Artificial Sequence; identical to SEQ ID NO: 4803
  GFR-binding peptide
  MOD_RES (1)..(3): Xaa is C or S

SEQ ID NO: 25882 - protein, 34 aa, Artificial Sequence
  GFR-binding peptide
  MOD_RES (1)..(34): Xaa is C or S
  MOD_RES (12)..(13)..(14)..(15)..(16): Xaa is A or G
  MOD_RES (17)..(18)..(19)..(20): Xaa is A or G or is absent
XSKVIMEYKFKXXXXXXXXXLYLISIPELDQSVX

SEQ ID NO: 25883 - protein, 36 aa, Artificial Sequence
  GFR-binding peptide
  MOD_RES (34)..(35): Xaa is C or S
  MOD_RES (12)..(13)..(14)..(15)..(16): Xaa is A or G
  MOD_RES (17)..(18)..(19)..(20): Xaa is A or G or is absent
SRVVMNEYQKYXXXXXXXXXIYLVSIPSLKTPAXXP

SEQ ID NO: 25884 - protein, 40 aa, Artificial Sequence; identical to SEQ ID NO: 4806
  GFR-binding peptide
  MOD_RES (2)..(4)..(39)..(40): Xaa is C or S
  MOD_RES (17)..(18)..(19)..(20)..(21): Xaa is A or G
  MOD_RES (22)..(23)..(24)..(25): Xaa is A or G or is absent

SEQ ID NO: 25885 - protein, 39 aa, Artificial Sequence; identical to SEQ ID NO: 4807
  GFR-binding peptide
  MOD_RES (1)..(3)..(37)..(38): Xaa is C or S
  MOD_RES (15)..(16)..(17)..(18)..(19): Xaa is A or G
  MOD_RES (20)..(21)..(22)..(23): Xaa is A or G or is absent

SEQ ID NO: 25886 - protein, 34 aa, Artificial Sequence
  GFR-binding peptide
  MOD_RES (2)..(4): Xaa is C or S
SXKXSKVIMEYQKYIKPTKGIIYLISIPSLDQSV

SEQ ID NO: 25887 - protein, 41 aa, Artificial Sequence; identical to SEQ ID NO: 4808
  GFR-binding peptide
  MOD_RES (1)..(3)..(36)..(37): Xaa is C or S
  MOD_RES (14)..(15)..(16)..(17)..(18): Xaa is A or G
  MOD_RES (19)..(20)..(21)..(22): Xaa is A or G or is absent

SEQ ID NO: 25888 - protein, 41 aa, Artificial Sequence; identical to SEQ ID NO: 4810
  GFR-binding peptide
  MOD_RES (2)..(36)..(37): Xaa is C or S
  MOD_RES (14)..(15)..(16)..(17)..(18): Xaa is A or G
  MOD_RES (19)..(20)..(21)..(22): Xaa is A or G or is absent

SEQ ID NO: 25889 - protein, 39 aa, Artificial Sequence; identical to SEQ ID NO: 4811
  GFR-binding peptide
  MOD_RES (2)..(4)..(35)..(36): Xaa is C or S

SEQ ID NO: 25890 - protein, 39 aa, Artificial Sequence
  GFR-binding peptide
  MOD_RES (2)..(36)..(37): Xaa is C or S
  MOD_RES (14)..(15)..(16)..(17)..(18): Xaa is A or G
  MOD_RES (19)..(20)..(21)..(22): Xaa is A or G or is absent
GXESVAMGRYKKLXXXXXXXXXFYLISIANLKTPVXXAK

SEQ ID NO: 25891 - protein, 37 aa, Artificial Sequence; identical to SEQ ID NO: 4813
  GFR-binding peptide
  MOD_RES (1)..(3)..(35)..(36): Xaa is C or S

SEQ ID NO: 25892 - protein, 37 aa, Artificial Sequence
  GFR-binding peptide
  MOD_RES (1)..(34)..(35): Xaa is C or S
  MOD_RES (12)..(13)..(14)..(15)..(16): Xaa is A or G
  MOD_RES (17)..(18)..(19)..(20): Xaa is A or G or is absent
XSKVVMEYKFKXXXXXXXXXLYLISIPELDQPVXXPS

SEQ ID NO: 25893 - protein, 39 aa, Artificial Sequence
  GFR-binding peptide
  MOD_RES (2)..(36)..(37): Xaa is C or S
  MOD_RES (14)..(15)..(16)..(17)..(18): Xaa is A or G
  MOD_RES (19)..(20)..(21)..(22): Xaa is A or G or is absent
GXAEVVMDEYQKYXXXXXXXXXIYLISIPSLRAPVXXSA

SEQ ID NO: 25894 - protein, 37 aa, Artificial Sequence
  GFR-binding peptide
  MOD_RES (35)..(36): Xaa is C or S
  MOD_RES (13)..(14)..(15)..(16)..(17): Xaa is A or G
  MOD_RES (18)..(19)..(20)..(21): Xaa is A or G or is absent
EAVSMGEEYQKYXXXXXXXXXIYLVSIPSLKTPVXXA

SEQ ID NO: 25895 - protein, 36 aa, Artificial Sequence
  GFR-binding peptide
  MOD_RES (1)..(3)..(36): Xaa is C or S
  MOD_RES (14)..(15)..(16)..(17)..(18): Xaa is A or G
  MOD_RES (19)..(20)..(21)..(22): Xaa is A or G or is absent
XKXSKVVMEYQKYXXXXXXXXXIYLISIPSLDQPVX

SEQ ID NO: 25896 - protein, 41 aa, Artificial Sequence
  GFR-binding peptide
  MOD_RES (1)..(35)..(36): Xaa is C or S
  MOD_RES (13)..(14)..(15)..(16)..(17): Xaa is A or G
  MOD_RES (18)..(19)..(20)..(21): Xaa is A or G or is absent
XAEVVMDEYQKYXXXXXXXXXIYLISIPSLRAPVXXSAPAA

SEQ ID NO: 25897 - protein, 40 aa, Artificial Sequence
  GFR-binding peptide
  MOD_RES (2)..(36)..(37): Xaa is C or S
  MOD_RES (14)..(15)..(16)..(17)..(18): Xaa is A or G
  MOD_RES (19)..(20)..(21)..(22): Xaa is A or G or is absent
GXGEVVMEEYKFKXXXXXXXXXLYLMSIPELETPVXXAKP

SEQ ID NO: 25898 - protein, 33 aa, Artificial Sequence; identical to SEQ ID NO: 4817
  GFR-binding peptide
  MOD_RES (12)..(13)..(14)..(15)..(16): Xaa is A or G
  MOD_RES (17)..(18)..(19)..(20): Xaa is A or G or is absent

SEQ ID NO: 25899 - protein, 37 aa, Artificial Sequence
  GFR-binding peptide
  MOD_RES (2)..(4): Xaa is C or S
  MOD_RES (16)..(17)..(18)..(19)..(20): Xaa is A or G
  MOD_RES (21)..(22)..(23)..(24): Xaa is A or G or is absent
RXGXAEVVMDEYKFKXXXXXXXXXLYLISIPELRAPV

SEQ ID NO: 25900 - protein, 41 aa, Artificial Sequence
  GFR-binding peptide
  MOD_RES (1)..(3)..(35)..(36): Xaa is C or S
XGXAEVVMDEYKFKVVNNAADLYLISIPELRAPVXXSAPAA

SEQ ID NO: 25901 - protein, 40 aa, Artificial Sequence; identical to SEQ ID NO: 4821
  GFR-binding peptide
  MOD_RES (2)..(4)..(38): Xaa is C or S
  MOD_RES (16)..(17)..(18)..(19)..(20): Xaa is A or G
  MOD_RES (21)..(22)..(23)..(24): Xaa is A or G or is absent

SEQ ID NO: 25902 - protein, 37 aa, Artificial Sequence; identical to SEQ ID NO: 4822
  GFR-binding peptide
  MOD_RES (1)..(33)..(34): Xaa is C or S

SEQ ID NO: 25903 - protein, 40 aa, Artificial Sequence; identical to SEQ ID NO: 4824
  GFR-binding peptide
  MOD_RES (1)..(36)..(37): Xaa is C or S
  MOD_RES (14)..(15)..(16)..(17)..(18): Xaa is A or G
  MOD_RES (19)..(20)..(21)..(22): Xaa is A or G or is absent

SEQ ID NO: 25904 - protein, 37 aa, Artificial Sequence; identical to SEQ ID NO: 4825
  GFR-binding peptide
  MOD_RES (32)..(33): Xaa is C or S

SEQ ID NO: 25905 - protein, 39 aa, Artificial Sequence; identical to SEQ ID NO: 4826
  GFR-binding peptide
  MOD_RES (2)..(35)..(36): Xaa is C or S

SEQ ID NO: 25906 - protein, 33 aa, Artificial Sequence; identical to SEQ ID NO: 4827
  GFR-binding peptide
  MOD_RES (1)..(32)..(33): Xaa is C or S

SEQ ID NO: 25907 - protein, 37 aa, Artificial Sequence; identical to SEQ ID NO: 4828
  GFR-binding peptide
  MOD_RES (31)..(32): Xaa is C or S

SEQ ID NO: 25908 - protein, 36 aa, Artificial Sequence; identical to SEQ ID NO: 4829
  GFR-binding peptide
  MOD_RES (2)..(34)..(35): Xaa is C or S

SEQ ID NO: 25909 - protein, 35 aa, Artificial Sequence; identical to SEQ ID NO: 4835
  GFR-binding peptide
  MOD_RES (1)..(3)..(34)..(35): Xaa is C or S

SEQ ID NO: 25910 - protein, 40 aa, Artificial Sequence
  GFR-binding peptide
  MOD_RES (1)..(35)..(36): Xaa is C or S
  MOD_RES (13)..(14)..(15)..(16)..(17): Xaa is A or G
  MOD_RES (18)..(19)..(20)..(21): Xaa is A or G or is absent
XARVVMNEYKFKXXXXXXXXXLYLVSIPELQTPAXXPKPV

SEQ ID NO: 25911 - protein, 38 aa, Artificial Sequence; identical to SEQ ID NO: 4837
  GFR-binding peptide
  MOD_RES (2)..(4)..(37)..(38): Xaa is C or S
  MOD_RES (15)..(16)..(17)..(18)..(19): Xaa is A or G
  MOD_RES (20)..(21)..(22)..(23): Xaa is A or G or is absent

SEQ ID NO: 25912 - protein, 38 aa, Artificial Sequence
  GFR-binding peptide
  MOD_RES (1)..(33)..(34): Xaa is C or S
XSRVVMNEYKFKIVNSSDDLYLVSIPELKTPAXXPKPV

SEQ ID NO: 25913 - protein, 34 aa, Artificial Sequence
  GFR-binding peptide
  MOD_RES (1)..(3): Xaa is C or S
XGXSRVVMNEYKFKIVNSSDDLYLVSIPELKTPA

SEQ ID NO: 25914 - protein, 32 aa, Artificial Sequence
  GFR-binding peptide
  MOD_RES (31)..(32): Xaa is C or S
RVVMNEYQKYIVNSSDDIYLVSIPSLQTPAXX

SEQ ID NO: 25915 - protein, 32 aa, Artificial Sequence
  GFR-binding peptide
  MOD_RES (32)..(32): Xaa is C or S
ARVVMNEYQKYIVNSSDDIYLVSIPSLQTPAX

SEQ ID NO: 25916 - protein, 38 aa, Artificial Sequence
  GFR-binding peptide
  MOD_RES (2)..(36): Xaa is C or S
  MOD_RES (14)..(15)..(16)..(17)..(18): Xaa is A or G
  MOD_RES (19)..(20)..(21)..(22): Xaa is A or G or is absent
GXSRVVMNEYKFKXXXXXXXXXLYLVSIPELKTPAXTP

SEQ ID NO: 25917 - protein, 39 aa, Artificial Sequence
  GFR-binding peptide
  MOD_RES (2)..(34)..(35): Xaa is C or S
GXGEVVMEEYQKYVVKDYEDIYLMSIPSLETPVXXAKPI

SEQ ID NO: 25918 - protein, 38 aa, Artificial Sequence; identical to SEQ ID NO: 4845
  GFR-binding peptide
  MOD_RES (2)..(4)..(36)..(37): Xaa is C or S

SEQ ID NO: 25919 - protein, 36 aa, Artificial Sequence; identical to SEQ ID NO: 4847
  GFR-binding peptide
  MOD_RES (33)..(34): Xaa is C or S
  MOD_RES (11)..(12)..(13)..(14)..(15): Xaa is A or G
  MOD_RES (16)..(17)..(18)..(19): Xaa is A or G or is absent

SEQ ID NO: 25920 - protein, 31 aa, Artificial Sequence
  GFR-binding peptide
GEVVMEEYQKYVVKDYEDIYLMSIPSLETPV

SEQ ID NO: 25921 - protein, 35 aa, Artificial Sequence
  GFR-binding peptide
  MOD_RES (2)..(4): Xaa is C or S
HXGXAKVVMNEYKFKIVNNSSDLYLVSIPELKTPA

SEQ ID NO: 25922 - protein, 41 aa, Artificial Sequence
  GFR-binding peptide
  MOD_RES (1)..(3)..(37)..(38): Xaa is C or S
  MOD_RES (15)..(16)..(17)..(18)..(19): Xaa is A or G
  MOD_RES (20)..(21)..(22)..(23): Xaa is A or G or is absent
XGXESVAMGEYKFKXXXXXXXXXLYLISIPELKTPVXXAKS

SEQ ID NO: 25923 - protein, 36 aa, Artificial Sequence
  GFR-binding peptide
  MOD_RES (1)..(3): Xaa is C or S
  MOD_RES (15)..(16)..(17)..(18)..(19): Xaa is A or G
  MOD_RES (20)..(21)..(22)..(23): Xaa is A or G or is absent
XGXESVAMGEYKFKXXXXXXXXXLYLISIPELKTPV

SEQ ID NO: 25924 - protein, 36 aa, Artificial Sequence
  GFR-binding peptide
  MOD_RES (1)..(3): Xaa is C or S
  MOD_RES (15)..(16)..(17)..(18)..(19): Xaa is A or G
  MOD_RES (20)..(21)..(22)..(23): Xaa is A or G or is absent
XGXAEVVMDRYKKLXXXXXXXXXFYLISIANLRAPV

SEQ ID NO: 25925 - protein, 32 aa, Artificial Sequence; identical to SEQ ID NO: 4852
  GFR-binding peptide
  MOD_RES (32)..(32): Xaa is C or S

SEQ ID NO: 25926 - protein, 40 aa, Artificial Sequence
  GFR-binding peptide
  MOD_RES (2)..(4)..(38)..(39): Xaa is C or S
  MOD_RES (16)..(17)..(18)..(19)..(20): Xaa is A or G
  MOD_RES (21)..(22)..(23)..(24): Xaa is A or G or is absent
RXGXGEVVMEEYKFKXXXXXXXXXLYLMSIPELETPVXXA

SEQ ID NO: 25927 - protein, 38 aa, Artificial Sequence
  GFR-binding peptide
  MOD_RES (1)..(33)..(34): Xaa is C or S
XAEVVMDRYKKLVVNNAADFYLISIANLRAPVXXSAPA

SEQ ID NO: 25928 - protein, 36 aa, Artificial Sequence; identical to SEQ ID NO: 4856
  GFR-binding peptide
  MOD_RES (33)..(33): Xaa is C or S
  MOD_RES (11)..(12)..(13)..(14)..(15): Xaa is A or G
  MOD_RES (16)..(17)..(18)..(19): Xaa is A or G or is absent

SEQ ID NO: 25929 - protein, 35 aa, Artificial Sequence
  GFR-binding peptide
  MOD_RES (34)..(35): Xaa is C or S
  MOD_RES (12)..(13)..(14)..(15)..(16): Xaa is A or G
  MOD_RES (17)..(18)..(19)..(20): Xaa is A or G or is absent
AEVVMDEYKFKXXXXXXXXXLYLISIPELRAPVXX

SEQ ID NO: 25930 - protein, 36 aa, Artificial Sequence; identical to SEQ ID NO: 4859
  GFR-binding peptide
  MOD_RES (33)..(34): Xaa is C or S
  MOD_RES (11)..(12)..(13)..(14)..(15): Xaa is A or G
  MOD_RES (16)..(17)..(18)..(19): Xaa is A or G or is absent

SEQ ID NO: 25931 - protein, 41 aa, Artificial Sequence; identical to SEQ ID NO: 4860
  GFR-binding peptide
  MOD_RES (1)..(35)..(36): Xaa is C or S
  MOD_RES (13)..(14)..(15)..(16)..(17): Xaa is A or G
  MOD_RES (18)..(19)..(20)..(21): Xaa is A or G or is absent

SEQ ID NO: 25932 - protein, 32 aa, Artificial Sequence; identical to SEQ ID NO: 4862
  GFR-binding peptide
  MOD_RES (32)..(32): Xaa is C or S

SEQ ID NO: 25933 - protein, 37 aa, Artificial Sequence
  GFR-binding peptide
  MOD_RES (2)..(34)..(35): Xaa is C or S
GXESVAMGEYQKYYTVVGKDIYLISIPSLKTPVXXAK

SEQ ID NO: 25934 - protein, 39 aa, Artificial Sequence; identical to SEQ ID NO: 4866
  GFR-binding peptide
  MOD_RES (1)..(35)..(36): Xaa is C or S
  MOD_RES (13)..(14)..(15)..(16)..(17): Xaa is A or G
  MOD_RES (18)..(19)..(20)..(21): Xaa is A or G or is absent

SEQ ID NO: 25935 - protein, 37 aa, Artificial Sequence; identical to SEQ ID NO: 4867
  GFR-binding peptide
  MOD_RES (2)..(4): Xaa is C or S
  MOD_RES (16)..(17)..(18)..(19)..(20): Xaa is A or G
  MOD_RES (21)..(22)..(23)..(24): Xaa is A or G or is absent

SEQ ID NO: 25936 - protein, 36 aa, Artificial Sequence
  GFR-binding peptide
  MOD_RES (1)..(3)..(35): Xaa is C or S
XGXSRVVMNEYKFKIVNSSDDLYLVSIPELKTPAXT

SEQ ID NO: 25937 - protein, 36 aa, Artificial Sequence; identical to SEQ ID NO: 4869
  GFR-binding peptide
  MOD_RES (1)..(3)..(36): Xaa is C or S

SEQ ID NO: 25938 - protein, 40 aa, Artificial Sequence
  GFR-binding peptide
  MOD_RES (1)..(35)..(36): Xaa is C or S
  MOD_RES (13)..(14)..(15)..(16)..(17): Xaa is A or G
  MOD_RES (18)..(19)..(20)..(21): Xaa is A or G or is absent
XESVAMGYHYKLXXXXXXXXXKYLISIPSLKTPVXXAKSA

SEQ ID NO: 25939 - protein, 40 aa, Artificial Sequence; identical to SEQ ID NO: 4870
  GFR-binding peptide
  MOD_RES (2)..(34)..(35): Xaa is C or S

SEQ ID NO: 25940 - protein, 38 aa, Artificial Sequence
  GFR-binding peptide
  MOD_RES (1)..(3)..(37)..(38): Xaa is C or S
  MOD_RES (15)..(16)..(17)..(18)..(19): Xaa is A or G
  MOD_RES (20)..(21)..(22)..(23): Xaa is A or G or is absent
XGXGEVVMEEYQKYXXXXXXXXXIYLMSIPSLETPVXX

SEQ ID NO: 25941 - protein, 39 aa, Artificial Sequence
  GFR-binding peptide
  MOD_RES (33)..(34): Xaa is C or S
  MOD_RES (11)..(12)..(13)..(14)..(15): Xaa is A or G
  MOD_RES (16)..(17)..(18)..(19): Xaa is A or G or is absent
RVVMNEYKFKXXXXXXXXXLYLVSIPELKTPAXXPKPVY

SEQ ID NO: 25942 - protein, 30 aa, Artificial Sequence
  GFR-binding peptide
RVVMNEYKFKIVNSSDDLYLVSIPELQTPA

SEQ ID NO: 25943 - protein, 31 aa, Artificial Sequence
  GFR-binding peptide
GEVVMEEYKFKVVKDYEDLYLMSIPELETPV

SEQ ID NO: 25944 - protein, 37 aa, Artificial Sequence
  GFR-binding peptide
  MOD_RES (1)..(35)..(36): Xaa is C or S
  MOD_RES (13)..(14)..(15)..(16)..(17): Xaa is A or G
  MOD_RES (18)..(19)..(20)..(21): Xaa is A or G or is absent
XAKVVMNEYKFKXXXXXXXXXLYLVSIPELKTPAXXA

SEQ ID NO: 25945 - protein, 35 aa, Artificial Sequence
  GFR-binding peptide
  MOD_RES (2)..(4): Xaa is C or S
HXGXARVVMNEYKFKIVNSSDDLYLVSIPELQTPA

SEQ ID NO: 25946 - protein, 41 aa, Artificial Sequence
  GFR-binding peptide
  MOD_RES (2)..(4)..(36)..(37): Xaa is C or S
RXGXAEVVMDRYKKLVVNNAADFYLISIANLRAPVXXSAPA

SEQ ID NO: 25947 - protein, 34 aa, Artificial Sequence; identical to SEQ ID NO: 4873
  GFR-binding peptide
  MOD_RES (31)..(32): Xaa is C or S

SEQ ID NO: 25948 - protein, 31 aa, Artificial Sequence
  GFR-binding peptide
  MOD_RES (31)..(31): Xaa is C or S
SVAMGEYQKYYTVVGKDIYLISIPSLKTPVX

SEQ ID NO: 25949 - protein, 33 aa, Artificial Sequence
  GFR-binding peptide
  MOD_RES (33)..(33): Xaa is C or S
  MOD_RES (11)..(12)..(13)..(14)..(15): Xaa is A or G
  MOD_RES (16)..(17)..(18)..(19): Xaa is A or G or is absent
RVVMNEYKFKXXXXXXXXXLYLVSIPELQTPAX

SEQ ID NO: 25950 - protein, 35 aa, Artificial Sequence
  GFR-binding peptide
  MOD_RES (1)..(3)..(34)..(35): Xaa is C or S
XKXSKVVMEYQKYVKPTRGVIYLISIPSLDQPVXX

SEQ ID NO: 25951 - protein, 36 aa, Artificial Sequence
  GFR-binding peptide
  MOD_RES (2)..(33)..(34): Xaa is C or S
KXSRVIMEYKFKVKPKRGVLYLISIPELAQPVXXPA

SEQ ID NO: 25952 - protein, 44 aa, Artificial Sequence
  GFR-binding peptide
  MOD_RES (2)..(4)..(38)..(39): Xaa is C or S
  MOD_RES (16)..(17)..(18)..(19)..(20): Xaa is A or G
  MOD_RES (21)..(22)..(23)..(24): Xaa is A or G or is absent
RXGXGEVVMEEYKFKXXXXXXXXXLYLMSIPELETPVXXAKPIS

SEQ ID NO: 25953 - protein, 39 aa, Artificial Sequence
  GFR-binding peptide
  MOD_RES (1)..(33)..(34): Xaa is C or S
XGEVVMEEYQKYVVKDYEDIYLMSIPSLETPVXXAKPIS

SEQ ID NO: 25954 - protein, 35 aa, Artificial Sequence; identical to SEQ ID NO: 4875
  GFR-binding peptide
  MOD_RES (1)..(3): Xaa is C or S
  MOD_RES (14)..(15)..(16)..(17)..(18): Xaa is A or G
  MOD_RES (19)..(20)..(21)..(22): Xaa is A or G or is absent

SEQ ID NO: 25955 - protein, 38 aa, Artificial Sequence
  GFR-binding peptide
  MOD_RES (2)..(36)..(37): Xaa is C or S
  MOD_RES (14)..(15)..(16)..(17)..(18): Xaa is A or G
  MOD_RES (19)..(20)..(21)..(22): Xaa is A or G or is absent
GXAEVVMDYHYKLXXXXXXXXXKYLISIPSLRAPVXXS

SEQ ID NO: 25956 - protein, 41 aa, Artificial Sequence; identical to SEQ ID NO: 4876
  GFR-binding peptide
  MOD_RES (1)..(3)..(35)..(36): Xaa is C or S

SEQ ID NO: 25957 - protein, 36 aa, Artificial Sequence; identical to SEQ ID NO: 4877
  GFR-binding peptide
  MOD_RES (31)..(32): Xaa is C or S

SEQ ID NO: 25958 - protein, 40 aa, Artificial Sequence; identical to SEQ ID NO: 4878
  GFR-binding peptide
  MOD_RES (2)..(4)..(36)..(37): Xaa is C or S

SEQ ID NO: 25959 - protein, 37 aa, Artificial Sequence
  GFR-binding peptide
  MOD_RES (2)..(36): Xaa is C or S
  MOD_RES (14)..(15)..(16)..(17)..(18): Xaa is A or G
  MOD_RES (19)..(20)..(21)..(22): Xaa is A or G or is absent
GXSRVVMNEYQKYXXXXXXXXXIYLVSIPSLKTPAXT

SEQ ID NO: 25960 - protein, 39 aa, Artificial Sequence
  GFR-binding peptide
  MOD_RES (1)..(3)..(37): Xaa is C or S
  MOD_RES (15)..(16)..(17)..(18)..(19): Xaa is A or G
  MOD_RES (20)..(21)..(22)..(23): Xaa is A or G or is absent
XGXSRVVMNEYKFKXXXXXXXXXLYLVSIPELKTPAXTP

SEQ ID NO: 25961 - protein, 39 aa, Artificial Sequence; identical to SEQ ID NO: 4885
  GFR-binding peptide
  MOD_RES (2)..(4)..(36)..(37): Xaa is C or S

SEQ ID NO: 25962 - protein, 41 aa, Artificial Sequence
  GFR-binding peptide
  MOD_RES (1)..(3)..(37)..(38): Xaa is C or S
  MOD_RES (15)..(16)..(17)..(18)..(19): Xaa is A or G
  MOD_RES (20)..(21)..(22)..(23): Xaa is A or G or is absent
XGXAKVVMNEYQKYXXXXXXXXXIYLVSIPSLKTPAXXAKP

SEQ ID NO: 25963 - protein, 35 aa, Artificial Sequence
  GFR-binding peptide
  MOD_RES (33)..(34): Xaa is C or S
  MOD_RES (11)..(12)..(13)..(14)..(15): Xaa is A or G
  MOD_RES (16)..(17)..(18)..(19): Xaa is A or G or is absent
SKVVMEYQKYXXXXXXXXXIYLISIPSLDQPVXXP

SEQ ID NO: 25964 - protein, 35 aa, Artificial Sequence
  GFR-binding peptide
  MOD_RES (2)..(4): Xaa is C or S
RXGXGEVVMEEYQKYVVKDYEDIYLMSIPSLETPV

SEQ ID NO: 25965 - protein, 33 aa, Artificial Sequence
  GFR-binding peptide
  MOD_RES (33)..(33): Xaa is C or S
EAVSMGEEYQKYTPVGMDDIYLVSIPSLKTPVX

SEQ ID NO: 25966 - protein, 34 aa, Artificial Sequence
  GFR-binding peptide
  MOD_RES (34)..(34): Xaa is C or S
  MOD_RES (12)..(13)..(14)..(15)..(16): Xaa is A or G
  MOD_RES (17)..(18)..(19)..(20): Xaa is A or G or is absent
ESVAMGYHYKLXXXXXXXXXKYLISIPSLKTPVX

SEQ ID NO: 25967 - protein, 34 aa, Artificial Sequence; identical to SEQ ID NO: 4887
  GFR-binding peptide
  MOD_RES (32)..(33): Xaa is C or S

SEQ ID NO: 25968 - protein, 37 aa, Artificial Sequence; identical to SEQ ID NO: 4889
  GFR-binding peptide
  MOD_RES (1)..(3)..(37): Xaa is C or S
  MOD_RES (15)..(16)..(17)..(18)..(19): Xaa is A or G
  MOD_RES (20)..(21)..(22)..(23): Xaa is A or G or is absent

SEQ ID NO: 25969 - protein, 39 aa, Artificial Sequence
  GFR-binding peptide
  MOD_RES (2)..(4)..(38): Xaa is C or S
  MOD_RES (16)..(17)..(18)..(19)..(20): Xaa is A or G
  MOD_RES (21)..(22)..(23)..(24): Xaa is A or G or is absent
HXGXSRVVMNEYKFKXXXXXXXXXLYLVSIPELKTPAXT

SEQ ID NO: 25970 - protein, 33 aa, Artificial Sequence
  GFR-binding peptide
  MOD_RES (32)..(33): Xaa is C or S
ARVVMNEYKFKIVNSSDDLYLVSIPELQTPAXX

SEQ ID NO: 25971 - protein, 33 aa, Artificial Sequence
  GFR-binding peptide
  MOD_RES (31)..(32): Xaa is C or S
RVVMNEYQKYIVNSSDDIYLVSIPSLQTPAXXP

SEQ ID NO: 25972 - protein, 38 aa, Artificial Sequence
  GFR-binding peptide
  MOD_RES (32)..(33): Xaa is C or S
AKVVMNEYKFKIVNNSSDLYLVSIPELKTPAXXAKPVA

SEQ ID NO: 25973 - protein, 34 aa, Artificial Sequence
  GFR-binding peptide
  MOD_RES (1)..(34): Xaa is C or S
  MOD_RES (12)..(13)..(14)..(15)..(16): Xaa is A or G
  MOD_RES (17)..(18)..(19)..(20): Xaa is A or G or is absent
XSKVIMEYQKYXXXXXXXXXIYLISIPSLDQSVX

SEQ ID NO: 25974 - protein, 34 aa, Artificial Sequence
  GFR-binding peptide
  MOD_RES (1)..(1): Xaa is C or S
  MOD_RES (13)..(14)..(15)..(16)..(17): Xaa is A or G
  MOD_RES (18)..(19)..(20)..(21): Xaa is A or G or is absent
XAEVVMDEYKFKXXXXXXXXXLYLISIPELRAPV

SEQ ID NO: 25975 - protein, 36 aa, Artificial Sequence
  GFR-binding peptide
  MOD_RES (31)..(32): Xaa is C or S
SKVIMEYKFKIKPTKGILYLISIPELDQSVXXPSAS

SEQ ID NO: 25976 - protein, 31 aa, Artificial Sequence; identical to SEQ ID NO: 4894
  GFR-binding peptide
  MOD_RES (31)..(31): Xaa is C or S

SEQ ID NO: 25977 - protein, 37 aa, Artificial Sequence; identical to SEQ ID NO: 4895
  GFR-binding peptide
  MOD_RES (1)..(3)..(34)..(35): Xaa is C or S

SEQ ID NO: 25978 - protein, 38 aa, Artificial Sequence
  GFR-binding peptide
  MOD_RES (1)..(3)..(37)..(38): Xaa is C or S
  MOD_RES (15)..(16)..(17)..(18)..(19): Xaa is A or G
  MOD_RES (20)..(21)..(22)..(23): Xaa is A or G or is absent
XGXAEVVMDEYKFKXXXXXXXXXLYLISIPELRAPVXX

SEQ ID NO: 25979 - protein, 41 aa, Artificial Sequence
  GFR-binding peptide
  MOD_RES (2)..(4)..(38)..(39): Xaa is C or S
  MOD_RES (16)..(17)..(18)..(19)..(20): Xaa is A or G
  MOD_RES (21)..(22)..(23)..(24): Xaa is A or G or is absent
HXGXSRVVMNEYKFKXXXXXXXXXLYLVSIPELKTPAXXPK

SEQ ID NO: 25980 - protein, 35 aa, Artificial Sequence
  GFR-binding peptide
  MOD_RES (34)..(35): Xaa is C or S
  MOD_RES (12)..(13)..(14)..(15)..(16): Xaa is A or G
  MOD_RES (17)..(18)..(19)..(20): Xaa is A or G or is absent
GEVVMDEYQKYXXXXXXXXXIYLMSIPSLETPVXX

SEQ ID NO: 25981 - protein, 41 aa, Artificial Sequence
  GFR-binding peptide
  MOD_RES (1)..(3)..(37)..(38): Xaa is C or S
  MOD_RES (15)..(16)..(17)..(18)..(19): Xaa is A or G
  MOD_RES (20)..(21)..(22)..(23): Xaa is A or G or is absent
XGXAEVVMDYHYKLXXXXXXXXXKYLISIPSLRAPVXXSAP

SEQ ID NO: 25982 - protein, 39 aa, Artificial Sequence; identical to SEQ ID NO: 4897
  GFR-binding peptide
  MOD_RES (2)..(4)..(37)..(38): Xaa is C or S
  MOD_RES (15)..(16)..(17)..(18)..(19): Xaa is A or G
  MOD_RES (20)..(21)..(22)..(23): Xaa is A or G or is absent

SEQ ID NO: 25983 - protein, 35 aa, Artificial Sequence; identical to SEQ ID NO: 4899
  GFR-binding peptide
  MOD_RES (2)..(35): Xaa is C or S
  MOD_RES (13)..(14)..(15)..(16)..(17): Xaa is A or G
  MOD_RES (18)..(19)..(20)..(21): Xaa is A or G or is absent

SEQ ID NO: 25984 - protein, 35 aa, Artificial Sequence
  GFR-binding peptide
  MOD_RES (1)..(34)..(35): Xaa is C or S
  MOD_RES (12)..(13)..(14)..(15)..(16): Xaa is A or G
  MOD_RES (17)..(18)..(19)..(20): Xaa is A or G or is absent
XSRVIMEYQKYXXXXXXXXXIYLISIPSLAQPVXX

SEQ ID NO: 25985 - protein, 37 aa, Artificial Sequence
  GFR-binding peptide
  MOD_RES (1)..(33)..(34): Xaa is C or S
XAEVVMDRYKKLVVNNAADFYLISIANLRAPVXXSAP

SEQ ID NO: 25986 - protein, 41 aa, Artificial Sequence
  GFR-binding peptide
  MOD_RES (1)..(35)..(36): Xaa is C or S
  MOD_RES (13)..(14)..(15)..(16)..(17): Xaa is A or G
  MOD_RES (18)..(19)..(20)..(21): Xaa is A or G or is absent
XAKVVMNEYQKYXXXXXXXXXIYLVSIPSLKTPAXXAKPVA

SEQ ID NO: 25987 - protein, 34 aa, Artificial Sequence; identical to SEQ ID NO: 4900
  GFR-binding peptide
  MOD_RES (32)..(33): Xaa is C or S

SEQ ID NO: 25988 - protein, 34 aa, Artificial Sequence; identical to SEQ ID NO: 4901
  GFR-binding peptide
  MOD_RES (1)..(3): Xaa is C or S

SEQ ID NO: 25989 - protein, 38 aa, Artificial Sequence; identical to SEQ ID NO: 4903
  GFR-binding peptide
  MOD_RES (32)..(32): Xaa is C or S

SEQ ID NO: 25990 - protein, 42 aa, Artificial Sequence; identical to SEQ ID NO: 4904
  GFR-binding peptide
  MOD_RES (2)..(36)..(37): Xaa is C or S
  MOD_RES (14)..(15)..(16)..(17)..(18): Xaa is A or G
  MOD_RES (19)..(20)..(21)..(22): Xaa is A or G or is absent

SEQ ID NO: 25991 - protein, 35 aa, Artificial Sequence
  GFR-binding peptide
  MOD_RES (31)..(31): Xaa is C or S
RVVMNEYKFKIVNSSDDLYLVSIPELKTPAXTPKT

SEQ ID NO: 25992 - protein, 37 aa, Artificial Sequence
  GFR-binding peptide
  MOD_RES (2)..(34)..(35): Xaa is C or S
GXGEVVMDEYKFKVVKENEDLYLMSIPELETPVXXAK

SEQ ID NO: 25993 - protein, 33 aa, Artificial Sequence
  GFR-binding peptide
  MOD_RES (32)..(33): Xaa is C or S
SRVVMNEYQKYIVNSSDDIYLVSIPSLKTPAXX

SEQ ID NO: 25994 - protein, 36 aa, Artificial Sequence
  GFR-binding peptide
  MOD_RES (34)..(34): Xaa is C or S
  MOD_RES (12)..(13)..(14)..(15)..(16): Xaa is A or G
  MOD_RES (17)..(18)..(19)..(20): Xaa is A or G or is absent
SRVVMNEYKFKXXXXXXXXXLYLVSIPELKTPAXTP

SEQ ID NO: 25995 - protein, 35 aa, Artificial Sequence
  GFR-binding peptide
  MOD_RES (1)..(35): Xaa is C or S
  MOD_RES (13)..(14)..(15)..(16)..(17): Xaa is A or G
  MOD_RES (18)..(19)..(20)..(21): Xaa is A or G or is absent
XESVAMGRYKKLXXXXXXXXXFYLISIANLKTPVX

SEQ ID NO: 25996 - protein, 38 aa, Artificial Sequence; identical to SEQ ID NO: 4907
  GFR-binding peptide
  MOD_RES (2)..(4)..(38): Xaa is C or S
  MOD_RES (16)..(17)..(18)..(19)..(20): Xaa is A or G
  MOD_RES (21)..(22)..(23)..(24): Xaa is A or G or is absent

SEQ ID NO: 25997 - protein, 40 aa, Artificial Sequence; identical to SEQ ID NO: 4908
  GFR-binding peptide
  MOD_RES (2)..(36)..(37): Xaa is C or S
  MOD_RES (14)..(15)..(16)..(17)..(18): Xaa is A or G
  MOD_RES (19)..(20)..(21)..(22): Xaa is A or G or is absent

SEQ ID NO: 25998 - protein, 36 aa, Artificial Sequence
  GFR-binding peptide
  MOD_RES (2)..(36): Xaa is C or S
  MOD_RES (14)..(15)..(16)..(17)..(18): Xaa is A or G
  MOD_RES (19)..(20)..(21)..(22): Xaa is A or G or is absent
GXESVAMGYHYKLXXXXXXXXXKYLISIPSLKTPVX

SEQ ID NO: 25999 - protein, 32 aa, Artificial Sequence
  GFR-binding peptide
  MOD_RES (1)..(1): Xaa is C or S
XGEVVMDEYKFKVVKENEDLYLMSIPELETPV

SEQ ID NO: 26000 - protein, 41 aa, Artificial Sequence
  GFR-binding peptide
  MOD_RES (2)..(4)..(38)..(39): Xaa is C or S
  MOD_RES (16)..(17)..(18)..(19)..(20): Xaa is A or G
  MOD_RES (21)..(22)..(23)..(24): Xaa is A or G or is absent
RXGXESVAMGYHYKLXXXXXXXXXKYLISIPSLKTPVXXAK

SEQ ID NO: 26001 - protein, 33 aa, Artificial Sequence
  GFR-binding peptide
  MOD_RES (1)..(1): Xaa is C or S
  MOD_RES (12)..(13)..(14)..(15)..(16): Xaa is A or G
  MOD_RES (17)..(18)..(19)..(20): Xaa is A or G or is absent
XSKVVMEYKFKXXXXXXXXXLYLISIPELDQPV

SEQ ID NO: 26002 - protein, 44 aa, Artificial Sequence
  GFR-binding peptide
  MOD_RES (2)..(4)..(38)..(39): Xaa is C or S
  MOD_RES (16)..(17)..(18)..(19)..(20): Xaa is A or G
  MOD_RES (21)..(22)..(23)..(24): Xaa is A or G or is absent
RXGXAEVVMDRYKKLXXXXXXXXXFYLISIANLRAPVXXSAPAA

SEQ ID NO: 26003 - protein, 37 aa, Artificial Sequence
  GFR-binding peptide
  MOD_RES (2)..(35)..(36): Xaa is C or S
  MOD_RES (13)..(14)..(15)..(16)..(17): Xaa is A or G
  MOD_RES (18)..(19)..(20)..(21): Xaa is A or G or is absent
KXSRVIMEYKFKXXXXXXXXXLYLISIPELAQPVXXP

SEQ ID NO: 26004 - protein, 39 aa, Artificial Sequence
  GFR-binding peptide
  MOD_RES (2)..(36)..(37): Xaa is C or S
  MOD_RES (14)..(15)..(16)..(17)..(18): Xaa is A or G
  MOD_RES (19)..(20)..(21)..(22): Xaa is A or G or is absent
GXARVVMNEYKFKXXXXXXXXXLYLVSIPELQTPAXXPK

SEQ ID NO: 26005 - protein, 35 aa, Artificial Sequence
  GFR-binding peptide
  MOD_RES (34)..(35): Xaa is C or S
  MOD_RES (12)..(13)..(14)..(15)..(16): Xaa is A or G
  MOD_RES (17)..(18)..(19)..(20): Xaa is A or G or is absent
ESVAMGYHYKLXXXXXXXXXKYLISIPSLKTPVXX

SEQ ID NO: 26006 - protein, 39 aa, Artificial Sequence; identical to SEQ ID NO: 4915
  GFR-binding peptide
  MOD_RES (2)..(33)..(34): Xaa is C or S

SEQ ID NO: 26007 - protein, 41 aa, Artificial Sequence; identical to SEQ ID NO: 4916
  GFR-binding peptide
  MOD_RES (2)..(4)..(35)..(36): Xaa is C or S

SEQ ID NO: 26008 - protein, 38 aa, Artificial Sequence; identical to SEQ ID NO: 4918
  GFR-binding peptide
  MOD_RES (2)..(35)..(36): Xaa is C or S
  MOD_RES (13)..(14)..(15)..(16)..(17): Xaa is A or G
  MOD_RES (18)..(19)..(20)..(21): Xaa is A or G or is absent

SEQ ID NO: 26009 - protein, 33 aa, Artificial Sequence
  GFR-binding peptide
  MOD_RES (33)..(33): Xaa is C or S
  MOD_RES (11)..(12)..(13)..(14)..(15): Xaa is A or G
  MOD_RES (16)..(17)..(18)..(19): Xaa is A or G or is absent
EVVMDEYQKYXXXXXXXXXIYLISIPSLRAPVX

SEQ ID NO: 26010 - protein, 43 aa, Artificial Sequence
  GFR-binding peptide
  MOD_RES (2)..(4)..(38): Xaa is C or S
  MOD_RES (16)..(17)..(18)..(19)..(20): Xaa is A or G
  MOD_RES (21)..(22)..(23)..(24): Xaa is A or G or is absent
HXGXSRVVMNEYKFKXXXXXXXXXLYLVSIPELKTPAXTPKTV

SEQ ID NO: 26011 - protein, 35 aa, Artificial Sequence
  GFR-binding peptide
  MOD_RES (31)..(32): Xaa is C or S
SKVIMEYQKYIKPTKGIIYLISIPSLDQSVXXPSA

SEQ ID NO: 26012 - protein, 39 aa, Artificial Sequence; identical to SEQ ID NO: 4920
  GFR-binding peptide
  MOD_RES (2)..(4)..(38)..(39): Xaa is C or S
  MOD_RES (16)..(17)..(18)..(19)..(20): Xaa is A or G
  MOD_RES (21)..(22)..(23)..(24): Xaa is A or G or is absent

SEQ ID NO: 26013 - protein, 38 aa, Artificial Sequence; identical to SEQ ID NO: 4921
  GFR-binding peptide
  MOD_RES (1)..(3)..(37): Xaa is C or S
  MOD_RES (15)..(16)..(17)..(18)..(19): Xaa is A or G
  MOD_RES (20)..(21)..(22)..(23): Xaa is A or G or is absent

SEQ ID NO: 26014 - protein, 38 aa, Artificial Sequence
  GFR-binding peptide
  MOD_RES (1)..(33)..(34): Xaa is C or S
XGEVVMDEYKFKVVKENEDLYLMSIPELETPVXXAKPI

SEQ ID NO: 26015 - protein, 35 aa, Artificial Sequence; identical to SEQ ID NO: 4923
  GFR-binding peptide
  MOD_RES (1)..(35): Xaa is C or S
  MOD_RES (13)..(14)..(15)..(16)..(17): Xaa is A or G
  MOD_RES (18)..(19)..(20)..(21): Xaa is A or G or is absent

SEQ ID NO: 26016 - protein, 36 aa, Artificial Sequence; identical to SEQ ID NO: 4924
  GFR-binding peptide
  MOD_RES (31)..(32): Xaa is C or S

SEQ ID NO: 26017 - protein, 37 aa, Artificial Sequence
  GFR-binding peptide
  MOD_RES (33)..(34): Xaa is C or S
  MOD_RES (11)..(12)..(13)..(14)..(15): Xaa is A or G
  MOD_RES (16)..(17)..(18)..(19): Xaa is A or G or is absent
SVAMGRYKKLXXXXXXXXXFYLISIANLKTPVXXAKS

SEQ ID NO: 26018 - protein, 32 aa, Artificial Sequence
  GFR-binding peptide
  MOD_RES (32)..(32): Xaa is C or S
AEVVMDEYKFKVVNNAADLYLISIPELRAPVX

SEQ ID NO: 26019 - protein, 38 aa, Artificial Sequence; identical to SEQ ID NO: 4926
  GFR-binding peptide
  MOD_RES (33)..(34): Xaa is C or S
  MOD_RES (11)..(12)..(13)..(14)..(15): Xaa is A or G
  MOD_RES (16)..(17)..(18)..(19): Xaa is A or G or is absent

SEQ ID NO: 26020 - protein, 40 aa, Artificial Sequence; identical to SEQ ID NO: 4927
  GFR-binding peptide
  MOD_RES (1)..(35)..(36): Xaa is C or S
  MOD_RES (13)..(14)..(15)..(16)..(17): Xaa is A or G
  MOD_RES (18)..(19)..(20)..(21): Xaa is A or G or is absent

SEQ ID NO: 26021 - protein, 35 aa, Artificial Sequence
  GFR-binding peptide
  MOD_RES (1)..(35): Xaa is C or S
  MOD_RES (13)..(14)..(15)..(16)..(17): Xaa is A or G
  MOD_RES (18)..(19)..(20)..(21): Xaa is A or G or is absent
XAEVVMDEYKFKXXXXXXXXXLYLISIPELRAPVX

SEQ ID NO: 26022 - protein, 42 aa, Artificial Sequence
  GFR-binding peptide
  MOD_RES (2)..(4)..(37)..(38): Xaa is C or S
  MOD_RES (15)..(16)..(17)..(18)..(19): Xaa is A or G
  MOD_RES (20)..(21)..(22)..(23): Xaa is A or G or is absent
SXKXSKVVMEYQKYXXXXXXXXXIYLISIPSLDQPVXXPSAS

SEQ ID NO: 26023 - protein, 36 aa, Artificial Sequence
  GFR-binding peptide
  MOD_RES (1)..(33)..(34): Xaa is C or S
XGEVVMDEYKFKVVKENEDLYLMSIPELETPVXXAK

SEQ ID NO: 26024 - protein, 38 aa, Artificial Sequence
  GFR-binding peptide
  MOD_RES (2)..(4)..(38): Xaa is C or S
  MOD_RES (16)..(17)..(18)..(19)..(20): Xaa is A or G
  MOD_RES (21)..(22)..(23)..(24): Xaa is A or G or is absent
RXGXAEVVMDRYKKLXXXXXXXXXFYLISIANLRAPVX

SEQ ID NO: 26025 - protein, 40 aa, Artificial Sequence
  GFR-binding peptide
  MOD_RES (34)..(35): Xaa is C or S
  MOD_RES (12)..(13)..(14)..(15)..(16): Xaa is A or G
  MOD_RES (17)..(18)..(19)..(20): Xaa is A or G or is absent
GEVVMDEYQKYXXXXXXXXXIYLMSIPSLETPVXXAKPIK

SEQ ID NO: 26026 - protein, 32 aa, Artificial Sequence
  GFR-binding peptide
  MOD_RES (1)..(1): Xaa is C or S
XGEVVMEEYKFKVVKDYEDLYLMSIPELETPV

SEQ ID NO: 26027 - protein, 38 aa, Artificial Sequence; identical to SEQ ID NO: 4934
  GFR-binding peptide
  MOD_RES (1)..(3)..(38): Xaa is C or S
  MOD_RES (16)..(17)..(18)..(19)..(20): Xaa is A or G
  MOD_RES (21)..(22)..(23)..(24): Xaa is A or G or is absent

SEQ ID NO: 26028 - protein, 37 aa, Artificial Sequence
  GFR-binding peptide
  MOD_RES (1)..(3)..(37): Xaa is C or S
  MOD_RES (15)..(16)..(17)..(18)..(19): Xaa is A or G
  MOD_RES (20)..(21)..(22)..(23): Xaa is A or G or is absent
XGXGEVVMEEYQKYXXXXXXXXXIYLMSIPSLETPVX

SEQ ID NO: 26029 - protein, 36 aa, Artificial Sequence; identical to SEQ ID NO: 4935
  GFR-binding peptide
  MOD_RES (1)..(3): Xaa is C or S
  MOD_RES (15)..(16)..(17)..(18)..(19): Xaa is A or G
  MOD_RES (20)..(21)..(22)..(23): Xaa is A or G or is absent

SEQ ID NO: 26030 - protein, 38 aa, Artificial Sequence; identical to SEQ ID NO: 4937
  GFR-binding peptide
  MOD_RES (1)..(3)..(37)..(38): Xaa is C or S
  MOD_RES (15)..(16)..(17)..(18)..(19): Xaa is A or G
  MOD_RES (20)..(21)..(22)..(23): Xaa is A or G or is absent

SEQ ID NO: 26031 - protein, 37 aa, Artificial Sequence; identical to SEQ ID NO: 4938
  GFR-binding peptide
  MOD_RES (2)..(4)..(37): Xaa is C or S
  MOD_RES (15)..(16)..(17)..(18)..(19): Xaa is A or G
  MOD_RES (20)..(21)..(22)..(23): Xaa is A or G or is absent

SEQ ID NO: 26032 - protein, 36 aa, Artificial Sequence
  GFR-binding peptide
  MOD_RES (1)..(33)..(34): Xaa is C or S
XSRVVMNEYKFKIVNSSDDLYLVSIPELKTPAXXPK

SEQ ID NO: 26033 - protein, 40 aa, Artificial Sequence; identical to SEQ ID NO: 4942
  GFR-binding peptide
  MOD_RES (2)..(36)..(37): Xaa is C or S
  MOD_RES (14)..(15)..(16)..(17)..(18): Xaa is A or G
  MOD_RES (19)..(20)..(21)..(22): Xaa is A or G or is absent

SEQ ID NO: 26034 - protein, 35 aa, Artificial Sequence; identical to SEQ ID NO: 4945
  GFR-binding peptide
  MOD_RES (1)..(33)..(34): Xaa is C or S

SEQ ID NO: 26035 - protein, 41 aa, Artificial Sequence; identical to SEQ ID NO: 4946
  GFR-binding peptide
  MOD_RES (35)..(36): Xaa is C or S
  MOD_RES (13)..(14)..(15)..(16)..(17): Xaa is A or G
  MOD_RES (18)..(19)..(20)..(21): Xaa is A or G or is absent

SEQ ID NO: 26036 - protein, 32 aa, Artificial Sequence
  GFR-binding peptide
  MOD_RES (2)..(2): Xaa is C or S
KXSKVIMEYKFKIKPTKGILYLISIPELDQSV

SEQ ID NO: 26037 - protein, 36 aa, Artificial Sequence
  GFR-binding peptide
  MOD_RES (1)..(33)..(34): Xaa is C or S
XESVAMGYHYKLYTVVGKDKYLISIPSLKTPVXXAK

SEQ ID NO: 26038 - protein, 34 aa, Artificial Sequence
  GFR-binding peptide
  MOD_RES (1)..(3): Xaa is C or S
XGXESVAMGYHYKLYTVVGKDKYLISIPSLKTPV

SEQ ID NO: 26039 - protein, 33 aa, Artificial Sequence
  GFR-binding peptide
  MOD_RES (1)..(32)..(33): Xaa is C or S
XSKVVMEYKFKVKPTRGVLYLISIPELDQPVXX

SEQ ID NO: 26040 - protein, 33 aa, Artificial Sequence
  GFR-binding peptide
  MOD_RES (2)..(33): Xaa is C or S
KXSRVIMEYKFKVKPKRGVLYLISIPELAQPVX

SEQ ID NO: 26041 - protein, 35 aa, Artificial Sequence
  GFR-binding peptide
  MOD_RES (31)..(32): Xaa is C or S
RVVMNEYKFKIVNSSDDLYLVSIPELKTPAXXPKP

SEQ ID NO: 26042 - protein, 37 aa, Artificial Sequence
  GFR-binding peptide
  MOD_RES (2)..(4)..(37): Xaa is C or S
  MOD_RES (15)..(16)..(17)..(18)..(19): Xaa is A or G
  MOD_RES (20)..(21)..(22)..(23): Xaa is A or G or is absent
SXKXSKVVMEYKFKXXXXXXXXXLYLISIPELDQPVX

SEQ ID NO: 26043 - protein, 44 aa, Artificial Sequence
  GFR-binding peptide
  MOD_RES (2)..(4)..(38)..(39): Xaa is C or S
  MOD_RES (16)..(17)..(18)..(19)..(20): Xaa is A or G
  MOD_RES (21)..(22)..(23)..(24): Xaa is A or G or is absent
RXGXAEVVMDEYQKYXXXXXXXXXIYLISIPSLRAPVXXSAPAA

SEQ ID NO: 26044 - protein, 35 aa, Artificial Sequence
  GFR-binding peptide
  MOD_RES (33)..(34): Xaa is C or S
  MOD_RES (11)..(12)..(13)..(14)..(15): Xaa is A or G
  MOD_RES (16)..(17)..(18)..(19): Xaa is A or G or is absent
SRVIMEYQKYXXXXXXXXXIYLISIPSLAQPVXXP

SEQ ID NO: 26045 - protein, 38 aa, Artificial Sequence; identical to SEQ ID NO: 4952
  GFR-binding peptide
  MOD_RES (1)..(3)..(35): Xaa is C or S

SEQ ID NO: 26046 - protein, 39 aa, Artificial Sequence
  GFR-binding peptide
  MOD_RES (1)..(33)..(34): Xaa is C or S
XARVVMNEYKFKIVNSSDDLYLVSIPELQTPAXXPKPVT

SEQ ID NO: 26047 - protein, 40 aa, Artificial Sequence
  GFR-binding peptide
  MOD_RES (1)..(3)..(37)..(38): Xaa is C or S
  MOD_RES (15)..(16)..(17)..(18)..(19): Xaa is A or G
  MOD_RES (20)..(21)..(22)..(23): Xaa is A or G or is absent
XGXSRVVMNEYQKYXXXXXXXXXIYLVSIPSLKTPAXXPK

SEQ ID NO: 26048 - protein, 39 aa, Artificial Sequence
  GFR-binding peptide
  MOD_RES (2)..(4)..(37)..(38): Xaa is C or S
RXGXEAVSMGEEYKFKTPVGMDDLYLVSIPELKTPVXXA

SEQ ID NO: 26049 - protein, 37 aa, Artificial Sequence
  GFR-binding peptide
  MOD_RES (34)..(35): Xaa is C or S
  MOD_RES (12)..(13)..(14)..(15)..(16): Xaa is A or G
  MOD_RES (17)..(18)..(19)..(20): Xaa is A or G or is absent
GEVVMEEYKFKXXXXXXXXXLYLMSIPELETPVXXAK

SEQ ID NO: 26050 - protein, 43 aa, Artificial Sequence
  GFR-binding peptide
  MOD_RES (2)..(37)..(38): Xaa is C or S
  MOD_RES (15)..(16)..(17)..(18)..(19): Xaa is A or G
  MOD_RES (20)..(21)..(22)..(23): Xaa is A or G or is absent
GXEAVSMGEEYKFKXXXXXXXXXLYLVSIPELKTPVXXAKGVK

SEQ ID NO: 26051 - protein, 34 aa, Artificial Sequence
  GFR-binding peptide
  MOD_RES (1)..(33)..(34): Xaa is C or S
XSRVVMNEYQKYIVNSSDDIYLVSIPSLKTPAXX

SEQ ID NO: 26052 - protein, 34 aa, Artificial Sequence
  GFR-binding peptide
  MOD_RES (31)..(32): Xaa is C or S
SRVIMEYQKYVKPKRGVIYLISIPSLAQPVXXPA

SEQ ID NO: 26053 - protein, 37 aa, Artificial Sequence; identical to SEQ ID NO: 4955
  GFR-binding peptide
  MOD_RES (2)..(34)..(35): Xaa is C or S

SEQ ID NO: 26054 - protein, 33 aa, Artificial Sequence
  GFR-binding peptide
  MOD_RES (31)..(32): Xaa is C or S
EVVMDEYQKYVVNNAADIYLISIPSLRAPVXXS

SEQ ID NO: 26055 - protein, 36 aa, Artificial Sequence; identical to SEQ ID NO: 4956
  GFR-binding peptide
  MOD_RES (2)..(34)..(35): Xaa is C or S

SEQ ID NO: 26056 - protein, 34 aa, Artificial Sequence; identical to SEQ ID NO: 4958
  GFR-binding peptide
  MOD_RES (2)..(4): Xaa is C or S

SEQ ID NO: 26057 - protein, 36 aa, Artificial Sequence; identical to SEQ ID NO: 4961
  GFR-binding peptide
  MOD_RES (33)..(34): Xaa is C or S
  MOD_RES (11)..(12)..(13)..(14)..(15): Xaa is A or G
  MOD_RES (16)..(17)..(18)..(19): Xaa is A or G or is absent

SEQ ID NO: 26058 - protein, 32 aa, Artificial Sequence; identical to SEQ ID NO: 4963
  GFR-binding peptide
  MOD_RES (11)..(12)..(13)..(14)..(15): Xaa is A or G
  MOD_RES (16)..(17)..(18)..(19): Xaa is A or G or is absent

SEQ ID NO: 26059 - protein, 38 aa, Artificial Sequence; identical to SEQ ID NO: 4964
  GFR-binding peptide
  MOD_RES (34)..(35): Xaa is C or S
  MOD_RES (12)..(13)..(14)..(15)..(16): Xaa is A or G
  MOD_RES (17)..(18)..(19)..(20): Xaa is A or G or is absent

SEQ ID NO: 26060 - protein, 33 aa, Artificial Sequence
  GFR-binding peptide
  MOD_RES (31)..(32): Xaa is C or S
EVVMEEYQKYVVKDYEDIYLMSIPSLETPVXXA

SEQ ID NO: 26061 - protein, 39 aa, Artificial Sequence
  GFR-binding peptide
  MOD_RES (2)..(36)..(37): Xaa is C or S
  MOD_RES (14)..(15)..(16)..(17)..(18): Xaa is A or G
  MOD_RES (19)..(20)..(21)..(22): Xaa is A or G or is absent
GXGEVVMEEYQKYXXXXXXXXXIYLMSIPSLETPVXXAK

SEQ ID NO: 26062 - protein, 40 aa, Artificial Sequence
  GFR-binding peptide
  MOD_RES (2)..(4)..(37)..(38): Xaa is C or S
  MOD_RES (15)..(16)..(17)..(18)..(19): Xaa is A or G
  MOD_RES (20)..(21)..(22)..(23): Xaa is A or G or is absent
SXKXSKVIMEYKFKXXXXXXXXXLYLISIPELDQSVXXPS

SEQ ID NO: 26063 - protein, 39 aa, Artificial Sequence
  GFR-binding peptide
  MOD_RES (2)..(35)..(36): Xaa is C or S
  MOD_RES (13)..(14)..(15)..(16)..(17): Xaa is A or G
  MOD_RES (18)..(19)..(20)..(21): Xaa is A or G or is absent
KXSKVVMEYKFKXXXXXXXXXLYLISIPELDQPVXXPSA

SEQ ID NO: 26064 - protein, 37 aa, Artificial Sequence
  GFR-binding peptide
  MOD_RES (1)..(3)..(35)..(36): Xaa is C or S
XGXGEVVMEEYQKYVVKDYEDIYLMSIPSLETPVXXA

SEQ ID NO: 26065 - protein, 36 aa, Artificial Sequence; identical to SEQ ID NO: 4973
  GFR-binding peptide
  MOD_RES (2)..(4)..(36): Xaa is C or S

SEQ ID NO: 26066 - protein, 35 aa, Artificial Sequence; identical to SEQ ID NO: 4976
  GFR-binding peptide
  MOD_RES (2)..(2): Xaa is C or S
  MOD_RES (14)..(15)..(16)..(17)..(18): Xaa is A or G
  MOD_RES (19)..(20)..(21)..(22): Xaa is A or G or is absent

SEQ ID NO: 26067 - protein, 37 aa, Artificial Sequence
  GFR-binding peptide
  MOD_RES (2)..(34)..(35): Xaa is C or S
GXARVVMNEYKFKIVNSSDDLYLVSIPELQTPAXXPK

SEQ ID NO: 26068 - protein, 32 aa, Artificial Sequence; identical to SEQ ID NO: 4978
  GFR-binding peptide
  MOD_RES (11)..(12)..(13)..(14)..(15): Xaa is A or G
  MOD_RES (16)..(17)..(18)..(19): Xaa is A or G or is absent

SEQ ID NO: 26069 - protein, 36 aa, Artificial Sequence
  GFR-binding peptide
  MOD_RES (34)..(35): Xaa is C or S
  MOD_RES (12)..(13)..(14)..(15)..(16): Xaa is A or G
  MOD_RES (17)..(18)..(19)..(20): Xaa is A or G or is absent
ESVAMGRYKKLXXXXXXXXXFYLISIANLKTPVXXA

SEQ ID NO: 26070 - protein, 38 aa, Artificial Sequence; identical to SEQ ID NO: 4980
  GFR-binding peptide
  MOD_RES (32)..(33): Xaa is C or S

SEQ ID NO: 26071 - protein, 43 aa, Artificial Sequence; identical to SEQ ID NO: 4981
  GFR-binding peptide
  MOD_RES (1)..(3)..(37)..(38): Xaa is C or S
  MOD_RES (15)..(16)..(17)..(18)..(19): Xaa is A or G
  MOD_RES (20)..(21)..(22)..(23): Xaa is A or G or is absent

SEQ ID NO: 26072 - protein, 37 aa, Artificial Sequence
  GFR-binding peptide
  MOD_RES (2)..(4)..(35)..(36): Xaa is C or S
SXKXSRVIMEYQKYVKPKRGVIYLISIPSLAQPVXXP

SEQ ID NO: 26073 - protein, 40 aa, Artificial Sequence
  GFR-binding peptide
  MOD_RES (2)..(36)..(37): Xaa is C or S
  MOD_RES (14)..(15)..(16)..(17)..(18): Xaa is A or G
  MOD_RES (19)..(20)..(21)..(22): Xaa is A or G or is absent
GXARVVMNEYKFKXXXXXXXXXLYLVSIPELQTPAXXPKP

SEQ ID NO: 26074 - protein, 40 aa, Artificial Sequence; identical to SEQ ID NO: 4982
  GFR-binding peptide
  MOD_RES (34)..(34): Xaa is C or S
  MOD_RES (12)..(13)..(14)..(15)..(16): Xaa is A or G
  MOD_RES (17)..(18)..(19)..(20): Xaa is A or G or is absent

SEQ ID NO: 26075 - protein, 35 aa, Artificial Sequence
  GFR-binding peptide
  MOD_RES (33)..(34): Xaa is C or S
  MOD_RES (11)..(12)..(13)..(14)..(15): Xaa is A or G
  MOD_RES (16)..(17)..(18)..(19): Xaa is A or G or is absent
EVVMDEYKFKXXXXXXXXXLYLMSIPELETPVXXA

SEQ ID NO: 26076 - protein, 34 aa, Artificial Sequence
  GFR-binding peptide
  MOD_RES (1)..(1): Xaa is C or S
  MOD_RES (13)..(14)..(15)..(16)..(17): Xaa is A or G
  MOD_RES (18)..(19)..(20)..(21): Xaa is A or G or is absent
XGEVVMDEYKFKXXXXXXXXXLYLMSIPELETPV

SEQ ID NO: 26077 - protein, 38 aa, Artificial Sequence; identical to SEQ ID NO: 4985
  GFR-binding peptide
  MOD_RES (2)..(4)..(35)..(36): Xaa is C or S

SEQ ID NO: 26078 - protein, 35 aa, Artificial Sequence
  GFR-binding peptide
  MOD_RES (1)..(3)..(35): Xaa is C or S
XGXAEVVMDEYQKYVVNNAADIYLISIPSLRAPVX

SEQ ID NO: 26079 - protein, 43 aa, Artificial Sequence
  GFR-binding peptide
  MOD_RES (2)..(4)..(38)..(39): Xaa is C or S
  MOD_RES (16)..(17)..(18)..(19)..(20): Xaa is A or G
  MOD_RES (21)..(22)..(23)..(24): Xaa is A or G or is absent
HXGXAKVVMNEYQKYXXXXXXXXXIYLVSIPSLKTPAXXAKPV

SEQ ID NO: 26080 - protein, 39 aa, Artificial Sequence; identical to SEQ ID NO: 4987
  GFR-binding peptide
  MOD_RES (2)..(36)..(37): Xaa is C or S
  MOD_RES (14)..(15)..(16)..(17)..(18): Xaa is A or G
  MOD_RES (19)..(20)..(21)..(22): Xaa is A or G or is absent

SEQ ID NO: 26081 - protein, 38 aa, Artificial Sequence
  GFR-binding peptide
  MOD_RES (34)..(35): Xaa is C or S
  MOD_RES (12)..(13)..(14)..(15)..(16): Xaa is A or G
  MOD_RES (17)..(18)..(19)..(20): Xaa is A or G or is absent
AEVVMDRYKKLXXXXXXXXXFYLISIANLRAPVXXSAP

SEQ ID NO: 26082 - protein, 36 aa, Artificial Sequence; identical to SEQ ID NO: 4988
  GFR-binding peptide
  MOD_RES (35)..(36): Xaa is C or S
  MOD_RES (13)..(14)..(15)..(16)..(17): Xaa is A or G
  MOD_RES (18)..(19)..(20)..(21): Xaa is A or G or is absent

SEQ ID NO: 26083 - protein, 36 aa, Artificial Sequence
  GFR-binding peptide
  MOD_RES (32)..(33): Xaa is C or S
AKVVMNEYQKYIVNNSSDIYLVSIPSLKTPAXXAKP

SEQ ID NO: 26084 - protein, 32 aa, Artificial Sequence
  GFR-binding peptide
  MOD_RES (11)..(12)..(13)..(14)..(15): Xaa is A or G
  MOD_RES (16)..(17)..(18)..(19): Xaa is A or G or is absent
SRVIMEYKFKXXXXXXXXXLYLISIPELAQPV

SEQ ID NO: 26085 - protein, 42 aa, Artificial Sequence
  GFR-binding peptide
  MOD_RES (2)..(4)..(37)..(38): Xaa is C or S
  MOD_RES (15)..(16)..(17)..(18)..(19): Xaa is A or G
  MOD_RES (20)..(21)..(22)..(23): Xaa is A or G or is absent
SXKXSKVVMEYKFKXXXXXXXXXLYLISIPELDQPVXXPSAS

SEQ ID NO: 26086 - protein, 42 aa, Artificial Sequence
  GFR-binding peptide
  MOD_RES (1)..(36)..(37): Xaa is C or S
  MOD_RES (14)..(15)..(16)..(17)..(18): Xaa is A or G
  MOD_RES (19)..(20)..(21)..(22): Xaa is A or G or is absent
XEAVSMGEEYKFKXXXXXXXXXLYLVSIPELKTPVXXAKGVK

SEQ ID NO: 26087 - protein, 38 aa, Artificial Sequence
  GFR-binding peptide
  MOD_RES (1)..(35)..(36): Xaa is C or S
  MOD_RES (13)..(14)..(15)..(16)..(17): Xaa is A or G
  MOD_RES (18)..(19)..(20)..(21): Xaa is A or G or is absent
XARVVMNEYKFKXXXXXXXXXLYLVSIPELQTPAXXPK

SEQ ID NO: 26088 - protein, 34 aa, Artificial Sequence
  GFR-binding peptide
  MOD_RES (33)..(34): Xaa is C or S
  MOD_RES (11)..(12)..(13)..(14)..(15): Xaa is A or G
  MOD_RES (16)..(17)..(18)..(19): Xaa is A or G or is absent
SVAMGYHYKLXXXXXXXXXKYLISIPSLKTPVXX

SEQ ID NO: 26089 - protein, 38 aa, Artificial Sequence; identical to SEQ ID NO: 4991
  GFR-binding peptide
  MOD_RES (2)..(33)..(34): Xaa is C or S

SEQ ID NO: 26090 - protein, 43 aa, Artificial Sequence; identical to SEQ ID NO: 4995
  GFR-binding peptide
  MOD_RES (1)..(3)..(37)..(38): Xaa is C or S
  MOD_RES (15)..(16)..(17)..(18)..(19): Xaa is A or G
  MOD_RES (20)..(21)..(22)..(23): Xaa is A or G or is absent

SEQ ID NO: 26091 - protein, 32 aa, Artificial Sequence
  GFR-binding peptide
  MOD_RES (32)..(32): Xaa is C or S
ESVAMGEYQKYYTVVGKDIYLISIPSLKTPVX

SEQ ID NO: 26092 - protein, 41 aa, Artificial Sequence
  GFR-binding peptide
  MOD_RES (1)..(3)..(37): Xaa is C or S
  MOD_RES (15)..(16)..(17)..(18)..(19): Xaa is A or G
  MOD_RES (20)..(21)..(22)..(23): Xaa is A or G or is absent
XGXSRVVMNEYQKYXXXXXXXXXIYLVSIPSLKTPAXTPKT

SEQ ID NO: 26093 - protein, 33 aa, Artificial Sequence
  GFR-binding peptide
  MOD_RES (1)..(33): Xaa is C or S
XESVAMGRYKKLYTVVGKDFYLISIANLKTPVX

SEQ ID NO: 26094 - protein, 35 aa, Artificial Sequence; identical to SEQ ID NO: 5000
  GFR-binding peptide
  MOD_RES (2)..(34)..(35): Xaa is C or S

SEQ ID NO: 26095 - protein, 34 aa, Artificial Sequence
  GFR-binding peptide
  MOD_RES (34)..(34): Xaa is C or S
  MOD_RES (12)..(13)..(14)..(15)..(16): Xaa is A or G
  MOD_RES (17)..(18)..(19)..(20): Xaa is A or G or is absent
AEVVMDEYKFKXXXXXXXXXLYLISIPELRAPVX

SEQ ID NO: 26096 - protein, 31 aa, Artificial Sequence; identical to SEQ ID NO: 5002
  GFR-binding peptide
  MOD_RES (31)..(31): Xaa is C or S

SEQ ID NO: 26097 - protein, 41 aa, Artificial Sequence; identical to SEQ ID NO: 5003
  GFR-binding peptide
  MOD_RES (2)..(35)..(36): Xaa is C or S

SEQ ID NO: 26098 - protein, 39 aa, Artificial Sequence; identical to SEQ ID NO: 5004
  GFR-binding peptide
  MOD_RES (1)..(3)..(35)..(36): Xaa is C or S

SEQ ID NO: 26099 - protein, 37 aa, Artificial Sequence; identical to SEQ ID NO: 5006
  GFR-binding peptide
  MOD_RES (1)..(3)..(34)..(35): Xaa is C or S

SEQ ID NO: 26100 - protein, 32 aa, Artificial Sequence
  GFR-binding peptide
  MOD_RES (1)..(1): Xaa is C or S
XSRVVMNEYQKYIVNSSDDIYLVSIPSLKTPA

SEQ ID NO: 26101 - protein, 36 aa, Artificial Sequence
  GFR-binding peptide
  MOD_RES (33)..(34): Xaa is C or S
  MOD_RES (11)..(12)..(13)..(14)..(15): Xaa is A or G
  MOD_RES (16)..(17)..(18)..(19): Xaa is A or G or is absent
EVVMDRYKKLXXXXXXXXXFYLISIANLRAPVXXSA

SEQ ID NO: 26102 - protein, 36 aa, Artificial Sequence
  GFR-binding peptide
  MOD_RES (2)..(34): Xaa is C or S
GXSRVVMNEYKFKIVNSSDDLYLVSIPELKTPAXTP

SEQ ID NO: 26103 - protein, 41 aa, Artificial Sequence
  GFR-binding peptide
  MOD_RES (1)..(3)..(35)..(36): Xaa is C or S
XGXARVVMNEYQKYIVNSSDDIYLVSIPSLQTPAXXPKPVT

SEQ ID NO: 26104 - protein, 37 aa, Artificial Sequence; identical to SEQ ID NO: 5012
  GFR-binding peptide
  MOD_RES (1)..(32)..(33): Xaa is C or S

SEQ ID NO: 26105 - protein, 39 aa, Artificial Sequence
  GFR-binding peptide
  MOD_RES (1)..(33): Xaa is C or S
XSRVVMNEYKFKIVNSSDDLYLVSIPELKTPAXTPKTVH

SEQ ID NO: 26106 - protein, 37 aa, Artificial Sequence; identical to SEQ ID NO: 5014
  GFR-binding peptide
  MOD_RES (31)..(32): Xaa is C or S

SEQ ID NO: 26107 - protein, 39 aa, Artificial Sequence; identical to SEQ ID NO: 5016
  GFR-binding peptide
  MOD_RES (1)..(35)..(36): Xaa is C or S
  MOD_RES (13)..(14)..(15)..(16)..(17): Xaa is A or G
  MOD_RES (18)..(19)..(20)..(21): Xaa is A or G or is absent

SEQ ID NO: 26108 - protein, 37 aa, Artificial Sequence
  GFR-binding peptide
  MOD_RES (2)..(36)..(37): Xaa is C or S
  MOD_RES (14)..(15)..(16)..(17)..(18): Xaa is A or G
  MOD_RES (19)..(20)..(21)..(22): Xaa is A or G or is absent
GXARVVMNEYKFKXXXXXXXXXLYLVSIPELQTPAXX

SEQ ID NO: 26109 - protein, 43 aa, Artificial Sequence
  GFR-binding peptide
  MOD_RES (2)..(4)..(38)..(39): Xaa is C or S
  MOD_RES (16)..(17)..(18)..(19)..(20): Xaa is A or G
  MOD_RES (21)..(22)..(23)..(24): Xaa is A or G or is absent
RXGXESVAMGRYKKLXXXXXXXXXFYLISIANLKTPVXXAKSA

SEQ ID NO: 26110 - protein, 37 aa, Artificial Sequence
  GFR-binding peptide
  MOD_RES (2)..(36)..(37): Xaa is C or S
  MOD_RES (14)..(15)..(16)..(17)..(18): Xaa is A or G
  MOD_RES (19)..(20)..(21)..(22): Xaa is A or G or is absent
GXAKVVMNEYKFKXXXXXXXXXLYLVSIPELKTPAXX

SEQ ID NO: 26111 - protein, 40 aa, Artificial Sequence
  GFR-binding peptide
  MOD_RES (2)..(4)..(36)..(37): Xaa is C or S
RXGXESVAMGRYKKLYTVVGKDFYLISIANLKTPVXXAKS

SEQ ID NO: 26112 - protein, 40 aa, Artificial Sequence; identical to SEQ ID NO: 5021
  GFR-binding peptide
  MOD_RES (2)..(36)..(37): Xaa is C or S
  MOD_RES (14)..(15)..(16)..(17)..(18): Xaa is A or G
  MOD_RES (19)..(20)..(21)..(22): Xaa is A or G or is absent

SEQ ID NO: 26113 - protein, 34 aa, Artificial Sequence
  GFR-binding peptide
  MOD_RES (2)..(34): Xaa is C or S
GXESVAMGEYQKYYTVVGKDIYLISIPSLKTPVX

SEQ ID NO: 26114 - protein, 34 aa, Artificial Sequence
  GFR-binding peptide
  MOD_RES (1)..(1): Xaa is C or S
  MOD_RES (13)..(14)..(15)..(16)..(17): Xaa is A or G
  MOD_RES (18)..(19)..(20)..(21): Xaa is A or G or is absent
XAEVVMDYHYKLXXXXXXXXXKYLISIPSLRAPV

SEQ ID NO: 26115 - protein, 38 aa, Artificial Sequence
  GFR-binding peptide
  MOD_RES (34)..(35): Xaa is C or S
  MOD_RES (12)..(13)..(14)..(15)..(16): Xaa is A or G
  MOD_RES (17)..(18)..(19)..(20): Xaa is A or G or is absent
SRVVMNEYQKYXXXXXXXXXIYLVSIPSLKTPAXXPKP

SEQ ID NO: 26116 - protein, 36 aa, Artificial Sequence; identical to SEQ ID NO: 5025
  GFR-binding peptide
  MOD_RES (2)..(35)..(36): Xaa is C or S
  MOD_RES (13)..(14)..(15)..(16)..(17): Xaa is A or G
  MOD_RES (18)..(19)..(20)..(21): Xaa is A or G or is absent

SEQ ID NO: 26117 - protein, 32 aa, Artificial Sequence
  GFR-binding peptide
  MOD_RES (32)..(32): Xaa is C or S
GEVVMDEYKFKVVKENEDLYLMSIPELETPVX

SEQ ID NO: 26118 - protein, 39 aa, Artificial Sequence
  GFR-binding peptide
  MOD_RES (1)..(3)..(35)..(36): Xaa is C or S
XGXARVVMNEYQKYIVNSSDDIYLVSIPSLQTPAXXPKP

SEQ ID NO: 26119 - protein, 33 aa, Artificial Sequence; identical to SEQ ID NO: 5026
  GFR-binding peptide
  MOD_RES (32)..(32): Xaa is C or S

SEQ ID NO: 26120 - protein, 33 aa, Artificial Sequence; identical to SEQ ID NO: 5027
  GFR-binding peptide
  MOD_RES (31)..(32): Xaa is C or S

SEQ ID NO: 26121 - protein, 38 aa, Artificial Sequence
  GFR-binding peptide
  MOD_RES (34)..(34): Xaa is C or S
  MOD_RES (12)..(13)..(14)..(15)..(16): Xaa is A or G
  MOD_RES (17)..(18)..(19)..(20): Xaa is A or G or is absent
SRVVMNEYQKYXXXXXXXXXIYLVSIPSLKTPAXTPKT

SEQ ID NO: 26122 - protein, 36 aa, Artificial Sequence; identical to SEQ ID NO: 5031
  GFR-binding peptide
  MOD_RES (1)..(34)..(35): Xaa is C or S

SEQ ID NO: 26123 - protein, 36 aa, Artificial Sequence
  GFR-binding peptide
  MOD_RES (2)..(4)..(36): Xaa is C or S
HXGXAKVVMNEYQKYIVNNSSDIYLVSIPSLKTPAX

SEQ ID NO: 26124 - protein, 41 aa, Artificial Sequence; identical to SEQ ID NO: 5035
  GFR-binding peptide
  MOD_RES (2)..(4)..(38)..(39): Xaa is C or S
  MOD_RES (16)..(17)..(18)..(19)..(20): Xaa is A or G
  MOD_RES (21)..(22)..(23)..(24): Xaa is A or G or is absent

SEQ ID NO: 26125 - protein, 34 aa, Artificial Sequence
  GFR-binding peptide
  MOD_RES (2)..(34): Xaa is C or S
GXSRVVMNEYQKYIVNSSDDIYLVSIPSLKTPAX

SEQ ID NO: 26126 - protein, 34 aa, Artificial Sequence
  GFR-binding peptide
  MOD_RES (2)..(34): Xaa is C or S
GXAEVVMDYHYKLVVNNAADKYLISIPSLRAPVX

SEQ ID NO: 26127 - protein, 30 aa, Artificial Sequence
  GFR-binding peptide
EVVMDEYQKYVVKENEDIYLMSIPSLETPV

SEQ ID NO: 26128 - protein, 37 aa, Artificial Sequence; identical to SEQ ID NO: 5037
  GFR-binding peptide
  MOD_RES (31)..(32): Xaa is C or S

SEQ ID NO: 26129 - protein, 35 aa, Artificial Sequence; identical to SEQ ID NO: 5038
  GFR-binding peptide
  MOD_RES (1)..(3)..(35): Xaa is C or S

SEQ ID NO: 26130 - protein, 36 aa, Artificial Sequence
  GFR-binding peptide
  MOD_RES (2)..(4)..(36): Xaa is C or S
HXGXAKVVMNEYKFKIVNNSSDLYLVSIPELKTPAX

SEQ ID NO: 26131 - protein, 38 aa, Artificial Sequence; identical to SEQ ID NO: 5040
  GFR-binding peptide
  MOD_RES (2)..(4)..(37)..(38): Xaa is C or S

SEQ ID NO: 26132 - protein, 32 aa, Artificial Sequence
  GFR-binding peptide
  MOD_RES (31)..(31): Xaa is C or S
RVVMNEYQKYIVNSSDDIYLVSIPSLKTPAXT

SEQ ID NO: 26133 - protein, 39 aa, Artificial Sequence; identical to SEQ ID NO: 5043
  GFR-binding peptide
  MOD_RES (1)..(3)..(37)..(38): Xaa is C or S
  MOD_RES (15)..(16)..(17)..(18)..(19): Xaa is A or G
  MOD_RES (20)..(21)..(22)..(23): Xaa is A or G or is absent

SEQ ID NO: 26134 - protein, 37 aa, Artificial Sequence; identical to SEQ ID NO: 5044
  GFR-binding peptide
  MOD_RES (32)..(33): Xaa is C or S

SEQ ID NO: 26135 - protein, 42 aa, Artificial Sequence
  GFR-binding peptide
  MOD_RES (2)..(36)..(37): Xaa is C or S
  MOD_RES (14)..(15)..(16)..(17)..(18): Xaa is A or G
  MOD_RES (19)..(20)..(21)..(22): Xaa is A or G or is absent
GXARVVMNEYKFKXXXXXXXXXLYLVSIPELQTPAXXPKPVT

SEQ ID NO: 26136 - protein, 39 aa, Artificial Sequence
  GFR-binding peptide
  MOD_RES (1)..(3)..(35)..(36): Xaa is C or S
XGXESVAMGYHYKLYTVVGKDKYLISIPSLKTPVXXAKS

SEQ ID NO: 26137 - protein, 37 aa, Artificial Sequence
  GFR-binding peptide
  MOD_RES (1)..(35)..(36): Xaa is C or S
  MOD_RES (13)..(14)..(15)..(16)..(17): Xaa is A or G
  MOD_RES (18)..(19)..(20)..(21): Xaa is A or G or is absent
XESVAMGYHYKLXXXXXXXXXKYLISIPSLKTPVXXA

SEQ ID NO: 26138 - protein, 38 aa, Artificial Sequence
  GFR-binding peptide
  MOD_RES (32)..(33): Xaa is C or S
AEVVMDEYQKYVVNNAADIYLISIPSLRAPVXXSAPAA

SEQ ID NO: 26139 - protein, 42 aa, Artificial Sequence
  GFR-binding peptide
  MOD_RES (1)..(3)..(37)..(38): Xaa is C or S
  MOD_RES (15)..(16)..(17)..(18)..(19): Xaa is A or G
  MOD_RES (20)..(21)..(22)..(23): Xaa is A or G or is absent
XGXAEVVMDRYKKLXXXXXXXXXFYLISIANLRAPVXXSAPA

SEQ ID NO: 26140 - protein, 39 aa, Artificial Sequence; identical to SEQ ID NO: 5047
  GFR-binding peptide
  MOD_RES (34)..(35): Xaa is C or S
  MOD_RES (12)..(13)..(14)..(15)..(16): Xaa is A or G
  MOD_RES (17)..(18)..(19)..(20): Xaa is A or G or is absent

SEQ ID NO: 26141 - protein, 38 aa, Artificial Sequence
  GFR-binding peptide
  MOD_RES (1)..(35)..(36): Xaa is C or S
  MOD_RES (13)..(14)..(15)..(16)..(17): Xaa is A or G
  MOD_RES (18)..(19)..(20)..(21): Xaa is A or G or is absent
XAKVVMNEYQKYXXXXXXXXXIYLVSIPSLKTPAXXAK

SEQ ID NO: 26142 - protein, 40 aa, Artificial Sequence
  GFR-binding peptide
  MOD_RES (1)..(3)..(35)..(36): Xaa is C or S
XGXGEVVMDEYKFKVVKENEDLYLMSIPELETPVXXAKPI

SEQ ID NO: 26143 - protein, 39 aa, Artificial Sequence
  GFR-binding peptide
  MOD_RES (2)..(4)..(37)..(38): Xaa is C or S
  MOD_RES (15)..(16)..(17)..(18)..(19): Xaa is A or G
  MOD_RES (20)..(21)..(22)..(23): Xaa is A or G or is absent
SXKXSKVIMEYQKYXXXXXXXXXIYLISIPSLDQSVXXP

SEQ ID NO: 26144 - protein, 34 aa, Artificial Sequence
  GFR-binding peptide
  MOD_RES (31)..(32): Xaa is C or S
EVVMEEYKFKVVKDYEDLYLMSIPELETPVXXAK

SEQ ID NO: 26145 - protein, 41 aa, Artificial Sequence; identical to SEQ ID NO: 5051
  GFR-binding peptide
  MOD_RES (2)..(4)..(37)..(38): Xaa is C or S
  MOD_RES (15)..(16)..(17)..(18)..(19): Xaa is A or G
  MOD_RES (20)..(21)..(22)..(23): Xaa is A or G or is absent

SEQ ID NO: 26146 - protein, 39 aa, Artificial Sequence; identical to SEQ ID NO: 5052
  GFR-binding peptide
  MOD_RES (2)..(4)..(38)..(39): Xaa is C or S
  MOD_RES (16)..(17)..(18)..(19)..(20): Xaa is A or G
  MOD_RES (21)..(22)..(23)..(24): Xaa is A or G or is absent

SEQ ID NO: 26147 - protein, 41 aa, Artificial Sequence
  GFR-binding peptide
  MOD_RES (2)..(4)..(37)..(38): Xaa is C or S
  MOD_RES (15)..(16)..(17)..(18)..(19): Xaa is A or G
  MOD_RES (20)..(21)..(22)..(23): Xaa is A or G or is absent
SXKXSRVIMEYKFKXXXXXXXXXLYLISIPELAQPVXXPAA

SEQ ID NO: 26148 - protein, 36 aa, Artificial Sequence
  GFR-binding peptide
  MOD_RES (32)..(33): Xaa is C or S
AEVVMDYHYKLVVNNAADKYLISIPSLRAPVXXSAP

SEQ ID NO: 26149 - protein, 32 aa, Artificial Sequence
  GFR-binding peptide
EAVSMGEEYKFKTPVGMDDLYLVSIPELKTPV

SEQ ID NO: 26150 - protein, 38 aa, Artificial Sequence
  GFR-binding peptide
  MOD_RES (2)..(4)..(37)..(38): Xaa is C or S
  MOD_RES (15)..(16)..(17)..(18)..(19): Xaa is A or G
  MOD_RES (20)..(21)..(22)..(23): Xaa is A or G or is absent
SXKXSKVVMEYQKYXXXXXXXXXIYLISIPSLDQPVXX

SEQ ID NO: 26151 - protein, 35 aa, Artificial Sequence
  GFR-binding peptide
  MOD_RES (34)..(34): Xaa is C or S
  MOD_RES (12)..(13)..(14)..(15)..(16): Xaa is A or G
  MOD_RES (17)..(18)..(19)..(20): Xaa is A or G or is absent
SRVVMNEYKFKXXXXXXXXXLYLVSIPELKTPAXT

SEQ ID NO: 26152 - protein, 40 aa, Artificial Sequence
  GFR-binding peptide
  MOD_RES (1)..(3)..(36)..(37): Xaa is C or S
  MOD_RES (14)..(15)..(16)..(17)..(18): Xaa is A or G
  MOD_RES (19)..(20)..(21)..(22): Xaa is A or G or is absent
XKXSKVVMEYQKYXXXXXXXXXIYLISIPSLDQPVXXPSA

SEQ ID NO: 26153 - protein, 33 aa, Artificial Sequence
  GFR-binding peptide
  MOD_RES (33)..(33): Xaa is C or S
  MOD_RES (11)..(12)..(13)..(14)..(15): Xaa is A or G
  MOD_RES (16)..(17)..(18)..(19): Xaa is A or G or is absent
SVAMGEYQKYXXXXXXXXXIYLISIPSLKTPVX

SEQ ID NO: 26154 - protein, 35 aa, Artificial Sequence
  GFR-binding peptide
  MOD_RES (1)..(3): Xaa is C or S
  MOD_RES (14)..(15)..(16)..(17)..(18): Xaa is A or G
  MOD_RES (19)..(20)..(21)..(22): Xaa is A or G or is absent
XKXSKVVMEYQKYXXXXXXXXXIYLISIPSLDQPV

SEQ ID NO: 26155 - protein, 39 aa, Artificial Sequence; identical to SEQ ID NO: 5058
  GFR-binding peptide
  MOD_RES (2)..(36)..(37): Xaa is C or S
  MOD_RES (14)..(15)..(16)..(17)..(18): Xaa is A or G
  MOD_RES (19)..(20)..(21)..(22): Xaa is A or G or is absent

SEQ ID NO: 26156 - protein, 36 aa, Artificial Sequence
  GFR-binding peptide
  MOD_RES (1)..(35): Xaa is C or S
  MOD_RES (13)..(14)..(15)..(16)..(17): Xaa is A or G
  MOD_RES (18)..(19)..(20)..(21): Xaa is A or G or is absent
XSRVVMNEYQKYXXXXXXXXXIYLVSIPSLKTPAXT

SEQ ID NO: 26157 - protein, 33 aa, Artificial Sequence
  GFR-binding peptide
  MOD_RES (2)..(2): Xaa is C or S
GXAEVVMDEYKFKVVNNAADLYLISIPELRAPV

SEQ ID NO: 26158 - protein, 41 aa, Artificial Sequence
  GFR-binding peptide
  MOD_RES (2)..(4)..(37)..(38): Xaa is C or S
  MOD_RES (15)..(16)..(17)..(18)..(19): Xaa is A or G
  MOD_RES (20)..(21)..(22)..(23): Xaa is A or G or is absent
SXKXSKVIMEYQKYXXXXXXXXXIYLISIPSLDQSVXXPSA

SEQ ID NO: 26159 - protein, 34 aa, Artificial Sequence
  GFR-binding peptide
  MOD_RES (2)..(34): Xaa is C or S
GXARVVMNEYQKYIVNSSDDIYLVSIPSLQTPAX

SEQ ID NO: 26160 - protein, 36 aa, Artificial Sequence; identical to SEQ ID NO: 5060
  GFR-binding peptide
  MOD_RES (31)..(32): Xaa is C or S

SEQ ID NO: 26161 - protein, 43 aa, Artificial Sequence
  GFR-binding peptide
  MOD_RES (1)..(3)..(37)..(38): Xaa is C or S
  MOD_RES (15)..(16)..(17)..(18)..(19): Xaa is A or G
  MOD_RES (20)..(21)..(22)..(23): Xaa is A or G or is absent
XGXAKVVMNEYKFKXXXXXXXXXLYLVSIPELKTPAXXAKPVA

SEQ ID NO: 26162 - protein, 36 aa, Artificial Sequence; identical to SEQ ID NO: 5063
  GFR-binding peptide
  MOD_RES (2)..(35)..(36): Xaa is C or S

SEQ ID NO: 26163 - protein, 35 aa, Artificial Sequence
  GFR-binding peptide
  MOD_RES (1)..(33): Xaa is C or S
XSRVVMNEYKFKIVNSSDDLYLVSIPELKTPAXTP

SEQ ID NO: 26164 - protein, 42 aa, Artificial Sequence
  GFR-binding peptide
  MOD_RES (2)..(36)..(37): Xaa is C or S
  MOD_RES (14)..(15)..(16)..(17)..(18): Xaa is A or G
  MOD_RES (19)..(20)..(21)..(22): Xaa is A or G or is absent
GXARVVMNEYQKYXXXXXXXXXIYLVSIPSLQTPAXXPKPVT

SEQ ID NO: 26165 - protein, 40 aa, Artificial Sequence
  GFR-binding peptide
  MOD_RES (1)..(35)..(36): Xaa is C or S
  MOD_RES (13)..(14)..(15)..(16)..(17): Xaa is A or G
  MOD_RES (18)..(19)..(20)..(21): Xaa is A or G or is absent
XAEVVMDEYQKYXXXXXXXXXIYLISIPSLRAPVXXSAPA

SEQ ID NO: 26166 - protein, 38 aa, Artificial Sequence
  GFR-binding peptide
  MOD_RES (34)..(35): Xaa is C or S
  MOD_RES (12)..(13)..(14)..(15)..(16): Xaa is A or G
  MOD_RES (17)..(18)..(19)..(20): Xaa is A or G or is absent
AKVVMNEYQKYXXXXXXXXXIYLVSIPSLKTPAXXAKP

SEQ ID NO: 26167 - protein, 36 aa, Artificial Sequence; identical to SEQ ID NO: 5066
  GFR-binding peptide
  MOD_RES (31)..(32): Xaa is C or S

SEQ ID NO: 26168 - protein, 34 aa, Artificial Sequence
  GFR-binding peptide
  MOD_RES (2)..(34): Xaa is C or S
GXGEVVMDEYKFKVVKENEDLYLMSIPELETPVX

SEQ ID NO: 26169 - protein, 42 aa, Artificial Sequence
  GFR-binding peptide
  MOD_RES (2)..(4)..(36)..(37): Xaa is C or S
HXGXSRVVMNEYQKYIVNSSDDIYLVSIPSLKTPAXXPKPVY

SEQ ID NO: 26170 - protein, 39 aa, Artificial Sequence
  GFR-binding peptide
  MOD_RES (1)..(34)..(35): Xaa is C or S
  MOD_RES (12)..(13)..(14)..(15)..(16): Xaa is A or G
  MOD_RES (17)..(18)..(19)..(20): Xaa is A or G or is absent
XSKVVMEYKFKXXXXXXXXXLYLISIPELDQPVXXPSAS

SEQ ID NO: 26171 - protein, 33 aa, Artificial Sequence
  GFR-binding peptide
  MOD_RES (31)..(32): Xaa is C or S
KVVMNEYQKYIVNNSSDIYLVSIPSLKTPAXXA

SEQ ID NO: 26172 - protein, 36 aa, Artificial Sequence; identical to SEQ ID NO: 5069
  GFR-binding peptide
  MOD_RES (1)..(33)..(34): Xaa is C or S

SEQ ID NO: 26173 - protein, 37 aa, Artificial Sequence
  GFR-binding peptide
  MOD_RES (2)..(35)..(36): Xaa is C or S
GXEAVSMGEEYKFKTPVGMDDLYLVSIPELKTPVXXA

SEQ ID NO: 26174 - protein, 41 aa, Artificial Sequence; identical to SEQ ID NO: 5070
  GFR-binding peptide
  MOD_RES (1)..(36)..(37): Xaa is C or S
  MOD_RES (14)..(15)..(16)..(17)..(18): Xaa is A or G
  MOD_RES (19)..(20)..(21)..(22): Xaa is A or G or is absent

SEQ ID NO: 26175 - protein, 35 aa, Artificial Sequence; identical to SEQ ID NO: 5072
  GFR-binding peptide
  MOD_RES (31)..(31): Xaa is C or S

SEQ ID NO: 26176 - protein, 35 aa, Artificial Sequence
  GFR-binding peptide
  MOD_RES (31)..(32): Xaa is C or S
EVVMEEYQKYVVKDYEDIYLMSIPSLETPVXXAKP

SEQ ID NO: 26177 - protein, 35 aa, Artificial Sequence
  GFR-binding peptide
  MOD_RES (32)..(33): Xaa is C or S
ESVAMGRYKKLYTVVGKDFYLISIANLKTPVXXAK

SEQ ID NO: 26178 - protein, 34 aa, Artificial Sequence
  GFR-binding peptide
  MOD_RES (33)..(34): Xaa is C or S
  MOD_RES (11)..(12)..(13)..(14)..(15): Xaa is A or G
  MOD_RES (16)..(17)..(18)..(19): Xaa is A or G or is absent
EVVMDYHYKLXXXXXXXXXKYLISIPSLRAPVXX

SEQ ID NO: 26179 - protein, 39 aa, Artificial Sequence
  GFR-binding peptide
  MOD_RES (2)..(4)..(38)..(39): Xaa is C or S
  MOD_RES (16)..(17)..(18)..(19)..(20): Xaa is A or G
  MOD_RES (21)..(22)..(23)..(24): Xaa is A or G or is absent
HXGXAKVVMNEYQKYXXXXXXXXXIYLVSIPSLKTPAXX

SEQ ID NO: 26180 - protein, 36 aa, Artificial Sequence; identical to SEQ ID NO: 5076
  GFR-binding peptide
  MOD_RES (2)..(34)..(35): Xaa is C or S

SEQ ID NO: 26181 - protein, 37 aa, Artificial Sequence
  GFR-binding peptide
  MOD_RES (1)..(3): Xaa is C or S
  MOD_RES (16)..(17)..(18)..(19)..(20): Xaa is A or G
  MOD_RES (21)..(22)..(23)..(24): Xaa is A or G or is absent
XGXEAVSMGEEYKFKXXXXXXXXXLYLVSIPELKTPV

SEQ ID NO: 26182 - protein, 37 aa, Artificial Sequence
  GFR-binding peptide
  MOD_RES (2)..(36)..(37): Xaa is C or S
  MOD_RES (14)..(15)..(16)..(17)..(18): Xaa is A or G
  MOD_RES (19)..(20)..(21)..(22): Xaa is A or G or is absent
GXGEVVMDEYQKYXXXXXXXXXIYLMSIPSLETPVXX

SEQ ID NO: 26183 - protein, 35 aa, Artificial Sequence
  GFR-binding peptide
  MOD_RES (2)..(2): Xaa is C or S
  MOD_RES (14)..(15)..(16)..(17)..(18): Xaa is A or G
  MOD_RES (19)..(20)..(21)..(22): Xaa is A or G or is absent
GXAEVVMDEYQKYXXXXXXXXXIYLISIPSLRAPV

SEQ ID NO: 26184 - protein, 35 aa, Artificial Sequence
  GFR-binding peptide
  MOD_RES (2)..(4): Xaa is C or S
HXGXAKVVMNEYQKYIVNNSSDIYLVSIPSLKTPA

SEQ ID NO: 26185 - protein, 38 aa, Artificial Sequence
  GFR-binding peptide
  MOD_RES (1)..(34)..(35): Xaa is C or S
XEAVSMGEEYKFKTPVGMDDLYLVSIPELKTPVXXAKG

SEQ ID NO: 26186 - protein, 38 aa, Artificial Sequence; identical to SEQ ID NO: 5081
  GFR-binding peptide
  MOD_RES (32)..(33): Xaa is C or S

SEQ ID NO: 26187 - protein, 37 aa, Artificial Sequence; identical to SEQ ID NO: 5083
  GFR-binding peptide
  MOD_RES (31)..(32): Xaa is C or S

SEQ ID NO: 26188 - protein, 33 aa, Artificial Sequence
  GFR-binding peptide
  MOD_RES (32)..(33): Xaa is C or S
ESVAMGEYQKYYTVVGKDIYLISIPSLKTPVXX

SEQ ID NO: 26189 - protein, 34 aa, Artificial Sequence
  GFR-binding peptide
  MOD_RES (1)..(33)..(34): Xaa is C or S
XESVAMGRYKKLYTVVGKDFYLISIANLKTPVXX

SEQ ID NO: 26190 - protein, 38 aa, Artificial Sequence; identical to SEQ ID NO: 5084
  GFR-binding peptide
  MOD_RES (2)..(36): Xaa is C or S
  MOD_RES (14)..(15)..(16)..(17)..(18): Xaa is A or G
  MOD_RES (19)..(20)..(21)..(22): Xaa is A or G or is absent

SEQ ID NO: 26191 - protein, 35 aa, Artificial Sequence; identical to SEQ ID NO: 5085
  GFR-binding peptide
  MOD_RES (1)..(3)..(35): Xaa is C or S

SEQ ID NO: 26192 - protein, 35 aa, Artificial Sequence
  GFR-binding peptide
  MOD_RES (2)..(33)..(34): Xaa is C or S
KXSKVIMEYKFKIKPTKGILYLISIPELDQSVXXP

SEQ ID NO: 26193 - protein, 33 aa, Artificial Sequence
  GFR-binding peptide
  MOD_RES (32)..(33): Xaa is C or S
ESVAMGEYKFKYTVVGKDLYLISIPELKTPVXX

SEQ ID NO: 26194 - protein, 41 aa, Artificial Sequence; identical to SEQ ID NO: 5090
  GFR-binding peptide
  MOD_RES (2)..(36)..(37): Xaa is C or S
  MOD_RES (14)..(15)..(16)..(17)..(18): Xaa is A or G
  MOD_RES (19)..(20)..(21)..(22): Xaa is A or G or is absent

SEQ ID NO: 26195 - protein, 42 aa, Artificial Sequence
  GFR-binding peptide
  MOD_RES (2)..(4)..(37)..(38): Xaa is C or S
  MOD_RES (15)..(16)..(17)..(18)..(19): Xaa is A or G
  MOD_RES (20)..(21)..(22)..(23): Xaa is A or G or is absent
SXKXSKVIMEYKFKXXXXXXXXXLYLISIPELDQSVXXPSAS

SEQ ID NO: 26196 - protein, 38 aa, Artificial Sequence; identical to SEQ ID NO: 5094
  GFR-binding peptide
  MOD_RES (33)..(34): Xaa is C or S
  MOD_RES (11)..(12)..(13)..(14)..(15): Xaa is A or G
  MOD_RES (16)..(17)..(18)..(19): Xaa is A or G or is absent

SEQ ID NO: 26197 - protein, 36 aa, Artificial Sequence
  GFR-binding peptide
  MOD_RES (2)..(36): Xaa is C or S
  MOD_RES (14)..(15)..(16)..(17)..(18): Xaa is A or G
  MOD_RES (19)..(20)..(21)..(22): Xaa is A or G or is absent
GXESVAMGEYKFKXXXXXXXXXLYLISIPELKTPVX

SEQ ID NO: 26198 - protein, 38 aa, Artificial Sequence
  GFR-binding peptide
  MOD_RES (1)..(33)..(34): Xaa is C or S
XESVAMGEYQKYYTVVGKDIYLISIPSLKTPVXXAKSA

SEQ ID NO: 26199 - protein, 36 aa, Artificial Sequence; identical to SEQ ID NO: 5098
  GFR-binding peptide
  MOD_RES (1)..(32)..(33): Xaa is C or S

SEQ ID NO: 26200 - protein, 38 aa, Artificial Sequence
  GFR-binding peptide
  MOD_RES (2)..(33)..(34): Xaa is C or S
KXSRVIMEYQKYVKPKRGVIYLISIPSLAQPVXXPAAS

SEQ ID NO: 26201 - protein, 37 aa, Artificial Sequence; identical to SEQ ID NO: 5101
  GFR-binding peptide
  MOD_RES (2)..(4)..(36)..(37): Xaa is C or S

SEQ ID NO: 26202 - protein, 31 aa, Artificial Sequence
  GFR-binding peptide
  MOD_RES (31)..(31): Xaa is C or S
EVVMEEYKFKVVKDYEDLYLMSIPELETPVX

SEQ ID NO: 26203 - protein, 38 aa, Artificial Sequence; identical to SEQ ID NO: 5102
  GFR-binding peptide
  MOD_RES (1)..(35)..(36): Xaa is C or S
  MOD_RES (13)..(14)..(15)..(16)..(17): Xaa is A or G
  MOD_RES (18)..(19)..(20)..(21): Xaa is A or G or is absent

SEQ ID NO: 26204 - protein, 41 aa, Artificial Sequence
  GFR-binding peptide
  MOD_RES (1)..(35)..(36): Xaa is C or S
  MOD_RES (13)..(14)..(15)..(16)..(17): Xaa is A or G
  MOD_RES (18)..(19)..(20)..(21): Xaa is A or G or is absent
XESVAMGEYQKYXXXXXXXXXIYLISIPSLKTPVXXAKSAK

SEQ ID NO: 26205 - protein, 39 aa, Artificial Sequence
  GFR-binding peptide
  MOD_RES (33)..(34): Xaa is C or S
  MOD_RES (11)..(12)..(13)..(14)..(15): Xaa is A or G
  MOD_RES (16)..(17)..(18)..(19): Xaa is A or G or is absent
SVAMGYHYKLXXXXXXXXXKYLISIPSLKTPVXXAKSAK

SEQ ID NO: 26206 - protein, 38 aa, Artificial Sequence; identical to SEQ ID NO: 5103
  GFR-binding peptide
  MOD_RES (33)..(34): Xaa is C or S
  MOD_RES (11)..(12)..(13)..(14)..(15): Xaa is A or G
  MOD_RES (16)..(17)..(18)..(19): Xaa is A or G or is absent

SEQ ID NO: 26207 - protein, 30 aa, Artificial Sequence; identical to SEQ ID NO: 5105
  GFR-binding peptide

SEQ ID NO: 26208 - protein, 33 aa, Artificial Sequence
  GFR-binding peptide
  MOD_RES (31)..(32): Xaa is C or S
RVVMNEYKFKIVNSSDDLYLVSIPELKTPAXXP

SEQ ID NO: 26209 - protein, 39 aa, Artificial Sequence
  GFR-binding peptide
  MOD_RES (1)..(3)..(35)..(36): Xaa is C or S
XGXGEVVMDEYKFKVVKENEDLYLMSIPELETPVXXAKP

SEQ ID NO: 26210 - protein, 36 aa, Artificial Sequence
  GFR-binding peptide
  MOD_RES (2)..(34)..(35): Xaa is C or S
GXAEVVMDRYKKLVVNNAADFYLISIANLRAPVXXS

SEQ ID NO: 26211 - protein, 35 aa, Artificial Sequence
  GFR-binding peptide
  MOD_RES (1)..(34)..(35): Xaa is C or S
XEAVSMGEEYQKYTPVGMDDIYLVSIPSLKTPVXX

SEQ ID NO: 26212 - protein, 34 aa, Artificial Sequence
  GFR-binding peptide
  MOD_RES (31)..(32): Xaa is C or S
RVVMNEYKFKIVNSSDDLYLVSIPELQTPAXXPK

SEQ ID NO: 26213 - protein, 34 aa, Artificial Sequence; identical to SEQ ID NO: 5111
  GFR-binding peptide
  MOD_RES (2)..(34): Xaa is C or S

SEQ ID NO: 26214 - protein, 35 aa, Artificial Sequence; identical to SEQ ID NO: 5113
  GFR-binding peptide
  MOD_RES (1)..(3): Xaa is C or S

SEQ ID NO: 26215 - protein, 31 aa, Artificial Sequence
  GFR-binding peptide
  MOD_RES (31)..(31): Xaa is C or S
RVVMNEYKFKIVNSSDDLYLVSIPELKTPAX

SEQ ID NO: 26216 - protein, 38 aa, Artificial Sequence
  GFR-binding peptide
  MOD_RES (2)..(36)..(37): Xaa is C or S
  MOD_RES (14)..(15)..(16)..(17)..(18): Xaa is A or G
  MOD_RES (19)..(20)..(21)..(22): Xaa is A or G or is absent
GXAEVVMDEYKFKXXXXXXXXXLYLISIPELRAPVXXS

SEQ ID NO: 26217 - protein, 35 aa, Artificial Sequence; identical to SEQ ID NO: 5116
  GFR-binding peptide
  MOD_RES (32)..(33): Xaa is C or S

SEQ ID NO: 26218 - protein, 32 aa, Artificial Sequence; identical to SEQ ID NO: 5117
  GFR-binding peptide
  MOD_RES (31)..(32): Xaa is C or S

SEQ ID NO: 26219 - protein, 36 aa, Artificial Sequence
  GFR-binding peptide
  MOD_RES (33)..(33): Xaa is C or S
  MOD_RES (11)..(12)..(13)..(14)..(15): Xaa is A or G
  MOD_RES (16)..(17)..(18)..(19): Xaa is A or G or is absent
RVVMNEYKFKXXXXXXXXXLYLVSIPELKTPAXTPK

SEQ ID NO: 26220 - protein, 33 aa, Artificial Sequence; identical to SEQ ID NO: 5119
  GFR-binding peptide
  MOD_RES (1)..(3): Xaa is C or S

SEQ ID NO: 26221 - protein, 41 aa, Artificial Sequence; identical to SEQ ID NO: 5120
  GFR-binding peptide
  MOD_RES (2)..(4)..(36)..(37): Xaa is C or S

SEQ ID NO: 26222 - protein, 34 aa, Artificial Sequence
  GFR-binding peptide
  MOD_RES (31)..(32): Xaa is C or S
SKVIMEYQKYIKPTKGIIYLISIPSLDQSVXXPS

SEQ ID NO: 26223 - protein, 40 aa, Artificial Sequence
  GFR-binding peptide
  MOD_RES (34)..(35): Xaa is C or S
  MOD_RES (12)..(13)..(14)..(15)..(16): Xaa is A or G
  MOD_RES (17)..(18)..(19)..(20): Xaa is A or G or is absent
ARVVMNEYKFKXXXXXXXXXLYLVSIPELQTPAXXPKPVT

SEQ ID NO: 26224 - protein, 36 aa, Artificial Sequence; identical to SEQ ID NO: 5122
  GFR-binding peptide
  MOD_RES (33)..(34): Xaa is C or S
  MOD_RES (11)..(12)..(13)..(14)..(15): Xaa is A or G
  MOD_RES (16)..(17)..(18)..(19): Xaa is A or G or is absent

SEQ ID NO: 26225 - protein, 39 aa, Artificial Sequence
  GFR-binding peptide
  MOD_RES (2)..(4)..(36)..(37): Xaa is C or S
RXGXAEVVMDRYKKLVVNNAADFYLISIANLRAPVXXSA

SEQ ID NO: 26226 - protein, 34 aa, Artificial Sequence; identical to SEQ ID NO: 5124
  GFR-binding peptide
  MOD_RES (33)..(34): Xaa is C or S
  MOD_RES (11)..(12)..(13)..(14)..(15): Xaa is A or G
  MOD_RES (16)..(17)..(18)..(19): Xaa is A or G or is absent

SEQ ID NO: 26227 - protein, 36 aa, Artificial Sequence
  GFR-binding peptide
  MOD_RES (1)..(35)..(36): Xaa is C or S
  MOD_RES (13)..(14)..(15)..(16)..(17): Xaa is A or G
  MOD_RES (18)..(19)..(20)..(21): Xaa is A or G or is absent
XGEVVMDEYKFKXXXXXXXXXLYLMSIPELETPVXX

SEQ ID NO: 26228 - protein, 36 aa, Artificial Sequence
  GFR-binding peptide
  MOD_RES (33)..(34): Xaa is C or S
  MOD_RES (11)..(12)..(13)..(14)..(15): Xaa is A or G
  MOD_RES (16)..(17)..(18)..(19): Xaa is A or G or is absent
SRVIMEYKFKXXXXXXXXXLYLISIPELAQPVXXPA

SEQ ID NO: 26229 - protein, 40 aa, Artificial Sequence
  GFR-binding peptide
  MOD_RES (34)..(35): Xaa is C or S
  MOD_RES (12)..(13)..(14)..(15)..(16): Xaa is A or G
  MOD_RES (17)..(18)..(19)..(20): Xaa is A or G or is absent
GEVVMEEYQKYXXXXXXXXXIYLMSIPSLETPVXXAKPIS

SEQ ID NO: 26230 - protein, 37 aa, Artificial Sequence
  GFR-binding peptide
  MOD_RES (2)..(4): Xaa is C or S
  MOD_RES (16)..(17)..(18)..(19)..(20): Xaa is A or G
  MOD_RES (21)..(22)..(23)..(24): Xaa is A or G or is absent
RXGXGEVVMDEYQKYXXXXXXXXXIYLMSIPSLETPV

SEQ ID NO: 26231 - protein, 37 aa, Artificial Sequence; identical to SEQ ID NO: 5128
  GFR-binding peptide
  MOD_RES (34)..(35): Xaa is C or S
  MOD_RES (12)..(13)..(14)..(15)..(16): Xaa is A or G
  MOD_RES (17)..(18)..(19)..(20): Xaa is A or G or is absent

SEQ ID NO: 26232 - protein, 39 aa, Artificial Sequence
  GFR-binding peptide
  MOD_RES (1)..(33)..(34): Xaa is C or S
XARVVMNEYQKYIVNSSDDIYLVSIPSLQTPAXXPKPVT

SEQ ID NO: 26233 - protein, 44 aa, Artificial Sequence; identical to SEQ ID NO: 5130
  GFR-binding peptide
  MOD_RES (2)..(4)..(38)..(39): Xaa is C or S
  MOD_RES (16)..(17)..(18)..(19)..(20): Xaa is A or G
  MOD_RES (21)..(22)..(23)..(24): Xaa is A or G or is absent

SEQ ID NO: 26234 - protein, 42 aa, Artificial Sequence; identical to SEQ ID NO: 5131
  GFR-binding peptide
  MOD_RES (2)..(4)..(37)..(38): Xaa is C or S
  MOD_RES (15)..(16)..(17)..(18)..(19): Xaa is A or G
  MOD_RES (20)..(21)..(22)..(23): Xaa is A or G or is absent

SEQ ID NO: 26235 - protein, 39 aa, Artificial Sequence
  GFR-binding peptide
  MOD_RES (33)..(34): Xaa is C or S
  MOD_RES (11)..(12)..(13)..(14)..(15): Xaa is A or G
  MOD_RES (16)..(17)..(18)..(19): Xaa is A or G or is absent
EVVMDEYQKYXXXXXXXXXIYLISIPSLRAPVXXSAPAA

SEQ ID NO: 26236 - protein, 33 aa, Artificial Sequence; identical to SEQ ID NO: 5135
  GFR-binding peptide
  MOD_RES (1)..(1): Xaa is C or S
  MOD_RES (12)..(13)..(14)..(15)..(16): Xaa is A or G
  MOD_RES (17)..(18)..(19)..(20): Xaa is A or G or is absent

SEQ ID NO: 26237 - protein, 37 aa, Artificial Sequence
  GFR-binding peptide
  MOD_RES (31)..(32): Xaa is C or S
EVVMDEYKFKVVKENEDLYLMSIPELETPVXXAKPIK

SEQ ID NO: 26238 - protein, 40 aa, Artificial Sequence
  GFR-binding peptide
  MOD_RES (2)..(4)..(38)..(39): Xaa is C or S
  MOD_RES (16)..(17)..(18)..(19)..(20): Xaa is A or G
  MOD_RES (21)..(22)..(23)..(24): Xaa is A or G or is absent
RXGXESVAMGRYKKLXXXXXXXXXFYLISIANLKTPVXXA

SEQ ID NO: 26239 - protein, 36 aa, Artificial Sequence
  GFR-binding peptide
  MOD_RES (1)..(33)..(34): Xaa is C or S
XSRVVMNEYQKYIVNSSDDIYLVSIPSLKTPAXXPK

SEQ ID NO: 26240 - protein, 38 aa, Artificial Sequence; identical to SEQ ID NO: 5139
  GFR-binding peptide
  MOD_RES (2)..(34)..(35): Xaa is C or S

SEQ ID NO: 26241 - protein, 36 aa, Artificial Sequence
  GFR-binding peptide
  MOD_RES (2)..(35)..(36): Xaa is C or S
  MOD_RES (13)..(14)..(15)..(16)..(17): Xaa is A or G
  MOD_RES (18)..(19)..(20)..(21): Xaa is A or G or is absent
KXSKVVMEYQKYXXXXXXXXXIYLISIPSLDQPVXX

SEQ ID NO: 26242 - protein, 33 aa, Artificial Sequence; identical to SEQ ID NO: 5140
  GFR-binding peptide
  MOD_RES (12)..(13)..(14)..(15)..(16): Xaa is A or G
  MOD_RES (17)..(18)..(19)..(20): Xaa is A or G or is absent

SEQ ID NO: 26243 - protein, 32 aa, Artificial Sequence; identical to SEQ ID NO: 5141
  GFR-binding peptide
  MOD_RES (1)..(1): Xaa is C or S

SEQ ID NO: 26244 - protein, 39 aa, Artificial Sequence
  GFR-binding peptide
  MOD_RES (1)..(33)..(34): Xaa is C or S
XESVAMGYHYKLYTVVGKDKYLISIPSLKTPVXXAKSAK

SEQ ID NO: 26245 - protein, 38 aa, Artificial Sequence
  GFR-binding peptide
  MOD_RES (1)..(3)..(35)..(36): Xaa is C or S
XGXESVAMGEYKFKYTVVGKDLYLISIPELKTPVXXAK

SEQ ID NO: 26246 - protein, 36 aa, Artificial Sequence
  GFR-binding peptide
  MOD_RES (2)..(34)..(35): Xaa is C or S
GXAEVVMDEYQKYVVNNAADIYLISIPSLRAPVXXS

SEQ ID NO: 26247 - protein, 41 aa, Artificial Sequence
  GFR-binding peptide
  MOD_RES (1)..(3)..(35): Xaa is C or S
XGXSRVVMNEYQKYIVNSSDDIYLVSIPSLKTPAXTPKTVH

SEQ ID NO: 26248 - protein, 38 aa, Artificial Sequence
  GFR-binding peptide
  MOD_RES (1)..(3)..(35)..(36): Xaa is C or S
XGXGEVVMEEYKFKVVKDYEDLYLMSIPELETPVXXAK

SEQ ID NO: 26249 - protein, 39 aa, Artificial Sequence
  GFR-binding peptide
  MOD_RES (1)..(3)..(36)..(37): Xaa is C or S
  MOD_RES (14)..(15)..(16)..(17)..(18): Xaa is A or G
  MOD_RES (19)..(20)..(21)..(22): Xaa is A or G or is absent
XKXSKVVMEYQKYXXXXXXXXXIYLISIPSLDQPVXXPS

SEQ ID NO: 26250 - protein, 32 aa, Artificial Sequence; identical to SEQ ID NO: 5144
  GFR-binding peptide
  MOD_RES (1)..(32): Xaa is C or S

SEQ ID NO: 26251 - protein, 41 aa, Artificial Sequence
  GFR-binding peptide
  MOD_RES (2)..(4)..(38)..(39): Xaa is C or S
  MOD_RES (16)..(17)..(18)..(19)..(20): Xaa is A or G
  MOD_RES (21)..(22)..(23)..(24): Xaa is A or G or is absent
RXGXAEVVMDYHYKLXXXXXXXXXKYLISIPSLRAPVXXSA

SEQ ID NO: 26252 - protein, 33 aa, Artificial Sequence
  GFR-binding peptide
  MOD_RES (12)..(13)..(14)..(15)..(16): Xaa is A or G
  MOD_RES (17)..(18)..(19)..(20): Xaa is A or G or is absent
GEVVMEEYKFKXXXXXXXXXLYLMSIPELETPV

SEQ ID NO: 26253 - protein, 39 aa, Artificial Sequence
  GFR-binding peptide
  MOD_RES (2)..(4)..(37)..(38): Xaa is C or S
  MOD_RES (15)..(16)..(17)..(18)..(19): Xaa is A or G
  MOD_RES (20)..(21)..(22)..(23): Xaa is A or G or is absent
SXKXSKVVMEYQKYXXXXXXXXXIYLISIPSLDQPVXXP

SEQ ID NO: 26254 - protein, 39 aa, Artificial Sequence; identical to SEQ ID NO: 5147
  GFR-binding peptide
  MOD_RES (1)..(33)..(34): Xaa is C or S

SEQ ID NO: 26255 - protein, 36 aa, Artificial Sequence
  GFR-binding peptide
  MOD_RES (35)..(36): Xaa is C or S
  MOD_RES (13)..(14)..(15)..(16)..(17): Xaa is A or G
  MOD_RES (18)..(19)..(20)..(21): Xaa is A or G or is absent
EAVSMGEEYQKYXXXXXXXXXIYLVSIPSLKTPVXX

SEQ ID NO: 26256 - protein, 36 aa, Artificial Sequence
  GFR-binding peptide
  MOD_RES (2)..(4)..(36): Xaa is C or S
HXGXARVVMNEYKFKIVNSSDDLYLVSIPELQTPAX

SEQ ID NO: 26257 - protein, 36 aa, Artificial Sequence; identical to SEQ ID NO: 5148
  GFR-binding peptide
  MOD_RES (2)..(4)..(35)..(36): Xaa is C or S

SEQ ID NO: 26258 - protein, 37 aa, Artificial Sequence
  GFR-binding peptide
  MOD_RES (33)..(34): Xaa is C or S
  MOD_RES (11)..(12)..(13)..(14)..(15): Xaa is A or G
  MOD_RES (16)..(17)..(18)..(19): Xaa is A or G or is absent
SRVIMEYKFKXXXXXXXXXLYLISIPELAQPVXXPAA

SEQ ID NO: 26259 - protein, 34 aa, Artificial Sequence
  GFR-binding peptide
  MOD_RES (2)..(4): Xaa is C or S
SXKXSKVVMEYKFKVKPTRGVLYLISIPELDQPV

SEQ ID NO: 26260 - protein, 34 aa, Artificial Sequence
  GFR-binding peptide
  MOD_RES (33)..(34): Xaa is C or S
  MOD_RES (11)..(12)..(13)..(14)..(15): Xaa is A or G
  MOD_RES (16)..(17)..(18)..(19): Xaa is A or G or is absent
EVVMDEYKFKXXXXXXXXXLYLMSIPELETPVXX

SEQ ID NO: 26261 - protein, 44 aa, Artificial Sequence
  GFR-binding peptide
  MOD_RES (2)..(4)..(38)..(39): Xaa is C or S
  MOD_RES (16)..(17)..(18)..(19)..(20): Xaa is A or G
  MOD_RES (21)..(22)..(23)..(24): Xaa is A or G or is absent
RXGXESVAMGYHYKLXXXXXXXXXKYLISIPSLKTPVXXAKSAK

SEQ ID NO: 26262 - protein, 37 aa, Artificial Sequence
  GFR-binding peptide
  MOD_RES (2)..(4): Xaa is C or S
  MOD_RES (16)..(17)..(18)..(19)..(20): Xaa is A or G
  MOD_RES (21)..(22)..(23)..(24): Xaa is A or G or is absent
HXGXSRVVMNEYKFKXXXXXXXXXLYLVSIPELKTPA

SEQ ID NO: 26263 - protein, 36 aa, Artificial Sequence; identical to SEQ ID NO: 5154
  GFR-binding peptide
  MOD_RES (2)..(34)..(35): Xaa is C or S

SEQ ID NO: 26264 - protein, 38 aa, Artificial Sequence
  GFR-binding peptide
  MOD_RES (2)..(4)..(35)..(36): Xaa is C or S
SXKXSKVVMEYQKYVKPTRGVIYLISIPSLDQPVXXPS

SEQ ID NO: 26265 - protein, 40 aa, Artificial Sequence
  GFR-binding peptide
  MOD_RES (34)..(35): Xaa is C or S
  MOD_RES (12)..(13)..(14)..(15)..(16): Xaa is A or G
  MOD_RES (17)..(18)..(19)..(20): Xaa is A or G or is absent
ESVAMGEYQKYXXXXXXXXXIYLISIPSLKTPVXXAKSAK

SEQ ID NO: 26266 - protein, 35 aa, Artificial Sequence; identical to SEQ ID NO: 5158
  GFR-binding peptide
  MOD_RES (1)..(3)..(35): Xaa is C or S

SEQ ID NO: 26267 - protein, 39 aa, Artificial Sequence
  GFR-binding peptide
  MOD_RES (1)..(33)..(34): Xaa is C or S
XAEVVMDYHYKLVVNNAADKYLISIPSLRAPVXXSAPAA

SEQ ID NO: 26268 - protein, 35 aa, Artificial Sequence; identical to SEQ ID NO: 5161
  GFR-binding peptide
  MOD_RES (2)..(4): Xaa is C or S

SEQ ID NO: 26269 - protein, 36 aa, Artificial Sequence
  GFR-binding peptide
  MOD_RES (1)..(3)..(35)..(36): Xaa is C or S
XGXESVAMGRYKKLYTVVGKDFYLISIANLKTPVXX

SEQ ID NO: 26270 - protein, 41 aa, Artificial Sequence; identical to SEQ ID NO: 5162
  GFR-binding peptide
  MOD_RES (2)..(4)..(36): Xaa is C or S

SEQ ID NO: 26271 - protein, 39 aa, Artificial Sequence
  GFR-binding peptide
  MOD_RES (2)..(34)..(35): Xaa is C or S
GXAKVVMNEYKFKIVNNSSDLYLVSIPELKTPAXXAKPV

SEQ ID NO: 26272 - protein, 37 aa, Artificial Sequence
  GFR-binding peptide
  MOD_RES (2)..(34)..(35): Xaa is C or S
GXSRVVMNEYKFKIVNSSDDLYLVSIPELKTPAXXPK

SEQ ID NO: 26273 - protein, 38 aa, Artificial Sequence
  GFR-binding peptide
  MOD_RES (2)..(36)..(37): Xaa is C or S
  MOD_RES (14)..(15)..(16)..(17)..(18): Xaa is A or G
  MOD_RES (19)..(20)..(21)..(22): Xaa is A or G or is absent
GXGEVVMDEYQKYXXXXXXXXXIYLMSIPSLETPVXXA

SEQ ID NO: 26274 - protein, 42 aa, Artificial Sequence
  GFR-binding peptide
  MOD_RES (2)..(4)..(36)..(37): Xaa is C or S
HXGXSRVVMNEYKFKIVNSSDDLYLVSIPELKTPAXXPKPVY

SEQ ID NO: 26275 - protein, 38 aa, Artificial Sequence
  GFR-binding peptide
  MOD_RES (2)..(4)..(38): Xaa is C or S
  MOD_RES (16)..(17)..(18)..(19)..(20): Xaa is A or G
  MOD_RES (21)..(22)..(23)..(24): Xaa is A or G or is absent
RXGXESVAMGYHYKLXXXXXXXXXKYLISIPSLKTPVX

SEQ ID NO: 26276 - protein, 37 aa, Artificial Sequence; identical to SEQ ID NO: 5168
  GFR-binding peptide
  MOD_RES (34)..(35): Xaa is C or S
  MOD_RES (12)..(13)..(14)..(15)..(16): Xaa is A or G
  MOD_RES (17)..(18)..(19)..(20): Xaa is A or G or is absent

SEQ ID NO: 26277 - protein, 36 aa, Artificial Sequence
  GFR-binding peptide
  MOD_RES (1)..(3)..(36): Xaa is C or S
  MOD_RES (14)..(15)..(16)..(17)..(18): Xaa is A or G
  MOD_RES (19)..(20)..(21)..(22): Xaa is A or G or is absent
XKXSKVIMEYKFKXXXXXXXXXLYLISIPELDQSVX

SEQ ID NO: 26278 - protein, 34 aa, Artificial Sequence
  GFR-binding peptide
  MOD_RES (33)..(34): Xaa is C or S
  MOD_RES (11)..(12)..(13)..(14)..(15): Xaa is A or G
  MOD_RES (16)..(17)..(18)..(19): Xaa is A or G or is absent
KVVMNEYQKYXXXXXXXXXIYLVSIPSLKTPAXX

SEQ ID NO: 26279 - protein, 36 aa, Artificial Sequence; identical to SEQ ID NO: 5169
  GFR-binding peptide
  MOD_RES (1)..(35)..(36): Xaa is C or S
  MOD_RES (13)..(14)..(15)..(16)..(17): Xaa is A or G
  MOD_RES (18)..(19)..(20)..(21): Xaa is A or G or is absent

SEQ ID NO: 26280 - protein, 32 aa, Artificial Sequence; identical to SEQ ID NO: 5171
  GFR-binding peptide
  MOD_RES (31)..(32): Xaa is C or S

SEQ ID NO: 26281 - protein, 35 aa, Artificial Sequence; identical to SEQ ID NO: 5174
  GFR-binding peptide
  MOD_RES (2)..(34)..(35): Xaa is C or S

SEQ ID NO: 26282 - protein, 34 aa, Artificial Sequence
  GFR-binding peptide
  MOD_RES (33)..(34): Xaa is C or S
  MOD_RES (11)..(12)..(13)..(14)..(15): Xaa is A or G
  MOD_RES (16)..(17)..(18)..(19): Xaa is A or G or is absent
RVVMNEYQKYXXXXXXXXXIYLVSIPSLKTPAXX

SEQ ID NO: 26283 - protein, 34 aa, Artificial Sequence; identical to SEQ ID NO: 5175
  GFR-binding peptide
  MOD_RES (1)..(3)..(34): Xaa is C or S

SEQ ID NO: 26284 - protein, 38 aa, Artificial Sequence
  GFR-binding peptide
  MOD_RES (1)..(36)..(37): Xaa is C or S
  MOD_RES (14)..(15)..(16)..(17)..(18): Xaa is A or G
  MOD_RES (19)..(20)..(21)..(22): Xaa is A or G or is absent
XEAVSMGEEYKFKXXXXXXXXXLYLVSIPELKTPVXXA

SEQ ID NO: 26285 - protein, 34 aa, Artificial Sequence; identical to SEQ ID NO: 5177
  GFR-binding peptide
  MOD_RES (33)..(34): Xaa is C or S
  MOD_RES (11)..(12)..(13)..(14)..(15): Xaa is A or G
  MOD_RES (16)..(17)..(18)..(19): Xaa is A or G or is absent

SEQ ID NO: 26286 - protein, 38 aa, Artificial Sequence
  GFR-binding peptide
  MOD_RES (2)..(4)..(38): Xaa is C or S
  MOD_RES (16)..(17)..(18)..(19)..(20): Xaa is A or G
  MOD_RES (21)..(22)..(23)..(24): Xaa is A or G or is absent
RXGXGEVVMDEYKFKXXXXXXXXXLYLMSIPELETPVX

SEQ ID NO: 26287 - protein, 37 aa, Artificial Sequence
  GFR-binding peptide
  MOD_RES (1)..(36)..(37): Xaa is C or S
  MOD_RES (14)..(15)..(16)..(17)..(18): Xaa is A or G
  MOD_RES (19)..(20)..(21)..(22): Xaa is A or G or is absent
XEAVSMGEEYQKYXXXXXXXXXIYLVSIPSLKTPVXX

SEQ ID NO: 26288 - protein, 35 aa, Artificial Sequence
  GFR-binding peptide
  MOD_RES (31)..(32): Xaa is C or S
SVAMGEYQKYYTVVGKDIYLISIPSLKTPVXXAKS

SEQ ID NO: 26289 - protein, 41 aa, Artificial Sequence
  GFR-binding peptide
  MOD_RES (2)..(36)..(37): Xaa is C or S
  MOD_RES (14)..(15)..(16)..(17)..(18): Xaa is A or G
  MOD_RES (19)..(20)..(21)..(22): Xaa is A or G or is absent
GXARVVMNEYKFKXXXXXXXXXLYLVSIPELQTPAXXPKPV

SEQ ID NO: 26290 - protein, 37 aa, Artificial Sequence; identical to SEQ ID NO: 5179
  GFR-binding peptide
  MOD_RES (33)..(34): Xaa is C or S
  MOD_RES (11)..(12)..(13)..(14)..(15): Xaa is A or G
  MOD_RES (16)..(17)..(18)..(19): Xaa is A or G or is absent

SEQ ID NO: 26291 - protein, 33 aa, Artificial Sequence; identical to SEQ ID NO: 5180
  GFR-binding peptide
  MOD_RES (12)..(13)..(14)..(15)..(16): Xaa is A or G
  MOD_RES (17)..(18)..(19)..(20): Xaa is A or G or is absent

SEQ ID NO: 26292 - protein, 37 aa, Artificial Sequence
  GFR-binding peptide
  MOD_RES (1)..(3)..(37): Xaa is C or S
  MOD_RES (15)..(16)..(17)..(18)..(19): Xaa is A or G
  MOD_RES (20)..(21)..(22)..(23): Xaa is A or G or is absent
XGXSRVVMNEYQKYXXXXXXXXXIYLVSIPSLKTPAX

SEQ ID NO: 26293 - protein, 39 aa, Artificial Sequence
  GFR-binding peptide
  MOD_RES (2)..(4)..(39): Xaa is C or S
  MOD_RES (17)..(18)..(19)..(20)..(21): Xaa is A or G
  MOD_RES (22)..(23)..(24)..(25): Xaa is A or G or is absent
RXGXEAVSMGEEYQKYXXXXXXXXXIYLVSIPSLKTPVX

SEQ ID NO: 26294 - protein, 38 aa, Artificial Sequence
  GFR-binding peptide
  MOD_RES (32)..(33): Xaa is C or S
AEVVMDEYKFKVVNNAADLYLISIPELRAPVXXSAPAA

SEQ ID NO: 26295 - protein, 38 aa, Artificial Sequence; identical to SEQ ID NO: 5182
  GFR-binding peptide
  MOD_RES (1)..(32)..(33): Xaa is C or S

SEQ ID NO: 26296 - protein, 42 aa, Artificial Sequence
  GFR-binding peptide
  MOD_RES (1)..(3)..(37)..(38): Xaa is C or S
  MOD_RES (15)..(16)..(17)..(18)..(19): Xaa is A or G
  MOD_RES (20)..(21)..(22)..(23): Xaa is A or G or is absent
XGXGEVVMEEYQKYXXXXXXXXXIYLMSIPSLETPVXXAKPI

SEQ ID NO: 26297 - protein, 35 aa, Artificial Sequence; identical to SEQ ID NO: 5184
  GFR-binding peptide
  MOD_RES (1)..(34)..(35): Xaa is C or S

SEQ ID NO: 26298 - protein, 36 aa, Artificial Sequence; identical to SEQ ID NO: 5185
  GFR-binding peptide
  MOD_RES (2)..(33)..(34): Xaa is C or S

SEQ ID NO: 26299 - protein, 38 aa, Artificial Sequence; identical to SEQ ID NO: 5186
  GFR-binding peptide
  MOD_RES (1)..(35)..(36): Xaa is C or S
  MOD_RES (13)..(14)..(15)..(16)..(17): Xaa is A or G
  MOD_RES (18)..(19)..(20)..(21): Xaa is A or G or is absent

SEQ ID NO: 26300 - protein, 37 aa, Artificial Sequence; identical to SEQ ID NO: 5187
  GFR-binding peptide
  MOD_RES (1)..(32)..(33): Xaa is C or S

SEQ ID NO: 26301 - protein, 33 aa, Artificial Sequence
  GFR-binding peptide
  MOD_RES (33)..(33): Xaa is C or S
  MOD_RES (11)..(12)..(13)..(14)..(15): Xaa is A or G
  MOD_RES (16)..(17)..(18)..(19): Xaa is A or G or is absent
SKVVMEYKFKXXXXXXXXXLYLISIPELDQPVX

SEQ ID NO: 26302 - protein, 44 aa, Artificial Sequence; identical to SEQ ID NO: 5189
  GFR-binding peptide
  MOD_RES (2)..(4)..(38)..(39): Xaa is C or S
  MOD_RES (16)..(17)..(18)..(19)..(20): Xaa is A or G
  MOD_RES (21)..(22)..(23)..(24): Xaa is A or G or is absent

SEQ ID NO: 26303 - protein, 36 aa, Artificial Sequence
  GFR-binding peptide
  MOD_RES (1)..(3)..(34)..(35): Xaa is C or S
XKXSRVIMEYQKYVKPKRGVIYLISIPSLAQPVXXP

SEQ ID NO: 26304 - protein, 42 aa, Artificial Sequence; identical to SEQ ID NO: 5194
  GFR-binding peptide
  MOD_RES (2)..(4)..(38)..(39): Xaa is C or S
  MOD_RES (16)..(17)..(18)..(19)..(20): Xaa is A or G
  MOD_RES (21)..(22)..(23)..(24): Xaa is A or G or is absent

SEQ ID NO: 26305 - protein, 35 aa, Artificial Sequence; identical to SEQ ID NO: 5195
  GFR-binding peptide
  MOD_RES (1)..(32)..(33): Xaa is C or S

SEQ ID NO: 26306 - protein, 39 aa, Artificial Sequence; identical to SEQ ID NO: 5197
  GFR-binding peptide
  MOD_RES (1)..(3)..(37)..(38): Xaa is C or S
  MOD_RES (15)..(16)..(17)..(18)..(19): Xaa is A or G
  MOD_RES (20)..(21)..(22)..(23): Xaa is A or G or is absent

SEQ ID NO: 26307 - protein, 40 aa, Artificial Sequence
  GFR-binding peptide
  MOD_RES (2)..(4)..(36)..(37): Xaa is C or S
HXGXSRVVMNEYKFKIVNSSDDLYLVSIPELKTPAXXPKP

SEQ ID NO: 26308 - protein, 36 aa, Artificial Sequence; identical to SEQ ID NO: 5198
  GFR-binding peptide
  MOD_RES (32)..(33): Xaa is C or S

SEQ ID NO: 26309 - protein, 34 aa, Artificial Sequence
  GFR-binding peptide
  MOD_RES (2)..(34): Xaa is C or S
GXESVAMGRYKKLYTVVGKDFYLISIANLKTPVX

SEQ ID NO: 26310 - protein, 33 aa, Artificial Sequence
  GFR-binding peptide
  MOD_RES (31)..(32): Xaa is C or S
EVVMDEYKFKVVNNAADLYLISIPELRAPVXXS

SEQ ID NO: 26311 - protein, 41 aa, Artificial Sequence; identical to SEQ ID NO: 5199
  GFR-binding peptide
  MOD_RES (1)..(3)..(35): Xaa is C or S

SEQ ID NO: 26312 - protein, 38 aa, Artificial Sequence; identical to SEQ ID NO: 5200
  GFR-binding peptide
  MOD_RES (1)..(33)..(34): Xaa is C or S

SEQ ID NO: 26313 - protein, 36 aa, Artificial Sequence; identical to SEQ ID NO: 5201
  GFR-binding peptide
  MOD_RES (33)..(34): Xaa is C or S

SEQ ID NO: 26314 - protein, 37 aa, Artificial Sequence
  GFR-binding peptide
  MOD_RES (1)..(34)..(35): Xaa is C or S
XEAVSMGEEYKFKTPVGMDDLYLVSIPELKTPVXXAK

SEQ ID NO: 26315 - protein, 41 aa, Artificial Sequence
  GFR-binding peptide
  MOD_RES (35)..(36): Xaa is C or S
  MOD_RES (13)..(14)..(15)..(16)..(17): Xaa is A or G
  MOD_RES (18)..(19)..(20)..(21): Xaa is A or G or is absent
EAVSMGEEYKFKXXXXXXXXXLYLVSIPELKTPVXXAKGVK

SEQ ID NO: 26316 - protein, 37 aa, Artificial Sequence
  GFR-binding peptide
  MOD_RES (1)..(3)..(36)..(37): Xaa is C or S
  MOD_RES (14)..(15)..(16)..(17)..(18): Xaa is A or G
  MOD_RES (19)..(20)..(21)..(22): Xaa is A or G or is absent
XKXSRVIMEYQKYXXXXXXXXXIYLISIPSLAQPVXX

SEQ ID NO: 26317 - protein, 31 aa, Artificial Sequence; identical to SEQ ID NO: 5207
  GFR-binding peptide
  MOD_RES (1)..(1): Xaa is C or S

SEQ ID NO: 26318 - protein, 39 aa, Artificial Sequence
  GFR-binding peptide
  MOD_RES (1)..(33)..(34): Xaa is C or S
XGEVVMDEYQKYVVKENEDIYLMSIPSLETPVXXAKPIK

SEQ ID NO: 26319 - protein, 40 aa, Artificial Sequence; identical to SEQ ID NO: 5212
  GFR-binding peptide
  MOD_RES (34)..(35): Xaa is C or S
  MOD_RES (12)..(13)..(14)..(15)..(16): Xaa is A or G
  MOD_RES (17)..(18)..(19)..(20): Xaa is A or G or is absent

SEQ ID NO: 26320 - protein, 41 aa, Artificial Sequence
  GFR-binding peptide
  MOD_RES (2)..(36)..(37): Xaa is C or S
  MOD_RES (14)..(15)..(16)..(17)..(18): Xaa is A or G
  MOD_RES (19)..(20)..(21)..(22): Xaa is A or G or is absent
GXESVAMGEYQKYXXXXXXXXXIYLISIPSLKTPVXXAKSA

SEQ ID NO: 26321 - protein, 35 aa, Artificial Sequence; identical to SEQ ID NO: 5215
  GFR-binding peptide
  MOD_RES (34)..(34): Xaa is C or S
  MOD_RES (12)..(13)..(14)..(15)..(16): Xaa is A or G
  MOD_RES (17)..(18)..(19)..(20): Xaa is A or G or is absent

SEQ ID NO: 26322 - protein, 33 aa, Artificial Sequence
  GFR-binding peptide
  MOD_RES (33)..(33): Xaa is C or S
  MOD_RES (11)..(12)..(13)..(14)..(15): Xaa is A or G
  MOD_RES (16)..(17)..(18)..(19): Xaa is A or G or is absent
RVVMNEYKFKXXXXXXXXXLYLVSIPELKTPAX

SEQ ID NO: 26323 - protein, 31 aa, Artificial Sequence
  GFR-binding peptide
  MOD_RES (31)..(31): Xaa is C or S
SKVIMEYQKYIKPTKGIIYLISIPSLDQSVX

SEQ ID NO: 26324 - protein, 33 aa, Artificial Sequence
  GFR-binding peptide
  MOD_RES (33)..(33): Xaa is C or S
  MOD_RES (11)..(12)..(13)..(14)..(15): Xaa is A or G
  MOD_RES (16)..(17)..(18)..(19): Xaa is A or G or is absent
KVVMNEYKFKXXXXXXXXXLYLVSIPELKTPAX

SEQ ID NO: 26325 - protein, 33 aa, Artificial Sequence
  GFR-binding peptide
  MOD_RES (12)..(13)..(14)..(15)..(16): Xaa is A or G
  MOD_RES (17)..(18)..(19)..(20): Xaa is A or G or is absent
AKVVMNEYQKYXXXXXXXXXIYLVSIPSLKTPA

SEQ ID NO: 26326 - protein, 37 aa, Artificial Sequence; identical to SEQ ID NO: 5217
  GFR-binding peptide
  MOD_RES (1)..(3)..(36)..(37): Xaa is C or S
  MOD_RES (14)..(15)..(16)..(17)..(18): Xaa is A or G
  MOD_RES (19)..(20)..(21)..(22): Xaa is A or G or is absent

SEQ ID NO: 26327 - protein, 36 aa, Artificial Sequence
  GFR-binding peptide
  MOD_RES (1)..(33)..(34): Xaa is C or S
XAEVVMDYHYKLVVNNAADKYLISIPSLRAPVXXSA

SEQ ID NO: 26328 - protein, 36 aa, Artificial Sequence
  GFR-binding peptide
  MOD_RES (31)..(32): Xaa is C or S
KVVMNEYQKYIVNNSSDIYLVSIPSLKTPAXXAKPV

SEQ ID NO: 26329 - protein, 35 aa, Artificial Sequence; identical to SEQ ID NO: 5219
  GFR-binding peptide
  MOD_RES (2)..(34)..(35): Xaa is C or S

SEQ ID NO: 26330 - protein, 42 aa, Artificial Sequence
  GFR-binding peptide
  MOD_RES (1)..(3)..(37): Xaa is C or S
  MOD_RES (15)..(16)..(17)..(18)..(19): Xaa is A or G
  MOD_RES (20)..(21)..(22)..(23): Xaa is A or G or is absent
XGXSRVVMNEYKFKXXXXXXXXXLYLVSIPELKTPAXTPKTV

SEQ ID NO: 26331 - protein, 37 aa, Artificial Sequence; identical to SEQ ID NO: 5221
  GFR-binding peptide
  MOD_RES (2)..(35)..(36): Xaa is C or S
  MOD_RES (13)..(14)..(15)..(16)..(17): Xaa is A or G
  MOD_RES (18)..(19)..(20)..(21): Xaa is A or G or is absent

SEQ ID NO: 26332 - protein, 36 aa, Artificial Sequence
  GFR-binding peptide
  MOD_RES (31)..(32): Xaa is C or S
SVAMGRYKKLYTVVGKDFYLISIANLKTPVXXAKSA

SEQ ID NO: 26333 - protein, 35 aa, Artificial Sequence
  GFR-binding peptide
  MOD_RES (2)..(35): Xaa is C or S
  MOD_RES (13)..(14)..(15)..(16)..(17): Xaa is A or G
  MOD_RES (18)..(19)..(20)..(21): Xaa is A or G or is absent
KXSKVVMEYQKYXXXXXXXXXIYLISIPSLDQPVX

SEQ ID NO: 26334 - protein, 37 aa, Artificial Sequence; identical to SEQ ID NO: 5223
  GFR-binding peptide
  MOD_RES (31)..(32): Xaa is C or S

SEQ ID NO: 26335 - protein, 36 aa, Artificial Sequence
  GFR-binding peptide
  MOD_RES (1)..(3)..(35)..(36): Xaa is C or S
XGXAKVVMNEYQKYIVNNSSDIYLVSIPSLKTPAXX

SEQ ID NO: 26336 - protein, 42 aa, Artificial Sequence; identical to SEQ ID NO: 5224
  GFR-binding peptide
  MOD_RES (2)..(37)..(38): Xaa is C or S
  MOD_RES (15)..(16)..(17)..(18)..(19): Xaa is A or G
  MOD_RES (20)..(21)..(22)..(23): Xaa is A or G or is absent

SEQ ID NO: 26337 - protein, 36 aa, Artificial Sequence
  GFR-binding peptide
  MOD_RES (2)..(34)..(35): Xaa is C or S
GXGEVVMDEYKFKVVKENEDLYLMSIPELETPVXXA

SEQ ID NO: 26338 - protein, 41 aa, Artificial Sequence; identical to SEQ ID NO: 5227
  GFR-binding peptide
  MOD_RES (1)..(36)..(37): Xaa is C or S
  MOD_RES (14)..(15)..(16)..(17)..(18): Xaa is A or G
  MOD_RES (19)..(20)..(21)..(22): Xaa is A or G or is absent

SEQ ID NO: 26339 - protein, 35 aa, Artificial Sequence
  GFR-binding peptide
  MOD_RES (2)..(34)..(35): Xaa is C or S
GXAEVVMDRYKKLVVNNAADFYLISIANLRAPVXX

SEQ ID NO: 26340 - protein, 39 aa, Artificial Sequence
  GFR-binding peptide
  MOD_RES (1)..(3)..(35)..(36): Xaa is C or S
XGXGEVVMEEYKFKVVKDYEDLYLMSIPELETPVXXAKP

SEQ ID NO: 26341 - protein, 33 aa, Artificial Sequence
  GFR-binding peptide
  MOD_RES (33)..(33): Xaa is C or S
  MOD_RES (11)..(12)..(13)..(14)..(15): Xaa is A or G
  MOD_RES (16)..(17)..(18)..(19): Xaa is A or G or is absent
SKVVMEYQKYXXXXXXXXXIYLISIPSLDQPVX

SEQ ID NO: 26342 - protein, 37 aa, Artificial Sequence
  GFR-binding peptide
  MOD_RES (2)..(36)..(37): Xaa is C or S
  MOD_RES (14)..(15)..(16)..(17)..(18): Xaa is A or G
  MOD_RES (19)..(20)..(21)..(22): Xaa is A or G or is absent
GXSRVVMNEYKFKXXXXXXXXXLYLVSIPELKTPAXX

SEQ ID NO: 26343 - protein, 34 aa, Artificial Sequence; identical to SEQ ID NO: 5231
  GFR-binding peptide
  MOD_RES (1)..(1): Xaa is C or S
  MOD_RES (13)..(14)..(15)..(16)..(17): Xaa is A or G
  MOD_RES (18)..(19)..(20)..(21): Xaa is A or G or is absent

SEQ ID NO: 26344 - protein, 35 aa, Artificial Sequence
  GFR-binding peptide
  MOD_RES (2)..(34)..(35): Xaa is C or S
GXAKVVMNEYKFKIVNNSSDLYLVSIPELKTPAXX

SEQ ID NO: 26345 - protein, 35 aa, Artificial Sequence
  GFR-binding peptide
  MOD_RES (2)..(34)..(35): Xaa is C or S
GXAEVVMDEYKFKVVNNAADLYLISIPELRAPVXX

SEQ ID NO: 26346 - protein, 41 aa, Artificial Sequence
  GFR-binding peptide
  MOD_RES (2)..(4)..(38)..(39): Xaa is C or S
  MOD_RES (16)..(17)..(18)..(19)..(20): Xaa is A or G
  MOD_RES (21)..(22)..(23)..(24): Xaa is A or G or is absent
RXGXGEVVMEEYQKYXXXXXXXXXIYLMSIPSLETPVXXAK

SEQ ID NO: 26347 - protein, 35 aa, Artificial Sequence
  GFR-binding peptide
  MOD_RES (1)..(3)..(35): Xaa is C or S
XGXESVAMGEYKFKYTVVGKDLYLISIPELKTPVX

SEQ ID NO: 26348 - protein, 35 aa, Artificial Sequence; identical to SEQ ID NO: 5236
  GFR-binding peptide
  MOD_RES (2)..(4)..(35): Xaa is C or S

SEQ ID NO: 26349 - protein, 35 aa, Artificial Sequence
  GFR-binding peptide
  MOD_RES (2)..(34)..(35): Xaa is C or S
GXSRVVMNEYQKYIVNSSDDIYLVSIPSLKTPAXX

SEQ ID NO: 26350 - protein, 39 aa, Artificial Sequence
  GFR-binding peptide
  MOD_RES (2)..(34)..(35): Xaa is C or S
GXARVVMNEYQKYIVNSSDDIYLVSIPSLQTPAXXPKPV

SEQ ID NO: 26351 - protein, 36 aa, Artificial Sequence
  GFR-binding peptide
  MOD_RES (31)..(32): Xaa is C or S
SRVIMEYKFKVKPKRGVLYLISIPELAQPVXXPAAS

SEQ ID NO: 26352 - protein, 31 aa, Artificial Sequence
  GFR-binding peptide
  MOD_RES (31)..(31): Xaa is C or S
KVVMNEYKFKIVNNSSDLYLVSIPELKTPAX

SEQ ID NO: 26353 - protein, 35 aa, Artificial Sequence
  GFR-binding peptide
  MOD_RES (1)..(3)..(35): Xaa is C or S
XGXAEVVMDYHYKLVVNNAADKYLISIPSLRAPVX

SEQ ID NO: 26354 - protein, 32 aa, Artificial Sequence
  GFR-binding peptide
EAVSMGEEYQKYTPVGMDDIYLVSIPSLKTPV

SEQ ID NO: 26355 - protein, 42 aa, Artificial Sequence
  GFR-binding peptide
  MOD_RES (1)..(3)..(37)..(38): Xaa is C or S
  MOD_RES (15)..(16)..(17)..(18)..(19): Xaa is A or G
  MOD_RES (20)..(21)..(22)..(23): Xaa is A or G or is absent
XGXGEVVMDEYQKYXXXXXXXXXIYLMSIPSLETPVXXAKPI

SEQ ID NO: 26356 - protein, 42 aa, Artificial Sequence
  GFR-binding peptide
  MOD_RES (2)..(4)..(39)..(40): Xaa is C or S
  MOD_RES (17)..(18)..(19)..(20)..(21): Xaa is A or G
  MOD_RES (22)..(23)..(24)..(25): Xaa is A or G or is absent
RXGXEAVSMGEEYQKYXXXXXXXXXIYLVSIPSLKTPVXXAK

SEQ ID NO: 26357 - protein, 36 aa, Artificial Sequence
  GFR-binding peptide
  MOD_RES (2)..(4)..(36): Xaa is C or S
RXGXGEVVMEEYKFKVVKDYEDLYLMSIPELETPVX

SEQ ID NO: 26358 - protein, 43 aa, Artificial Sequence
  GFR-binding peptide
  MOD_RES (1)..(3)..(37)..(38): Xaa is C or S
  MOD_RES (15)..(16)..(17)..(18)..(19): Xaa is A or G
  MOD_RES (20)..(21)..(22)..(23): Xaa is A or G or is absent
XGXAEVVMDRYKKLXXXXXXXXXFYLISIANLRAPVXXSAPAA

SEQ ID NO: 26359 - protein, 34 aa, Artificial Sequence
  GFR-binding peptide
  MOD_RES (33)..(34): Xaa is C or S
  MOD_RES (11)..(12)..(13)..(14)..(15): Xaa is A or G
  MOD_RES (16)..(17)..(18)..(19): Xaa is A or G or is absent
SKVVMEYQKYXXXXXXXXXIYLISIPSLDQPVXX

SEQ ID NO: 26360 - protein, 34 aa, Artificial Sequence; identical to SEQ ID NO: 5240
  GFR-binding peptide
  MOD_RES (1)..(3)..(34): Xaa is C or S

SEQ ID NO: 26361 - protein, 36 aa, Artificial Sequence
  GFR-binding peptide
  MOD_RES (33)..(34): Xaa is C or S
  MOD_RES (11)..(12)..(13)..(14)..(15): Xaa is A or G
  MOD_RES (16)..(17)..(18)..(19): Xaa is A or G or is absent
SVAMGYHYKLXXXXXXXXXKYLISIPSLKTPVXXAK

SEQ ID NO: 26362 - protein, 41 aa, Artificial Sequence; identical to SEQ ID NO: 5242
  GFR-binding peptide
  MOD_RES (2)..(35)..(36): Xaa is C or S
  MOD_RES (13)..(14)..(15)..(16)..(17): Xaa is A or G
  MOD_RES (18)..(19)..(20)..(21): Xaa is A or G or is absent

SEQ ID NO: 26363 - protein, 38 aa, Artificial Sequence; identical to SEQ ID NO: 5243
  GFR-binding peptide
  MOD_RES (33)..(34): Xaa is C or S
  MOD_RES (11)..(12)..(13)..(14)..(15): Xaa is A or G
  MOD_RES (16)..(17)..(18)..(19): Xaa is A or G or is absent

SEQ ID NO: 26364 - protein, 32 aa, Artificial Sequence
  GFR-binding peptide
  MOD_RES (31)..(32): Xaa is C or S
SVAMGEYQKYYTVVGKDIYLISIPSLKTPVXX

SEQ ID NO: 26365 - protein, 34 aa, Artificial Sequence
  GFR-binding peptide
  MOD_RES (32)..(33): Xaa is C or S
ESVAMGRYKKLYTVVGKDFYLISIANLKTPVXXA

SEQ ID NO: 26366 - protein, 39 aa, Artificial Sequence
  GFR-binding peptide
  MOD_RES (34)..(35): Xaa is C or S
  MOD_RES (12)..(13)..(14)..(15)..(16): Xaa is A or G
  MOD_RES (17)..(18)..(19)..(20): Xaa is A or G or is absent
GEVVMEEYKFKXXXXXXXXXLYLMSIPELETPVXXAKPI

SEQ ID NO: 26367 - protein, 36 aa, Artificial Sequence
  GFR-binding peptide
  MOD_RES (2)..(34)..(35): Xaa is C or S
GXESVAMGEYQKYYTVVGKDIYLISIPSLKTPVXXA

SEQ ID NO: 26368 - protein, 38 aa, Artificial Sequence
  GFR-binding peptide
  MOD_RES (1)..(33)..(34): Xaa is C or S
XESVAMGEYKFKYTVVGKDLYLISIPELKTPVXXAKSA

SEQ ID NO: 26369 - protein, 41 aa, Artificial Sequence
  GFR-binding peptide
  MOD_RES (2)..(36)..(37): Xaa is C or S
  MOD_RES (14)..(15)..(16)..(17)..(18): Xaa is A or G
  MOD_RES (19)..(20)..(21)..(22): Xaa is A or G or is absent
GXGEVVMEEYQKYXXXXXXXXXIYLMSIPSLETPVXXAKPI

SEQ ID NO: 26370 - protein, 39 aa, Artificial Sequence
  GFR-binding peptide
  MOD_RES (2)..(4)..(38)..(39): Xaa is C or S
  MOD_RES (16)..(17)..(18)..(19)..(20): Xaa is A or G
  MOD_RES (21)..(22)..(23)..(24): Xaa is A or G or is absent
RXGXGEVVMDEYQKYXXXXXXXXXIYLMSIPSLETPVXX

SEQ ID NO: 26371 - protein, 39 aa, Artificial Sequence; identical to SEQ ID NO: 5249
  GFR-binding peptide
  MOD_RES (2)..(4)..(37)..(38): Xaa is C or S

SEQ ID NO: 26372 - protein, 35 aa, Artificial Sequence
  GFR-binding peptide
  MOD_RES (31)..(32): Xaa is C or S
SRVIMEYQKYVKPKRGVIYLISIPSLAQPVXXPAA

SEQ ID NO: 26373 - protein, 38 aa, Artificial Sequence; identical to SEQ ID NO: 5250
  GFR-binding peptide
  MOD_RES (1)..(3)..(35)..(36): Xaa is C or S

SEQ ID NO: 26374 - protein, 45 aa, Artificial Sequence; identical to SEQ ID NO: 5252
  GFR-binding peptide
  MOD_RES (2)..(4)..(39)..(40): Xaa is C or S
  MOD_RES (17)..(18)..(19)..(20)..(21): Xaa is A or G
  MOD_RES (22)..(23)..(24)..(25): Xaa is A or G or is absent

SEQ ID NO: 26375 - protein, 37 aa, Artificial Sequence; identical to SEQ ID NO: 5253
  GFR-binding peptide
  MOD_RES (1)..(34)..(35): Xaa is C or S

SEQ ID NO: 26376 - protein, 36 aa, Artificial Sequence; identical to SEQ ID NO: 5254
  GFR-binding peptide
  MOD_RES (2)..(4)..(36): Xaa is C or S

SEQ ID NO: 26377 - protein, 33 aa, Artificial Sequence; identical to SEQ ID NO: 5255
  GFR-binding peptide
  MOD_RES (33)..(33): Xaa is C or S
  MOD_RES (11)..(12)..(13)..(14)..(15): Xaa is A or G
  MOD_RES (16)..(17)..(18)..(19): Xaa is A or G or is absent

SEQ ID NO: 26378 - protein, 40 aa, Artificial Sequence; identical to SEQ ID NO: 5256
  GFR-binding peptide
  MOD_RES (1)..(3)..(35)..(36): Xaa is C or S

SEQ ID NO: 26379 - protein, 34 aa, Artificial Sequence
  GFR-binding peptide
  MOD_RES (33)..(34): Xaa is C or S
  MOD_RES (11)..(12)..(13)..(14)..(15): Xaa is A or G
  MOD_RES (16)..(17)..(18)..(19): Xaa is A or G or is absent
RVVMNEYKFKXXXXXXXXXLYLVSIPELKTPAXX

SEQ ID NO: 26380 - protein, 39 aa, Artificial Sequence
  GFR-binding peptide
  MOD_RES (33)..(34): Xaa is C or S
  MOD_RES (11)..(12)..(13)..(14)..(15): Xaa is A or G
  MOD_RES (16)..(17)..(18)..(19): Xaa is A or G or is absent
RVVMNEYQKYXXXXXXXXXIYLVSIPSLKTPAXXPKPVY

SEQ ID NO: 26381 - protein, 35 aa, Artificial Sequence
  GFR-binding peptide
  MOD_RES (1)..(33): Xaa is C or S
XSRVVMNEYQKYIVNSSDDIYLVSIPSLKTPAXTP

SEQ ID NO: 26382 - protein, 39 aa, Artificial Sequence
  GFR-binding peptide
  MOD_RES (1)..(33)..(34): Xaa is C or S
XSRVVMNEYKFKIVNSSDDLYLVSIPELKTPAXXPKPVY

SEQ ID NO: 26383 - protein, 41 aa, Artificial Sequence
  GFR-binding peptide
  MOD_RES (1)..(3)..(35): Xaa is C or S
XGXSRVVMNEYKFKIVNSSDDLYLVSIPELKTPAXTPKTVH

SEQ ID NO: 26384 - protein, 35 aa, Artificial Sequence
  GFR-binding peptide
  MOD_RES (1)..(35): Xaa is C or S
  MOD_RES (13)..(14)..(15)..(16)..(17): Xaa is A or G
  MOD_RES (18)..(19)..(20)..(21): Xaa is A or G or is absent
XGEVVMEEYQKYXXXXXXXXXIYLMSIPSLETPVX

SEQ ID NO: 26385 - protein, 32 aa, Artificial Sequence; identical to SEQ ID NO: 5263
  GFR-binding peptide
  MOD_RES (11)..(12)..(13)..(14)..(15): Xaa is A or G
  MOD_RES (16)..(17)..(18)..(19): Xaa is A or G or is absent

SEQ ID NO: 26386 - protein, 41 aa, Artificial Sequence
  GFR-binding peptide
  MOD_RES (1)..(3)..(37)..(38): Xaa is C or S
  MOD_RES (15)..(16)..(17)..(18)..(19): Xaa is A or G
  MOD_RES (20)..(21)..(22)..(23): Xaa is A or G or is absent
XGXGEVVMDEYQKYXXXXXXXXXIYLMSIPSLETPVXXAKP

SEQ ID NO: 26387 - protein, 32 aa, Artificial Sequence; identical to SEQ ID NO: 5264
  GFR-binding peptide
  MOD_RES (2)..(2): Xaa is C or S

SEQ ID NO: 26388 - protein, 39 aa, Artificial Sequence; identical to SEQ ID NO: 5265
  GFR-binding peptide
  MOD_RES (1)..(3)..(36)..(37): Xaa is C or S
  MOD_RES (14)..(15)..(16)..(17)..(18): Xaa is A or G
  MOD_RES (19)..(20)..(21)..(22): Xaa is A or G or is absent

SEQ ID NO: 26389 - protein, 40 aa, Artificial Sequence; identical to SEQ ID NO: 5268
  GFR-binding peptide
  MOD_RES (34)..(35): Xaa is C or S
  MOD_RES (12)..(13)..(14)..(15)..(16): Xaa is A or G
  MOD_RES (17)..(18)..(19)..(20): Xaa is A or G or is absent

SEQ ID NO: 26390 - protein, 37 aa, Artificial Sequence; identical to SEQ ID NO: 5269
  GFR-binding peptide
  MOD_RES (35)..(36): Xaa is C or S
  MOD_RES (13)..(14)..(15)..(16)..(17): Xaa is A or G
  MOD_RES (18)..(19)..(20)..(21): Xaa is A or G or is absent

SEQ ID NO: 26391 - protein, 40 aa, Artificial Sequence
  GFR-binding peptide
  MOD_RES (34)..(35): Xaa is C or S
  MOD_RES (12)..(13)..(14)..(15)..(16): Xaa is A or G
  MOD_RES (17)..(18)..(19)..(20): Xaa is A or G or is absent
SRVVMNEYQKYXXXXXXXXXIYLVSIPSLKTPAXXPKPVY

SEQ ID NO: 26392 - protein, 35 aa, Artificial Sequence
  GFR-binding peptide
  MOD_RES (2)..(2): Xaa is C or S
  MOD_RES (14)..(15)..(16)..(17)..(18): Xaa is A or G
  MOD_RES (19)..(20)..(21)..(22): Xaa is A or G or is absent
GXESVAMGEYKFKXXXXXXXXXLYLISIPELKTPV

SEQ ID NO: 26393 - protein, 37 aa, Artificial Sequence
  GFR-binding peptide
  MOD_RES (1)..(32)..(33): Xaa is C or S
XSKVVMEYKFKVKPTRGVLYLISIPELDQPVXXPSAS

SEQ ID NO: 26394 - protein, 39 aa, Artificial Sequence
  GFR-binding peptide
  MOD_RES (1)..(36)..(37): Xaa is C or S
  MOD_RES (14)..(15)..(16)..(17)..(18): Xaa is A or G
  MOD_RES (19)..(20)..(21)..(22): Xaa is A or G or is absent
XEAVSMGEEYQKYXXXXXXXXXIYLVSIPSLKTPVXXAK

SEQ ID NO: 26395 - protein, 34 aa, Artificial Sequence
  GFR-binding peptide
  MOD_RES (32)..(33): Xaa is C or S
GEVVMDEYKFKVVKENEDLYLMSIPELETPVXXA

SEQ ID NO: 26396 - protein, 38 aa, Artificial Sequence
  GFR-binding peptide
  MOD_RES (33)..(34): Xaa is C or S
  MOD_RES (11)..(12)..(13)..(14)..(15): Xaa is A or G
  MOD_RES (16)..(17)..(18)..(19): Xaa is A or G or is absent
EVVMDEYQKYXXXXXXXXXIYLMSIPSLETPVXXAKPI

SEQ ID NO: 26397 - protein, 37 aa, Artificial Sequence
  GFR-binding peptide
  MOD_RES (1)..(3)..(35)..(36): Xaa is C or S
XGXSRVVMNEYKFKIVNSSDDLYLVSIPELKTPAXXP

SEQ ID NO: 26398 - protein, 43 aa, Artificial Sequence
  GFR-binding peptide
  MOD_RES (1)..(3)..(38)..(39): Xaa is C or S
  MOD_RES (16)..(17)..(18)..(19)..(20): Xaa is A or G
  MOD_RES (21)..(22)..(23)..(24): Xaa is A or G or is absent
XGXEAVSMGEEYQKYXXXXXXXXXIYLVSIPSLKTPVXXAKGV

SEQ ID NO: 26399 - protein, 41 aa, Artificial Sequence
  GFR-binding peptide
  MOD_RES (1)..(36)..(37): Xaa is C or S
  MOD_RES (14)..(15)..(16)..(17)..(18): Xaa is A or G
  MOD_RES (19)..(20)..(21)..(22): Xaa is A or G or is absent
XEAVSMGEEYKFKXXXXXXXXXLYLVSIPELKTPVXXAKGV

SEQ ID NO: 26400 - protein, 38 aa, Artificial Sequence; identical to SEQ ID NO: 5280
  GFR-binding peptide
  MOD_RES (1)..(35)..(36): Xaa is C or S
  MOD_RES (13)..(14)..(15)..(16)..(17): Xaa is A or G
  MOD_RES (18)..(19)..(20)..(21): Xaa is A or G or is absent

SEQ ID NO: 26401 - protein, 33 aa, Artificial Sequence
  GFR-binding peptide
  MOD_RES (1)..(33): Xaa is C or S
XARVVMNEYQKYIVNSSDDIYLVSIPSLQTPAX

SEQ ID NO: 26402 - protein, 36 aa, Artificial Sequence
  GFR-binding peptide
  MOD_RES (31)..(32): Xaa is C or S
SVAMGEYKFKYTVVGKDLYLISIPELKTPVXXAKSA

SEQ ID NO: 26403 - protein, 34 aa, Artificial Sequence
  GFR-binding peptide
  MOD_RES (31)..(32): Xaa is C or S
KVVMNEYQKYIVNNSSDIYLVSIPSLKTPAXXAK

SEQ ID NO: 26404 - protein, 37 aa, Artificial Sequence
  GFR-binding peptide
  MOD_RES (1)..(3)..(35)..(36): Xaa is C or S
XGXAEVVMDEYQKYVVNNAADIYLISIPSLRAPVXXS

SEQ ID NO: 26405 - protein, 39 aa, Artificial Sequence; identical to SEQ ID NO: 5284
  GFR-binding peptide
  MOD_RES (2)..(34)..(35): Xaa is C or S

SEQ ID NO: 26406 - protein, 38 aa, Artificial Sequence
  GFR-binding peptide
  MOD_RES (1)..(3)..(36)..(37): Xaa is C or S
  MOD_RES (14)..(15)..(16)..(17)..(18): Xaa is A or G
  MOD_RES (19)..(20)..(21)..(22): Xaa is A or G or is absent
XKXSKVVMEYKFKXXXXXXXXXLYLISIPELDQPVXXP

SEQ ID NO: 26407 - protein, 40 aa, Artificial Sequence; identical to SEQ ID NO: 5287
  GFR-binding peptide
  MOD_RES (2)..(4)..(37)..(38): Xaa is C or S

SEQ ID NO: 26408 - protein, 34 aa, Artificial Sequence
  GFR-binding peptide
  MOD_RES (33)..(33): Xaa is C or S
  MOD_RES (11)..(12)..(13)..(14)..(15): Xaa is A or G
  MOD_RES (16)..(17)..(18)..(19): Xaa is A or G or is absent
RVVMNEYQKYXXXXXXXXXIYLVSIPSLKTPAXT

SEQ ID NO: 26409 - protein, 35 aa, Artificial Sequence; identical to SEQ ID NO: 5290
  GFR-binding peptide
  MOD_RES (1)..(3)..(35): Xaa is C or S

SEQ ID NO: 26410 - protein, 34 aa, Artificial Sequence
  GFR-binding peptide
  MOD_RES (32)..(33): Xaa is C or S
AEVVMDEYKFKVVNNAADLYLISIPELRAPVXXS

SEQ ID NO: 26411 - protein, 39 aa, Artificial Sequence
  GFR-binding peptide
  MOD_RES (1)..(3)..(34)..(35): Xaa is C or S
XKXSKVIMEYKFKIKPTKGILYLISIPELDQSVXXPSAS

SEQ ID NO: 26412 - protein, 33 aa, Artificial Sequence; identical to SEQ ID NO: 5291
  GFR-binding peptide
  MOD_RES (31)..(32): Xaa is C or S

SEQ ID NO: 26413 - protein, 40 aa, Artificial Sequence; identical to SEQ ID NO: 5292
  GFR-binding peptide
  MOD_RES (2)..(4)..(37)..(38): Xaa is C or S
  MOD_RES (15)..(16)..(17)..(18)..(19): Xaa is A or G
  MOD_RES (20)..(21)..(22)..(23): Xaa is A or G or is absent

SEQ ID NO: 26414 - protein, 32 aa, Artificial Sequence; identical to SEQ ID NO: 5295
  GFR-binding peptide
  MOD_RES (31)..(32): Xaa is C or S

SEQ ID NO: 26415 - protein, 33 aa, Artificial Sequence
  GFR-binding peptide
  MOD_RES (2)..(2): Xaa is C or S
GXESVAMGEYKFKYTVVGKDLYLISIPELKTPV

SEQ ID NO: 26416 - protein, 35 aa, Artificial Sequence; identical to SEQ ID NO: 5296
  GFR-binding peptide
  MOD_RES (34)..(35): Xaa is C or S
  MOD_RES (12)..(13)..(14)..(15)..(16): Xaa is A or G
  MOD_RES (17)..(18)..(19)..(20): Xaa is A or G or is absent

SEQ ID NO: 26417 - protein, 40 aa, Artificial Sequence
  GFR-binding peptide
  MOD_RES (1)..(3)..(37)..(38): Xaa is C or S
  MOD_RES (15)..(16)..(17)..(18)..(19): Xaa is A or G
  MOD_RES (20)..(21)..(22)..(23): Xaa is A or G or is absent
XGXARVVMNEYKFKXXXXXXXXXLYLVSIPELQTPAXXPK

SEQ ID NO: 26418 - protein, 42 aa, Artificial Sequence
  GFR-binding peptide
  MOD_RES (1)..(3)..(37): Xaa is C or S
  MOD_RES (15)..(16)..(17)..(18)..(19): Xaa is A or G
  MOD_RES (20)..(21)..(22)..(23): Xaa is A or G or is absent
XGXSRVVMNEYQKYXXXXXXXXXIYLVSIPSLKTPAXTPKTV

SEQ ID NO: 26419 - protein, 36 aa, Artificial Sequence
  GFR-binding peptide
  MOD_RES (1)..(33)..(34): Xaa is C or S
XAEVVMDRYKKLVVNNAADFYLISIANLRAPVXXSA

SEQ ID NO: 26420 - protein, 37 aa, Artificial Sequence; identical to SEQ ID NO: 5298
  GFR-binding peptide
  MOD_RES (32)..(33): Xaa is C or S

SEQ ID NO: 26421 - protein, 35 aa, Artificial Sequence
  GFR-binding peptide
  MOD_RES (2)..(2): Xaa is C or S
  MOD_RES (14)..(15)..(16)..(17)..(18): Xaa is A or G
  MOD_RES (19)..(20)..(21)..(22): Xaa is A or G or is absent
GXSRVVMNEYKFKXXXXXXXXXLYLVSIPELKTPA

SEQ ID NO: 26422 - protein, 35 aa, Artificial Sequence
  GFR-binding peptide
  MOD_RES (2)..(4)..(35): Xaa is C or S
SXKXSRVIMEYQKYVKPKRGVIYLISIPSLAQPVX

SEQ ID NO: 26423 - protein, 40 aa, Artificial Sequence; identical to SEQ ID NO: 5299
  GFR-binding peptide
  MOD_RES (1)..(3)..(37)..(38): Xaa is C or S
  MOD_RES (15)..(16)..(17)..(18)..(19): Xaa is A or G
  MOD_RES (20)..(21)..(22)..(23): Xaa is A or G or is absent

SEQ ID NO: 26424 - protein, 35 aa, Artificial Sequence; identical to SEQ ID NO: 5301
  GFR-binding peptide
  MOD_RES (2)..(4): Xaa is C or S

SEQ ID NO: 26425 - protein, 39 aa, Artificial Sequence; identical to SEQ ID NO: 5302
  GFR-binding peptide
  MOD_RES (2)..(4)..(37)..(38): Xaa is C or S
  MOD_RES (15)..(16)..(17)..(18)..(19): Xaa is A or G
  MOD_RES (20)..(21)..(22)..(23): Xaa is A or G or is absent

SEQ ID NO: 26426 - protein, 36 aa, Artificial Sequence; identical to SEQ ID NO: 5304
  GFR-binding peptide
  MOD_RES (31)..(32): Xaa is C or S

SEQ ID NO: 26427 - protein, 41 aa, Artificial Sequence; identical to SEQ ID NO: 5305
  GFR-binding peptide
  MOD_RES (2)..(4)..(37)..(38): Xaa is C or S
  MOD_RES (15)..(16)..(17)..(18)..(19): Xaa is A or G
  MOD_RES (20)..(21)..(22)..(23): Xaa is A or G or is absent

SEQ ID NO: 26428 - protein, 33 aa, Artificial Sequence; identical to SEQ ID NO: 5307
  GFR-binding peptide
  MOD_RES (32)..(33): Xaa is C or S

SEQ ID NO: 26429 - protein, 31 aa, Artificial Sequence; identical to SEQ ID NO: 5308
  GFR-binding peptide
  MOD_RES (31)..(31): Xaa is C or S

SEQ ID NO: 26430 - protein, 32 aa, Artificial Sequence
  GFR-binding peptide
  MOD_RES (1)..(1): Xaa is C or S
XARVVMNEYKFKIVNSSDDLYLVSIPELQTPA

SEQ ID NO: 26431 - protein, 35 aa, Artificial Sequence
  GFR-binding peptide
  MOD_RES (1)..(3)..(35): Xaa is C or S
XGXAEVVMDEYKFKVVNNAADLYLISIPELRAPVX

SEQ ID NO: 26432 - protein, 44 aa, Artificial Sequence; identical to SEQ ID NO: 5309
  GFR-binding peptide
  MOD_RES (2)..(4)..(39)..(40): Xaa is C or S
  MOD_RES (17)..(18)..(19)..(20)..(21): Xaa is A or G
  MOD_RES (22)..(23)..(24)..(25): Xaa is A or G or is absent

SEQ ID NO: 26433 - protein, 39 aa, Artificial Sequence; identical to SEQ ID NO: 5310
  GFR-binding peptide
  MOD_RES (2)..(4)..(36)..(37): Xaa is C or S

SEQ ID NO: 26434 - protein, 34 aa, Artificial Sequence
  GFR-binding peptide
  MOD_RES (31)..(32): Xaa is C or S
SRVIMEYKFKVKPKRGVLYLISIPELAQPVXXPA

SEQ ID NO: 26435 - protein, 44 aa, Artificial Sequence; identical to SEQ ID NO: 5311
  GFR-binding peptide
  MOD_RES (2)..(4)..(38)..(39): Xaa is C or S
  MOD_RES (16)..(17)..(18)..(19)..(20): Xaa is A or G
  MOD_RES (21)..(22)..(23)..(24): Xaa is A or G or is absent

SEQ ID NO: 26436 - protein, 38 aa, Artificial Sequence; identical to SEQ ID NO: 5313
  GFR-binding peptide
  MOD_RES (1)..(33)..(34): Xaa is C or S

SEQ ID NO: 26437 - protein, 32 aa, Artificial Sequence; identical to SEQ ID NO: 5314
  GFR-binding peptide
  MOD_RES (2)..(2): Xaa is C or S

SEQ ID NO: 26438 - protein, 36 aa, Artificial Sequence
  GFR-binding peptide
  MOD_RES (2)..(4)..(35)..(36): Xaa is C or S
SXKXSRVIMEYKFKVKPKRGVLYLISIPELAQPVXX

SEQ ID NO: 26439 - protein, 38 aa, Artificial Sequence; identical to SEQ ID NO: 5316
  GFR-binding peptide
  MOD_RES (2)..(33)..(34): Xaa is C or S

SEQ ID NO: 26440 - protein, 36 aa, Artificial Sequence
  GFR-binding peptide
  MOD_RES (1)..(3): Xaa is C or S
  MOD_RES (15)..(16)..(17)..(18)..(19): Xaa is A or G
  MOD_RES (20)..(21)..(22)..(23): Xaa is A or G or is absent
XGXAEVVMDEYKFKXXXXXXXXXLYLISIPELRAPV

SEQ ID NO: 26441 - protein, 42 aa, Artificial Sequence; identical to SEQ ID NO: 5317
  GFR-binding peptide
  MOD_RES (2)..(4)..(38)..(39): Xaa is C or S
  MOD_RES (16)..(17)..(18)..(19)..(20): Xaa is A or G
  MOD_RES (21)..(22)..(23)..(24): Xaa is A or G or is absent

SEQ ID NO: 26442 - protein, 34 aa, Artificial Sequence
  GFR-binding peptide
  MOD_RES (33)..(34): Xaa is C or S
EAVSMGEEYKFKTPVGMDDLYLVSIPELKTPVXX

SEQ ID NO: 26443 - protein, 39 aa, Artificial Sequence
  GFR-binding peptide
  MOD_RES (2)..(36)..(37): Xaa is C or S
  MOD_RES (14)..(15)..(16)..(17)..(18): Xaa is A or G
  MOD_RES (19)..(20)..(21)..(22): Xaa is A or G or is absent
GXAEVVMDEYKFKXXXXXXXXXLYLISIPELRAPVXXSA

SEQ ID NO: 26444 - protein, 39 aa, Artificial Sequence
  GFR-binding peptide
  MOD_RES (2)..(4)..(36)..(37): Xaa is C or S
RXGXGEVVMEEYQKYVVKDYEDIYLMSIPSLETPVXXAK

SEQ ID NO: 26445 - protein, 38 aa, Artificial Sequence
  GFR-binding peptide
  MOD_RES (1)..(3)..(35): Xaa is C or S
XGXSRVVMNEYQKYIVNSSDDIYLVSIPSLKTPAXTPK

SEQ ID NO: 26446 - protein, 31 aa, Artificial Sequence
  GFR-binding peptide
ESVAMGEYQKYYTVVGKDIYLISIPSLKTPV

SEQ ID NO: 26447 - protein, 35 aa, Artificial Sequence
  GFR-binding peptide
  MOD_RES (2)..(2): Xaa is C or S
  MOD_RES (14)..(15)..(16)..(17)..(18): Xaa is A or G
  MOD_RES (19)..(20)..(21)..(22): Xaa is A or G or is absent
GXESVAMGRYKKLXXXXXXXXXFYLISIANLKTPV

SEQ ID NO: 26448 - protein, 39 aa, Artificial Sequence; identical to SEQ ID NO: 5323
  GFR-binding peptide
  MOD_RES (2)..(4)..(39): Xaa is C or S
  MOD_RES (17)..(18)..(19)..(20)..(21): Xaa is A or G
  MOD_RES (22)..(23)..(24)..(25): Xaa is A or G or is absent

SEQ ID NO: 26449 - protein, 33 aa, Artificial Sequence; identical to SEQ ID NO: 5325
  GFR-binding peptide
  MOD_RES (1)..(33): Xaa is C or S

SEQ ID NO: 26450 - protein, 33 aa, Artificial Sequence
  GFR-binding peptide
  MOD_RES (12)..(13)..(14)..(15)..(16): Xaa is A or G
  MOD_RES (17)..(18)..(19)..(20): Xaa is A or G or is absent
SRVVMNEYQKYXXXXXXXXXIYLVSIPSLKTPA

SEQ ID NO: 26451 - protein, 40 aa, Artificial Sequence
  GFR-binding peptide
  MOD_RES (1)..(35)..(36): Xaa is C or S
  MOD_RES (13)..(14)..(15)..(16)..(17): Xaa is A or G
  MOD_RES (18)..(19)..(20)..(21): Xaa is A or G or is absent
XGEVVMEEYQKYXXXXXXXXXIYLMSIPSLETPVXXAKPI

SEQ ID NO: 26452 - protein, 33 aa, Artificial Sequence; identical to SEQ ID NO: 5330
  GFR-binding peptide
  MOD_RES (1)..(33): Xaa is C or S

SEQ ID NO: 26453 - protein, 38 aa, Artificial Sequence
  GFR-binding peptide
  MOD_RES (32)..(33): Xaa is C or S
ARVVMNEYQKYIVNSSDDIYLVSIPSLQTPAXXPKPVT

SEQ ID NO: 26454 - protein, 41 aa, Artificial Sequence; identical to SEQ ID NO: 5331
  GFR-binding peptide
  MOD_RES (1)..(3)..(37)..(38): Xaa is C or S
  MOD_RES (15)..(16)..(17)..(18)..(19): Xaa is A or G
  MOD_RES (20)..(21)..(22)..(23): Xaa is A or G or is absent

SEQ ID NO: 26455 - protein, 35 aa, Artificial Sequence
  GFR-binding peptide
  MOD_RES (31)..(32): Xaa is C or S
EVVMDEYKFKVVKENEDLYLMSIPELETPVXXAKP

SEQ ID NO: 26456 - protein, 36 aa, Artificial Sequence
  GFR-binding peptide
  MOD_RES (1)..(3): Xaa is C or S
  MOD_RES (15)..(16)..(17)..(18)..(19): Xaa is A or G
  MOD_RES (20)..(21)..(22)..(23): Xaa is A or G or is absent
XGXGEVVMEEYKFKXXXXXXXXXLYLMSIPELETPV

SEQ ID NO: 26457 - protein, 32 aa, Artificial Sequence
  GFR-binding peptide
  MOD_RES (1)..(32): Xaa is C or S
XSRVIMEYKFKVKPKRGVLYLISIPELAQPVX

SEQ ID NO: 26458 - protein, 36 aa, Artificial Sequence; identical to SEQ ID NO: 5334
  GFR-binding peptide
  MOD_RES (34)..(35): Xaa is C or S
  MOD_RES (12)..(13)..(14)..(15)..(16): Xaa is A or G
  MOD_RES (17)..(18)..(19)..(20): Xaa is A or G or is absent

SEQ ID NO: 26459 - protein, 39 aa, Artificial Sequence
  GFR-binding peptide
  MOD_RES (2)..(37)..(38): Xaa is C or S
  MOD_RES (15)..(16)..(17)..(18)..(19): Xaa is A or G
  MOD_RES (20)..(21)..(22)..(23): Xaa is A or G or is absent
GXEAVSMGEEYKFKXXXXXXXXXLYLVSIPELKTPVXXA

SEQ ID NO: 26460 - protein, 31 aa, Artificial Sequence
  GFR-binding peptide
SRVVMNEYKFKIVNSSDDLYLVSIPELKTPA

SEQ ID NO: 26461 - protein, 37 aa, Artificial Sequence
  GFR-binding peptide
  MOD_RES (1)..(33)..(34): Xaa is C or S
XSRVVMNEYQKYIVNSSDDIYLVSIPSLKTPAXXPKP

SEQ ID NO: 26462 - protein, 36 aa, Artificial Sequence
  GFR-binding peptide
  MOD_RES (34)..(35): Xaa is C or S
  MOD_RES (12)..(13)..(14)..(15)..(16): Xaa is A or G
  MOD_RES (17)..(18)..(19)..(20): Xaa is A or G or is absent
GEVVMEEYQKYXXXXXXXXXIYLMSIPSLETPVXXA

SEQ ID NO: 26463 - protein, 34 aa, Artificial Sequence
  GFR-binding peptide
  MOD_RES (34)..(34): Xaa is C or S
  MOD_RES (12)..(13)..(14)..(15)..(16): Xaa is A or G
  MOD_RES (17)..(18)..(19)..(20): Xaa is A or G or is absent
GEVVMDEYQKYXXXXXXXXXIYLMSIPSLETPVX

SEQ ID NO: 26464 - protein, 31 aa, Artificial Sequence; identical to SEQ ID NO: 5336
  GFR-binding peptide
  MOD_RES (31)..(31): Xaa is C or S

SEQ ID NO: 26465 - protein, 42 aa, Artificial Sequence
  GFR-binding peptide
  MOD_RES (2)..(36)..(37): Xaa is C or S
  MOD_RES (14)..(15)..(16)..(17)..(18): Xaa is A or G
  MOD_RES (19)..(20)..(21)..(22): Xaa is A or G or is absent
GXESVAMGEYQKYXXXXXXXXXIYLISIPSLKTPVXXAKSAK

SEQ ID NO: 26466 - protein, 38 aa, Artificial Sequence; identical to SEQ ID NO: 5338
  GFR-binding peptide
  MOD_RES (1)..(3)..(35)..(36): Xaa is C or S

SEQ ID NO: 26467 - protein, 38 aa, Artificial Sequence
  GFR-binding peptide
  MOD_RES (2)..(34)..(35): Xaa is C or S
GXAKVVMNEYQKYIVNNSSDIYLVSIPSLKTPAXXAKP

SEQ ID NO: 26468 - protein, 40 aa, Artificial Sequence
  GFR-binding peptide
  MOD_RES (2)..(34)..(35): Xaa is C or S
GXESVAMGYHYKLYTVVGKDKYLISIPSLKTPVXXAKSAK

SEQ ID NO: 26469 - protein, 39 aa, Artificial Sequence; identical to SEQ ID NO: 5342
  GFR-binding peptide
  MOD_RES (2)..(4)..(36): Xaa is C or S

SEQ ID NO: 26470 - protein, 32 aa, Artificial Sequence; identical to SEQ ID NO: 5345
  GFR-binding peptide
  MOD_RES (31)..(32): Xaa is C or S

SEQ ID NO: 26471 - protein, 39 aa, Artificial Sequence
  GFR-binding peptide
  MOD_RES (1)..(35)..(36): Xaa is C or S
  MOD_RES (13)..(14)..(15)..(16)..(17): Xaa is A or G
  MOD_RES (18)..(19)..(20)..(21): Xaa is A or G or is absent
XGEVVMDEYKFKXXXXXXXXXLYLMSIPELETPVXXAKP

SEQ ID NO: 26472 - protein, 33 aa, Artificial Sequence
  GFR-binding peptide
  MOD_RES (12)..(13)..(14)..(15)..(16): Xaa is A or G
  MOD_RES (17)..(18)..(19)..(20): Xaa is A or G or is absent
GEVVMEEYQKYXXXXXXXXXIYLMSIPSLETPV

SEQ ID NO: 26473 - protein, 37 aa, Artificial Sequence
  GFR-binding peptide
  MOD_RES (2)..(34)..(35): Xaa is C or S
GXESVAMGYHYKLYTVVGKDKYLISIPSLKTPVXXAK

SEQ ID NO: 26474 - protein, 33 aa, Artificial Sequence; identical to SEQ ID NO: 5346
  GFR-binding peptide
  MOD_RES (32)..(33): Xaa is C or S

SEQ ID NO: 26475 - protein, 32 aa, Artificial Sequence; identical to SEQ ID NO: 5347
  GFR-binding peptide
  MOD_RES (31)..(32): Xaa is C or S

SEQ ID NO: 26476 - protein, 39 aa, Artificial Sequence; identical to SEQ ID NO: 5348
  GFR-binding peptide
  MOD_RES (1)..(3)..(35)..(36): Xaa is C or S

SEQ ID NO: 26477 - protein, 32 aa, Artificial Sequence
  GFR-binding peptide
  MOD_RES (31)..(32): Xaa is C or S
EVVMDYHYKLVVNNAADKYLISIPSLRAPVXX

SEQ ID NO: 26478 - protein, 44 aa, Artificial Sequence; identical to SEQ ID NO: 5349
  GFR-binding peptide
  MOD_RES (2)..(4)..(38)..(39): Xaa is C or S
  MOD_RES (16)..(17)..(18)..(19)..(20): Xaa is A or G
  MOD_RES (21)..(22)..(23)..(24): Xaa is A or G or is absent

SEQ ID NO: 26479 - protein, 33 aa, Artificial Sequence
  GFR-binding peptide
  MOD_RES (1)..(33): Xaa is C or S
XESVAMGEYQKYYTVVGKDIYLISIPSLKTPVX

SEQ ID NO: 26480 - protein, 33 aa, Artificial Sequence; identical to SEQ ID NO: 5351
  GFR-binding peptide
  MOD_RES (31)..(32): Xaa is C or S

SEQ ID NO: 26481 - protein, 40 aa, Artificial Sequence; identical to SEQ ID NO: 5355
  GFR-binding peptide
  MOD_RES (1)..(35)..(36): Xaa is C or S
  MOD_RES (13)..(14)..(15)..(16)..(17): Xaa is A or G
  MOD_RES (18)..(19)..(20)..(21): Xaa is A or G or is absent

SEQ ID NO: 26482 - protein, 42 aa, Artificial Sequence
  GFR-binding peptide
  MOD_RES (1)..(3)..(36)..(37): Xaa is C or S
  MOD_RES (14)..(15)..(16)..(17)..(18): Xaa is A or G
  MOD_RES (19)..(20)..(21)..(22): Xaa is A or G or is absent
XKXSKVVMEYQKYXXXXXXXXXIYLISIPSLDQPVXXPSASA

SEQ ID NO: 26483 - protein, 40 aa, Artificial Sequence
  GFR-binding peptide
  MOD_RES (34)..(34): Xaa is C or S
  MOD_RES (12)..(13)..(14)..(15)..(16): Xaa is A or G
  MOD_RES (17)..(18)..(19)..(20): Xaa is A or G or is absent
SRVVMNEYKFKXXXXXXXXXLYLVSIPELKTPAXTPKTVH

SEQ ID NO: 26484 - protein, 41 aa, Artificial Sequence; identical to SEQ ID NO: 5357
  GFR-binding peptide
  MOD_RES (1)..(3)..(35)..(36): Xaa is C or S

SEQ ID NO: 26485 - protein, 36 aa, Artificial Sequence; identical to SEQ ID NO: 5359
  GFR-binding peptide
  MOD_RES (33)..(34): Xaa is C or S
  MOD_RES (11)..(12)..(13)..(14)..(15): Xaa is A or G
  MOD_RES (16)..(17)..(18)..(19): Xaa is A or G or is absent

SEQ ID NO: 26486 - protein, 35 aa, Artificial Sequence; identical to SEQ ID NO: 5361
  GFR-binding peptide
  MOD_RES (32)..(33): Xaa is C or S

SEQ ID NO: 26487 - protein, 41 aa, Artificial Sequence
  GFR-binding peptide
  MOD_RES (1)..(3)..(37)..(38): Xaa is C or S
  MOD_RES (15)..(16)..(17)..(18)..(19): Xaa is A or G
  MOD_RES (20)..(21)..(22)..(23): Xaa is A or G or is absent
XGXGEVVMDEYKFKXXXXXXXXXLYLMSIPELETPVXXAKP

SEQ ID NO: 26488 - protein, 35 aa, Artificial Sequence; identical to SEQ ID NO: 5362
  GFR-binding peptide
  MOD_RES (31)..(32): Xaa is C or S

SEQ ID NO: 26489 - protein, 40 aa, Artificial Sequence
  GFR-binding peptide
  MOD_RES (1)..(3)..(37)..(38): Xaa is C or S
  MOD_RES (15)..(16)..(17)..(18)..(19): Xaa is A or G
  MOD_RES (20)..(21)..(22)..(23): Xaa is A or G or is absent
XGXESVAMGYHYKLXXXXXXXXXKYLISIPSLKTPVXXAK

SEQ ID NO: 26490 - protein, 32 aa, Artificial Sequence
  GFR-binding peptide
  MOD_RES (11)..(12)..(13)..(14)..(15): Xaa is A or G
  MOD_RES (16)..(17)..(18)..(19): Xaa is A or G or is absent
SKVIMEYKFKXXXXXXXXXLYLISIPELDQSV

SEQ ID NO: 26491 - protein, 38 aa, Artificial Sequence
  GFR-binding peptide
  MOD_RES (1)..(3)..(34)..(35): Xaa is C or S
XKXSRVIMEYKFKVKPKRGVLYLISIPELAQPVXXPAA

SEQ ID NO: 26492 - protein, 37 aa, Artificial Sequence
  GFR-binding peptide
  MOD_RES (31)..(32): Xaa is C or S
EVVMDYHYKLVVNNAADKYLISIPSLRAPVXXSAPAA

SEQ ID NO: 26493 - protein, 35 aa, Artificial Sequence; identical to SEQ ID NO: 5364
  GFR-binding peptide
  MOD_RES (2)..(35): Xaa is C or S

SEQ ID NO: 26494 - protein, 32 aa, Artificial Sequence
  GFR-binding peptide
  MOD_RES (1)..(1): Xaa is C or S
XAEVVMDEYQKYVVNNAADIYLISIPSLRAPV

SEQ ID NO: 26495 - protein, 37 aa, Artificial Sequence
  GFR-binding peptide
  MOD_RES (1)..(35)..(36): Xaa is C or S
  MOD_RES (13)..(14)..(15)..(16)..(17): Xaa is A or G
  MOD_RES (18)..(19)..(20)..(21): Xaa is A or G or is absent
XAEVVMDYHYKLXXXXXXXXXKYLISIPSLRAPVXXS

SEQ ID NO: 26496 - protein, 41 aa, Artificial Sequence; identical to SEQ ID NO: 5365
  GFR-binding peptide
  MOD_RES (1)..(35)..(36): Xaa is C or S
  MOD_RES (13)..(14)..(15)..(16)..(17): Xaa is A or G
  MOD_RES (18)..(19)..(20)..(21): Xaa is A or G or is absent

SEQ ID NO: 26497 - protein, 38 aa, Artificial Sequence
  GFR-binding peptide
  MOD_RES (1)..(3)..(36)..(37): Xaa is C or S
  MOD_RES (14)..(15)..(16)..(17)..(18): Xaa is A or G
  MOD_RES (19)..(20)..(21)..(22): Xaa is A or G or is absent
XKXSKVIMEYQKYXXXXXXXXXIYLISIPSLDQSVXXP

SEQ ID NO: 26498 - protein, 39 aa, Artificial Sequence
  GFR-binding peptide
  MOD_RES (2)..(35)..(36): Xaa is C or S
  MOD_RES (13)..(14)..(15)..(16)..(17): Xaa is A or G
  MOD_RES (18)..(19)..(20)..(21): Xaa is A or G or is absent
KXSKVVMEYQKYXXXXXXXXXIYLISIPSLDQPVXXPSA

SEQ ID NO: 26499 - protein, 37 aa, Artificial Sequence
  GFR-binding peptide
  MOD_RES (2)..(36)..(37): Xaa is C or S
  MOD_RES (14)..(15)..(16)..(17)..(18): Xaa is A or G
  MOD_RES (19)..(20)..(21)..(22): Xaa is A or G or is absent
GXESVAMGRYKKLXXXXXXXXXFYLISIANLKTPVXX

SEQ ID NO: 26500 - protein, 35 aa, Artificial Sequence; identical to SEQ ID NO: 5369
  GFR-binding peptide
  MOD_RES (33)..(34): Xaa is C or S

SEQ ID NO: 26501 - protein, 33 aa, Artificial Sequence; identical to SEQ ID NO: 5370
  GFR-binding peptide
  MOD_RES (1)..(33): Xaa is C or S

SEQ ID NO: 26502 - protein, 40 aa, Artificial Sequence; identical to SEQ ID NO: 5371
  GFR-binding peptide
  MOD_RES (34)..(35): Xaa is C or S
  MOD_RES (12)..(13)..(14)..(15)..(16): Xaa is A or G
  MOD_RES (17)..(18)..(19)..(20): Xaa is A or G or is absent

SEQ ID NO: 26503 - protein, 39 aa, Artificial Sequence
  GFR-binding peptide
  MOD_RES (2)..(34)..(35): Xaa is C or S
GXESVAMGEYQKYYTVVGKDIYLISIPSLKTPVXXAKSA

SEQ ID NO: 26504 - protein, 33 aa, Artificial Sequence
  GFR-binding peptide
  MOD_RES (1)..(33): Xaa is C or S
XAKVVMNEYKFKIVNNSSDLYLVSIPELKTPAX

SEQ ID NO: 26505 - protein, 42 aa, Artificial Sequence
  GFR-binding peptide
  MOD_RES (2)..(36)..(37): Xaa is C or S
  MOD_RES (14)..(15)..(16)..(17)..(18): Xaa is A or G
  MOD_RES (19)..(20)..(21)..(22): Xaa is A or G or is absent
GXGEVVMEEYKFKXXXXXXXXXLYLMSIPELETPVXXAKPIS

SEQ ID NO: 26506 - protein, 40 aa, Artificial Sequence
  GFR-binding peptide
  MOD_RES (1)..(34)..(35): Xaa is C or S
  MOD_RES (12)..(13)..(14)..(15)..(16): Xaa is A or G
  MOD_RES (17)..(18)..(19)..(20): Xaa is A or G or is absent
XSRVIMEYKFKXXXXXXXXXLYLISIPELAQPVXXPAASA

SEQ ID NO: 26507 - protein, 36 aa, Artificial Sequence; identical to SEQ ID NO: 5375
  GFR-binding peptide
  MOD_RES (1)..(3): Xaa is C or S
  MOD_RES (15)..(16)..(17)..(18)..(19): Xaa is A or G
  MOD_RES (20)..(21)..(22)..(23): Xaa is A or G or is absent

SEQ ID NO: 26508 - protein, 36 aa, Artificial Sequence; identical to SEQ ID NO: 5376
  GFR-binding peptide
  MOD_RES (1)..(3)..(36): Xaa is C or S
  MOD_RES (14)..(15)..(16)..(17)..(18): Xaa is A or G
  MOD_RES (19)..(20)..(21)..(22): Xaa is A or G or is absent

SEQ ID NO: 26509 - protein, 36 aa, Artificial Sequence; identical to SEQ ID NO: 5378
  GFR-binding peptide
  MOD_RES (2)..(4): Xaa is C or S
  MOD_RES (15)..(16)..(17)..(18)..(19): Xaa is A or G
  MOD_RES (20)..(21)..(22)..(23): Xaa is A or G or is absent

SEQ ID NO: 26510 - protein, 36 aa, Artificial Sequence
  GFR-binding peptide
  MOD_RES (33)..(34): Xaa is C or S
  MOD_RES (11)..(12)..(13)..(14)..(15): Xaa is A or G
  MOD_RES (16)..(17)..(18)..(19): Xaa is A or G or is absent
SKVIMEYQKYXXXXXXXXXIYLISIPSLDQSVXXPS

SEQ ID NO: 26511 - protein, 35 aa, Artificial Sequence
  GFR-binding peptide
  MOD_RES (31)..(32): Xaa is C or S
SVAMGRYKKLYTVVGKDFYLISIANLKTPVXXAKS

SEQ ID NO: 26512 - protein, 39 aa, Artificial Sequence; identical to SEQ ID NO: 5379
  GFR-binding peptide
  MOD_RES (1)..(3)..(36)..(37): Xaa is C or S
  MOD_RES (14)..(15)..(16)..(17)..(18): Xaa is A or G
  MOD_RES (19)..(20)..(21)..(22): Xaa is A or G or is absent

SEQ ID NO: 26513 - protein, 32 aa, Artificial Sequence; identical to SEQ ID NO: 5380
  GFR-binding peptide

SEQ ID NO: 26514 - protein, 43 aa, Artificial Sequence
  GFR-binding peptide
  MOD_RES (2)..(4)..(38)..(39): Xaa is C or S
  MOD_RES (16)..(17)..(18)..(19)..(20): Xaa is A or G
  MOD_RES (21)..(22)..(23)..(24): Xaa is A or G or is absent
HXGXSRVVMNEYKFKXXXXXXXXXLYLVSIPELKTPAXXPKPV

SEQ ID NO: 26515 - protein, 37 aa, Artificial Sequence; identical to SEQ ID NO: 5383
  GFR-binding peptide
  MOD_RES (2)..(34)..(35): Xaa is C or S

SEQ ID NO: 26516 - protein, 34 aa, Artificial Sequence; identical to SEQ ID NO: 5385
  GFR-binding peptide
  MOD_RES (1)..(1): Xaa is C or S
  MOD_RES (13)..(14)..(15)..(16)..(17): Xaa is A or G
  MOD_RES (18)..(19)..(20)..(21): Xaa is A or G or is absent

SEQ ID NO: 26517 - protein, 34 aa, Artificial Sequence
  GFR-binding peptide
  MOD_RES (1)..(1): Xaa is C or S
  MOD_RES (13)..(14)..(15)..(16)..(17): Xaa is A or G
  MOD_RES (18)..(19)..(20)..(21): Xaa is A or G or is absent
XARVVMNEYQKYXXXXXXXXXIYLVSIPSLQTPA

SEQ ID NO: 26518 - protein, 34 aa, Artificial Sequence
  GFR-binding peptide
  MOD_RES (1)..(1): Xaa is C or S
  MOD_RES (13)..(14)..(15)..(16)..(17): Xaa is A or G
  MOD_RES (18)..(19)..(20)..(21): Xaa is A or G or is absent
XSRVVMNEYKFKXXXXXXXXXLYLVSIPELKTPA

SEQ ID NO: 26519 - protein, 35 aa, Artificial Sequence; identical to SEQ ID NO: 5388
  GFR-binding peptide
  MOD_RES (2)..(35): Xaa is C or S
  MOD_RES (13)..(14)..(15)..(16)..(17): Xaa is A or G
  MOD_RES (18)..(19)..(20)..(21): Xaa is A or G or is absent

SEQ ID NO: 26520 - protein, 43 aa, Artificial Sequence; identical to SEQ ID NO: 5393
  GFR-binding peptide
  MOD_RES (2)..(4)..(38)..(39): Xaa is C or S
  MOD_RES (16)..(17)..(18)..(19)..(20): Xaa is A or G
  MOD_RES (21)..(22)..(23)..(24): Xaa is A or G or is absent

SEQ ID NO: 26521 - protein, 42 aa, Artificial Sequence; identical to SEQ ID NO: 5396
  GFR-binding peptide
  MOD_RES (2)..(36)..(37): Xaa is C or S
  MOD_RES (14)..(15)..(16)..(17)..(18): Xaa is A or G
  MOD_RES (19)..(20)..(21)..(22): Xaa is A or G or is absent

SEQ ID NO: 26522 - protein, 39 aa, Artificial Sequence
  GFR-binding peptide
  MOD_RES (2)..(4)..(36)..(37): Xaa is C or S
HXGXAKVVMNEYKFKIVNNSSDLYLVSIPELKTPAXXAK

SEQ ID NO: 26523 - protein, 40 aa, Artificial Sequence; identical to SEQ ID NO: 5400
  GFR-binding peptide
  MOD_RES (1)..(35)..(36): Xaa is C or S
  MOD_RES (13)..(14)..(15)..(16)..(17): Xaa is A or G
  MOD_RES (18)..(19)..(20)..(21): Xaa is A or G or is absent

SEQ ID NO: 26524 - protein, 36 aa, Artificial Sequence
  GFR-binding peptide
  MOD_RES (32)..(33): Xaa is C or S
ESVAMGEYKFKYTVVGKDLYLISIPELKTPVXXAKS

SEQ ID NO: 26525 - protein, 33 aa, Artificial Sequence
  GFR-binding peptide
  MOD_RES (2)..(2): Xaa is C or S
GXESVAMGRYKKLYTVVGKDFYLISIANLKTPV

SEQ ID NO: 26526 - protein, 39 aa, Artificial Sequence
  GFR-binding peptide
  MOD_RES (1)..(3)..(35): Xaa is C or S
XGXSRVVMNEYQKYIVNSSDDIYLVSIPSLKTPAXTPKT

SEQ ID NO: 26527 - protein, 40 aa, Artificial Sequence
  GFR-binding peptide
  MOD_RES (1)..(3)..(37)..(38): Xaa is C or S
  MOD_RES (15)..(16)..(17)..(18)..(19): Xaa is A or G
  MOD_RES (20)..(21)..(22)..(23): Xaa is A or G or is absent
XGXAKVVMNEYKFKXXXXXXXXXLYLVSIPELKTPAXXAK

SEQ ID NO: 26528 - protein, 37 aa, Artificial Sequence; identical to SEQ ID NO: 5404
  GFR-binding peptide
  MOD_RES (2)..(4)..(35)..(36): Xaa is C or S

SEQ ID NO: 26529 - protein, 37 aa, Artificial Sequence
  GFR-binding peptide
  MOD_RES (2)..(4)..(36)..(37): Xaa is C or S
RXGXGEVVMEEYKFKVVKDYEDLYLMSIPELETPVXX

SEQ ID NO: 26530 - protein, 35 aa, Artificial Sequence
  GFR-binding peptide
  MOD_RES (32)..(33): Xaa is C or S
AEVVMDEYQKYVVNNAADIYLISIPSLRAPVXXSA

SEQ ID NO: 26531 - protein, 37 aa, Artificial Sequence
  GFR-binding peptide
  MOD_RES (1)..(34)..(35): Xaa is C or S
  MOD_RES (12)..(13)..(14)..(15)..(16): Xaa is A or G
  MOD_RES (17)..(18)..(19)..(20): Xaa is A or G or is absent
XSRVIMEYQKYXXXXXXXXXIYLISIPSLAQPVXXPA

SEQ ID NO: 26532 - protein, 44 aa, Artificial Sequence
  GFR-binding peptide
  MOD_RES (2)..(4)..(38)..(39): Xaa is C or S
  MOD_RES (16)..(17)..(18)..(19)..(20): Xaa is A or G
  MOD_RES (21)..(22)..(23)..(24): Xaa is A or G or is absent
HXGXARVVMNEYKFKXXXXXXXXXLYLVSIPELQTPAXXPKPVT

SEQ ID NO: 26533 - protein, 36 aa, Artificial Sequence
  GFR-binding peptide
  MOD_RES (1)..(3)..(35)..(36): Xaa is C or S
XGXGEVVMEEYQKYVVKDYEDIYLMSIPSLETPVXX

SEQ ID NO: 26534 - protein, 36 aa, Artificial Sequence
  GFR-binding peptide
  MOD_RES (1)..(3)..(36): Xaa is C or S
  MOD_RES (14)..(15)..(16)..(17)..(18): Xaa is A or G
  MOD_RES (19)..(20)..(21)..(22): Xaa is A or G or is absent
XKXSRVIMEYQKYXXXXXXXXXIYLISIPSLAQPVX

SEQ ID NO: 26535 - protein, 35 aa, Artificial Sequence; identical to SEQ ID NO: 5409
  GFR-binding peptide
  MOD_RES (32)..(33): Xaa is C or S

SEQ ID NO: 26536 - protein, 39 aa, Artificial Sequence; identical to SEQ ID NO: 5411
  GFR-binding peptide
  MOD_RES (1)..(3)..(36)..(37): Xaa is C or S
  MOD_RES (14)..(15)..(16)..(17)..(18): Xaa is A or G
  MOD_RES (19)..(20)..(21)..(22): Xaa is A or G or is absent

SEQ ID NO: 26537 - protein, 38 aa, Artificial Sequence; identical to SEQ ID NO: 5412
  GFR-binding peptide
  MOD_RES (2)..(35)..(36): Xaa is C or S
  MOD_RES (13)..(14)..(15)..(16)..(17): Xaa is A or G
  MOD_RES (18)..(19)..(20)..(21): Xaa is A or G or is absent

SEQ ID NO: 26538 - protein, 35 aa, Artificial Sequence; identical to SEQ ID NO: 5413
  GFR-binding peptide
  MOD_RES (1)..(35): Xaa is C or S
  MOD_RES (13)..(14)..(15)..(16)..(17): Xaa is A or G
  MOD_RES (18)..(19)..(20)..(21): Xaa is A or G or is absent

SEQ ID NO: 26539 - protein, 34 aa, Artificial Sequence
  GFR-binding peptide
  MOD_RES (2)..(33)..(34): Xaa is C or S
KXSRVIMEYKFKVKPKRGVLYLISIPELAQPVXX

SEQ ID NO: 26540 - protein, 35 aa, Artificial Sequence
  GFR-binding peptide
  MOD_RES (1)..(3)..(35): Xaa is C or S
XGXSRVVMNEYQKYIVNSSDDIYLVSIPSLKTPAX

SEQ ID NO: 26541 - protein, 39 aa, Artificial Sequence; identical to SEQ ID NO: 5415
  GFR-binding peptide
  MOD_RES (2)..(4)..(35)..(36): Xaa is C or S

SEQ ID NO: 26542 - protein, 40 aa, Artificial Sequence
  GFR-binding peptide
  MOD_RES (2)..(4)..(38)..(39): Xaa is C or S
  MOD_RES (16)..(17)..(18)..(19)..(20): Xaa is A or G
  MOD_RES (21)..(22)..(23)..(24): Xaa is A or G or is absent
RXGXAEVVMDYHYKLXXXXXXXXXKYLISIPSLRAPVXXS

SEQ ID NO: 26543 - protein, 38 aa, Artificial Sequence; identical to SEQ ID NO: 5416
  GFR-binding peptide
  MOD_RES (2)..(36)..(37): Xaa is C or S
  MOD_RES (14)..(15)..(16)..(17)..(18): Xaa is A or G
  MOD_RES (19)..(20)..(21)..(22): Xaa is A or G or is absent

SEQ ID NO: 26544 - protein, 42 aa, Artificial Sequence
  GFR-binding peptide
  MOD_RES (2)..(36)..(37): Xaa is C or S
  MOD_RES (14)..(15)..(16)..(17)..(18): Xaa is A or G
  MOD_RES (19)..(20)..(21)..(22): Xaa is A or G or is absent
GXESVAMGRYKKLXXXXXXXXXFYLISIANLKTPVXXAKSAK

SEQ ID NO: 26545 - protein, 35 aa, Artificial Sequence
  GFR-binding peptide
  MOD_RES (33)..(34): Xaa is C or S
  MOD_RES (11)..(12)..(13)..(14)..(15): Xaa is A or G
  MOD_RES (16)..(17)..(18)..(19): Xaa is A or G or is absent
SVAMGYHYKLXXXXXXXXXKYLISIPSLKTPVXXA

SEQ ID NO: 26546 - protein, 36 aa, Artificial Sequence; identical to SEQ ID NO: 5418
  GFR-binding peptide
  MOD_RES (1)..(3)..(36): Xaa is C or S
  MOD_RES (14)..(15)..(16)..(17)..(18): Xaa is A or G
  MOD_RES (19)..(20)..(21)..(22): Xaa is A or G or is absent

SEQ ID NO: 26547 - protein, 37 aa, Artificial Sequence
  GFR-binding peptide
  MOD_RES (2)..(4): Xaa is C or S
  MOD_RES (16)..(17)..(18)..(19)..(20): Xaa is A or G
  MOD_RES (21)..(22)..(23)..(24): Xaa is A or G or is absent
RXGXESVAMGEYQKYXXXXXXXXXIYLISIPSLKTPV

SEQ ID NO: 26548 - protein, 35 aa, Artificial Sequence
  GFR-binding peptide
  MOD_RES (34)..(35): Xaa is C or S
  MOD_RES (12)..(13)..(14)..(15)..(16): Xaa is A or G
  MOD_RES (17)..(18)..(19)..(20): Xaa is A or G or is absent
GEVVMEEYKFKXXXXXXXXXLYLMSIPELETPVXX

SEQ ID NO: 26549 - protein, 35 aa, Artificial Sequence
  GFR-binding peptide
  MOD_RES (2)..(4)..(35): Xaa is C or S
SXKXSKVVMEYKFKVKPTRGVLYLISIPELDQPVX

SEQ ID NO: 26550 - protein, 31 aa, Artificial Sequence; identical to SEQ ID NO: 5422
  GFR-binding peptide
  MOD_RES (31)..(31): Xaa is C or S

SEQ ID NO: 26551 - protein, 32 aa, Artificial Sequence
  GFR-binding peptide
  MOD_RES (11)..(12)..(13)..(14)..(15): Xaa is A or G
  MOD_RES (16)..(17)..(18)..(19): Xaa is A or G or is absent
EVVMDEYQKYXXXXXXXXXIYLMSIPSLETPV

SEQ ID NO: 26552 - protein, 39 aa, Artificial Sequence; identical to SEQ ID NO: 5430
  GFR-binding peptide
  MOD_RES (1)..(3)..(35)..(36): Xaa is C or S

SEQ ID NO: 26553 - protein, 40 aa, Artificial Sequence
  GFR-binding peptide
  MOD_RES (2)..(35)..(36): Xaa is C or S
GXEAVSMGEEYKFKTPVGMDDLYLVSIPELKTPVXXAKGV

SEQ ID NO: 26554 - protein, 43 aa, Artificial Sequence
  GFR-binding peptide
  MOD_RES (1)..(3)..(37)..(38): Xaa is C or S
  MOD_RES (15)..(16)..(17)..(18)..(19): Xaa is A or G
  MOD_RES (20)..(21)..(22)..(23): Xaa is A or G or is absent
XGXESVAMGRYKKLXXXXXXXXXFYLISIANLKTPVXXAKSAK

SEQ ID NO: 26555 - protein, 33 aa, Artificial Sequence; identical to SEQ ID NO: 5433
  GFR-binding peptide
  MOD_RES (33)..(33): Xaa is C or S
  MOD_RES (11)..(12)..(13)..(14)..(15): Xaa is A or G
  MOD_RES (16)..(17)..(18)..(19): Xaa is A or G or is absent

SEQ ID NO: 26556 - protein, 37 aa, Artificial Sequence
  GFR-binding peptide
  MOD_RES (2)..(33)..(34): Xaa is C or S
KXSKVIMEYQKYIKPTKGIIYLISIPSLDQSVXXPSA

SEQ ID NO: 26557 - protein, 33 aa, Artificial Sequence; identical to SEQ ID NO: 5437
  GFR-binding peptide
  MOD_RES (33)..(33): Xaa is C or S
  MOD_RES (11)..(12)..(13)..(14)..(15): Xaa is A or G
  MOD_RES (16)..(17)..(18)..(19): Xaa is A or G or is absent

SEQ ID NO: 26558 - protein, 33 aa, Artificial Sequence
  GFR-binding peptide
  MOD_RES (33)..(33): Xaa is C or S
  MOD_RES (11)..(12)..(13)..(14)..(15): Xaa is A or G
  MOD_RES (16)..(17)..(18)..(19): Xaa is A or G or is absent
EVVMDEYQKYXXXXXXXXXIYLMSIPSLETPVX

SEQ ID NO: 26559 - protein, 39 aa, Artificial Sequence
  GFR-binding peptide
  MOD_RES (1)..(33)..(34): Xaa is C or S
XESVAMGEYQKYYTVVGKDIYLISIPSLKTPVXXAKSAK

SEQ ID NO: 26560 - protein, 41 aa, Artificial Sequence
  GFR-binding peptide
  MOD_RES (1)..(3)..(37)..(38): Xaa is C or S
  MOD_RES (15)..(16)..(17)..(18)..(19): Xaa is A or G
  MOD_RES (20)..(21)..(22)..(23): Xaa is A or G or is absent
XGXGEVVMEEYKFKXXXXXXXXXLYLMSIPELETPVXXAKP

SEQ ID NO: 26561 - protein, 40 aa, Artificial Sequence; identical to SEQ ID NO: 5446
  GFR-binding peptide
  MOD_RES (1)..(34)..(35): Xaa is C or S
  MOD_RES (12)..(13)..(14)..(15)..(16): Xaa is A or G
  MOD_RES (17)..(18)..(19)..(20): Xaa is A or G or is absent

SEQ ID NO: 26562 - protein, 35 aa, Artificial Sequence; identical to SEQ ID NO: 5448
  GFR-binding peptide
  MOD_RES (1)..(3): Xaa is C or S
  MOD_RES (14)..(15)..(16)..(17)..(18): Xaa is A or G
  MOD_RES (19)..(20)..(21)..(22): Xaa is A or G or is absent

SEQ ID NO: 26563 - protein, 34 aa, Artificial Sequence; identical to SEQ ID NO: 5449
  GFR-binding peptide
  MOD_RES (2)..(34): Xaa is C or S

SEQ ID NO: 26564 - protein, 33 aa, Artificial Sequence
  GFR-binding peptide
  MOD_RES (31)..(31): Xaa is C or S
RVVMNEYQKYIVNSSDDIYLVSIPSLKTPAXTP

SEQ ID NO: 26565 - protein, 39 aa, Artificial Sequence
  GFR-binding peptide
  MOD_RES (33)..(34): Xaa is C or S
  MOD_RES (11)..(12)..(13)..(14)..(15): Xaa is A or G
  MOD_RES (16)..(17)..(18)..(19): Xaa is A or G or is absent
EVVMEEYKFKXXXXXXXXXLYLMSIPELETPVXXAKPIS

SEQ ID NO: 26566 - protein, 33 aa, Artificial Sequence; identical to SEQ ID NO: 5451
  GFR-binding peptide
  MOD_RES (12)..(13)..(14)..(15)..(16): Xaa is A or G
  MOD_RES (17)..(18)..(19)..(20): Xaa is A or G or is absent

SEQ ID NO: 26567 - protein, 43 aa, Artificial Sequence
  GFR-binding peptide
  MOD_RES (1)..(3)..(37)..(38): Xaa is C or S
  MOD_RES (15)..(16)..(17)..(18)..(19): Xaa is A or G
  MOD_RES (20)..(21)..(22)..(23): Xaa is A or G or is absent
XGXGEVVMEEYQKYXXXXXXXXXIYLMSIPSLETPVXXAKPIS

SEQ ID NO: 26568 - protein, 39 aa, Artificial Sequence
  GFR-binding peptide
  MOD_RES (2)..(34)..(35): Xaa is C or S
GXGEVVMEEYKFKVVKDYEDLYLMSIPELETPVXXAKPI

SEQ ID NO: 26569 - protein, 31 aa, Artificial Sequence; identical to SEQ ID NO: 5457
  GFR-binding peptide
  MOD_RES (1)..(1): Xaa is C or S

SEQ ID NO: 26570 - protein, 37 aa, Artificial Sequence
  GFR-binding peptide
  MOD_RES (2)..(4)..(36): Xaa is C or S
HXGXSRVVMNEYKFKIVNSSDDLYLVSIPELKTPAXT

SEQ ID NO: 26571 - protein, 36 aa, Artificial Sequence
  GFR-binding peptide
  MOD_RES (2)..(36): Xaa is C or S
  MOD_RES (14)..(15)..(16)..(17)..(18): Xaa is A or G
  MOD_RES (19)..(20)..(21)..(22): Xaa is A or G or is absent
GXARVVMNEYKFKXXXXXXXXXLYLVSIPELQTPAX

SEQ ID NO: 26572 - protein, 39 aa, Artificial Sequence
  GFR-binding peptide
  MOD_RES (2)..(4)..(36)..(37): Xaa is C or S
RXGXGEVVMDEYQKYVVKENEDIYLMSIPSLETPVXXAK

SEQ ID NO: 26573 - protein, 38 aa, Artificial Sequence
  GFR-binding peptide
  MOD_RES (2)..(4)..(36)..(37): Xaa is C or S
HXGXAKVVMNEYQKYIVNNSSDIYLVSIPSLKTPAXXA

SEQ ID NO: 26574 - protein, 35 aa, Artificial Sequence
  GFR-binding peptide
  MOD_RES (32)..(33): Xaa is C or S
ARVVMNEYKFKIVNSSDDLYLVSIPELQTPAXXPK

SEQ ID NO: 26575 - protein, 35 aa, Artificial Sequence
  GFR-binding peptide
  MOD_RES (31)..(32): Xaa is C or S
SVAMGEYKFKYTVVGKDLYLISIPELKTPVXXAKS

SEQ ID NO: 26576 - protein, 36 aa, Artificial Sequence
  GFR-binding peptide
  MOD_RES (33)..(33): Xaa is C or S
  MOD_RES (11)..(12)..(13)..(14)..(15): Xaa is A or G
  MOD_RES (16)..(17)..(18)..(19): Xaa is A or G or is absent
RVVMNEYQKYXXXXXXXXXIYLVSIPSLKTPAXTPK

SEQ ID NO: 26577 - protein, 33 aa, Artificial Sequence
  GFR-binding peptide
  MOD_RES (1)..(1): Xaa is C or S
  MOD_RES (12)..(13)..(14)..(15)..(16): Xaa is A or G
  MOD_RES (17)..(18)..(19)..(20): Xaa is A or G or is absent
XSKVIMEYQKYXXXXXXXXXIYLISIPSLDQSV

SEQ ID NO: 26578 - protein, 34 aa, Artificial Sequence
  GFR-binding peptide
  MOD_RES (1)..(33)..(34): Xaa is C or S
XAKVVMNEYKFKIVNNSSDLYLVSIPELKTPAXX

SEQ ID NO: 26579 - protein, 43 aa, Artificial Sequence; identical to SEQ ID NO: 5466
  GFR-binding peptide
  MOD_RES (2)..(4)..(37)..(38): Xaa is C or S
  MOD_RES (15)..(16)..(17)..(18)..(19): Xaa is A or G
  MOD_RES (20)..(21)..(22)..(23): Xaa is A or G or is absent

SEQ ID NO: 26580 - protein, 41 aa, Artificial Sequence; identical to SEQ ID NO: 5467
  GFR-binding peptide
  MOD_RES (2)..(35)..(36): Xaa is C or S
  MOD_RES (13)..(14)..(15)..(16)..(17): Xaa is A or G
  MOD_RES (18)..(19)..(20)..(21): Xaa is A or G or is absent

SEQ ID NO: 26581 - protein, 31 aa, Artificial Sequence; identical to SEQ ID NO: 5468
  GFR-binding peptide
  MOD_RES (31)..(31): Xaa is C or S

SEQ ID NO: 26582 - protein, 36 aa, Artificial Sequence
  GFR-binding peptide
  MOD_RES (1)..(35)..(36): Xaa is C or S
  MOD_RES (13)..(14)..(15)..(16)..(17): Xaa is A or G
  MOD_RES (18)..(19)..(20)..(21): Xaa is A or G or is absent
XAEVVMDEYKFKXXXXXXXXXLYLISIPELRAPVXX

SEQ ID NO: 26583 - protein, 37 aa, Artificial Sequence
  GFR-binding peptide
  MOD_RES (32)..(32): Xaa is C or S
SRVVMNEYKFKIVNSSDDLYLVSIPELKTPAXTPKTV

SEQ ID NO: 26584 - protein, 39 aa, Artificial Sequence; identical to SEQ ID NO: 5471
  GFR-binding peptide
  MOD_RES (1)..(36)..(37): Xaa is C or S
  MOD_RES (14)..(15)..(16)..(17)..(18): Xaa is A or G
  MOD_RES (19)..(20)..(21)..(22): Xaa is A or G or is absent

SEQ ID NO: 26585 - protein, 34 aa, Artificial Sequence
  GFR-binding peptide
  MOD_RES (33)..(34): Xaa is C or S
  MOD_RES (11)..(12)..(13)..(14)..(15): Xaa is A or G
  MOD_RES (16)..(17)..(18)..(19): Xaa is A or G or is absent
SVAMGRYKKLXXXXXXXXXFYLISIANLKTPVXX

SEQ ID NO: 26586 - protein, 34 aa, Artificial Sequence
  GFR-binding peptide
  MOD_RES (1)..(1): Xaa is C or S
  MOD_RES (13)..(14)..(15)..(16)..(17): Xaa is A or G
  MOD_RES (18)..(19)..(20)..(21): Xaa is A or G or is absent
XAKVVMNEYQKYXXXXXXXXXIYLVSIPSLKTPA

SEQ ID NO: 26587 - protein, 35 aa, Artificial Sequence
  GFR-binding peptide
  MOD_RES (32)..(33): Xaa is C or S
AKVVMNEYKFKIVNNSSDLYLVSIPELKTPAXXAK

SEQ ID NO: 26588 - protein, 44 aa, Artificial Sequence; identical to SEQ ID NO: 5477
  GFR-binding peptide
  MOD_RES (2)..(4)..(38)..(39): Xaa is C or S
  MOD_RES (16)..(17)..(18)..(19)..(20): Xaa is A or G
  MOD_RES (21)..(22)..(23)..(24): Xaa is A or G or is absent

SEQ ID NO: 26589 - protein, 39 aa, Artificial Sequence
  GFR-binding peptide
  MOD_RES (1)..(3)..(37)..(38): Xaa is C or S
  MOD_RES (15)..(16)..(17)..(18)..(19): Xaa is A or G
  MOD_RES (20)..(21)..(22)..(23): Xaa is A or G or is absent
XGXAEVVMDEYKFKXXXXXXXXXLYLISIPELRAPVXXS

SEQ ID NO: 26590 - protein, 40 aa, Artificial Sequence
  GFR-binding peptide
  MOD_RES (2)..(36)..(37): Xaa is C or S
  MOD_RES (14)..(15)..(16)..(17)..(18): Xaa is A or G
  MOD_RES (19)..(20)..(21)..(22): Xaa is A or G or is absent
GXGEVVMDEYKFKXXXXXXXXXLYLMSIPELETPVXXAKP

SEQ ID NO: 26591 - protein, 34 aa, Artificial Sequence; identical to SEQ ID NO: 5483
  GFR-binding peptide
  MOD_RES (2)..(34): Xaa is C or S

SEQ ID NO: 26592 - protein, 39 aa, Artificial Sequence; identical to SEQ ID NO: 5484
  GFR-binding peptide
  MOD_RES (2)..(35)..(36): Xaa is C or S
  MOD_RES (13)..(14)..(15)..(16)..(17): Xaa is A or G
  MOD_RES (18)..(19)..(20)..(21): Xaa is A or G or is absent

SEQ ID NO: 26593 - protein, 36 aa, Artificial Sequence
  GFR-binding peptide
  MOD_RES (31)..(32): Xaa is C or S
EVVMEEYKFKVVKDYEDLYLMSIPELETPVXXAKPI

SEQ ID NO: 26594 - protein, 36 aa, Artificial Sequence
  GFR-binding peptide
  MOD_RES (1)..(3): Xaa is C or S
  MOD_RES (15)..(16)..(17)..(18)..(19): Xaa is A or G
  MOD_RES (20)..(21)..(22)..(23): Xaa is A or G or is absent
XGXGEVVMEEYQKYXXXXXXXXXIYLMSIPSLETPV

SEQ ID NO: 26595 - protein, 36 aa, Artificial Sequence; identical to SEQ ID NO: 5489
  GFR-binding peptide
  MOD_RES (31)..(32): Xaa is C or S

SEQ ID NO: 26596 - protein, 38 aa, Artificial Sequence
  GFR-binding peptide
  MOD_RES (1)..(33)..(34): Xaa is C or S
XESVAMGRYKKLYTVVGKDFYLISIANLKTPVXXAKSA

SEQ ID NO: 26597 - protein, 37 aa, Artificial Sequence
  GFR-binding peptide
  MOD_RES (1)..(33)..(34): Xaa is C or S
XGEVVMEEYQKYVVKDYEDIYLMSIPSLETPVXXAKP

SEQ ID NO: 26598 - protein, 34 aa, Artificial Sequence; identical to SEQ ID NO: 5493
  GFR-binding peptide
  MOD_RES (1)..(3): Xaa is C or S

SEQ ID NO: 26599 - protein, 34 aa, Artificial Sequence
  GFR-binding peptide
  MOD_RES (1)..(3): Xaa is C or S
XGXESVAMGRYKKLYTVVGKDFYLISIANLKTPV

SEQ ID NO: 26600 - protein, 41 aa, Artificial Sequence
  GFR-binding peptide
  MOD_RES (1)..(3)..(37)..(38): Xaa is C or S
  MOD_RES (15)..(16)..(17)..(18)..(19): Xaa is A or G
  MOD_RES (20)..(21)..(22)..(23): Xaa is A or G or is absent
XGXGEVVMEEYQKYXXXXXXXXXIYLMSIPSLETPVXXAKP

SEQ ID NO: 26601 - protein, 35 aa, Artificial Sequence
  GFR-binding peptide
  MOD_RES (1)..(32)..(33): Xaa is C or S
XSRVIMEYQKYVKPKRGVIYLISIPSLAQPVXXPA

SEQ ID NO: 26602 - protein, 39 aa, Artificial Sequence; identical to SEQ ID NO: 5501
  GFR-binding peptide
  MOD_RES (1)..(35)..(36): Xaa is C or S
  MOD_RES (13)..(14)..(15)..(16)..(17): Xaa is A or G
  MOD_RES (18)..(19)..(20)..(21): Xaa is A or G or is absent

SEQ ID NO: 26603 - protein, 38 aa, Artificial Sequence
  GFR-binding peptide
  MOD_RES (1)..(33)..(34): Xaa is C or S
XAEVVMDEYQKYVVNNAADIYLISIPSLRAPVXXSAPA

SEQ ID NO: 26604 - protein, 44 aa, Artificial Sequence
  GFR-binding peptide
  MOD_RES (2)..(4)..(39)..(40): Xaa is C or S
  MOD_RES (17)..(18)..(19)..(20)..(21): Xaa is A or G
  MOD_RES (22)..(23)..(24)..(25): Xaa is A or G or is absent
RXGXEAVSMGEEYQKYXXXXXXXXXIYLVSIPSLKTPVXXAKGV

SEQ ID NO: 26605 - protein, 34 aa, Artificial Sequence
  GFR-binding peptide
  MOD_RES (2)..(34): Xaa is C or S
GXSRVVMNEYKFKIVNSSDDLYLVSIPELKTPAX

SEQ ID NO: 26606 - protein, 40 aa, Artificial Sequence; identical to SEQ ID NO: 5502
  GFR-binding peptide
  MOD_RES (1)..(3)..(38)..(39): Xaa is C or S
  MOD_RES (16)..(17)..(18)..(19)..(20): Xaa is A or G
  MOD_RES (21)..(22)..(23)..(24): Xaa is A or G or is absent

SEQ ID NO: 26607 - protein, 35 aa, Artificial Sequence; identical to SEQ ID NO: 5503
  GFR-binding peptide
  MOD_RES (2)..(2): Xaa is C or S
  MOD_RES (14)..(15)..(16)..(17)..(18): Xaa is A or G
  MOD_RES (19)..(20)..(21)..(22): Xaa is A or G or is absent

SEQ ID NO: 26608 - protein, 37 aa, Artificial Sequence; identical to SEQ ID NO: 5504
  GFR-binding peptide
  MOD_RES (1)..(33)..(34): Xaa is C or S

SEQ ID NO: 26609 - protein, 34 aa, Artificial Sequence
  GFR-binding peptide
  MOD_RES (1)..(32)..(33): Xaa is C or S
XSKVVMEYKFKVKPTRGVLYLISIPELDQPVXXP

SEQ ID NO: 26610 - protein, 38 aa, Artificial Sequence
  GFR-binding peptide
  MOD_RES (2)..(4)..(37)..(38): Xaa is C or S
  MOD_RES (15)..(16)..(17)..(18)..(19): Xaa is A or G
  MOD_RES (20)..(21)..(22)..(23): Xaa is A or G or is absent
SXKXSKVVMEYKFKXXXXXXXXXLYLISIPELDQPVXX

SEQ ID NO: 26611 - protein, 40 aa, Artificial Sequence; identical to SEQ ID NO: 5507
  GFR-binding peptide
  MOD_RES (1)..(3)..(36)..(37): Xaa is C or S
  MOD_RES (14)..(15)..(16)..(17)..(18): Xaa is A or G
  MOD_RES (19)..(20)..(21)..(22): Xaa is A or G or is absent

SEQ ID NO: 26612 - protein, 36 aa, Artificial Sequence
  GFR-binding peptide
  MOD_RES (2)..(36): Xaa is C or S
  MOD_RES (14)..(15)..(16)..(17)..(18): Xaa is A or G
  MOD_RES (19)..(20)..(21)..(22): Xaa is A or G or is absent
GXAEVVMDEYQKYXXXXXXXXXIYLISIPSLRAPVX

SEQ ID NO: 26613 - protein, 37 aa, Artificial Sequence
  GFR-binding peptide
  MOD_RES (34)..(34): Xaa is C or S
  MOD_RES (12)..(13)..(14)..(15)..(16): Xaa is A or G
  MOD_RES (17)..(18)..(19)..(20): Xaa is A or G or is absent
SRVVMNEYKFKXXXXXXXXXLYLVSIPELKTPAXTPK

SEQ ID NO: 26614 - protein, 42 aa, Artificial Sequence
  GFR-binding peptide
  MOD_RES (2)..(4)..(38)..(39): Xaa is C or S
  MOD_RES (16)..(17)..(18)..(19)..(20): Xaa is A or G
  MOD_RES (21)..(22)..(23)..(24): Xaa is A or G or is absent
RXGXGEVVMDEYQKYXXXXXXXXXIYLMSIPSLETPVXXAKP

SEQ ID NO: 26615 - protein, 41 aa, Artificial Sequence; identical to SEQ ID NO: 5509
  GFR-binding peptide
  MOD_RES (1)..(35)..(36): Xaa is C or S
  MOD_RES (13)..(14)..(15)..(16)..(17): Xaa is A or G
  MOD_RES (18)..(19)..(20)..(21): Xaa is A or G or is absent

SEQ ID NO: 26616 - protein, 36 aa, Artificial Sequence
  GFR-binding peptide
  MOD_RES (1)..(33)..(34): Xaa is C or S
XESVAMGRYKKLYTVVGKDFYLISIANLKTPVXXAK

SEQ ID NO: 26617 - protein, 38 aa, Artificial Sequence
  GFR-binding peptide
  MOD_RES (35)..(36): Xaa is C or S
  MOD_RES (13)..(14)..(15)..(16)..(17): Xaa is A or G
  MOD_RES (18)..(19)..(20)..(21): Xaa is A or G or is absent
EAVSMGEEYKFKXXXXXXXXXLYLVSIPELKTPVXXAK

SEQ ID NO: 26618 - protein, 34 aa, Artificial Sequence; identical to SEQ ID NO: 5510
  GFR-binding peptide
  MOD_RES (32)..(33): Xaa is C or S

SEQ ID NO: 26619 - protein, 38 aa, Artificial Sequence
  GFR-binding peptide
  MOD_RES (1)..(35): Xaa is C or S
  MOD_RES (13)..(14)..(15)..(16)..(17): Xaa is A or G
  MOD_RES (18)..(19)..(20)..(21): Xaa is A or G or is absent
XSRVVMNEYKFKXXXXXXXXXLYLVSIPELKTPAXTPK

SEQ ID NO: 26620 - protein, 35 aa, Artificial Sequence; identical to SEQ ID NO: 5512
  GFR-binding peptide
  MOD_RES (2)..(4): Xaa is C or S

SEQ ID NO: 26621 - protein, 33 aa, Artificial Sequence
  GFR-binding peptide
  MOD_RES (31)..(32): Xaa is C or S
SVAMGYHYKLYTVVGKDKYLISIPSLKTPVXXA

SEQ ID NO: 26622 - protein, 42 aa, Artificial Sequence; identical to SEQ ID NO: 5516
  GFR-binding peptide
  MOD_RES (2)..(36)..(37): Xaa is C or S
  MOD_RES (14)..(15)..(16)..(17)..(18): Xaa is A or G
  MOD_RES (19)..(20)..(21)..(22): Xaa is A or G or is absent

SEQ ID NO: 26623 - protein, 36 aa, Artificial Sequence
  GFR-binding peptide
  MOD_RES (1)..(3)..(35)..(36): Xaa is C or S
XGXGEVVMDEYQKYVVKENEDIYLMSIPSLETPVXX

SEQ ID NO: 26624 - protein, 33 aa, Artificial Sequence
  GFR-binding peptide
  MOD_RES (1)..(33): Xaa is C or S
XAEVVMDEYKFKVVNNAADLYLISIPELRAPVX

SEQ ID NO: 26625 - protein, 32 aa, Artificial Sequence; identical to SEQ ID NO: 5517
  GFR-binding peptide
  MOD_RES (31)..(32): Xaa is C or S

SEQ ID NO: 26626 - protein, 33 aa, Artificial Sequence
  GFR-binding peptide
  MOD_RES (1)..(1): Xaa is C or S
  MOD_RES (12)..(13)..(14)..(15)..(16): Xaa is A or G
  MOD_RES (17)..(18)..(19)..(20): Xaa is A or G or is absent
XSKVVMEYQKYXXXXXXXXXIYLISIPSLDQPV

SEQ ID NO: 26627 - protein, 43 aa, Artificial Sequence
  GFR-binding peptide
  MOD_RES (2)..(4)..(38)..(39): Xaa is C or S
  MOD_RES (16)..(17)..(18)..(19)..(20): Xaa is A or G
  MOD_RES (21)..(22)..(23)..(24): Xaa is A or G or is absent
RXGXGEVVMEEYKFKXXXXXXXXXLYLMSIPELETPVXXAKPI

SEQ ID NO: 26628 - protein, 38 aa, Artificial Sequence
  GFR-binding peptide
  MOD_RES (1)..(33)..(34): Xaa is C or S
XARVVMNEYQKYIVNSSDDIYLVSIPSLQTPAXXPKPV

SEQ ID NO: 26629 - protein, 32 aa, Artificial Sequence
  GFR-binding peptide
  MOD_RES (11)..(12)..(13)..(14)..(15): Xaa is A or G
  MOD_RES (16)..(17)..(18)..(19): Xaa is A or G or is absent
RVVMNEYKFKXXXXXXXXXLYLVSIPELKTPA

SEQ ID NO: 26630 - protein, 39 aa, Artificial Sequence; identical to SEQ ID NO: 5522
  GFR-binding peptide
  MOD_RES (1)..(3)..(36)..(37): Xaa is C or S

SEQ ID NO: 26631 - protein, 38 aa, Artificial Sequence
  GFR-binding peptide
  MOD_RES (2)..(35)..(36): Xaa is C or S
GXEAVSMGEEYKFKTPVGMDDLYLVSIPELKTPVXXAK

SEQ ID NO: 26632 - protein, 32 aa, Artificial Sequence
  GFR-binding peptide
  MOD_RES (11)..(12)..(13)..(14)..(15): Xaa is A or G
  MOD_RES (16)..(17)..(18)..(19): Xaa is A or G or is absent
KVVMNEYKFKXXXXXXXXXLYLVSIPELKTPA

SEQ ID NO: 26633 - protein, 34 aa, Artificial Sequence
  GFR-binding peptide
  MOD_RES (1)..(33)..(34): Xaa is C or S
XESVAMGEYQKYYTVVGKDIYLISIPSLKTPVXX

SEQ ID NO: 26634 - protein, 31 aa, Artificial Sequence
  GFR-binding peptide
  MOD_RES (31)..(31): Xaa is C or S
SRVIMEYKFKVKPKRGVLYLISIPELAQPVX

SEQ ID NO: 26635 - protein, 36 aa, Artificial Sequence
  GFR-binding peptide
  MOD_RES (1)..(3)..(34)..(35): Xaa is C or S
XKXSRVIMEYKFKVKPKRGVLYLISIPELAQPVXXP

SEQ ID NO: 26636 - protein, 38 aa, Artificial Sequence
  GFR-binding peptide
  MOD_RES (2)..(36)..(37): Xaa is C or S
  MOD_RES (14)..(15)..(16)..(17)..(18): Xaa is A or G
  MOD_RES (19)..(20)..(21)..(22): Xaa is A or G or is absent
GXARVVMNEYQKYXXXXXXXXXIYLVSIPSLQTPAXXP

SEQ ID NO: 26637 - protein, 42 aa, Artificial Sequence
  GFR-binding peptide
  MOD_RES (2)..(36): Xaa is C or S
  MOD_RES (14)..(15)..(16)..(17)..(18): Xaa is A or G
  MOD_RES (19)..(20)..(21)..(22): Xaa is A or G or is absent
GXSRVVMNEYKFKXXXXXXXXXLYLVSIPELKTPAXTPKTVH

SEQ ID NO: 26638 - protein, 31 aa, Artificial Sequence
  GFR-binding peptide
  MOD_RES (1)..(1): Xaa is C or S
XSRVIMEYKFKVKPKRGVLYLISIPELAQPV

SEQ ID NO: 26639 - protein, 32 aa, Artificial Sequence; identical to SEQ ID NO: 5528
  GFR-binding peptide
  MOD_RES (31)..(32): Xaa is C or S

SEQ ID NO: 26640 - protein, 33 aa, Artificial Sequence
  GFR-binding peptide
  MOD_RES (1)..(32)..(33): Xaa is C or S
XSRVIMEYKFKVKPKRGVLYLISIPELAQPVXX

SEQ ID NO: 26641 - protein, 37 aa, Artificial Sequence
  GFR-binding peptide
  MOD_RES (33)..(34): Xaa is C or S
  MOD_RES (11)..(12)..(13)..(14)..(15): Xaa is A or G
  MOD_RES (16)..(17)..(18)..(19): Xaa is A or G or is absent
SVAMGEYQKYXXXXXXXXXIYLISIPSLKTPVXXAKS

SEQ ID NO: 26642 - protein, 39 aa, Artificial Sequence
  GFR-binding peptide
  MOD_RES (33)..(34): Xaa is C or S
  MOD_RES (11)..(12)..(13)..(14)..(15): Xaa is A or G
  MOD_RES (16)..(17)..(18)..(19): Xaa is A or G or is absent
SVAMGRYKKLXXXXXXXXXFYLISIANLKTPVXXAKSAK

SEQ ID NO: 26643 - protein, 38 aa, Artificial Sequence
  GFR-binding peptide
  MOD_RES (33)..(34): Xaa is C or S
  MOD_RES (11)..(12)..(13)..(14)..(15): Xaa is A or G
  MOD_RES (16)..(17)..(18)..(19): Xaa is A or G or is absent
RVVMNEYKFKXXXXXXXXXLYLVSIPELKTPAXXPKPV

SEQ ID NO: 26644 - protein, 41 aa, Artificial Sequence
  GFR-binding peptide
  MOD_RES (2)..(37)..(38): Xaa is C or S
  MOD_RES (15)..(16)..(17)..(18)..(19): Xaa is A or G
  MOD_RES (20)..(21)..(22)..(23): Xaa is A or G or is absent
GXEAVSMGEEYQKYXXXXXXXXXIYLVSIPSLKTPVXXAKG

SEQ ID NO: 26645 - protein, 32 aa, Artificial Sequence; identical to SEQ ID NO: 5533
  GFR-binding peptide
  MOD_RES (1)..(32): Xaa is C or S

SEQ ID NO: 26646 - protein, 43 aa, Artificial Sequence
  GFR-binding peptide
  MOD_RES (2)..(4)..(37)..(38): Xaa is C or S
  MOD_RES (15)..(16)..(17)..(18)..(19): Xaa is A or G
  MOD_RES (20)..(21)..(22)..(23): Xaa is A or G or is absent
SXKXSKVIMEYKFKXXXXXXXXXLYLISIPELDQSVXXPSASA

SEQ ID NO: 26647 - protein, 41 aa, Artificial Sequence
  GFR-binding peptide
  MOD_RES (2)..(4)..(37)..(38): Xaa is C or S
  MOD_RES (15)..(16)..(17)..(18)..(19): Xaa is A or G
  MOD_RES (20)..(21)..(22)..(23): Xaa is A or G or is absent
SXKXSKVVMEYKFKXXXXXXXXXLYLISIPELDQPVXXPSA

SEQ ID NO: 26648 - protein, 38 aa, Artificial Sequence
  GFR-binding peptide
  MOD_RES (34)..(35): Xaa is C or S
  MOD_RES (12)..(13)..(14)..(15)..(16): Xaa is A or G
  MOD_RES (17)..(18)..(19)..(20): Xaa is A or G or is absent
SRVVMNEYKFKXXXXXXXXXLYLVSIPELKTPAXXPKP

SEQ ID NO: 26649 - protein, 35 aa, Artificial Sequence
  GFR-binding peptide
  MOD_RES (33)..(34): Xaa is C or S
  MOD_RES (11)..(12)..(13)..(14)..(15): Xaa is A or G
  MOD_RES (16)..(17)..(18)..(19): Xaa is A or G or is absent
SKVIMEYKFKXXXXXXXXXLYLISIPELDQSVXXP

SEQ ID NO: 26650 - protein, 35 aa, Artificial Sequence; identical to SEQ ID NO: 5540
  GFR-binding peptide
  MOD_RES (2)..(2): Xaa is C or S
  MOD_RES (14)..(15)..(16)..(17)..(18): Xaa is A or G
  MOD_RES (19)..(20)..(21)..(22): Xaa is A or G or is absent

SEQ ID NO: 26651 - protein, 39 aa, Artificial Sequence
  GFR-binding peptide
  MOD_RES (33)..(34): Xaa is C or S
  MOD_RES (11)..(12)..(13)..(14)..(15): Xaa is A or G
  MOD_RES (16)..(17)..(18)..(19): Xaa is A or G or is absent
SVAMGEYKFKXXXXXXXXXLYLISIPELKTPVXXAKSAK

SEQ ID NO: 26652 - protein, 35 aa, Artificial Sequence; identical to SEQ ID NO: 5542
  GFR-binding peptide
  MOD_RES (31)..(32): Xaa is C or S

SEQ ID NO: 26653 - protein, 39 aa, Artificial Sequence
  GFR-binding peptide
  MOD_RES (2)..(4)..(36)..(37): Xaa is C or S
RXGXGEVVMDEYKFKVVKENEDLYLMSIPELETPVXXAK

SEQ ID NO: 26654 - protein, 43 aa, Artificial Sequence
  GFR-binding peptide
  MOD_RES (2)..(4)..(38)..(39): Xaa is C or S
  MOD_RES (16)..(17)..(18)..(19)..(20): Xaa is A or G
  MOD_RES (21)..(22)..(23)..(24): Xaa is A or G or is absent
HXGXARVVMNEYQKYXXXXXXXXXIYLVSIPSLQTPAXXPKPV

SEQ ID NO: 26655 - protein, 34 aa, Artificial Sequence
  GFR-binding peptide
  MOD_RES (1)..(3)..(34): Xaa is C or S
XKXSKVIMEYQKYIKPTKGIIYLISIPSLDQSVX

SEQ ID NO: 26656 - protein, 34 aa, Artificial Sequence
  GFR-binding peptide
  MOD_RES (1)..(3): Xaa is C or S
XGXAKVVMNEYKFKIVNNSSDLYLVSIPELKTPA

SEQ ID NO: 26657 - protein, 40 aa, Artificial Sequence; identical to SEQ ID NO: 5544
  GFR-binding peptide
  MOD_RES (1)..(3)..(37)..(38): Xaa is C or S
  MOD_RES (15)..(16)..(17)..(18)..(19): Xaa is A or G
  MOD_RES (20)..(21)..(22)..(23): Xaa is A or G or is absent

SEQ ID NO: 26658 - protein, 35 aa, Artificial Sequence; identical to SEQ ID NO: 5545
  GFR-binding peptide
  MOD_RES (33)..(34): Xaa is C or S
  MOD_RES (11)..(12)..(13)..(14)..(15): Xaa is A or G
  MOD_RES (16)..(17)..(18)..(19): Xaa is A or G or is absent

SEQ ID NO: 26659 - protein, 38 aa, Artificial Sequence
  GFR-binding peptide
  MOD_RES (33)..(34): Xaa is C or S
  MOD_RES (11)..(12)..(13)..(14)..(15): Xaa is A or G
  MOD_RES (16)..(17)..(18)..(19): Xaa is A or G or is absent
EVVMDEYKFKXXXXXXXXXLYLMSIPELETPVXXAKPI

SEQ ID NO: 26660 - protein, 39 aa, Artificial Sequence; identical to SEQ ID NO: 5549
  GFR-binding peptide
  MOD_RES (33)..(34): Xaa is C or S
  MOD_RES (11)..(12)..(13)..(14)..(15): Xaa is A or G
  MOD_RES (16)..(17)..(18)..(19): Xaa is A or G or is absent

SEQ ID NO: 26661 - protein, 41 aa, Artificial Sequence
  GFR-binding peptide
  MOD_RES (2)..(4)..(36)..(37): Xaa is C or S
RXGXGEVVMEEYQKYVVKDYEDIYLMSIPSLETPVXXAKPI

SEQ ID NO: 26662 - protein, 40 aa, Artificial Sequence
  GFR-binding peptide
  MOD_RES (2)..(35)..(36): Xaa is C or S
  MOD_RES (13)..(14)..(15)..(16)..(17): Xaa is A or G
  MOD_RES (18)..(19)..(20)..(21): Xaa is A or G or is absent
KXSKVVMEYKFKXXXXXXXXXLYLISIPELDQPVXXPSAS

SEQ ID NO: 26663 - protein, 34 aa, Artificial Sequence; identical to SEQ ID NO: 5551
  GFR-binding peptide
  MOD_RES (2)..(4): Xaa is C or S

SEQ ID NO: 26664 - protein, 41 aa, Artificial Sequence; identical to SEQ ID NO: 5552
  GFR-binding peptide
  MOD_RES (2)..(4)..(38): Xaa is C or S
  MOD_RES (16)..(17)..(18)..(19)..(20): Xaa is A or G
  MOD_RES (21)..(22)..(23)..(24): Xaa is A or G or is absent

SEQ ID NO: 26665 - protein, 36 aa, Artificial Sequence
  GFR-binding peptide
  MOD_RES (32)..(33): Xaa is C or S
AEVVMDRYKKLVVNNAADFYLISIANLRAPVXXSAP

SEQ ID NO: 26666 - protein, 37 aa, Artificial Sequence
  GFR-binding peptide
  MOD_RES (2)..(4): Xaa is C or S
  MOD_RES (16)..(17)..(18)..(19)..(20): Xaa is A or G
  MOD_RES (21)..(22)..(23)..(24): Xaa is A or G or is absent
RXGXAEVVMDRYKKLXXXXXXXXXFYLISIANLRAPV

SEQ ID NO: 26667 - protein, 40 aa, Artificial Sequence
  GFR-binding peptide
  MOD_RES (2)..(4)..(36)..(37): Xaa is C or S
RXGXGEVVMDEYQKYVVKENEDIYLMSIPSLETPVXXAKP

SEQ ID NO: 26668 - protein, 32 aa, Artificial Sequence
  GFR-binding peptide
  MOD_RES (32)..(32): Xaa is C or S
AEVVMDRYKKLVVNNAADFYLISIANLRAPVX

SEQ ID NO: 26669 - protein, 37 aa, Artificial Sequence; identical to SEQ ID NO: 5554
  GFR-binding peptide
  MOD_RES (1)..(3)..(35)..(36): Xaa is C or S

SEQ ID NO: 26670 - protein, 33 aa, Artificial Sequence
  GFR-binding peptide
  MOD_RES (12)..(13)..(14)..(15)..(16): Xaa is A or G
  MOD_RES (17)..(18)..(19)..(20): Xaa is A or G or is absent
ARVVMNEYQKYXXXXXXXXXIYLVSIPSLQTPA

SEQ ID NO: 26671 - protein, 36 aa, Artificial Sequence
  GFR-binding peptide
  MOD_RES (2)..(33)..(34): Xaa is C or S
KXSKVIMEYKFKIKPTKGILYLISIPELDQSVXXPS

SEQ ID NO: 26672 - protein, 37 aa, Artificial Sequence
  GFR-binding peptide
  MOD_RES (1)..(33)..(34): Xaa is C or S
XAEVVMDEYKFKVVNNAADLYLISIPELRAPVXXSAP

SEQ ID NO: 26673 - protein, 38 aa, Artificial Sequence
  GFR-binding peptide
  MOD_RES (1)..(33)..(34): Xaa is C or S
XESVAMGYHYKLYTVVGKDKYLISIPSLKTPVXXAKSA

SEQ ID NO: 26674 - protein, 35 aa, Artificial Sequence; identical to SEQ ID NO: 5557
  GFR-binding peptide
  MOD_RES (1)..(35): Xaa is C or S
  MOD_RES (13)..(14)..(15)..(16)..(17): Xaa is A or G
  MOD_RES (18)..(19)..(20)..(21): Xaa is A or G or is absent

SEQ ID NO: 26675 - protein, 37 aa, Artificial Sequence; identical to SEQ ID NO: 5558
  GFR-binding peptide
  MOD_RES (1)..(3): Xaa is C or S
  MOD_RES (16)..(17)..(18)..(19)..(20): Xaa is A or G
  MOD_RES (21)..(22)..(23)..(24): Xaa is A or G or is absent

SEQ ID NO: 26676 - protein, 42 aa, Artificial Sequence; identical to SEQ ID NO: 5559
  GFR-binding peptide
  MOD_RES (2)..(4)..(39)..(40): Xaa is C or S
  MOD_RES (17)..(18)..(19)..(20)..(21): Xaa is A or G
  MOD_RES (22)..(23)..(24)..(25): Xaa is A or G or is absent

SEQ ID NO: 26677 - protein, 40 aa, Artificial Sequence; identical to SEQ ID NO: 5561
  GFR-binding peptide
  MOD_RES (1)..(3)..(35)..(36): Xaa is C or S

SEQ ID NO: 26678 - protein, 36 aa, Artificial Sequence; identical to SEQ ID NO: 5563
  GFR-binding peptide
  MOD_RES (2)..(36): Xaa is C or S
  MOD_RES (14)..(15)..(16)..(17)..(18): Xaa is A or G
  MOD_RES (19)..(20)..(21)..(22): Xaa is A or G or is absent

SEQ ID NO: 26679 - protein, 33 aa, Artificial Sequence
  GFR-binding peptide
  MOD_RES (32)..(33): Xaa is C or S
AEVVMDEYQKYVVNNAADIYLISIPSLRAPVXX

SEQ ID NO: 26680 - protein, 38 aa, Artificial Sequence; identical to SEQ ID NO: 5566
  GFR-binding peptide
  MOD_RES (1)..(36)..(37): Xaa is C or S
  MOD_RES (14)..(15)..(16)..(17)..(18): Xaa is A or G
  MOD_RES (19)..(20)..(21)..(22): Xaa is A or G or is absent

SEQ ID NO: 26681 - protein, 33 aa, Artificial Sequence
  GFR-binding peptide
  MOD_RES (1)..(1): Xaa is C or S
XEAVSMGEEYQKYTPVGMDDIYLVSIPSLKTPV

SEQ ID NO: 26682 - protein, 39 aa, Artificial Sequence; identical to SEQ ID NO: 5569
  GFR-binding peptide
  MOD_RES (1)..(3)..(37)..(38): Xaa is C or S
  MOD_RES (15)..(16)..(17)..(18)..(19): Xaa is A or G
  MOD_RES (20)..(21)..(22)..(23): Xaa is A or G or is absent

SEQ ID NO: 26683 - protein, 36 aa, Artificial Sequence
  GFR-binding peptide
  MOD_RES (1)..(36): Xaa is C or S
  MOD_RES (14)..(15)..(16)..(17)..(18): Xaa is A or G
  MOD_RES (19)..(20)..(21)..(22): Xaa is A or G or is absent
XEAVSMGEEYQKYXXXXXXXXXIYLVSIPSLKTPVX

SEQ ID NO: 26684 - protein, 33 aa, Artificial Sequence; identical to SEQ ID NO: 5571
  GFR-binding peptide
  MOD_RES (12)..(13)..(14)..(15)..(16): Xaa is A or G
  MOD_RES (17)..(18)..(19)..(20): Xaa is A or G or is absent

SEQ ID NO: 26685 - protein, 36 aa, Artificial Sequence; identical to SEQ ID NO: 5573
  GFR-binding peptide
  MOD_RES (34)..(35): Xaa is C or S
  MOD_RES (12)..(13)..(14)..(15)..(16): Xaa is A or G
  MOD_RES (17)..(18)..(19)..(20): Xaa is A or G or is absent

SEQ ID NO: 26686 - protein, 36 aa, Artificial Sequence; identical to SEQ ID NO: 5574
  GFR-binding peptide
  MOD_RES (35)..(36): Xaa is C or S
  MOD_RES (13)..(14)..(15)..(16)..(17): Xaa is A or G
  MOD_RES (18)..(19)..(20)..(21): Xaa is A or G or is absent

SEQ ID NO: 26687 - protein, 42 aa, Artificial Sequence; identical to SEQ ID NO: 5575
  GFR-binding peptide
  MOD_RES (1)..(3)..(37)..(38): Xaa is C or S
  MOD_RES (15)..(16)..(17)..(18)..(19): Xaa is A or G
  MOD_RES (20)..(21)..(22)..(23): Xaa is A or G or is absent

SEQ ID NO: 26688 - protein, 33 aa, Artificial Sequence
  GFR-binding peptide
  MOD_RES (12)..(13)..(14)..(15)..(16): Xaa is A or G
  MOD_RES (17)..(18)..(19)..(20): Xaa is A or G or is absent
ARVVMNEYKFKXXXXXXXXXLYLVSIPELQTPA

SEQ ID NO: 26689 - protein, 34 aa, Artificial Sequence; identical to SEQ ID NO: 5577
  GFR-binding peptide
  MOD_RES (33)..(34): Xaa is C or S
  MOD_RES (11)..(12)..(13)..(14)..(15): Xaa is A or G
  MOD_RES (16)..(17)..(18)..(19): Xaa is A or G or is absent

SEQ ID NO: 26690 - protein, 38 aa, Artificial Sequence; identical to SEQ ID NO: 5578
  GFR-binding peptide
  MOD_RES (1)..(3)..(37)..(38): Xaa is C or S
  MOD_RES (15)..(16)..(17)..(18)..(19): Xaa is A or G
  MOD_RES (20)..(21)..(22)..(23): Xaa is A or G or is absent

SEQ ID NO: 26691 - protein, 34 aa, Artificial Sequence; identical to SEQ ID NO: 5579
  GFR-binding peptide
  MOD_RES (1)..(32)..(33): Xaa is C or S

SEQ ID NO: 26692 - protein, 40 aa, Artificial Sequence; identical to SEQ ID NO: 5580
  GFR-binding peptide
  MOD_RES (2)..(35)..(36): Xaa is C or S
  MOD_RES (13)..(14)..(15)..(16)..(17): Xaa is A or G
  MOD_RES (18)..(19)..(20)..(21): Xaa is A or G or is absent

SEQ ID NO: 26693 - protein, 39 aa, Artificial Sequence; identical to SEQ ID NO: 5581
  GFR-binding peptide
  MOD_RES (2)..(4)..(38)..(39): Xaa is C or S
  MOD_RES (16)..(17)..(18)..(19)..(20): Xaa is A or G
  MOD_RES (21)..(22)..(23)..(24): Xaa is A or G or is absent

SEQ ID NO: 26694 - protein, 35 aa, Artificial Sequence
  GFR-binding peptide
  MOD_RES (32)..(33): Xaa is C or S
SRVVMNEYQKYIVNSSDDIYLVSIPSLKTPAXXPK

SEQ ID NO: 26695 - protein, 35 aa, Artificial Sequence
  GFR-binding peptide
  MOD_RES (33)..(34): Xaa is C or S
EAVSMGEEYQKYTPVGMDDIYLVSIPSLKTPVXXA

SEQ ID NO: 26696 - protein, 37 aa, Artificial Sequence
  GFR-binding peptide
  MOD_RES (1)..(3)..(35)..(36): Xaa is C or S
XGXGEVVMEEYKFKVVKDYEDLYLMSIPELETPVXXA

SEQ ID NO: 26697 - protein, 37 aa, Artificial Sequence; identical to SEQ ID NO: 5586
  GFR-binding peptide
  MOD_RES (2)..(35)..(36): Xaa is C or S
  MOD_RES (13)..(14)..(15)..(16)..(17): Xaa is A or G
  MOD_RES (18)..(19)..(20)..(21): Xaa is A or G or is absent

SEQ ID NO: 26698 - protein, 37 aa, Artificial Sequence; identical to SEQ ID NO: 5589
  GFR-binding peptide
  MOD_RES (1)..(3)..(36)..(37): Xaa is C or S
  MOD_RES (14)..(15)..(16)..(17)..(18): Xaa is A or G
  MOD_RES (19)..(20)..(21)..(22): Xaa is A or G or is absent

SEQ ID NO: 26699 - protein, 33 aa, Artificial Sequence; identical to SEQ ID NO: 5590
  GFR-binding peptide
  MOD_RES (1)..(33): Xaa is C or S

SEQ ID NO: 26700 - protein, 41 aa, Artificial Sequence; identical to SEQ ID NO: 5591
  GFR-binding peptide
  MOD_RES (1)..(3)..(36)..(37): Xaa is C or S
  MOD_RES (14)..(15)..(16)..(17)..(18): Xaa is A or G
  MOD_RES (19)..(20)..(21)..(22): Xaa is A or G or is absent

SEQ ID NO: 26701 - protein, 39 aa, Artificial Sequence; identical to SEQ ID NO: 5593
  GFR-binding peptide
  MOD_RES (1)..(3)..(37)..(38): Xaa is C or S
  MOD_RES (15)..(16)..(17)..(18)..(19): Xaa is A or G
  MOD_RES (20)..(21)..(22)..(23): Xaa is A or G or is absent

SEQ ID NO: 26702 - protein, 41 aa, Artificial Sequence
  GFR-binding peptide
  MOD_RES (1)..(3)..(36)..(37): Xaa is C or S
XGXEAVSMGEEYKFKTPVGMDDLYLVSIPELKTPVXXAKGV

SEQ ID NO: 26703 - protein, 39 aa, Artificial Sequence
  GFR-binding peptide
  MOD_RES (1)..(35)..(36): Xaa is C or S
  MOD_RES (13)..(14)..(15)..(16)..(17): Xaa is A or G
  MOD_RES (18)..(19)..(20)..(21): Xaa is A or G or is absent
XSRVVMNEYQKYXXXXXXXXXIYLVSIPSLKTPAXXPKP

SEQ ID NO: 26704 - protein, 42 aa, Artificial Sequence
  GFR-binding peptide
  MOD_RES (2)..(4)..(36): Xaa is C or S
HXGXSRVVMNEYKFKIVNSSDDLYLVSIPELKTPAXTPKTVH

SEQ ID NO: 26705 - protein, 42 aa, Artificial Sequence
  GFR-binding peptide
  MOD_RES (2)..(4)..(36): Xaa is C or S
HXGXSRVVMNEYQKYIVNSSDDIYLVSIPSLKTPAXTPKTVH

SEQ ID NO: 26706 - protein, 30 aa, Artificial Sequence
  GFR-binding peptide
EVVMDEYQKYVVNNAADIYLISIPSLRAPV

SEQ ID NO: 26707 - protein, 40 aa, Artificial Sequence
  GFR-binding peptide
  MOD_RES (1)..(3)..(37)..(38): Xaa is C or S
  MOD_RES (15)..(16)..(17)..(18)..(19): Xaa is A or G
  MOD_RES (20)..(21)..(22)..(23): Xaa is A or G or is absent
XGXARVVMNEYQKYXXXXXXXXXIYLVSIPSLQTPAXXPK

SEQ ID NO: 26708 - protein, 37 aa, Artificial Sequence; identical to SEQ ID NO: 5596
  GFR-binding peptide
  MOD_RES (1)..(34)..(35): Xaa is C or S
  MOD_RES (12)..(13)..(14)..(15)..(16): Xaa is A or G
  MOD_RES (17)..(18)..(19)..(20): Xaa is A or G or is absent

SEQ ID NO: 26709 - protein, 41 aa, Artificial Sequence; identical to SEQ ID NO: 5597
  GFR-binding peptide
  MOD_RES (1)..(3)..(38)..(39): Xaa is C or S
  MOD_RES (16)..(17)..(18)..(19)..(20): Xaa is A or G
  MOD_RES (21)..(22)..(23)..(24): Xaa is A or G or is absent

SEQ ID NO: 26710 - protein, 33 aa, Artificial Sequence; identical to SEQ ID NO: 5599
  GFR-binding peptide
  MOD_RES (33)..(33): Xaa is C or S
  MOD_RES (11)..(12)..(13)..(14)..(15): Xaa is A or G
  MOD_RES (16)..(17)..(18)..(19): Xaa is A or G or is absent

SEQ ID NO: 26711 - protein, 39 aa, Artificial Sequence; identical to SEQ ID NO: 5600
  GFR-binding peptide
  MOD_RES (2)..(4)..(36)..(37): Xaa is C or S

SEQ ID NO: 26712 - protein, 40 aa, Artificial Sequence
  GFR-binding peptide
  MOD_RES (2)..(4)..(35)..(36): Xaa is C or S
SXKXSKVIMEYQKYIKPTKGIIYLISIPSLDQSVXXPSAS

SEQ ID NO: 26713 - protein, 43 aa, Artificial Sequence; identical to SEQ ID NO: 5602
  GFR-binding peptide
  MOD_RES (1)..(3)..(37)..(38): Xaa is C or S
  MOD_RES (15)..(16)..(17)..(18)..(19): Xaa is A or G
  MOD_RES (20)..(21)..(22)..(23): Xaa is A or G or is absent

SEQ ID NO: 26714 - protein, 42 aa, Artificial Sequence
  GFR-binding peptide
  MOD_RES (2)..(36)..(37): Xaa is C or S
  MOD_RES (14)..(15)..(16)..(17)..(18): Xaa is A or G
  MOD_RES (19)..(20)..(21)..(22): Xaa is A or G or is absent
GXSRVVMNEYKFKXXXXXXXXXLYLVSIPELKTPAXXPKPVY

SEQ ID NO: 26715 - protein, 38 aa, Artificial Sequence
  GFR-binding peptide
  MOD_RES (1)..(33): Xaa is C or S
XSRVVMNEYQKYIVNSSDDIYLVSIPSLKTPAXTPKTV

SEQ ID NO: 26716 - protein, 30 aa, Artificial Sequence
  GFR-binding peptide
RVVMNEYQKYIVNSSDDIYLVSIPSLKTPA

SEQ ID NO: 26717 - protein, 36 aa, Artificial Sequence; identical to SEQ ID NO: 5605
  GFR-binding peptide
  MOD_RES (1)..(3)..(36): Xaa is C or S
  MOD_RES (14)..(15)..(16)..(17)..(18): Xaa is A or G
  MOD_RES (19)..(20)..(21)..(22): Xaa is A or G or is absent

SEQ ID NO: 26718 - protein, 39 aa, Artificial Sequence
  GFR-binding peptide
  MOD_RES (2)..(4)..(35)..(36): Xaa is C or S
SXKXSKVVMEYKFKVKPTRGVLYLISIPELDQPVXXPSA

SEQ ID NO: 26719 - protein, 38 aa, Artificial Sequence; identical to SEQ ID NO: 5607
  GFR-binding peptide
  MOD_RES (2)..(33)..(34): Xaa is C or S

SEQ ID NO: 26720 - protein, 41 aa, Artificial Sequence
  GFR-binding peptide
  MOD_RES (1)..(35)..(36): Xaa is C or S
  MOD_RES (13)..(14)..(15)..(16)..(17): Xaa is A or G
  MOD_RES (18)..(19)..(20)..(21): Xaa is A or G or is absent
XAEVVMDRYKKLXXXXXXXXXFYLISIANLRAPVXXSAPAA

SEQ ID NO: 26721 - protein, 38 aa, Artificial Sequence
  GFR-binding peptide
  MOD_RES (33)..(34): Xaa is C or S
EAVSMGEEYKFKTPVGMDDLYLVSIPELKTPVXXAKGV

SEQ ID NO: 26722 - protein, 40 aa, Artificial Sequence
  GFR-binding peptide
  MOD_RES (2)..(34)..(35): Xaa is C or S
GXSRVVMNEYKFKIVNSSDDLYLVSIPELKTPAXXPKPVY

SEQ ID NO: 26723 - protein, 36 aa, Artificial Sequence; identical to SEQ ID NO: 5609
  GFR-binding peptide
  MOD_RES (2)..(4)..(36): Xaa is C or S

SEQ ID NO: 26724 - protein, 31 aa, Artificial Sequence
  GFR-binding peptide
AEVVMDEYKFKVVNNAADLYLISIPELRAPV

SEQ ID NO: 26725 - protein, 37 aa, Artificial Sequence; identical to SEQ ID NO: 5610
  GFR-binding peptide
  MOD_RES (2)..(33)..(34): Xaa is C or S

SEQ ID NO: 26726 - protein, 41 aa, Artificial Sequence; identical to SEQ ID NO: 5612
  GFR-binding peptide
  MOD_RES (1)..(35)..(36): Xaa is C or S
  MOD_RES (13)..(14)..(15)..(16)..(17): Xaa is A or G
  MOD_RES (18)..(19)..(20)..(21): Xaa is A or G or is absent

SEQ ID NO: 26727 - protein, 34 aa, Artificial Sequence; identical to SEQ ID NO: 5613
  GFR-binding peptide
  MOD_RES (31)..(32): Xaa is C or S

SEQ ID NO: 26728 - protein, 37 aa, Artificial Sequence; identical to SEQ ID NO: 5614
  GFR-binding peptide
  MOD_RES (31)..(32): Xaa is C or S

SEQ ID NO: 26729 - protein, 34 aa, Artificial Sequence
  GFR-binding peptide
  MOD_RES (1)..(3): Xaa is C or S
XGXAKVVMNEYQKYIVNNSSDIYLVSIPSLKTPA

SEQ ID NO: 26730 - protein, 35 aa, Artificial Sequence
  GFR-binding peptide
  MOD_RES (1)..(35): Xaa is C or S
  MOD_RES (13)..(14)..(15)..(16)..(17): Xaa is A or G
  MOD_RES (18)..(19)..(20)..(21): Xaa is A or G or is absent
XAKVVMNEYQKYXXXXXXXXXIYLVSIPSLKTPAX

SEQ ID NO: 26731 - protein, 44 aa, Artificial Sequence
  GFR-binding peptide
  MOD_RES (2)..(4)..(38)..(39): Xaa is C or S
  MOD_RES (16)..(17)..(18)..(19)..(20): Xaa is A or G
  MOD_RES (21)..(22)..(23)..(24): Xaa is A or G or is absent
HXGXSRVVMNEYKFKXXXXXXXXXLYLVSIPELKTPAXXPKPVY

SEQ ID NO: 26732 - protein, 37 aa, Artificial Sequence; identical to SEQ ID NO: 5618
  GFR-binding peptide
  MOD_RES (33)..(34): Xaa is C or S
  MOD_RES (11)..(12)..(13)..(14)..(15): Xaa is A or G
  MOD_RES (16)..(17)..(18)..(19): Xaa is A or G or is absent

SEQ ID NO: 26733 - protein, 36 aa, Artificial Sequence
  GFR-binding peptide
  MOD_RES (2)..(4): Xaa is C or S
  MOD_RES (15)..(16)..(17)..(18)..(19): Xaa is A or G
  MOD_RES (20)..(21)..(22)..(23): Xaa is A or G or is absent
SXKXSKVVMEYKFKXXXXXXXXXLYLISIPELDQPV

SEQ ID NO: 26734 - protein, 32 aa, Artificial Sequence
  GFR-binding peptide
  MOD_RES (11)..(12)..(13)..(14)..(15): Xaa is A or G
  MOD_RES (16)..(17)..(18)..(19): Xaa is A or G or is absent
SKVVMEYQKYXXXXXXXXXIYLISIPSLDQPV

SEQ ID NO: 26735 - protein, 41 aa, Artificial Sequence; identical to SEQ ID NO: 5621
  GFR-binding peptide
  MOD_RES (2)..(35)..(36): Xaa is C or S
  MOD_RES (13)..(14)..(15)..(16)..(17): Xaa is A or G
  MOD_RES (18)..(19)..(20)..(21): Xaa is A or G or is absent

SEQ ID NO: 26736 - protein, 33 aa, Artificial Sequence
  GFR-binding peptide
  MOD_RES (2)..(2): Xaa is C or S
GXGEVVMDEYQKYVVKENEDIYLMSIPSLETPV

SEQ ID NO: 26737 - protein, 32 aa, Artificial Sequence
  GFR-binding peptide
  MOD_RES (11)..(12)..(13)..(14)..(15): Xaa is A or G
  MOD_RES (16)..(17)..(18)..(19): Xaa is A or G or is absent
SVAMGRYKKLXXXXXXXXXFYLISIANLKTPV

SEQ ID NO: 26738 - protein, 34 aa, Artificial Sequence
  GFR-binding peptide
  MOD_RES (1)..(33)..(34): Xaa is C or S
XGEVVMDEYKFKVVKENEDLYLMSIPELETPVXX

SEQ ID NO: 26739 - protein, 36 aa, Artificial Sequence
  GFR-binding peptide
  MOD_RES (1)..(32)..(33): Xaa is C or S
XSRVIMEYKFKVKPKRGVLYLISIPELAQPVXXPAA

SEQ ID NO: 26740 - protein, 34 aa, Artificial Sequence
  GFR-binding peptide
  MOD_RES (31)..(32): Xaa is C or S
RVVMNEYQKYIVNSSDDIYLVSIPSLQTPAXXPK

SEQ ID NO: 26741 - protein, 34 aa, Artificial Sequence
  GFR-binding peptide
  MOD_RES (33)..(34): Xaa is C or S
  MOD_RES (11)..(12)..(13)..(14)..(15): Xaa is A or G
  MOD_RES (16)..(17)..(18)..(19): Xaa is A or G or is absent
EVVMDEYKFKXXXXXXXXXLYLISIPELRAPVXX

SEQ ID NO: 26742 - protein, 36 aa, Artificial Sequence
  GFR-binding peptide
  MOD_RES (1)..(33)..(34): Xaa is C or S
XGEVVMEEYQKYVVKDYEDIYLMSIPSLETPVXXAK

SEQ ID NO: 26743 - protein, 41 aa, Artificial Sequence; identical to SEQ ID NO: 5622
  GFR-binding peptide
  MOD_RES (1)..(3)..(36)..(37): Xaa is C or S
  MOD_RES (14)..(15)..(16)..(17)..(18): Xaa is A or G
  MOD_RES (19)..(20)..(21)..(22): Xaa is A or G or is absent

SEQ ID NO: 26744 - protein, 39 aa, Artificial Sequence
  GFR-binding peptide
  MOD_RES (1)..(3)..(37)..(38): Xaa is C or S
  MOD_RES (15)..(16)..(17)..(18)..(19): Xaa is A or G
  MOD_RES (20)..(21)..(22)..(23): Xaa is A or G or is absent
XGXESVAMGYHYKLXXXXXXXXXKYLISIPSLKTPVXXA

SEQ ID NO: 26745 - protein, 33 aa, Artificial Sequence
  GFR-binding peptide
  MOD_RES (33)..(33): Xaa is C or S
  MOD_RES (11)..(12)..(13)..(14)..(15): Xaa is A or G
  MOD_RES (16)..(17)..(18)..(19): Xaa is A or G or is absent
SVAMGRYKKLXXXXXXXXXFYLISIANLKTPVX

SEQ ID NO: 26746 - protein, 40 aa, Artificial Sequence; identical to SEQ ID NO: 5627
  GFR-binding peptide
  MOD_RES (2)..(4)..(38)..(39): Xaa is C or S
  MOD_RES (16)..(17)..(18)..(19)..(20): Xaa is A or G
  MOD_RES (21)..(22)..(23)..(24): Xaa is A or G or is absent

SEQ ID NO: 26747 - protein, 38 aa, Artificial Sequence
  GFR-binding peptide
  MOD_RES (1)..(35)..(36): Xaa is C or S
  MOD_RES (13)..(14)..(15)..(16)..(17): Xaa is A or G
  MOD_RES (18)..(19)..(20)..(21): Xaa is A or G or is absent
XESVAMGEYKFKXXXXXXXXXLYLISIPELKTPVXXAK

SEQ ID NO: 26748 - protein, 34 aa, Artificial Sequence
  GFR-binding peptide
  MOD_RES (33)..(34): Xaa is C or S
  MOD_RES (11)..(12)..(13)..(14)..(15): Xaa is A or G
  MOD_RES (16)..(17)..(18)..(19): Xaa is A or G or is absent
KVVMNEYKFKXXXXXXXXXLYLVSIPELKTPAXX

SEQ ID NO: 26749 - protein, 41 aa, Artificial Sequence; identical to SEQ ID NO: 5629
  GFR-binding peptide
  MOD_RES (2)..(4)..(35)..(36): Xaa is C or S

SEQ ID NO: 26750 - protein, 35 aa, Artificial Sequence; identical to SEQ ID NO: 5630
  GFR-binding peptide
  MOD_RES (33)..(34): Xaa is C or S
  MOD_RES (11)..(12)..(13)..(14)..(15): Xaa is A or G
  MOD_RES (16)..(17)..(18)..(19): Xaa is A or G or is absent

SEQ ID NO: 26751 - protein, 38 aa, Artificial Sequence
  GFR-binding peptide
  MOD_RES (1)..(32)..(33): Xaa is C or S
XSRVIMEYKFKVKPKRGVLYLISIPELAQPVXXPAASA

SEQ ID NO: 26752 - protein, 36 aa, Artificial Sequence
  GFR-binding peptide
  MOD_RES (1)..(3): Xaa is C or S
  MOD_RES (15)..(16)..(17)..(18)..(19): Xaa is A or G
  MOD_RES (20)..(21)..(22)..(23): Xaa is A or G or is absent
XGXSRVVMNEYQKYXXXXXXXXXIYLVSIPSLKTPA

SEQ ID NO: 26753 - protein, 39 aa, Artificial Sequence; identical to SEQ ID NO: 5632
  GFR-binding peptide
  MOD_RES (2)..(4)..(35)..(36): Xaa is C or S

SEQ ID NO: 26754 - protein, 36 aa, Artificial Sequence
  GFR-binding peptide
  MOD_RES (2)..(4)..(36): Xaa is C or S
RXGXGEVVMDEYKFKVVKENEDLYLMSIPELETPVX

SEQ ID NO: 26755 - protein, 34 aa, Artificial Sequence
  GFR-binding peptide
  MOD_RES (32)..(33): Xaa is C or S
AKVVMNEYKFKIVNNSSDLYLVSIPELKTPAXXA

SEQ ID NO: 26756 - protein, 34 aa, Artificial Sequence; identical to SEQ ID NO: 5636
  GFR-binding peptide
  MOD_RES (1)..(1): Xaa is C or S
  MOD_RES (13)..(14)..(15)..(16)..(17): Xaa is A or G
  MOD_RES (18)..(19)..(20)..(21): Xaa is A or G or is absent

SEQ ID NO: 26757 - protein, 40 aa, Artificial Sequence
  GFR-binding peptide
  MOD_RES (2)..(4)..(38)..(39): Xaa is C or S
  MOD_RES (16)..(17)..(18)..(19)..(20): Xaa is A or G
  MOD_RES (21)..(22)..(23)..(24): Xaa is A or G or is absent
RXGXGEVVMDEYQKYXXXXXXXXXIYLMSIPSLETPVXXA

SEQ ID NO: 26758 - protein, 36 aa, Artificial Sequence
  GFR-binding peptide
  MOD_RES (1)..(3): Xaa is C or S
  MOD_RES (15)..(16)..(17)..(18)..(19): Xaa is A or G
  MOD_RES (20)..(21)..(22)..(23): Xaa is A or G or is absent
XGXAEVVMDEYQKYXXXXXXXXXIYLISIPSLRAPV

SEQ ID NO: 26759 - protein, 37 aa, Artificial Sequence; identical to SEQ ID NO: 5638
  GFR-binding peptide
  MOD_RES (33)..(34): Xaa is C or S
  MOD_RES (11)..(12)..(13)..(14)..(15): Xaa is A or G
  MOD_RES (16)..(17)..(18)..(19): Xaa is A or G or is absent

SEQ ID NO: 26760 - protein, 40 aa, Artificial Sequence
  GFR-binding peptide
  MOD_RES (1)..(3)..(34)..(35): Xaa is C or S
XKXSKVIMEYKFKIKPTKGILYLISIPELDQSVXXPSASA

SEQ ID NO: 26761 - protein, 36 aa, Artificial Sequence
  GFR-binding peptide
  MOD_RES (33)..(34): Xaa is C or S
  MOD_RES (11)..(12)..(13)..(14)..(15): Xaa is A or G
  MOD_RES (16)..(17)..(18)..(19): Xaa is A or G or is absent
SVAMGEYKFKXXXXXXXXXLYLISIPELKTPVXXAK

SEQ ID NO: 26762 - protein, 42 aa, Artificial Sequence
  GFR-binding peptide
  MOD_RES (2)..(4)..(38): Xaa is C or S
  MOD_RES (16)..(17)..(18)..(19)..(20): Xaa is A or G
  MOD_RES (21)..(22)..(23)..(24): Xaa is A or G or is absent
HXGXSRVVMNEYKFKXXXXXXXXXLYLVSIPELKTPAXTPKT

SEQ ID NO: 26763 - protein, 41 aa, Artificial Sequence
  GFR-binding peptide
  MOD_RES (1)..(3)..(38)..(39): Xaa is C or S
  MOD_RES (16)..(17)..(18)..(19)..(20): Xaa is A or G
  MOD_RES (21)..(22)..(23)..(24): Xaa is A or G or is absent
XGXEAVSMGEEYKFKXXXXXXXXXLYLVSIPELKTPVXXAK

SEQ ID NO: 26764 - protein, 37 aa, Artificial Sequence
  GFR-binding peptide
  MOD_RES (1)..(3)..(37): Xaa is C or S
  MOD_RES (15)..(16)..(17)..(18)..(19): Xaa is A or G
  MOD_RES (20)..(21)..(22)..(23): Xaa is A or G or is absent
XGXAEVVMDYHYKLXXXXXXXXXKYLISIPSLRAPVX

SEQ ID NO: 26765 - protein, 41 aa, Artificial Sequence
  GFR-binding peptide
  MOD_RES (1)..(3)..(35)..(36): Xaa is C or S
XGXAKVVMNEYQKYIVNNSSDIYLVSIPSLKTPAXXAKPVA

SEQ ID NO: 26766 - protein, 40 aa, Artificial Sequence; identical to SEQ ID NO: 5640
  GFR-binding peptide
  MOD_RES (1)..(3)..(35)..(36): Xaa is C or S

SEQ ID NO: 26767 - protein, 38 aa, Artificial Sequence
  GFR-binding peptide
  MOD_RES (1)..(35)..(36): Xaa is C or S
  MOD_RES (13)..(14)..(15)..(16)..(17): Xaa is A or G
  MOD_RES (18)..(19)..(20)..(21): Xaa is A or G or is absent
XSRVVMNEYKFKXXXXXXXXXLYLVSIPELKTPAXXPK

SEQ ID NO: 26768 - protein, 42 aa, Artificial Sequence
  GFR-binding peptide
  MOD_RES (1)..(3)..(37)..(38): Xaa is C or S
  MOD_RES (15)..(16)..(17)..(18)..(19): Xaa is A or G
  MOD_RES (20)..(21)..(22)..(23): Xaa is A or G or is absent
XGXESVAMGYHYKLXXXXXXXXXKYLISIPSLKTPVXXAKSA

SEQ ID NO: 26769 - protein, 35 aa, Artificial Sequence
  GFR-binding peptide
  MOD_RES (2)..(34): Xaa is C or S
GXSRVVMNEYKFKIVNSSDDLYLVSIPELKTPAXT

SEQ ID NO: 26770 - protein, 40 aa, Artificial Sequence
  GFR-binding peptide
  MOD_RES (2)..(36)..(37): Xaa is C or S
  MOD_RES (14)..(15)..(16)..(17)..(18): Xaa is A or G
  MOD_RES (19)..(20)..(21)..(22): Xaa is A or G or is absent
GXAKVVMNEYKFKXXXXXXXXXLYLVSIPELKTPAXXAKP

SEQ ID NO: 26771 - protein, 34 aa, Artificial Sequence; identical to SEQ ID NO: 5642
  GFR-binding peptide
  MOD_RES (31)..(32): Xaa is C or S

SEQ ID NO: 26772 - protein, 36 aa, Artificial Sequence
  GFR-binding peptide
  MOD_RES (1)..(32)..(33): Xaa is C or S
XSKVVMEYQKYVKPTRGVIYLISIPSLDQPVXXPSA

SEQ ID NO: 26773 - protein, 39 aa, Artificial Sequence; identical to SEQ ID NO: 5645
  GFR-binding peptide
  MOD_RES (33)..(34): Xaa is C or S
  MOD_RES (11)..(12)..(13)..(14)..(15): Xaa is A or G
  MOD_RES (16)..(17)..(18)..(19): Xaa is A or G or is absent

SEQ ID NO: 26774 - protein, 34 aa, Artificial Sequence; identical to SEQ ID NO: 5646
  GFR-binding peptide
  MOD_RES (33)..(34): Xaa is C or S
  MOD_RES (11)..(12)..(13)..(14)..(15): Xaa is A or G
  MOD_RES (16)..(17)..(18)..(19): Xaa is A or G or is absent

SEQ ID NO: 26775 - protein, 44 aa, Artificial Sequence; identical to SEQ ID NO: 5647
  GFR-binding peptide
  MOD_RES (2)..(4)..(38)..(39): Xaa is C or S
  MOD_RES (16)..(17)..(18)..(19)..(20): Xaa is A or G
  MOD_RES (21)..(22)..(23)..(24): Xaa is A or G or is absent

SEQ ID NO: 26776 - protein, 42 aa, Artificial Sequence
  GFR-binding peptide
  MOD_RES (1)..(3)..(37)..(38): Xaa is C or S
  MOD_RES (15)..(16)..(17)..(18)..(19): Xaa is A or G
  MOD_RES (20)..(21)..(22)..(23): Xaa is A or G or is absent
XGXGEVVMDEYKFKXXXXXXXXXLYLMSIPELETPVXXAKPI

SEQ ID NO: 26777 - protein, 35 aa, Artificial Sequence
  GFR-binding peptide
  MOD_RES (1)..(32)..(33): Xaa is C or S
XSKVIMEYKFKIKPTKGILYLISIPELDQSVXXPS

SEQ ID NO: 26778 - protein, 31 aa, Artificial Sequence
  GFR-binding peptide
  MOD_RES (31)..(31): Xaa is C or S
EVVMDRYKKLVVNNAADFYLISIANLRAPVX

SEQ ID NO: 26779 - protein, 39 aa, Artificial Sequence; identical to SEQ ID NO: 5651
  GFR-binding peptide
  MOD_RES (1)..(3)..(38)..(39): Xaa is C or S
  MOD_RES (16)..(17)..(18)..(19)..(20): Xaa is A or G
  MOD_RES (21)..(22)..(23)..(24): Xaa is A or G or is absent

SEQ ID NO: 26780 - protein, 40 aa, Artificial Sequence
  GFR-binding peptide
  MOD_RES (1)..(35)..(36): Xaa is C or S
  MOD_RES (13)..(14)..(15)..(16)..(17): Xaa is A or G
  MOD_RES (18)..(19)..(20)..(21): Xaa is A or G or is absent
XAEVVMDRYKKLXXXXXXXXXFYLISIANLRAPVXXSAPA

SEQ ID NO: 26781 - protein, 36 aa, Artificial Sequence; identical to SEQ ID NO: 5653
  GFR-binding peptide
  MOD_RES (31)..(32): Xaa is C or S

SEQ ID NO: 26782 - protein, 42 aa, Artificial Sequence; identical to SEQ ID NO: 5655
  GFR-binding peptide
  MOD_RES (1)..(3)..(36)..(37): Xaa is C or S
  MOD_RES (14)..(15)..(16)..(17)..(18): Xaa is A or G
  MOD_RES (19)..(20)..(21)..(22): Xaa is A or G or is absent

SEQ ID NO: 26783 - protein, 33 aa, Artificial Sequence
  GFR-binding peptide
  MOD_RES (31)..(32): Xaa is C or S
SKVIMEYKFKIKPTKGILYLISIPELDQSVXXP

SEQ ID NO: 26784 - protein, 40 aa, Artificial Sequence
  GFR-binding peptide
  MOD_RES (1)..(3)..(35)..(36): Xaa is C or S
XGXAEVVMDRYKKLVVNNAADFYLISIANLRAPVXXSAPA

SEQ ID NO: 26785 - protein, 42 aa, Artificial Sequence
  GFR-binding peptide
  MOD_RES (2)..(37)..(38): Xaa is C or S
  MOD_RES (15)..(16)..(17)..(18)..(19): Xaa is A or G
  MOD_RES (20)..(21)..(22)..(23): Xaa is A or G or is absent
GXEAVSMGEEYQKYXXXXXXXXXIYLVSIPSLKTPVXXAKGV

SEQ ID NO: 26786 - protein, 37 aa, Artificial Sequence
  GFR-binding peptide
  MOD_RES (1)..(35)..(36): Xaa is C or S
  MOD_RES (13)..(14)..(15)..(16)..(17): Xaa is A or G
  MOD_RES (18)..(19)..(20)..(21): Xaa is A or G or is absent
XARVVMNEYKFKXXXXXXXXXLYLVSIPELQTPAXXP

SEQ ID NO: 26787 - protein, 43 aa, Artificial Sequence; identical to SEQ ID NO: 5656
  GFR-binding peptide
  MOD_RES (2)..(4)..(37)..(38): Xaa is C or S
  MOD_RES (15)..(16)..(17)..(18)..(19): Xaa is A or G
  MOD_RES (20)..(21)..(22)..(23): Xaa is A or G or is absent

SEQ ID NO: 26788 - protein, 33 aa, Artificial Sequence; identical to SEQ ID NO: 5657
  GFR-binding peptide
  MOD_RES (1)..(3): Xaa is C or S

SEQ ID NO: 26789 - protein, 39 aa, Artificial Sequence
  GFR-binding peptide
  MOD_RES (2)..(4)..(36)..(37): Xaa is C or S
RXGXESVAMGRYKKLYTVVGKDFYLISIANLKTPVXXAK

SEQ ID NO: 26790 - protein, 40 aa, Artificial Sequence
  GFR-binding peptide
  MOD_RES (2)..(34)..(35): Xaa is C or S
GXAEVVMDEYQKYVVNNAADIYLISIPSLRAPVXXSAPAA

SEQ ID NO: 26791 - protein, 35 aa, Artificial Sequence
  GFR-binding peptide
  MOD_RES (1)..(3)..(35): Xaa is C or S
XGXESVAMGYHYKLYTVVGKDKYLISIPSLKTPVX

SEQ ID NO: 26792 - protein, 30 aa, Artificial Sequence
  GFR-binding peptide
EVVMDEYKFKVVKENEDLYLMSIPELETPV

SEQ ID NO: 26793 - protein, 36 aa, Artificial Sequence
  GFR-binding peptide
  MOD_RES (1)..(33)..(34): Xaa is C or S
XAEVVMDEYKFKVVNNAADLYLISIPELRAPVXXSA

SEQ ID NO: 26794 - protein, 41 aa, Artificial Sequence; identical to SEQ ID NO: 5660
  GFR-binding peptide
  MOD_RES (2)..(4)..(36)..(37): Xaa is C or S

SEQ ID NO: 26795 - protein, 38 aa, Artificial Sequence
  GFR-binding peptide
  MOD_RES (32)..(33): Xaa is C or S
GEVVMEEYQKYVVKDYEDIYLMSIPSLETPVXXAKPIS

SEQ ID NO: 26796 - protein, 38 aa, Artificial Sequence
  GFR-binding peptide
  MOD_RES (1)..(3)..(35)..(36): Xaa is C or S
XGXAEVVMDRYKKLVVNNAADFYLISIANLRAPVXXSA

SEQ ID NO: 26797 - protein, 37 aa, Artificial Sequence
  GFR-binding peptide
  MOD_RES (1)..(3)..(35)..(36): Xaa is C or S
XGXGEVVMDEYKFKVVKENEDLYLMSIPELETPVXXA

SEQ ID NO: 26798 - protein, 41 aa, Artificial Sequence; identical to SEQ ID NO: 5664
  GFR-binding peptide
  MOD_RES (2)..(4)..(38)..(39): Xaa is C or S
  MOD_RES (16)..(17)..(18)..(19)..(20): Xaa is A or G
  MOD_RES (21)..(22)..(23)..(24): Xaa is A or G or is absent

SEQ ID NO: 26799 - protein, 35 aa, Artificial Sequence; identical to SEQ ID NO: 5665
  GFR-binding peptide
  MOD_RES (1)..(35): Xaa is C or S
  MOD_RES (13)..(14)..(15)..(16)..(17): Xaa is A or G
  MOD_RES (18)..(19)..(20)..(21): Xaa is A or G or is absent

SEQ ID NO: 26800 - protein, 39 aa, Artificial Sequence; identical to SEQ ID NO: 5668
  GFR-binding peptide
  MOD_RES (2)..(4)..(37)..(38): Xaa is C or S
  MOD_RES (15)..(16)..(17)..(18)..(19): Xaa is A or G
  MOD_RES (20)..(21)..(22)..(23): Xaa is A or G or is absent

SEQ ID NO: 26801 - protein, 39 aa, Artificial Sequence
  GFR-binding peptide
  MOD_RES (1)..(3)..(37)..(38): Xaa is C or S
  MOD_RES (15)..(16)..(17)..(18)..(19): Xaa is A or G
  MOD_RES (20)..(21)..(22)..(23): Xaa is A or G or is absent
XGXSRVVMNEYQKYXXXXXXXXXIYLVSIPSLKTPAXXP

SEQ ID NO: 26802 - protein, 36 aa, Artificial Sequence; identical to SEQ ID NO: 5670
  GFR-binding peptide
  MOD_RES (33)..(34): Xaa is C or S
  MOD_RES (11)..(12)..(13)..(14)..(15): Xaa is A or G
  MOD_RES (16)..(17)..(18)..(19): Xaa is A or G or is absent

SEQ ID NO: 26803 - protein, 39 aa, Artificial Sequence
  GFR-binding peptide
  MOD_RES (1)..(35)..(36): Xaa is C or S
  MOD_RES (13)..(14)..(15)..(16)..(17): Xaa is A or G
  MOD_RES (18)..(19)..(20)..(21): Xaa is A or G or is absent
XAEVVMDEYKFKXXXXXXXXXLYLISIPELRAPVXXSAP

SEQ ID NO: 26804 - protein, 31 aa, Artificial Sequence
  GFR-binding peptide
ARVVMNEYQKYIVNSSDDIYLVSIPSLQTPA

SEQ ID NO: 26805 - protein, 37 aa, Artificial Sequence; identical to SEQ ID NO: 5671
  GFR-binding peptide
  MOD_RES (1)..(34)..(35): Xaa is C or S
  MOD_RES (12)..(13)..(14)..(15)..(16): Xaa is A or G
  MOD_RES (17)..(18)..(19)..(20): Xaa is A or G or is absent

SEQ ID NO: 26806 - protein, 40 aa, Artificial Sequence
  GFR-binding peptide
  MOD_RES (34)..(35): Xaa is C or S
  MOD_RES (12)..(13)..(14)..(15)..(16): Xaa is A or G
  MOD_RES (17)..(18)..(19)..(20): Xaa is A or G or is absent
GEVVMDEYKFKXXXXXXXXXLYLMSIPELETPVXXAKPIK

SEQ ID NO: 26807 - protein, 35 aa, Artificial Sequence; identical to SEQ ID NO: 5679
  GFR-binding peptide
  MOD_RES (1)..(3)..(35): Xaa is C or S

SEQ ID NO: 26808 - protein, 39 aa, Artificial Sequence; identical to SEQ ID NO: 5680
  GFR-binding peptide
  MOD_RES (34)..(35): Xaa is C or S
  MOD_RES (12)..(13)..(14)..(15)..(16): Xaa is A or G
  MOD_RES (17)..(18)..(19)..(20): Xaa is A or G or is absent

SEQ ID NO: 26809 - protein, 37 aa, Artificial Sequence
  GFR-binding peptide
  MOD_RES (32)..(33): Xaa is C or S
GEVVMDEYKFKVVKENEDLYLMSIPELETPVXXAKPI

SEQ ID NO: 26810 - protein, 40 aa, Artificial Sequence; identical to SEQ ID NO: 5681
  GFR-binding peptide
  MOD_RES (2)..(36)..(37): Xaa is C or S
  MOD_RES (14)..(15)..(16)..(17)..(18): Xaa is A or G
  MOD_RES (19)..(20)..(21)..(22): Xaa is A or G or is absent

SEQ ID NO: 26811 - protein, 37 aa, Artificial Sequence; identical to SEQ ID NO: 5682
  GFR-binding peptide
  MOD_RES (1)..(3)..(36)..(37): Xaa is C or S
  MOD_RES (14)..(15)..(16)..(17)..(18): Xaa is A or G
  MOD_RES (19)..(20)..(21)..(22): Xaa is A or G or is absent

SEQ ID NO: 26812 - protein, 41 aa, Artificial Sequence
  GFR-binding peptide
  MOD_RES (1)..(3)..(37)..(38): Xaa is C or S
  MOD_RES (15)..(16)..(17)..(18)..(19): Xaa is A or G
  MOD_RES (20)..(21)..(22)..(23): Xaa is A or G or is absent
XGXESVAMGEYQKYXXXXXXXXXIYLISIPSLKTPVXXAKS

SEQ ID NO: 26813 - protein, 37 aa, Artificial Sequence; identical to SEQ ID NO: 5683
  GFR-binding peptide
  MOD_RES (2)..(34)..(35): Xaa is C or S

SEQ ID NO: 26814 - protein, 36 aa, Artificial Sequence; identical to SEQ ID NO: 5685
  GFR-binding peptide
  MOD_RES (1)..(3): Xaa is C or S
  MOD_RES (15)..(16)..(17)..(18)..(19): Xaa is A or G
  MOD_RES (20)..(21)..(22)..(23): Xaa is A or G or is absent

SEQ ID NO: 26815 - protein, 35 aa, Artificial Sequence; identical to SEQ ID NO: 5688
  GFR-binding peptide
  MOD_RES (1)..(32)..(33): Xaa is C or S

SEQ ID NO: 26816 - protein, 34 aa, Artificial Sequence
  GFR-binding peptide
  MOD_RES (1)..(33)..(34): Xaa is C or S
XARVVMNEYQKYIVNSSDDIYLVSIPSLQTPAXX

SEQ ID NO: 26817 - protein, 37 aa, Artificial Sequence
  GFR-binding peptide
  MOD_RES (2)..(4): Xaa is C or S
  MOD_RES (16)..(17)..(18)..(19)..(20): Xaa is A or G
  MOD_RES (21)..(22)..(23)..(24): Xaa is A or G or is absent
RXGXGEVVMEEYKFKXXXXXXXXXLYLMSIPELETPV

SEQ ID NO: 26818 - protein, 35 aa, Artificial Sequence; identical to SEQ ID NO: 5691
  GFR-binding peptide
  MOD_RES (2)..(33)..(34): Xaa is C or S

SEQ ID NO: 26819 - protein, 34 aa, Artificial Sequence
  GFR-binding peptide
  MOD_RES (34)..(34): Xaa is C or S
  MOD_RES (12)..(13)..(14)..(15)..(16): Xaa is A or G
  MOD_RES (17)..(18)..(19)..(20): Xaa is A or G or is absent
ESVAMGEYKFKXXXXXXXXXLYLISIPELKTPVX

SEQ ID NO: 26820 - protein, 35 aa, Artificial Sequence
  GFR-binding peptide
  MOD_RES (2)..(2): Xaa is C or S
  MOD_RES (14)..(15)..(16)..(17)..(18): Xaa is A or G
  MOD_RES (19)..(20)..(21)..(22): Xaa is A or G or is absent
GXARVVMNEYQKYXXXXXXXXXIYLVSIPSLQTPA

SEQ ID NO: 26821 - protein, 31 aa, Artificial Sequence
  GFR-binding peptide
AKVVMNEYKFKIVNNSSDLYLVSIPELKTPA

SEQ ID NO: 26822 - protein, 38 aa, Artificial Sequence
  GFR-binding peptide
  MOD_RES (2)..(34)..(35): Xaa is C or S
GXGEVVMEEYKFKVVKDYEDLYLMSIPELETPVXXAKP

SEQ ID NO: 26823 - protein, 38 aa, Artificial Sequence; identical to SEQ ID NO: 5698
  GFR-binding peptide
  MOD_RES (1)..(3)..(37)..(38): Xaa is C or S
  MOD_RES (15)..(16)..(17)..(18)..(19): Xaa is A or G
  MOD_RES (20)..(21)..(22)..(23): Xaa is A or G or is absent

SEQ ID NO: 26824 - protein, 38 aa, Artificial Sequence
  GFR-binding peptide
  MOD_RES (33)..(34): Xaa is C or S
  MOD_RES (11)..(12)..(13)..(14)..(15): Xaa is A or G
  MOD_RES (16)..(17)..(18)..(19): Xaa is A or G or is absent
RVVMNEYQKYXXXXXXXXXIYLVSIPSLQTPAXXPKPV

SEQ ID NO: 26825 - protein, 31 aa, Artificial Sequence; identical to SEQ ID NO: 5701
  GFR-binding peptide

SEQ ID NO: 26826 - protein, 39 aa, Artificial Sequence; identical to SEQ ID NO: 5702
  GFR-binding peptide
  MOD_RES (2)..(36)..(37): Xaa is C or S
  MOD_RES (14)..(15)..(16)..(17)..(18): Xaa is A or G
  MOD_RES (19)..(20)..(21)..(22): Xaa is A or G or is absent

SEQ ID NO: 26827 - protein, 41 aa, Artificial Sequence
  GFR-binding peptide
  MOD_RES (1)..(35)..(36): Xaa is C or S
  MOD_RES (13)..(14)..(15)..(16)..(17): Xaa is A or G
  MOD_RES (18)..(19)..(20)..(21): Xaa is A or G or is absent
XESVAMGRYKKLXXXXXXXXXFYLISIANLKTPVXXAKSAK

SEQ ID NO: 26828 - protein, 40 aa, Artificial Sequence
  GFR-binding peptide
  MOD_RES (34)..(35): Xaa is C or S
  MOD_RES (12)..(13)..(14)..(15)..(16): Xaa is A or G
  MOD_RES (17)..(18)..(19)..(20): Xaa is A or G or is absent
SRVVMNEYKFKXXXXXXXXXLYLVSIPELKTPAXXPKPVY

SEQ ID NO: 26829 - protein, 35 aa, Artificial Sequence
  GFR-binding peptide
  MOD_RES (2)..(4): Xaa is C or S
RXGXAEVVMDRYKKLVVNNAADFYLISIANLRAPV

SEQ ID NO: 26830 - protein, 41 aa, Artificial Sequence; identical to SEQ ID NO: 5706
  GFR-binding peptide
  MOD_RES (2)..(4)..(37)..(38): Xaa is C or S
  MOD_RES (15)..(16)..(17)..(18)..(19): Xaa is A or G
  MOD_RES (20)..(21)..(22)..(23): Xaa is A or G or is absent

SEQ ID NO: 26831 - protein, 38 aa, Artificial Sequence; identical to SEQ ID NO: 5707
  GFR-binding peptide
  MOD_RES (2)..(4)..(35)..(36): Xaa is C or S

SEQ ID NO: 26832 - protein, 38 aa, Artificial Sequence
  GFR-binding peptide
  MOD_RES (2)..(4)..(38): Xaa is C or S
  MOD_RES (16)..(17)..(18)..(19)..(20): Xaa is A or G
  MOD_RES (21)..(22)..(23)..(24): Xaa is A or G or is absent
RXGXAEVVMDEYKFKXXXXXXXXXLYLISIPELRAPVX

SEQ ID NO: 26833 - protein, 34 aa, Artificial Sequence
  GFR-binding peptide
  MOD_RES (2)..(34): Xaa is C or S
GXARVVMNEYKFKIVNSSDDLYLVSIPELQTPAX

SEQ ID NO: 26834 - protein, 37 aa, Artificial Sequence
  GFR-binding peptide
  MOD_RES (1)..(3)..(36)..(37): Xaa is C or S
  MOD_RES (14)..(15)..(16)..(17)..(18): Xaa is A or G
  MOD_RES (19)..(20)..(21)..(22): Xaa is A or G or is absent
XKXSKVVMEYQKYXXXXXXXXXIYLISIPSLDQPVXX

SEQ ID NO: 26835 - protein, 38 aa, Artificial Sequence
  GFR-binding peptide
  MOD_RES (1)..(3)..(37)..(38): Xaa is C or S
  MOD_RES (15)..(16)..(17)..(18)..(19): Xaa is A or G
  MOD_RES (20)..(21)..(22)..(23): Xaa is A or G or is absent
XGXGEVVMEEYKFKXXXXXXXXXLYLMSIPELETPVXX

SEQ ID NO: 26836 - protein, 37 aa, Artificial Sequence
  GFR-binding peptide
  MOD_RES (31)..(32): Xaa is C or S
KVVMNEYKFKIVNNSSDLYLVSIPELKTPAXXAKPVA

SEQ ID NO: 26837 - protein, 39 aa, Artificial Sequence; identical to SEQ ID NO: 5712
  GFR-binding peptide
  MOD_RES (2)..(34)..(35): Xaa is C or S

SEQ ID NO: 26838 - protein, 36 aa, Artificial Sequence; identical to SEQ ID NO: 5713
  GFR-binding peptide
  MOD_RES (2)..(4): Xaa is C or S
  MOD_RES (15)..(16)..(17)..(18)..(19): Xaa is A or G
  MOD_RES (20)..(21)..(22)..(23): Xaa is A or G or is absent

SEQ ID NO: 26839 - protein, 37 aa, Artificial Sequence; identical to SEQ ID NO: 5715
  GFR-binding peptide
  MOD_RES (1)..(33)..(34): Xaa is C or S

SEQ ID NO: 26840 - protein, 37 aa, Artificial Sequence
  GFR-binding peptide
  MOD_RES (2)..(4)..(37): Xaa is C or S
RXGXEAVSMGEEYKFKTPVGMDDLYLVSIPELKTPVX

SEQ ID NO: 26841 - protein, 36 aa, Artificial Sequence; identical to SEQ ID NO: 5716
  GFR-binding peptide
  MOD_RES (1)..(3)..(35)..(36): Xaa is C or S

SEQ ID NO: 26842 - protein, 41 aa, Artificial Sequence; identical to SEQ ID NO: 5717
  GFR-binding peptide
  MOD_RES (2)..(4)..(39)..(40): Xaa is C or S
  MOD_RES (17)..(18)..(19)..(20)..(21): Xaa is A or G
  MOD_RES (22)..(23)..(24)..(25): Xaa is A or G or is absent

SEQ ID NO: 26843 - protein, 38 aa, Artificial Sequence
  GFR-binding peptide
  MOD_RES (1)..(32)..(33): Xaa is C or S
XSKVIMEYKFKIKPTKGILYLISIPELDQSVXXPSASA

SEQ ID NO: 26844 - protein, 31 aa, Artificial Sequence
  GFR-binding peptide
  MOD_RES (31)..(31): Xaa is C or S
SKVVMEYQKYVKPTRGVIYLISIPSLDQPVX

SEQ ID NO: 26845 - protein, 36 aa, Artificial Sequence
  GFR-binding peptide
  MOD_RES (2)..(4): Xaa is C or S
RXGXEAVSMGEEYQKYTPVGMDDIYLVSIPSLKTPV

SEQ ID NO: 26846 - protein, 35 aa, Artificial Sequence; identical to SEQ ID NO: 5719
  GFR-binding peptide
  MOD_RES (31)..(32): Xaa is C or S

SEQ ID NO: 26847 - protein, 38 aa, Artificial Sequence; identical to SEQ ID NO: 5721
  GFR-binding peptide
  MOD_RES (1)..(35)..(36): Xaa is C or S
  MOD_RES (13)..(14)..(15)..(16)..(17): Xaa is A or G
  MOD_RES (18)..(19)..(20)..(21): Xaa is A or G or is absent

SEQ ID NO: 26848 - protein, 44 aa, Artificial Sequence
  GFR-binding peptide
  MOD_RES (2)..(4)..(38)..(39): Xaa is C or S
  MOD_RES (16)..(17)..(18)..(19)..(20): Xaa is A or G
  MOD_RES (21)..(22)..(23)..(24): Xaa is A or G or is absent
RXGXAEVVMDEYKFKXXXXXXXXXLYLISIPELRAPVXXSAPAA

SEQ ID NO: 26849 - protein, 36 aa, Artificial Sequence
  GFR-binding peptide
  MOD_RES (32)..(33): Xaa is C or S
ESVAMGYHYKLYTVVGKDKYLISIPSLKTPVXXAKS

SEQ ID NO: 26850 - protein, 37 aa, Artificial Sequence
  GFR-binding peptide
  MOD_RES (1)..(35)..(36): Xaa is C or S
  MOD_RES (13)..(14)..(15)..(16)..(17): Xaa is A or G
  MOD_RES (18)..(19)..(20)..(21): Xaa is A or G or is absent
XAEVVMDRYKKLXXXXXXXXXFYLISIANLRAPVXXS

SEQ ID NO: 26851 - protein, 32 aa, Artificial Sequence
  GFR-binding peptide
  MOD_RES (31)..(31): Xaa is C or S
RVVMNEYKFKIVNSSDDLYLVSIPELKTPAXT

SEQ ID NO: 26852 - protein, 39 aa, Artificial Sequence
  GFR-binding peptide
  MOD_RES (2)..(4)..(38)..(39): Xaa is C or S
  MOD_RES (16)..(17)..(18)..(19)..(20): Xaa is A or G
  MOD_RES (21)..(22)..(23)..(24): Xaa is A or G or is absent
RXGXESVAMGEYKFKXXXXXXXXXLYLISIPELKTPVXX

SEQ ID NO: 26853 - protein, 31 aa, Artificial Sequence; identical to SEQ ID NO: 5727
  GFR-binding peptide
  MOD_RES (31)..(31): Xaa is C or S

SEQ ID NO: 26854 - protein, 35 aa, Artificial Sequence; identical to SEQ ID NO: 5728
  GFR-binding peptide
  MOD_RES (34)..(35): Xaa is C or S
  MOD_RES (12)..(13)..(14)..(15)..(16): Xaa is A or G
  MOD_RES (17)..(18)..(19)..(20): Xaa is A or G or is absent

SEQ ID NO: 26855 - protein, 36 aa, Artificial Sequence
  GFR-binding peptide
  MOD_RES (1)..(34)..(35): Xaa is C or S
  MOD_RES (12)..(13)..(14)..(15)..(16): Xaa is A or G
  MOD_RES (17)..(18)..(19)..(20): Xaa is A or G or is absent
XSKVVMEYQKYXXXXXXXXXIYLISIPSLDQPVXXP

SEQ ID NO: 26856 - protein, 40 aa, Artificial Sequence
  GFR-binding peptide
  MOD_RES (1)..(3)..(37)..(38): Xaa is C or S
  MOD_RES (15)..(16)..(17)..(18)..(19): Xaa is A or G
  MOD_RES (20)..(21)..(22)..(23): Xaa is A or G or is absent
XGXESVAMGRYKKLXXXXXXXXXFYLISIANLKTPVXXAK

SEQ ID NO: 26857 - protein, 34 aa, Artificial Sequence
  GFR-binding peptide
  MOD_RES (1)..(33): Xaa is C or S
XSRVVMNEYQKYIVNSSDDIYLVSIPSLKTPAXT

SEQ ID NO: 26858 - protein, 34 aa, Artificial Sequence; identical to SEQ ID NO: 5729
  GFR-binding peptide
  MOD_RES (1)..(33)..(34): Xaa is C or S

SEQ ID NO: 26859 - protein, 39 aa, Artificial Sequence; identical to SEQ ID NO: 5730
  GFR-binding peptide
  MOD_RES (33)..(34): Xaa is C or S
  MOD_RES (11)..(12)..(13)..(14)..(15): Xaa is A or G
  MOD_RES (16)..(17)..(18)..(19): Xaa is A or G or is absent

SEQ ID NO: 26860 - protein, 31 aa, Artificial Sequence
  GFR-binding peptide
  MOD_RES (31)..(31): Xaa is C or S
EVVMDYHYKLVVNNAADKYLISIPSLRAPVX

SEQ ID NO: 26861 - protein, 41 aa, Artificial Sequence; identical to SEQ ID NO: 5731
  GFR-binding peptide
  MOD_RES (1)..(3)..(35)..(36): Xaa is C or S

SEQ ID NO: 26862 - protein, 39 aa, Artificial Sequence; identical to SEQ ID NO: 5733
  GFR-binding peptide
  MOD_RES (2)..(4)..(35)..(36): Xaa is C or S

SEQ ID NO: 26863 - protein, 38 aa, Artificial Sequence; identical to SEQ ID NO: 5734
  GFR-binding peptide
  MOD_RES (2)..(4)..(36)..(37): Xaa is C or S

SEQ ID NO: 26864 - protein, 36 aa, Artificial Sequence
  GFR-binding peptide
  MOD_RES (2)..(35)..(36): Xaa is C or S
  MOD_RES (13)..(14)..(15)..(16)..(17): Xaa is A or G
  MOD_RES (18)..(19)..(20)..(21): Xaa is A or G or is absent
KXSKVVMEYKFKXXXXXXXXXLYLISIPELDQPVXX

SEQ ID NO: 26865 - protein, 39 aa, Artificial Sequence
  GFR-binding peptide
  MOD_RES (2)..(4)..(39): Xaa is C or S
  MOD_RES (17)..(18)..(19)..(20)..(21): Xaa is A or G
  MOD_RES (22)..(23)..(24)..(25): Xaa is A or G or is absent
RXGXEAVSMGEEYKFKXXXXXXXXXLYLVSIPELKTPVX

SEQ ID NO: 26866 - protein, 40 aa, Artificial Sequence
  GFR-binding peptide
  MOD_RES (1)..(3)..(37)..(38): Xaa is C or S
  MOD_RES (15)..(16)..(17)..(18)..(19): Xaa is A or G
  MOD_RES (20)..(21)..(22)..(23): Xaa is A or G or is absent
XGXAEVVMDEYQKYXXXXXXXXXIYLISIPSLRAPVXXSA

SEQ ID NO: 26867 - protein, 42 aa, Artificial Sequence; identical to SEQ ID NO: 5735
  GFR-binding peptide
  MOD_RES (2)..(4)..(38)..(39): Xaa is C or S
  MOD_RES (16)..(17)..(18)..(19)..(20): Xaa is A or G
  MOD_RES (21)..(22)..(23)..(24): Xaa is A or G or is absent

SEQ ID NO: 26868 - protein, 33 aa, Artificial Sequence; identical to SEQ ID NO: 5736
  GFR-binding peptide
  MOD_RES (2)..(2): Xaa is C or S

SEQ ID NO: 26869 - protein, 37 aa, Artificial Sequence
  GFR-binding peptide
  MOD_RES (32)..(33): Xaa is C or S
AKVVMNEYQKYIVNNSSDIYLVSIPSLKTPAXXAKPV

SEQ ID NO: 26870 - protein, 42 aa, Artificial Sequence; identical to SEQ ID NO: 5737
  GFR-binding peptide
  MOD_RES (1)..(3)..(36)..(37): Xaa is C or S

SEQ ID NO: 26871 - protein, 39 aa, Artificial Sequence
  GFR-binding peptide
  MOD_RES (2)..(4)..(36)..(37): Xaa is C or S
RXGXGEVVMEEYKFKVVKDYEDLYLMSIPELETPVXXAK

SEQ ID NO: 26872 - protein, 36 aa, Artificial Sequence
  GFR-binding peptide
  MOD_RES (33)..(34): Xaa is C or S
  MOD_RES (11)..(12)..(13)..(14)..(15): Xaa is A or G
  MOD_RES (16)..(17)..(18)..(19): Xaa is A or G or is absent
EVVMEEYQKYXXXXXXXXXIYLMSIPSLETPVXXAK

SEQ ID NO: 26873 - protein, 35 aa, Artificial Sequence
  GFR-binding peptide
  MOD_RES (1)..(3): Xaa is C or S
  MOD_RES (14)..(15)..(16)..(17)..(18): Xaa is A or G
  MOD_RES (19)..(20)..(21)..(22): Xaa is A or G or is absent
XKXSRVIMEYKFKXXXXXXXXXLYLISIPELAQPV

SEQ ID NO: 26874 - protein, 40 aa, Artificial Sequence
  GFR-binding peptide
  MOD_RES (34)..(35): Xaa is C or S
  MOD_RES (12)..(13)..(14)..(15)..(16): Xaa is A or G
  MOD_RES (17)..(18)..(19)..(20): Xaa is A or G or is absent
ARVVMNEYQKYXXXXXXXXXIYLVSIPSLQTPAXXPKPVT

SEQ ID NO: 26875 - protein, 38 aa, Artificial Sequence
  GFR-binding peptide
  MOD_RES (2)..(4)..(38): Xaa is C or S
  MOD_RES (16)..(17)..(18)..(19)..(20): Xaa is A or G
  MOD_RES (21)..(22)..(23)..(24): Xaa is A or G or is absent
HXGXSRVVMNEYKFKXXXXXXXXXLYLVSIPELKTPAX

SEQ ID NO: 26876 - protein, 35 aa, Artificial Sequence; identical to SEQ ID NO: 5742
  GFR-binding peptide
  MOD_RES (2)..(4): Xaa is C or S

SEQ ID NO: 26877 - protein, 38 aa, Artificial Sequence
  GFR-binding peptide
  MOD_RES (2)..(4)..(38): Xaa is C or S
  MOD_RES (16)..(17)..(18)..(19)..(20): Xaa is A or G
  MOD_RES (21)..(22)..(23)..(24): Xaa is A or G or is absent
HXGXAKVVMNEYQKYXXXXXXXXXIYLVSIPSLKTPAX

SEQ ID NO: 26878 - protein, 36 aa, Artificial Sequence
  GFR-binding peptide
  MOD_RES (1)..(34)..(35): Xaa is C or S
XEAVSMGEEYKFKTPVGMDDLYLVSIPELKTPVXXA

SEQ ID NO: 26879 - protein, 32 aa, Artificial Sequence; identical to SEQ ID NO: 5746
  GFR-binding peptide
  MOD_RES (11)..(12)..(13)..(14)..(15): Xaa is A or G
  MOD_RES (16)..(17)..(18)..(19): Xaa is A or G or is absent

SEQ ID NO: 26880 - protein, 37 aa, Artificial Sequence; identical to SEQ ID NO: 5749
  GFR-binding peptide
  MOD_RES (1)..(3)..(35)..(36): Xaa is C or S

SEQ ID NO: 26881 - protein, 42 aa, Artificial Sequence
  GFR-binding peptide
  MOD_RES (2)..(4)..(37)..(38): Xaa is C or S
  MOD_RES (15)..(16)..(17)..(18)..(19): Xaa is A or G
  MOD_RES (20)..(21)..(22)..(23): Xaa is A or G or is absent
SXKXSRVIMEYKFKXXXXXXXXXLYLISIPELAQPVXXPAAS

SEQ ID NO: 26882 - protein, 39 aa, Artificial Sequence; identical to SEQ ID NO: 5750
  GFR-binding peptide
  MOD_RES (1)..(35)..(36): Xaa is C or S
  MOD_RES (13)..(14)..(15)..(16)..(17): Xaa is A or G
  MOD_RES (18)..(19)..(20)..(21): Xaa is A or G or is absent

SEQ ID NO: 26883 - protein, 37 aa, Artificial Sequence
  GFR-binding peptide
  MOD_RES (32)..(33): Xaa is C or S
AEVVMDEYKFKVVNNAADLYLISIPELRAPVXXSAPA

SEQ ID NO: 26884 - protein, 38 aa, Artificial Sequence; identical to SEQ ID NO: 5753
  GFR-binding peptide
  MOD_RES (2)..(4)..(37)..(38): Xaa is C or S
  MOD_RES (15)..(16)..(17)..(18)..(19): Xaa is A or G
  MOD_RES (20)..(21)..(22)..(23): Xaa is A or G or is absent

SEQ ID NO: 26885 - protein, 34 aa, Artificial Sequence; identical to SEQ ID NO: 5754
  GFR-binding peptide
  MOD_RES (31)..(32): Xaa is C or S

SEQ ID NO: 26886 - protein, 34 aa, Artificial Sequence; identical to SEQ ID NO: 5755
  GFR-binding peptide
  MOD_RES (34)..(34): Xaa is C or S
  MOD_RES (12)..(13)..(14)..(15)..(16): Xaa is A or G
  MOD_RES (17)..(18)..(19)..(20): Xaa is A or G or is absent

SEQ ID NO: 26887 - protein, 33 aa, Artificial Sequence
  GFR-binding peptide
  MOD_RES (12)..(13)..(14)..(15)..(16): Xaa is A or G
  MOD_RES (17)..(18)..(19)..(20): Xaa is A or G or is absent
GEVVMDEYKFKXXXXXXXXXLYLMSIPELETPV

SEQ ID NO: 26888 - protein, 36 aa, Artificial Sequence
  GFR-binding peptide
  MOD_RES (35)..(36): Xaa is C or S
  MOD_RES (13)..(14)..(15)..(16)..(17): Xaa is A or G
  MOD_RES (18)..(19)..(20)..(21): Xaa is A or G or is absent
EAVSMGEEYKFKXXXXXXXXXLYLVSIPELKTPVXX

SEQ ID NO: 26889 - protein, 39 aa, Artificial Sequence
  GFR-binding peptide
  MOD_RES (34)..(35): Xaa is C or S
  MOD_RES (12)..(13)..(14)..(15)..(16): Xaa is A or G
  MOD_RES (17)..(18)..(19)..(20): Xaa is A or G or is absent
ARVVMNEYQKYXXXXXXXXXIYLVSIPSLQTPAXXPKPV

SEQ ID NO: 26890 - protein, 37 aa, Artificial Sequence; identical to SEQ ID NO: 5758
  GFR-binding peptide
  MOD_RES (1)..(3): Xaa is C or S
  MOD_RES (16)..(17)..(18)..(19)..(20): Xaa is A or G
  MOD_RES (21)..(22)..(23)..(24): Xaa is A or G or is absent

SEQ ID NO: 26891 - protein, 38 aa, Artificial Sequence; identical to SEQ ID NO: 5759
  GFR-binding peptide
  MOD_RES (1)..(35)..(36): Xaa is C or S
  MOD_RES (13)..(14)..(15)..(16)..(17): Xaa is A or G
  MOD_RES (18)..(19)..(20)..(21): Xaa is A or G or is absent

SEQ ID NO: 26892 - protein, 42 aa, Artificial Sequence; identical to SEQ ID NO: 5761
  GFR-binding peptide
  MOD_RES (1)..(3)..(37)..(38): Xaa is C or S
  MOD_RES (15)..(16)..(17)..(18)..(19): Xaa is A or G
  MOD_RES (20)..(21)..(22)..(23): Xaa is A or G or is absent

SEQ ID NO: 26893 - protein, 36 aa, Artificial Sequence
  GFR-binding peptide
  MOD_RES (1)..(35)..(36): Xaa is C or S
  MOD_RES (13)..(14)..(15)..(16)..(17): Xaa is A or G
  MOD_RES (18)..(19)..(20)..(21): Xaa is A or G or is absent
XGEVVMEEYKFKXXXXXXXXXLYLMSIPELETPVXX

SEQ ID NO: 26894 - protein, 35 aa, Artificial Sequence
  GFR-binding peptide
  MOD_RES (33)..(34): Xaa is C or S
  MOD_RES (11)..(12)..(13)..(14)..(15): Xaa is A or G
  MOD_RES (16)..(17)..(18)..(19): Xaa is A or G or is absent
EVVMEEYQKYXXXXXXXXXIYLMSIPSLETPVXXA

SEQ ID NO: 26895 - protein, 43 aa, Artificial Sequence
  GFR-binding peptide
  MOD_RES (1)..(3)..(37)..(38): Xaa is C or S
  MOD_RES (15)..(16)..(17)..(18)..(19): Xaa is A or G
  MOD_RES (20)..(21)..(22)..(23): Xaa is A or G or is absent
XGXARVVMNEYKFKXXXXXXXXXLYLVSIPELQTPAXXPKPVT

SEQ ID NO: 26896 - protein, 33 aa, Artificial Sequence
  GFR-binding peptide
  MOD_RES (2)..(2): Xaa is C or S
GXARVVMNEYQKYIVNSSDDIYLVSIPSLQTPA

SEQ ID NO: 26897 - protein, 37 aa, Artificial Sequence
  GFR-binding peptide
  MOD_RES (2)..(4)..(36)..(37): Xaa is C or S
RXGXGEVVMEEYQKYVVKDYEDIYLMSIPSLETPVXX

SEQ ID NO: 26898 - protein, 40 aa, Artificial Sequence
  GFR-binding peptide
  MOD_RES (2)..(34)..(35): Xaa is C or S
GXAKVVMNEYQKYIVNNSSDIYLVSIPSLKTPAXXAKPVA

SEQ ID NO: 26899 - protein, 39 aa, Artificial Sequence
  GFR-binding peptide
  MOD_RES (33)..(34): Xaa is C or S
  MOD_RES (11)..(12)..(13)..(14)..(15): Xaa is A or G
  MOD_RES (16)..(17)..(18)..(19): Xaa is A or G or is absent
SRVIMEYKFKXXXXXXXXXLYLISIPELAQPVXXPAASA

SEQ ID NO: 26900 - protein, 34 aa, Artificial Sequence
  GFR-binding peptide
  MOD_RES (1)..(33)..(34): Xaa is C or S
XARVVMNEYKFKIVNSSDDLYLVSIPELQTPAXX

SEQ ID NO: 26901 - protein, 39 aa, Artificial Sequence
  GFR-binding peptide
  MOD_RES (2)..(34)..(35): Xaa is C or S
GXAEVVMDRYKKLVVNNAADFYLISIANLRAPVXXSAPA

SEQ ID NO: 26902 - protein, 35 aa, Artificial Sequence
  GFR-binding peptide
  MOD_RES (1)..(33)..(34): Xaa is C or S
XAKVVMNEYKFKIVNNSSDLYLVSIPELKTPAXXA

SEQ ID NO: 26903 - protein, 37 aa, Artificial Sequence
  GFR-binding peptide
  MOD_RES (2)..(36)..(37): Xaa is C or S
  MOD_RES (14)..(15)..(16)..(17)..(18): Xaa is A or G
  MOD_RES (19)..(20)..(21)..(22): Xaa is A or G or is absent
GXESVAMGEYQKYXXXXXXXXXIYLISIPSLKTPVXX

SEQ ID NO: 26904 - protein, 42 aa, Artificial Sequence
  GFR-binding peptide
  MOD_RES (2)..(4)..(36)..(37): Xaa is C or S
RXGXGEVVMDEYKFKVVKENEDLYLMSIPELETPVXXAKPIK

SEQ ID NO: 26905 - protein, 30 aa, Artificial Sequence
  GFR-binding peptide
EVVMEEYKFKVVKDYEDLYLMSIPELETPV

SEQ ID NO: 26906 - protein, 36 aa, Artificial Sequence
  GFR-binding peptide
  MOD_RES (2)..(33)..(34): Xaa is C or S
KXSKVVMEYKFKVKPTRGVLYLISIPELDQPVXXPS

SEQ ID NO: 26907 - protein, 39 aa, Artificial Sequence
  GFR-binding peptide
  MOD_RES (1)..(3)..(36)..(37): Xaa is C or S
  MOD_RES (14)..(15)..(16)..(17)..(18): Xaa is A or G
  MOD_RES (19)..(20)..(21)..(22): Xaa is A or G or is absent
XKXSKVIMEYQKYXXXXXXXXXIYLISIPSLDQSVXXPS

SEQ ID NO: 26908 - protein, 36 aa, Artificial Sequence; identical to SEQ ID NO: 5768
  GFR-binding peptide
  MOD_RES (1)..(32)..(33): Xaa is C or S

SEQ ID NO: 26909 - protein, 34 aa, Artificial Sequence; identical to SEQ ID NO: 5769
  GFR-binding peptide
  MOD_RES (1)..(33)..(34): Xaa is C or S

SEQ ID NO: 26910 - protein, 41 aa, Artificial Sequence
  GFR-binding peptide
  MOD_RES (2)..(4)..(38)..(39): Xaa is C or S
  MOD_RES (16)..(17)..(18)..(19)..(20): Xaa is A or G
  MOD_RES (21)..(22)..(23)..(24): Xaa is A or G or is absent
RXGXESVAMGEYQKYXXXXXXXXXIYLISIPSLKTPVXXAK

SEQ ID NO: 26911 - protein, 37 aa, Artificial Sequence; identical to SEQ ID NO: 5771
  GFR-binding peptide
  MOD_RES (2)..(33)..(34): Xaa is C or S

SEQ ID NO: 26912 - protein, 36 aa, Artificial Sequence; identical to SEQ ID NO: 5774
  GFR-binding peptide
  MOD_RES (2)..(35)..(36): Xaa is C or S

SEQ ID NO: 26913 - protein, 39 aa, Artificial Sequence; identical to SEQ ID NO: 5776
  GFR-binding peptide
  MOD_RES (2)..(4)..(37)..(38): Xaa is C or S

SEQ ID NO: 26914 - protein, 36 aa, Artificial Sequence
  GFR-binding peptide
  MOD_RES (1)..(3): Xaa is C or S
  MOD_RES (15)..(16)..(17)..(18)..(19): Xaa is A or G
  MOD_RES (20)..(21)..(22)..(23): Xaa is A or G or is absent
XGXESVAMGEYQKYXXXXXXXXXIYLISIPSLKTPV

SEQ ID NO: 26915 - protein, 35 aa, Artificial Sequence
  GFR-binding peptide
  MOD_RES (2)..(2): Xaa is C or S
  MOD_RES (14)..(15)..(16)..(17)..(18): Xaa is A or G
  MOD_RES (19)..(20)..(21)..(22): Xaa is A or G or is absent
GXGEVVMDEYQKYXXXXXXXXXIYLMSIPSLETPV

SEQ ID NO: 26916 - protein, 36 aa, Artificial Sequence
  GFR-binding peptide
  MOD_RES (1)..(34)..(35): Xaa is C or S
  MOD_RES (12)..(13)..(14)..(15)..(16): Xaa is A or G
  MOD_RES (17)..(18)..(19)..(20): Xaa is A or G or is absent
XSRVIMEYKFKXXXXXXXXXLYLISIPELAQPVXXP

SEQ ID NO: 26917 - protein, 37 aa, Artificial Sequence
  GFR-binding peptide
  MOD_RES (1)..(3)..(36)..(37): Xaa is C or S
  MOD_RES (14)..(15)..(16)..(17)..(18): Xaa is A or G
  MOD_RES (19)..(20)..(21)..(22): Xaa is A or G or is absent
XKXSKVIMEYQKYXXXXXXXXXIYLISIPSLDQSVXX

SEQ ID NO: 26918 - protein, 35 aa, Artificial Sequence; identical to SEQ ID NO: 5780
  GFR-binding peptide
  MOD_RES (2)..(33)..(34): Xaa is C or S

SEQ ID NO: 26919 - protein, 36 aa, Artificial Sequence; identical to SEQ ID NO: 5782
  GFR-binding peptide
  MOD_RES (2)..(36): Xaa is C or S
  MOD_RES (14)..(15)..(16)..(17)..(18): Xaa is A or G
  MOD_RES (19)..(20)..(21)..(22): Xaa is A or G or is absent

SEQ ID NO: 26920 - protein, 32 aa, Artificial Sequence; identical to SEQ ID NO: 5783
  GFR-binding peptide
  MOD_RES (1)..(32): Xaa is C or S

SEQ ID NO: 26921 - protein, 36 aa, Artificial Sequence
  GFR-binding peptide
  MOD_RES (1)..(3)..(35)..(36): Xaa is C or S
XGXGEVVMEEYKFKVVKDYEDLYLMSIPELETPVXX

SEQ ID NO: 26922 - protein, 38 aa, Artificial Sequence
  GFR-binding peptide
  MOD_RES (1)..(3)..(35)..(36): Xaa is C or S
XGXGEVVMEEYQKYVVKDYEDIYLMSIPSLETPVXXAK

SEQ ID NO: 26923 - protein, 37 aa, Artificial Sequence
  GFR-binding peptide
  MOD_RES (31)..(31): Xaa is C or S
RVVMNEYQKYIVNSSDDIYLVSIPSLKTPAXTPKTVH

SEQ ID NO: 26924 - protein, 36 aa, Artificial Sequence; identical to SEQ ID NO: 5788
  GFR-binding peptide
  MOD_RES (34)..(35): Xaa is C or S
  MOD_RES (12)..(13)..(14)..(15)..(16): Xaa is A or G
  MOD_RES (17)..(18)..(19)..(20): Xaa is A or G or is absent

SEQ ID NO: 26925 - protein, 34 aa, Artificial Sequence
  GFR-binding peptide
  MOD_RES (2)..(2): Xaa is C or S
GXEAVSMGEEYKFKTPVGMDDLYLVSIPELKTPV

SEQ ID NO: 26926 - protein, 35 aa, Artificial Sequence
  GFR-binding peptide
  MOD_RES (1)..(33)..(34): Xaa is C or S
XAKVVMNEYQKYIVNNSSDIYLVSIPSLKTPAXXA

SEQ ID NO: 26927 - protein, 33 aa, Artificial Sequence
  GFR-binding peptide
  MOD_RES (1)..(1): Xaa is C or S
  MOD_RES (12)..(13)..(14)..(15)..(16): Xaa is A or G
  MOD_RES (17)..(18)..(19)..(20): Xaa is A or G or is absent
XSKVIMEYKFKXXXXXXXXXLYLISIPELDQSV

SEQ ID NO: 26928 - protein, 38 aa, Artificial Sequence
  GFR-binding peptide
  MOD_RES (2)..(4)..(35)..(36): Xaa is C or S
SXKXSRVIMEYKFKVKPKRGVLYLISIPELAQPVXXPA

SEQ ID NO: 26929 - protein, 39 aa, Artificial Sequence; identical to SEQ ID NO: 5794
  GFR-binding peptide
  MOD_RES (33)..(34): Xaa is C or S

SEQ ID NO: 26930 - protein, 35 aa, Artificial Sequence
  GFR-binding peptide
  MOD_RES (1)..(33)..(34): Xaa is C or S
XESVAMGEYQKYYTVVGKDIYLISIPSLKTPVXXA

SEQ ID NO: 26931 - protein, 35 aa, Artificial Sequence
  GFR-binding peptide
  MOD_RES (31)..(32): Xaa is C or S
SKVVMEYKFKVKPTRGVLYLISIPELDQPVXXPSA

SEQ ID NO: 26932 - protein, 34 aa, Artificial Sequence; identical to SEQ ID NO: 5796
  GFR-binding peptide
  MOD_RES (33)..(34): Xaa is C or S
  MOD_RES (11)..(12)..(13)..(14)..(15): Xaa is A or G
  MOD_RES (16)..(17)..(18)..(19): Xaa is A or G or is absent

SEQ ID NO: 26933 - protein, 37 aa, Artificial Sequence
  GFR-binding peptide
  MOD_RES (34)..(35): Xaa is C or S
  MOD_RES (12)..(13)..(14)..(15)..(16): Xaa is A or G
  MOD_RES (17)..(18)..(19)..(20): Xaa is A or G or is absent
AKVVMNEYKFKXXXXXXXXXLYLVSIPELKTPAXXAK

SEQ ID NO: 26934 - protein, 42 aa, Artificial Sequence
  GFR-binding peptide
  MOD_RES (2)..(4)..(38)..(39): Xaa is C or S
  MOD_RES (16)..(17)..(18)..(19)..(20): Xaa is A or G
  MOD_RES (21)..(22)..(23)..(24): Xaa is A or G or is absent
RXGXAEVVMDYHYKLXXXXXXXXXKYLISIPSLRAPVXXSAP

SEQ ID NO: 26935 - protein, 41 aa, Artificial Sequence
  GFR-binding peptide
  MOD_RES (1)..(3)..(37)..(38): Xaa is C or S
  MOD_RES (15)..(16)..(17)..(18)..(19): Xaa is A or G
  MOD_RES (20)..(21)..(22)..(23): Xaa is A or G or is absent
XGXARVVMNEYQKYXXXXXXXXXIYLVSIPSLQTPAXXPKP

SEQ ID NO: 26936 - protein, 32 aa, Artificial Sequence
  GFR-binding peptide
  MOD_RES (1)..(1): Xaa is C or S
XAKVVMNEYQKYIVNNSSDIYLVSIPSLKTPA

SEQ ID NO: 26937 - protein, 34 aa, Artificial Sequence
  GFR-binding peptide
  MOD_RES (31)..(32): Xaa is C or S
EVVMDEYKFKVVKENEDLYLMSIPELETPVXXAK

SEQ ID NO: 26938 - protein, 32 aa, Artificial Sequence
  GFR-binding peptide
  MOD_RES (32)..(32): Xaa is C or S
AKVVMNEYQKYIVNNSSDIYLVSIPSLKTPAX

SEQ ID NO: 26939 - protein, 43 aa, Artificial Sequence
  GFR-binding peptide
  MOD_RES (1)..(3)..(37)..(38): Xaa is C or S
  MOD_RES (15)..(16)..(17)..(18)..(19): Xaa is A or G
  MOD_RES (20)..(21)..(22)..(23): Xaa is A or G or is absent
XGXAEVVMDYHYKLXXXXXXXXXKYLISIPSLRAPVXXSAPAA

SEQ ID NO: 26940 - protein, 37 aa, Artificial Sequence
  GFR-binding peptide
  MOD_RES (1)..(3)..(37): Xaa is C or S
  MOD_RES (15)..(16)..(17)..(18)..(19): Xaa is A or G
  MOD_RES (20)..(21)..(22)..(23): Xaa is A or G or is absent
XGXGEVVMDEYQKYXXXXXXXXXIYLMSIPSLETPVX

SEQ ID NO: 26941 - protein, 38 aa, Artificial Sequence; identical to SEQ ID NO: 5808
  GFR-binding peptide
  MOD_RES (1)..(3)..(36)..(37): Xaa is C or S
  MOD_RES (14)..(15)..(16)..(17)..(18): Xaa is A or G
  MOD_RES (19)..(20)..(21)..(22): Xaa is A or G or is absent

SEQ ID NO: 26942 - protein, 37 aa, Artificial Sequence; identical to SEQ ID NO: 5809
  GFR-binding peptide
  MOD_RES (34)..(34): Xaa is C or S
  MOD_RES (12)..(13)..(14)..(15)..(16): Xaa is A or G
  MOD_RES (17)..(18)..(19)..(20): Xaa is A or G or is absent

SEQ ID NO: 26943 - protein, 40 aa, Artificial Sequence
  GFR-binding peptide
  MOD_RES (1)..(3)..(37)..(38): Xaa is C or S
  MOD_RES (15)..(16)..(17)..(18)..(19): Xaa is A or G
  MOD_RES (20)..(21)..(22)..(23): Xaa is A or G or is absent
XGXAEVVMDEYKFKXXXXXXXXXLYLISIPELRAPVXXSA

SEQ ID NO: 26944 - protein, 30 aa, Artificial Sequence; identical to SEQ ID NO: 5814
  GFR-binding peptide

SEQ ID NO: 26945 - protein, 37 aa, Artificial Sequence
  GFR-binding peptide
  MOD_RES (1)..(3)..(34)..(35): Xaa is C or S
XKXSKVVMEYQKYVKPTRGVIYLISIPSLDQPVXXPS

SEQ ID NO: 26946 - protein, 38 aa, Artificial Sequence
  GFR-binding peptide
  MOD_RES (33)..(34): Xaa is C or S
  MOD_RES (11)..(12)..(13)..(14)..(15): Xaa is A or G
  MOD_RES (16)..(17)..(18)..(19): Xaa is A or G or is absent
KVVMNEYQKYXXXXXXXXXIYLVSIPSLKTPAXXAKPV

SEQ ID NO: 26947 - protein, 38 aa, Artificial Sequence; identical to SEQ ID NO: 5817
  GFR-binding peptide
  MOD_RES (32)..(33): Xaa is C or S

SEQ ID NO: 26948 - protein, 31 aa, Artificial Sequence; identical to SEQ ID NO: 5819
  GFR-binding peptide

SEQ ID NO: 26949 - protein, 34 aa, Artificial Sequence
  GFR-binding peptide
  MOD_RES (1)..(1): Xaa is C or S
  MOD_RES (13)..(14)..(15)..(16)..(17): Xaa is A or G
  MOD_RES (18)..(19)..(20)..(21): Xaa is A or G or is absent
XGEVVMEEYQKYXXXXXXXXXIYLMSIPSLETPV

SEQ ID NO: 26950 - protein, 36 aa, Artificial Sequence
  GFR-binding peptide
  MOD_RES (32)..(33): Xaa is C or S
GEVVMDEYQKYVVKENEDIYLMSIPSLETPVXXAKP

SEQ ID NO: 26951 - protein, 40 aa, Artificial Sequence; identical to SEQ ID NO: 5825
  GFR-binding peptide
  MOD_RES (2)..(4)..(36)..(37): Xaa is C or S

SEQ ID NO: 26952 - protein, 34 aa, Artificial Sequence; identical to SEQ ID NO: 5826
  GFR-binding peptide
  MOD_RES (32)..(33): Xaa is C or S

SEQ ID NO: 26953 - protein, 38 aa, Artificial Sequence; identical to SEQ ID NO: 5827
  GFR-binding peptide
  MOD_RES (33)..(34): Xaa is C or S
  MOD_RES (11)..(12)..(13)..(14)..(15): Xaa is A or G
  MOD_RES (16)..(17)..(18)..(19): Xaa is A or G or is absent

SEQ ID NO: 26954 - protein, 40 aa, Artificial Sequence; identical to SEQ ID NO: 5828
  GFR-binding peptide
  MOD_RES (1)..(35): Xaa is C or S
  MOD_RES (13)..(14)..(15)..(16)..(17): Xaa is A or G
  MOD_RES (18)..(19)..(20)..(21): Xaa is A or G or is absent

SEQ ID NO: 26955 - protein, 35 aa, Artificial Sequence
  GFR-binding peptide
  MOD_RES (1)..(35): Xaa is C or S
  MOD_RES (13)..(14)..(15)..(16)..(17): Xaa is A or G
  MOD_RES (18)..(19)..(20)..(21): Xaa is A or G or is absent
XSRVVMNEYKFKXXXXXXXXXLYLVSIPELKTPAX

SEQ ID NO: 26956 - protein, 38 aa, Artificial Sequence; identical to SEQ ID NO: 5830
  GFR-binding peptide
  MOD_RES (2)..(4)..(36)..(37): Xaa is C or S

SEQ ID NO: 26957 - protein, 36 aa, Artificial Sequence; identical to SEQ ID NO: 5831
  GFR-binding peptide
  MOD_RES (2)..(2): Xaa is C or S
  MOD_RES (15)..(16)..(17)..(18)..(19): Xaa is A or G
  MOD_RES (20)..(21)..(22)..(23): Xaa is A or G or is absent

SEQ ID NO: 26958 - protein, 36 aa, Artificial Sequence; identical to SEQ ID NO: 5833
  GFR-binding peptide
  MOD_RES (33)..(34): Xaa is C or S
  MOD_RES (11)..(12)..(13)..(14)..(15): Xaa is A or G
  MOD_RES (16)..(17)..(18)..(19): Xaa is A or G or is absent

SEQ ID NO: 26959 - protein, 38 aa, Artificial Sequence
  GFR-binding peptide
  MOD_RES (2)..(36)..(37): Xaa is C or S
  MOD_RES (14)..(15)..(16)..(17)..(18): Xaa is A or G
  MOD_RES (19)..(20)..(21)..(22): Xaa is A or G or is absent
GXESVAMGEYQKYXXXXXXXXXIYLISIPSLKTPVXXA

SEQ ID NO: 26960 - protein, 35 aa, Artificial Sequence
  GFR-binding peptide
  MOD_RES (32)..(33): Xaa is C or S
AEVVMDYHYKLVVNNAADKYLISIPSLRAPVXXSA

SEQ ID NO: 26961 - protein, 39 aa, Artificial Sequence
  GFR-binding peptide
  MOD_RES (1)..(3)..(35)..(36): Xaa is C or S
XGXGEVVMEEYQKYVVKDYEDIYLMSIPSLETPVXXAKP

SEQ ID NO: 26962 - protein, 41 aa, Artificial Sequence
  GFR-binding peptide
  MOD_RES (1)..(3)..(35)..(36): Xaa is C or S
XGXAEVVMDRYKKLVVNNAADFYLISIANLRAPVXXSAPAA

SEQ ID NO: 26963 - protein, 39 aa, Artificial Sequence; identical to SEQ ID NO: 5837
  GFR-binding peptide
  MOD_RES (1)..(33): Xaa is C or S

SEQ ID NO: 26964 - protein, 39 aa, Artificial Sequence; identical to SEQ ID NO: 5838
  GFR-binding peptide
  MOD_RES (2)..(4)..(36)..(37): Xaa is C or S

SEQ ID NO: 26965 - protein, 43 aa, Artificial Sequence
  GFR-binding peptide
  MOD_RES (1)..(3)..(37): Xaa is C or S
  MOD_RES (15)..(16)..(17)..(18)..(19): Xaa is A or G
  MOD_RES (20)..(21)..(22)..(23): Xaa is A or G or is absent
XGXSRVVMNEYKFKXXXXXXXXXLYLVSIPELKTPAXTPKTVH

SEQ ID NO: 26966 - protein, 38 aa, Artificial Sequence
  GFR-binding peptide
  MOD_RES (1)..(3)..(37)..(38): Xaa is C or S
  MOD_RES (15)..(16)..(17)..(18)..(19): Xaa is A or G
  MOD_RES (20)..(21)..(22)..(23): Xaa is A or G or is absent
XGXSRVVMNEYKFKXXXXXXXXXLYLVSIPELKTPAXX

SEQ ID NO: 26967 - protein, 36 aa, Artificial Sequence; identical to SEQ ID NO: 5841
  GFR-binding peptide
  MOD_RES (2)..(33)..(34): Xaa is C or S

SEQ ID NO: 26968 - protein, 37 aa, Artificial Sequence
  GFR-binding peptide
  MOD_RES (34)..(34): Xaa is C or S
  MOD_RES (12)..(13)..(14)..(15)..(16): Xaa is A or G
  MOD_RES (17)..(18)..(19)..(20): Xaa is A or G or is absent
SRVVMNEYQKYXXXXXXXXXIYLVSIPSLKTPAXTPK

SEQ ID NO: 26969 - protein, 36 aa, Artificial Sequence
  GFR-binding peptide
  MOD_RES (1)..(3)..(35)..(36): Xaa is C or S
XGXARVVMNEYKFKIVNSSDDLYLVSIPELQTPAXX

SEQ ID NO: 26970 - protein, 36 aa, Artificial Sequence; identical to SEQ ID NO: 5844
  GFR-binding peptide
  MOD_RES (1)..(3)..(35)..(36): Xaa is C or S

SEQ ID NO: 26971 - protein, 40 aa, Artificial Sequence; identical to SEQ ID NO: 5845
  GFR-binding peptide
  MOD_RES (1)..(36)..(37): Xaa is C or S
  MOD_RES (14)..(15)..(16)..(17)..(18): Xaa is A or G
  MOD_RES (19)..(20)..(21)..(22): Xaa is A or G or is absent

SEQ ID NO: 26972 - protein, 40 aa, Artificial Sequence
  GFR-binding peptide
  MOD_RES (34)..(35): Xaa is C or S
  MOD_RES (12)..(13)..(14)..(15)..(16): Xaa is A or G
  MOD_RES (17)..(18)..(19)..(20): Xaa is A or G or is absent
GEVVMEEYKFKXXXXXXXXXLYLMSIPELETPVXXAKPIS

SEQ ID NO: 26973 - protein, 35 aa, Artificial Sequence; identical to SEQ ID NO: 5848
  GFR-binding peptide
  MOD_RES (2)..(33)..(34): Xaa is C or S

SEQ ID NO: 26974 - protein, 39 aa, Artificial Sequence; identical to SEQ ID NO: 5849
  GFR-binding peptide
  MOD_RES (2)..(34)..(35): Xaa is C or S

SEQ ID NO: 26975 - protein, 34 aa, Artificial Sequence; identical to SEQ ID NO: 5851
  GFR-binding peptide
  MOD_RES (34)..(34): Xaa is C or S
  MOD_RES (12)..(13)..(14)..(15)..(16): Xaa is A or G
  MOD_RES (17)..(18)..(19)..(20): Xaa is A or G or is absent

SEQ ID NO: 26976 - protein, 42 aa, Artificial Sequence
  GFR-binding peptide
  MOD_RES (2)..(4)..(38)..(39): Xaa is C or S
  MOD_RES (16)..(17)..(18)..(19)..(20): Xaa is A or G
  MOD_RES (21)..(22)..(23)..(24): Xaa is A or G or is absent
RXGXESVAMGYHYKLXXXXXXXXXKYLISIPSLKTPVXXAKS

SEQ ID NO: 26977 - protein, 42 aa, Artificial Sequence
  GFR-binding peptide
  MOD_RES (1)..(3)..(37)..(38): Xaa is C or S
  MOD_RES (15)..(16)..(17)..(18)..(19): Xaa is A or G
  MOD_RES (20)..(21)..(22)..(23): Xaa is A or G or is absent
XGXAKVVMNEYKFKXXXXXXXXXLYLVSIPELKTPAXXAKPV

SEQ ID NO: 26978 - protein, 38 aa, Artificial Sequence; identical to SEQ ID NO: 5852
  GFR-binding peptide
  MOD_RES (33)..(34): Xaa is C or S
  MOD_RES (11)..(12)..(13)..(14)..(15): Xaa is A or G
  MOD_RES (16)..(17)..(18)..(19): Xaa is A or G or is absent

SEQ ID NO: 26979 - protein, 35 aa, Artificial Sequence
  GFR-binding peptide
  MOD_RES (1)..(35): Xaa is C or S
  MOD_RES (13)..(14)..(15)..(16)..(17): Xaa is A or G
  MOD_RES (18)..(19)..(20)..(21): Xaa is A or G or is absent
XARVVMNEYQKYXXXXXXXXXIYLVSIPSLQTPAX

SEQ ID NO: 26980 - protein, 37 aa, Artificial Sequence; identical to SEQ ID NO: 5853
  GFR-binding peptide
  MOD_RES (32)..(33): Xaa is C or S

SEQ ID NO: 26981 - protein, 38 aa, Artificial Sequence; identical to SEQ ID NO: 5854
  GFR-binding peptide
  MOD_RES (33)..(34): Xaa is C or S
  MOD_RES (11)..(12)..(13)..(14)..(15): Xaa is A or G
  MOD_RES (16)..(17)..(18)..(19): Xaa is A or G or is absent

SEQ ID NO: 26982 - protein, 39 aa, Artificial Sequence; identical to SEQ ID NO: 5856
  GFR-binding peptide
  MOD_RES (2)..(33)..(34): Xaa is C or S

SEQ ID NO: 26983 - protein, 39 aa, Artificial Sequence
  GFR-binding peptide
  MOD_RES (1)..(3)..(36)..(37): Xaa is C or S
  MOD_RES (14)..(15)..(16)..(17)..(18): Xaa is A or G
  MOD_RES (19)..(20)..(21)..(22): Xaa is A or G or is absent
XKXSRVIMEYQKYXXXXXXXXXIYLISIPSLAQPVXXPA

SEQ ID NO: 26984 - protein, 33 aa, Artificial Sequence; identical to SEQ ID NO: 5857
  GFR-binding peptide
  MOD_RES (33)..(33): Xaa is C or S

SEQ ID NO: 26985 - protein, 38 aa, Artificial Sequence
  GFR-binding peptide
  MOD_RES (1)..(3)..(37)..(38): Xaa is C or S
  MOD_RES (15)..(16)..(17)..(18)..(19): Xaa is A or G
  MOD_RES (20)..(21)..(22)..(23): Xaa is A or G or is absent
XGXAEVVMDEYQKYXXXXXXXXXIYLISIPSLRAPVXX

SEQ ID NO: 26986 - protein, 37 aa, Artificial Sequence
  GFR-binding peptide
  MOD_RES (32)..(33): Xaa is C or S
ESVAMGRYKKLYTVVGKDFYLISIANLKTPVXXAKSA

SEQ ID NO: 26987 - protein, 35 aa, Artificial Sequence; identical to SEQ ID NO: 5859
  GFR-binding peptide
  MOD_RES (2)..(34)..(35): Xaa is C or S

SEQ ID NO: 26988 - protein, 35 aa, Artificial Sequence
  GFR-binding peptide
  MOD_RES (1)..(3)..(34)..(35): Xaa is C or S
XKXSKVVMEYKFKVKPTRGVLYLISIPELDQPVXX

SEQ ID NO: 26989 - protein, 41 aa, Artificial Sequence; identical to SEQ ID NO: 5860
  GFR-binding peptide
  MOD_RES (2)..(4)..(38)..(39): Xaa is C or S
  MOD_RES (16)..(17)..(18)..(19)..(20): Xaa is A or G
  MOD_RES (21)..(22)..(23)..(24): Xaa is A or G or is absent

SEQ ID NO: 26990 - protein, 37 aa, Artificial Sequence; identical to SEQ ID NO: 5861
  GFR-binding peptide
  MOD_RES (31)..(32): Xaa is C or S

SEQ ID NO: 26991 - protein, 36 aa, Artificial Sequence; identical to SEQ ID NO: 5866
  GFR-binding peptide
  MOD_RES (2)..(35)..(36): Xaa is C or S
  MOD_RES (13)..(14)..(15)..(16)..(17): Xaa is A or G
  MOD_RES (18)..(19)..(20)..(21): Xaa is A or G or is absent

SEQ ID NO: 26992 - protein, 31 aa, Artificial Sequence; identical to SEQ ID NO: 5867
  GFR-binding peptide

SEQ ID NO: 26993 - protein, 37 aa, Artificial Sequence
  GFR-binding peptide
  MOD_RES (33)..(34): Xaa is C or S
  MOD_RES (11)..(12)..(13)..(14)..(15): Xaa is A or G
  MOD_RES (16)..(17)..(18)..(19): Xaa is A or G or is absent
EVVMDRYKKLXXXXXXXXXFYLISIANLRAPVXXSAP

SEQ ID NO: 26994 - protein, 40 aa, Artificial Sequence; identical to SEQ ID NO: 5868
  GFR-binding peptide
  MOD_RES (2)..(4)..(38)..(39): Xaa is C or S
  MOD_RES (16)..(17)..(18)..(19)..(20): Xaa is A or G
  MOD_RES (21)..(22)..(23)..(24): Xaa is A or G or is absent

SEQ ID NO: 26995 - protein, 40 aa, Artificial Sequence
  GFR-binding peptide
  MOD_RES (1)..(35)..(36): Xaa is C or S
  MOD_RES (13)..(14)..(15)..(16)..(17): Xaa is A or G
  MOD_RES (18)..(19)..(20)..(21): Xaa is A or G or is absent
XSRVVMNEYKFKXXXXXXXXXLYLVSIPELKTPAXXPKPV

SEQ ID NO: 26996 - protein, 37 aa, Artificial Sequence
  GFR-binding peptide
  MOD_RES (2)..(37): Xaa is C or S
  MOD_RES (15)..(16)..(17)..(18)..(19): Xaa is A or G
  MOD_RES (20)..(21)..(22)..(23): Xaa is A or G or is absent
GXEAVSMGEEYKFKXXXXXXXXXLYLVSIPELKTPVX

SEQ ID NO: 26997 - protein, 33 aa, Artificial Sequence
  GFR-binding peptide
  MOD_RES (31)..(32): Xaa is C or S
EVVMDYHYKLVVNNAADKYLISIPSLRAPVXXS

SEQ ID NO: 26998 - protein, 40 aa, Artificial Sequence; identical to SEQ ID NO: 5870
  GFR-binding peptide
  MOD_RES (2)..(34)..(35): Xaa is C or S

SEQ ID NO: 26999 - protein, 37 aa, Artificial Sequence; identical to SEQ ID NO: 5871
  GFR-binding peptide
  MOD_RES (1)..(33)..(34): Xaa is C or S

SEQ ID NO: 27000 - protein, 32 aa, Artificial Sequence; identical to SEQ ID NO: 5873
  GFR-binding peptide
  MOD_RES (31)..(32): Xaa is C or S

SEQ ID NO: 27001 - protein, 30 aa, Artificial Sequence
  GFR-binding peptide
KVVMNEYQKYIVNNSSDIYLVSIPSLKTPA

SEQ ID NO: 27002 - protein, 35 aa, Artificial Sequence
  GFR-binding peptide
  MOD_RES (1)..(35): Xaa is C or S
  MOD_RES (13)..(14)..(15)..(16)..(17): Xaa is A or G
  MOD_RES (18)..(19)..(20)..(21): Xaa is A or G or is absent
XESVAMGEYKFKXXXXXXXXXLYLISIPELKTPVX

SEQ ID NO: 27003 - protein, 35 aa, Artificial Sequence
  GFR-binding peptide
  MOD_RES (33)..(34): Xaa is C or S
  MOD_RES (11)..(12)..(13)..(14)..(15): Xaa is A or G
  MOD_RES (16)..(17)..(18)..(19): Xaa is A or G or is absent
SVAMGEYQKYXXXXXXXXXIYLISIPSLKTPVXXA

SEQ ID NO: 27004 - protein, 39 aa, Artificial Sequence; identical to SEQ ID NO: 5877
  GFR-binding peptide
  MOD_RES (1)..(3)..(38)..(39): Xaa is C or S
  MOD_RES (16)..(17)..(18)..(19)..(20): Xaa is A or G
  MOD_RES (21)..(22)..(23)..(24): Xaa is A or G or is absent

SEQ ID NO: 27005 - protein, 32 aa, Artificial Sequence
  GFR-binding peptide
  MOD_RES (32)..(32): Xaa is C or S
ESVAMGYHYKLYTVVGKDKYLISIPSLKTPVX

SEQ ID NO: 27006 - protein, 34 aa, Artificial Sequence; identical to SEQ ID NO: 5878
  GFR-binding peptide
  MOD_RES (1)..(1): Xaa is C or S
  MOD_RES (13)..(14)..(15)..(16)..(17): Xaa is A or G
  MOD_RES (18)..(19)..(20)..(21): Xaa is A or G or is absent

SEQ ID NO: 27007 - protein, 37 aa, Artificial Sequence
  GFR-binding peptide
  MOD_RES (31)..(32): Xaa is C or S
RVVMNEYQKYIVNSSDDIYLVSIPSLQTPAXXPKPVT

SEQ ID NO: 27008 - protein, 43 aa, Artificial Sequence; identical to SEQ ID NO: 5882
  GFR-binding peptide
  MOD_RES (2)..(4)..(37)..(38): Xaa is C or S
  MOD_RES (15)..(16)..(17)..(18)..(19): Xaa is A or G
  MOD_RES (20)..(21)..(22)..(23): Xaa is A or G or is absent

SEQ ID NO: 27009 - protein, 41 aa, Artificial Sequence; identical to SEQ ID NO: 5883
  GFR-binding peptide
  MOD_RES (2)..(4)..(35)..(36): Xaa is C or S

SEQ ID NO: 27010 - protein, 35 aa, Artificial Sequence; identical to SEQ ID NO: 5885
  GFR-binding peptide
  MOD_RES (2)..(34)..(35): Xaa is C or S

SEQ ID NO: 27011 - protein, 36 aa, Artificial Sequence; identical to SEQ ID NO: 5886
  GFR-binding peptide
  MOD_RES (2)..(4)..(36): Xaa is C or S

SEQ ID NO: 27012 - protein, 42 aa, Artificial Sequence; identical to SEQ ID NO: 5887
  GFR-binding peptide
  MOD_RES (2)..(36): Xaa is C or S
  MOD_RES (14)..(15)..(16)..(17)..(18): Xaa is A or G
  MOD_RES (19)..(20)..(21)..(22): Xaa is A or G or is absent

SEQ ID NO: 27013 - protein, 41 aa, Artificial Sequence
  GFR-binding peptide
  MOD_RES (2)..(35)..(36): Xaa is C or S
  MOD_RES (13)..(14)..(15)..(16)..(17): Xaa is A or G
  MOD_RES (18)..(19)..(20)..(21): Xaa is A or G or is absent
KXSKVVMEYKFKXXXXXXXXXLYLISIPELDQPVXXPSASA

SEQ ID NO: 27014 - protein, 39 aa, Artificial Sequence
  GFR-binding peptide
  MOD_RES (33)..(34): Xaa is C or S
  MOD_RES (11)..(12)..(13)..(14)..(15): Xaa is A or G
  MOD_RES (16)..(17)..(18)..(19): Xaa is A or G or is absent
RVVMNEYQKYXXXXXXXXXIYLVSIPSLQTPAXXPKPVT

SEQ ID NO: 27015 - protein, 36 aa, Artificial Sequence
  GFR-binding peptide
  MOD_RES (1)..(35)..(36): Xaa is C or S
  MOD_RES (13)..(14)..(15)..(16)..(17): Xaa is A or G
  MOD_RES (18)..(19)..(20)..(21): Xaa is A or G or is absent
XAKVVMNEYKFKXXXXXXXXXLYLVSIPELKTPAXX

SEQ ID NO: 27016 - protein, 44 aa, Artificial Sequence; identical to SEQ ID NO: 5895
  GFR-binding peptide
  MOD_RES (2)..(4)..(38)..(39): Xaa is C or S
  MOD_RES (16)..(17)..(18)..(19)..(20): Xaa is A or G
  MOD_RES (21)..(22)..(23)..(24): Xaa is A or G or is absent

SEQ ID NO: 27017 - protein, 38 aa, Artificial Sequence
  GFR-binding peptide
  MOD_RES (1)..(33): Xaa is C or S
XSRVVMNEYKFKIVNSSDDLYLVSIPELKTPAXTPKTV

SEQ ID NO: 27018 - protein, 34 aa, Artificial Sequence; identical to SEQ ID NO: 5897
  GFR-binding peptide
  MOD_RES (2)..(2): Xaa is C or S
  MOD_RES (13)..(14)..(15)..(16)..(17): Xaa is A or G
  MOD_RES (18)..(19)..(20)..(21): Xaa is A or G or is absent

SEQ ID NO: 27019 - protein, 31 aa, Artificial Sequence; identical to SEQ ID NO: 5898
  GFR-binding peptide

SEQ ID NO: 27020 - protein, 32 aa, Artificial Sequence
  GFR-binding peptide
  MOD_RES (31)..(32): Xaa is C or S
EVVMDEYKFKVVKENEDLYLMSIPELETPVXX

SEQ ID NO: 27021 - protein, 40 aa, Artificial Sequence; identical to SEQ ID NO: 5900
  GFR-binding peptide
  MOD_RES (2)..(37)..(38): Xaa is C or S
  MOD_RES (15)..(16)..(17)..(18)..(19): Xaa is A or G
  MOD_RES (20)..(21)..(22)..(23): Xaa is A or G or is absent

SEQ ID NO: 27022 - protein, 42 aa, Artificial Sequence; identical to SEQ ID NO: 5901
  GFR-binding peptide
  MOD_RES (2)..(4)..(38)..(39): Xaa is C or S
  MOD_RES (16)..(17)..(18)..(19)..(20): Xaa is A or G
  MOD_RES (21)..(22)..(23)..(24): Xaa is A or G or is absent

SEQ ID NO: 27023 - protein, 34 aa, Artificial Sequence
  GFR-binding peptide
  MOD_RES (1)..(33)..(34): Xaa is C or S
XAEVVMDEYKFKVVNNAADLYLISIPELRAPVXX

SEQ ID NO: 27024 - protein, 39 aa, Artificial Sequence; identical to SEQ ID NO: 5904
  GFR-binding peptide
  MOD_RES (2)..(4)..(37)..(38): Xaa is C or S
  MOD_RES (15)..(16)..(17)..(18)..(19): Xaa is A or G
  MOD_RES (20)..(21)..(22)..(23): Xaa is A or G or is absent

SEQ ID NO: 27025 - protein, 39 aa, Artificial Sequence; identical to SEQ ID NO: 5907
  GFR-binding peptide
  MOD_RES (2)..(4)..(36)..(37): Xaa is C or S

SEQ ID NO: 27026 - protein, 37 aa, Artificial Sequence
  GFR-binding peptide
  MOD_RES (2)..(4)..(36)..(37): Xaa is C or S
RXGXESVAMGRYKKLYTVVGKDFYLISIANLKTPVXX

SEQ ID NO: 27027 - protein, 36 aa, Artificial Sequence; identical to SEQ ID NO: 5908
  GFR-binding peptide
  MOD_RES (2)..(33)..(34): Xaa is C or S

SEQ ID NO: 27028 - protein, 36 aa, Artificial Sequence
  GFR-binding peptide
  MOD_RES (31)..(31): Xaa is C or S
RVVMNEYKFKIVNSSDDLYLVSIPELKTPAXTPKTV

SEQ ID NO: 27029 - protein, 40 aa, Artificial Sequence; identical to SEQ ID NO: 5912
  GFR-binding peptide
  MOD_RES (2)..(4)..(38)..(39): Xaa is C or S
  MOD_RES (16)..(17)..(18)..(19)..(20): Xaa is A or G
  MOD_RES (21)..(22)..(23)..(24): Xaa is A or G or is absent

SEQ ID NO: 27030 - protein, 36 aa, Artificial Sequence; identical to SEQ ID NO: 5913
  GFR-binding peptide
  MOD_RES (34)..(35): Xaa is C or S
  MOD_RES (12)..(13)..(14)..(15)..(16): Xaa is A or G
  MOD_RES (17)..(18)..(19)..(20): Xaa is A or G or is absent

SEQ ID NO: 27031 - protein, 30 aa, Artificial Sequence; identical to SEQ ID NO: 5914
  GFR-binding peptide

SEQ ID NO: 27032 - protein, 33 aa, Artificial Sequence
  GFR-binding peptide
  MOD_RES (1)..(33): Xaa is C or S
XGEVVMDEYQKYVVKENEDIYLMSIPSLETPVX

SEQ ID NO: 27033 - protein, 33 aa, Artificial Sequence
  GFR-binding peptide
  MOD_RES (31)..(32): Xaa is C or S
SRVIMEYQKYVKPKRGVIYLISIPSLAQPVXXP

SEQ ID NO: 27034 - protein, 39 aa, Artificial Sequence
  GFR-binding peptide
  MOD_RES (2)..(34)..(35): Xaa is C or S
GXGEVVMDEYKFKVVKENEDLYLMSIPELETPVXXAKPI

SEQ ID NO: 27035 - protein, 38 aa, Artificial Sequence
  GFR-binding peptide
  MOD_RES (1)..(34)..(35): Xaa is C or S
XEAVSMGEEYQKYTPVGMDDIYLVSIPSLKTPVXXAKG

SEQ ID NO: 27036 - protein, 38 aa, Artificial Sequence; identical to SEQ ID NO: 5916
  GFR-binding peptide
  MOD_RES (32)..(33): Xaa is C or S

SEQ ID NO: 27037 - protein, 42 aa, Artificial Sequence
  GFR-binding peptide
  MOD_RES (2)..(36)..(37): Xaa is C or S
  MOD_RES (14)..(15)..(16)..(17)..(18): Xaa is A or G
  MOD_RES (19)..(20)..(21)..(22): Xaa is A or G or is absent
GXGEVVMDEYQKYXXXXXXXXXIYLMSIPSLETPVXXAKPIK

SEQ ID NO: 27038 - protein, 40 aa, Artificial Sequence; identical to SEQ ID NO: 5918
  GFR-binding peptide
  MOD_RES (2)..(4)..(35)..(36): Xaa is C or S

SEQ ID NO: 27039 - protein, 38 aa, Artificial Sequence
  GFR-binding peptide
  MOD_RES (1)..(3)..(38): Xaa is C or S
  MOD_RES (16)..(17)..(18)..(19)..(20): Xaa is A or G
  MOD_RES (21)..(22)..(23)..(24): Xaa is A or G or is absent
XGXEAVSMGEEYKFKXXXXXXXXXLYLVSIPELKTPVX

SEQ ID NO: 27040 - protein, 41 aa, Artificial Sequence
  GFR-binding peptide
  MOD_RES (1)..(3)..(35)..(36): Xaa is C or S
XGXGEVVMDEYKFKVVKENEDLYLMSIPELETPVXXAKPIK

SEQ ID NO: 27041 - protein, 35 aa, Artificial Sequence
  GFR-binding peptide
  MOD_RES (2)..(34)..(35): Xaa is C or S
GXESVAMGRYKKLYTVVGKDFYLISIANLKTPVXX

SEQ ID NO: 27042 - protein, 34 aa, Artificial Sequence; identical to SEQ ID NO: 5925
  GFR-binding peptide
  MOD_RES (2)..(34): Xaa is C or S

SEQ ID NO: 27043 - protein, 39 aa, Artificial Sequence; identical to SEQ ID NO: 5926
  GFR-binding peptide
  MOD_RES (2)..(33)..(34): Xaa is C or S

SEQ ID NO: 27044 - protein, 37 aa, Artificial Sequence; identical to SEQ ID NO: 5928
  GFR-binding peptide
  MOD_RES (1)..(3)..(36)..(37): Xaa is C or S

SEQ ID NO: 27045 - protein, 37 aa, Artificial Sequence
  GFR-binding peptide
  MOD_RES (1)..(3)..(37): Xaa is C or S
  MOD_RES (15)..(16)..(17)..(18)..(19): Xaa is A or G
  MOD_RES (20)..(21)..(22)..(23): Xaa is A or G or is absent
XGXAKVVMNEYKFKXXXXXXXXXLYLVSIPELKTPAX

SEQ ID NO: 27046 - protein, 37 aa, Artificial Sequence
  GFR-binding peptide
  MOD_RES (2)..(4)..(36)..(37): Xaa is C or S
HXGXAKVVMNEYKFKIVNNSSDLYLVSIPELKTPAXX

SEQ ID NO: 27047 - protein, 36 aa, Artificial Sequence
  GFR-binding peptide
  MOD_RES (34)..(35): Xaa is C or S
  MOD_RES (12)..(13)..(14)..(15)..(16): Xaa is A or G
  MOD_RES (17)..(18)..(19)..(20): Xaa is A or G or is absent
GEVVMDEYQKYXXXXXXXXXIYLMSIPSLETPVXXA

SEQ ID NO: 27048 - protein, 33 aa, Artificial Sequence
  GFR-binding peptide
  MOD_RES (2)..(2): Xaa is C or S
GXSRVVMNEYQKYIVNSSDDIYLVSIPSLKTPA

SEQ ID NO: 27049 - protein, 32 aa, Artificial Sequence
  GFR-binding peptide
  MOD_RES (1)..(32): Xaa is C or S
XSKVIMEYQKYIKPTKGIIYLISIPSLDQSVX

SEQ ID NO: 27050 - protein, 43 aa, Artificial Sequence
  GFR-binding peptide
  MOD_RES (1)..(3)..(37)..(38): Xaa is C or S
  MOD_RES (15)..(16)..(17)..(18)..(19): Xaa is A or G
  MOD_RES (20)..(21)..(22)..(23): Xaa is A or G or is absent
XGXGEVVMDEYQKYXXXXXXXXXIYLMSIPSLETPVXXAKPIK

SEQ ID NO: 27051 - protein, 37 aa, Artificial Sequence; identical to SEQ ID NO: 5931
  GFR-binding peptide
  MOD_RES (2)..(37): Xaa is C or S
  MOD_RES (15)..(16)..(17)..(18)..(19): Xaa is A or G
  MOD_RES (20)..(21)..(22)..(23): Xaa is A or G or is absent

SEQ ID NO: 27052 - protein, 41 aa, Artificial Sequence; identical to SEQ ID NO: 5932
  GFR-binding peptide
  MOD_RES (2)..(4)..(36)..(37): Xaa is C or S

SEQ ID NO: 27053 - protein, 34 aa, Artificial Sequence
  GFR-binding peptide
  MOD_RES (2)..(2): Xaa is C or S
  MOD_RES (13)..(14)..(15)..(16)..(17): Xaa is A or G
  MOD_RES (18)..(19)..(20)..(21): Xaa is A or G or is absent
KXSKVIMEYKFKXXXXXXXXXLYLISIPELDQSV

SEQ ID NO: 27054 - protein, 40 aa, Artificial Sequence; identical to SEQ ID NO: 5934
  GFR-binding peptide
  MOD_RES (1)..(34)..(35): Xaa is C or S

SEQ ID NO: 27055 - protein, 37 aa, Artificial Sequence; identical to SEQ ID NO: 5936
  GFR-binding peptide
  MOD_RES (1)..(36)..(37): Xaa is C or S
  MOD_RES (14)..(15)..(16)..(17)..(18): Xaa is A or G
  MOD_RES (19)..(20)..(21)..(22): Xaa is A or G or is absent

SEQ ID NO: 27056 - protein, 32 aa, Artificial Sequence; identical to SEQ ID NO: 5937
  GFR-binding peptide
  MOD_RES (32)..(32): Xaa is C or S

SEQ ID NO: 27057 - protein, 39 aa, Artificial Sequence; identical to SEQ ID NO: 5938
  GFR-binding peptide
  MOD_RES (33)..(34): Xaa is C or S
  MOD_RES (11)..(12)..(13)..(14)..(15): Xaa is A or G
  MOD_RES (16)..(17)..(18)..(19): Xaa is A or G or is absent

SEQ ID NO: 27058 - protein, 34 aa, Artificial Sequence
  GFR-binding peptide
  MOD_RES (2)..(34): Xaa is C or S
GXGEVVMDEYQKYVVKENEDIYLMSIPSLETPVX

SEQ ID NO: 27059 - protein, 34 aa, Artificial Sequence; identical to SEQ ID NO: 5940
  GFR-binding peptide
  MOD_RES (1)..(3)..(34): Xaa is C or S

SEQ ID NO: 27060 - protein, 36 aa, Artificial Sequence
  GFR-binding peptide
  MOD_RES (32)..(33): Xaa is C or S
ARVVMNEYKFKIVNSSDDLYLVSIPELQTPAXXPKP

SEQ ID NO: 27061 - protein, 36 aa, Artificial Sequence
  GFR-binding peptide
  MOD_RES (34)..(35): Xaa is C or S
  MOD_RES (12)..(13)..(14)..(15)..(16): Xaa is A or G
  MOD_RES (17)..(18)..(19)..(20): Xaa is A or G or is absent
ARVVMNEYQKYXXXXXXXXXIYLVSIPSLQTPAXXP

SEQ ID NO: 27062 - protein, 40 aa, Artificial Sequence; identical to SEQ ID NO: 5943
  GFR-binding peptide
  MOD_RES (2)..(35)..(36): Xaa is C or S
  MOD_RES (13)..(14)..(15)..(16)..(17): Xaa is A or G
  MOD_RES (18)..(19)..(20)..(21): Xaa is A or G or is absent

SEQ ID NO: 27063 - protein, 36 aa, Artificial Sequence; identical to SEQ ID NO: 5946
  GFR-binding peptide
  MOD_RES (2)..(4)..(36): Xaa is C or S

SEQ ID NO: 27064 - protein, 39 aa, Artificial Sequence
  GFR-binding peptide
  MOD_RES (2)..(4)..(35)..(36): Xaa is C or S
SXKXSKVIMEYQKYIKPTKGIIYLISIPSLDQSVXXPSA

SEQ ID NO: 27065 - protein, 37 aa, Artificial Sequence
  GFR-binding peptide
  MOD_RES (1)..(3)..(37): Xaa is C or S
  MOD_RES (15)..(16)..(17)..(18)..(19): Xaa is A or G
  MOD_RES (20)..(21)..(22)..(23): Xaa is A or G or is absent
XGXGEVVMDEYKFKXXXXXXXXXLYLMSIPELETPVX

SEQ ID NO: 27066 - protein, 37 aa, Artificial Sequence; identical to SEQ ID NO: 5952
  GFR-binding peptide
  MOD_RES (1)..(35)..(36): Xaa is C or S
  MOD_RES (13)..(14)..(15)..(16)..(17): Xaa is A or G
  MOD_RES (18)..(19)..(20)..(21): Xaa is A or G or is absent

SEQ ID NO: 27067 - protein, 36 aa, Artificial Sequence; identical to SEQ ID NO: 5953
  GFR-binding peptide
  MOD_RES (2)..(36): Xaa is C or S
  MOD_RES (14)..(15)..(16)..(17)..(18): Xaa is A or G
  MOD_RES (19)..(20)..(21)..(22): Xaa is A or G or is absent

SEQ ID NO: 27068 - protein, 33 aa, Artificial Sequence; identical to SEQ ID NO: 5954
  GFR-binding peptide
  MOD_RES (12)..(13)..(14)..(15)..(16): Xaa is A or G
  MOD_RES (17)..(18)..(19)..(20): Xaa is A or G or is absent

SEQ ID NO: 27069 - protein, 39 aa, Artificial Sequence
  GFR-binding peptide
  MOD_RES (1)..(3)..(35)..(36): Xaa is C or S
XGXSRVVMNEYKFKIVNSSDDLYLVSIPELKTPAXXPKP

SEQ ID NO: 27070 - protein, 38 aa, Artificial Sequence
  GFR-binding peptide
  MOD_RES (1)..(33)..(34): Xaa is C or S
XAKVVMNEYKFKIVNNSSDLYLVSIPELKTPAXXAKPV

SEQ ID NO: 27071 - protein, 37 aa, Artificial Sequence; identical to SEQ ID NO: 5955
  GFR-binding peptide
  MOD_RES (33)..(34): Xaa is C or S

SEQ ID NO: 27072 - protein, 41 aa, Artificial Sequence
  GFR-binding peptide
  MOD_RES (1)..(3)..(37)..(38): Xaa is C or S
  MOD_RES (15)..(16)..(17)..(18)..(19): Xaa is A or G
  MOD_RES (20)..(21)..(22)..(23): Xaa is A or G or is absent
XGXARVVMNEYKFKXXXXXXXXXLYLVSIPELQTPAXXPKP

SEQ ID NO: 27073 - protein, 36 aa, Artificial Sequence
  GFR-binding peptide
  MOD_RES (1)..(35)..(36): Xaa is C or S
  MOD_RES (13)..(14)..(15)..(16)..(17): Xaa is A or G
  MOD_RES (18)..(19)..(20)..(21): Xaa is A or G or is absent
XGEVVMDEYQKYXXXXXXXXXIYLMSIPSLETPVXX

SEQ ID NO: 27074 - protein, 37 aa, Artificial Sequence
  GFR-binding peptide
  MOD_RES (33)..(34): Xaa is C or S
  MOD_RES (11)..(12)..(13)..(14)..(15): Xaa is A or G
  MOD_RES (16)..(17)..(18)..(19): Xaa is A or G or is absent
RVVMNEYQKYXXXXXXXXXIYLVSIPSLKTPAXXPKP

SEQ ID NO: 27075 - protein, 33 aa, Artificial Sequence; identical to SEQ ID NO: 5957
  GFR-binding peptide
  MOD_RES (33)..(33): Xaa is C or S
  MOD_RES (11)..(12)..(13)..(14)..(15): Xaa is A or G
  MOD_RES (16)..(17)..(18)..(19): Xaa is A or G or is absent

SEQ ID NO: 27076 - protein, 33 aa, Artificial Sequence
  GFR-binding peptide
  MOD_RES (1)..(33): Xaa is C or S
XAEVVMDEYQKYVVNNAADIYLISIPSLRAPVX

SEQ ID NO: 27077 - protein, 41 aa, Artificial Sequence
  GFR-binding peptide
  MOD_RES (1)..(35)..(36): Xaa is C or S
  MOD_RES (13)..(14)..(15)..(16)..(17): Xaa is A or G
  MOD_RES (18)..(19)..(20)..(21): Xaa is A or G or is absent
XAEVVMDYHYKLXXXXXXXXXKYLISIPSLRAPVXXSAPAA

SEQ ID NO: 27078 - protein, 38 aa, Artificial Sequence
  GFR-binding peptide
  MOD_RES (1)..(35)..(36): Xaa is C or S
  MOD_RES (13)..(14)..(15)..(16)..(17): Xaa is A or G
  MOD_RES (18)..(19)..(20)..(21): Xaa is A or G or is absent
XAEVVMDRYKKLXXXXXXXXXFYLISIANLRAPVXXSA

SEQ ID NO: 27079 - protein, 38 aa, Artificial Sequence; identical to SEQ ID NO: 5964
  GFR-binding peptide
  MOD_RES (2)..(34)..(35): Xaa is C or S

SEQ ID NO: 27080 - protein, 42 aa, Artificial Sequence
  GFR-binding peptide
  MOD_RES (1)..(3)..(36)..(37): Xaa is C or S
  MOD_RES (14)..(15)..(16)..(17)..(18): Xaa is A or G
  MOD_RES (19)..(20)..(21)..(22): Xaa is A or G or is absent
XKXSRVIMEYQKYXXXXXXXXXIYLISIPSLAQPVXXPAASA

SEQ ID NO: 27081 - protein, 38 aa, Artificial Sequence; identical to SEQ ID NO: 5965
  GFR-binding peptide
  MOD_RES (1)..(34)..(35): Xaa is C or S
  MOD_RES (12)..(13)..(14)..(15)..(16): Xaa is A or G
  MOD_RES (17)..(18)..(19)..(20): Xaa is A or G or is absent

SEQ ID NO: 27082 - protein, 34 aa, Artificial Sequence; identical to SEQ ID NO: 5966
  GFR-binding peptide
  MOD_RES (31)..(32): Xaa is C or S

SEQ ID NO: 27083 - protein, 41 aa, Artificial Sequence; identical to SEQ ID NO: 5967
  GFR-binding peptide
  MOD_RES (1)..(35)..(36): Xaa is C or S
  MOD_RES (13)..(14)..(15)..(16)..(17): Xaa is A or G
  MOD_RES (18)..(19)..(20)..(21): Xaa is A or G or is absent

SEQ ID NO: 27084 - protein, 37 aa, Artificial Sequence; identical to SEQ ID NO: 5968
  GFR-binding peptide
  MOD_RES (33)..(34): Xaa is C or S
  MOD_RES (11)..(12)..(13)..(14)..(15): Xaa is A or G
  MOD_RES (16)..(17)..(18)..(19): Xaa is A or G or is absent

SEQ ID NO: 27085 - protein, 39 aa, Artificial Sequence
  GFR-binding peptide
  MOD_RES (2)..(4)..(36): Xaa is C or S
HXGXSRVVMNEYKFKIVNSSDDLYLVSIPELKTPAXTPK

SEQ ID NO: 27086 - protein, 38 aa, Artificial Sequence; identical to SEQ ID NO: 5971
  GFR-binding peptide
  MOD_RES (32)..(33): Xaa is C or S

SEQ ID NO: 27087 - protein, 32 aa, Artificial Sequence; identical to SEQ ID NO: 5972
  GFR-binding peptide
  MOD_RES (2)..(2): Xaa is C or S

SEQ ID NO: 27088 - protein, 39 aa, Artificial Sequence; identical to SEQ ID NO: 5973
  GFR-binding peptide
  MOD_RES (1)..(34)..(35): Xaa is C or S

SEQ ID NO: 27089 - protein, 39 aa, Artificial Sequence
  GFR-binding peptide
  MOD_RES (1)..(35): Xaa is C or S
  MOD_RES (13)..(14)..(15)..(16)..(17): Xaa is A or G
  MOD_RES (18)..(19)..(20)..(21): Xaa is A or G or is absent
XSRVVMNEYKFKXXXXXXXXXLYLVSIPELKTPAXTPKT

SEQ ID NO: 27090 - protein, 40 aa, Artificial Sequence
  GFR-binding peptide
  MOD_RES (2)..(4)..(38)..(39): Xaa is C or S
  MOD_RES (16)..(17)..(18)..(19)..(20): Xaa is A or G
  MOD_RES (21)..(22)..(23)..(24): Xaa is A or G or is absent
HXGXAKVVMNEYKFKXXXXXXXXXLYLVSIPELKTPAXXA

SEQ ID NO: 27091 - protein, 30 aa, Artificial Sequence; identical to SEQ ID NO: 5976
  GFR-binding peptide

SEQ ID NO: 27092 - protein, 37 aa, Artificial Sequence; identical to SEQ ID NO: 5978
  GFR-binding peptide
  MOD_RES (1)..(3)..(35)..(36): Xaa is C or S

SEQ ID NO: 27093 - protein, 36 aa, Artificial Sequence; identical to SEQ ID NO: 5980
  GFR-binding peptide
  MOD_RES (2)..(36): Xaa is C or S
  MOD_RES (14)..(15)..(16)..(17)..(18): Xaa is A or G
  MOD_RES (19)..(20)..(21)..(22): Xaa is A or G or is absent

SEQ ID NO: 27094 - protein, 40 aa, Artificial Sequence; identical to SEQ ID NO: 5981
  GFR-binding peptide
  MOD_RES (1)..(35)..(36): Xaa is C or S
  MOD_RES (13)..(14)..(15)..(16)..(17): Xaa is A or G
  MOD_RES (18)..(19)..(20)..(21): Xaa is A or G or is absent

SEQ ID NO: 27095 - protein, 34 aa, Artificial Sequence
  GFR-binding peptide
  MOD_RES (34)..(34): Xaa is C or S
  MOD_RES (12)..(13)..(14)..(15)..(16): Xaa is A or G
  MOD_RES (17)..(18)..(19)..(20): Xaa is A or G or is absent
GEVVMEEYQKYXXXXXXXXXIYLMSIPSLETPVX

SEQ ID NO: 27096 - protein, 32 aa, Artificial Sequence; identical to SEQ ID NO: 5983
  GFR-binding peptide
  MOD_RES (11)..(12)..(13)..(14)..(15): Xaa is A or G
  MOD_RES (16)..(17)..(18)..(19): Xaa is A or G or is absent

SEQ ID NO: 27097 - protein, 35 aa, Artificial Sequence
  GFR-binding peptide
  MOD_RES (33)..(33): Xaa is C or S
  MOD_RES (11)..(12)..(13)..(14)..(15): Xaa is A or G
  MOD_RES (16)..(17)..(18)..(19): Xaa is A or G or is absent
RVVMNEYKFKXXXXXXXXXLYLVSIPELKTPAXTP

SEQ ID NO: 27098 - protein, 42 aa, Artificial Sequence; identical to SEQ ID NO: 5986
  GFR-binding peptide
  MOD_RES (1)..(3)..(36)..(37): Xaa is C or S
  MOD_RES (14)..(15)..(16)..(17)..(18): Xaa is A or G
  MOD_RES (19)..(20)..(21)..(22): Xaa is A or G or is absent

SEQ ID NO: 27099 - protein, 37 aa, Artificial Sequence
  GFR-binding peptide
  MOD_RES (1)..(3)..(35)..(36): Xaa is C or S
XGXAEVVMDRYKKLVVNNAADFYLISIANLRAPVXXS

SEQ ID NO: 27100 - protein, 40 aa, Artificial Sequence
  GFR-binding peptide
  MOD_RES (1)..(3)..(37)..(38): Xaa is C or S
  MOD_RES (15)..(16)..(17)..(18)..(19): Xaa is A or G
  MOD_RES (20)..(21)..(22)..(23): Xaa is A or G or is absent
XGXGEVVMDEYQKYXXXXXXXXXIYLMSIPSLETPVXXAK

SEQ ID NO: 27101 - protein, 34 aa, Artificial Sequence
  GFR-binding peptide
  MOD_RES (1)..(34): Xaa is C or S
XEAVSMGEEYQKYTPVGMDDIYLVSIPSLKTPVX

SEQ ID NO: 27102 - protein, 37 aa, Artificial Sequence; identical to SEQ ID NO: 5991
  GFR-binding peptide
  MOD_RES (1)..(33)..(34): Xaa is C or S

SEQ ID NO: 27103 - protein, 35 aa, Artificial Sequence; identical to SEQ ID NO: 5992
  GFR-binding peptide
  MOD_RES (31)..(32): Xaa is C or S

SEQ ID NO: 27104 - protein, 33 aa, Artificial Sequence; identical to SEQ ID NO: 5993
  GFR-binding peptide
  MOD_RES (32)..(33): Xaa is C or S

SEQ ID NO: 27105 - protein, 39 aa, Artificial Sequence; identical to SEQ ID NO: 5994
  GFR-binding peptide
  MOD_RES (1)..(3)..(35)..(36): Xaa is C or S

SEQ ID NO: 27106 - protein, 33 aa, Artificial Sequence
  GFR-binding peptide
  MOD_RES (2)..(2): Xaa is C or S
GXAEVVMDRYKKLVVNNAADFYLISIANLRAPV

SEQ ID NO: 27107 - protein, 33 aa, Artificial Sequence
  GFR-binding peptide
  MOD_RES (31)..(32): Xaa is C or S
EVVMDEYQKYVVKENEDIYLMSIPSLETPVXXA

SEQ ID NO: 27108 - protein, 35 aa, Artificial Sequence; identical to SEQ ID NO: 5996
  GFR-binding peptide
  MOD_RES (33)..(34): Xaa is C or S
  MOD_RES (11)..(12)..(13)..(14)..(15): Xaa is A or G
  MOD_RES (16)..(17)..(18)..(19): Xaa is A or G or is absent

SEQ ID NO: 27109 - protein, 36 aa, Artificial Sequence; identical to SEQ ID NO: 5997
  GFR-binding peptide
  MOD_RES (1)..(33)..(34): Xaa is C or S

SEQ ID NO: 27110 - protein, 35 aa, Artificial Sequence
  GFR-binding peptide
  MOD_RES (1)..(3): Xaa is C or S
XGXEAVSMGEEYKFKTPVGMDDLYLVSIPELKTPV

SEQ ID NO: 27111 - protein, 32 aa, Artificial Sequence
  GFR-binding peptide
  MOD_RES (1)..(1): Xaa is C or S
XESVAMGEYQKYYTVVGKDIYLISIPSLKTPV

SEQ ID NO: 27112 - protein, 38 aa, Artificial Sequence
  GFR-binding peptide
  MOD_RES (1)..(33)..(34): Xaa is C or S
XAKVVMNEYQKYIVNNSSDIYLVSIPSLKTPAXXAKPV

SEQ ID NO: 27113 - protein, 35 aa, Artificial Sequence
  GFR-binding peptide
  MOD_RES (2)..(35): Xaa is C or S
  MOD_RES (13)..(14)..(15)..(16)..(17): Xaa is A or G
  MOD_RES (18)..(19)..(20)..(21): Xaa is A or G or is absent
KXSRVIMEYQKYXXXXXXXXXIYLISIPSLAQPVX

SEQ ID NO: 27114 - protein, 36 aa, Artificial Sequence
  GFR-binding peptide
  MOD_RES (1)..(34)..(35): Xaa is C or S
  MOD_RES (12)..(13)..(14)..(15)..(16): Xaa is A or G
  MOD_RES (17)..(18)..(19)..(20): Xaa is A or G or is absent
XSRVIMEYQKYXXXXXXXXXIYLISIPSLAQPVXXP

SEQ ID NO: 27115 - protein, 34 aa, Artificial Sequence
  GFR-binding peptide
  MOD_RES (33)..(34): Xaa is C or S
  MOD_RES (11)..(12)..(13)..(14)..(15): Xaa is A or G
  MOD_RES (16)..(17)..(18)..(19): Xaa is A or G or is absent
SKVIMEYKFKXXXXXXXXXLYLISIPELDQSVXX

SEQ ID NO: 27116 - protein, 41 aa, Artificial Sequence; identical to SEQ ID NO: 6000
  GFR-binding peptide
  MOD_RES (2)..(36)..(37): Xaa is C or S
  MOD_RES (14)..(15)..(16)..(17)..(18): Xaa is A or G
  MOD_RES (19)..(20)..(21)..(22): Xaa is A or G or is absent

SEQ ID NO: 27117 - protein, 38 aa, Artificial Sequence
  GFR-binding peptide
  MOD_RES (2)..(36)..(37): Xaa is C or S
  MOD_RES (14)..(15)..(16)..(17)..(18): Xaa is A or G
  MOD_RES (19)..(20)..(21)..(22): Xaa is A or G or is absent
GXSRVVMNEYKFKXXXXXXXXXLYLVSIPELKTPAXXP

SEQ ID NO: 27118 - protein, 36 aa, Artificial Sequence
  GFR-binding peptide
  MOD_RES (32)..(33): Xaa is C or S
AEVVMDEYQKYVVNNAADIYLISIPSLRAPVXXSAP

SEQ ID NO: 27119 - protein, 39 aa, Artificial Sequence; identical to SEQ ID NO: 6004
  GFR-binding peptide
  MOD_RES (1)..(34)..(35): Xaa is C or S
  MOD_RES (12)..(13)..(14)..(15)..(16): Xaa is A or G
  MOD_RES (17)..(18)..(19)..(20): Xaa is A or G or is absent

SEQ ID NO: 27120 - protein, 40 aa, Artificial Sequence
  GFR-binding peptide
  MOD_RES (1)..(3)..(37)..(38): Xaa is C or S
  MOD_RES (15)..(16)..(17)..(18)..(19): Xaa is A or G
  MOD_RES (20)..(21)..(22)..(23): Xaa is A or G or is absent
XGXAKVVMNEYQKYXXXXXXXXXIYLVSIPSLKTPAXXAK

SEQ ID NO: 27121 - protein, 39 aa, Artificial Sequence
  GFR-binding peptide
  MOD_RES (1)..(3)..(34)..(35): Xaa is C or S
XKXSRVIMEYKFKVKPKRGVLYLISIPELAQPVXXPAAS

SEQ ID NO: 27122 - protein, 33 aa, Artificial Sequence
  GFR-binding peptide
  MOD_RES (32)..(32): Xaa is C or S
SRVVMNEYQKYIVNSSDDIYLVSIPSLKTPAXT

SEQ ID NO: 27123 - protein, 42 aa, Artificial Sequence; identical to SEQ ID NO: 6005
  GFR-binding peptide
  MOD_RES (2)..(36)..(37): Xaa is C or S
  MOD_RES (14)..(15)..(16)..(17)..(18): Xaa is A or G
  MOD_RES (19)..(20)..(21)..(22): Xaa is A or G or is absent

SEQ ID NO: 27124 - protein, 33 aa, Artificial Sequence
  GFR-binding peptide
  MOD_RES (33)..(33): Xaa is C or S
  MOD_RES (11)..(12)..(13)..(14)..(15): Xaa is A or G
  MOD_RES (16)..(17)..(18)..(19): Xaa is A or G or is absent
RVVMNEYQKYXXXXXXXXXIYLVSIPSLQTPAX

SEQ ID NO: 27125 - protein, 32 aa, Artificial Sequence
  GFR-binding peptide
  MOD_RES (1)..(1): Xaa is C or S
XAKVVMNEYKFKIVNNSSDLYLVSIPELKTPA

SEQ ID NO: 27126 - protein, 38 aa, Artificial Sequence
  GFR-binding peptide
  MOD_RES (2)..(4)..(38): Xaa is C or S
  MOD_RES (16)..(17)..(18)..(19)..(20): Xaa is A or G
  MOD_RES (21)..(22)..(23)..(24): Xaa is A or G or is absent
RXGXESVAMGEYQKYXXXXXXXXXIYLISIPSLKTPVX

SEQ ID NO: 27127 - protein, 39 aa, Artificial Sequence
  GFR-binding peptide
  MOD_RES (1)..(3)..(35)..(36): Xaa is C or S
XGXARVVMNEYKFKIVNSSDDLYLVSIPELQTPAXXPKP

SEQ ID NO: 27128 - protein, 35 aa, Artificial Sequence
  GFR-binding peptide
  MOD_RES (31)..(32): Xaa is C or S
SVAMGYHYKLYTVVGKDKYLISIPSLKTPVXXAKS

SEQ ID NO: 27129 - protein, 37 aa, Artificial Sequence
  GFR-binding peptide
  MOD_RES (2)..(34)..(35): Xaa is C or S
GXAKVVMNEYKFKIVNNSSDLYLVSIPELKTPAXXAK

SEQ ID NO: 27130 - protein, 38 aa, Artificial Sequence
  GFR-binding peptide
  MOD_RES (1)..(3)..(35)..(36): Xaa is C or S
XGXARVVMNEYKFKIVNSSDDLYLVSIPELQTPAXXPK

SEQ ID NO: 27131 - protein, 35 aa, Artificial Sequence; identical to SEQ ID NO: 6013
  GFR-binding peptide
  MOD_RES (34)..(35): Xaa is C or S
  MOD_RES (12)..(13)..(14)..(15)..(16): Xaa is A or G
  MOD_RES (17)..(18)..(19)..(20): Xaa is A or G or is absent

SEQ ID NO: 27132 - protein, 40 aa, Artificial Sequence; identical to SEQ ID NO: 6014
  GFR-binding peptide
  MOD_RES (1)..(3)..(36)..(37): Xaa is C or S
  MOD_RES (14)..(15)..(16)..(17)..(18): Xaa is A or G
  MOD_RES (19)..(20)..(21)..(22): Xaa is A or G or is absent

SEQ ID NO: 27133 - protein, 40 aa, Artificial Sequence
  GFR-binding peptide
  MOD_RES (2)..(34)..(35): Xaa is C or S
GXGEVVMEEYKFKVVKDYEDLYLMSIPELETPVXXAKPIS

SEQ ID NO: 27134 - protein, 36 aa, Artificial Sequence
  GFR-binding peptide
  MOD_RES (1)..(3)..(34)..(35): Xaa is C or S
XKXSKVIMEYKFKIKPTKGILYLISIPELDQSVXXP

SEQ ID NO: 27135 - protein, 36 aa, Artificial Sequence; identical to SEQ ID NO: 6017
  GFR-binding peptide
  MOD_RES (2)..(4)..(35)..(36): Xaa is C or S

SEQ ID NO: 27136 - protein, 34 aa, Artificial Sequence
  GFR-binding peptide
  MOD_RES (34)..(34): Xaa is C or S
  MOD_RES (12)..(13)..(14)..(15)..(16): Xaa is A or G
  MOD_RES (17)..(18)..(19)..(20): Xaa is A or G or is absent
ARVVMNEYKFKXXXXXXXXXLYLVSIPELQTPAX

SEQ ID NO: 27137 - protein, 36 aa, Artificial Sequence
  GFR-binding peptide
  MOD_RES (2)..(34)..(35): Xaa is C or S
GXARVVMNEYKFKIVNSSDDLYLVSIPELQTPAXXP

SEQ ID NO: 27138 - protein, 39 aa, Artificial Sequence; identical to SEQ ID NO: 6018
  GFR-binding peptide
  MOD_RES (1)..(35)..(36): Xaa is C or S
  MOD_RES (13)..(14)..(15)..(16)..(17): Xaa is A or G
  MOD_RES (18)..(19)..(20)..(21): Xaa is A or G or is absent

SEQ ID NO: 27139 - protein, 33 aa, Artificial Sequence
  GFR-binding peptide
  MOD_RES (32)..(33): Xaa is C or S
AKVVMNEYQKYIVNNSSDIYLVSIPSLKTPAXX

SEQ ID NO: 27140 - protein, 39 aa, Artificial Sequence
  GFR-binding peptide
  MOD_RES (2)..(4)..(38)..(39): Xaa is C or S
  MOD_RES (16)..(17)..(18)..(19)..(20): Xaa is A or G
  MOD_RES (21)..(22)..(23)..(24): Xaa is A or G or is absent
HXGXAKVVMNEYKFKXXXXXXXXXLYLVSIPELKTPAXX

SEQ ID NO: 27141 - protein, 36 aa, Artificial Sequence
  GFR-binding peptide
  MOD_RES (2)..(33)..(34): Xaa is C or S
KXSKVIMEYQKYIKPTKGIIYLISIPSLDQSVXXPS

SEQ ID NO: 27142 - protein, 37 aa, Artificial Sequence
  GFR-binding peptide
  MOD_RES (2)..(4): Xaa is C or S
  MOD_RES (16)..(17)..(18)..(19)..(20): Xaa is A or G
  MOD_RES (21)..(22)..(23)..(24): Xaa is A or G or is absent
HXGXARVVMNEYKFKXXXXXXXXXLYLVSIPELQTPA

SEQ ID NO: 27143 - protein, 37 aa, Artificial Sequence
  GFR-binding peptide
  MOD_RES (2)..(36)..(37): Xaa is C or S
  MOD_RES (14)..(15)..(16)..(17)..(18): Xaa is A or G
  MOD_RES (19)..(20)..(21)..(22): Xaa is A or G or is absent
GXAEVVMDYHYKLXXXXXXXXXKYLISIPSLRAPVXX

SEQ ID NO: 27144 - protein, 35 aa, Artificial Sequence
  GFR-binding peptide
  MOD_RES (2)..(35): Xaa is C or S
GXEAVSMGEEYKFKTPVGMDDLYLVSIPELKTPVX

SEQ ID NO: 27145 - protein, 32 aa, Artificial Sequence
  GFR-binding peptide
  MOD_RES (1)..(1): Xaa is C or S
XESVAMGEYKFKYTVVGKDLYLISIPELKTPV

SEQ ID NO: 27146 - protein, 35 aa, Artificial Sequence
  GFR-binding peptide
  MOD_RES (2)..(4)..(35): Xaa is C or S
SXKXSKVIMEYQKYIKPTKGIIYLISIPSLDQSVX

SEQ ID NO: 27147 - protein, 36 aa, Artificial Sequence; identical to SEQ ID NO: 6025
  GFR-binding peptide
  MOD_RES (32)..(33): Xaa is C or S

SEQ ID NO: 27148 - protein, 43 aa, Artificial Sequence
  GFR-binding peptide
  MOD_RES (1)..(3)..(37): Xaa is C or S
  MOD_RES (15)..(16)..(17)..(18)..(19): Xaa is A or G
  MOD_RES (20)..(21)..(22)..(23): Xaa is A or G or is absent
XGXSRVVMNEYQKYXXXXXXXXXIYLVSIPSLKTPAXTPKTVH

SEQ ID NO: 27149 - protein, 39 aa, Artificial Sequence; identical to SEQ ID NO: 6026
  GFR-binding peptide
  MOD_RES (1)..(3)..(37): Xaa is C or S
  MOD_RES (15)..(16)..(17)..(18)..(19): Xaa is A or G
  MOD_RES (20)..(21)..(22)..(23): Xaa is A or G or is absent

SEQ ID NO: 27150 - protein, 36 aa, Artificial Sequence
  GFR-binding peptide
  MOD_RES (32)..(33): Xaa is C or S
GEVVMEEYKFKVVKDYEDLYLMSIPELETPVXXAKP

SEQ ID NO: 27151 - protein, 33 aa, Artificial Sequence; identical to SEQ ID NO: 6027
  GFR-binding peptide
  MOD_RES (2)..(2): Xaa is C or S

SEQ ID NO: 27152 - protein, 37 aa, Artificial Sequence
  GFR-binding peptide
  MOD_RES (2)..(34): Xaa is C or S
GXSRVVMNEYQKYIVNSSDDIYLVSIPSLKTPAXTPK

SEQ ID NO: 27153 - protein, 32 aa, Artificial Sequence
  GFR-binding peptide
  MOD_RES (31)..(32): Xaa is C or S
SKVIMEYQKYIKPTKGIIYLISIPSLDQSVXX

SEQ ID NO: 27154 - protein, 36 aa, Artificial Sequence
  GFR-binding peptide
  MOD_RES (33)..(34): Xaa is C or S
  MOD_RES (11)..(12)..(13)..(14)..(15): Xaa is A or G
  MOD_RES (16)..(17)..(18)..(19): Xaa is A or G or is absent
RVVMNEYKFKXXXXXXXXXLYLVSIPELKTPAXXPK

SEQ ID NO: 27155 - protein, 36 aa, Artificial Sequence
  GFR-binding peptide
  MOD_RES (2)..(34)..(35): Xaa is C or S
GXSRVVMNEYKFKIVNSSDDLYLVSIPELKTPAXXP

SEQ ID NO: 27156 - protein, 36 aa, Artificial Sequence
  GFR-binding peptide
  MOD_RES (2)..(34)..(35): Xaa is C or S
GXGEVVMEEYQKYVVKDYEDIYLMSIPSLETPVXXA

SEQ ID NO: 27157 - protein, 42 aa, Artificial Sequence; identical to SEQ ID NO: 6036
  GFR-binding peptide
  MOD_RES (1)..(3)..(38)..(39): Xaa is C or S
  MOD_RES (16)..(17)..(18)..(19)..(20): Xaa is A or G
  MOD_RES (21)..(22)..(23)..(24): Xaa is A or G or is absent

SEQ ID NO: 27158 - protein, 34 aa, Artificial Sequence; identical to SEQ ID NO: 6037
  GFR-binding peptide
  MOD_RES (34)..(34): Xaa is C or S
  MOD_RES (12)..(13)..(14)..(15)..(16): Xaa is A or G
  MOD_RES (17)..(18)..(19)..(20): Xaa is A or G or is absent

SEQ ID NO: 27159 - protein, 37 aa, Artificial Sequence; identical to SEQ ID NO: 6039
  GFR-binding peptide
  MOD_RES (2)..(4): Xaa is C or S
  MOD_RES (16)..(17)..(18)..(19)..(20): Xaa is A or G
  MOD_RES (21)..(22)..(23)..(24): Xaa is A or G or is absent

SEQ ID NO: 27160 - protein, 39 aa, Artificial Sequence; identical to SEQ ID NO: 6040
  GFR-binding peptide
  MOD_RES (1)..(3)..(37)..(38): Xaa is C or S
  MOD_RES (15)..(16)..(17)..(18)..(19): Xaa is A or G
  MOD_RES (20)..(21)..(22)..(23): Xaa is A or G or is absent

SEQ ID NO: 27161 - protein, 41 aa, Artificial Sequence; identical to SEQ ID NO: 6041
  GFR-binding peptide
  MOD_RES (2)..(4)..(36)..(37): Xaa is C or S

SEQ ID NO: 27162 - protein, 41 aa, Artificial Sequence
  GFR-binding peptide
  MOD_RES (35)..(36): Xaa is C or S
  MOD_RES (13)..(14)..(15)..(16)..(17): Xaa is A or G
  MOD_RES (18)..(19)..(20)..(21): Xaa is A or G or is absent
EAVSMGEEYQKYXXXXXXXXXIYLVSIPSLKTPVXXAKGVK

SEQ ID NO: 27163 - protein, 35 aa, Artificial Sequence
  GFR-binding peptide
  MOD_RES (1)..(35): Xaa is C or S
  MOD_RES (13)..(14)..(15)..(16)..(17): Xaa is A or G
  MOD_RES (18)..(19)..(20)..(21): Xaa is A or G or is absent
XAEVVMDEYQKYXXXXXXXXXIYLISIPSLRAPVX

SEQ ID NO: 27164 - protein, 32 aa, Artificial Sequence; identical to SEQ ID NO: 6044
  GFR-binding peptide
  MOD_RES (2)..(2): Xaa is C or S

SEQ ID NO: 27165 - protein, 42 aa, Artificial Sequence; identical to SEQ ID NO: 6046
  GFR-binding peptide
  MOD_RES (1)..(3)..(36)..(37): Xaa is C or S
  MOD_RES (14)..(15)..(16)..(17)..(18): Xaa is A or G
  MOD_RES (19)..(20)..(21)..(22): Xaa is A or G or is absent

SEQ ID NO: 27166 - protein, 36 aa, Artificial Sequence
  GFR-binding peptide
  MOD_RES (2)..(2): Xaa is C or S
  MOD_RES (15)..(16)..(17)..(18)..(19): Xaa is A or G
  MOD_RES (20)..(21)..(22)..(23): Xaa is A or G or is absent
GXEAVSMGEEYQKYXXXXXXXXXIYLVSIPSLKTPV

SEQ ID NO: 27167 - protein, 36 aa, Artificial Sequence
  GFR-binding peptide
  MOD_RES (1)..(33): Xaa is C or S
XSRVVMNEYQKYIVNSSDDIYLVSIPSLKTPAXTPK

SEQ ID NO: 27168 - protein, 39 aa, Artificial Sequence
  GFR-binding peptide
  MOD_RES (1)..(3)..(35)..(36): Xaa is C or S
XGXGEVVMDEYQKYVVKENEDIYLMSIPSLETPVXXAKP

SEQ ID NO: 27169 - protein, 41 aa, Artificial Sequence; identical to SEQ ID NO: 6049
  GFR-binding peptide
  MOD_RES (1)..(35)..(36): Xaa is C or S
  MOD_RES (13)..(14)..(15)..(16)..(17): Xaa is A or G
  MOD_RES (18)..(19)..(20)..(21): Xaa is A or G or is absent

SEQ ID NO: 27170 - protein, 39 aa, Artificial Sequence
  GFR-binding peptide
  MOD_RES (1)..(33)..(34): Xaa is C or S
XAKVVMNEYQKYIVNNSSDIYLVSIPSLKTPAXXAKPVA

SEQ ID NO: 27171 - protein, 33 aa, Artificial Sequence
  GFR-binding peptide
  MOD_RES (32)..(33): Xaa is C or S
AEVVMDRYKKLVVNNAADFYLISIANLRAPVXX

SEQ ID NO: 27172 - protein, 35 aa, Artificial Sequence
  GFR-binding peptide
  MOD_RES (34)..(35): Xaa is C or S
  MOD_RES (12)..(13)..(14)..(15)..(16): Xaa is A or G
  MOD_RES (17)..(18)..(19)..(20): Xaa is A or G or is absent
ARVVMNEYKFKXXXXXXXXXLYLVSIPELQTPAXX

SEQ ID NO: 27173 - protein, 35 aa, Artificial Sequence; identical to SEQ ID NO: 6054
  GFR-binding peptide
  MOD_RES (31)..(32): Xaa is C or S

SEQ ID NO: 27174 - protein, 39 aa, Artificial Sequence
  GFR-binding peptide
  MOD_RES (2)..(34)..(35): Xaa is C or S
GXESVAMGYHYKLYTVVGKDKYLISIPSLKTPVXXAKSA

SEQ ID NO: 27175 - protein, 36 aa, Artificial Sequence; identical to SEQ ID NO: 6055
  GFR-binding peptide
  MOD_RES (1)..(33)..(34): Xaa is C or S

SEQ ID NO: 27176 - protein, 42 aa, Artificial Sequence
  GFR-binding peptide
  MOD_RES (1)..(3)..(36)..(37): Xaa is C or S
  MOD_RES (14)..(15)..(16)..(17)..(18): Xaa is A or G
  MOD_RES (19)..(20)..(21)..(22): Xaa is A or G or is absent
XKXSKVIMEYQKYXXXXXXXXXIYLISIPSLDQSVXXPSASA

SEQ ID NO: 27177 - protein, 43 aa, Artificial Sequence; identical to SEQ ID NO: 6056
  GFR-binding peptide
  MOD_RES (2)..(4)..(38)..(39): Xaa is C or S
  MOD_RES (16)..(17)..(18)..(19)..(20): Xaa is A or G
  MOD_RES (21)..(22)..(23)..(24): Xaa is A or G or is absent

SEQ ID NO: 27178 - protein, 38 aa, Artificial Sequence
  GFR-binding peptide
  MOD_RES (33)..(33): Xaa is C or S
  MOD_RES (11)..(12)..(13)..(14)..(15): Xaa is A or G
  MOD_RES (16)..(17)..(18)..(19): Xaa is A or G or is absent
RVVMNEYKFKXXXXXXXXXLYLVSIPELKTPAXTPKTV

SEQ ID NO: 27179 - protein, 37 aa, Artificial Sequence
  GFR-binding peptide
  MOD_RES (2)..(4)..(36)..(37): Xaa is C or S
RXGXESVAMGYHYKLYTVVGKDKYLISIPSLKTPVXX

SEQ ID NO: 27180 - protein, 37 aa, Artificial Sequence; identical to SEQ ID NO: 6058
  GFR-binding peptide
  MOD_RES (1)..(35)..(36): Xaa is C or S
  MOD_RES (13)..(14)..(15)..(16)..(17): Xaa is A or G
  MOD_RES (18)..(19)..(20)..(21): Xaa is A or G or is absent

SEQ ID NO: 27181 - protein, 40 aa, Artificial Sequence
  GFR-binding peptide
  MOD_RES (2)..(34): Xaa is C or S
GXSRVVMNEYKFKIVNSSDDLYLVSIPELKTPAXTPKTVH

SEQ ID NO: 27182 - protein, 35 aa, Artificial Sequence
  GFR-binding peptide
  MOD_RES (34)..(34): Xaa is C or S
  MOD_RES (12)..(13)..(14)..(15)..(16): Xaa is A or G
  MOD_RES (17)..(18)..(19)..(20): Xaa is A or G or is absent
SRVVMNEYQKYXXXXXXXXXIYLVSIPSLKTPAXT

SEQ ID NO: 27183 - protein, 35 aa, Artificial Sequence
  GFR-binding peptide
  MOD_RES (1)..(3): Xaa is C or S
XGXEAVSMGEEYQKYTPVGMDDIYLVSIPSLKTPV

SEQ ID NO: 27184 - protein, 38 aa, Artificial Sequence
  GFR-binding peptide
  MOD_RES (33)..(34): Xaa is C or S
  MOD_RES (11)..(12)..(13)..(14)..(15): Xaa is A or G
  MOD_RES (16)..(17)..(18)..(19): Xaa is A or G or is absent
SRVIMEYKFKXXXXXXXXXLYLISIPELAQPVXXPAAS

SEQ ID NO: 27185 - protein, 35 aa, Artificial Sequence; identical to SEQ ID NO: 6060
  GFR-binding peptide
  MOD_RES (2)..(33)..(34): Xaa is C or S

SEQ ID NO: 27186 - protein, 34 aa, Artificial Sequence
  GFR-binding peptide
  MOD_RES (1)..(1): Xaa is C or S
  MOD_RES (13)..(14)..(15)..(16)..(17): Xaa is A or G
  MOD_RES (18)..(19)..(20)..(21): Xaa is A or G or is absent
XAEVVMDEYQKYXXXXXXXXXIYLISIPSLRAPV

SEQ ID NO: 27187 - protein, 35 aa, Artificial Sequence
  GFR-binding peptide
  MOD_RES (2)..(4): Xaa is C or S
RXGXESVAMGEYKFKYTVVGKDLYLISIPELKTPV

SEQ ID NO: 27188 - protein, 34 aa, Artificial Sequence
  GFR-binding peptide
  MOD_RES (1)..(33)..(34): Xaa is C or S
XESVAMGEYKFKYTVVGKDLYLISIPELKTPVXX

SEQ ID NO: 27189 - protein, 37 aa, Artificial Sequence; identical to SEQ ID NO: 6062
  GFR-binding peptide
  MOD_RES (2)..(35)..(36): Xaa is C or S

SEQ ID NO: 27190 - protein, 39 aa, Artificial Sequence
  GFR-binding peptide
  MOD_RES (1)..(33)..(34): Xaa is C or S
XSRVVMNEYQKYIVNSSDDIYLVSIPSLKTPAXXPKPVY

SEQ ID NO: 27191 - protein, 39 aa, Artificial Sequence
  GFR-binding peptide
  MOD_RES (1)..(3)..(37)..(38): Xaa is C or S
  MOD_RES (15)..(16)..(17)..(18)..(19): Xaa is A or G
  MOD_RES (20)..(21)..(22)..(23): Xaa is A or G or is absent
XGXAEVVMDEYQKYXXXXXXXXXIYLISIPSLRAPVXXS

SEQ ID NO: 27192 - protein, 36 aa, Artificial Sequence
  GFR-binding peptide
  MOD_RES (2)..(34)..(35): Xaa is C or S
GXAKVVMNEYQKYIVNNSSDIYLVSIPSLKTPAXXA

SEQ ID NO: 27193 - protein, 38 aa, Artificial Sequence; identical to SEQ ID NO: 6066
  GFR-binding peptide
  MOD_RES (1)..(3)..(35)..(36): Xaa is C or S

SEQ ID NO: 27194 - protein, 31 aa, Artificial Sequence
  GFR-binding peptide
  MOD_RES (31)..(31): Xaa is C or S
EVVMDEYKFKVVNNAADLYLISIPELRAPVX

SEQ ID NO: 27195 - protein, 36 aa, Artificial Sequence
  GFR-binding peptide
  MOD_RES (34)..(35): Xaa is C or S
  MOD_RES (12)..(13)..(14)..(15)..(16): Xaa is A or G
  MOD_RES (17)..(18)..(19)..(20): Xaa is A or G or is absent
AEVVMDEYKFKXXXXXXXXXLYLISIPELRAPVXXS

SEQ ID NO: 27196 - protein, 33 aa, Artificial Sequence; identical to SEQ ID NO: 6069
  GFR-binding peptide
  MOD_RES (1)..(32)..(33): Xaa is C or S

SEQ ID NO: 27197 - protein, 36 aa, Artificial Sequence; identical to SEQ ID NO: 6073
  GFR-binding peptide
  MOD_RES (2)..(36): Xaa is C or S
  MOD_RES (14)..(15)..(16)..(17)..(18): Xaa is A or G
  MOD_RES (19)..(20)..(21)..(22): Xaa is A or G or is absent

SEQ ID NO: 27198 - protein, 40 aa, Artificial Sequence
  GFR-binding peptide
  MOD_RES (1)..(34)..(35): Xaa is C or S
  MOD_RES (12)..(13)..(14)..(15)..(16): Xaa is A or G
  MOD_RES (17)..(18)..(19)..(20): Xaa is A or G or is absent
XSKVIMEYQKYXXXXXXXXXIYLISIPSLDQSVXXPSASA

SEQ ID NO: 27199 - protein, 34 aa, Artificial Sequence
  GFR-binding peptide
  MOD_RES (1)..(34): Xaa is C or S
  MOD_RES (12)..(13)..(14)..(15)..(16): Xaa is A or G
  MOD_RES (17)..(18)..(19)..(20): Xaa is A or G or is absent
XSKVVMEYQKYXXXXXXXXXIYLISIPSLDQPVX

SEQ ID NO: 27200 - protein, 36 aa, Artificial Sequence; identical to SEQ ID NO: 6077
  GFR-binding peptide
  MOD_RES (1)..(3)..(35)..(36): Xaa is C or S

SEQ ID NO: 27201 - protein, 41 aa, Artificial Sequence
  GFR-binding peptide
  MOD_RES (1)..(35)..(36): Xaa is C or S
  MOD_RES (13)..(14)..(15)..(16)..(17): Xaa is A or G
  MOD_RES (18)..(19)..(20)..(21): Xaa is A or G or is absent
XESVAMGYHYKLXXXXXXXXXKYLISIPSLKTPVXXAKSAK

SEQ ID NO: 27202 - protein, 36 aa, Artificial Sequence; identical to SEQ ID NO: 6078
  GFR-binding peptide
  MOD_RES (31)..(32): Xaa is C or S

SEQ ID NO: 27203 - protein, 38 aa, Artificial Sequence; identical to SEQ ID NO: 6079
  GFR-binding peptide
  MOD_RES (2)..(34)..(35): Xaa is C or S

SEQ ID NO: 27204 - protein, 38 aa, Artificial Sequence; identical to SEQ ID NO: 6081
  GFR-binding peptide
  MOD_RES (1)..(35)..(36): Xaa is C or S
  MOD_RES (13)..(14)..(15)..(16)..(17): Xaa is A or G
  MOD_RES (18)..(19)..(20)..(21): Xaa is A or G or is absent

SEQ ID NO: 27205 - protein, 40 aa, Artificial Sequence
  GFR-binding peptide
  MOD_RES (1)..(3)..(35)..(36): Xaa is C or S
XGXARVVMNEYKFKIVNSSDDLYLVSIPELQTPAXXPKPV

SEQ ID NO: 27206 - protein, 34 aa, Artificial Sequence
  GFR-binding peptide
  MOD_RES (33)..(34): Xaa is C or S
  MOD_RES (11)..(12)..(13)..(14)..(15): Xaa is A or G
  MOD_RES (16)..(17)..(18)..(19): Xaa is A or G or is absent
EVVMEEYKFKXXXXXXXXXLYLMSIPELETPVXX

SEQ ID NO: 27207 - protein, 35 aa, Artificial Sequence
  GFR-binding peptide
  MOD_RES (1)..(3)..(35): Xaa is C or S
XGXARVVMNEYQKYIVNSSDDIYLVSIPSLQTPAX

SEQ ID NO: 27208 - protein, 41 aa, Artificial Sequence; identical to SEQ ID NO: 6085
  GFR-binding peptide
  MOD_RES (2)..(35)..(36): Xaa is C or S
  MOD_RES (13)..(14)..(15)..(16)..(17): Xaa is A or G
  MOD_RES (18)..(19)..(20)..(21): Xaa is A or G or is absent

SEQ ID NO: 27209 - protein, 34 aa, Artificial Sequence
  GFR-binding peptide
  MOD_RES (34)..(34): Xaa is C or S
  MOD_RES (12)..(13)..(14)..(15)..(16): Xaa is A or G
  MOD_RES (17)..(18)..(19)..(20): Xaa is A or G or is absent
GEVVMDEYKFKXXXXXXXXXLYLMSIPELETPVX

SEQ ID NO: 27210 - protein, 37 aa, Artificial Sequence; identical to SEQ ID NO: 6086
  GFR-binding peptide
  MOD_RES (33)..(34): Xaa is C or S
  MOD_RES (11)..(12)..(13)..(14)..(15): Xaa is A or G
  MOD_RES (16)..(17)..(18)..(19): Xaa is A or G or is absent

SEQ ID NO: 27211 - protein, 40 aa, Artificial Sequence
  GFR-binding peptide
  MOD_RES (2)..(4)..(38)..(39): Xaa is C or S
  MOD_RES (16)..(17)..(18)..(19)..(20): Xaa is A or G
  MOD_RES (21)..(22)..(23)..(24): Xaa is A or G or is absent
RXGXESVAMGEYKFKXXXXXXXXXLYLISIPELKTPVXXA

SEQ ID NO: 27212 - protein, 34 aa, Artificial Sequence
  GFR-binding peptide
  MOD_RES (1)..(33)..(34): Xaa is C or S
XAEVVMDEYQKYVVNNAADIYLISIPSLRAPVXX

SEQ ID NO: 27213 - protein, 42 aa, Artificial Sequence; identical to SEQ ID NO: 6088
  GFR-binding peptide
  MOD_RES (1)..(3)..(36)..(37): Xaa is C or S

SEQ ID NO: 27214 - protein, 41 aa, Artificial Sequence
  GFR-binding peptide
  MOD_RES (2)..(4)..(38)..(39): Xaa is C or S
  MOD_RES (16)..(17)..(18)..(19)..(20): Xaa is A or G
  MOD_RES (21)..(22)..(23)..(24): Xaa is A or G or is absent
HXGXAKVVMNEYQKYXXXXXXXXXIYLVSIPSLKTPAXXAK

SEQ ID NO: 27215 - protein, 40 aa, Artificial Sequence
  GFR-binding peptide
  MOD_RES (1)..(36)..(37): Xaa is C or S
  MOD_RES (14)..(15)..(16)..(17)..(18): Xaa is A or G
  MOD_RES (19)..(20)..(21)..(22): Xaa is A or G or is absent
XEAVSMGEEYKFKXXXXXXXXXLYLVSIPELKTPVXXAKG

SEQ ID NO: 27216 - protein, 30 aa, Artificial Sequence; identical to SEQ ID NO: 6091
  GFR-binding peptide

SEQ ID NO: 27217 - protein, 40 aa, Artificial Sequence; identical to SEQ ID NO: 6092
  GFR-binding peptide
  MOD_RES (34)..(35): Xaa is C or S
  MOD_RES (12)..(13)..(14)..(15)..(16): Xaa is A or G
  MOD_RES (17)..(18)..(19)..(20): Xaa is A or G or is absent

SEQ ID NO: 27218 - protein, 31 aa, Artificial Sequence; identical to SEQ ID NO: 6093
  GFR-binding peptide
  MOD_RES (31)..(31): Xaa is C or S

SEQ ID NO: 27219 - protein, 34 aa, Artificial Sequence; identical to SEQ ID NO: 6095
  GFR-binding peptide
  MOD_RES (13)..(14)..(15)..(16)..(17): Xaa is A or G
  MOD_RES (18)..(19)..(20)..(21): Xaa is A or G or is absent

SEQ ID NO: 27220 - protein, 32 aa, Artificial Sequence
  GFR-binding peptide
  MOD_RES (31)..(32): Xaa is C or S
EVVMDEYKFKVVNNAADLYLISIPELRAPVXX

SEQ ID NO: 27221 - protein, 35 aa, Artificial Sequence
  GFR-binding peptide
  MOD_RES (2)..(4): Xaa is C or S
RXGXESVAMGEYQKYYTVVGKDIYLISIPSLKTPV

SEQ ID NO: 27222 - protein, 44 aa, Artificial Sequence; identical to SEQ ID NO: 6096
  GFR-binding peptide
  MOD_RES (2)..(4)..(38)..(39): Xaa is C or S
  MOD_RES (16)..(17)..(18)..(19)..(20): Xaa is A or G
  MOD_RES (21)..(22)..(23)..(24): Xaa is A or G or is absent

SEQ ID NO: 27223 - protein, 35 aa, Artificial Sequence; identical to SEQ ID NO: 6097
  GFR-binding peptide
  MOD_RES (33)..(34): Xaa is C or S
  MOD_RES (11)..(12)..(13)..(14)..(15): Xaa is A or G
  MOD_RES (16)..(17)..(18)..(19): Xaa is A or G or is absent

SEQ ID NO: 27224 - protein, 39 aa, Artificial Sequence; identical to SEQ ID NO: 6098
  GFR-binding peptide
  MOD_RES (34)..(35): Xaa is C or S
  MOD_RES (12)..(13)..(14)..(15)..(16): Xaa is A or G
  MOD_RES (17)..(18)..(19)..(20): Xaa is A or G or is absent

SEQ ID NO: 27225 - protein, 39 aa, Artificial Sequence
  GFR-binding peptide
  MOD_RES (1)..(3)..(37)..(38): Xaa is C or S
  MOD_RES (15)..(16)..(17)..(18)..(19): Xaa is A or G
  MOD_RES (20)..(21)..(22)..(23): Xaa is A or G or is absent
XGXSRVVMNEYKFKXXXXXXXXXLYLVSIPELKTPAXXP

SEQ ID NO: 27226 - protein, 37 aa, Artificial Sequence; identical to SEQ ID NO: 6099
  GFR-binding peptide
  MOD_RES (33)..(34): Xaa is C or S
  MOD_RES (11)..(12)..(13)..(14)..(15): Xaa is A or G
  MOD_RES (16)..(17)..(18)..(19): Xaa is A or G or is absent

SEQ ID NO: 27227 - protein, 38 aa, Artificial Sequence
  GFR-binding peptide
  MOD_RES (1)..(3)..(36)..(37): Xaa is C or S
  MOD_RES (14)..(15)..(16)..(17)..(18): Xaa is A or G
  MOD_RES (19)..(20)..(21)..(22): Xaa is A or G or is absent
XKXSRVIMEYKFKXXXXXXXXXLYLISIPELAQPVXXP

SEQ ID NO: 27228 - protein, 33 aa, Artificial Sequence
  GFR-binding peptide
  MOD_RES (12)..(13)..(14)..(15)..(16): Xaa is A or G
  MOD_RES (17)..(18)..(19)..(20): Xaa is A or G or is absent
ESVAMGEYKFKXXXXXXXXXLYLISIPELKTPV

SEQ ID NO: 27229 - protein, 36 aa, Artificial Sequence
  GFR-binding peptide
  MOD_RES (33)..(34): Xaa is C or S
  MOD_RES (11)..(12)..(13)..(14)..(15): Xaa is A or G
  MOD_RES (16)..(17)..(18)..(19): Xaa is A or G or is absent
EVVMDEYKFKXXXXXXXXXLYLMSIPELETPVXXAK

SEQ ID NO: 27230 - protein, 38 aa, Artificial Sequence
  GFR-binding peptide
  MOD_RES (2)..(4)..(36)..(37): Xaa is C or S
RXGXESVAMGRYKKLYTVVGKDFYLISIANLKTPVXXA

SEQ ID NO: 27231 - protein, 37 aa, Artificial Sequence
  GFR-binding peptide
  MOD_RES (2)..(4)..(35)..(36): Xaa is C or S
SXKXSRVIMEYKFKVKPKRGVLYLISIPELAQPVXXP

SEQ ID NO: 27232 - protein, 39 aa, Artificial Sequence
  GFR-binding peptide
  MOD_RES (2)..(4)..(36)..(37): Xaa is C or S
RXGXAEVVMDEYKFKVVNNAADLYLISIPELRAPVXXSA

SEQ ID NO: 27233 - protein, 38 aa, Artificial Sequence; identical to SEQ ID NO: 6102
  GFR-binding peptide
  MOD_RES (1)..(36)..(37): Xaa is C or S
  MOD_RES (14)..(15)..(16)..(17)..(18): Xaa is A or G
  MOD_RES (19)..(20)..(21)..(22): Xaa is A or G or is absent

SEQ ID NO: 27234 - protein, 34 aa, Artificial Sequence
  GFR-binding peptide
  MOD_RES (33)..(34): Xaa is C or S
  MOD_RES (11)..(12)..(13)..(14)..(15): Xaa is A or G
  MOD_RES (16)..(17)..(18)..(19): Xaa is A or G or is absent
SRVIMEYKFKXXXXXXXXXLYLISIPELAQPVXX

SEQ ID NO: 27235 - protein, 35 aa, Artificial Sequence
  GFR-binding peptide
  MOD_RES (2)..(2): Xaa is C or S
  MOD_RES (14)..(15)..(16)..(17)..(18): Xaa is A or G
  MOD_RES (19)..(20)..(21)..(22): Xaa is A or G or is absent
GXESVAMGYHYKLXXXXXXXXXKYLISIPSLKTPV

SEQ ID NO: 27236 - protein, 40 aa, Artificial Sequence; identical to SEQ ID NO: 6103
  GFR-binding peptide
  MOD_RES (1)..(3)..(36)..(37): Xaa is C or S

SEQ ID NO: 27237 - protein, 37 aa, Artificial Sequence; identical to SEQ ID NO: 6104
  GFR-binding peptide
  MOD_RES (2)..(34): Xaa is C or S

SEQ ID NO: 27238 - protein, 33 aa, Artificial Sequence; identical to SEQ ID NO: 6105
  GFR-binding peptide
  MOD_RES (1)..(3): Xaa is C or S

SEQ ID NO: 27239 - protein, 39 aa, Artificial Sequence
  GFR-binding peptide
  MOD_RES (1)..(33)..(34): Xaa is C or S
XAEVVMDEYKFKVVNNAADLYLISIPELRAPVXXSAPAA

SEQ ID NO: 27240 - protein, 39 aa, Artificial Sequence; identical to SEQ ID NO: 6107
  GFR-binding peptide
  MOD_RES (33)..(34): Xaa is C or S
  MOD_RES (11)..(12)..(13)..(14)..(15): Xaa is A or G
  MOD_RES (16)..(17)..(18)..(19): Xaa is A or G or is absent

SEQ ID NO: 27241 - protein, 35 aa, Artificial Sequence; identical to SEQ ID NO: 6108
  GFR-binding peptide
  MOD_RES (1)..(3)..(35): Xaa is C or S

SEQ ID NO: 27242 - protein, 40 aa, Artificial Sequence; identical to SEQ ID NO: 6109
  GFR-binding peptide
  MOD_RES (2)..(35)..(36): Xaa is C or S
  MOD_RES (13)..(14)..(15)..(16)..(17): Xaa is A or G
  MOD_RES (18)..(19)..(20)..(21): Xaa is A or G or is absent

SEQ ID NO: 27243 - protein, 31 aa, Artificial Sequence
  GFR-binding peptide
  MOD_RES (1)..(1): Xaa is C or S
XSKVVMEYQKYVKPTRGVIYLISIPSLDQPV

SEQ ID NO: 27244 - protein, 45 aa, Artificial Sequence
  GFR-binding peptide
  MOD_RES (2)..(4)..(39)..(40): Xaa is C or S
  MOD_RES (17)..(18)..(19)..(20)..(21): Xaa is A or G
  MOD_RES (22)..(23)..(24)..(25): Xaa is A or G or is absent
RXGXEAVSMGEEYKFKXXXXXXXXXLYLVSIPELKTPVXXAKGVK

SEQ ID NO: 27245 - protein, 32 aa, Artificial Sequence
  GFR-binding peptide
  MOD_RES (31)..(32): Xaa is C or S
SKVVMEYQKYVKPTRGVIYLISIPSLDQPVXX

SEQ ID NO: 27246 - protein, 42 aa, Artificial Sequence; identical to SEQ ID NO: 6115
  GFR-binding peptide
  MOD_RES (2)..(36)..(37): Xaa is C or S
  MOD_RES (14)..(15)..(16)..(17)..(18): Xaa is A or G
  MOD_RES (19)..(20)..(21)..(22): Xaa is A or G or is absent

SEQ ID NO: 27247 - protein, 35 aa, Artificial Sequence
  GFR-binding peptide
  MOD_RES (34)..(35): Xaa is C or S
  MOD_RES (12)..(13)..(14)..(15)..(16): Xaa is A or G
  MOD_RES (17)..(18)..(19)..(20): Xaa is A or G or is absent
GEVVMEEYQKYXXXXXXXXXIYLMSIPSLETPVXX

SEQ ID NO: 27248 - protein, 43 aa, Artificial Sequence
  GFR-binding peptide
  MOD_RES (2)..(4)..(37)..(38): Xaa is C or S
  MOD_RES (15)..(16)..(17)..(18)..(19): Xaa is A or G
  MOD_RES (20)..(21)..(22)..(23): Xaa is A or G or is absent
SXKXSKVIMEYQKYXXXXXXXXXIYLISIPSLDQSVXXPSASA

SEQ ID NO: 27249 - protein, 34 aa, Artificial Sequence; identical to SEQ ID NO: 6120
  GFR-binding peptide
  MOD_RES (32)..(33): Xaa is C or S

SEQ ID NO: 27250 - protein, 34 aa, Artificial Sequence; identical to SEQ ID NO: 6121
  GFR-binding peptide
  MOD_RES (33)..(34): Xaa is C or S
  MOD_RES (11)..(12)..(13)..(14)..(15): Xaa is A or G
  MOD_RES (16)..(17)..(18)..(19): Xaa is A or G or is absent

SEQ ID NO: 27251 - protein, 39 aa, Artificial Sequence
  GFR-binding peptide
  MOD_RES (2)..(4)..(36): Xaa is C or S
HXGXSRVVMNEYQKYIVNSSDDIYLVSIPSLKTPAXTPK

SEQ ID NO: 27252 - protein, 33 aa, Artificial Sequence
  GFR-binding peptide
  MOD_RES (31)..(32): Xaa is C or S
EVVMDRYKKLVVNNAADFYLISIANLRAPVXXS

SEQ ID NO: 27253 - protein, 37 aa, Artificial Sequence; identical to SEQ ID NO: 6123
  GFR-binding peptide
  MOD_RES (1)..(33)..(34): Xaa is C or S

SEQ ID NO: 27254 - protein, 37 aa, Artificial Sequence; identical to SEQ ID NO: 6124
  GFR-binding peptide
  MOD_RES (2)..(36)..(37): Xaa is C or S
  MOD_RES (14)..(15)..(16)..(17)..(18): Xaa is A or G
  MOD_RES (19)..(20)..(21)..(22): Xaa is A or G or is absent

SEQ ID NO: 27255 - protein, 38 aa, Artificial Sequence
  GFR-binding peptide
  MOD_RES (35)..(36): Xaa is C or S
  MOD_RES (13)..(14)..(15)..(16)..(17): Xaa is A or G
  MOD_RES (18)..(19)..(20)..(21): Xaa is A or G or is absent
EAVSMGEEYQKYXXXXXXXXXIYLVSIPSLKTPVXXAK

SEQ ID NO: 27256 - protein, 38 aa, Artificial Sequence; identical to SEQ ID NO: 6125
  GFR-binding peptide
  MOD_RES (1)..(3)..(35)..(36): Xaa is C or S

SEQ ID NO: 27257 - protein, 34 aa, Artificial Sequence
  GFR-binding peptide
  MOD_RES (2)..(2): Xaa is C or S
  MOD_RES (13)..(14)..(15)..(16)..(17): Xaa is A or G
  MOD_RES (18)..(19)..(20)..(21): Xaa is A or G or is absent
KXSRVIMEYQKYXXXXXXXXXIYLISIPSLAQPV

SEQ ID NO: 27258 - protein, 34 aa, Artificial Sequence; identical to SEQ ID NO: 6127
  GFR-binding peptide
  MOD_RES (33)..(34): Xaa is C or S
  MOD_RES (11)..(12)..(13)..(14)..(15): Xaa is A or G
  MOD_RES (16)..(17)..(18)..(19): Xaa is A or G or is absent

SEQ ID NO: 27259 - protein, 38 aa, Artificial Sequence; identical to SEQ ID NO: 6128
  GFR-binding peptide
  MOD_RES (2)..(34): Xaa is C or S

SEQ ID NO: 27260 - protein, 39 aa, Artificial Sequence
  GFR-binding peptide
  MOD_RES (34)..(34): Xaa is C or S
  MOD_RES (12)..(13)..(14)..(15)..(16): Xaa is A or G
  MOD_RES (17)..(18)..(19)..(20): Xaa is A or G or is absent
SRVVMNEYKFKXXXXXXXXXLYLVSIPELKTPAXTPKTV

SEQ ID NO: 27261 - protein, 44 aa, Artificial Sequence; identical to SEQ ID NO: 6130
  GFR-binding peptide
  MOD_RES (2)..(4)..(38): Xaa is C or S
  MOD_RES (16)..(17)..(18)..(19)..(20): Xaa is A or G
  MOD_RES (21)..(22)..(23)..(24): Xaa is A or G or is absent

SEQ ID NO: 27262 - protein, 31 aa, Artificial Sequence
  GFR-binding peptide
  MOD_RES (1)..(1): Xaa is C or S
XSKVIMEYQKYIKPTKGIIYLISIPSLDQSV

SEQ ID NO: 27263 - protein, 40 aa, Artificial Sequence; identical to SEQ ID NO: 6134
  GFR-binding peptide
  MOD_RES (2)..(34)..(35): Xaa is C or S

SEQ ID NO: 27264 - protein, 33 aa, Artificial Sequence; identical to SEQ ID NO: 6135
  GFR-binding peptide
  MOD_RES (12)..(13)..(14)..(15)..(16): Xaa is A or G
  MOD_RES (17)..(18)..(19)..(20): Xaa is A or G or is absent

SEQ ID NO: 27265 - protein, 36 aa, Artificial Sequence
  GFR-binding peptide
  MOD_RES (34)..(35): Xaa is C or S
  MOD_RES (12)..(13)..(14)..(15)..(16): Xaa is A or G
  MOD_RES (17)..(18)..(19)..(20): Xaa is A or G or is absent
ESVAMGYHYKLXXXXXXXXXKYLISIPSLKTPVXXA

SEQ ID NO: 27266 - protein, 36 aa, Artificial Sequence
  GFR-binding peptide
  MOD_RES (1)..(3)..(35)..(36): Xaa is C or S
XGXSRVVMNEYKFKIVNSSDDLYLVSIPELKTPAXX

SEQ ID NO: 27267 - protein, 41 aa, Artificial Sequence
  GFR-binding peptide
  MOD_RES (2)..(35)..(36): Xaa is C or S
GXEAVSMGEEYKFKTPVGMDDLYLVSIPELKTPVXXAKGVK

SEQ ID NO: 27268 - protein, 38 aa, Artificial Sequence
  GFR-binding peptide
  MOD_RES (1)..(35)..(36): Xaa is C or S
  MOD_RES (13)..(14)..(15)..(16)..(17): Xaa is A or G
  MOD_RES (18)..(19)..(20)..(21): Xaa is A or G or is absent
XARVVMNEYQKYXXXXXXXXXIYLVSIPSLQTPAXXPK

SEQ ID NO: 27269 - protein, 40 aa, Artificial Sequence
  GFR-binding peptide
  MOD_RES (2)..(4)..(37)..(38): Xaa is C or S
RXGXEAVSMGEEYKFKTPVGMDDLYLVSIPELKTPVXXAK

SEQ ID NO: 27270 - protein, 41 aa, Artificial Sequence
  GFR-binding peptide
  MOD_RES (1)..(3)..(35)..(36): Xaa is C or S
XGXAEVVMDEYQKYVVNNAADIYLISIPSLRAPVXXSAPAA

SEQ ID NO: 27271 - protein, 39 aa, Artificial Sequence
  GFR-binding peptide
  MOD_RES (2)..(35)..(36): Xaa is C or S
GXEAVSMGEEYQKYTPVGMDDIYLVSIPSLKTPVXXAKG

SEQ ID NO: 27272 - protein, 35 aa, Artificial Sequence
  GFR-binding peptide
  MOD_RES (2)..(35): Xaa is C or S
  MOD_RES (13)..(14)..(15)..(16)..(17): Xaa is A or G
  MOD_RES (18)..(19)..(20)..(21): Xaa is A or G or is absent
KXSKVIMEYKFKXXXXXXXXXLYLISIPELDQSVX

SEQ ID NO: 27273 - protein, 35 aa, Artificial Sequence
  GFR-binding peptide
  MOD_RES (1)..(34)..(35): Xaa is C or S
  MOD_RES (12)..(13)..(14)..(15)..(16): Xaa is A or G
  MOD_RES (17)..(18)..(19)..(20): Xaa is A or G or is absent
XSKVIMEYQKYXXXXXXXXXIYLISIPSLDQSVXX

SEQ ID NO: 27274 - protein, 40 aa, Artificial Sequence; identical to SEQ ID NO: 6144
  GFR-binding peptide
  MOD_RES (1)..(3)..(36)..(37): Xaa is C or S
  MOD_RES (14)..(15)..(16)..(17)..(18): Xaa is A or G
  MOD_RES (19)..(20)..(21)..(22): Xaa is A or G or is absent

SEQ ID NO: 27275 - protein, 37 aa, Artificial Sequence
  GFR-binding peptide
  MOD_RES (31)..(32): Xaa is C or S
EVVMDEYKFKVVNNAADLYLISIPELRAPVXXSAPAA

SEQ ID NO: 27276 - protein, 37 aa, Artificial Sequence; identical to SEQ ID NO: 6146
  GFR-binding peptide
  MOD_RES (2)..(33)..(34): Xaa is C or S

SEQ ID NO: 27277 - protein, 42 aa, Artificial Sequence
  GFR-binding peptide
  MOD_RES (2)..(4)..(38)..(39): Xaa is C or S
  MOD_RES (16)..(17)..(18)..(19)..(20): Xaa is A or G
  MOD_RES (21)..(22)..(23)..(24): Xaa is A or G or is absent
HXGXAKVVMNEYKFKXXXXXXXXXLYLVSIPELKTPAXXAKP

SEQ ID NO: 27278 - protein, 34 aa, Artificial Sequence; identical to SEQ ID NO: 6150
  GFR-binding peptide
  MOD_RES (33)..(34): Xaa is C or S
  MOD_RES (11)..(12)..(13)..(14)..(15): Xaa is A or G
  MOD_RES (16)..(17)..(18)..(19): Xaa is A or G or is absent

SEQ ID NO: 27279 - protein, 41 aa, Artificial Sequence
  GFR-binding peptide
  MOD_RES (1)..(3)..(35)..(36): Xaa is C or S
XGXSRVVMNEYKFKIVNSSDDLYLVSIPELKTPAXXPKPVY

SEQ ID NO: 27280 - protein, 36 aa, Artificial Sequence
  GFR-binding peptide
  MOD_RES (1)..(3): Xaa is C or S
  MOD_RES (15)..(16)..(17)..(18)..(19): Xaa is A or G
  MOD_RES (20)..(21)..(22)..(23): Xaa is A or G or is absent
XGXSRVVMNEYKFKXXXXXXXXXLYLVSIPELKTPA

SEQ ID NO: 27281 - protein, 38 aa, Artificial Sequence
  GFR-binding peptide
  MOD_RES (2)..(4)..(36)..(37): Xaa is C or S
RXGXGEVVMEEYQKYVVKDYEDIYLMSIPSLETPVXXA

SEQ ID NO: 27282 - protein, 39 aa, Artificial Sequence
  GFR-binding peptide
  MOD_RES (1)..(33)..(34): Xaa is C or S
XESVAMGEYKFKYTVVGKDLYLISIPELKTPVXXAKSAK

SEQ ID NO: 27283 - protein, 37 aa, Artificial Sequence; identical to SEQ ID NO: 6152
  GFR-binding peptide
  MOD_RES (1)..(34)..(35): Xaa is C or S
  MOD_RES (12)..(13)..(14)..(15)..(16): Xaa is A or G
  MOD_RES (17)..(18)..(19)..(20): Xaa is A or G or is absent

SEQ ID NO: 27284 - protein, 37 aa, Artificial Sequence
  GFR-binding peptide
  MOD_RES (33)..(34): Xaa is C or S
  MOD_RES (11)..(12)..(13)..(14)..(15): Xaa is A or G
  MOD_RES (16)..(17)..(18)..(19): Xaa is A or G or is absent
SKVVMEYQKYXXXXXXXXXIYLISIPSLDQPVXXPSA

SEQ ID NO: 27285 - protein, 40 aa, Artificial Sequence
  GFR-binding peptide
  MOD_RES (1)..(35)..(36): Xaa is C or S
  MOD_RES (13)..(14)..(15)..(16)..(17): Xaa is A or G
  MOD_RES (18)..(19)..(20)..(21): Xaa is A or G or is absent
XAEVVMDYHYKLXXXXXXXXXKYLISIPSLRAPVXXSAPA

SEQ ID NO: 27286 - protein, 38 aa, Artificial Sequence
  GFR-binding peptide
  MOD_RES (1)..(3)..(35)..(36): Xaa is C or S
XGXGEVVMDEYQKYVVKENEDIYLMSIPSLETPVXXAK

SEQ ID NO: 27287 - protein, 39 aa, Artificial Sequence
  GFR-binding peptide
  MOD_RES (33)..(33): Xaa is C or S
  MOD_RES (11)..(12)..(13)..(14)..(15): Xaa is A or G
  MOD_RES (16)..(17)..(18)..(19): Xaa is A or G or is absent
RVVMNEYKFKXXXXXXXXXLYLVSIPELKTPAXTPKTVH

SEQ ID NO: 27288 - protein, 42 aa, Artificial Sequence
  GFR-binding peptide
  MOD_RES (1)..(3)..(37)..(38): Xaa is C or S
  MOD_RES (15)..(16)..(17)..(18)..(19): Xaa is A or G
  MOD_RES (20)..(21)..(22)..(23): Xaa is A or G or is absent
XGXARVVMNEYQKYXXXXXXXXXIYLVSIPSLQTPAXXPKPV

SEQ ID NO: 27289 - protein, 36 aa, Artificial Sequence; identical to SEQ ID NO: 6154
  GFR-binding peptide
  MOD_RES (1)..(3): Xaa is C or S
  MOD_RES (15)..(16)..(17)..(18)..(19): Xaa is A or G
  MOD_RES (20)..(21)..(22)..(23): Xaa is A or G or is absent

SEQ ID NO: 27290 - protein, 40 aa, Artificial Sequence
  GFR-binding peptide
  MOD_RES (2)..(4)..(36)..(37): Xaa is C or S
RXGXAEVVMDRYKKLVVNNAADFYLISIANLRAPVXXSAP

SEQ ID NO: 27291 - protein, 33 aa, Artificial Sequence
  GFR-binding peptide
  MOD_RES (32)..(33): Xaa is C or S
ESVAMGYHYKLYTVVGKDKYLISIPSLKTPVXX

SEQ ID NO: 27292 - protein, 38 aa, Artificial Sequence
  GFR-binding peptide
  MOD_RES (2)..(4)..(36)..(37): Xaa is C or S
RXGXGEVVMEEYKFKVVKDYEDLYLMSIPELETPVXXA

SEQ ID NO: 27293 - protein, 38 aa, Artificial Sequence; identical to SEQ ID NO: 6159
  GFR-binding peptide
  MOD_RES (2)..(4)..(38): Xaa is C or S
  MOD_RES (16)..(17)..(18)..(19)..(20): Xaa is A or G
  MOD_RES (21)..(22)..(23)..(24): Xaa is A or G or is absent

SEQ ID NO: 27294 - protein, 37 aa, Artificial Sequence
  GFR-binding peptide
  MOD_RES (2)..(4)..(36)..(37): Xaa is C or S
HXGXAKVVMNEYQKYIVNNSSDIYLVSIPSLKTPAXX

SEQ ID NO: 27295 - protein, 38 aa, Artificial Sequence
  GFR-binding peptide
  MOD_RES (2)..(4)..(37)..(38): Xaa is C or S
RXGXEAVSMGEEYQKYTPVGMDDIYLVSIPSLKTPVXX

SEQ ID NO: 27296 - protein, 37 aa, Artificial Sequence; identical to SEQ ID NO: 6160
  GFR-binding peptide
  MOD_RES (2)..(4)..(37): Xaa is C or S
  MOD_RES (15)..(16)..(17)..(18)..(19): Xaa is A or G
  MOD_RES (20)..(21)..(22)..(23): Xaa is A or G or is absent

SEQ ID NO: 27297 - protein, 36 aa, Artificial Sequence
  GFR-binding peptide
  MOD_RES (32)..(33): Xaa is C or S
SRVVMNEYQKYIVNSSDDIYLVSIPSLKTPAXXPKP

SEQ ID NO: 27298 - protein, 39 aa, Artificial Sequence
  GFR-binding peptide
  MOD_RES (2)..(4)..(38)..(39): Xaa is C or S
  MOD_RES (16)..(17)..(18)..(19)..(20): Xaa is A or G
  MOD_RES (21)..(22)..(23)..(24): Xaa is A or G or is absent
RXGXAEVVMDRYKKLXXXXXXXXXFYLISIANLRAPVXX

SEQ ID NO: 27299 - protein, 34 aa, Artificial Sequence
  GFR-binding peptide
  MOD_RES (1)..(3): Xaa is C or S
XGXAEVVMDRYKKLVVNNAADFYLISIANLRAPV

SEQ ID NO: 27300 - protein, 34 aa, Artificial Sequence
  GFR-binding peptide
  MOD_RES (31)..(32): Xaa is C or S
RVVMNEYQKYIVNSSDDIYLVSIPSLKTPAXXPK

SEQ ID NO: 27301 - protein, 30 aa, Artificial Sequence
  GFR-binding peptide
RVVMNEYQKYIVNSSDDIYLVSIPSLQTPA

SEQ ID NO: 27302 - protein, 40 aa, Artificial Sequence
  GFR-binding peptide
  MOD_RES (2)..(34)..(35): Xaa is C or S
GXARVVMNEYKFKIVNSSDDLYLVSIPELQTPAXXPKPVT

SEQ ID NO: 27303 - protein, 36 aa, Artificial Sequence; identical to SEQ ID NO: 6163
  GFR-binding peptide
  MOD_RES (31)..(31): Xaa is C or S

SEQ ID NO: 27304 - protein, 42 aa, Artificial Sequence
  GFR-binding peptide
  MOD_RES (2)..(4)..(37)..(38): Xaa is C or S
  MOD_RES (15)..(16)..(17)..(18)..(19): Xaa is A or G
  MOD_RES (20)..(21)..(22)..(23): Xaa is A or G or is absent
SXKXSRVIMEYQKYXXXXXXXXXIYLISIPSLAQPVXXPAAS

SEQ ID NO: 27305 - protein, 34 aa, Artificial Sequence
  GFR-binding peptide
  MOD_RES (32)..(32): Xaa is C or S
SRVVMNEYKFKIVNSSDDLYLVSIPELKTPAXTP

SEQ ID NO: 27306 - protein, 38 aa, Artificial Sequence
  GFR-binding peptide
  MOD_RES (2)..(34): Xaa is C or S
GXSRVVMNEYQKYIVNSSDDIYLVSIPSLKTPAXTPKT

SEQ ID NO: 27307 - protein, 36 aa, Artificial Sequence; identical to SEQ ID NO: 6172
  GFR-binding peptide
  MOD_RES (2)..(34)..(35): Xaa is C or S

SEQ ID NO: 27308 - protein, 35 aa, Artificial Sequence; identical to SEQ ID NO: 6174
  GFR-binding peptide
  MOD_RES (2)..(4)..(35): Xaa is C or S

SEQ ID NO: 27309 - protein, 36 aa, Artificial Sequence; identical to SEQ ID NO: 6175
  GFR-binding peptide
  MOD_RES (1)..(34)..(35): Xaa is C or S
  MOD_RES (12)..(13)..(14)..(15)..(16): Xaa is A or G
  MOD_RES (17)..(18)..(19)..(20): Xaa is A or G or is absent

SEQ ID NO: 27310 - protein, 36 aa, Artificial Sequence; identical to SEQ ID NO: 6176
  GFR-binding peptide
  MOD_RES (1)..(35)..(36): Xaa is C or S
  MOD_RES (13)..(14)..(15)..(16)..(17): Xaa is A or G
  MOD_RES (18)..(19)..(20)..(21): Xaa is A or G or is absent

SEQ ID NO: 27311 - protein, 39 aa, Artificial Sequence; identical to SEQ ID NO: 6177
  GFR-binding peptide
  MOD_RES (2)..(4)..(36)..(37): Xaa is C or S

SEQ ID NO: 27312 - protein, 38 aa, Artificial Sequence
  GFR-binding peptide
  MOD_RES (2)..(35)..(36): Xaa is C or S
  MOD_RES (13)..(14)..(15)..(16)..(17): Xaa is A or G
  MOD_RES (18)..(19)..(20)..(21): Xaa is A or G or is absent
KXSKVVMEYQKYXXXXXXXXXIYLISIPSLDQPVXXPS

SEQ ID NO: 27313 - protein, 36 aa, Artificial Sequence
  GFR-binding peptide
  MOD_RES (2)..(36): Xaa is C or S
  MOD_RES (14)..(15)..(16)..(17)..(18): Xaa is A or G
  MOD_RES (19)..(20)..(21)..(22): Xaa is A or G or is absent
GXGEVVMEEYKFKXXXXXXXXXLYLMSIPELETPVX

SEQ ID NO: 27314 - protein, 40 aa, Artificial Sequence
  GFR-binding peptide
  MOD_RES (2)..(4)..(35)..(36): Xaa is C or S
SXKXSKVVMEYKFKVKPTRGVLYLISIPELDQPVXXPSAS

SEQ ID NO: 27315 - protein, 37 aa, Artificial Sequence
  GFR-binding peptide
  MOD_RES (31)..(32): Xaa is C or S
SKVIMEYQKYIKPTKGIIYLISIPSLDQSVXXPSASA

SEQ ID NO: 27316 - protein, 37 aa, Artificial Sequence
  GFR-binding peptide
  MOD_RES (2)..(34)..(35): Xaa is C or S
GXGEVVMEEYKFKVVKDYEDLYLMSIPELETPVXXAK

SEQ ID NO: 27317 - protein, 33 aa, Artificial Sequence; identical to SEQ ID NO: 6179
  GFR-binding peptide
  MOD_RES (31)..(32): Xaa is C or S

SEQ ID NO: 27318 - protein, 34 aa, Artificial Sequence
  GFR-binding peptide
  MOD_RES (1)..(34): Xaa is C or S
  MOD_RES (12)..(13)..(14)..(15)..(16): Xaa is A or G
  MOD_RES (17)..(18)..(19)..(20): Xaa is A or G or is absent
XSRVIMEYQKYXXXXXXXXXIYLISIPSLAQPVX

SEQ ID NO: 27319 - protein, 39 aa, Artificial Sequence
  GFR-binding peptide
  MOD_RES (2)..(4)..(36)..(37): Xaa is C or S
RXGXAEVVMDEYQKYVVNNAADIYLISIPSLRAPVXXSA

SEQ ID NO: 27320 - protein, 38 aa, Artificial Sequence; identical to SEQ ID NO: 6181
  GFR-binding peptide
  MOD_RES (6)..(7): Xaa is C or S

SEQ ID NO: 27321 - protein, 40 aa, Artificial Sequence
  GFR-binding peptide
  MOD_RES (2)..(3)..(38)..(40): Xaa is C or S
  MOD_RES (17)..(18)..(19)..(20)..(21): Xaa is A or G
  MOD_RES (22)..(23)..(24)..(25): Xaa is A or G or is absent
AXXVPTKLSPISVLYIXXXXXXXXXYKQYEEGMSVAEXGX

SEQ ID NO: 27322 - protein, 34 aa, Artificial Sequence; identical to SEQ ID NO: 6184
  GFR-binding peptide
  MOD_RES (14)..(15)..(16)..(17)..(18): Xaa is A or G
  MOD_RES (19)..(20)..(21)..(22): Xaa is A or G or is absent

SEQ ID NO: 27323 - protein, 42 aa, Artificial Sequence; identical to SEQ ID NO: 6186
  GFR-binding peptide
  MOD_RES (4)..(5)..(40)..(42): Xaa is C or S
  MOD_RES (19)..(20)..(21)..(22)..(23): Xaa is A or G
  MOD_RES (24)..(25)..(26)..(27): Xaa is A or G or is absent

SEQ ID NO: 27324 - protein, 36 aa, Artificial Sequence
  GFR-binding peptide
  MOD_RES (1)..(35): Xaa is C or S
  MOD_RES (15)..(16)..(17)..(18)..(19): Xaa is A or G
  MOD_RES (20)..(21)..(22)..(23): Xaa is A or G or is absent
XVPTKLSPISILYIXXXXXXXXXYKQYEGMAVSEXG

SEQ ID NO: 27325 - protein, 35 aa, Artificial Sequence
  GFR-binding peptide
  MOD_RES (2)..(3)..(35): Xaa is C or S
AXXVPTELSPISMLYIDENEKVVYKQYEDMVVEGX

SEQ ID NO: 27326 - protein, 33 aa, Artificial Sequence; identical to SEQ ID NO: 6189
  GFR-binding peptide
  MOD_RES (32)..(32): Xaa is C or S

SEQ ID NO: 27327 - protein, 38 aa, Artificial Sequence; identical to SEQ ID NO: 6190
  GFR-binding peptide
  MOD_RES (2)..(3)..(36)..(38): Xaa is C or S
  MOD_RES (17)..(18)..(19)..(20)..(21): Xaa is A or G
  MOD_RES (22)..(23)..(24)..(25): Xaa is A or G or is absent

SEQ ID NO: 27328 - protein, 40 aa, Artificial Sequence
  GFR-binding peptide
  MOD_RES (4)..(5)..(37)..(39): Xaa is C or S
PKAXXVPTELEPISMLYLDEYDKVVKFKYEEMVVEGXGXR

SEQ ID NO: 27329 - protein, 41 aa, Artificial Sequence
  GFR-binding peptide
  MOD_RES (2)..(3)..(38)..(40): Xaa is C or S
  MOD_RES (17)..(18)..(19)..(20)..(21): Xaa is A or G
  MOD_RES (22)..(23)..(24)..(25): Xaa is A or G or is absent
AXXVPTKLSPISVLYIXXXXXXXXXYKQYEEGMSVAEXGXR

SEQ ID NO: 27330 - protein, 36 aa, Artificial Sequence; identical to SEQ ID NO: 6192
  GFR-binding peptide
  MOD_RES (3)..(4)..(36): Xaa is C or S

SEQ ID NO: 27331 - protein, 32 aa, Artificial Sequence; identical to SEQ ID NO: 6193
  GFR-binding peptide
  MOD_RES (1)..(32): Xaa is C or S

SEQ ID NO: 27332 - protein, 32 aa, Artificial Sequence
  GFR-binding peptide
  MOD_RES (1)..(2): Xaa is C or S
XXAPTKLSPISVLYIDSSNNVIYKQYENMVVK

SEQ ID NO: 27333 - protein, 40 aa, Artificial Sequence
  GFR-binding peptide
  MOD_RES (1)..(2)..(37)..(39): Xaa is C or S
  MOD_RES (16)..(17)..(18)..(19)..(20): Xaa is A or G
  MOD_RES (21)..(22)..(23)..(24): Xaa is A or G or is absent
XXVPTKLSPISVLYIXXXXXXXXXYKQYEEGMSVAEXGXR

SEQ ID NO: 27334 - protein, 33 aa, Artificial Sequence
  GFR-binding peptide
  MOD_RES (2)..(3): Xaa is C or S
PXXVPQDLEPISILYLVGRTPKVKFKYEMVVKS

SEQ ID NO: 27335 - protein, 35 aa, Artificial Sequence; identical to SEQ ID NO: 6199
  GFR-binding peptide
  MOD_RES (4)..(5): Xaa is C or S

SEQ ID NO: 27336 - protein, 42 aa, Artificial Sequence; identical to SEQ ID NO: 6200
  GFR-binding peptide
  MOD_RES (5)..(6)..(40)..(42): Xaa is C or S
  MOD_RES (20)..(21)..(22)..(23)..(24): Xaa is A or G
  MOD_RES (25)..(26)..(27)..(28): Xaa is A or G or is absent

SEQ ID NO: 27337 - protein, 40 aa, Artificial Sequence
  GFR-binding peptide
  MOD_RES (4)..(5)..(38)..(40): Xaa is C or S
  MOD_RES (19)..(20)..(21)..(22)..(23): Xaa is A or G
  MOD_RES (24)..(25)..(26)..(27): Xaa is A or G or is absent
ASPXXVPQDLEPISILYLXXXXXXXXXKFKYEMVVKSXKX

SEQ ID NO: 27338 - protein, 33 aa, Artificial Sequence
  GFR-binding peptide
  MOD_RES (33)..(33): Xaa is C or S
  MOD_RES (14)..(15)..(16)..(17)..(18): Xaa is A or G
  MOD_RES (19)..(20)..(21)..(22): Xaa is A or G or is absent
VPQALSPISILYIXXXXXXXXXYKQYEMIVRSX

SEQ ID NO: 27339 - protein, 39 aa, Artificial Sequence
  GFR-binding peptide
  MOD_RES (4)..(38): Xaa is C or S
  MOD_RES (18)..(19)..(20)..(21)..(22): Xaa is A or G
  MOD_RES (23)..(24)..(25)..(26): Xaa is A or G or is absent
KPTXAPTKLSPISVLYIXXXXXXXXXYKQYENMVVRSXG

SEQ ID NO: 27340 - protein, 38 aa, Artificial Sequence; identical to SEQ ID NO: 6203
  GFR-binding peptide
  MOD_RES (1)..(2)..(35)..(37): Xaa is C or S
  MOD_RES (16)..(17)..(18)..(19)..(20): Xaa is A or G
  MOD_RES (21)..(22)..(23)..(24): Xaa is A or G or is absent

SEQ ID NO: 27341 - protein, 37 aa, Artificial Sequence
  GFR-binding peptide
  MOD_RES (4)..(5)..(36): Xaa is C or S
ASPXXVSQDLEPISILYLIGKTPKIKFKYEMIVKSXK

SEQ ID NO: 27342 - protein, 40 aa, Artificial Sequence
  GFR-binding peptide
  MOD_RES (4)..(5)..(37)..(39): Xaa is C or S
PKPXXAPTQLEPISVLYLDDSSNVIKFKYENMVVRAXGXH

SEQ ID NO: 27343 - protein, 36 aa, Artificial Sequence
  GFR-binding peptide
  MOD_RES (3)..(4): Xaa is C or S
  MOD_RES (18)..(19)..(20)..(21)..(22): Xaa is A or G
  MOD_RES (23)..(24)..(25)..(26): Xaa is A or G or is absent
KAXXAPTKLSPISVLYIXXXXXXXXXYKQYENMVVK

SEQ ID NO: 27344 - protein, 42 aa, Artificial Sequence
  GFR-binding peptide
  MOD_RES (5)..(6)..(40)..(42): Xaa is C or S
  MOD_RES (20)..(21)..(22)..(23)..(24): Xaa is A or G
  MOD_RES (25)..(26)..(27)..(28): Xaa is A or G or is absent
APASXXVPARLSPISILYIXXXXXXXXXYKQYEDMVVEAXGX

SEQ ID NO: 27345 - protein, 36 aa, Artificial Sequence
  GFR-binding peptide
  MOD_RES (5)..(6): Xaa is C or S
IPKAXXVPTELSPISMLYIDEYDKVVYKQYEEMVVE

SEQ ID NO: 27346 - protein, 38 aa, Artificial Sequence
  GFR-binding peptide
  MOD_RES (5)..(6): Xaa is C or S
  MOD_RES (20)..(21)..(22)..(23)..(24): Xaa is A or G
  MOD_RES (25)..(26)..(27)..(28): Xaa is A or G or is absent
IPKAXXVPTELSPISMLYIXXXXXXXXXYKQYEEMVVE

SEQ ID NO: 27347 - protein, 39 aa, Artificial Sequence; identical to SEQ ID NO: 6208
  GFR-binding peptide
  MOD_RES (4)..(5)..(37)..(39): Xaa is C or S

SEQ ID NO: 27348 - protein, 34 aa, Artificial Sequence
  GFR-binding peptide
  MOD_RES (1)..(2)..(34): Xaa is C or S
XXVPARLSPISILYKDAANNVVLKYHYDMVVEAX

SEQ ID NO: 27349 - protein, 35 aa, Artificial Sequence
  GFR-binding peptide
  MOD_RES (1)..(35): Xaa is C or S
  MOD_RES (15)..(16)..(17)..(18)..(19): Xaa is A or G
  MOD_RES (20)..(21)..(22)..(23): Xaa is A or G or is absent
XAPTQLEPISVLYLXXXXXXXXXKFKYENMVVRAX

SEQ ID NO: 27350 - protein, 35 aa, Artificial Sequence
  GFR-binding peptide
  MOD_RES (2)..(3): Xaa is C or S
  MOD_RES (17)..(18)..(19)..(20)..(21): Xaa is A or G
  MOD_RES (22)..(23)..(24)..(25): Xaa is A or G or is absent
SXXVPARLNAISILYFXXXXXXXXXLKKYRDMVVE

SEQ ID NO: 27351 - protein, 32 aa, Artificial Sequence; identical to SEQ ID NO: 6210
  GFR-binding peptide
  MOD_RES (1)..(2): Xaa is C or S

SEQ ID NO: 27352 - protein, 41 aa, Artificial Sequence; identical to SEQ ID NO: 6212
  GFR-binding peptide
  MOD_RES (6)..(7)..(41): Xaa is C or S
  MOD_RES (21)..(22)..(23)..(24)..(25): Xaa is A or G
  MOD_RES (26)..(27)..(28)..(29): Xaa is A or G or is absent

SEQ ID NO: 27353 - protein, 36 aa, Artificial Sequence
  GFR-binding peptide
  MOD_RES (1)..(2)..(36): Xaa is C or S
  MOD_RES (16)..(17)..(18)..(19)..(20): Xaa is A or G
  MOD_RES (21)..(22)..(23)..(24): Xaa is A or G or is absent
XXVPTKLSPISILYKXXXXXXXXXLKYHYGMAVSEX

SEQ ID NO: 27354 - protein, 35 aa, Artificial Sequence
  GFR-binding peptide
  MOD_RES (1)..(33)..(35): Xaa is C or S
XVPTELEPISMLYLDEYDKVVKFKYEEMVVEGXGX

SEQ ID NO: 27355 - protein, 30 aa, Artificial Sequence; identical to SEQ ID NO: 6216
  GFR-binding peptide

SEQ ID NO: 27356 - protein, 43 aa, Artificial Sequence; identical to SEQ ID NO: 6217
  GFR-binding peptide
  MOD_RES (5)..(6)..(40)..(42): Xaa is C or S
  MOD_RES (20)..(21)..(22)..(23)..(24): Xaa is A or G
  MOD_RES (25)..(26)..(27)..(28): Xaa is A or G or is absent

SEQ ID NO: 27357 - protein, 32 aa, Artificial Sequence; identical to SEQ ID NO: 6220
  GFR-binding peptide
  MOD_RES (1)..(1): Xaa is C or S

SEQ ID NO: 27358 - protein, 35 aa, Artificial Sequence
  GFR-binding peptide
  MOD_RES (33)..(35): Xaa is C or S
  MOD_RES (14)..(15)..(16)..(17)..(18): Xaa is A or G
  MOD_RES (19)..(20)..(21)..(22): Xaa is A or G or is absent
VPQDLEPISILYLXXXXXXXXXKFKYEMVVKSXKX

SEQ ID NO: 27359 - protein, 31 aa, Artificial Sequence
  GFR-binding peptide
  MOD_RES (1)..(1): Xaa is C or S
XVPTKLNAISILYFDKGVVTYLKKYRGMAVS

SEQ ID NO: 27360 - protein, 40 aa, Artificial Sequence
  GFR-binding peptide
  MOD_RES (5)..(6)..(40): Xaa is C or S
  MOD_RES (20)..(21)..(22)..(23)..(24): Xaa is A or G
  MOD_RES (25)..(26)..(27)..(28): Xaa is A or G or is absent
ASKAXXVPTKLNAISILYFXXXXXXXXXLKKYRGMAVSEX

SEQ ID NO: 27361 - protein, 32 aa, Artificial Sequence; identical to SEQ ID NO: 6225
  GFR-binding peptide
  MOD_RES (32)..(32): Xaa is C or S

SEQ ID NO: 27362 - protein, 34 aa, Artificial Sequence
  GFR-binding peptide
  MOD_RES (1)..(33): Xaa is C or S
XVPTELSPISMLYIDEYDKVVYKQYEEMVVEGXG

SEQ ID NO: 27363 - protein, 37 aa, Artificial Sequence; identical to SEQ ID NO: 6230
  GFR-binding peptide
  MOD_RES (34)..(36): Xaa is C or S
  MOD_RES (14)..(15)..(16)..(17)..(18): Xaa is A or G
  MOD_RES (19)..(20)..(21)..(22): Xaa is A or G or is absent

SEQ ID NO: 27364 - protein, 30 aa, Artificial Sequence
  GFR-binding peptide
APTKLEPISVLYLDSSNNVIKFKYENMVVK

SEQ ID NO: 27365 - protein, 34 aa, Artificial Sequence; identical to SEQ ID NO: 6233
  GFR-binding peptide
  MOD_RES (1)..(34): Xaa is C or S
  MOD_RES (15)..(16)..(17)..(18)..(19): Xaa is A or G
  MOD_RES (20)..(21)..(22)..(23): Xaa is A or G or is absent

SEQ ID NO: 27366 - protein, 37 aa, Artificial Sequence
  GFR-binding peptide
  MOD_RES (3)..(4): Xaa is C or S
  MOD_RES (18)..(19)..(20)..(21)..(22): Xaa is A or G
  MOD_RES (23)..(24)..(25)..(26): Xaa is A or G or is absent
KAXXVPTKLSPISILYIXXXXXXXXXYKQYEGMAVSE

SEQ ID NO: 27367 - protein, 36 aa, Artificial Sequence
  GFR-binding peptide
  MOD_RES (5)..(6): Xaa is C or S
SASPXXVPQDLSPISILYIVGRTPKVYKQYEMVVKS

SEQ ID NO: 27368 - protein, 35 aa, Artificial Sequence
  GFR-binding peptide
  MOD_RES (1)..(2): Xaa is C or S
  MOD_RES (16)..(17)..(18)..(19)..(20): Xaa is A or G
  MOD_RES (21)..(22)..(23)..(24): Xaa is A or G or is absent
XXVPTELEPISMLYLXXXXXXXXXKFKYEDMVVEG

SEQ ID NO: 27369 - protein, 40 aa, Artificial Sequence
  GFR-binding peptide
  MOD_RES (5)..(6): Xaa is C or S
  MOD_RES (20)..(21)..(22)..(23)..(24): Xaa is A or G
  MOD_RES (25)..(26)..(27)..(28): Xaa is A or G or is absent
VGKAXXVPTKLEPISVLYLXXXXXXXXXKFKYEEGMSVAE

SEQ ID NO: 27370 - protein, 38 aa, Artificial Sequence
  GFR-binding peptide
  MOD_RES (3)..(35)..(37): Xaa is C or S
PTXAPTKLSPISVLYIDDSSNVIYKQYENMVVRSXGXH

SEQ ID NO: 27371 - protein, 42 aa, Artificial Sequence; identical to SEQ ID NO: 6234
  GFR-binding peptide
  MOD_RES (5)..(6)..(39)..(41): Xaa is C or S
  MOD_RES (20)..(21)..(22)..(23)..(24): Xaa is A or G
  MOD_RES (25)..(26)..(27)..(28): Xaa is A or G or is absent

SEQ ID NO: 27372 - protein, 37 aa, Artificial Sequence
  GFR-binding peptide
  MOD_RES (6)..(7): Xaa is C or S
ASAAPXXVPQALSPISILYIVGRKPKVYKQYEMIVRS

SEQ ID NO: 27373 - protein, 38 aa, Artificial Sequence
  GFR-binding peptide
  MOD_RES (1)..(35)..(37): Xaa is C or S
  MOD_RES (15)..(16)..(17)..(18)..(19): Xaa is A or G
  MOD_RES (20)..(21)..(22)..(23): Xaa is A or G or is absent
XAPTQLSPISVLYIXXXXXXXXXYKQYENMVVRAXGXH

SEQ ID NO: 27374 - protein, 41 aa, Artificial Sequence
  GFR-binding peptide
  MOD_RES (6)..(7)..(39)..(41): Xaa is C or S
YVPKPXXAPTKLSPISVLYIDDSSNVIYKQYENMVVRSXGX

SEQ ID NO: 27375 - protein, 33 aa, Artificial Sequence; identical to SEQ ID NO: 6236
  GFR-binding peptide
  MOD_RES (33)..(33): Xaa is C or S
  MOD_RES (14)..(15)..(16)..(17)..(18): Xaa is A or G
  MOD_RES (19)..(20)..(21)..(22): Xaa is A or G or is absent

SEQ ID NO: 27376 - protein, 32 aa, Artificial Sequence
  GFR-binding peptide
  MOD_RES (1)..(32): Xaa is C or S
XVPQDLSPISILYIVGRTPKVYKQYEMVVKSX

SEQ ID NO: 27377 - protein, 40 aa, Artificial Sequence
  GFR-binding peptide
  MOD_RES (5)..(6)..(38)..(40): Xaa is C or S
VPKPXXAPTKLEPISVLYLDDSSNVIKFKYENMVVRSXGX

SEQ ID NO: 27378 - protein, 40 aa, Artificial Sequence; identical to SEQ ID NO: 6239
  GFR-binding peptide
  MOD_RES (4)..(5)..(38)..(40): Xaa is C or S

SEQ ID NO: 27379 - protein, 37 aa, Artificial Sequence
  GFR-binding peptide
  MOD_RES (4)..(5)..(37): Xaa is C or S
SKAXXVPTKLNAISILYFDKGVVTYLKKYRGMAVSEX

SEQ ID NO: 27380 - protein, 36 aa, Artificial Sequence; identical to SEQ ID NO: 6240
  GFR-binding peptide
  MOD_RES (34)..(36): Xaa is C or S
  MOD_RES (14)..(15)..(16)..(17)..(18): Xaa is A or G
  MOD_RES (19)..(20)..(21)..(22): Xaa is A or G or is absent

SEQ ID NO: 27381 - protein, 43 aa, Artificial Sequence
  GFR-binding peptide
  MOD_RES (5)..(6)..(40)..(42): Xaa is C or S
  MOD_RES (20)..(21)..(22)..(23)..(24): Xaa is A or G
  MOD_RES (25)..(26)..(27)..(28): Xaa is A or G or is absent
VPKPXXAPTQLEPISVLYLXXXXXXXXXKFKYENMVVRAXGXH

SEQ ID NO: 27382 - protein, 42 aa, Artificial Sequence
  GFR-binding peptide
  MOD_RES (6)..(7)..(39)..(41): Xaa is C or S
AAPASXXVPARLSPISILYKDAANNVVLKYHYDMVVEAXGXR

SEQ ID NO: 27383 - protein, 37 aa, Artificial Sequence
  GFR-binding peptide
  MOD_RES (2)..(3)..(36): Xaa is C or S
  MOD_RES (17)..(18)..(19)..(20)..(21): Xaa is A or G
  MOD_RES (22)..(23)..(24)..(25): Xaa is A or G or is absent
PXXVPQDLEPISILYLXXXXXXXXXKFKYEMVVKSXK

SEQ ID NO: 27384 - protein, 39 aa, Artificial Sequence; identical to SEQ ID NO: 6246
  GFR-binding peptide
  MOD_RES (6)..(7): Xaa is C or S
  MOD_RES (21)..(22)..(23)..(24)..(25): Xaa is A or G
  MOD_RES (26)..(27)..(28)..(29): Xaa is A or G or is absent

SEQ ID NO: 27385 - protein, 41 aa, Artificial Sequence
  GFR-binding peptide
  MOD_RES (6)..(7)..(39)..(41): Xaa is C or S
KIPKAXXVPTELSPISMLYIDENEKVVYKQYEDMVVEGXGX

SEQ ID NO: 27386 - protein, 37 aa, Artificial Sequence
  GFR-binding peptide
  MOD_RES (3)..(4)..(36): Xaa is C or S
ASXXVPARLEPISILYLDAANNVVKFKYEDMVVEAXG

SEQ ID NO: 27387 - protein, 36 aa, Artificial Sequence
  GFR-binding peptide
  MOD_RES (1)..(35): Xaa is C or S
  MOD_RES (15)..(16)..(17)..(18)..(19): Xaa is A or G
  MOD_RES (20)..(21)..(22)..(23): Xaa is A or G or is absent
XAPTKLSPISVLYIXXXXXXXXXYKQYENMVVRSXG

SEQ ID NO: 27388 - protein, 42 aa, Artificial Sequence
  GFR-binding peptide
  MOD_RES (6)..(7)..(41): Xaa is C or S
  MOD_RES (21)..(22)..(23)..(24)..(25): Xaa is A or G
  MOD_RES (26)..(27)..(28)..(29): Xaa is A or G or is absent
AVPKAXXAPTKLSPISVLYIXXXXXXXXXYKQYENMVVKAXG

SEQ ID NO: 27389 - protein, 36 aa, Artificial Sequence
  GFR-binding peptide
  MOD_RES (6)..(6): Xaa is C or S
VTKPTXAPTKLSPISVLYIDDSSNVIYKQYENMVVR

SEQ ID NO: 27390 - protein, 37 aa, Artificial Sequence
  GFR-binding peptide
  MOD_RES (4)..(5)..(37): Xaa is C or S
PKAXXVPTELEPISMLYLDENEKVVKFKYEDMVVEGX

SEQ ID NO: 27391 - protein, 36 aa, Artificial Sequence
  GFR-binding peptide
  MOD_RES (1)..(34)..(36): Xaa is C or S
  MOD_RES (15)..(16)..(17)..(18)..(19): Xaa is A or G
  MOD_RES (20)..(21)..(22)..(23): Xaa is A or G or is absent
XVPQDLEPISILYLXXXXXXXXXKFKYEMVVKSXKX

SEQ ID NO: 27392 - protein, 43 aa, Artificial Sequence; identical to SEQ ID NO: 6253
  GFR-binding peptide
  MOD_RES (5)..(6)..(40)..(42): Xaa is C or S
  MOD_RES (20)..(21)..(22)..(23)..(24): Xaa is A or G
  MOD_RES (25)..(26)..(27)..(28): Xaa is A or G or is absent

SEQ ID NO: 27393 - protein, 36 aa, Artificial Sequence
  GFR-binding peptide
  MOD_RES (2)..(3): Xaa is C or S
  MOD_RES (17)..(18)..(19)..(20)..(21): Xaa is A or G
  MOD_RES (22)..(23)..(24)..(25): Xaa is A or G or is absent
PXXAPTKLEPISVLYLXXXXXXXXXKFKYENMVVRS

SEQ ID NO: 27394 - protein, 33 aa, Artificial Sequence; identical to SEQ ID NO: 6255
  GFR-binding peptide
  MOD_RES (1)..(32): Xaa is C or S

SEQ ID NO: 27395 - protein, 35 aa, Artificial Sequence
  GFR-binding peptide
  MOD_RES (3)..(4)..(35): Xaa is C or S
SPXXVPQDLEPISILYLVGRTPKVKFKYEMVVKSX

SEQ ID NO: 27396 - protein, 36 aa, Artificial Sequence
  GFR-binding peptide
  MOD_RES (2)..(3): Xaa is C or S
  MOD_RES (17)..(18)..(19)..(20)..(21): Xaa is A or G
  MOD_RES (22)..(23)..(24)..(25): Xaa is A or G or is absent
SXXVPARLSPISILYIXXXXXXXXXYKQYEDMVVEA

SEQ ID NO: 27397 - protein, 34 aa, Artificial Sequence; identical to SEQ ID NO: 6259
  GFR-binding peptide
  MOD_RES (1)..(34): Xaa is C or S
  MOD_RES (15)..(16)..(17)..(18)..(19): Xaa is A or G
  MOD_RES (20)..(21)..(22)..(23): Xaa is A or G or is absent

SEQ ID NO: 27398 - protein, 43 aa, Artificial Sequence; identical to SEQ ID NO: 6260
  GFR-binding peptide
  MOD_RES (5)..(6)..(40)..(42): Xaa is C or S
  MOD_RES (20)..(21)..(22)..(23)..(24): Xaa is A or G
  MOD_RES (25)..(26)..(27)..(28): Xaa is A or G or is absent

SEQ ID NO: 27399 - protein, 33 aa, Artificial Sequence; identical to SEQ ID NO: 6261
  GFR-binding peptide
  MOD_RES (1)..(1): Xaa is C or S
  MOD_RES (15)..(16)..(17)..(18)..(19): Xaa is A or G
  MOD_RES (20)..(21)..(22)..(23): Xaa is A or G or is absent

SEQ ID NO: 27400 - protein, 38 aa, Artificial Sequence; identical to SEQ ID NO: 6262
  GFR-binding peptide
  MOD_RES (4)..(5)..(38): Xaa is C or S
  MOD_RES (19)..(20)..(21)..(22)..(23): Xaa is A or G
  MOD_RES (24)..(25)..(26)..(27): Xaa is A or G or is absent

SEQ ID NO: 27401 - protein, 36 aa, Artificial Sequence
  GFR-binding peptide
  MOD_RES (1)..(2)..(36): Xaa is C or S
  MOD_RES (16)..(17)..(18)..(19)..(20): Xaa is A or G
  MOD_RES (21)..(22)..(23)..(24): Xaa is A or G or is absent
XXAPTQLEPISVLYLXXXXXXXXXKFKYENMVVRAX

SEQ ID NO: 27402 - protein, 37 aa, Artificial Sequence; identical to SEQ ID NO: 6263
  GFR-binding peptide
  MOD_RES (1)..(35)..(37): Xaa is C or S
  MOD_RES (15)..(16)..(17)..(18)..(19): Xaa is A or G
  MOD_RES (20)..(21)..(22)..(23): Xaa is A or G or is absent

SEQ ID NO: 27403 - protein, 41 aa, Artificial Sequence
  GFR-binding peptide
  MOD_RES (5)..(6)..(38)..(40): Xaa is C or S
VPKAXXAPTKLEPISVLYLDSSNNVIKFKYENMVVKAXGXH

SEQ ID NO: 27404 - protein, 39 aa, Artificial Sequence; identical to SEQ ID NO: 6266
  GFR-binding peptide
  MOD_RES (6)..(7): Xaa is C or S
  MOD_RES (21)..(22)..(23)..(24)..(25): Xaa is A or G
  MOD_RES (26)..(27)..(28)..(29): Xaa is A or G or is absent

SEQ ID NO: 27405 - protein, 39 aa, Artificial Sequence
  GFR-binding peptide
  MOD_RES (6)..(7): Xaa is C or S
  MOD_RES (21)..(22)..(23)..(24)..(25): Xaa is A or G
  MOD_RES (26)..(27)..(28)..(29): Xaa is A or G or is absent
AAPASXXVPARLEPISILYLXXXXXXXXXKFKYEDMVVE

SEQ ID NO: 27406 - protein, 33 aa, Artificial Sequence
  GFR-binding peptide
  MOD_RES (1)..(33): Xaa is C or S
XAPTKLEPISVLYLDDSSNVIKFKYENMVVRSX

SEQ ID NO: 27407 - protein, 36 aa, Artificial Sequence
  GFR-binding peptide
  MOD_RES (1)..(2)..(33)..(35): Xaa is C or S
XXVSQDLEPISILYLIGKTPKIKFKYEMIVKSXKXS

SEQ ID NO: 27408 - protein, 37 aa, Artificial Sequence; identical to SEQ ID NO: 6272
  GFR-binding peptide
  MOD_RES (5)..(6): Xaa is C or S

SEQ ID NO: 27409 - protein, 38 aa, Artificial Sequence; identical to SEQ ID NO: 6276
  GFR-binding peptide
  MOD_RES (5)..(6)..(38): Xaa is C or S

SEQ ID NO: 27410 - protein, 33 aa, Artificial Sequence
  GFR-binding peptide
  MOD_RES (32)..(32): Xaa is C or S
VPTKLSPISILYIDKGVVTYYKQYEGMAVSEXG

SEQ ID NO: 27411 - protein, 38 aa, Artificial Sequence; identical to SEQ ID NO: 6281
  GFR-binding peptide
  MOD_RES (1)..(2)..(36)..(38): Xaa is C or S
  MOD_RES (16)..(17)..(18)..(19)..(20): Xaa is A or G
  MOD_RES (21)..(22)..(23)..(24): Xaa is A or G or is absent

SEQ ID NO: 27412 - protein, 39 aa, Artificial Sequence; identical to SEQ ID NO: 6282
  GFR-binding peptide
  MOD_RES (3)..(4)..(38): Xaa is C or S
  MOD_RES (18)..(19)..(20)..(21)..(22): Xaa is A or G
  MOD_RES (23)..(24)..(25)..(26): Xaa is A or G or is absent

SEQ ID NO: 27413 - protein, 42 aa, Artificial Sequence; identical to SEQ ID NO: 6284
  GFR-binding peptide
  MOD_RES (6)..(7)..(41): Xaa is C or S
  MOD_RES (21)..(22)..(23)..(24)..(25): Xaa is A or G
  MOD_RES (26)..(27)..(28)..(29): Xaa is A or G or is absent

SEQ ID NO: 27414 - protein, 38 aa, Artificial Sequence
  GFR-binding peptide
  MOD_RES (6)..(7): Xaa is C or S
KIPKAXXVPTELEPISMLYLDENEKVVKFKYEDMVVEG

SEQ ID NO: 27415 - protein, 37 aa, Artificial Sequence; identical to SEQ ID NO: 6285
  GFR-binding peptide
  MOD_RES (6)..(7): Xaa is C or S

SEQ ID NO: 27416 - protein, 36 aa, Artificial Sequence; identical to SEQ ID NO: 6286
  GFR-binding peptide
  MOD_RES (2)..(3)..(34)..(36): Xaa is C or S

SEQ ID NO: 27417 - protein, 38 aa, Artificial Sequence
  GFR-binding peptide
  MOD_RES (4)..(5): Xaa is C or S
  MOD_RES (19)..(20)..(21)..(22)..(23): Xaa is A or G
  MOD_RES (24)..(25)..(26)..(27): Xaa is A or G or is absent
PKAXXAPTKLEPISVLYLXXXXXXXXXKFKYENMVVKA

SEQ ID NO: 27418 - protein, 44 aa, Artificial Sequence; identical to SEQ ID NO: 6288
  GFR-binding peptide
  MOD_RES (6)..(7)..(42)..(44): Xaa is C or S
  MOD_RES (21)..(22)..(23)..(24)..(25): Xaa is A or G
  MOD_RES (26)..(27)..(28)..(29): Xaa is A or G or is absent

SEQ ID NO: 27419 - protein, 38 aa, Artificial Sequence
  GFR-binding peptide
  MOD_RES (3)..(4)..(36)..(38): Xaa is C or S
KAXXVPTELEPISMLYLDENEKVVKFKYEDMVVEGXGX

SEQ ID NO: 27420 - protein, 35 aa, Artificial Sequence; identical to SEQ ID NO: 6290
  GFR-binding peptide
  MOD_RES (3)..(4)..(35): Xaa is C or S

SEQ ID NO: 27421 - protein, 40 aa, Artificial Sequence; identical to SEQ ID NO: 6291
  GFR-binding peptide
  MOD_RES (2)..(3)..(38)..(40): Xaa is C or S
  MOD_RES (17)..(18)..(19)..(20)..(21): Xaa is A or G
  MOD_RES (22)..(23)..(24)..(25): Xaa is A or G or is absent

SEQ ID NO: 27422 - protein, 35 aa, Artificial Sequence; identical to SEQ ID NO: 6293
  GFR-binding peptide
  MOD_RES (1)..(33)..(35): Xaa is C or S

SEQ ID NO: 27423 - protein, 41 aa, Artificial Sequence; identical to SEQ ID NO: 6294
  GFR-binding peptide
  MOD_RES (5)..(6)..(40): Xaa is C or S
  MOD_RES (20)..(21)..(22)..(23)..(24): Xaa is A or G
  MOD_RES (25)..(26)..(27)..(28): Xaa is A or G or is absent

SEQ ID NO: 27424 - protein, 39 aa, Artificial Sequence
  GFR-binding peptide
  MOD_RES (3)..(4)..(36)..(38): Xaa is C or S
KPXXAPTKLSPISVLYIDDSSNVIYKQYENMVVRSXGXH

SEQ ID NO: 27425 - protein, 41 aa, Artificial Sequence
  GFR-binding peptide
  MOD_RES (6)..(7)..(39)..(41): Xaa is C or S
KASKAXXVPTKLSPISILYKDKGVVTYLKYHYGMAVSEXGX

SEQ ID NO: 27426 - protein, 44 aa, Artificial Sequence
  GFR-binding peptide
  MOD_RES (6)..(7)..(42)..(44): Xaa is C or S
  MOD_RES (21)..(22)..(23)..(24)..(25): Xaa is A or G
  MOD_RES (26)..(27)..(28)..(29): Xaa is A or G or is absent
KVGKAXXVPTKLEPISVLYLXXXXXXXXXKFKYEEGMSVAEXGX

SEQ ID NO: 27427 - protein, 35 aa, Artificial Sequence
  GFR-binding peptide
  MOD_RES (1)..(33)..(35): Xaa is C or S
XAPTKLEPISVLYLDSSNNVIKFKYENMVVKAXGX

SEQ ID NO: 27428 - protein, 36 aa, Artificial Sequence; identical to SEQ ID NO: 6298
  GFR-binding peptide
  MOD_RES (2)..(3)..(36): Xaa is C or S
  MOD_RES (17)..(18)..(19)..(20)..(21): Xaa is A or G
  MOD_RES (22)..(23)..(24)..(25): Xaa is A or G or is absent

SEQ ID NO: 27429 - protein, 36 aa, Artificial Sequence
  GFR-binding peptide
  MOD_RES (3)..(4): Xaa is C or S
  MOD_RES (18)..(19)..(20)..(21)..(22): Xaa is A or G
  MOD_RES (23)..(24)..(25)..(26): Xaa is A or G or is absent
KAXXVPTELEPISMLYLXXXXXXXXXKFKYEEMVVE

SEQ ID NO: 27430 - protein, 36 aa, Artificial Sequence
  GFR-binding peptide
  MOD_RES (3)..(4): Xaa is C or S
  MOD_RES (18)..(19)..(20)..(21)..(22): Xaa is A or G
  MOD_RES (23)..(24)..(25)..(26): Xaa is A or G or is absent
APXXVPQALSPISILYIXXXXXXXXXYKQYEMIVRS

SEQ ID NO: 27431 - protein, 36 aa, Artificial Sequence
  GFR-binding peptide
  MOD_RES (2)..(3): Xaa is C or S
  MOD_RES (17)..(18)..(19)..(20)..(21): Xaa is A or G
  MOD_RES (22)..(23)..(24)..(25): Xaa is A or G or is absent
AXXVPTKLEPISILYLXXXXXXXXXKFKYEGMAVSE

SEQ ID NO: 27432 - protein, 39 aa, Artificial Sequence
  GFR-binding peptide
  MOD_RES (4)..(5)..(39): Xaa is C or S
  MOD_RES (19)..(20)..(21)..(22)..(23): Xaa is A or G
  MOD_RES (24)..(25)..(26)..(27): Xaa is A or G or is absent
PKPXXAPTQLSPISVLYIXXXXXXXXXYKQYENMVVRAX

SEQ ID NO: 27433 - protein, 34 aa, Artificial Sequence
  GFR-binding peptide
  MOD_RES (32)..(34): Xaa is C or S
VPTKLSPISILYIDKGVVTYYKQYEGMAVSEXGX

SEQ ID NO: 27434 - protein, 35 aa, Artificial Sequence
  GFR-binding peptide
  MOD_RES (1)..(2)..(35): Xaa is C or S
  MOD_RES (16)..(17)..(18)..(19)..(20): Xaa is A or G
  MOD_RES (21)..(22)..(23)..(24): Xaa is A or G or is absent
XXVPQDLSPISILYIXXXXXXXXXYKQYEMVVKSX

SEQ ID NO: 27435 - protein, 36 aa, Artificial Sequence
  GFR-binding peptide
  MOD_RES (2)..(3)..(35): Xaa is C or S
AXXVPTELSPISMLYIDENEKVVYKQYEDMVVEGXG

SEQ ID NO: 27436 - protein, 41 aa, Artificial Sequence; identical to SEQ ID NO: 6301
  GFR-binding peptide
  MOD_RES (6)..(7)..(39)..(41): Xaa is C or S

SEQ ID NO: 27437 - protein, 38 aa, Artificial Sequence; identical to SEQ ID NO: 6302
  GFR-binding peptide
  MOD_RES (2)..(3)..(35)..(37): Xaa is C or S

SEQ ID NO: 27438 - protein, 38 aa, Artificial Sequence
  GFR-binding peptide
  MOD_RES (4)..(5)..(38): Xaa is C or S
  MOD_RES (19)..(20)..(21)..(22)..(23): Xaa is A or G
  MOD_RES (24)..(25)..(26)..(27): Xaa is A or G or is absent
AAPXXVPQALSPISILYIXXXXXXXXXYKQYEMIVRSX

SEQ ID NO: 27439 - protein, 40 aa, Artificial Sequence; identical to SEQ ID NO: 6305
  GFR-binding peptide
  MOD_RES (4)..(5)..(37)..(39): Xaa is C or S

SEQ ID NO: 27440 - protein, 39 aa, Artificial Sequence; identical to SEQ ID NO: 6306
  GFR-binding peptide
  MOD_RES (1)..(2)..(36)..(38): Xaa is C or S
  MOD_RES (16)..(17)..(18)..(19)..(20): Xaa is A or G
  MOD_RES (21)..(22)..(23)..(24): Xaa is A or G or is absent

SEQ ID NO: 27441 - protein, 39 aa, Artificial Sequence
  GFR-binding peptide
  MOD_RES (4)..(5)..(38): Xaa is C or S
  MOD_RES (19)..(20)..(21)..(22)..(23): Xaa is A or G
  MOD_RES (24)..(25)..(26)..(27): Xaa is A or G or is absent
AAPXXVPQALSPISILYIXXXXXXXXXYKQYEMIVRSXK

SEQ ID NO: 27442 - protein, 38 aa, Artificial Sequence; identical to SEQ ID NO: 6307
  GFR-binding peptide
  MOD_RES (5)..(6): Xaa is C or S
  MOD_RES (20)..(21)..(22)..(23)..(24): Xaa is A or G
  MOD_RES (25)..(26)..(27)..(28): Xaa is A or G or is absent

SEQ ID NO: 27443 - protein, 32 aa, Artificial Sequence
  GFR-binding peptide
  MOD_RES (14)..(15)..(16)..(17)..(18): Xaa is A or G
  MOD_RES (19)..(20)..(21)..(22): Xaa is A or G or is absent
VPARLSPISILYIXXXXXXXXXYKQYEDMVVE

SEQ ID NO: 27444 - protein, 34 aa, Artificial Sequence; identical to SEQ ID NO: 6310
  GFR-binding peptide
  MOD_RES (3)..(4): Xaa is C or S

SEQ ID NO: 27445 - protein, 31 aa, Artificial Sequence
  GFR-binding peptide
APTKLSPISVLYIDDSSNVIYKQYENMVVRS

SEQ ID NO: 27446 - protein, 38 aa, Artificial Sequence; identical to SEQ ID NO: 6311
  GFR-binding peptide
  MOD_RES (2)..(3)..(35)..(37): Xaa is C or S

SEQ ID NO: 27447 - protein, 39 aa, Artificial Sequence
  GFR-binding peptide
  MOD_RES (1)..(2)..(36)..(38): Xaa is C or S
  MOD_RES (16)..(17)..(18)..(19)..(20): Xaa is A or G
  MOD_RES (21)..(22)..(23)..(24): Xaa is A or G or is absent
XXVPARLSPISILYIXXXXXXXXXYKQYEDMVVEAXGXR

SEQ ID NO: 27448 - protein, 42 aa, Artificial Sequence
  GFR-binding peptide
  MOD_RES (5)..(6)..(40)..(42): Xaa is C or S
  MOD_RES (20)..(21)..(22)..(23)..(24): Xaa is A or G
  MOD_RES (25)..(26)..(27)..(28): Xaa is A or G or is absent
APASXXVPARLEPISILYLXXXXXXXXXKFKYEDMVVEAXGX

SEQ ID NO: 27449 - protein, 35 aa, Artificial Sequence
  GFR-binding peptide
  MOD_RES (1)..(35): Xaa is C or S
  MOD_RES (15)..(16)..(17)..(18)..(19): Xaa is A or G
  MOD_RES (20)..(21)..(22)..(23): Xaa is A or G or is absent
XVPTKLSPISILYIXXXXXXXXXYKQYEGMAVSEX

SEQ ID NO: 27450 - protein, 40 aa, Artificial Sequence
  GFR-binding peptide
  MOD_RES (5)..(6)..(38)..(40): Xaa is C or S
IPKAXXVPTELEPISMLYLDEYDKVVKFKYEEMVVEGXGX

SEQ ID NO: 27451 - protein, 39 aa, Artificial Sequence; identical to SEQ ID NO: 6314
  GFR-binding peptide
  MOD_RES (4)..(5)..(37)..(39): Xaa is C or S

SEQ ID NO: 27452 - protein, 38 aa, Artificial Sequence
  GFR-binding peptide
  MOD_RES (1)..(2)..(35)..(37): Xaa is C or S
  MOD_RES (16)..(17)..(18)..(19)..(20): Xaa is A or G
  MOD_RES (21)..(22)..(23)..(24): Xaa is A or G or is absent
XXVSQDLEPISILYLXXXXXXXXXKFKYEMIVKSXKXS

SEQ ID NO: 27453 - protein, 34 aa, Artificial Sequence
  GFR-binding peptide
  MOD_RES (3)..(4): Xaa is C or S
KAXXVPTELSPISMLYIDENEKVVYKQYEDMVVE

SEQ ID NO: 27454 - protein, 37 aa, Artificial Sequence
  GFR-binding peptide
  MOD_RES (3)..(4)..(36): Xaa is C or S
ASXXVPARLNAISILYFDAANNVVLKKYRDMVVEAXG

SEQ ID NO: 27455 - protein, 37 aa, Artificial Sequence
  GFR-binding peptide
  MOD_RES (1)..(2)..(34)..(36): Xaa is C or S
XXVPARLSPISILYKDAANNVVLKYHYDMVVEAXGXR

SEQ ID NO: 27456 - protein, 38 aa, Artificial Sequence; identical to SEQ ID NO: 6316
  GFR-binding peptide
  MOD_RES (5)..(6)..(38): Xaa is C or S

SEQ ID NO: 27457 - protein, 36 aa, Artificial Sequence; identical to SEQ ID NO: 6317
  GFR-binding peptide
  MOD_RES (4)..(5)..(36): Xaa is C or S

SEQ ID NO: 27458 - protein, 40 aa, Artificial Sequence; identical to SEQ ID NO: 6319
  GFR-binding peptide
  MOD_RES (4)..(5)..(37)..(39): Xaa is C or S

SEQ ID NO: 27459 - protein, 38 aa, Artificial Sequence
  GFR-binding peptide
  MOD_RES (4)..(5)..(37): Xaa is C or S
PASXXVPARLNAISILYFDAANNVVLKKYRDMVVEAXG

SEQ ID NO: 27460 - protein, 40 aa, Artificial Sequence
  GFR-binding peptide
  MOD_RES (5)..(39): Xaa is C or S
  MOD_RES (19)..(20)..(21)..(22)..(23): Xaa is A or G
  MOD_RES (24)..(25)..(26)..(27): Xaa is A or G or is absent
TKPTXAPTKLSPISVLYIXXXXXXXXXYKQYENMVVRSXG

SEQ ID NO: 27461 - protein, 35 aa, Artificial Sequence; identical to SEQ ID NO: 6325
  GFR-binding peptide
  MOD_RES (34)..(34): Xaa is C or S
  MOD_RES (14)..(15)..(16)..(17)..(18): Xaa is A or G
  MOD_RES (19)..(20)..(21)..(22): Xaa is A or G or is absent

SEQ ID NO: 27462 - protein, 41 aa, Artificial Sequence
  GFR-binding peptide
  MOD_RES (5)..(6)..(38)..(40): Xaa is C or S
IPKAXXVPTELEPISMLYLDEYDKVVKFKYEEMVVEGXGXR

SEQ ID NO: 27463 - protein, 41 aa, Artificial Sequence
  GFR-binding peptide
  MOD_RES (5)..(6)..(39)..(41): Xaa is C or S
  MOD_RES (20)..(21)..(22)..(23)..(24): Xaa is A or G
  MOD_RES (25)..(26)..(27)..(28): Xaa is A or G or is absent
SAAPXXVPQALEPISILYLXXXXXXXXXKFKYEMIVRSXKX

SEQ ID NO: 27464 - protein, 39 aa, Artificial Sequence
  GFR-binding peptide
  MOD_RES (2)..(3)..(37)..(39): Xaa is C or S
  MOD_RES (17)..(18)..(19)..(20)..(21): Xaa is A or G
  MOD_RES (22)..(23)..(24)..(25): Xaa is A or G or is absent
AXXVPTELSPISMLYIXXXXXXXXXYKQYEDMVVEGXGX

SEQ ID NO: 27465 - protein, 37 aa, Artificial Sequence
  GFR-binding peptide
  MOD_RES (3)..(4): Xaa is C or S
  MOD_RES (18)..(19)..(20)..(21)..(22): Xaa is A or G
  MOD_RES (23)..(24)..(25)..(26): Xaa is A or G or is absent
KPXXAPTKLSPISVLYIXXXXXXXXXYKQYENMVVRS

SEQ ID NO: 27466 - protein, 36 aa, Artificial Sequence; identical to SEQ ID NO: 6326
  GFR-binding peptide
  MOD_RES (3)..(4)..(36): Xaa is C or S

SEQ ID NO: 27467 - protein, 38 aa, Artificial Sequence
  GFR-binding peptide
  MOD_RES (3)..(4)..(36)..(38): Xaa is C or S
KPXXAPTKLSPISVLYIDDSSNVIYKQYENMVVRSXGX

SEQ ID NO: 27468 - protein, 32 aa, Artificial Sequence; identical to SEQ ID NO: 6327
  GFR-binding peptide
  MOD_RES (1)..(1): Xaa is C or S

SEQ ID NO: 27469 - protein, 35 aa, Artificial Sequence
  GFR-binding peptide
  MOD_RES (1)..(34): Xaa is C or S
  MOD_RES (15)..(16)..(17)..(18)..(19): Xaa is A or G
  MOD_RES (20)..(21)..(22)..(23): Xaa is A or G or is absent
XVPQALEPISILYLXXXXXXXXXKFKYEMIVRSXK

SEQ ID NO: 27470 - protein, 40 aa, Artificial Sequence
  GFR-binding peptide
  MOD_RES (4)..(5)..(39): Xaa is C or S
  MOD_RES (19)..(20)..(21)..(22)..(23): Xaa is A or G
  MOD_RES (24)..(25)..(26)..(27): Xaa is A or G or is absent
PASXXVPARLEPISILYLXXXXXXXXXKFKYEDMVVEAXG

SEQ ID NO: 27471 - protein, 33 aa, Artificial Sequence
  GFR-binding peptide
  MOD_RES (2)..(3): Xaa is C or S
AXXVPTKLNAISILYFDKGVVTYLKKYRGMAVS

SEQ ID NO: 27472 - protein, 37 aa, Artificial Sequence; identical to SEQ ID NO: 6332
  GFR-binding peptide
  MOD_RES (1)..(2)..(36): Xaa is C or S
  MOD_RES (16)..(17)..(18)..(19)..(20): Xaa is A or G
  MOD_RES (21)..(22)..(23)..(24): Xaa is A or G or is absent

SEQ ID NO: 27473 - protein, 32 aa, Artificial Sequence
  GFR-binding peptide
  MOD_RES (14)..(15)..(16)..(17)..(18): Xaa is A or G
  MOD_RES (19)..(20)..(21)..(22): Xaa is A or G or is absent
VPTELSPISMLYIXXXXXXXXXYKQYEEMVVE

SEQ ID NO: 27474 - protein, 43 aa, Artificial Sequence
  GFR-binding peptide
  MOD_RES (6)..(7)..(41)..(43): Xaa is C or S
  MOD_RES (21)..(22)..(23)..(24)..(25): Xaa is A or G
  MOD_RES (26)..(27)..(28)..(29): Xaa is A or G or is absent
YVPKPXXAPTKLEPISVLYLXXXXXXXXXKFKYENMVVRSXGX

SEQ ID NO: 27475 - protein, 33 aa, Artificial Sequence; identical to SEQ ID NO: 6338
  GFR-binding peptide
  MOD_RES (2)..(3): Xaa is C or S

SEQ ID NO: 27476 - protein, 38 aa, Artificial Sequence
  GFR-binding peptide
  MOD_RES (3)..(4)..(38): Xaa is C or S
  MOD_RES (18)..(19)..(20)..(21)..(22): Xaa is A or G
  MOD_RES (23)..(24)..(25)..(26): Xaa is A or G or is absent
ASXXVPARLSPISILYKXXXXXXXXXLKYHYDMVVEAX

SEQ ID NO: 27477 - protein, 37 aa, Artificial Sequence
  GFR-binding peptide
  MOD_RES (4)..(5): Xaa is C or S
  MOD_RES (19)..(20)..(21)..(22)..(23): Xaa is A or G
  MOD_RES (24)..(25)..(26)..(27): Xaa is A or G or is absent
PASXXVPARLEPISILYLXXXXXXXXXKFKYEDMVVE

SEQ ID NO: 27478 - protein, 36 aa, Artificial Sequence
  GFR-binding peptide
  MOD_RES (1)..(35): Xaa is C or S
  MOD_RES (15)..(16)..(17)..(18)..(19): Xaa is A or G
  MOD_RES (20)..(21)..(22)..(23): Xaa is A or G or is absent
XAPTKLEPISVLYLXXXXXXXXXKFKYENMVVKAXG

SEQ ID NO: 27479 - protein, 35 aa, Artificial Sequence
  GFR-binding peptide
  MOD_RES (1)..(2)..(34): Xaa is C or S
XXVPTKLSPISILYKDKGVVTYLKYHYGMAVSEXG

SEQ ID NO: 27480 - protein, 37 aa, Artificial Sequence; identical to SEQ ID NO: 6344
  GFR-binding peptide
  MOD_RES (2)..(36): Xaa is C or S
  MOD_RES (16)..(17)..(18)..(19)..(20): Xaa is A or G
  MOD_RES (21)..(22)..(23)..(24): Xaa is A or G or is absent

SEQ ID NO: 27481 - protein, 39 aa, Artificial Sequence
  GFR-binding peptide
  MOD_RES (4)..(5)..(39): Xaa is C or S
  MOD_RES (19)..(20)..(21)..(22)..(23): Xaa is A or G
  MOD_RES (24)..(25)..(26)..(27): Xaa is A or G or is absent
SKAXXVPTKLEPISILYLXXXXXXXXXKFKYEGMAVSEX

SEQ ID NO: 27482 - protein, 37 aa, Artificial Sequence
  GFR-binding peptide
  MOD_RES (2)..(36): Xaa is C or S
  MOD_RES (16)..(17)..(18)..(19)..(20): Xaa is A or G
  MOD_RES (21)..(22)..(23)..(24): Xaa is A or G or is absent
TXAPTKLEPISVLYLXXXXXXXXXKFKYENMVVRSXG

SEQ ID NO: 27483 - protein, 41 aa, Artificial Sequence
  GFR-binding peptide
  MOD_RES (5)..(6)..(38)..(40): Xaa is C or S
VPKPXXAPTQLSPISVLYIDDSSNVIYKQYENMVVRAXGXH

SEQ ID NO: 27484 - protein, 41 aa, Artificial Sequence
  GFR-binding peptide
  MOD_RES (5)..(6)..(40): Xaa is C or S
  MOD_RES (20)..(21)..(22)..(23)..(24): Xaa is A or G
  MOD_RES (25)..(26)..(27)..(28): Xaa is A or G or is absent
VPKAXXAPTKLSPISVLYIXXXXXXXXXYKQYENMVVKAXG

SEQ ID NO: 27485 - protein, 36 aa, Artificial Sequence
  GFR-binding peptide
  MOD_RES (3)..(4): Xaa is C or S
  MOD_RES (18)..(19)..(20)..(21)..(22): Xaa is A or G
  MOD_RES (23)..(24)..(25)..(26): Xaa is A or G or is absent
KPXXAPTQLSPISVLYIXXXXXXXXXYKQYENMVVR

SEQ ID NO: 27486 - protein, 31 aa, Artificial Sequence; identical to SEQ ID NO: 6347
  GFR-binding peptide
  MOD_RES (1)..(1): Xaa is C or S

SEQ ID NO: 27487 - protein, 35 aa, Artificial Sequence
  GFR-binding peptide
  MOD_RES (2)..(3): Xaa is C or S
  MOD_RES (17)..(18)..(19)..(20)..(21): Xaa is A or G
  MOD_RES (22)..(23)..(24)..(25): Xaa is A or G or is absent
AXXAPTKLSPISVLYIXXXXXXXXXYKQYENMVVK

SEQ ID NO: 27488 - protein, 37 aa, Artificial Sequence
  GFR-binding peptide
  MOD_RES (3)..(35)..(37): Xaa is C or S
PTXAPTKLEPISVLYLDDSSNVIKFKYENMVVRSXGX

SEQ ID NO: 27489 - protein, 35 aa, Artificial Sequence; identical to SEQ ID NO: 6350
  GFR-binding peptide
  MOD_RES (34)..(34): Xaa is C or S
  MOD_RES (14)..(15)..(16)..(17)..(18): Xaa is A or G
  MOD_RES (19)..(20)..(21)..(22): Xaa is A or G or is absent

SEQ ID NO: 27490 - protein, 33 aa, Artificial Sequence
  GFR-binding peptide
  MOD_RES (14)..(15)..(16)..(17)..(18): Xaa is A or G
  MOD_RES (19)..(20)..(21)..(22): Xaa is A or G or is absent
VPTKLSPISILYIXXXXXXXXXYKQYEGMAVSE

SEQ ID NO: 27491 - protein, 40 aa, Artificial Sequence; identical to SEQ ID NO: 6352
  GFR-binding peptide
  MOD_RES (4)..(5)..(37)..(39): Xaa is C or S

SEQ ID NO: 27492 - protein, 33 aa, Artificial Sequence; identical to SEQ ID NO: 6355
  GFR-binding peptide
  MOD_RES (1)..(1): Xaa is C or S
  MOD_RES (15)..(16)..(17)..(18)..(19): Xaa is A or G
  MOD_RES (20)..(21)..(22)..(23): Xaa is A or G or is absent

SEQ ID NO: 27493 - protein, 40 aa, Artificial Sequence
  GFR-binding peptide
  MOD_RES (4)..(5)..(38)..(40): Xaa is C or S
  MOD_RES (19)..(20)..(21)..(22)..(23): Xaa is A or G
  MOD_RES (24)..(25)..(26)..(27): Xaa is A or G or is absent
AAPXXVPQALSPISILYIXXXXXXXXXYKQYEMIVRSXKX

SEQ ID NO: 27494 - protein, 41 aa, Artificial Sequence
  GFR-binding peptide
  MOD_RES (4)..(5)..(39)..(41): Xaa is C or S
  MOD_RES (19)..(20)..(21)..(22)..(23): Xaa is A or G
  MOD_RES (24)..(25)..(26)..(27): Xaa is A or G or is absent
SKAXXVPTKLNAISILYFXXXXXXXXXLKKYRGMAVSEXGX

SEQ ID NO: 27495 - protein, 39 aa, Artificial Sequence; identical to SEQ ID NO: 6356
  GFR-binding peptide
  MOD_RES (6)..(7): Xaa is C or S
  MOD_RES (21)..(22)..(23)..(24)..(25): Xaa is A or G
  MOD_RES (26)..(27)..(28)..(29): Xaa is A or G or is absent

SEQ ID NO: 27496 - protein, 39 aa, Artificial Sequence
  GFR-binding peptide
  MOD_RES (3)..(4)..(37)..(39): Xaa is C or S
KAXXVPTKLSPISVLYIDDMGVPTYKQYEEGMSVAEXGX

SEQ ID NO: 27497 - protein, 40 aa, Artificial Sequence
  GFR-binding peptide
  MOD_RES (5)..(6)..(40): Xaa is C or S
  MOD_RES (20)..(21)..(22)..(23)..(24): Xaa is A or G
  MOD_RES (25)..(26)..(27)..(28): Xaa is A or G or is absent
IPKAXXVPTELEPISMLYLXXXXXXXXXKFKYEDMVVEGX

SEQ ID NO: 27498 - protein, 39 aa, Artificial Sequence
  GFR-binding peptide
  MOD_RES (6)..(7): Xaa is C or S
  MOD_RES (21)..(22)..(23)..(24)..(25): Xaa is A or G
  MOD_RES (26)..(27)..(28)..(29): Xaa is A or G or is absent
TVPKPXXAPTQLEPISVLYLXXXXXXXXXKFKYENMVVR

SEQ ID NO: 27499 - protein, 42 aa, Artificial Sequence
  GFR-binding peptide
  MOD_RES (5)..(6)..(40)..(42): Xaa is C or S
  MOD_RES (20)..(21)..(22)..(23)..(24): Xaa is A or G
  MOD_RES (25)..(26)..(27)..(28): Xaa is A or G or is absent
ASKAXXVPTKLNAISILYFXXXXXXXXXLKKYRGMAVSEXGX

SEQ ID NO: 27500 - protein, 42 aa, Artificial Sequence
  GFR-binding peptide
  MOD_RES (6)..(7)..(41): Xaa is C or S
  MOD_RES (21)..(22)..(23)..(24)..(25): Xaa is A or G
  MOD_RES (26)..(27)..(28)..(29): Xaa is A or G or is absent
KIPKAXXVPTELEPISMLYLXXXXXXXXXKFKYEDMVVEGXG

SEQ ID NO: 27501 - protein, 37 aa, Artificial Sequence
  GFR-binding peptide
  MOD_RES (1)..(35)..(37): Xaa is C or S
  MOD_RES (15)..(16)..(17)..(18)..(19): Xaa is A or G
  MOD_RES (20)..(21)..(22)..(23): Xaa is A or G or is absent
XVPTKLNAISILYFXXXXXXXXXLKKYRGMAVSEXGX

SEQ ID NO: 27502 - protein, 40 aa, Artificial Sequence
  GFR-binding peptide
  MOD_RES (3)..(4)..(38)..(40): Xaa is C or S
  MOD_RES (18)..(19)..(20)..(21)..(22): Xaa is A or G
  MOD_RES (23)..(24)..(25)..(26): Xaa is A or G or is absent
ASXXVPARLNAISILYFXXXXXXXXXLKKYRDMVVEAXGX

SEQ ID NO: 27503 - protein, 39 aa, Artificial Sequence; identical to SEQ ID NO: 6365
  GFR-binding peptide
  MOD_RES (6)..(7): Xaa is C or S
  MOD_RES (21)..(22)..(23)..(24)..(25): Xaa is A or G
  MOD_RES (26)..(27)..(28)..(29): Xaa is A or G or is absent

SEQ ID NO: 27504 - protein, 32 aa, Artificial Sequence; identical to SEQ ID NO: 6367
  GFR-binding peptide
  MOD_RES (14)..(15)..(16)..(17)..(18): Xaa is A or G
  MOD_RES (19)..(20)..(21)..(22): Xaa is A or G or is absent

SEQ ID NO: 27505 - protein, 37 aa, Artificial Sequence; identical to SEQ ID NO: 6369
  GFR-binding peptide
  MOD_RES (5)..(6): Xaa is C or S

SEQ ID NO: 27506 - protein, 43 aa, Artificial Sequence; identical to SEQ ID NO: 6370
  GFR-binding peptide
  MOD_RES (4)..(5)..(40)..(42): Xaa is C or S
  MOD_RES (19)..(20)..(21)..(22)..(23): Xaa is A or G
  MOD_RES (24)..(25)..(26)..(27): Xaa is A or G or is absent

SEQ ID NO: 27507 - protein, 35 aa, Artificial Sequence
  GFR-binding peptide
  MOD_RES (34)..(34): Xaa is C or S
  MOD_RES (14)..(15)..(16)..(17)..(18): Xaa is A or G
  MOD_RES (19)..(20)..(21)..(22): Xaa is A or G or is absent
VPTELSPISMLYIXXXXXXXXXYKQYEEMVVEGXG

SEQ ID NO: 27508 - protein, 40 aa, Artificial Sequence; identical to SEQ ID NO: 6372
  GFR-binding peptide
  MOD_RES (6)..(7)..(38)..(40): Xaa is C or S

SEQ ID NO: 27509 - protein, 39 aa, Artificial Sequence; identical to SEQ ID NO: 6373
  GFR-binding peptide
  MOD_RES (3)..(4)..(38): Xaa is C or S
  MOD_RES (18)..(19)..(20)..(21)..(22): Xaa is A or G
  MOD_RES (23)..(24)..(25)..(26): Xaa is A or G or is absent

SEQ ID NO: 27510 - protein, 38 aa, Artificial Sequence; identical to SEQ ID NO: 6374
  GFR-binding peptide
  MOD_RES (35)..(37): Xaa is C or S
  MOD_RES (14)..(15)..(16)..(17)..(18): Xaa is A or G
  MOD_RES (19)..(20)..(21)..(22): Xaa is A or G or is absent

SEQ ID NO: 27511 - protein, 35 aa, Artificial Sequence; identical to SEQ ID NO: 6375
  GFR-binding peptide
  MOD_RES (4)..(5): Xaa is C or S

SEQ ID NO: 27512 - protein, 35 aa, Artificial Sequence
  GFR-binding peptide
  MOD_RES (2)..(34): Xaa is C or S
TXAPTKLSPISVLYIDDSSNVIYKQYENMVVRSXG

SEQ ID NO: 27513 - protein, 38 aa, Artificial Sequence
  GFR-binding peptide
  MOD_RES (2)..(3)..(37): Xaa is C or S
  MOD_RES (17)..(18)..(19)..(20)..(21): Xaa is A or G
  MOD_RES (22)..(23)..(24)..(25): Xaa is A or G or is absent
AXXVPTKLSPISILYKXXXXXXXXXLKYHYGMAVSEXG

SEQ ID NO: 27514 - protein, 35 aa, Artificial Sequence
  GFR-binding peptide
  MOD_RES (1)..(35): Xaa is C or S
  MOD_RES (15)..(16)..(17)..(18)..(19): Xaa is A or G
  MOD_RES (20)..(21)..(22)..(23): Xaa is A or G or is absent
XVPTKLSPISILYKXXXXXXXXXLKYHYGMAVSEX

SEQ ID NO: 27515 - protein, 36 aa, Artificial Sequence; identical to SEQ ID NO: 6376
  GFR-binding peptide
  MOD_RES (3)..(4): Xaa is C or S
  MOD_RES (18)..(19)..(20)..(21)..(22): Xaa is A or G
  MOD_RES (23)..(24)..(25)..(26): Xaa is A or G or is absent

SEQ ID NO: 27516 - protein, 37 aa, Artificial Sequence; identical to SEQ ID NO: 6377
  GFR-binding peptide
  MOD_RES (2)..(3)..(35)..(37): Xaa is C or S

SEQ ID NO: 27517 - protein, 35 aa, Artificial Sequence; identical to SEQ ID NO: 6378
  GFR-binding peptide
  MOD_RES (35)..(35): Xaa is C or S
  MOD_RES (14)..(15)..(16)..(17)..(18): Xaa is A or G
  MOD_RES (19)..(20)..(21)..(22): Xaa is A or G or is absent

SEQ ID NO: 27518 - protein, 39 aa, Artificial Sequence
  GFR-binding peptide
  MOD_RES (2)..(3)..(37)..(39): Xaa is C or S
  MOD_RES (17)..(18)..(19)..(20)..(21): Xaa is A or G
  MOD_RES (22)..(23)..(24)..(25): Xaa is A or G or is absent
AXXVPTELEPISMLYLXXXXXXXXXKFKYEDMVVEGXGX

SEQ ID NO: 27519 - protein, 40 aa, Artificial Sequence
  GFR-binding peptide
  MOD_RES (4)..(5)..(38)..(40): Xaa is C or S
  MOD_RES (19)..(20)..(21)..(22)..(23): Xaa is A or G
  MOD_RES (24)..(25)..(26)..(27): Xaa is A or G or is absent
ASPXXVSQDLSPISILYIXXXXXXXXXYKQYEMIVKSXKX

SEQ ID NO: 27520 - protein, 33 aa, Artificial Sequence
  GFR-binding peptide
  MOD_RES (32)..(32): Xaa is C or S
VPTELEPISMLYLDENEKVVKFKYEDMVVEGXG

SEQ ID NO: 27521 - protein, 39 aa, Artificial Sequence; identical to SEQ ID NO: 6381
  GFR-binding peptide
  MOD_RES (4)..(5)..(36)..(38): Xaa is C or S

SEQ ID NO: 27522 - protein, 38 aa, Artificial Sequence
  GFR-binding peptide
  MOD_RES (3)..(4)..(37): Xaa is C or S
  MOD_RES (18)..(19)..(20)..(21)..(22): Xaa is A or G
  MOD_RES (23)..(24)..(25)..(26): Xaa is A or G or is absent
SPXXVSQDLSPISILYIXXXXXXXXXYKQYEMIVKSXK

SEQ ID NO: 27523 - protein, 39 aa, Artificial Sequence; identical to SEQ ID NO: 6383
  GFR-binding peptide
  MOD_RES (5)..(6): Xaa is C or S
  MOD_RES (20)..(21)..(22)..(23)..(24): Xaa is A or G
  MOD_RES (25)..(26)..(27)..(28): Xaa is A or G or is absent

SEQ ID NO: 27524 - protein, 40 aa, Artificial Sequence; identical to SEQ ID NO: 6385
  GFR-binding peptide
  MOD_RES (5)..(6)..(37)..(39): Xaa is C or S

SEQ ID NO: 27525 - protein, 37 aa, Artificial Sequence
  GFR-binding peptide
  MOD_RES (6)..(7): Xaa is C or S
ASASPXXVPQDLSPISILYIVGRTPKVYKQYEMVVKS

SEQ ID NO: 27526 - protein, 39 aa, Artificial Sequence
  GFR-binding peptide
  MOD_RES (1)..(2)..(36)..(38): Xaa is C or S
  MOD_RES (16)..(17)..(18)..(19)..(20): Xaa is A or G
  MOD_RES (21)..(22)..(23)..(24): Xaa is A or G or is absent
XXVPARLSPISILYKXXXXXXXXXLKYHYDMVVEAXGXR

SEQ ID NO: 27527 - protein, 32 aa, Artificial Sequence
  GFR-binding peptide
  MOD_RES (1)..(2): Xaa is C or S
XXAPTKLSPISVLYIDDSSNVIYKQYENMVVR

SEQ ID NO: 27528 - protein, 30 aa, Artificial Sequence
  GFR-binding peptide
APTKLEPISVLYLDDSSNVIKFKYENMVVR

SEQ ID NO: 27529 - protein, 43 aa, Artificial Sequence
  GFR-binding peptide
  MOD_RES (6)..(7)..(41)..(43): Xaa is C or S
  MOD_RES (21)..(22)..(23)..(24)..(25): Xaa is A or G
  MOD_RES (26)..(27)..(28)..(29): Xaa is A or G or is absent
YVPKPXXAPTKLSPISVLYIXXXXXXXXXYKQYENMVVRSXGX

SEQ ID NO: 27530 - protein, 38 aa, Artificial Sequence; identical to SEQ ID NO: 6390
  GFR-binding peptide
  MOD_RES (4)..(5): Xaa is C or S
  MOD_RES (19)..(20)..(21)..(22)..(23): Xaa is A or G
  MOD_RES (24)..(25)..(26)..(27): Xaa is A or G or is absent

SEQ ID NO: 27531 - protein, 38 aa, Artificial Sequence; identical to SEQ ID NO: 6391
  GFR-binding peptide
  MOD_RES (4)..(5)..(37): Xaa is C or S

SEQ ID NO: 27532 - protein, 38 aa, Artificial Sequence
  GFR-binding peptide
  MOD_RES (1)..(2)..(35)..(37): Xaa is C or S
  MOD_RES (16)..(17)..(18)..(19)..(20): Xaa is A or G
  MOD_RES (21)..(22)..(23)..(24): Xaa is A or G or is absent
XXVSQDLSPISILYIXXXXXXXXXYKQYEMIVKSXKXS

SEQ ID NO: 27533 - protein, 39 aa, Artificial Sequence
  GFR-binding peptide
  MOD_RES (4)..(5)..(37)..(39): Xaa is C or S
SKAXXVPTKLSPISILYIDKGVVTYYKQYEGMAVSEXGX

SEQ ID NO: 27534 - protein, 34 aa, Artificial Sequence; identical to SEQ ID NO: 6396
  GFR-binding peptide
  MOD_RES (31)..(33): Xaa is C or S

SEQ ID NO: 27535 - protein, 40 aa, Artificial Sequence
  GFR-binding peptide
  MOD_RES (5)..(6): Xaa is C or S
  MOD_RES (20)..(21)..(22)..(23)..(24): Xaa is A or G
  MOD_RES (25)..(26)..(27)..(28): Xaa is A or G or is absent
VGKAXXVPTKLSPISVLYIXXXXXXXXXYKQYEEGMSVAE

SEQ ID NO: 27536 - protein, 37 aa, Artificial Sequence
  GFR-binding peptide
  MOD_RES (1)..(2)..(36): Xaa is C or S
  MOD_RES (16)..(17)..(18)..(19)..(20): Xaa is A or G
  MOD_RES (21)..(22)..(23)..(24): Xaa is A or G or is absent
XXVPARLNAISILYFXXXXXXXXXLKKYRDMVVEAXG

SEQ ID NO: 27537 - protein, 39 aa, Artificial Sequence
  GFR-binding peptide
  MOD_RES (4)..(5)..(39): Xaa is C or S
  MOD_RES (19)..(20)..(21)..(22)..(23): Xaa is A or G
  MOD_RES (24)..(25)..(26)..(27): Xaa is A or G or is absent
PKAXXAPTKLSPISVLYIXXXXXXXXXYKQYENMVVKAX

SEQ ID NO: 27538 - protein, 38 aa, Artificial Sequence; identical to SEQ ID NO: 6398
  GFR-binding peptide
  MOD_RES (1)..(35)..(37): Xaa is C or S
  MOD_RES (15)..(16)..(17)..(18)..(19): Xaa is A or G
  MOD_RES (20)..(21)..(22)..(23): Xaa is A or G or is absent

SEQ ID NO: 27539 - protein, 38 aa, Artificial Sequence; identical to SEQ ID NO: 6399
  GFR-binding peptide
  MOD_RES (3)..(4)..(37): Xaa is C or S
  MOD_RES (18)..(19)..(20)..(21)..(22): Xaa is A or G
  MOD_RES (23)..(24)..(25)..(26): Xaa is A or G or is absent

SEQ ID NO: 27540 - protein, 35 aa, Artificial Sequence
  GFR-binding peptide
  MOD_RES (1)..(33)..(35): Xaa is C or S
XAPTQLEPISVLYLDDSSNVIKFKYENMVVRAXGX

SEQ ID NO: 27541 - protein, 37 aa, Artificial Sequence
  GFR-binding peptide
  MOD_RES (1)..(2)..(36): Xaa is C or S
  MOD_RES (16)..(17)..(18)..(19)..(20): Xaa is A or G
  MOD_RES (21)..(22)..(23)..(24): Xaa is A or G or is absent
XXVPARLSPISILYIXXXXXXXXXYKQYEDMVVEAXG

SEQ ID NO: 27542 - protein, 32 aa, Artificial Sequence; identical to SEQ ID NO: 6400
  GFR-binding peptide
  MOD_RES (2)..(2): Xaa is C or S

SEQ ID NO: 27543 - protein, 35 aa, Artificial Sequence; identical to SEQ ID NO: 6402
  GFR-binding peptide
  MOD_RES (3)..(3): Xaa is C or S
  MOD_RES (17)..(18)..(19)..(20)..(21): Xaa is A or G
  MOD_RES (22)..(23)..(24)..(25): Xaa is A or G or is absent

SEQ ID NO: 27544 - protein, 38 aa, Artificial Sequence
  GFR-binding peptide
  MOD_RES (3)..(4)..(37): Xaa is C or S
  MOD_RES (18)..(19)..(20)..(21)..(22): Xaa is A or G
  MOD_RES (23)..(24)..(25)..(26): Xaa is A or G or is absent
APXXVPQALEPISILYLXXXXXXXXXKFKYEMIVRSXK

SEQ ID NO: 27545 - protein, 34 aa, Artificial Sequence
  GFR-binding peptide
  MOD_RES (3)..(4): Xaa is C or S
KAXXVPTKLSPISILYIDKGVVTYYKQYEGMAVS

SEQ ID NO: 27546 - protein, 34 aa, Artificial Sequence
  GFR-binding peptide
  MOD_RES (34)..(34): Xaa is C or S
  MOD_RES (14)..(15)..(16)..(17)..(18): Xaa is A or G
  MOD_RES (19)..(20)..(21)..(22): Xaa is A or G or is absent
VPTKLEPISILYLXXXXXXXXXKFKYEGMAVSEX

SEQ ID NO: 27547 - protein, 39 aa, Artificial Sequence
  GFR-binding peptide
  MOD_RES (1)..(2)..(36)..(38): Xaa is C or S
  MOD_RES (16)..(17)..(18)..(19)..(20): Xaa is A or G
  MOD_RES (21)..(22)..(23)..(24): Xaa is A or G or is absent
XXAPTQLEPISVLYLXXXXXXXXXKFKYENMVVRAXGXH

SEQ ID NO: 27548 - protein, 35 aa, Artificial Sequence
  GFR-binding peptide
  MOD_RES (1)..(2)..(35): Xaa is C or S
XXVPTKLEPISVLYLDDMGVPTKFKYEEGMSVAEX

SEQ ID NO: 27549 - protein, 39 aa, Artificial Sequence; identical to SEQ ID NO: 6406
  GFR-binding peptide
  MOD_RES (6)..(7)..(39): Xaa is C or S

SEQ ID NO: 27550 - protein, 38 aa, Artificial Sequence; identical to SEQ ID NO: 6407
  GFR-binding peptide
  MOD_RES (3)..(4)..(36)..(38): Xaa is C or S

SEQ ID NO: 27551 - protein, 39 aa, Artificial Sequence; identical to SEQ ID NO: 6408
  GFR-binding peptide
  MOD_RES (4)..(5): Xaa is C or S
  MOD_RES (19)..(20)..(21)..(22)..(23): Xaa is A or G
  MOD_RES (24)..(25)..(26)..(27): Xaa is A or G or is absent

SEQ ID NO: 27552 - protein, 37 aa, Artificial Sequence
  GFR-binding peptide
  MOD_RES (3)..(4): Xaa is C or S
  MOD_RES (18)..(19)..(20)..(21)..(22): Xaa is A or G
  MOD_RES (23)..(24)..(25)..(26): Xaa is A or G or is absent
ASXXVPARLSPISILYIXXXXXXXXXYKQYEDMVVEA

SEQ ID NO: 27553 - protein, 42 aa, Artificial Sequence; identical to SEQ ID NO: 6410
  GFR-binding peptide
  MOD_RES (6)..(40)..(42): Xaa is C or S
  MOD_RES (20)..(21)..(22)..(23)..(24): Xaa is A or G
  MOD_RES (25)..(26)..(27)..(28): Xaa is A or G or is absent

SEQ ID NO: 27554 - protein, 41 aa, Artificial Sequence
  GFR-binding peptide
  MOD_RES (5)..(6)..(39)..(41): Xaa is C or S
  MOD_RES (20)..(21)..(22)..(23)..(24): Xaa is A or G
  MOD_RES (25)..(26)..(27)..(28): Xaa is A or G or is absent
SASPXXVSQDLEPISILYLXXXXXXXXXKFKYEMIVKSXKX

SEQ ID NO: 27555 - protein, 32 aa, Artificial Sequence
  GFR-binding peptide
  MOD_RES (14)..(15)..(16)..(17)..(18): Xaa is A or G
  MOD_RES (19)..(20)..(21)..(22): Xaa is A or G or is absent
VPQALSPISILYIXXXXXXXXXYKQYEMIVRS

SEQ ID NO: 27556 - protein, 39 aa, Artificial Sequence
  GFR-binding peptide
  MOD_RES (3)..(4)..(38): Xaa is C or S
  MOD_RES (18)..(19)..(20)..(21)..(22): Xaa is A or G
  MOD_RES (23)..(24)..(25)..(26): Xaa is A or G or is absent
KPXXAPTQLSPISVLYIXXXXXXXXXYKQYENMVVRAXG

SEQ ID NO: 27557 - protein, 34 aa, Artificial Sequence; identical to SEQ ID NO: 6414
  GFR-binding peptide
  MOD_RES (1)..(1): Xaa is C or S
  MOD_RES (15)..(16)..(17)..(18)..(19): Xaa is A or G
  MOD_RES (20)..(21)..(22)..(23): Xaa is A or G or is absent

SEQ ID NO: 27558 - protein, 40 aa, Artificial Sequence
  GFR-binding peptide
  MOD_RES (6)..(7): Xaa is C or S
  MOD_RES (21)..(22)..(23)..(24)..(25): Xaa is A or G
  MOD_RES (26)..(27)..(28)..(29): Xaa is A or G or is absent
KASKAXXVPTKLEPISILYLXXXXXXXXXKFKYEGMAVSE

SEQ ID NO: 27559 - protein, 40 aa, Artificial Sequence
  GFR-binding peptide
  MOD_RES (6)..(40): Xaa is C or S
  MOD_RES (20)..(21)..(22)..(23)..(24): Xaa is A or G
  MOD_RES (25)..(26)..(27)..(28): Xaa is A or G or is absent
VTKPTXAPTKLSPISVLYIXXXXXXXXXYKQYENMVVRSX

SEQ ID NO: 27560 - protein, 36 aa, Artificial Sequence
  GFR-binding peptide
  MOD_RES (3)..(3): Xaa is C or S
  MOD_RES (17)..(18)..(19)..(20)..(21): Xaa is A or G
  MOD_RES (22)..(23)..(24)..(25): Xaa is A or G or is absent
PTXAPTKLSPISVLYIXXXXXXXXXYKQYENMVVRS

SEQ ID NO: 27561 - protein, 33 aa, Artificial Sequence
  GFR-binding peptide
  MOD_RES (33)..(33): Xaa is C or S
  MOD_RES (14)..(15)..(16)..(17)..(18): Xaa is A or G
  MOD_RES (19)..(20)..(21)..(22): Xaa is A or G or is absent
VPQALEPISILYLXXXXXXXXXKFKYEMIVRSX

SEQ ID NO: 27562 - protein, 38 aa, Artificial Sequence
  GFR-binding peptide
  MOD_RES (3)..(4)..(36)..(38): Xaa is C or S
ASXXVPARLSPISILYKDAANNVVLKYHYDMVVEAXGX

SEQ ID NO: 27563 - protein, 40 aa, Artificial Sequence
  GFR-binding peptide
  MOD_RES (2)..(3)..(37)..(39): Xaa is C or S
  MOD_RES (17)..(18)..(19)..(20)..(21): Xaa is A or G
  MOD_RES (22)..(23)..(24)..(25): Xaa is A or G or is absent
PXXAPTKLSPISVLYIXXXXXXXXXYKQYENMVVRSXGXH

SEQ ID NO: 27564 - protein, 37 aa, Artificial Sequence
  GFR-binding peptide
  MOD_RES (1)..(2)..(34)..(36): Xaa is C or S
XXVPARLEPISILYLDAANNVVKFKYEDMVVEAXGXR

SEQ ID NO: 27565 - protein, 36 aa, Artificial Sequence; identical to SEQ ID NO: 6422
  GFR-binding peptide
  MOD_RES (3)..(4)..(36): Xaa is C or S

SEQ ID NO: 27566 - protein, 40 aa, Artificial Sequence
  GFR-binding peptide
  MOD_RES (6)..(7): Xaa is C or S
  MOD_RES (21)..(22)..(23)..(24)..(25): Xaa is A or G
  MOD_RES (26)..(27)..(28)..(29): Xaa is A or G or is absent
AAPASXXVPARLSPISILYIXXXXXXXXXYKQYEDMVVEA

SEQ ID NO: 27567 - protein, 41 aa, Artificial Sequence
  GFR-binding peptide
  MOD_RES (6)..(7)..(41): Xaa is C or S
  MOD_RES (21)..(22)..(23)..(24)..(25): Xaa is A or G
  MOD_RES (26)..(27)..(28)..(29): Xaa is A or G or is absent
KIPKAXXVPTELEPISMLYLXXXXXXXXXKFKYEDMVVEGX

SEQ ID NO: 27568 - protein, 36 aa, Artificial Sequence; identical to SEQ ID NO: 6425
  GFR-binding peptide
  MOD_RES (2)..(3): Xaa is C or S
  MOD_RES (17)..(18)..(19)..(20)..(21): Xaa is A or G
  MOD_RES (22)..(23)..(24)..(25): Xaa is A or G or is absent

SEQ ID NO: 27569 - protein, 35 aa, Artificial Sequence
  GFR-binding peptide
  MOD_RES (1)..(2)..(33)..(35): Xaa is C or S
XXVSQDLEPISILYLIGKTPKIKFKYEMIVKSXKX

SEQ ID NO: 27570 - protein, 38 aa, Artificial Sequence
  GFR-binding peptide
  MOD_RES (3)..(4)..(36)..(38): Xaa is C or S
KPXXAPTKLEPISVLYLDDSSNVIKFKYENMVVRSXGX

SEQ ID NO: 27571 - protein, 36 aa, Artificial Sequence
  GFR-binding peptide
  MOD_RES (1)..(2)..(35): Xaa is C or S
  MOD_RES (16)..(17)..(18)..(19)..(20): Xaa is A or G
  MOD_RES (21)..(22)..(23)..(24): Xaa is A or G or is absent
XXVPQALSPISILYIXXXXXXXXXYKQYEMIVRSXK

SEQ ID NO: 27572 - protein, 43 aa, Artificial Sequence
  GFR-binding peptide
  MOD_RES (6)..(7)..(40)..(42): Xaa is C or S
  MOD_RES (21)..(22)..(23)..(24)..(25): Xaa is A or G
  MOD_RES (26)..(27)..(28)..(29): Xaa is A or G or is absent
ASAAPXXVPQALEPISILYLXXXXXXXXXKFKYEMIVRSXKXS

SEQ ID NO: 27573 - protein, 33 aa, Artificial Sequence; identical to SEQ ID NO: 6430
  GFR-binding peptide
  MOD_RES (32)..(32): Xaa is C or S

SEQ ID NO: 27574 - protein, 41 aa, Artificial Sequence
  GFR-binding peptide
  MOD_RES (5)..(6)..(40): Xaa is C or S
  MOD_RES (20)..(21)..(22)..(23)..(24): Xaa is A or G
  MOD_RES (25)..(26)..(27)..(28): Xaa is A or G or is absent
APASXXVPARLEPISILYLXXXXXXXXXKFKYEDMVVEAXG

SEQ ID NO: 27575 - protein, 36 aa, Artificial Sequence
  GFR-binding peptide
  MOD_RES (3)..(4): Xaa is C or S
  MOD_RES (18)..(19)..(20)..(21)..(22): Xaa is A or G
  MOD_RES (23)..(24)..(25)..(26): Xaa is A or G or is absent
KPXXAPTKLSPISVLYIXXXXXXXXXYKQYENMVVR

SEQ ID NO: 27576 - protein, 36 aa, Artificial Sequence; identical to SEQ ID NO: 6431
  GFR-binding peptide
  MOD_RES (1)..(2)..(34)..(36): Xaa is C or S

SEQ ID NO: 27577 - protein, 35 aa, Artificial Sequence
  GFR-binding peptide
  MOD_RES (33)..(35): Xaa is C or S
  MOD_RES (14)..(15)..(16)..(17)..(18): Xaa is A or G
  MOD_RES (19)..(20)..(21)..(22): Xaa is A or G or is absent
VSQDLSPISILYIXXXXXXXXXYKQYEMIVKSXKX

SEQ ID NO: 27578 - protein, 36 aa, Artificial Sequence
  GFR-binding peptide
  MOD_RES (4)..(5)..(36): Xaa is C or S
ASPXXVPQDLEPISILYLVGRTPKVKFKYEMVVKSX

SEQ ID NO: 27579 - protein, 37 aa, Artificial Sequence; identical to SEQ ID NO: 6432
  GFR-binding peptide
  MOD_RES (4)..(5)..(36): Xaa is C or S

SEQ ID NO: 27580 - protein, 41 aa, Artificial Sequence; identical to SEQ ID NO: 6435
  GFR-binding peptide
  MOD_RES (4)..(5)..(39)..(41): Xaa is C or S
  MOD_RES (19)..(20)..(21)..(22)..(23): Xaa is A or G
  MOD_RES (24)..(25)..(26)..(27): Xaa is A or G or is absent

SEQ ID NO: 27581 - protein, 41 aa, Artificial Sequence; identical to SEQ ID NO: 6436
  GFR-binding peptide
  MOD_RES (5)..(6)..(38)..(40): Xaa is C or S

SEQ ID NO: 27582 - protein, 35 aa, Artificial Sequence
  GFR-binding peptide
  MOD_RES (4)..(5): Xaa is C or S
PKAXXAPTKLEPISVLYLDSSNNVIKFKYENMVVK

SEQ ID NO: 27583 - protein, 40 aa, Artificial Sequence
  GFR-binding peptide
  MOD_RES (2)..(3)..(37)..(39): Xaa is C or S
  MOD_RES (17)..(18)..(19)..(20)..(21): Xaa is A or G
  MOD_RES (22)..(23)..(24)..(25): Xaa is A or G or is absent
PXXAPTQLEPISVLYLXXXXXXXXXKFKYENMVVRAXGXH

SEQ ID NO: 27584 - protein, 36 aa, Artificial Sequence
  GFR-binding peptide
  MOD_RES (1)..(33)..(35): Xaa is C or S
XVPARLSPISILYKDAANNVVLKYHYDMVVEAXGXR

SEQ ID NO: 27585 - protein, 36 aa, Artificial Sequence
  GFR-binding peptide
  MOD_RES (5)..(6): Xaa is C or S
SAAPXXVPQALSPISILYIVGRKPKVYKQYEMIVRS

SEQ ID NO: 27586 - protein, 40 aa, Artificial Sequence
  GFR-binding peptide
  MOD_RES (5)..(6)..(38)..(40): Xaa is C or S
IPKAXXVPTELSPISMLYIDEYDKVVYKQYEEMVVEGXGX

SEQ ID NO: 27587 - protein, 42 aa, Artificial Sequence
  GFR-binding peptide
  MOD_RES (7)..(41): Xaa is C or S
  MOD_RES (21)..(22)..(23)..(24)..(25): Xaa is A or G
  MOD_RES (26)..(27)..(28)..(29): Xaa is A or G or is absent
HVTKPTXAPTKLSPISVLYIXXXXXXXXXYKQYENMVVRSXG

SEQ ID NO: 27588 - protein, 41 aa, Artificial Sequence; identical to SEQ ID NO: 6443
  GFR-binding peptide
  MOD_RES (3)..(4)..(38)..(40): Xaa is C or S
  MOD_RES (18)..(19)..(20)..(21)..(22): Xaa is A or G
  MOD_RES (23)..(24)..(25)..(26): Xaa is A or G or is absent

SEQ ID NO: 27589 - protein, 35 aa, Artificial Sequence; identical to SEQ ID NO: 6444
  GFR-binding peptide
  MOD_RES (1)..(2)..(34): Xaa is C or S

SEQ ID NO: 27590 - protein, 40 aa, Artificial Sequence
  GFR-binding peptide
  MOD_RES (6)..(40): Xaa is C or S
  MOD_RES (20)..(21)..(22)..(23)..(24): Xaa is A or G
  MOD_RES (25)..(26)..(27)..(28): Xaa is A or G or is absent
VTKPTXAPTKLEPISVLYLXXXXXXXXXKFKYENMVVRSX

SEQ ID NO: 27591 - protein, 36 aa, Artificial Sequence; identical to SEQ ID NO: 6445
  GFR-binding peptide
  MOD_RES (4)..(5): Xaa is C or S

SEQ ID NO: 27592 - protein, 33 aa, Artificial Sequence; identical to SEQ ID NO: 6446
  GFR-binding peptide
  MOD_RES (2)..(3): Xaa is C or S

SEQ ID NO: 27593 - protein, 43 aa, Artificial Sequence
  GFR-binding peptide
  MOD_RES (5)..(6)..(41)..(43): Xaa is C or S
  MOD_RES (20)..(21)..(22)..(23)..(24): Xaa is A or G
  MOD_RES (25)..(26)..(27)..(28): Xaa is A or G or is absent
VGKAXXVPTKLEPISVLYLXXXXXXXXXKFKYEEGMSVAEXGX

SEQ ID NO: 27594 - protein, 36 aa, Artificial Sequence
  GFR-binding peptide
  MOD_RES (33)..(35): Xaa is C or S
  MOD_RES (14)..(15)..(16)..(17)..(18): Xaa is A or G
  MOD_RES (19)..(20)..(21)..(22): Xaa is A or G or is absent
VSQDLEPISILYLXXXXXXXXXKFKYEMIVKSXKXS

SEQ ID NO: 27595 - protein, 37 aa, Artificial Sequence
  GFR-binding peptide
  MOD_RES (3)..(35)..(37): Xaa is C or S
PTXAPTKLSPISVLYIDDSSNVIYKQYENMVVRSXGX

SEQ ID NO: 27596 - protein, 35 aa, Artificial Sequence; identical to SEQ ID NO: 6447
  GFR-binding peptide
  MOD_RES (33)..(35): Xaa is C or S
  MOD_RES (14)..(15)..(16)..(17)..(18): Xaa is A or G
  MOD_RES (19)..(20)..(21)..(22): Xaa is A or G or is absent

SEQ ID NO: 27597 - protein, 34 aa, Artificial Sequence; identical to SEQ ID NO: 6449
  GFR-binding peptide
  MOD_RES (31)..(33): Xaa is C or S

SEQ ID NO: 27598 - protein, 37 aa, Artificial Sequence
  GFR-binding peptide
  MOD_RES (4)..(36): Xaa is C or S
KPTXAPTKLEPISVLYLDDSSNVIKFKYENMVVRSXG

SEQ ID NO: 27599 - protein, 34 aa, Artificial Sequence
  GFR-binding peptide
  MOD_RES (1)..(2): Xaa is C or S
  MOD_RES (16)..(17)..(18)..(19)..(20): Xaa is A or G
  MOD_RES (21)..(22)..(23)..(24): Xaa is A or G or is absent
XXVPTELSPISMLYIXXXXXXXXXYKQYEEMVVE

SEQ ID NO: 27600 - protein, 38 aa, Artificial Sequence; identical to SEQ ID NO: 6452
  GFR-binding peptide
  MOD_RES (3)..(4)..(36)..(38): Xaa is C or S

SEQ ID NO: 27601 - protein, 36 aa, Artificial Sequence
  GFR-binding peptide
  MOD_RES (1)..(33)..(35): Xaa is C or S
XVPTELSPISMLYIDENEKVVYKQYEDMVVEGXGXR

SEQ ID NO: 27602 - protein, 36 aa, Artificial Sequence
  GFR-binding peptide
  MOD_RES (2)..(3): Xaa is C or S
  MOD_RES (17)..(18)..(19)..(20)..(21): Xaa is A or G
  MOD_RES (22)..(23)..(24)..(25): Xaa is A or G or is absent
PXXAPTQLEPISVLYLXXXXXXXXXKFKYENMVVRA

SEQ ID NO: 27603 - protein, 39 aa, Artificial Sequence
  GFR-binding peptide
  MOD_RES (3)..(4)..(36)..(38): Xaa is C or S
KAXXVPTKLSPISILYIDKGVVTYYKQYEGMAVSEXGXR

SEQ ID NO: 27604 - protein, 40 aa, Artificial Sequence; identical to SEQ ID NO: 6454
  GFR-binding peptide
  MOD_RES (5)..(6)..(38)..(40): Xaa is C or S

SEQ ID NO: 27605 - protein, 35 aa, Artificial Sequence
  GFR-binding peptide
  MOD_RES (2)..(3)..(35): Xaa is C or S
PXXAPTKLSPISVLYIDDSSNVIYKQYENMVVRSX

SEQ ID NO: 27606 - protein, 36 aa, Artificial Sequence; identical to SEQ ID NO: 6455
  GFR-binding peptide
  MOD_RES (1)..(34)..(36): Xaa is C or S
  MOD_RES (15)..(16)..(17)..(18)..(19): Xaa is A or G
  MOD_RES (20)..(21)..(22)..(23): Xaa is A or G or is absent

SEQ ID NO: 27607 - protein, 40 aa, Artificial Sequence
  GFR-binding peptide
  MOD_RES (2)..(3)..(37)..(39): Xaa is C or S
  MOD_RES (17)..(18)..(19)..(20)..(21): Xaa is A or G
  MOD_RES (22)..(23)..(24)..(25): Xaa is A or G or is absent
AXXVPTKLSPISILYKXXXXXXXXXLKYHYGMAVSEXGXR

SEQ ID NO: 27608 - protein, 34 aa, Artificial Sequence; identical to SEQ ID NO: 6456
  GFR-binding peptide
  MOD_RES (2)..(3): Xaa is C or S

SEQ ID NO: 27609 - protein, 39 aa, Artificial Sequence
  GFR-binding peptide
  MOD_RES (1)..(2)..(36)..(38): Xaa is C or S
  MOD_RES (16)..(17)..(18)..(19)..(20): Xaa is A or G
  MOD_RES (21)..(22)..(23)..(24): Xaa is A or G or is absent
XXAPTKLSPISVLYIXXXXXXXXXYKQYENMVVRSXGXH

SEQ ID NO: 27610 - protein, 35 aa, Artificial Sequence; identical to SEQ ID NO: 6458
  GFR-binding peptide
  MOD_RES (2)..(3)..(35): Xaa is C or S

SEQ ID NO: 27611 - protein, 39 aa, Artificial Sequence
  GFR-binding peptide
  MOD_RES (3)..(4)..(36)..(38): Xaa is C or S
ASXXVPARLSPISILYKDAANNVVLKYHYDMVVEAXGXR

SEQ ID NO: 27612 - protein, 37 aa, Artificial Sequence
  GFR-binding peptide
  MOD_RES (1)..(35)..(37): Xaa is C or S
  MOD_RES (15)..(16)..(17)..(18)..(19): Xaa is A or G
  MOD_RES (20)..(21)..(22)..(23): Xaa is A or G or is absent
XVPARLNAISILYFXXXXXXXXXLKKYRDMVVEAXGX

SEQ ID NO: 27613 - protein, 41 aa, Artificial Sequence
  GFR-binding peptide
  MOD_RES (6)..(7)..(41): Xaa is C or S
  MOD_RES (21)..(22)..(23)..(24)..(25): Xaa is A or G
  MOD_RES (26)..(27)..(28)..(29): Xaa is A or G or is absent
SIPKAXXVPTELSPISMLYIXXXXXXXXXYKQYEEMVVEGX

SEQ ID NO: 27614 - protein, 37 aa, Artificial Sequence
  GFR-binding peptide
  MOD_RES (3)..(37): Xaa is C or S
  MOD_RES (17)..(18)..(19)..(20)..(21): Xaa is A or G
  MOD_RES (22)..(23)..(24)..(25): Xaa is A or G or is absent
PTXAPTKLSPISVLYIXXXXXXXXXYKQYENMVVRSX

SEQ ID NO: 27615 - protein, 36 aa, Artificial Sequence
  GFR-binding peptide
  MOD_RES (1)..(33)..(35): Xaa is C or S
XVPTKLSPISILYIDKGVVTYYKQYEGMAVSEXGXR

SEQ ID NO: 27616 - protein, 40 aa, Artificial Sequence
  GFR-binding peptide
  MOD_RES (6)..(7)..(40): Xaa is C or S
  MOD_RES (21)..(22)..(23)..(24)..(25): Xaa is A or G
  MOD_RES (26)..(27)..(28)..(29): Xaa is A or G or is absent
ASASPXXVPQDLEPISILYLXXXXXXXXXKFKYEMVVKSX

SEQ ID NO: 27617 - protein, 32 aa, Artificial Sequence
  GFR-binding peptide
  MOD_RES (14)..(15)..(16)..(17)..(18): Xaa is A or G
  MOD_RES (19)..(20)..(21)..(22): Xaa is A or G or is absent
APTQLEPISVLYLXXXXXXXXXKFKYENMVVR

SEQ ID NO: 27618 - protein, 39 aa, Artificial Sequence; identical to SEQ ID NO: 6464
  GFR-binding peptide
  MOD_RES (4)..(5)..(39): Xaa is C or S
  MOD_RES (19)..(20)..(21)..(22)..(23): Xaa is A or G
  MOD_RES (24)..(25)..(26)..(27): Xaa is A or G or is absent

SEQ ID NO: 27619 - protein, 36 aa, Artificial Sequence
  GFR-binding peptide
  MOD_RES (3)..(4): Xaa is C or S
  MOD_RES (18)..(19)..(20)..(21)..(22): Xaa is A or G
  MOD_RES (23)..(24)..(25)..(26): Xaa is A or G or is absent
ASXXVPARLSPISILYIXXXXXXXXXYKQYEDMVVE

SEQ ID NO: 27620 - protein, 37 aa, Artificial Sequence
  GFR-binding peptide
  MOD_RES (3)..(4): Xaa is C or S
  MOD_RES (18)..(19)..(20)..(21)..(22): Xaa is A or G
  MOD_RES (23)..(24)..(25)..(26): Xaa is A or G or is absent
ASXXVPARLNAISILYFXXXXXXXXXLKKYRDMVVEA

SEQ ID NO: 27621 - protein, 42 aa, Artificial Sequence; identical to SEQ ID NO: 6466
  GFR-binding peptide
  MOD_RES (4)..(5)..(39)..(41): Xaa is C or S
  MOD_RES (19)..(20)..(21)..(22)..(23): Xaa is A or G
  MOD_RES (24)..(25)..(26)..(27): Xaa is A or G or is absent

SEQ ID NO: 27622 - protein, 38 aa, Artificial Sequence; identical to SEQ ID NO: 6467
  GFR-binding peptide
  MOD_RES (2)..(3)..(36)..(38): Xaa is C or S
  MOD_RES (17)..(18)..(19)..(20)..(21): Xaa is A or G
  MOD_RES (22)..(23)..(24)..(25): Xaa is A or G or is absent

SEQ ID NO: 27623 - protein, 42 aa, Artificial Sequence; identical to SEQ ID NO: 6469
  GFR-binding peptide
  MOD_RES (5)..(6)..(40)..(42): Xaa is C or S
  MOD_RES (20)..(21)..(22)..(23)..(24): Xaa is A or G
  MOD_RES (25)..(26)..(27)..(28): Xaa is A or G or is absent

SEQ ID NO: 27624 - protein, 35 aa, Artificial Sequence
  GFR-binding peptide
  MOD_RES (1)..(35): Xaa is C or S
  MOD_RES (15)..(16)..(17)..(18)..(19): Xaa is A or G
  MOD_RES (20)..(21)..(22)..(23): Xaa is A or G or is absent
XVPARLNAISILYFXXXXXXXXXLKKYRDMVVEAX

SEQ ID NO: 27625 - protein, 36 aa, Artificial Sequence; identical to SEQ ID NO: 6470
  GFR-binding peptide
  MOD_RES (34)..(36): Xaa is C or S
  MOD_RES (14)..(15)..(16)..(17)..(18): Xaa is A or G
  MOD_RES (19)..(20)..(21)..(22): Xaa is A or G or is absent

SEQ ID NO: 27626 - protein, 39 aa, Artificial Sequence
  GFR-binding peptide
  MOD_RES (2)..(3)..(37)..(39): Xaa is C or S
  MOD_RES (17)..(18)..(19)..(20)..(21): Xaa is A or G
  MOD_RES (22)..(23)..(24)..(25): Xaa is A or G or is absent
SXXVPARLNAISILYFXXXXXXXXXLKKYRDMVVEAXGX

SEQ ID NO: 27627 - protein, 42 aa, Artificial Sequence
  GFR-binding peptide
  MOD_RES (6)..(7)..(41): Xaa is C or S
  MOD_RES (21)..(22)..(23)..(24)..(25): Xaa is A or G
  MOD_RES (26)..(27)..(28)..(29): Xaa is A or G or is absent
AAPASXXVPARLEPISILYLXXXXXXXXXKFKYEDMVVEAXG

SEQ ID NO: 27628 - protein, 39 aa, Artificial Sequence
  GFR-binding peptide
  MOD_RES (3)..(4)..(38): Xaa is C or S
  MOD_RES (18)..(19)..(20)..(21)..(22): Xaa is A or G
  MOD_RES (23)..(24)..(25)..(26): Xaa is A or G or is absent
KAXXAPTKLSPISVLYIXXXXXXXXXYKQYENMVVKAXG

SEQ ID NO: 27629 - protein, 38 aa, Artificial Sequence
  GFR-binding peptide
  MOD_RES (4)..(5)..(36)..(38): Xaa is C or S
AAPXXVPQALSPISILYIVGRKPKVYKQYEMIVRSXKX

SEQ ID NO: 27630 - protein, 37 aa, Artificial Sequence
  GFR-binding peptide
  MOD_RES (2)..(3)..(37): Xaa is C or S
  MOD_RES (17)..(18)..(19)..(20)..(21): Xaa is A or G
  MOD_RES (22)..(23)..(24)..(25): Xaa is A or G or is absent
AXXVPTELEPISMLYLXXXXXXXXXKFKYEEMVVEGX

SEQ ID NO: 27631 - protein, 38 aa, Artificial Sequence; identical to SEQ ID NO: 6475
  GFR-binding peptide
  MOD_RES (3)..(4)..(35)..(37): Xaa is C or S

SEQ ID NO: 27632 - protein, 42 aa, Artificial Sequence
  GFR-binding peptide
  MOD_RES (6)..(7)..(41): Xaa is C or S
  MOD_RES (21)..(22)..(23)..(24)..(25): Xaa is A or G
  MOD_RES (26)..(27)..(28)..(29): Xaa is A or G or is absent
AAPASXXVPARLSPISILYKXXXXXXXXXLKYHYDMVVEAXG

SEQ ID NO: 27633 - protein, 41 aa, Artificial Sequence
  GFR-binding peptide
  MOD_RES (5)..(6)..(38)..(40): Xaa is C or S
APASXXVPARLSPISILYKDAANNVVLKYHYDMVVEAXGXR

SEQ ID NO: 27634 - protein, 41 aa, Artificial Sequence
  GFR-binding peptide
  MOD_RES (3)..(4)..(38)..(40): Xaa is C or S
  MOD_RES (18)..(19)..(20)..(21)..(22): Xaa is A or G
  MOD_RES (23)..(24)..(25)..(26): Xaa is A or G or is absent
KAXXVPTELEPISMLYLXXXXXXXXXKFKYEEMVVEGXGXR

SEQ ID NO: 27635 - protein, 38 aa, Artificial Sequence
  GFR-binding peptide
  MOD_RES (4)..(5)..(37): Xaa is C or S
SKAXXVPTKLSPISILYKDKGVVTYLKYHYGMAVSEXG

SEQ ID NO: 27636 - protein, 38 aa, Artificial Sequence
  GFR-binding peptide
  MOD_RES (6)..(7): Xaa is C or S
KASKAXXVPTKLSPISILYKDKGVVTYLKYHYGMAVSE

SEQ ID NO: 27637 - protein, 36 aa, Artificial Sequence
  GFR-binding peptide
  MOD_RES (1)..(35): Xaa is C or S
  MOD_RES (15)..(16)..(17)..(18)..(19): Xaa is A or G
  MOD_RES (20)..(21)..(22)..(23): Xaa is A or G or is absent
XVPTELSPISMLYIXXXXXXXXXYKQYEDMVVEGXG

SEQ ID NO: 27638 - protein, 37 aa, Artificial Sequence
  GFR-binding peptide
  MOD_RES (1)..(2)..(34)..(36): Xaa is C or S
XXVPTELSPISMLYIDENEKVVYKQYEDMVVEGXGXR

SEQ ID NO: 27639 - protein, 43 aa, Artificial Sequence; identical to SEQ ID NO: 6479
  GFR-binding peptide
  MOD_RES (4)..(5)..(40)..(42): Xaa is C or S
  MOD_RES (19)..(20)..(21)..(22)..(23): Xaa is A or G
  MOD_RES (24)..(25)..(26)..(27): Xaa is A or G or is absent

SEQ ID NO: 27640 - protein, 37 aa, Artificial Sequence
  GFR-binding peptide
  MOD_RES (2)..(3)..(34)..(36): Xaa is C or S
PXXVSQDLSPISILYIIGKTPKIYKQYEMIVKSXKXS

SEQ ID NO: 27641 - protein, 35 aa, Artificial Sequence
  GFR-binding peptide
  MOD_RES (1)..(2)..(35): Xaa is C or S
  MOD_RES (16)..(17)..(18)..(19)..(20): Xaa is A or G
  MOD_RES (21)..(22)..(23)..(24): Xaa is A or G or is absent
XXVPQDLEPISILYLXXXXXXXXXKFKYEMVVKSX

SEQ ID NO: 27642 - protein, 38 aa, Artificial Sequence
  GFR-binding peptide
  MOD_RES (3)..(4)..(38): Xaa is C or S
  MOD_RES (18)..(19)..(20)..(21)..(22): Xaa is A or G
  MOD_RES (23)..(24)..(25)..(26): Xaa is A or G or is absent
KAXXVPTELSPISMLYIXXXXXXXXXYKQYEDMVVEGX

SEQ ID NO: 27643 - protein, 35 aa, Artificial Sequence
  GFR-binding peptide
  MOD_RES (3)..(4): Xaa is C or S
ASXXVPARLEPISILYLDAANNVVKFKYEDMVVEA

SEQ ID NO: 27644 - protein, 37 aa, Artificial Sequence
  GFR-binding peptide
  MOD_RES (4)..(5): Xaa is C or S
  MOD_RES (19)..(20)..(21)..(22)..(23): Xaa is A or G
  MOD_RES (24)..(25)..(26)..(27): Xaa is A or G or is absent
ASPXXVSQDLEPISILYLXXXXXXXXXKFKYEMIVKS

SEQ ID NO: 27645 - protein, 39 aa, Artificial Sequence
  GFR-binding peptide
  MOD_RES (5)..(6): Xaa is C or S
  MOD_RES (20)..(21)..(22)..(23)..(24): Xaa is A or G
  MOD_RES (25)..(26)..(27)..(28): Xaa is A or G or is absent
ASKAXXVPTKLSPISILYKXXXXXXXXXLKYHYGMAVSE

SEQ ID NO: 27646 - protein, 39 aa, Artificial Sequence
  GFR-binding peptide
  MOD_RES (5)..(6)..(38): Xaa is C or S
VPKPXXAPTKLSPISVLYIDDSSNVIYKQYENMVVRSXG

SEQ ID NO: 27647 - protein, 35 aa, Artificial Sequence
  GFR-binding peptide
  MOD_RES (2)..(3): Xaa is C or S
  MOD_RES (17)..(18)..(19)..(20)..(21): Xaa is A or G
  MOD_RES (22)..(23)..(24)..(25): Xaa is A or G or is absent
PXXAPTKLSPISVLYIXXXXXXXXXYKQYENMVVR

SEQ ID NO: 27648 - protein, 36 aa, Artificial Sequence
  GFR-binding peptide
  MOD_RES (2)..(3)..(35): Xaa is C or S
AXXVPTKLSPISILYKDKGVVTYLKYHYGMAVSEXG

SEQ ID NO: 27649 - protein, 37 aa, Artificial Sequence
  GFR-binding peptide
  MOD_RES (2)..(3)..(34)..(36): Xaa is C or S
PXXVSQDLEPISILYLIGKTPKIKFKYEMIVKSXKXS

SEQ ID NO: 27650 - protein, 36 aa, Artificial Sequence
  GFR-binding peptide
  MOD_RES (5)..(5): Xaa is C or S
TKPTXAPTKLSPISVLYIDDSSNVIYKQYENMVVRS

SEQ ID NO: 27651 - protein, 41 aa, Artificial Sequence
  GFR-binding peptide
  MOD_RES (5)..(6)..(38)..(40): Xaa is C or S
APASXXVPARLEPISILYLDAANNVVKFKYEDMVVEAXGXR

SEQ ID NO: 27652 - protein, 38 aa, Artificial Sequence
  GFR-binding peptide
  MOD_RES (2)..(3)..(36)..(38): Xaa is C or S
AXXVPTKLEPISVLYLDDMGVPTKFKYEEGMSVAEXGX

SEQ ID NO: 27653 - protein, 36 aa, Artificial Sequence
  GFR-binding peptide
  MOD_RES (1)..(2)..(35): Xaa is C or S
  MOD_RES (16)..(17)..(18)..(19)..(20): Xaa is A or G
  MOD_RES (21)..(22)..(23)..(24): Xaa is A or G or is absent
XXVPQALEPISILYLXXXXXXXXXKFKYEMIVRSXK

SEQ ID NO: 27654 - protein, 40 aa, Artificial Sequence
  GFR-binding peptide
  MOD_RES (4)..(5)..(37)..(39): Xaa is C or S
PASXXVPARLSPISILYKDAANNVVLKYHYDMVVEAXGXR

SEQ ID NO: 27655 - protein, 34 aa, Artificial Sequence
  GFR-binding peptide
  MOD_RES (2)..(3): Xaa is C or S
PXXAPTQLSPISVLYIDDSSNVIYKQYENMVVRA

SEQ ID NO: 27656 - protein, 33 aa, Artificial Sequence
  GFR-binding peptide
  MOD_RES (1)..(1): Xaa is C or S
  MOD_RES (15)..(16)..(17)..(18)..(19): Xaa is A or G
  MOD_RES (20)..(21)..(22)..(23): Xaa is A or G or is absent
XVPARLNAISILYFXXXXXXXXXLKKYRDMVVE

SEQ ID NO: 27657 - protein, 43 aa, Artificial Sequence; identical to SEQ ID NO: 6493
  GFR-binding peptide
  MOD_RES (6)..(7)..(41)..(43): Xaa is C or S
  MOD_RES (21)..(22)..(23)..(24)..(25): Xaa is A or G
  MOD_RES (26)..(27)..(28)..(29): Xaa is A or G or is absent

SEQ ID NO: 27658 - protein, 41 aa, Artificial Sequence
  GFR-binding peptide
  MOD_RES (5)..(6)..(40): Xaa is C or S
  MOD_RES (20)..(21)..(22)..(23)..(24): Xaa is A or G
  MOD_RES (25)..(26)..(27)..(28): Xaa is A or G or is absent
IPKAXXVPTELSPISMLYIXXXXXXXXXYKQYEDMVVEGXG

SEQ ID NO: 27659 - protein, 38 aa, Artificial Sequence
  GFR-binding peptide
  MOD_RES (2)..(3)..(37): Xaa is C or S
  MOD_RES (17)..(18)..(19)..(20)..(21): Xaa is A or G
  MOD_RES (22)..(23)..(24)..(25): Xaa is A or G or is absent
AXXVPTKLEPISILYLXXXXXXXXXKFKYEGMAVSEXG

SEQ ID NO: 27660 - protein, 36 aa, Artificial Sequence; identical to SEQ ID NO: 6495
  GFR-binding peptide
  MOD_RES (3)..(35): Xaa is C or S

SEQ ID NO: 27661 - protein, 32 aa, Artificial Sequence; identical to SEQ ID NO: 6496
  GFR-binding peptide
  MOD_RES (14)..(15)..(16)..(17)..(18): Xaa is A or G
  MOD_RES (19)..(20)..(21)..(22): Xaa is A or G or is absent

SEQ ID NO: 27662 - protein, 33 aa, Artificial Sequence; identical to SEQ ID NO: 6498
  GFR-binding peptide
  MOD_RES (33)..(33): Xaa is C or S
  MOD_RES (14)..(15)..(16)..(17)..(18): Xaa is A or G
  MOD_RES (19)..(20)..(21)..(22): Xaa is A or G or is absent

SEQ ID NO: 27663 - protein, 41 aa, Artificial Sequence
  GFR-binding peptide
  MOD_RES (4)..(5)..(38)..(40): Xaa is C or S
GKAXXVPTKLSPISVLYIDDMGVPTYKQYEEGMSVAEXGXR

SEQ ID NO: 27664 - protein, 35 aa, Artificial Sequence; identical to SEQ ID NO: 6500
  GFR-binding peptide
  MOD_RES (2)..(3): Xaa is C or S
  MOD_RES (17)..(18)..(19)..(20)..(21): Xaa is A or G
  MOD_RES (22)..(23)..(24)..(25): Xaa is A or G or is absent

SEQ ID NO: 27665 - protein, 35 aa, Artificial Sequence
  GFR-binding peptide
  MOD_RES (2)..(3): Xaa is C or S
  MOD_RES (17)..(18)..(19)..(20)..(21): Xaa is A or G
  MOD_RES (22)..(23)..(24)..(25): Xaa is A or G or is absent
PXXVPQALEPISILYLXXXXXXXXXKFKYEMIVRS

SEQ ID NO: 27666 - protein, 36 aa, Artificial Sequence
  GFR-binding peptide
  MOD_RES (1)..(33)..(35): Xaa is C or S
XVPARLEPISILYLDAANNVVKFKYEDMVVEAXGXR

SEQ ID NO: 27667 - protein, 30 aa, Artificial Sequence
  GFR-binding peptide
VPTKLSPISILYKDKGVVTYLKYHYGMAVS

SEQ ID NO: 27668 - protein, 34 aa, Artificial Sequence
  GFR-binding peptide
  MOD_RES (34)..(34): Xaa is C or S
  MOD_RES (14)..(15)..(16)..(17)..(18): Xaa is A or G
  MOD_RES (19)..(20)..(21)..(22): Xaa is A or G or is absent
VPTKLSPISILYIXXXXXXXXXYKQYEGMAVSEX

SEQ ID NO: 27669 - protein, 42 aa, Artificial Sequence
  GFR-binding peptide
  MOD_RES (5)..(6)..(39)..(41): Xaa is C or S
VGKAXXVPTKLSPISVLYIDDMGVPTYKQYEEGMSVAEXGXR

SEQ ID NO: 27670 - protein, 37 aa, Artificial Sequence
  GFR-binding peptide
  MOD_RES (2)..(3)..(37): Xaa is C or S
  MOD_RES (17)..(18)..(19)..(20)..(21): Xaa is A or G
  MOD_RES (22)..(23)..(24)..(25): Xaa is A or G or is absent
AXXVPTKLNAISILYFXXXXXXXXXLKKYRGMAVSEX

SEQ ID NO: 27671 - protein, 35 aa, Artificial Sequence; identical to SEQ ID NO: 6511
  GFR-binding peptide
  MOD_RES (1)..(2): Xaa is C or S
  MOD_RES (16)..(17)..(18)..(19)..(20): Xaa is A or G
  MOD_RES (21)..(22)..(23)..(24): Xaa is A or G or is absent

SEQ ID NO: 27672 - protein, 41 aa, Artificial Sequence; identical to SEQ ID NO: 6512
  GFR-binding peptide
  MOD_RES (6)..(7)..(38)..(40): Xaa is C or S

SEQ ID NO: 27673 - protein, 31 aa, Artificial Sequence; identical to SEQ ID NO: 6513
  GFR-binding peptide
  MOD_RES (1)..(1): Xaa is C or S

SEQ ID NO: 27674 - protein, 33 aa, Artificial Sequence
  GFR-binding peptide
  MOD_RES (1)..(2): Xaa is C or S
XXVPARLSPISILYKDAANNVVLKYHYDMVVEA

SEQ ID NO: 27675 - protein, 39 aa, Artificial Sequence
  GFR-binding peptide
  MOD_RES (5)..(6): Xaa is C or S
  MOD_RES (20)..(21)..(22)..(23)..(24): Xaa is A or G
  MOD_RES (25)..(26)..(27)..(28): Xaa is A or G or is absent
APASXXVPARLSPISILYIXXXXXXXXXYKQYEDMVVEA

SEQ ID NO: 27676 - protein, 40 aa, Artificial Sequence
  GFR-binding peptide
  MOD_RES (5)..(6)..(38)..(40): Xaa is C or S
ASKAXXVPTKLSPISILYIDKGVVTYYKQYEGMAVSEXGX

SEQ ID NO: 27677 - protein, 39 aa, Artificial Sequence; identical to SEQ ID NO: 6520
  GFR-binding peptide
  MOD_RES (2)..(3)..(38): Xaa is C or S
  MOD_RES (17)..(18)..(19)..(20)..(21): Xaa is A or G
  MOD_RES (22)..(23)..(24)..(25): Xaa is A or G or is absent

SEQ ID NO: 27678 - protein, 31 aa, Artificial Sequence
  GFR-binding peptide
APTQLEPISVLYLDDSSNVIKFKYENMVVRA

SEQ ID NO: 27679 - protein, 37 aa, Artificial Sequence
  GFR-binding peptide
  MOD_RES (3)..(4): Xaa is C or S
  MOD_RES (18)..(19)..(20)..(21)..(22): Xaa is A or G
  MOD_RES (23)..(24)..(25)..(26): Xaa is A or G or is absent
KAXXVPTKLNAISILYFXXXXXXXXXLKKYRGMAVSE

SEQ ID NO: 27680 - protein, 39 aa, Artificial Sequence; identical to SEQ ID NO: 6521
  GFR-binding peptide
  MOD_RES (2)..(3)..(36)..(38): Xaa is C or S
  MOD_RES (17)..(18)..(19)..(20)..(21): Xaa is A or G
  MOD_RES (22)..(23)..(24)..(25): Xaa is A or G or is absent

SEQ ID NO: 27681 - protein, 37 aa, Artificial Sequence
  GFR-binding peptide
  MOD_RES (2)..(34)..(36): Xaa is C or S
TXAPTKLSPISVLYIDDSSNVIYKQYENMVVRSXGXH

SEQ ID NO: 27682 - protein, 37 aa, Artificial Sequence
  GFR-binding peptide
  MOD_RES (1)..(35)..(37): Xaa is C or S
  MOD_RES (15)..(16)..(17)..(18)..(19): Xaa is A or G
  MOD_RES (20)..(21)..(22)..(23): Xaa is A or G or is absent
XAPTKLSPISVLYIXXXXXXXXXYKQYENMVVKAXGX

SEQ ID NO: 27683 - protein, 34 aa, Artificial Sequence
  GFR-binding peptide
  MOD_RES (3)..(4): Xaa is C or S
KPXXAPTKLEPISVLYLDDSSNVIKFKYENMVVR

SEQ ID NO: 27684 - protein, 37 aa, Artificial Sequence; identical to SEQ ID NO: 6525
  GFR-binding peptide
  MOD_RES (5)..(6): Xaa is C or S

SEQ ID NO: 27685 - protein, 38 aa, Artificial Sequence
  GFR-binding peptide
  MOD_RES (1)..(35)..(37): Xaa is C or S
  MOD_RES (15)..(16)..(17)..(18)..(19): Xaa is A or G
  MOD_RES (20)..(21)..(22)..(23): Xaa is A or G or is absent
XAPTKLEPISVLYLXXXXXXXXXKFKYENMVVKAXGXH

SEQ ID NO: 27686 - protein, 33 aa, Artificial Sequence
  GFR-binding peptide
  MOD_RES (1)..(33): Xaa is C or S
XAPTQLEPISVLYLDDSSNVIKFKYENMVVRAX

SEQ ID NO: 27687 - protein, 31 aa, Artificial Sequence
  GFR-binding peptide
VPTKLNAISILYFDKGVVTYLKKYRGMAVSE

SEQ ID NO: 27688 - protein, 37 aa, Artificial Sequence
  GFR-binding peptide
  MOD_RES (5)..(6): Xaa is C or S
IPKAXXVPTELSPISMLYIDENEKVVYKQYEDMVVEG

SEQ ID NO: 27689 - protein, 37 aa, Artificial Sequence; identical to SEQ ID NO: 6526
  GFR-binding peptide
  MOD_RES (6)..(7): Xaa is C or S

SEQ ID NO: 27690 - protein, 37 aa, Artificial Sequence
  GFR-binding peptide
  MOD_RES (4)..(5)..(37): Xaa is C or S
PKPXXAPTKLEPISVLYLDDSSNVIKFKYENMVVRSX

SEQ ID NO: 27691 - protein, 39 aa, Artificial Sequence
  GFR-binding peptide
  MOD_RES (4)..(5)..(39): Xaa is C or S
  MOD_RES (19)..(20)..(21)..(22)..(23): Xaa is A or G
  MOD_RES (24)..(25)..(26)..(27): Xaa is A or G or is absent
PKAXXAPTKLEPISVLYLXXXXXXXXXKFKYENMVVKAX

SEQ ID NO: 27692 - protein, 43 aa, Artificial Sequence; identical to SEQ ID NO: 6527
  GFR-binding peptide
  MOD_RES (6)..(7)..(40)..(42): Xaa is C or S
  MOD_RES (21)..(22)..(23)..(24)..(25): Xaa is A or G
  MOD_RES (26)..(27)..(28)..(29): Xaa is A or G or is absent

SEQ ID NO: 27693 - protein, 39 aa, Artificial Sequence; identical to SEQ ID NO: 6532
  GFR-binding peptide
  MOD_RES (5)..(6)..(38): Xaa is C or S

SEQ ID NO: 27694 - protein, 39 aa, Artificial Sequence; identical to SEQ ID NO: 6533
  GFR-binding peptide
  MOD_RES (1)..(2)..(36)..(38): Xaa is C or S
  MOD_RES (16)..(17)..(18)..(19)..(20): Xaa is A or G
  MOD_RES (21)..(22)..(23)..(24): Xaa is A or G or is absent

SEQ ID NO: 27695 - protein, 39 aa, Artificial Sequence
  GFR-binding peptide
  MOD_RES (3)..(4)..(38): Xaa is C or S
  MOD_RES (18)..(19)..(20)..(21)..(22): Xaa is A or G
  MOD_RES (23)..(24)..(25)..(26): Xaa is A or G or is absent
KAXXVPTELEPISMLYLXXXXXXXXXKFKYEDMVVEGXG

SEQ ID NO: 27696 - protein, 37 aa, Artificial Sequence; identical to SEQ ID NO: 6534
  GFR-binding peptide
  MOD_RES (1)..(2)..(37): Xaa is C or S
  MOD_RES (16)..(17)..(18)..(19)..(20): Xaa is A or G
  MOD_RES (21)..(22)..(23)..(24): Xaa is A or G or is absent

SEQ ID NO: 27697 - protein, 39 aa, Artificial Sequence; identical to SEQ ID NO: 6536
  GFR-binding peptide
  MOD_RES (6)..(6): Xaa is C or S
  MOD_RES (20)..(21)..(22)..(23)..(24): Xaa is A or G
  MOD_RES (25)..(26)..(27)..(28): Xaa is A or G or is absent

SEQ ID NO: 27698 - protein, 35 aa, Artificial Sequence
  GFR-binding peptide
  MOD_RES (4)..(5): Xaa is C or S
PKAXXVPTELEPISMLYLDEYDKVVKFKYEEMVVE

SEQ ID NO: 27699 - protein, 39 aa, Artificial Sequence
  GFR-binding peptide
  MOD_RES (7)..(7): Xaa is C or S
  MOD_RES (21)..(22)..(23)..(24)..(25): Xaa is A or G
  MOD_RES (26)..(27)..(28)..(29): Xaa is A or G or is absent
HVTKPTXAPTKLSPISVLYIXXXXXXXXXYKQYENMVVR

SEQ ID NO: 27700 - protein, 38 aa, Artificial Sequence
  GFR-binding peptide
  MOD_RES (3)..(4)..(38): Xaa is C or S
  MOD_RES (18)..(19)..(20)..(21)..(22): Xaa is A or G
  MOD_RES (23)..(24)..(25)..(26): Xaa is A or G or is absent
KAXXVPTELEPISMLYLXXXXXXXXXKFKYEDMVVEGX

SEQ ID NO: 27701 - protein, 38 aa, Artificial Sequence; identical to SEQ ID NO: 6541
  GFR-binding peptide
  MOD_RES (1)..(2)..(36)..(38): Xaa is C or S
  MOD_RES (16)..(17)..(18)..(19)..(20): Xaa is A or G
  MOD_RES (21)..(22)..(23)..(24): Xaa is A or G or is absent

SEQ ID NO: 27702 - protein, 35 aa, Artificial Sequence; identical to SEQ ID NO: 6542
  GFR-binding peptide
  MOD_RES (1)..(32)..(34): Xaa is C or S

SEQ ID NO: 27703 - protein, 38 aa, Artificial Sequence; identical to SEQ ID NO: 6545
  GFR-binding peptide
  MOD_RES (1)..(2)..(36)..(38): Xaa is C or S
  MOD_RES (16)..(17)..(18)..(19)..(20): Xaa is A or G
  MOD_RES (21)..(22)..(23)..(24): Xaa is A or G or is absent

SEQ ID NO: 27704 - protein, 41 aa, Artificial Sequence
  GFR-binding peptide
  MOD_RES (4)..(5)..(39)..(41): Xaa is C or S
  MOD_RES (19)..(20)..(21)..(22)..(23): Xaa is A or G
  MOD_RES (24)..(25)..(26)..(27): Xaa is A or G or is absent
PASXXVPARLEPISILYLXXXXXXXXXKFKYEDMVVEAXGX

SEQ ID NO: 27705 - protein, 37 aa, Artificial Sequence; identical to SEQ ID NO: 6546
  GFR-binding peptide
  MOD_RES (4)..(5): Xaa is C or S
  MOD_RES (19)..(20)..(21)..(22)..(23): Xaa is A or G
  MOD_RES (24)..(25)..(26)..(27): Xaa is A or G or is absent

SEQ ID NO: 27706 - protein, 36 aa, Artificial Sequence; identical to SEQ ID NO: 6547
  GFR-binding peptide
  MOD_RES (1)..(35): Xaa is C or S
  MOD_RES (15)..(16)..(17)..(18)..(19): Xaa is A or G
  MOD_RES (20)..(21)..(22)..(23): Xaa is A or G or is absent

SEQ ID NO: 27707 - protein, 36 aa, Artificial Sequence
  GFR-binding peptide
  MOD_RES (1)..(2)..(36): Xaa is C or S
  MOD_RES (16)..(17)..(18)..(19)..(20): Xaa is A or G
  MOD_RES (21)..(22)..(23)..(24): Xaa is A or G or is absent
XXAPTQLSPISVLYIXXXXXXXXXYKQYENMVVRAX

SEQ ID NO: 27708 - protein, 37 aa, Artificial Sequence
  GFR-binding peptide
  MOD_RES (1)..(2)..(36): Xaa is C or S
  MOD_RES (16)..(17)..(18)..(19)..(20): Xaa is A or G
  MOD_RES (21)..(22)..(23)..(24): Xaa is A or G or is absent
XXVPTELEPISMLYLXXXXXXXXXKFKYEEMVVEGXG

SEQ ID NO: 27709 - protein, 42 aa, Artificial Sequence
  GFR-binding peptide
  MOD_RES (4)..(5)..(39)..(41): Xaa is C or S
  MOD_RES (19)..(20)..(21)..(22)..(23): Xaa is A or G
  MOD_RES (24)..(25)..(26)..(27): Xaa is A or G or is absent
PKPXXAPTKLSPISVLYIXXXXXXXXXYKQYENMVVRSXGXH

SEQ ID NO: 27710 - protein, 39 aa, Artificial Sequence
  GFR-binding peptide
  MOD_RES (6)..(7): Xaa is C or S
  MOD_RES (21)..(22)..(23)..(24)..(25): Xaa is A or G
  MOD_RES (26)..(27)..(28)..(29): Xaa is A or G or is absent
AAPASXXVPARLNAISILYFXXXXXXXXXLKKYRDMVVE

SEQ ID NO: 27711 - protein, 31 aa, Artificial Sequence; identical to SEQ ID NO: 6553
  GFR-binding peptide
  MOD_RES (1)..(1): Xaa is C or S

SEQ ID NO: 27712 - protein, 35 aa, Artificial Sequence
  GFR-binding peptide
  MOD_RES (1)..(35): Xaa is C or S
  MOD_RES (15)..(16)..(17)..(18)..(19): Xaa is A or G
  MOD_RES (20)..(21)..(22)..(23): Xaa is A or G or is absent
XAPTKLEPISVLYLXXXXXXXXXKFKYENMVVKAX

SEQ ID NO: 27713 - protein, 38 aa, Artificial Sequence; identical to SEQ ID NO: 6554
  GFR-binding peptide
  MOD_RES (3)..(4): Xaa is C or S
  MOD_RES (18)..(19)..(20)..(21)..(22): Xaa is A or G
  MOD_RES (23)..(24)..(25)..(26): Xaa is A or G or is absent

SEQ ID NO: 27714 - protein, 42 aa, Artificial Sequence
  GFR-binding peptide
  MOD_RES (5)..(6)..(40)..(42): Xaa is C or S
  MOD_RES (20)..(21)..(22)..(23)..(24): Xaa is A or G
  MOD_RES (25)..(26)..(27)..(28): Xaa is A or G or is absent
VPKPXXAPTQLEPISVLYLXXXXXXXXXKFKYENMVVRAXGX

SEQ ID NO: 27715 - protein, 38 aa, Artificial Sequence; identical to SEQ ID NO: 6555
  GFR-binding peptide
  MOD_RES (2)..(3)..(37): Xaa is C or S
  MOD_RES (17)..(18)..(19)..(20)..(21): Xaa is A or G
  MOD_RES (22)..(23)..(24)..(25): Xaa is A or G or is absent

SEQ ID NO: 27716 - protein, 38 aa, Artificial Sequence; identical to SEQ ID NO: 6556
  GFR-binding peptide
  MOD_RES (1)..(35)..(37): Xaa is C or S
  MOD_RES (15)..(16)..(17)..(18)..(19): Xaa is A or G
  MOD_RES (20)..(21)..(22)..(23): Xaa is A or G or is absent

SEQ ID NO: 27717 - protein, 35 aa, Artificial Sequence
  GFR-binding peptide
  MOD_RES (32)..(34): Xaa is C or S
VPARLEPISILYLDAANNVVKFKYEDMVVEAXGXR

SEQ ID NO: 27718 - protein, 40 aa, Artificial Sequence
  GFR-binding peptide
  MOD_RES (5)..(6)..(38)..(40): Xaa is C or S
APASXXVPARLSPISILYKDAANNVVLKYHYDMVVEAXGX

SEQ ID NO: 27719 - protein, 37 aa, Artificial Sequence
  GFR-binding peptide
  MOD_RES (34)..(36): Xaa is C or S
  MOD_RES (14)..(15)..(16)..(17)..(18): Xaa is A or G
  MOD_RES (19)..(20)..(21)..(22): Xaa is A or G or is absent
APTKLEPISVLYLXXXXXXXXXKFKYENMVVKAXGXH

SEQ ID NO: 27720 - protein, 37 aa, Artificial Sequence
  GFR-binding peptide
  MOD_RES (2)..(3)..(37): Xaa is C or S
  MOD_RES (17)..(18)..(19)..(20)..(21): Xaa is A or G
  MOD_RES (22)..(23)..(24)..(25): Xaa is A or G or is absent
AXXVPTELSPISMLYIXXXXXXXXXYKQYEEMVVEGX

SEQ ID NO: 27721 - protein, 37 aa, Artificial Sequence
  GFR-binding peptide
  MOD_RES (4)..(5): Xaa is C or S
  MOD_RES (19)..(20)..(21)..(22)..(23): Xaa is A or G
  MOD_RES (24)..(25)..(26)..(27): Xaa is A or G or is absent
PKPXXAPTKLEPISVLYLXXXXXXXXXKFKYENMVVR

SEQ ID NO: 27722 - protein, 36 aa, Artificial Sequence; identical to SEQ ID NO: 6564
  GFR-binding peptide
  MOD_RES (2)..(34)..(36): Xaa is C or S

SEQ ID NO: 27723 - protein, 38 aa, Artificial Sequence; identical to SEQ ID NO: 6566
  GFR-binding peptide
  MOD_RES (4)..(5): Xaa is C or S
  MOD_RES (19)..(20)..(21)..(22)..(23): Xaa is A or G
  MOD_RES (24)..(25)..(26)..(27): Xaa is A or G or is absent

SEQ ID NO: 27724 - protein, 38 aa, Artificial Sequence; identical to SEQ ID NO: 6567
  GFR-binding peptide
  MOD_RES (5)..(6)..(38): Xaa is C or S

SEQ ID NO: 27725 - protein, 38 aa, Artificial Sequence; identical to SEQ ID NO: 6568
  GFR-binding peptide
  MOD_RES (1)..(2)..(35)..(37): Xaa is C or S
  MOD_RES (16)..(17)..(18)..(19)..(20): Xaa is A or G
  MOD_RES (21)..(22)..(23)..(24): Xaa is A or G or is absent

SEQ ID NO: 27726 - protein, 35 aa, Artificial Sequence
  GFR-binding peptide
  MOD_RES (3)..(4): Xaa is C or S
KPXXAPTKLEPISVLYLDDSSNVIKFKYENMVVRS

SEQ ID NO: 27727 - protein, 33 aa, Artificial Sequence
  GFR-binding peptide
  MOD_RES (1)..(1): Xaa is C or S
  MOD_RES (15)..(16)..(17)..(18)..(19): Xaa is A or G
  MOD_RES (20)..(21)..(22)..(23): Xaa is A or G or is absent
XVPTKLEPISILYLXXXXXXXXXKFKYEGMAVS

SEQ ID NO: 27728 - protein, 40 aa, Artificial Sequence
  GFR-binding peptide
  MOD_RES (3)..(4)..(39): Xaa is C or S
  MOD_RES (18)..(19)..(20)..(21)..(22): Xaa is A or G
  MOD_RES (23)..(24)..(25)..(26): Xaa is A or G or is absent
KAXXVPTKLEPISVLYLXXXXXXXXXKFKYEEGMSVAEXG

SEQ ID NO: 27729 - protein, 38 aa, Artificial Sequence
  GFR-binding peptide
  MOD_RES (4)..(5)..(37): Xaa is C or S
PASXXVPARLEPISILYLDAANNVVKFKYEDMVVEAXG

SEQ ID NO: 27730 - protein, 32 aa, Artificial Sequence; identical to SEQ ID NO: 6571
  GFR-binding peptide
  MOD_RES (1)..(2): Xaa is C or S

SEQ ID NO: 27731 - protein, 32 aa, Artificial Sequence
  GFR-binding peptide
  MOD_RES (1)..(2): Xaa is C or S
XXVPQALEPISILYLVGRKPKVKFKYEMIVRS

SEQ ID NO: 27732 - protein, 34 aa, Artificial Sequence
  GFR-binding peptide
  MOD_RES (1)..(34): Xaa is C or S
  MOD_RES (15)..(16)..(17)..(18)..(19): Xaa is A or G
  MOD_RES (20)..(21)..(22)..(23): Xaa is A or G or is absent
XVPQDLEPISILYLXXXXXXXXXKFKYEMVVKSX

SEQ ID NO: 27733 - protein, 38 aa, Artificial Sequence
  GFR-binding peptide
  MOD_RES (2)..(3)..(35)..(37): Xaa is C or S
AXXVPTKLSPISILYKDKGVVTYLKYHYGMAVSEXGXR

SEQ ID NO: 27734 - protein, 41 aa, Artificial Sequence
  GFR-binding peptide
  MOD_RES (2)..(3)..(38)..(40): Xaa is C or S
  MOD_RES (17)..(18)..(19)..(20)..(21): Xaa is A or G
  MOD_RES (22)..(23)..(24)..(25): Xaa is A or G or is absent
AXXVPTKLEPISVLYLXXXXXXXXXKFKYEEGMSVAEXGXR

SEQ ID NO: 27735 - protein, 43 aa, Artificial Sequence
  GFR-binding peptide
  MOD_RES (5)..(6)..(40)..(42): Xaa is C or S
  MOD_RES (20)..(21)..(22)..(23)..(24): Xaa is A or G
  MOD_RES (25)..(26)..(27)..(28): Xaa is A or G or is absent
APASXXVPARLNAISILYFXXXXXXXXXLKKYRDMVVEAXGXR

SEQ ID NO: 27736 - protein, 36 aa, Artificial Sequence; identical to SEQ ID NO: 6572
  GFR-binding peptide
  MOD_RES (4)..(5): Xaa is C or S

SEQ ID NO: 27737 - protein, 43 aa, Artificial Sequence; identical to SEQ ID NO: 6573
  GFR-binding peptide
  MOD_RES (5)..(6)..(41)..(43): Xaa is C or S
  MOD_RES (20)..(21)..(22)..(23)..(24): Xaa is A or G
  MOD_RES (25)..(26)..(27)..(28): Xaa is A or G or is absent

SEQ ID NO: 27738 - protein, 41 aa, Artificial Sequence
  GFR-binding peptide
  MOD_RES (4)..(5)..(38)..(40): Xaa is C or S
GKAXXVPTKLEPISVLYLDDMGVPTKFKYEEGMSVAEXGXR

SEQ ID NO: 27739 - protein, 43 aa, Artificial Sequence
  GFR-binding peptide
  MOD_RES (6)..(7)..(41)..(43): Xaa is C or S
  MOD_RES (21)..(22)..(23)..(24)..(25): Xaa is A or G
  MOD_RES (26)..(27)..(28)..(29): Xaa is A or G or is absent
KIPKAXXVPTELEPISMLYLXXXXXXXXXKFKYEDMVVEGXGX

SEQ ID NO: 27740 - protein, 35 aa, Artificial Sequence; identical to SEQ ID NO: 6577
  GFR-binding peptide
  MOD_RES (2)..(3): Xaa is C or S
  MOD_RES (17)..(18)..(19)..(20)..(21): Xaa is A or G
  MOD_RES (22)..(23)..(24)..(25): Xaa is A or G or is absent

SEQ ID NO: 27741 - protein, 42 aa, Artificial Sequence
  GFR-binding peptide
  MOD_RES (4)..(5)..(40)..(42): Xaa is C or S
  MOD_RES (19)..(20)..(21)..(22)..(23): Xaa is A or G
  MOD_RES (24)..(25)..(26)..(27): Xaa is A or G or is absent
GKAXXVPTKLEPISVLYLXXXXXXXXXKFKYEEGMSVAEXGX

SEQ ID NO: 27742 - protein, 34 aa, Artificial Sequence; identical to SEQ ID NO: 6579
  GFR-binding peptide
  MOD_RES (1)..(2)..(33): Xaa is C or S

SEQ ID NO: 27743 - protein, 30 aa, Artificial Sequence; identical to SEQ ID NO: 6580
  GFR-binding peptide

SEQ ID NO: 27744 - protein, 37 aa, Artificial Sequence
  GFR-binding peptide
  MOD_RES (1)..(2)..(35)..(37): Xaa is C or S
  MOD_RES (16)..(17)..(18)..(19)..(20): Xaa is A or G
  MOD_RES (21)..(22)..(23)..(24): Xaa is A or G or is absent
XXVPQDLEPISILYLXXXXXXXXXKFKYEMVVKSXKX

SEQ ID NO: 27745 - protein, 35 aa, Artificial Sequence
  GFR-binding peptide
  MOD_RES (34)..(34): Xaa is C or S
  MOD_RES (14)..(15)..(16)..(17)..(18): Xaa is A or G
  MOD_RES (19)..(20)..(21)..(22): Xaa is A or G or is absent
APTQLEPISVLYLXXXXXXXXXKFKYENMVVRAXG

SEQ ID NO: 27746 - protein, 35 aa, Artificial Sequence
  GFR-binding peptide
  MOD_RES (3)..(4)..(35): Xaa is C or S
SPXXVPQDLSPISILYIVGRTPKVYKQYEMVVKSX

SEQ ID NO: 27747 - protein, 40 aa, Artificial Sequence
  GFR-binding peptide
  MOD_RES (3)..(4)..(38)..(40): Xaa is C or S
  MOD_RES (18)..(19)..(20)..(21)..(22): Xaa is A or G
  MOD_RES (23)..(24)..(25)..(26): Xaa is A or G or is absent
KAXXVPTELEPISMLYLXXXXXXXXXKFKYEEMVVEGXGX

SEQ ID NO: 27748 - protein, 37 aa, Artificial Sequence; identical to SEQ ID NO: 6584
  GFR-binding peptide
  MOD_RES (1)..(2)..(35)..(37): Xaa is C or S
  MOD_RES (16)..(17)..(18)..(19)..(20): Xaa is A or G
  MOD_RES (21)..(22)..(23)..(24): Xaa is A or G or is absent

SEQ ID NO: 27749 - protein, 43 aa, Artificial Sequence
  GFR-binding peptide
  MOD_RES (5)..(6)..(40)..(42): Xaa is C or S
  MOD_RES (20)..(21)..(22)..(23)..(24): Xaa is A or G
  MOD_RES (25)..(26)..(27)..(28): Xaa is A or G or is absent
APASXXVPARLEPISILYLXXXXXXXXXKFKYEDMVVEAXGXR

SEQ ID NO: 27750 - protein, 34 aa, Artificial Sequence
  GFR-binding peptide
  MOD_RES (2)..(3): Xaa is C or S
AXXVPTKLSPISILYIDKGVVTYYKQYEGMAVSE

SEQ ID NO: 27751 - protein, 37 aa, Artificial Sequence; identical to SEQ ID NO: 6591
  GFR-binding peptide
  MOD_RES (4)..(5): Xaa is C or S
  MOD_RES (19)..(20)..(21)..(22)..(23): Xaa is A or G
  MOD_RES (24)..(25)..(26)..(27): Xaa is A or G or is absent

SEQ ID NO: 27752 - protein, 33 aa, Artificial Sequence
  GFR-binding peptide
  MOD_RES (1)..(32): Xaa is C or S
XVPQALSPISILYIVGRKPKVYKQYEMIVRSXK

SEQ ID NO: 27753 - protein, 34 aa, Artificial Sequence; identical to SEQ ID NO: 6592
  GFR-binding peptide
  MOD_RES (4)..(4): Xaa is C or S

SEQ ID NO: 27754 - protein, 37 aa, Artificial Sequence
  GFR-binding peptide
  MOD_RES (5)..(6)..(37): Xaa is C or S
SAAPXXVPQALEPISILYLVGRKPKVKFKYEMIVRSX

SEQ ID NO: 27755 - protein, 34 aa, Artificial Sequence
  GFR-binding peptide
  MOD_RES (32)..(34): Xaa is C or S
APTQLEPISVLYLDDSSNVIKFKYENMVVRAXGX

SEQ ID NO: 27756 - protein, 43 aa, Artificial Sequence
  GFR-binding peptide
  MOD_RES (6)..(7)..(41)..(43): Xaa is C or S
  MOD_RES (21)..(22)..(23)..(24)..(25): Xaa is A or G
  MOD_RES (26)..(27)..(28)..(29): Xaa is A or G or is absent
AAPASXXVPARLEPISILYLXXXXXXXXXKFKYEDMVVEAXGX

SEQ ID NO: 27757 - protein, 39 aa, Artificial Sequence; identical to SEQ ID NO: 6599
  GFR-binding peptide
  MOD_RES (2)..(3)..(36)..(38): Xaa is C or S
  MOD_RES (17)..(18)..(19)..(20)..(21): Xaa is A or G
  MOD_RES (22)..(23)..(24)..(25): Xaa is A or G or is absent

SEQ ID NO: 27758 - protein, 39 aa, Artificial Sequence
  GFR-binding peptide
  MOD_RES (6)..(7): Xaa is C or S
  MOD_RES (21)..(22)..(23)..(24)..(25): Xaa is A or G
  MOD_RES (26)..(27)..(28)..(29): Xaa is A or G or is absent
ASASPXXVPQDLEPISILYLXXXXXXXXXKFKYEMVVKS

SEQ ID NO: 27759 - protein, 40 aa, Artificial Sequence
  GFR-binding peptide
  MOD_RES (6)..(7)..(38)..(40): Xaa is C or S
ASASPXXVPQDLEPISILYLVGRTPKVKFKYEMVVKSXKX

SEQ ID NO: 27760 - protein, 37 aa, Artificial Sequence
  GFR-binding peptide
  MOD_RES (4)..(5): Xaa is C or S
  MOD_RES (19)..(20)..(21)..(22)..(23): Xaa is A or G
  MOD_RES (24)..(25)..(26)..(27): Xaa is A or G or is absent
AAPXXVPQALSPISILYIXXXXXXXXXYKQYEMIVRS

SEQ ID NO: 27761 - protein, 36 aa, Artificial Sequence; identical to SEQ ID NO: 6605
  GFR-binding peptide
  MOD_RES (1)..(2)..(34)..(36): Xaa is C or S

SEQ ID NO: 27762 - protein, 35 aa, Artificial Sequence
  GFR-binding peptide
  MOD_RES (1)..(33)..(35): Xaa is C or S
XVPTKLNAISILYFDKGVVTYLKKYRGMAVSEXGX

SEQ ID NO: 27763 - protein, 30 aa, Artificial Sequence
  GFR-binding peptide
VPARLSPISILYKDAANNVVLKYHYDMVVE

SEQ ID NO: 27764 - protein, 35 aa, Artificial Sequence
  GFR-binding peptide
  MOD_RES (2)..(3): Xaa is C or S
AXXVPTKLEPISVLYLDDMGVPTKFKYEEGMSVAE

SEQ ID NO: 27765 - protein, 36 aa, Artificial Sequence
  GFR-binding peptide
  MOD_RES (5)..(6): Xaa is C or S
IPKAXXVPTELEPISMLYLDENEKVVKFKYEDMVVE

SEQ ID NO: 27766 - protein, 35 aa, Artificial Sequence
  GFR-binding peptide
  MOD_RES (34)..(34): Xaa is C or S
  MOD_RES (14)..(15)..(16)..(17)..(18): Xaa is A or G
  MOD_RES (19)..(20)..(21)..(22): Xaa is A or G or is absent
VPARLSPISILYKXXXXXXXXXLKYHYDMVVEAXG

SEQ ID NO: 27767 - protein, 35 aa, Artificial Sequence; identical to SEQ ID NO: 6615
  GFR-binding peptide
  MOD_RES (2)..(3)..(35): Xaa is C or S

SEQ ID NO: 27768 - protein, 31 aa, Artificial Sequence; identical to SEQ ID NO: 6616
  GFR-binding peptide
  MOD_RES (31)..(31): Xaa is C or S

SEQ ID NO: 27769 - protein, 38 aa, Artificial Sequence
  GFR-binding peptide
  MOD_RES (2)..(36)..(38): Xaa is C or S
  MOD_RES (16)..(17)..(18)..(19)..(20): Xaa is A or G
  MOD_RES (21)..(22)..(23)..(24): Xaa is A or G or is absent
TXAPTKLEPISVLYLXXXXXXXXXKFKYENMVVRSXGX

SEQ ID NO: 27770 - protein, 36 aa, Artificial Sequence
  GFR-binding peptide
  MOD_RES (1)..(2)..(34)..(36): Xaa is C or S
XXVPTELEPISMLYLDENEKVVKFKYEDMVVEGXGX

SEQ ID NO: 27771 - protein, 40 aa, Artificial Sequence
  GFR-binding peptide
  MOD_RES (3)..(4)..(38)..(40): Xaa is C or S
  MOD_RES (18)..(19)..(20)..(21)..(22): Xaa is A or G
  MOD_RES (23)..(24)..(25)..(26): Xaa is A or G or is absent
KAXXVPTELEPISMLYLXXXXXXXXXKFKYEDMVVEGXGX

SEQ ID NO: 27772 - protein, 34 aa, Artificial Sequence
  GFR-binding peptide
  MOD_RES (3)..(4): Xaa is C or S
KAXXVPTELSPISMLYIDEYDKVVYKQYEEMVVE

SEQ ID NO: 27773 - protein, 41 aa, Artificial Sequence; identical to SEQ ID NO: 6621
  GFR-binding peptide
  MOD_RES (4)..(5)..(38)..(40): Xaa is C or S
  MOD_RES (19)..(20)..(21)..(22)..(23): Xaa is A or G
  MOD_RES (24)..(25)..(26)..(27): Xaa is A or G or is absent

SEQ ID NO: 27774 - protein, 39 aa, Artificial Sequence; identical to SEQ ID NO: 6622
  GFR-binding peptide
  MOD_RES (4)..(5)..(36)..(38): Xaa is C or S

SEQ ID NO: 27775 - protein, 33 aa, Artificial Sequence
  GFR-binding peptide
  MOD_RES (31)..(33): Xaa is C or S
VPQALEPISILYLVGRKPKVKFKYEMIVRSXKX

SEQ ID NO: 27776 - protein, 37 aa, Artificial Sequence
  GFR-binding peptide
  MOD_RES (5)..(6)..(37): Xaa is C or S
SAAPXXVPQALSPISILYIVGRKPKVYKQYEMIVRSX

SEQ ID NO: 27777 - protein, 37 aa, Artificial Sequence; identical to SEQ ID NO: 6625
  GFR-binding peptide
  MOD_RES (2)..(3)..(36): Xaa is C or S

SEQ ID NO: 27778 - protein, 40 aa, Artificial Sequence
  GFR-binding peptide
  MOD_RES (3)..(4)..(38)..(40): Xaa is C or S
  MOD_RES (18)..(19)..(20)..(21)..(22): Xaa is A or G
  MOD_RES (23)..(24)..(25)..(26): Xaa is A or G or is absent
KAXXVPTKLEPISILYLXXXXXXXXXKFKYEGMAVSEXGX

SEQ ID NO: 27779 - protein, 33 aa, Artificial Sequence
  GFR-binding peptide
  MOD_RES (1)..(33): Xaa is C or S
XVPTELEPISMLYLDENEKVVKFKYEDMVVEGX

SEQ ID NO: 27780 - protein, 35 aa, Artificial Sequence
  GFR-binding peptide
  MOD_RES (4)..(5): Xaa is C or S
PKPXXAPTQLEPISVLYLDDSSNVIKFKYENMVVR

SEQ ID NO: 27781 - protein, 43 aa, Artificial Sequence
  GFR-binding peptide
  MOD_RES (6)..(7)..(41)..(43): Xaa is C or S
  MOD_RES (21)..(22)..(23)..(24)..(25): Xaa is A or G
  MOD_RES (26)..(27)..(28)..(29): Xaa is A or G or is absent
KASKAXXVPTKLSPISILYKXXXXXXXXXLKYHYGMAVSEXGX

SEQ ID NO: 27782 - protein, 40 aa, Artificial Sequence; identical to SEQ ID NO: 6626
  GFR-binding peptide
  MOD_RES (3)..(4)..(38)..(40): Xaa is C or S
  MOD_RES (18)..(19)..(20)..(21)..(22): Xaa is A or G
  MOD_RES (23)..(24)..(25)..(26): Xaa is A or G or is absent

SEQ ID NO: 27783 - protein, 44 aa, Artificial Sequence
  GFR-binding peptide
  MOD_RES (5)..(6)..(41)..(43): Xaa is C or S
  MOD_RES (20)..(21)..(22)..(23)..(24): Xaa is A or G
  MOD_RES (25)..(26)..(27)..(28): Xaa is A or G or is absent
VGKAXXVPTKLEPISVLYLXXXXXXXXXKFKYEEGMSVAEXGXR

SEQ ID NO: 27784 - protein, 43 aa, Artificial Sequence
  GFR-binding peptide
  MOD_RES (5)..(6)..(40)..(42): Xaa is C or S
  MOD_RES (20)..(21)..(22)..(23)..(24): Xaa is A or G
  MOD_RES (25)..(26)..(27)..(28): Xaa is A or G or is absent
IPKAXXVPTELSPISMLYIXXXXXXXXXYKQYEDMVVEGXGXR

SEQ ID NO: 27785 - protein, 42 aa, Artificial Sequence
  GFR-binding peptide
  MOD_RES (4)..(5)..(39)..(41): Xaa is C or S
  MOD_RES (19)..(20)..(21)..(22)..(23): Xaa is A or G
  MOD_RES (24)..(25)..(26)..(27): Xaa is A or G or is absent
PKPXXAPTQLSPISVLYIXXXXXXXXXYKQYENMVVRAXGXH

SEQ ID NO: 27786 - protein, 37 aa, Artificial Sequence
  GFR-binding peptide
  MOD_RES (3)..(4)..(37): Xaa is C or S
  MOD_RES (18)..(19)..(20)..(21)..(22): Xaa is A or G
  MOD_RES (23)..(24)..(25)..(26): Xaa is A or G or is absent
SPXXVSQDLSPISILYIXXXXXXXXXYKQYEMIVKSX

SEQ ID NO: 27787 - protein, 34 aa, Artificial Sequence
  GFR-binding peptide
  MOD_RES (1)..(2): Xaa is C or S
  MOD_RES (16)..(17)..(18)..(19)..(20): Xaa is A or G
  MOD_RES (21)..(22)..(23)..(24): Xaa is A or G or is absent
XXVPQALSPISILYIXXXXXXXXXYKQYEMIVRS

SEQ ID NO: 27788 - protein, 37 aa, Artificial Sequence; identical to SEQ ID NO: 6628
  GFR-binding peptide
  MOD_RES (2)..(3)..(37): Xaa is C or S
  MOD_RES (17)..(18)..(19)..(20)..(21): Xaa is A or G
  MOD_RES (22)..(23)..(24)..(25): Xaa is A or G or is absent

SEQ ID NO: 27789 - protein, 37 aa, Artificial Sequence
  GFR-binding peptide
  MOD_RES (3)..(4): Xaa is C or S
  MOD_RES (18)..(19)..(20)..(21)..(22): Xaa is A or G
  MOD_RES (23)..(24)..(25)..(26): Xaa is A or G or is absent
KPXXAPTQLSPISVLYIXXXXXXXXXYKQYENMVVRA

SEQ ID NO: 27790 - protein, 40 aa, Artificial Sequence; identical to SEQ ID NO: 6630
  GFR-binding peptide
  MOD_RES (4)..(38)..(40): Xaa is C or S
  MOD_RES (18)..(19)..(20)..(21)..(22): Xaa is A or G
  MOD_RES (23)..(24)..(25)..(26): Xaa is A or G or is absent

SEQ ID NO: 27791 - protein, 38 aa, Artificial Sequence
  GFR-binding peptide
  MOD_RES (6)..(7)..(38): Xaa is C or S
ASASPXXVSQDLSPISILYIIGKTPKIYKQYEMIVKSX

SEQ ID NO: 27792 - protein, 34 aa, Artificial Sequence
  GFR-binding peptide
  MOD_RES (1)..(2)..(33): Xaa is C or S
XXVPQALSPISILYIVGRKPKVYKQYEMIVRSXK

SEQ ID NO: 27793 - protein, 41 aa, Artificial Sequence
  GFR-binding peptide
  MOD_RES (6)..(7)..(41): Xaa is C or S
  MOD_RES (21)..(22)..(23)..(24)..(25): Xaa is A or G
  MOD_RES (26)..(27)..(28)..(29): Xaa is A or G or is absent
YVPKPXXAPTKLEPISVLYLXXXXXXXXXKFKYENMVVRSX

SEQ ID NO: 27794 - protein, 43 aa, Artificial Sequence
  GFR-binding peptide
  MOD_RES (5)..(6)..(40)..(42): Xaa is C or S
  MOD_RES (20)..(21)..(22)..(23)..(24): Xaa is A or G
  MOD_RES (25)..(26)..(27)..(28): Xaa is A or G or is absent
VPKPXXAPTKLSPISVLYIXXXXXXXXXYKQYENMVVRSXGXH

SEQ ID NO: 27795 - protein, 37 aa, Artificial Sequence
  GFR-binding peptide
  MOD_RES (4)..(5): Xaa is C or S
  MOD_RES (19)..(20)..(21)..(22)..(23): Xaa is A or G
  MOD_RES (24)..(25)..(26)..(27): Xaa is A or G or is absent
PKAXXVPTELEPISMLYLXXXXXXXXXKFKYEDMVVE

SEQ ID NO: 27796 - protein, 37 aa, Artificial Sequence; identical to SEQ ID NO: 6632
  GFR-binding peptide
  MOD_RES (2)..(3)..(37): Xaa is C or S
  MOD_RES (17)..(18)..(19)..(20)..(21): Xaa is A or G
  MOD_RES (22)..(23)..(24)..(25): Xaa is A or G or is absent

SEQ ID NO: 27797 - protein, 34 aa, Artificial Sequence
  GFR-binding peptide
  MOD_RES (1)..(1): Xaa is C or S
  MOD_RES (15)..(16)..(17)..(18)..(19): Xaa is A or G
  MOD_RES (20)..(21)..(22)..(23): Xaa is A or G or is absent
XAPTKLEPISVLYLXXXXXXXXXKFKYENMVVRS

SEQ ID NO: 27798 - protein, 39 aa, Artificial Sequence
  GFR-binding peptide
  MOD_RES (3)..(4)..(36)..(38): Xaa is C or S
KPXXAPTQLEPISVLYLDDSSNVIKFKYENMVVRAXGXH

SEQ ID NO: 27799 - protein, 35 aa, Artificial Sequence
  GFR-binding peptide
  MOD_RES (1)..(2)..(34): Xaa is C or S
XXVPTELEPISMLYLDEYDKVVKFKYEEMVVEGXG

SEQ ID NO: 27800 - protein, 41 aa, Artificial Sequence; identical to SEQ ID NO: 6634
  GFR-binding peptide
  MOD_RES (6)..(7)..(39)..(41): Xaa is C or S

SEQ ID NO: 27801 - protein, 38 aa, Artificial Sequence
  GFR-binding peptide
  MOD_RES (4)..(5)..(36)..(38): Xaa is C or S
ASPXXVSQDLEPISILYLIGKTPKIKFKYEMIVKSXKX

SEQ ID NO: 27802 - protein, 40 aa, Artificial Sequence; identical to SEQ ID NO: 6635
  GFR-binding peptide
  MOD_RES (6)..(7)..(40): Xaa is C or S
  MOD_RES (21)..(22)..(23)..(24)..(25): Xaa is A or G
  MOD_RES (26)..(27)..(28)..(29): Xaa is A or G or is absent

SEQ ID NO: 27803 - protein, 33 aa, Artificial Sequence
  GFR-binding peptide
  MOD_RES (14)..(15)..(16)..(17)..(18): Xaa is A or G
  MOD_RES (19)..(20)..(21)..(22): Xaa is A or G or is absent
VPTKLNAISILYFXXXXXXXXXLKKYRGMAVSE

SEQ ID NO: 27804 - protein, 44 aa, Artificial Sequence; identical to SEQ ID NO: 6639
  GFR-binding peptide
  MOD_RES (6)..(7)..(41)..(43): Xaa is C or S
  MOD_RES (21)..(22)..(23)..(24)..(25): Xaa is A or G
  MOD_RES (26)..(27)..(28)..(29): Xaa is A or G or is absent

SEQ ID NO: 27805 - protein, 38 aa, Artificial Sequence
  GFR-binding peptide
  MOD_RES (5)..(6): Xaa is C or S
  MOD_RES (20)..(21)..(22)..(23)..(24): Xaa is A or G
  MOD_RES (25)..(26)..(27)..(28): Xaa is A or G or is absent
APASXXVPARLSPISILYIXXXXXXXXXYKQYEDMVVE

SEQ ID NO: 27806 - protein, 34 aa, Artificial Sequence
  GFR-binding peptide
  MOD_RES (3)..(4): Xaa is C or S
ASXXVPARLEPISILYLDAANNVVKFKYEDMVVE

SEQ ID NO: 27807 - protein, 35 aa, Artificial Sequence; identical to SEQ ID NO: 6642
  GFR-binding peptide
  MOD_RES (1)..(34): Xaa is C or S
  MOD_RES (15)..(16)..(17)..(18)..(19): Xaa is A or G
  MOD_RES (20)..(21)..(22)..(23): Xaa is A or G or is absent

SEQ ID NO: 27808 - protein, 37 aa, Artificial Sequence; identical to SEQ ID NO: 6645
  GFR-binding peptide
  MOD_RES (3)..(4)..(37): Xaa is C or S
  MOD_RES (18)..(19)..(20)..(21)..(22): Xaa is A or G
  MOD_RES (23)..(24)..(25)..(26): Xaa is A or G or is absent

SEQ ID NO: 27809 - protein, 34 aa, Artificial Sequence
  GFR-binding peptide
  MOD_RES (34)..(34): Xaa is C or S
  MOD_RES (14)..(15)..(16)..(17)..(18): Xaa is A or G
  MOD_RES (19)..(20)..(21)..(22): Xaa is A or G or is absent
APTKLSPISVLYIXXXXXXXXXYKQYENMVVRSX

SEQ ID NO: 27810 - protein, 34 aa, Artificial Sequence; identical to SEQ ID NO: 6646
  GFR-binding peptide
  MOD_RES (1)..(2)..(33): Xaa is C or S

SEQ ID NO: 27811 - protein, 41 aa, Artificial Sequence
  GFR-binding peptide
  MOD_RES (6)..(7)..(41): Xaa is C or S
  MOD_RES (21)..(22)..(23)..(24)..(25): Xaa is A or G
  MOD_RES (26)..(27)..(28)..(29): Xaa is A or G or is absent
YVPKPXXAPTKLSPISVLYIXXXXXXXXXYKQYENMVVRSX

SEQ ID NO: 27812 - protein, 37 aa, Artificial Sequence
  GFR-binding peptide
  MOD_RES (34)..(36): Xaa is C or S
  MOD_RES (14)..(15)..(16)..(17)..(18): Xaa is A or G
  MOD_RES (19)..(20)..(21)..(22): Xaa is A or G or is absent
VPARLSPISILYKXXXXXXXXXLKYHYDMVVEAXGXR

SEQ ID NO: 27813 - protein, 39 aa, Artificial Sequence
  GFR-binding peptide
  MOD_RES (5)..(6): Xaa is C or S
  MOD_RES (20)..(21)..(22)..(23)..(24): Xaa is A or G
  MOD_RES (25)..(26)..(27)..(28): Xaa is A or G or is absent
ASKAXXVPTKLEPISILYLXXXXXXXXXKFKYEGMAVSE

SEQ ID NO: 27814 - protein, 35 aa, Artificial Sequence; identical to SEQ ID NO: 6652
  GFR-binding peptide
  MOD_RES (2)..(3): Xaa is C or S
  MOD_RES (17)..(18)..(19)..(20)..(21): Xaa is A or G
  MOD_RES (22)..(23)..(24)..(25): Xaa is A or G or is absent

SEQ ID NO: 27815 - protein, 34 aa, Artificial Sequence
  GFR-binding peptide
  MOD_RES (1)..(33): Xaa is C or S
XAPTKLSPISVLYIDSSNNVIYKQYENMVVKAXG

SEQ ID NO: 27816 - protein, 35 aa, Artificial Sequence; identical to SEQ ID NO: 6653
  GFR-binding peptide
  MOD_RES (1)..(32)..(34): Xaa is C or S

SEQ ID NO: 27817 - protein, 36 aa, Artificial Sequence; identical to SEQ ID NO: 6655
  GFR-binding peptide
  MOD_RES (4)..(5): Xaa is C or S

SEQ ID NO: 27818 - protein, 36 aa, Artificial Sequence
  GFR-binding peptide
  MOD_RES (2)..(3)..(35): Xaa is C or S
PXXAPTKLSPISVLYIDDSSNVIYKQYENMVVRSXG

SEQ ID NO: 27819 - protein, 43 aa, Artificial Sequence; identical to SEQ ID NO: 6658
  GFR-binding peptide
  MOD_RES (5)..(6)..(40)..(42): Xaa is C or S
  MOD_RES (20)..(21)..(22)..(23)..(24): Xaa is A or G
  MOD_RES (25)..(26)..(27)..(28): Xaa is A or G or is absent

SEQ ID NO: 27820 - protein, 36 aa, Artificial Sequence
  GFR-binding peptide
  MOD_RES (1)..(2)..(34)..(36): Xaa is C or S
XXVPARLEPISILYLDAANNVVKFKYEDMVVEAXGX

SEQ ID NO: 27821 - protein, 39 aa, Artificial Sequence; identical to SEQ ID NO: 6661
  GFR-binding peptide
  MOD_RES (6)..(7)..(39): Xaa is C or S

SEQ ID NO: 27822 - protein, 42 aa, Artificial Sequence; identical to SEQ ID NO: 6662
  GFR-binding peptide
  MOD_RES (5)..(6)..(40)..(42): Xaa is C or S
  MOD_RES (20)..(21)..(22)..(23)..(24): Xaa is A or G
  MOD_RES (25)..(26)..(27)..(28): Xaa is A or G or is absent

SEQ ID NO: 27823 - protein, 40 aa, Artificial Sequence
  GFR-binding peptide
  MOD_RES (6)..(7)..(38)..(40): Xaa is C or S
ASASPXXVSQDLSPISILYIIGKTPKIYKQYEMIVKSXKX

SEQ ID NO: 27824 - protein, 40 aa, Artificial Sequence; identical to SEQ ID NO: 6663
  GFR-binding peptide
  MOD_RES (3)..(4)..(37)..(39): Xaa is C or S
  MOD_RES (18)..(19)..(20)..(21)..(22): Xaa is A or G
  MOD_RES (23)..(24)..(25)..(26): Xaa is A or G or is absent

SEQ ID NO: 27825 - protein, 40 aa, Artificial Sequence
  GFR-binding peptide
  MOD_RES (6)..(7)..(39): Xaa is C or S
KIPKAXXVPTELEPISMLYLDENEKVVKFKYEDMVVEGXG

SEQ ID NO: 27826 - protein, 37 aa, Artificial Sequence; identical to SEQ ID NO: 6664
  GFR-binding peptide
  MOD_RES (4)..(5): Xaa is C or S

SEQ ID NO: 27827 - protein, 34 aa, Artificial Sequence; identical to SEQ ID NO: 6665
  GFR-binding peptide
  MOD_RES (1)..(2)..(34): Xaa is C or S

SEQ ID NO: 27828 - protein, 36 aa, Artificial Sequence; identical to SEQ ID NO: 6666
  GFR-binding peptide
  MOD_RES (3)..(4)..(35): Xaa is C or S

SEQ ID NO: 27829 - protein, 32 aa, Artificial Sequence
  GFR-binding peptide
  MOD_RES (1)..(2): Xaa is C or S
XXAPTKLEPISVLYLDDSSNVIKFKYENMVVR

SEQ ID NO: 27830 - protein, 41 aa, Artificial Sequence; identical to SEQ ID NO: 6667
  GFR-binding peptide
  MOD_RES (5)..(39)..(41): Xaa is C or S
  MOD_RES (19)..(20)..(21)..(22)..(23): Xaa is A or G
  MOD_RES (24)..(25)..(26)..(27): Xaa is A or G or is absent

SEQ ID NO: 27831 - protein, 40 aa, Artificial Sequence
  GFR-binding peptide
  MOD_RES (4)..(5)..(37)..(39): Xaa is C or S
PKAXXVPTELSPISMLYIDEYDKVVYKQYEEMVVEGXGXR

SEQ ID NO: 27832 - protein, 36 aa, Artificial Sequence; identical to SEQ ID NO: 6668
  GFR-binding peptide
  MOD_RES (4)..(36): Xaa is C or S

SEQ ID NO: 27833 - protein, 35 aa, Artificial Sequence
  GFR-binding peptide
  MOD_RES (2)..(3): Xaa is C or S
  MOD_RES (17)..(18)..(19)..(20)..(21): Xaa is A or G
  MOD_RES (22)..(23)..(24)..(25): Xaa is A or G or is absent
SXXVPARLEPISILYLXXXXXXXXXKFKYEDMVVE

SEQ ID NO: 27834 - protein, 37 aa, Artificial Sequence
  GFR-binding peptide
  MOD_RES (2)..(3)..(36): Xaa is C or S
  MOD_RES (17)..(18)..(19)..(20)..(21): Xaa is A or G
  MOD_RES (22)..(23)..(24)..(25): Xaa is A or G or is absent
PXXVPQDLSPISILYIXXXXXXXXXYKQYEMVVKSXK

SEQ ID NO: 27835 - protein, 36 aa, Artificial Sequence
  GFR-binding peptide
  MOD_RES (5)..(6): Xaa is C or S
IPKAXXVPTELSPISMLYIDENEKVVYKQYEDMVVE

SEQ ID NO: 27836 - protein, 33 aa, Artificial Sequence
  GFR-binding peptide
  MOD_RES (1)..(2): Xaa is C or S
XXVPTELEPISMLYLDENEKVVKFKYEDMVVEG

SEQ ID NO: 27837 - protein, 40 aa, Artificial Sequence; identical to SEQ ID NO: 6669
  GFR-binding peptide
  MOD_RES (5)..(6)..(40): Xaa is C or S
  MOD_RES (20)..(21)..(22)..(23)..(24): Xaa is A or G
  MOD_RES (25)..(26)..(27)..(28): Xaa is A or G or is absent

SEQ ID NO: 27838 - protein, 35 aa, Artificial Sequence; identical to SEQ ID NO: 6670
  GFR-binding peptide
  MOD_RES (3)..(4): Xaa is C or S

SEQ ID NO: 27839 - protein, 36 aa, Artificial Sequence; identical to SEQ ID NO: 6671
  GFR-binding peptide
  MOD_RES (1)..(35): Xaa is C or S
  MOD_RES (15)..(16)..(17)..(18)..(19): Xaa is A or G
  MOD_RES (20)..(21)..(22)..(23): Xaa is A or G or is absent

SEQ ID NO: 27840 - protein, 33 aa, Artificial Sequence; identical to SEQ ID NO: 6672
  GFR-binding peptide
  MOD_RES (33)..(33): Xaa is C or S
  MOD_RES (14)..(15)..(16)..(17)..(18): Xaa is A or G
  MOD_RES (19)..(20)..(21)..(22): Xaa is A or G or is absent

SEQ ID NO: 27841 - protein, 39 aa, Artificial Sequence
  GFR-binding peptide
  MOD_RES (4)..(5)..(39): Xaa is C or S
  MOD_RES (19)..(20)..(21)..(22)..(23): Xaa is A or G
  MOD_RES (24)..(25)..(26)..(27): Xaa is A or G or is absent
PASXXVPARLNAISILYFXXXXXXXXXLKKYRDMVVEAX

SEQ ID NO: 27842 - protein, 40 aa, Artificial Sequence
  GFR-binding peptide
  MOD_RES (4)..(5)..(39): Xaa is C or S
  MOD_RES (19)..(20)..(21)..(22)..(23): Xaa is A or G
  MOD_RES (24)..(25)..(26)..(27): Xaa is A or G or is absent
PKPXXAPTKLEPISVLYLXXXXXXXXXKFKYENMVVRSXG

SEQ ID NO: 27843 - protein, 33 aa, Artificial Sequence; identical to SEQ ID NO: 6679
  GFR-binding peptide
  MOD_RES (1)..(2): Xaa is C or S

SEQ ID NO: 27844 - protein, 42 aa, Artificial Sequence
  GFR-binding peptide
  MOD_RES (6)..(7)..(40)..(42): Xaa is C or S
KVGKAXXVPTKLEPISVLYLDDMGVPTKFKYEEGMSVAEXGX

SEQ ID NO: 27845 - protein, 38 aa, Artificial Sequence
  GFR-binding peptide
  MOD_RES (4)..(5)..(38): Xaa is C or S
  MOD_RES (19)..(20)..(21)..(22)..(23): Xaa is A or G
  MOD_RES (24)..(25)..(26)..(27): Xaa is A or G or is absent
ASPXXVPQDLSPISILYIXXXXXXXXXYKQYEMVVKSX

SEQ ID NO: 27846 - protein, 36 aa, Artificial Sequence; identical to SEQ ID NO: 6682
  GFR-binding peptide
  MOD_RES (2)..(3)..(34)..(36): Xaa is C or S

SEQ ID NO: 27847 - protein, 39 aa, Artificial Sequence; identical to SEQ ID NO: 6683
  GFR-binding peptide
  MOD_RES (6)..(7): Xaa is C or S
  MOD_RES (21)..(22)..(23)..(24)..(25): Xaa is A or G
  MOD_RES (26)..(27)..(28)..(29): Xaa is A or G or is absent

SEQ ID NO: 27848 - protein, 38 aa, Artificial Sequence
  GFR-binding peptide
  MOD_RES (5)..(6): Xaa is C or S
  MOD_RES (20)..(21)..(22)..(23)..(24): Xaa is A or G
  MOD_RES (25)..(26)..(27)..(28): Xaa is A or G or is absent
ASKAXXVPTKLSPISILYIXXXXXXXXXYKQYEGMAVS

SEQ ID NO: 27849 - protein, 33 aa, Artificial Sequence; identical to SEQ ID NO: 6684
  GFR-binding peptide
  MOD_RES (2)..(3): Xaa is C or S

SEQ ID NO: 27850 - protein, 34 aa, Artificial Sequence
  GFR-binding peptide
  MOD_RES (2)..(3)..(34): Xaa is C or S
PXXVSQDLEPISILYLIGKTPKIKFKYEMIVKSX

SEQ ID NO: 27851 - protein, 40 aa, Artificial Sequence; identical to SEQ ID NO: 6685
  GFR-binding peptide
  MOD_RES (5)..(6)..(40): Xaa is C or S
  MOD_RES (20)..(21)..(22)..(23)..(24): Xaa is A or G
  MOD_RES (25)..(26)..(27)..(28): Xaa is A or G or is absent

SEQ ID NO: 27852 - protein, 35 aa, Artificial Sequence
  GFR-binding peptide
  MOD_RES (2)..(3)..(35): Xaa is C or S
PXXAPTQLSPISVLYIDDSSNVIYKQYENMVVRAX

SEQ ID NO: 27853 - protein, 32 aa, Artificial Sequence; identical to SEQ ID NO: 6688
  GFR-binding peptide
  MOD_RES (1)..(2): Xaa is C or S

SEQ ID NO: 27854 - protein, 38 aa, Artificial Sequence; identical to SEQ ID NO: 6692
  GFR-binding peptide
  MOD_RES (3)..(4)..(38): Xaa is C or S
  MOD_RES (18)..(19)..(20)..(21)..(22): Xaa is A or G
  MOD_RES (23)..(24)..(25)..(26): Xaa is A or G or is absent

SEQ ID NO: 27855 - protein, 38 aa, Artificial Sequence
  GFR-binding peptide
  MOD_RES (2)..(3)..(37): Xaa is C or S
  MOD_RES (17)..(18)..(19)..(20)..(21): Xaa is A or G
  MOD_RES (22)..(23)..(24)..(25): Xaa is A or G or is absent
AXXVPTELSPISMLYIXXXXXXXXXYKQYEEMVVEGXG

SEQ ID NO: 27856 - protein, 40 aa, Artificial Sequence
  GFR-binding peptide
  MOD_RES (4)..(5)..(37)..(39): Xaa is C or S
PKPXXAPTKLSPISVLYIDDSSNVIYKQYENMVVRSXGXH

SEQ ID NO: 27857 - protein, 35 aa, Artificial Sequence
  GFR-binding peptide
  MOD_RES (2)..(3)..(35): Xaa is C or S
AXXVPTELEPISMLYLDEYDKVVKFKYEEMVVEGX

SEQ ID NO: 27858 - protein, 39 aa, Artificial Sequence; identical to SEQ ID NO: 6694
  GFR-binding peptide
  MOD_RES (3)..(4)..(36)..(38): Xaa is C or S

SEQ ID NO: 27859 - protein, 40 aa, Artificial Sequence
  GFR-binding peptide
  MOD_RES (7)..(7): Xaa is C or S
  MOD_RES (21)..(22)..(23)..(24)..(25): Xaa is A or G
  MOD_RES (26)..(27)..(28)..(29): Xaa is A or G or is absent
HVTKPTXAPTKLSPISVLYIXXXXXXXXXYKQYENMVVRS

SEQ ID NO: 27860 - protein, 34 aa, Artificial Sequence
  GFR-binding peptide
  MOD_RES (1)..(33): Xaa is C or S
XVPTKLSPISILYKDKGVVTYLKYHYGMAVSEXG

SEQ ID NO: 27861 - protein, 38 aa, Artificial Sequence
  GFR-binding peptide
  MOD_RES (3)..(4)..(37): Xaa is C or S
  MOD_RES (18)..(19)..(20)..(21)..(22): Xaa is A or G
  MOD_RES (23)..(24)..(25)..(26): Xaa is A or G or is absent
SPXXVSQDLEPISILYLXXXXXXXXXKFKYEMIVKSXK

SEQ ID NO: 27862 - protein, 43 aa, Artificial Sequence
  GFR-binding peptide
  MOD_RES (6)..(7)..(41)..(43): Xaa is C or S
  MOD_RES (21)..(22)..(23)..(24)..(25): Xaa is A or G
  MOD_RES (26)..(27)..(28)..(29): Xaa is A or G or is absent
TVPKPXXAPTQLSPISVLYIXXXXXXXXXYKQYENMVVRAXGX

SEQ ID NO: 27863 - protein, 35 aa, Artificial Sequence
  GFR-binding peptide
  MOD_RES (1)..(2): Xaa is C or S
  MOD_RES (16)..(17)..(18)..(19)..(20): Xaa is A or G
  MOD_RES (21)..(22)..(23)..(24): Xaa is A or G or is absent
XXVPTKLSPISILYIXXXXXXXXXYKQYEGMAVSE

SEQ ID NO: 27864 - protein, 34 aa, Artificial Sequence
  GFR-binding peptide
  MOD_RES (14)..(15)..(16)..(17)..(18): Xaa is A or G
  MOD_RES (19)..(20)..(21)..(22): Xaa is A or G or is absent
VPTKLSPISVLYIXXXXXXXXXYKQYEEGMSVAE

SEQ ID NO: 27865 - protein, 39 aa, Artificial Sequence; identical to SEQ ID NO: 6699
  GFR-binding peptide
  MOD_RES (5)..(6)..(37)..(39): Xaa is C or S

SEQ ID NO: 27866 - protein, 33 aa, Artificial Sequence
  GFR-binding peptide
  MOD_RES (1)..(1): Xaa is C or S
  MOD_RES (15)..(16)..(17)..(18)..(19): Xaa is A or G
  MOD_RES (20)..(21)..(22)..(23): Xaa is A or G or is absent
XVPQALEPISILYLXXXXXXXXXKFKYEMIVRS

SEQ ID NO: 27867 - protein, 34 aa, Artificial Sequence; identical to SEQ ID NO: 6701
  GFR-binding peptide
  MOD_RES (1)..(2): Xaa is C or S
  MOD_RES (16)..(17)..(18)..(19)..(20): Xaa is A or G
  MOD_RES (21)..(22)..(23)..(24): Xaa is A or G or is absent

SEQ ID NO: 27868 - protein, 34 aa, Artificial Sequence; identical to SEQ ID NO: 6702
  GFR-binding peptide
  MOD_RES (1)..(1): Xaa is C or S
  MOD_RES (15)..(16)..(17)..(18)..(19): Xaa is A or G
  MOD_RES (20)..(21)..(22)..(23): Xaa is A or G or is absent

SEQ ID NO: 27869 - protein, 37 aa, Artificial Sequence
  GFR-binding peptide
  MOD_RES (4)..(5)..(37): Xaa is C or S
PKPXXAPTQLEPISVLYLDDSSNVIKFKYENMVVRAX

SEQ ID NO: 27870 - protein, 38 aa, Artificial Sequence; identical to SEQ ID NO: 6703
  GFR-binding peptide
  MOD_RES (3)..(35)..(37): Xaa is C or S

SEQ ID NO: 27871 - protein, 34 aa, Artificial Sequence; identical to SEQ ID NO: 6707
  GFR-binding peptide
  MOD_RES (34)..(34): Xaa is C or S
  MOD_RES (14)..(15)..(16)..(17)..(18): Xaa is A or G
  MOD_RES (19)..(20)..(21)..(22): Xaa is A or G or is absent

SEQ ID NO: 27872 - protein, 40 aa, Artificial Sequence; identical to SEQ ID NO: 6708
  GFR-binding peptide
  MOD_RES (3)..(4)..(38)..(40): Xaa is C or S
  MOD_RES (18)..(19)..(20)..(21)..(22): Xaa is A or G
  MOD_RES (23)..(24)..(25)..(26): Xaa is A or G or is absent

SEQ ID NO: 27873 - protein, 39 aa, Artificial Sequence
  GFR-binding peptide
  MOD_RES (6)..(7): Xaa is C or S
  MOD_RES (21)..(22)..(23)..(24)..(25): Xaa is A or G
  MOD_RES (26)..(27)..(28)..(29): Xaa is A or G or is absent
KIPKAXXVPTELEPISMLYLXXXXXXXXXKFKYEDMVVE

SEQ ID NO: 27874 - protein, 43 aa, Artificial Sequence; identical to SEQ ID NO: 6711
  GFR-binding peptide
  MOD_RES (6)..(7)..(41)..(43): Xaa is C or S
  MOD_RES (21)..(22)..(23)..(24)..(25): Xaa is A or G
  MOD_RES (26)..(27)..(28)..(29): Xaa is A or G or is absent

SEQ ID NO: 27875 - protein, 37 aa, Artificial Sequence
  GFR-binding peptide
  MOD_RES (1)..(2)..(36): Xaa is C or S
  MOD_RES (16)..(17)..(18)..(19)..(20): Xaa is A or G
  MOD_RES (21)..(22)..(23)..(24): Xaa is A or G or is absent
XXAPTQLSPISVLYIXXXXXXXXXYKQYENMVVRAXG

SEQ ID NO: 27876 - protein, 36 aa, Artificial Sequence
  GFR-binding peptide
  MOD_RES (4)..(5)..(36): Xaa is C or S
AAPXXVPQALSPISILYIVGRKPKVYKQYEMIVRSX

SEQ ID NO: 27877 - protein, 38 aa, Artificial Sequence; identical to SEQ ID NO: 6713
  GFR-binding peptide
  MOD_RES (2)..(3)..(35)..(37): Xaa is C or S

SEQ ID NO: 27878 - protein, 41 aa, Artificial Sequence
  GFR-binding peptide
  MOD_RES (5)..(6)..(38)..(40): Xaa is C or S
ASKAXXVPTKLSPISILYKDKGVVTYLKYHYGMAVSEXGXR

SEQ ID NO: 27879 - protein, 40 aa, Artificial Sequence
  GFR-binding peptide
  MOD_RES (5)..(6)..(38)..(40): Xaa is C or S
VPKPXXAPTKLSPISVLYIDDSSNVIYKQYENMVVRSXGX

SEQ ID NO: 27880 - protein, 37 aa, Artificial Sequence
  GFR-binding peptide
  MOD_RES (2)..(3)..(36): Xaa is C or S
AXXVPTKLSPISVLYIDDMGVPTYKQYEEGMSVAEXG

SEQ ID NO: 27881 - protein, 37 aa, Artificial Sequence
  GFR-binding peptide
  MOD_RES (5)..(6): Xaa is C or S
VPKPXXAPTQLSPISVLYIDDSSNVIYKQYENMVVRA

SEQ ID NO: 27882 - protein, 35 aa, Artificial Sequence
  GFR-binding peptide
  MOD_RES (2)..(3)..(35): Xaa is C or S
PXXAPTQLEPISVLYLDDSSNVIKFKYENMVVRAX

SEQ ID NO: 27883 - protein, 44 aa, Artificial Sequence; identical to SEQ ID NO: 6720
  GFR-binding peptide
  MOD_RES (7)..(41)..(43): Xaa is C or S
  MOD_RES (21)..(22)..(23)..(24)..(25): Xaa is A or G
  MOD_RES (26)..(27)..(28)..(29): Xaa is A or G or is absent

SEQ ID NO: 27884 - protein, 36 aa, Artificial Sequence; identical to SEQ ID NO: 6721
  GFR-binding peptide
  MOD_RES (1)..(2)..(35): Xaa is C or S
  MOD_RES (16)..(17)..(18)..(19)..(20): Xaa is A or G
  MOD_RES (21)..(22)..(23)..(24): Xaa is A or G or is absent

SEQ ID NO: 27885 - protein, 41 aa, Artificial Sequence
  GFR-binding peptide
  MOD_RES (5)..(6)..(38)..(40): Xaa is C or S
VPKAXXAPTKLSPISVLYIDSSNNVIYKQYENMVVKAXGXH

SEQ ID NO: 27886 - protein, 41 aa, Artificial Sequence
  GFR-binding peptide
  MOD_RES (5)..(6)..(39)..(41): Xaa is C or S
  MOD_RES (20)..(21)..(22)..(23)..(24): Xaa is A or G
  MOD_RES (25)..(26)..(27)..(28): Xaa is A or G or is absent
SASPXXVPQDLSPISILYIXXXXXXXXXYKQYEMVVKSXKX

SEQ ID NO: 27887 - protein, 31 aa, Artificial Sequence
  GFR-binding peptide
  MOD_RES (1)..(1): Xaa is C or S
XAPTQLEPISVLYLDDSSNVIKFKYENMVVR

SEQ ID NO: 27888 - protein, 39 aa, Artificial Sequence; identical to SEQ ID NO: 6726
  GFR-binding peptide
  MOD_RES (5)..(6)..(39): Xaa is C or S
  MOD_RES (20)..(21)..(22)..(23)..(24): Xaa is A or G
  MOD_RES (25)..(26)..(27)..(28): Xaa is A or G or is absent

SEQ ID NO: 27889 - protein, 35 aa, Artificial Sequence; identical to SEQ ID NO: 6727
  GFR-binding peptide
  MOD_RES (1)..(2)..(35): Xaa is C or S
  MOD_RES (16)..(17)..(18)..(19)..(20): Xaa is A or G
  MOD_RES (21)..(22)..(23)..(24): Xaa is A or G or is absent

SEQ ID NO: 27890 - protein, 33 aa, Artificial Sequence; identical to SEQ ID NO: 6728
  GFR-binding peptide
  MOD_RES (1)..(1): Xaa is C or S
  MOD_RES (15)..(16)..(17)..(18)..(19): Xaa is A or G
  MOD_RES (20)..(21)..(22)..(23): Xaa is A or G or is absent

SEQ ID NO: 27891 - protein, 39 aa, Artificial Sequence
  GFR-binding peptide
  MOD_RES (2)..(3)..(38): Xaa is C or S
  MOD_RES (17)..(18)..(19)..(20)..(21): Xaa is A or G
  MOD_RES (22)..(23)..(24)..(25): Xaa is A or G or is absent
AXXVPTKLSPISVLYIXXXXXXXXXYKQYEEGMSVAEXG

SEQ ID NO: 27892 - protein, 35 aa, Artificial Sequence
  GFR-binding peptide
  MOD_RES (2)..(3): Xaa is C or S
  MOD_RES (17)..(18)..(19)..(20)..(21): Xaa is A or G
  MOD_RES (22)..(23)..(24)..(25): Xaa is A or G or is absent
PXXVSQDLSPISILYIXXXXXXXXXYKQYEMIVKS

SEQ ID NO: 27893 - protein, 34 aa, Artificial Sequence; identical to SEQ ID NO: 6731
  GFR-binding peptide
  MOD_RES (2)..(3)..(34): Xaa is C or S

SEQ ID NO: 27894 - protein, 37 aa, Artificial Sequence
  GFR-binding peptide
  MOD_RES (6)..(7): Xaa is C or S
TVPKPXXAPTQLEPISVLYLDDSSNVIKFKYENMVVR

SEQ ID NO: 27895 - protein, 39 aa, Artificial Sequence
  GFR-binding peptide
  MOD_RES (6)..(7)..(39): Xaa is C or S
KASKAXXVPTKLNAISILYFDKGVVTYLKKYRGMAVSEX

SEQ ID NO: 27896 - protein, 34 aa, Artificial Sequence; identical to SEQ ID NO: 6732
  GFR-binding peptide
  MOD_RES (2)..(3): Xaa is C or S

SEQ ID NO: 27897 - protein, 42 aa, Artificial Sequence
  GFR-binding peptide
  MOD_RES (4)..(5)..(39)..(41): Xaa is C or S
  MOD_RES (19)..(20)..(21)..(22)..(23): Xaa is A or G
  MOD_RES (24)..(25)..(26)..(27): Xaa is A or G or is absent
PASXXVPARLNAISILYFXXXXXXXXXLKKYRDMVVEAXGXR

SEQ ID NO: 27898 - protein, 40 aa, Artificial Sequence
  GFR-binding peptide
  MOD_RES (6)..(7): Xaa is C or S
  MOD_RES (21)..(22)..(23)..(24)..(25): Xaa is A or G
  MOD_RES (26)..(27)..(28)..(29): Xaa is A or G or is absent
AVPKAXXAPTKLSPISVLYIXXXXXXXXXYKQYENMVVKA

SEQ ID NO: 27899 - protein, 36 aa, Artificial Sequence
  GFR-binding peptide
  MOD_RES (2)..(3)..(36): Xaa is C or S
  MOD_RES (17)..(18)..(19)..(20)..(21): Xaa is A or G
  MOD_RES (22)..(23)..(24)..(25): Xaa is A or G or is absent
PXXVSQDLSPISILYIXXXXXXXXXYKQYEMIVKSX

SEQ ID NO: 27900 - protein, 33 aa, Artificial Sequence
  GFR-binding peptide
  MOD_RES (1)..(2): Xaa is C or S
XXAPTKLEPISVLYLDDSSNVIKFKYENMVVRS

SEQ ID NO: 27901 - protein, 39 aa, Artificial Sequence
  GFR-binding peptide
  MOD_RES (5)..(6)..(37)..(39): Xaa is C or S
SASPXXVPQDLEPISILYLVGRTPKVKFKYEMVVKSXKX

SEQ ID NO: 27902 - protein, 37 aa, Artificial Sequence; identical to SEQ ID NO: 6738
  GFR-binding peptide
  MOD_RES (4)..(5)..(36): Xaa is C or S

SEQ ID NO: 27903 - protein, 40 aa, Artificial Sequence
  GFR-binding peptide
  MOD_RES (6)..(7)..(40): Xaa is C or S
  MOD_RES (21)..(22)..(23)..(24)..(25): Xaa is A or G
  MOD_RES (26)..(27)..(28)..(29): Xaa is A or G or is absent
ASAAPXXVPQALSPISILYIXXXXXXXXXYKQYEMIVRSX

SEQ ID NO: 27904 - protein, 37 aa, Artificial Sequence
  GFR-binding peptide
  MOD_RES (5)..(6): Xaa is C or S
IPKAXXVPTELSPISMLYIDEYDKVVYKQYEEMVVEG

SEQ ID NO: 27905 - protein, 37 aa, Artificial Sequence
  GFR-binding peptide
  MOD_RES (6)..(7): Xaa is C or S
ASASPXXVPQDLEPISILYLVGRTPKVKFKYEMVVKS

SEQ ID NO: 27906 - protein, 33 aa, Artificial Sequence
  GFR-binding peptide
  MOD_RES (1)..(33): Xaa is C or S
XVPARLSPISILYKDAANNVVLKYHYDMVVEAX

SEQ ID NO: 27907 - protein, 36 aa, Artificial Sequence
  GFR-binding peptide
  MOD_RES (3)..(4): Xaa is C or S
  MOD_RES (18)..(19)..(20)..(21)..(22): Xaa is A or G
  MOD_RES (23)..(24)..(25)..(26): Xaa is A or G or is absent
KAXXVPTELSPISMLYIXXXXXXXXXYKQYEDMVVE

SEQ ID NO: 27908 - protein, 40 aa, Artificial Sequence; identical to SEQ ID NO: 6742
  GFR-binding peptide
  MOD_RES (2)..(3)..(37)..(39): Xaa is C or S
  MOD_RES (17)..(18)..(19)..(20)..(21): Xaa is A or G
  MOD_RES (22)..(23)..(24)..(25): Xaa is A or G or is absent

SEQ ID NO: 27909 - protein, 34 aa, Artificial Sequence
  GFR-binding peptide
  MOD_RES (34)..(34): Xaa is C or S
  MOD_RES (14)..(15)..(16)..(17)..(18): Xaa is A or G
  MOD_RES (19)..(20)..(21)..(22): Xaa is A or G or is absent
APTQLEPISVLYLXXXXXXXXXKFKYENMVVRAX

SEQ ID NO: 27910 - protein, 34 aa, Artificial Sequence; identical to SEQ ID NO: 6743
  GFR-binding peptide
  MOD_RES (32)..(34): Xaa is C or S

SEQ ID NO: 27911 - protein, 38 aa, Artificial Sequence
  GFR-binding peptide
  MOD_RES (3)..(35)..(37): Xaa is C or S
PTXAPTKLEPISVLYLDDSSNVIKFKYENMVVRSXGXH

SEQ ID NO: 27912 - protein, 43 aa, Artificial Sequence
  GFR-binding peptide
  MOD_RES (5)..(6)..(40)..(42): Xaa is C or S
  MOD_RES (20)..(21)..(22)..(23)..(24): Xaa is A or G
  MOD_RES (25)..(26)..(27)..(28): Xaa is A or G or is absent
IPKAXXVPTELSPISMLYIXXXXXXXXXYKQYEEMVVEGXGXR

SEQ ID NO: 27913 - protein, 37 aa, Artificial Sequence
  GFR-binding peptide
  MOD_RES (1)..(35)..(37): Xaa is C or S
  MOD_RES (15)..(16)..(17)..(18)..(19): Xaa is A or G
  MOD_RES (20)..(21)..(22)..(23): Xaa is A or G or is absent
XAPTQLEPISVLYLXXXXXXXXXKFKYENMVVRAXGX

SEQ ID NO: 27914 - protein, 41 aa, Artificial Sequence; identical to SEQ ID NO: 6744
  GFR-binding peptide
  MOD_RES (3)..(4)..(38)..(40): Xaa is C or S
  MOD_RES (18)..(19)..(20)..(21)..(22): Xaa is A or G
  MOD_RES (23)..(24)..(25)..(26): Xaa is A or G or is absent

SEQ ID NO: 27915 - protein, 37 aa, Artificial Sequence
  GFR-binding peptide
  MOD_RES (2)..(3)..(37): Xaa is C or S
  MOD_RES (17)..(18)..(19)..(20)..(21): Xaa is A or G
  MOD_RES (22)..(23)..(24)..(25): Xaa is A or G or is absent
AXXVPTELSPISMLYIXXXXXXXXXYKQYEDMVVEGX

SEQ ID NO: 27916 - protein, 37 aa, Artificial Sequence
  GFR-binding peptide
  MOD_RES (3)..(4)..(35)..(37): Xaa is C or S
APXXVPQALEPISILYLVGRKPKVKFKYEMIVRSXKX

SEQ ID NO: 27917 - protein, 40 aa, Artificial Sequence
  GFR-binding peptide
  MOD_RES (6)..(7): Xaa is C or S
  MOD_RES (21)..(22)..(23)..(24)..(25): Xaa is A or G
  MOD_RES (26)..(27)..(28)..(29): Xaa is A or G or is absent
KASKAXXVPTKLSPISILYKXXXXXXXXXLKYHYGMAVSE

SEQ ID NO: 27918 - protein, 39 aa, Artificial Sequence; identical to SEQ ID NO: 6747
  GFR-binding peptide
  MOD_RES (4)..(5)..(38): Xaa is C or S
  MOD_RES (19)..(20)..(21)..(22)..(23): Xaa is A or G
  MOD_RES (24)..(25)..(26)..(27): Xaa is A or G or is absent

SEQ ID NO: 27919 - protein, 35 aa, Artificial Sequence
  GFR-binding peptide
  MOD_RES (3)..(4): Xaa is C or S
KAXXVPTELSPISMLYIDEYDKVVYKQYEEMVVEG

SEQ ID NO: 27920 - protein, 37 aa, Artificial Sequence; identical to SEQ ID NO: 6748
  GFR-binding peptide
  MOD_RES (2)..(3)..(36): Xaa is C or S
  MOD_RES (17)..(18)..(19)..(20)..(21): Xaa is A or G
  MOD_RES (22)..(23)..(24)..(25): Xaa is A or G or is absent

SEQ ID NO: 27921 - protein, 39 aa, Artificial Sequence; identical to SEQ ID NO: 6749
  GFR-binding peptide
  MOD_RES (3)..(4)..(39): Xaa is C or S
  MOD_RES (18)..(19)..(20)..(21)..(22): Xaa is A or G
  MOD_RES (23)..(24)..(25)..(26): Xaa is A or G or is absent

SEQ ID NO: 27922 - protein, 40 aa, Artificial Sequence
  GFR-binding peptide
  MOD_RES (4)..(5)..(39): Xaa is C or S
  MOD_RES (19)..(20)..(21)..(22)..(23): Xaa is A or G
  MOD_RES (24)..(25)..(26)..(27): Xaa is A or G or is absent
SKAXXVPTKLSPISILYIXXXXXXXXXYKQYEGMAVSEXG

SEQ ID NO: 27923 - protein, 37 aa, Artificial Sequence; identical to SEQ ID NO: 6750
  GFR-binding peptide
  MOD_RES (2)..(3)..(34)..(36): Xaa is C or S

SEQ ID NO: 27924 - protein, 36 aa, Artificial Sequence; identical to SEQ ID NO: 6751
  GFR-binding peptide
  MOD_RES (1)..(2)..(36): Xaa is C or S
  MOD_RES (16)..(17)..(18)..(19)..(20): Xaa is A or G
  MOD_RES (21)..(22)..(23)..(24): Xaa is A or G or is absent

SEQ ID NO: 27925 - protein, 35 aa, Artificial Sequence
  GFR-binding peptide
  MOD_RES (3)..(4): Xaa is C or S
KAXXVPTELEPISMLYLDENEKVVKFKYEDMVVEG

SEQ ID NO: 27926 - protein, 39 aa, Artificial Sequence
  GFR-binding peptide
  MOD_RES (6)..(7): Xaa is C or S
  MOD_RES (21)..(22)..(23)..(24)..(25): Xaa is A or G
  MOD_RES (26)..(27)..(28)..(29): Xaa is A or G or is absent
ASASPXXVSQDLSPISILYIXXXXXXXXXYKQYEMIVKS

SEQ ID NO: 27927 - protein, 35 aa, Artificial Sequence
  GFR-binding peptide
  MOD_RES (2)..(3): Xaa is C or S
  MOD_RES (17)..(18)..(19)..(20)..(21): Xaa is A or G
  MOD_RES (22)..(23)..(24)..(25): Xaa is A or G or is absent
AXXVPTELSPISMLYIXXXXXXXXXYKQYEDMVVE

SEQ ID NO: 27928 - protein, 35 aa, Artificial Sequence; identical to SEQ ID NO: 6754
  GFR-binding peptide
  MOD_RES (1)..(35): Xaa is C or S
  MOD_RES (15)..(16)..(17)..(18)..(19): Xaa is A or G
  MOD_RES (20)..(21)..(22)..(23): Xaa is A or G or is absent

SEQ ID NO: 27929 - protein, 37 aa, Artificial Sequence
  GFR-binding peptide
  MOD_RES (1)..(35)..(37): Xaa is C or S
  MOD_RES (15)..(16)..(17)..(18)..(19): Xaa is A or G
  MOD_RES (20)..(21)..(22)..(23): Xaa is A or G or is absent
XAPTQLSPISVLYIXXXXXXXXXYKQYENMVVRAXGX

SEQ ID NO: 27930 - protein, 36 aa, Artificial Sequence
  GFR-binding peptide
  MOD_RES (1)..(35): Xaa is C or S
  MOD_RES (15)..(16)..(17)..(18)..(19): Xaa is A or G
  MOD_RES (20)..(21)..(22)..(23): Xaa is A or G or is absent
XVPARLSPISILYKXXXXXXXXXLKYHYDMVVEAXG

SEQ ID NO: 27931 - protein, 41 aa, Artificial Sequence
  GFR-binding peptide
  MOD_RES (6)..(7)..(39)..(41): Xaa is C or S
AAPASXXVPARLSPISILYKDAANNVVLKYHYDMVVEAXGX

SEQ ID NO: 27932 - protein, 39 aa, Artificial Sequence
  GFR-binding peptide
  MOD_RES (4)..(5)..(36)..(38): Xaa is C or S
ASPXXVSQDLEPISILYLIGKTPKIKFKYEMIVKSXKXS

SEQ ID NO: 27933 - protein, 42 aa, Artificial Sequence
  GFR-binding peptide
  MOD_RES (4)..(5)..(39)..(41): Xaa is C or S
  MOD_RES (19)..(20)..(21)..(22)..(23): Xaa is A or G
  MOD_RES (24)..(25)..(26)..(27): Xaa is A or G or is absent
PKPXXAPTQLEPISVLYLXXXXXXXXXKFKYENMVVRAXGXH

SEQ ID NO: 27934 - protein, 38 aa, Artificial Sequence
  GFR-binding peptide
  MOD_RES (5)..(6): Xaa is C or S
  MOD_RES (20)..(21)..(22)..(23)..(24): Xaa is A or G
  MOD_RES (25)..(26)..(27)..(28): Xaa is A or G or is absent
SASPXXVSQDLEPISILYLXXXXXXXXXKFKYEMIVKS

SEQ ID NO: 27935 - protein, 31 aa, Artificial Sequence; identical to SEQ ID NO: 6759
  GFR-binding peptide
  MOD_RES (1)..(1): Xaa is C or S

SEQ ID NO: 27936 - protein, 38 aa, Artificial Sequence; identical to SEQ ID NO: 6760
  GFR-binding peptide
  MOD_RES (2)..(3)..(35)..(37): Xaa is C or S

SEQ ID NO: 27937 - protein, 34 aa, Artificial Sequence
  GFR-binding peptide
  MOD_RES (2)..(34): Xaa is C or S
TXAPTKLEPISVLYLDDSSNVIKFKYENMVVRSX

SEQ ID NO: 27938 - protein, 36 aa, Artificial Sequence; identical to SEQ ID NO: 6762
  GFR-binding peptide
  MOD_RES (33)..(35): Xaa is C or S
  MOD_RES (14)..(15)..(16)..(17)..(18): Xaa is A or G
  MOD_RES (19)..(20)..(21)..(22): Xaa is A or G or is absent

SEQ ID NO: 27939 - protein, 39 aa, Artificial Sequence
  GFR-binding peptide
  MOD_RES (3)..(4)..(38): Xaa is C or S
  MOD_RES (18)..(19)..(20)..(21)..(22): Xaa is A or G
  MOD_RES (23)..(24)..(25)..(26): Xaa is A or G or is absent
KAXXVPTELEPISMLYLXXXXXXXXXKFKYEEMVVEGXG

SEQ ID NO: 27940 - protein, 35 aa, Artificial Sequence
  GFR-binding peptide
  MOD_RES (3)..(4): Xaa is C or S
KAXXVPTELEPISMLYLDEYDKVVKFKYEEMVVEG

SEQ ID NO: 27941 - protein, 42 aa, Artificial Sequence; identical to SEQ ID NO: 6765
  GFR-binding peptide
  MOD_RES (5)..(6)..(39)..(41): Xaa is C or S
  MOD_RES (20)..(21)..(22)..(23)..(24): Xaa is A or G
  MOD_RES (25)..(26)..(27)..(28): Xaa is A or G or is absent

SEQ ID NO: 27942 - protein, 38 aa, Artificial Sequence
  GFR-binding peptide
  MOD_RES (5)..(6)..(38): Xaa is C or S
APASXXVPARLSPISILYKDAANNVVLKYHYDMVVEAX

SEQ ID NO: 27943 - protein, 39 aa, Artificial Sequence
  GFR-binding peptide
  MOD_RES (6)..(7)..(38): Xaa is C or S
ASAAPXXVPQALSPISILYIVGRKPKVYKQYEMIVRSXK

SEQ ID NO: 27944 - protein, 35 aa, Artificial Sequence
  GFR-binding peptide
  MOD_RES (3)..(4): Xaa is C or S
KAXXVPTELSPISMLYIDENEKVVYKQYEDMVVEG

SEQ ID NO: 27945 - protein, 33 aa, Artificial Sequence; identical to SEQ ID NO: 6769
  GFR-binding peptide
  MOD_RES (1)..(1): Xaa is C or S

SEQ ID NO: 27946 - protein, 39 aa, Artificial Sequence
  GFR-binding peptide
  MOD_RES (5)..(6)..(38): Xaa is C or S
APASXXVPARLEPISILYLDAANNVVKFKYEDMVVEAXG

SEQ ID NO: 27947 - protein, 35 aa, Artificial Sequence; identical to SEQ ID NO: 6770
  GFR-binding peptide
  MOD_RES (2)..(3): Xaa is C or S
  MOD_RES (17)..(18)..(19)..(20)..(21): Xaa is A or G
  MOD_RES (22)..(23)..(24)..(25): Xaa is A or G or is absent

SEQ ID NO: 27948 - protein, 37 aa, Artificial Sequence
  GFR-binding peptide
  MOD_RES (2)..(3)..(37): Xaa is C or S
  MOD_RES (17)..(18)..(19)..(20)..(21): Xaa is A or G
  MOD_RES (22)..(23)..(24)..(25): Xaa is A or G or is absent
PXXAPTKLSPISVLYIXXXXXXXXXYKQYENMVVRSX

SEQ ID NO: 27949 - protein, 40 aa, Artificial Sequence
  GFR-binding peptide
  MOD_RES (4)..(5)..(37)..(39): Xaa is C or S
SKAXXVPTKLSPISILYKDKGVVTYLKYHYGMAVSEXGXR

SEQ ID NO: 27950 - protein, 39 aa, Artificial Sequence; identical to SEQ ID NO: 6773
  GFR-binding peptide
  MOD_RES (1)..(2)..(36)..(38): Xaa is C or S
  MOD_RES (16)..(17)..(18)..(19)..(20): Xaa is A or G
  MOD_RES (21)..(22)..(23)..(24): Xaa is A or G or is absent

SEQ ID NO: 27951 - protein, 39 aa, Artificial Sequence
  GFR-binding peptide
  MOD_RES (5)..(6): Xaa is C or S
  MOD_RES (20)..(21)..(22)..(23)..(24): Xaa is A or G
  MOD_RES (25)..(26)..(27)..(28): Xaa is A or G or is absent
APASXXVPARLNAISILYFXXXXXXXXXLKKYRDMVVEA

SEQ ID NO: 27952 - protein, 37 aa, Artificial Sequence
  GFR-binding peptide
  MOD_RES (34)..(36): Xaa is C or S
  MOD_RES (14)..(15)..(16)..(17)..(18): Xaa is A or G
  MOD_RES (19)..(20)..(21)..(22): Xaa is A or G or is absent
APTKLSPISVLYIXXXXXXXXXYKQYENMVVKAXGXH

SEQ ID NO: 27953 - protein, 37 aa, Artificial Sequence
  GFR-binding peptide
  MOD_RES (3)..(4)..(36): Xaa is C or S
KAXXVPTELSPISMLYIDEYDKVVYKQYEEMVVEGXG

SEQ ID NO: 27954 - protein, 40 aa, Artificial Sequence; identical to SEQ ID NO: 6775
  GFR-binding peptide
  MOD_RES (3)..(4)..(37)..(39): Xaa is C or S
  MOD_RES (18)..(19)..(20)..(21)..(22): Xaa is A or G
  MOD_RES (23)..(24)..(25)..(26): Xaa is A or G or is absent

SEQ ID NO: 27955 - protein, 35 aa, Artificial Sequence
  GFR-binding peptide
  MOD_RES (1)..(33)..(35): Xaa is C or S
XVPTELSPISMLYIDEYDKVVYKQYEEMVVEGXGX

SEQ ID NO: 27956 - protein, 39 aa, Artificial Sequence; identical to SEQ ID NO: 6777
  GFR-binding peptide
  MOD_RES (3)..(4)..(38): Xaa is C or S
  MOD_RES (18)..(19)..(20)..(21)..(22): Xaa is A or G
  MOD_RES (23)..(24)..(25)..(26): Xaa is A or G or is absent

SEQ ID NO: 27957 - protein, 35 aa, Artificial Sequence
  GFR-binding peptide
  MOD_RES (4)..(5): Xaa is C or S
PKPXXAPTQLSPISVLYIDDSSNVIYKQYENMVVR

SEQ ID NO: 27958 - protein, 36 aa, Artificial Sequence
  GFR-binding peptide
  MOD_RES (1)..(2)..(34)..(36): Xaa is C or S
XXVPARLNAISILYFDAANNVVLKKYRDMVVEAXGX

SEQ ID NO: 27959 - protein, 40 aa, Artificial Sequence; identical to SEQ ID NO: 6779
  GFR-binding peptide
  MOD_RES (5)..(6)..(37)..(39): Xaa is C or S

SEQ ID NO: 27960 - protein, 36 aa, Artificial Sequence
  GFR-binding peptide
  MOD_RES (1)..(2)..(33)..(35): Xaa is C or S
XXVSQDLSPISILYIIGKTPKIYKQYEMIVKSXKXS

SEQ ID NO: 27961 - protein, 41 aa, Artificial Sequence
  GFR-binding peptide
  MOD_RES (5)..(6)..(40): Xaa is C or S
  MOD_RES (20)..(21)..(22)..(23)..(24): Xaa is A or G
  MOD_RES (25)..(26)..(27)..(28): Xaa is A or G or is absent
ASKAXXVPTKLEPISILYLXXXXXXXXXKFKYEGMAVSEXG

SEQ ID NO: 27962 - protein, 39 aa, Artificial Sequence
  GFR-binding peptide
  MOD_RES (5)..(39): Xaa is C or S
  MOD_RES (19)..(20)..(21)..(22)..(23): Xaa is A or G
  MOD_RES (24)..(25)..(26)..(27): Xaa is A or G or is absent
TKPTXAPTKLSPISVLYIXXXXXXXXXYKQYENMVVRSX

SEQ ID NO: 27963 - protein, 37 aa, Artificial Sequence; identical to SEQ ID NO: 6782
  GFR-binding peptide
  MOD_RES (34)..(36): Xaa is C or S
  MOD_RES (14)..(15)..(16)..(17)..(18): Xaa is A or G
  MOD_RES (19)..(20)..(21)..(22): Xaa is A or G or is absent

SEQ ID NO: 27964 - protein, 36 aa, Artificial Sequence
  GFR-binding peptide
  MOD_RES (1)..(2)..(34)..(36): Xaa is C or S
XXAPTKLSPISVLYIDDSSNVIYKQYENMVVRSXGX

SEQ ID NO: 27965 - protein, 37 aa, Artificial Sequence
  GFR-binding peptide
  MOD_RES (2)..(3)..(34)..(36): Xaa is C or S
PXXVPQDLSPISILYIVGRTPKVYKQYEMVVKSXKXS

SEQ ID NO: 27966 - protein, 39 aa, Artificial Sequence
  GFR-binding peptide
  MOD_RES (2)..(3)..(37)..(39): Xaa is C or S
  MOD_RES (17)..(18)..(19)..(20)..(21): Xaa is A or G
  MOD_RES (22)..(23)..(24)..(25): Xaa is A or G or is absent
AXXVPTKLSPISILYIXXXXXXXXXYKQYEGMAVSEXGX

SEQ ID NO: 27967 - protein, 44 aa, Artificial Sequence
  GFR-binding peptide
  MOD_RES (6)..(7)..(41)..(43): Xaa is C or S
  MOD_RES (21)..(22)..(23)..(24)..(25): Xaa is A or G
  MOD_RES (26)..(27)..(28)..(29): Xaa is A or G or is absent
KIPKAXXVPTELSPISMLYIXXXXXXXXXYKQYEDMVVEGXGXR

SEQ ID NO: 27968 - protein, 36 aa, Artificial Sequence; identical to SEQ ID NO: 6787
  GFR-binding peptide
  MOD_RES (2)..(3): Xaa is C or S
  MOD_RES (17)..(18)..(19)..(20)..(21): Xaa is A or G
  MOD_RES (22)..(23)..(24)..(25): Xaa is A or G or is absent

SEQ ID NO: 27969 - protein, 37 aa, Artificial Sequence; identical to SEQ ID NO: 6789
  GFR-binding peptide
  MOD_RES (4)..(5)..(37): Xaa is C or S

SEQ ID NO: 27970 - protein, 38 aa, Artificial Sequence; identical to SEQ ID NO: 6791
  GFR-binding peptide
  MOD_RES (4)..(5)..(37): Xaa is C or S

SEQ ID NO: 27971 - protein, 38 aa, Artificial Sequence; identical to SEQ ID NO: 6792
  GFR-binding peptide
  MOD_RES (4)..(5): Xaa is C or S
  MOD_RES (19)..(20)..(21)..(22)..(23): Xaa is A or G
  MOD_RES (24)..(25)..(26)..(27): Xaa is A or G or is absent

SEQ ID NO: 27972 - protein, 40 aa, Artificial Sequence; identical to SEQ ID NO: 6793
  GFR-binding peptide
  MOD_RES (2)..(3)..(37)..(39): Xaa is C or S
  MOD_RES (17)..(18)..(19)..(20)..(21): Xaa is A or G
  MOD_RES (22)..(23)..(24)..(25): Xaa is A or G or is absent

SEQ ID NO: 27973 - protein, 37 aa, Artificial Sequence
  GFR-binding peptide
  MOD_RES (5)..(5): Xaa is C or S
  MOD_RES (19)..(20)..(21)..(22)..(23): Xaa is A or G
  MOD_RES (24)..(25)..(26)..(27): Xaa is A or G or is absent
TKPTXAPTKLSPISVLYIXXXXXXXXXYKQYENMVVR

SEQ ID NO: 27974 - protein, 34 aa, Artificial Sequence
  GFR-binding peptide
  MOD_RES (33)..(33): Xaa is C or S
  MOD_RES (14)..(15)..(16)..(17)..(18): Xaa is A or G
  MOD_RES (19)..(20)..(21)..(22): Xaa is A or G or is absent
VPQDLSPISILYIXXXXXXXXXYKQYEMVVKSXK

SEQ ID NO: 27975 - protein, 37 aa, Artificial Sequence
  GFR-binding peptide
  MOD_RES (2)..(3)..(35)..(37): Xaa is C or S
AXXVPTELSPISMLYIDENEKVVYKQYEDMVVEGXGX

SEQ ID NO: 27976 - protein, 38 aa, Artificial Sequence; identical to SEQ ID NO: 6796
  GFR-binding peptide
  MOD_RES (35)..(37): Xaa is C or S
  MOD_RES (14)..(15)..(16)..(17)..(18): Xaa is A or G
  MOD_RES (19)..(20)..(21)..(22): Xaa is A or G or is absent

SEQ ID NO: 27977 - protein, 34 aa, Artificial Sequence; identical to SEQ ID NO: 6797
  GFR-binding peptide
  MOD_RES (34)..(34): Xaa is C or S
  MOD_RES (14)..(15)..(16)..(17)..(18): Xaa is A or G
  MOD_RES (19)..(20)..(21)..(22): Xaa is A or G or is absent

SEQ ID NO: 27978 - protein, 42 aa, Artificial Sequence
  GFR-binding peptide
  MOD_RES (6)..(7)..(42): Xaa is C or S
  MOD_RES (21)..(22)..(23)..(24)..(25): Xaa is A or G
  MOD_RES (26)..(27)..(28)..(29): Xaa is A or G or is absent
KVGKAXXVPTKLSPISVLYIXXXXXXXXXYKQYEEGMSVAEX

SEQ ID NO: 27979 - protein, 39 aa, Artificial Sequence
  GFR-binding peptide
  MOD_RES (3)..(4)..(37)..(39): Xaa is C or S
  MOD_RES (18)..(19)..(20)..(21)..(22): Xaa is A or G
  MOD_RES (23)..(24)..(25)..(26): Xaa is A or G or is absent
SPXXVPQDLEPISILYLXXXXXXXXXKFKYEMVVKSXKX

SEQ ID NO: 27980 - protein, 34 aa, Artificial Sequence; identical to SEQ ID NO: 6798
  GFR-binding peptide
  MOD_RES (31)..(33): Xaa is C or S

SEQ ID NO: 27981 - protein, 39 aa, Artificial Sequence
  GFR-binding peptide
  MOD_RES (1)..(2)..(37)..(39): Xaa is C or S
  MOD_RES (16)..(17)..(18)..(19)..(20): Xaa is A or G
  MOD_RES (21)..(22)..(23)..(24): Xaa is A or G or is absent
XXVPTKLSPISVLYIXXXXXXXXXYKQYEEGMSVAEXGX

SEQ ID NO: 27982 - protein, 43 aa, Artificial Sequence
  GFR-binding peptide
  MOD_RES (6)..(7)..(40)..(42): Xaa is C or S
  MOD_RES (21)..(22)..(23)..(24)..(25): Xaa is A or G
  MOD_RES (26)..(27)..(28)..(29): Xaa is A or G or is absent
ASAAPXXVPQALSPISILYIXXXXXXXXXYKQYEMIVRSXKXS

SEQ ID NO: 27983 - protein, 38 aa, Artificial Sequence; identical to SEQ ID NO: 6801
  GFR-binding peptide
  MOD_RES (4)..(5)..(38): Xaa is C or S
  MOD_RES (19)..(20)..(21)..(22)..(23): Xaa is A or G
  MOD_RES (24)..(25)..(26)..(27): Xaa is A or G or is absent

SEQ ID NO: 27984 - protein, 32 aa, Artificial Sequence; identical to SEQ ID NO: 6802
  GFR-binding peptide
  MOD_RES (14)..(15)..(16)..(17)..(18): Xaa is A or G
  MOD_RES (19)..(20)..(21)..(22): Xaa is A or G or is absent

SEQ ID NO: 27985 - protein, 40 aa, Artificial Sequence; identical to SEQ ID NO: 6804
  GFR-binding peptide
  MOD_RES (6)..(7)..(40): Xaa is C or S
  MOD_RES (21)..(22)..(23)..(24)..(25): Xaa is A or G
  MOD_RES (26)..(27)..(28)..(29): Xaa is A or G or is absent

SEQ ID NO: 27986 - protein, 37 aa, Artificial Sequence
  GFR-binding peptide
  MOD_RES (4)..(5)..(37): Xaa is C or S
PASXXVPARLSPISILYKDAANNVVLKYHYDMVVEAX

SEQ ID NO: 27987 - protein, 41 aa, Artificial Sequence
  GFR-binding peptide
  MOD_RES (4)..(5)..(38)..(40): Xaa is C or S
  MOD_RES (19)..(20)..(21)..(22)..(23): Xaa is A or G
  MOD_RES (24)..(25)..(26)..(27): Xaa is A or G or is absent
ASPXXVPQDLSPISILYIXXXXXXXXXYKQYEMVVKSXKXS

SEQ ID NO: 27988 - protein, 33 aa, Artificial Sequence
  GFR-binding peptide
  MOD_RES (1)..(2): Xaa is C or S
XXVPTELSPISMLYIDENEKVVYKQYEDMVVEG

SEQ ID NO: 27989 - protein, 38 aa, Artificial Sequence
  GFR-binding peptide
  MOD_RES (4)..(36)..(38): Xaa is C or S
KPTXAPTKLEPISVLYLDDSSNVIKFKYENMVVRSXGX

SEQ ID NO: 27990 - protein, 38 aa, Artificial Sequence
  GFR-binding peptide
  MOD_RES (3)..(4)..(38): Xaa is C or S
  MOD_RES (18)..(19)..(20)..(21)..(22): Xaa is A or G
  MOD_RES (23)..(24)..(25)..(26): Xaa is A or G or is absent
ASXXVPARLSPISILYIXXXXXXXXXYKQYEDMVVEAX

SEQ ID NO: 27991 - protein, 35 aa, Artificial Sequence; identical to SEQ ID NO: 6810
  GFR-binding peptide
  MOD_RES (4)..(5): Xaa is C or S

SEQ ID NO: 27992 - protein, 37 aa, Artificial Sequence; identical to SEQ ID NO: 6812
  GFR-binding peptide
  MOD_RES (3)..(37): Xaa is C or S
  MOD_RES (17)..(18)..(19)..(20)..(21): Xaa is A or G
  MOD_RES (22)..(23)..(24)..(25): Xaa is A or G or is absent

SEQ ID NO: 27993 - protein, 34 aa, Artificial Sequence
  GFR-binding peptide
  MOD_RES (2)..(3)..(34): Xaa is C or S
PXXVPQDLSPISILYIVGRTPKVYKQYEMVVKSX

SEQ ID NO: 27994 - protein, 32 aa, Artificial Sequence; identical to SEQ ID NO: 6818
  GFR-binding peptide
  MOD_RES (14)..(15)..(16)..(17)..(18): Xaa is A or G
  MOD_RES (19)..(20)..(21)..(22): Xaa is A or G or is absent

SEQ ID NO: 27995 - protein, 33 aa, Artificial Sequence
  GFR-binding peptide
  MOD_RES (32)..(32): Xaa is C or S
APTKLEPISVLYLDSSNNVIKFKYENMVVKAXG

SEQ ID NO: 27996 - protein, 39 aa, Artificial Sequence
  GFR-binding peptide
  MOD_RES (5)..(6): Xaa is C or S
  MOD_RES (20)..(21)..(22)..(23)..(24): Xaa is A or G
  MOD_RES (25)..(26)..(27)..(28): Xaa is A or G or is absent
IPKAXXVPTELSPISMLYIXXXXXXXXXYKQYEEMVVEG

SEQ ID NO: 27997 - protein, 36 aa, Artificial Sequence
  GFR-binding peptide
  MOD_RES (1)..(34)..(36): Xaa is C or S
  MOD_RES (15)..(16)..(17)..(18)..(19): Xaa is A or G
  MOD_RES (20)..(21)..(22)..(23): Xaa is A or G or is absent
XVSQDLSPISILYIXXXXXXXXXYKQYEMIVKSXKX

SEQ ID NO: 27998 - protein, 32 aa, Artificial Sequence; identical to SEQ ID NO: 6822
  GFR-binding peptide
  MOD_RES (1)..(2): Xaa is C or S

SEQ ID NO: 27999 - protein, 39 aa, Artificial Sequence
  GFR-binding peptide
  MOD_RES (2)..(3)..(37)..(39): Xaa is C or S
  MOD_RES (17)..(18)..(19)..(20)..(21): Xaa is A or G
  MOD_RES (22)..(23)..(24)..(25): Xaa is A or G or is absent
PXXAPTQLSPISVLYIXXXXXXXXXYKQYENMVVRAXGX

SEQ ID NO: 28000 - protein, 36 aa, Artificial Sequence
  GFR-binding peptide
  MOD_RES (2)..(3): Xaa is C or S
  MOD_RES (17)..(18)..(19)..(20)..(21): Xaa is A or G
  MOD_RES (22)..(23)..(24)..(25): Xaa is A or G or is absent
SXXVPARLNAISILYFXXXXXXXXXLKKYRDMVVEA

SEQ ID NO: 28001 - protein, 42 aa, Artificial Sequence
  GFR-binding peptide
  MOD_RES (4)..(5)..(40)..(42): Xaa is C or S
  MOD_RES (19)..(20)..(21)..(22)..(23): Xaa is A or G
  MOD_RES (24)..(25)..(26)..(27): Xaa is A or G or is absent
GKAXXVPTKLSPISVLYIXXXXXXXXXYKQYEEGMSVAEXGX

SEQ ID NO: 28002 - protein, 40 aa, Artificial Sequence; identical to SEQ ID NO: 6823
  GFR-binding peptide
  MOD_RES (6)..(7)..(39): Xaa is C or S

SEQ ID NO: 28003 - protein, 37 aa, Artificial Sequence
  GFR-binding peptide
  MOD_RES (1)..(2)..(35)..(37): Xaa is C or S
  MOD_RES (16)..(17)..(18)..(19)..(20): Xaa is A or G
  MOD_RES (21)..(22)..(23)..(24): Xaa is A or G or is absent
XXVPQALEPISILYLXXXXXXXXXKFKYEMIVRSXKX

SEQ ID NO: 28004 - protein, 33 aa, Artificial Sequence; identical to SEQ ID NO: 6824
  GFR-binding peptide
  MOD_RES (1)..(1): Xaa is C or S
  MOD_RES (15)..(16)..(17)..(18)..(19): Xaa is A or G
  MOD_RES (20)..(21)..(22)..(23): Xaa is A or G or is absent

SEQ ID NO: 28005 - protein, 36 aa, Artificial Sequence; identical to SEQ ID NO: 6826
  GFR-binding peptide
  MOD_RES (3)..(4): Xaa is C or S
  MOD_RES (18)..(19)..(20)..(21)..(22): Xaa is A or G
  MOD_RES (23)..(24)..(25)..(26): Xaa is A or G or is absent

SEQ ID NO: 28006 - protein, 39 aa, Artificial Sequence
  GFR-binding peptide
  MOD_RES (2)..(3)..(37)..(39): Xaa is C or S
  MOD_RES (17)..(18)..(19)..(20)..(21): Xaa is A or G
  MOD_RES (22)..(23)..(24)..(25): Xaa is A or G or is absent
AXXVPTKLEPISILYLXXXXXXXXXKFKYEGMAVSEXGX

SEQ ID NO: 28007 - protein, 40 aa, Artificial Sequence; identical to SEQ ID NO: 6828
  GFR-binding peptide
  MOD_RES (6)..(7): Xaa is C or S
  MOD_RES (21)..(22)..(23)..(24)..(25): Xaa is A or G
  MOD_RES (26)..(27)..(28)..(29): Xaa is A or G or is absent

SEQ ID NO: 28008 - protein, 37 aa, Artificial Sequence
  GFR-binding peptide
  MOD_RES (5)..(6): Xaa is C or S
VPKPXXAPTKLSPISVLYIDDSSNVIYKQYENMVVRS

SEQ ID NO: 28009 - protein, 37 aa, Artificial Sequence
  GFR-binding peptide
  MOD_RES (5)..(6): Xaa is C or S
VPKPXXAPTQLEPISVLYLDDSSNVIKFKYENMVVRA

SEQ ID NO: 28010 - protein, 40 aa, Artificial Sequence; identical to SEQ ID NO: 6831
  GFR-binding peptide
  MOD_RES (6)..(7)..(38)..(40): Xaa is C or S

SEQ ID NO: 28011 - protein, 33 aa, Artificial Sequence
  GFR-binding peptide
  MOD_RES (1)..(2)..(33): Xaa is C or S
XXVSQDLSPISILYIIGKTPKIYKQYEMIVKSX

SEQ ID NO: 28012 - protein, 36 aa, Artificial Sequence; identical to SEQ ID NO: 6833
  GFR-binding peptide
  MOD_RES (4)..(5)..(36): Xaa is C or S

SEQ ID NO: 28013 - protein, 40 aa, Artificial Sequence; identical to SEQ ID NO: 6834
  GFR-binding peptide
  MOD_RES (5)..(6)..(40): Xaa is C or S
  MOD_RES (20)..(21)..(22)..(23)..(24): Xaa is A or G
  MOD_RES (25)..(26)..(27)..(28): Xaa is A or G or is absent

SEQ ID NO: 28014 - protein, 37 aa, Artificial Sequence; identical to SEQ ID NO: 6835
  GFR-binding peptide
  MOD_RES (34)..(36): Xaa is C or S
  MOD_RES (14)..(15)..(16)..(17)..(18): Xaa is A or G
  MOD_RES (19)..(20)..(21)..(22): Xaa is A or G or is absent

SEQ ID NO: 28015 - protein, 32 aa, Artificial Sequence
  GFR-binding peptide
  MOD_RES (31)..(31): Xaa is C or S
VPQALSPISILYIVGRKPKVYKQYEMIVRSXK

SEQ ID NO: 28016 - protein, 31 aa, Artificial Sequence
  GFR-binding peptide
  MOD_RES (1)..(1): Xaa is C or S
XAPTQLSPISVLYIDDSSNVIYKQYENMVVR

SEQ ID NO: 28017 - protein, 40 aa, Artificial Sequence
  GFR-binding peptide
  MOD_RES (6)..(7)..(39): Xaa is C or S
TVPKPXXAPTQLSPISVLYIDDSSNVIYKQYENMVVRAXG

SEQ ID NO: 28018 - protein, 36 aa, Artificial Sequence
  GFR-binding peptide
  MOD_RES (3)..(4): Xaa is C or S
KAXXVPTKLEPISVLYLDDMGVPTKFKYEEGMSVAE

SEQ ID NO: 28019 - protein, 33 aa, Artificial Sequence; identical to SEQ ID NO: 6840
  GFR-binding peptide
  MOD_RES (1)..(2)..(33): Xaa is C or S

SEQ ID NO: 28020 - protein, 38 aa, Artificial Sequence; identical to SEQ ID NO: 6841
  GFR-binding peptide
  MOD_RES (5)..(6): Xaa is C or S
  MOD_RES (20)..(21)..(22)..(23)..(24): Xaa is A or G
  MOD_RES (25)..(26)..(27)..(28): Xaa is A or G or is absent

SEQ ID NO: 28021 - protein, 35 aa, Artificial Sequence
  GFR-binding peptide
  MOD_RES (2)..(3): Xaa is C or S
  MOD_RES (17)..(18)..(19)..(20)..(21): Xaa is A or G
  MOD_RES (22)..(23)..(24)..(25): Xaa is A or G or is absent
SXXVPARLSPISILYKXXXXXXXXXLKYHYDMVVE

SEQ ID NO: 28022 - protein, 37 aa, Artificial Sequence
  GFR-binding peptide
  MOD_RES (3)..(4)..(36): Xaa is C or S
KAXXVPTKLNAISILYFDKGVVTYLKKYRGMAVSEXG

SEQ ID NO: 28023 - protein, 41 aa, Artificial Sequence
  GFR-binding peptide
  MOD_RES (5)..(6)..(38)..(40): Xaa is C or S
VPKPXXAPTQLEPISVLYLDDSSNVIKFKYENMVVRAXGXH

SEQ ID NO: 28024 - protein, 37 aa, Artificial Sequence; identical to SEQ ID NO: 6847
  GFR-binding peptide
  MOD_RES (3)..(4)..(36): Xaa is C or S

SEQ ID NO: 28025 - protein, 39 aa, Artificial Sequence; identical to SEQ ID NO: 6848
  GFR-binding peptide
  MOD_RES (5)..(6)..(38): Xaa is C or S

SEQ ID NO: 28026 - protein, 35 aa, Artificial Sequence; identical to SEQ ID NO: 6849
  GFR-binding peptide
  MOD_RES (1)..(2)..(35): Xaa is C or S
  MOD_RES (16)..(17)..(18)..(19)..(20): Xaa is A or G
  MOD_RES (21)..(22)..(23)..(24): Xaa is A or G or is absent

SEQ ID NO: 28027 - protein, 42 aa, Artificial Sequence
  GFR-binding peptide
  MOD_RES (6)..(7)..(39)..(41): Xaa is C or S
TVPKPXXAPTQLSPISVLYIDDSSNVIYKQYENMVVRAXGXH

SEQ ID NO: 28028 - protein, 36 aa, Artificial Sequence; identical to SEQ ID NO: 6851
  GFR-binding peptide
  MOD_RES (1)..(33)..(35): Xaa is C or S

SEQ ID NO: 28029 - protein, 41 aa, Artificial Sequence
  GFR-binding peptide
  MOD_RES (6)..(40): Xaa is C or S
  MOD_RES (20)..(21)..(22)..(23)..(24): Xaa is A or G
  MOD_RES (25)..(26)..(27)..(28): Xaa is A or G or is absent
VTKPTXAPTKLEPISVLYLXXXXXXXXXKFKYENMVVRSXG

SEQ ID NO: 28030 - protein, 41 aa, Artificial Sequence
  GFR-binding peptide
  MOD_RES (3)..(4)..(38)..(40): Xaa is C or S
  MOD_RES (18)..(19)..(20)..(21)..(22): Xaa is A or G
  MOD_RES (23)..(24)..(25)..(26): Xaa is A or G or is absent
KAXXVPTELEPISMLYLXXXXXXXXXKFKYEDMVVEGXGXR

SEQ ID NO: 28031 - protein, 38 aa, Artificial Sequence
  GFR-binding peptide
  MOD_RES (4)..(5)..(38): Xaa is C or S
  MOD_RES (19)..(20)..(21)..(22)..(23): Xaa is A or G
  MOD_RES (24)..(25)..(26)..(27): Xaa is A or G or is absent
AAPXXVPQALEPISILYLXXXXXXXXXKFKYEMIVRSX

SEQ ID NO: 28032 - protein, 33 aa, Artificial Sequence
  GFR-binding peptide
  MOD_RES (1)..(1): Xaa is C or S
  MOD_RES (15)..(16)..(17)..(18)..(19): Xaa is A or G
  MOD_RES (20)..(21)..(22)..(23): Xaa is A or G or is absent
XVPTELEPISMLYLXXXXXXXXXKFKYEEMVVE

SEQ ID NO: 28033 - protein, 40 aa, Artificial Sequence
  GFR-binding peptide
  MOD_RES (2)..(3)..(37)..(39): Xaa is C or S
  MOD_RES (17)..(18)..(19)..(20)..(21): Xaa is A or G
  MOD_RES (22)..(23)..(24)..(25): Xaa is A or G or is absent
AXXVPTKLSPISILYIXXXXXXXXXYKQYEGMAVSEXGXR

SEQ ID NO: 28034 - protein, 39 aa, Artificial Sequence; identical to SEQ ID NO: 6856
  GFR-binding peptide
  MOD_RES (3)..(4)..(38): Xaa is C or S
  MOD_RES (18)..(19)..(20)..(21)..(22): Xaa is A or G
  MOD_RES (23)..(24)..(25)..(26): Xaa is A or G or is absent

SEQ ID NO: 28035 - protein, 33 aa, Artificial Sequence; identical to SEQ ID NO: 6857
  GFR-binding peptide
  MOD_RES (32)..(32): Xaa is C or S

SEQ ID NO: 28036 - protein, 40 aa, Artificial Sequence
  GFR-binding peptide
  MOD_RES (5)..(6)..(38)..(40): Xaa is C or S
VPKPXXAPTQLSPISVLYIDDSSNVIYKQYENMVVRAXGX

SEQ ID NO: 28037 - protein, 35 aa, Artificial Sequence; identical to SEQ ID NO: 6860
  GFR-binding peptide
  MOD_RES (3)..(4)..(35): Xaa is C or S

SEQ ID NO: 28038 - protein, 37 aa, Artificial Sequence
  GFR-binding peptide
  MOD_RES (2)..(3)..(35)..(37): Xaa is C or S
AXXVPTKLSPISILYIDKGVVTYYKQYEGMAVSEXGX

SEQ ID NO: 28039 - protein, 39 aa, Artificial Sequence
  GFR-binding peptide
  MOD_RES (1)..(2)..(36)..(38): Xaa is C or S
  MOD_RES (16)..(17)..(18)..(19)..(20): Xaa is A or G
  MOD_RES (21)..(22)..(23)..(24): Xaa is A or G or is absent
XXVPTKLSPISILYIXXXXXXXXXYKQYEGMAVSEXGXR

SEQ ID NO: 28040 - protein, 36 aa, Artificial Sequence
  GFR-binding peptide
  MOD_RES (4)..(5): Xaa is C or S
PKAXXAPTKLEPISVLYLDSSNNVIKFKYENMVVKA

SEQ ID NO: 28041 - protein, 37 aa, Artificial Sequence; identical to SEQ ID NO: 6863
  GFR-binding peptide
  MOD_RES (4)..(5): Xaa is C or S
  MOD_RES (19)..(20)..(21)..(22)..(23): Xaa is A or G
  MOD_RES (24)..(25)..(26)..(27): Xaa is A or G or is absent

SEQ ID NO: 28042 - protein, 34 aa, Artificial Sequence
  GFR-binding peptide
  MOD_RES (33)..(33): Xaa is C or S
  MOD_RES (14)..(15)..(16)..(17)..(18): Xaa is A or G
  MOD_RES (19)..(20)..(21)..(22): Xaa is A or G or is absent
VPQALEPISILYLXXXXXXXXXKFKYEMIVRSXK

SEQ ID NO: 28043 - protein, 32 aa, Artificial Sequence
  GFR-binding peptide
  MOD_RES (1)..(2): Xaa is C or S
XXAPTKLEPISVLYLDSSNNVIKFKYENMVVK

SEQ ID NO: 28044 - protein, 39 aa, Artificial Sequence
  GFR-binding peptide
  MOD_RES (7)..(39): Xaa is C or S
HVTKPTXAPTKLSPISVLYIDDSSNVIYKQYENMVVRSX

SEQ ID NO: 28045 - protein, 39 aa, Artificial Sequence
  GFR-binding peptide
  MOD_RES (5)..(6): Xaa is C or S
  MOD_RES (20)..(21)..(22)..(23)..(24): Xaa is A or G
  MOD_RES (25)..(26)..(27)..(28): Xaa is A or G or is absent
VPKPXXAPTKLSPISVLYIXXXXXXXXXYKQYENMVVRS

SEQ ID NO: 28046 - protein, 36 aa, Artificial Sequence
  GFR-binding peptide
  MOD_RES (5)..(6): Xaa is C or S
SASPXXVPQDLEPISILYLVGRTPKVKFKYEMVVKS

SEQ ID NO: 28047 - protein, 40 aa, Artificial Sequence; identical to SEQ ID NO: 6869
  GFR-binding peptide
  MOD_RES (3)..(4)..(37)..(39): Xaa is C or S
  MOD_RES (18)..(19)..(20)..(21)..(22): Xaa is A or G
  MOD_RES (23)..(24)..(25)..(26): Xaa is A or G or is absent

SEQ ID NO: 28048 - protein, 35 aa, Artificial Sequence
  GFR-binding peptide
  MOD_RES (1)..(2)..(33)..(35): Xaa is C or S
XXVPQALEPISILYLVGRKPKVKFKYEMIVRSXKX

SEQ ID NO: 28049 - protein, 36 aa, Artificial Sequence
  GFR-binding peptide
  MOD_RES (1)..(2)..(36): Xaa is C or S
  MOD_RES (16)..(17)..(18)..(19)..(20): Xaa is A or G
  MOD_RES (21)..(22)..(23)..(24): Xaa is A or G or is absent
XXVPARLNAISILYFXXXXXXXXXLKKYRDMVVEAX

SEQ ID NO: 28050 - protein, 37 aa, Artificial Sequence
  GFR-binding peptide
  MOD_RES (4)..(5): Xaa is C or S
  MOD_RES (19)..(20)..(21)..(22)..(23): Xaa is A or G
  MOD_RES (24)..(25)..(26)..(27): Xaa is A or G or is absent
PKPXXAPTQLEPISVLYLXXXXXXXXXKFKYENMVVR

SEQ ID NO: 28051 - protein, 37 aa, Artificial Sequence
  GFR-binding peptide
  MOD_RES (6)..(7): Xaa is C or S
ASAAPXXVPQALEPISILYLVGRKPKVKFKYEMIVRS

SEQ ID NO: 28052 - protein, 38 aa, Artificial Sequence
  GFR-binding peptide
  MOD_RES (2)..(36)..(38): Xaa is C or S
  MOD_RES (16)..(17)..(18)..(19)..(20): Xaa is A or G
  MOD_RES (21)..(22)..(23)..(24): Xaa is A or G or is absent
TXAPTKLSPISVLYIXXXXXXXXXYKQYENMVVRSXGX

SEQ ID NO: 28053 - protein, 39 aa, Artificial Sequence
  GFR-binding peptide
  MOD_RES (6)..(38): Xaa is C or S
VTKPTXAPTKLEPISVLYLDDSSNVIKFKYENMVVRSXG

SEQ ID NO: 28054 - protein, 36 aa, Artificial Sequence
  GFR-binding peptide
  MOD_RES (2)..(3)..(36): Xaa is C or S
  MOD_RES (17)..(18)..(19)..(20)..(21): Xaa is A or G
  MOD_RES (22)..(23)..(24)..(25): Xaa is A or G or is absent
PXXVSQDLEPISILYLXXXXXXXXXKFKYEMIVKSX

SEQ ID NO: 28055 - protein, 33 aa, Artificial Sequence
  GFR-binding peptide
  MOD_RES (31)..(33): Xaa is C or S
VPQALSPISILYIVGRKPKVYKQYEMIVRSXKX

SEQ ID NO: 28056 - protein, 36 aa, Artificial Sequence
  GFR-binding peptide
  MOD_RES (1)..(33)..(35): Xaa is C or S
XAPTQLSPISVLYIDDSSNVIYKQYENMVVRAXGXH

SEQ ID NO: 28057 - protein, 35 aa, Artificial Sequence
  GFR-binding peptide
  MOD_RES (34)..(34): Xaa is C or S
  MOD_RES (14)..(15)..(16)..(17)..(18): Xaa is A or G
  MOD_RES (19)..(20)..(21)..(22): Xaa is A or G or is absent
VPARLEPISILYLXXXXXXXXXKFKYEDMVVEAXG

SEQ ID NO: 28058 - protein, 41 aa, Artificial Sequence; identical to SEQ ID NO: 6880
  GFR-binding peptide
  MOD_RES (5)..(6)..(38)..(40): Xaa is C or S

SEQ ID NO: 28059 - protein, 37 aa, Artificial Sequence
  GFR-binding peptide
  MOD_RES (2)..(3)..(35)..(37): Xaa is C or S
SXXVPARLSPISILYKDAANNVVLKYHYDMVVEAXGX

SEQ ID NO: 28060 - protein, 32 aa, Artificial Sequence
  GFR-binding peptide
  MOD_RES (1)..(1): Xaa is C or S
XVPTELSPISMLYIDENEKVVYKQYEDMVVEG

SEQ ID NO: 28061 - protein, 42 aa, Artificial Sequence
  GFR-binding peptide
  MOD_RES (5)..(6)..(39)..(41): Xaa is C or S
VGKAXXVPTKLEPISVLYLDDMGVPTKFKYEEGMSVAEXGXR

SEQ ID NO: 28062 - protein, 35 aa, Artificial Sequence
  GFR-binding peptide
  MOD_RES (32)..(34): Xaa is C or S
VPTKLSPISILYKDKGVVTYLKYHYGMAVSEXGXR

SEQ ID NO: 28063 - protein, 36 aa, Artificial Sequence; identical to SEQ ID NO: 6882
  GFR-binding peptide
  MOD_RES (2)..(3)..(36): Xaa is C or S
  MOD_RES (17)..(18)..(19)..(20)..(21): Xaa is A or G
  MOD_RES (22)..(23)..(24)..(25): Xaa is A or G or is absent

SEQ ID NO: 28064 - protein, 38 aa, Artificial Sequence
  GFR-binding peptide
  MOD_RES (2)..(3)..(35)..(37): Xaa is C or S
AXXVPTELEPISMLYLDENEKVVKFKYEDMVVEGXGXR

SEQ ID NO: 28065 - protein, 35 aa, Artificial Sequence; identical to SEQ ID NO: 6886
  GFR-binding peptide
  MOD_RES (3)..(4): Xaa is C or S

SEQ ID NO: 28066 - protein, 35 aa, Artificial Sequence
  GFR-binding peptide
  MOD_RES (32)..(34): Xaa is C or S
VPARLSPISILYKDAANNVVLKYHYDMVVEAXGXR

SEQ ID NO: 28067 - protein, 34 aa, Artificial Sequence
  GFR-binding peptide
  MOD_RES (2)..(3)..(34): Xaa is C or S
PXXVPQALEPISILYLVGRKPKVKFKYEMIVRSX

SEQ ID NO: 28068 - protein, 38 aa, Artificial Sequence
  GFR-binding peptide
  MOD_RES (3)..(4)..(35)..(37): Xaa is C or S
APXXVPQALSPISILYIVGRKPKVYKQYEMIVRSXKXS

SEQ ID NO: 28069 - protein, 32 aa, Artificial Sequence
  GFR-binding peptide
  MOD_RES (1)..(1): Xaa is C or S
XAPTKLSPISVLYIDDSSNVIYKQYENMVVRS

SEQ ID NO: 28070 - protein, 35 aa, Artificial Sequence; identical to SEQ ID NO: 6891
  GFR-binding peptide
  MOD_RES (1)..(1): Xaa is C or S
  MOD_RES (15)..(16)..(17)..(18)..(19): Xaa is A or G
  MOD_RES (20)..(21)..(22)..(23): Xaa is A or G or is absent

SEQ ID NO: 28071 - protein, 33 aa, Artificial Sequence
  GFR-binding peptide
  MOD_RES (1)..(1): Xaa is C or S
  MOD_RES (15)..(16)..(17)..(18)..(19): Xaa is A or G
  MOD_RES (20)..(21)..(22)..(23): Xaa is A or G or is absent
XVSQDLEPISILYLXXXXXXXXXKFKYEMIVKS

SEQ ID NO: 28072 - protein, 39 aa, Artificial Sequence
  GFR-binding peptide
  MOD_RES (6)..(7): Xaa is C or S
KVGKAXXVPTKLEPISVLYLDDMGVPTKFKYEEGMSVAE

SEQ ID NO: 28073 - protein, 35 aa, Artificial Sequence; identical to SEQ ID NO: 6892
  GFR-binding peptide
  MOD_RES (1)..(2): Xaa is C or S
  MOD_RES (16)..(17)..(18)..(19)..(20): Xaa is A or G
  MOD_RES (21)..(22)..(23)..(24): Xaa is A or G or is absent

SEQ ID NO: 28074 - protein, 37 aa, Artificial Sequence
  GFR-binding peptide
  MOD_RES (1)..(2)..(36): Xaa is C or S
  MOD_RES (16)..(17)..(18)..(19)..(20): Xaa is A or G
  MOD_RES (21)..(22)..(23)..(24): Xaa is A or G or is absent
XXVPTELEPISMLYLXXXXXXXXXKFKYEDMVVEGXG

SEQ ID NO: 28075 - protein, 38 aa, Artificial Sequence
  GFR-binding peptide
  MOD_RES (4)..(5): Xaa is C or S
  MOD_RES (19)..(20)..(21)..(22)..(23): Xaa is A or G
  MOD_RES (24)..(25)..(26)..(27): Xaa is A or G or is absent
PKAXXVPTELEPISMLYLXXXXXXXXXKFKYEEMVVEG

SEQ ID NO: 28076 - protein, 36 aa, Artificial Sequence
  GFR-binding peptide
  MOD_RES (1)..(2)..(35): Xaa is C or S
  MOD_RES (16)..(17)..(18)..(19)..(20): Xaa is A or G
  MOD_RES (21)..(22)..(23)..(24): Xaa is A or G or is absent
XXVSQDLSPISILYIXXXXXXXXXYKQYEMIVKSXK

SEQ ID NO: 28077 - protein, 33 aa, Artificial Sequence
  GFR-binding peptide
  MOD_RES (1)..(2): Xaa is C or S
XXVPTELSPISMLYIDEYDKVVYKQYEEMVVEG

SEQ ID NO: 28078 - protein, 37 aa, Artificial Sequence
  GFR-binding peptide
  MOD_RES (4)..(5)..(37): Xaa is C or S
SKAXXVPTKLSPISILYIDKGVVTYYKQYEGMAVSEX

SEQ ID NO: 28079 - protein, 39 aa, Artificial Sequence
  GFR-binding peptide
  MOD_RES (4)..(5)..(39): Xaa is C or S
  MOD_RES (19)..(20)..(21)..(22)..(23): Xaa is A or G
  MOD_RES (24)..(25)..(26)..(27): Xaa is A or G or is absent
SKAXXVPTKLSPISILYIXXXXXXXXXYKQYEGMAVSEX

SEQ ID NO: 28080 - protein, 37 aa, Artificial Sequence
  GFR-binding peptide
  MOD_RES (3)..(37): Xaa is C or S
  MOD_RES (17)..(18)..(19)..(20)..(21): Xaa is A or G
  MOD_RES (22)..(23)..(24)..(25): Xaa is A or G or is absent
PTXAPTKLEPISVLYLXXXXXXXXXKFKYENMVVRSX

SEQ ID NO: 28081 - protein, 38 aa, Artificial Sequence; identical to SEQ ID NO: 6898
  GFR-binding peptide
  MOD_RES (2)..(3)..(36)..(38): Xaa is C or S
  MOD_RES (17)..(18)..(19)..(20)..(21): Xaa is A or G
  MOD_RES (22)..(23)..(24)..(25): Xaa is A or G or is absent

SEQ ID NO: 28082 - protein, 35 aa, Artificial Sequence
  GFR-binding peptide
  MOD_RES (3)..(4): Xaa is C or S
ASXXVPARLNAISILYFDAANNVVLKKYRDMVVEA

SEQ ID NO: 28083 - protein, 37 aa, Artificial Sequence
  GFR-binding peptide
  MOD_RES (1)..(2)..(34)..(36): Xaa is C or S
XXVPTKLSPISILYIDKGVVTYYKQYEGMAVSEXGXR

SEQ ID NO: 28084 - protein, 33 aa, Artificial Sequence; identical to SEQ ID NO: 6899
  GFR-binding peptide
  MOD_RES (1)..(2): Xaa is C or S

SEQ ID NO: 28085 - protein, 38 aa, Artificial Sequence; identical to SEQ ID NO: 6900
  GFR-binding peptide
  MOD_RES (1)..(2)..(36)..(38): Xaa is C or S
  MOD_RES (16)..(17)..(18)..(19)..(20): Xaa is A or G
  MOD_RES (21)..(22)..(23)..(24): Xaa is A or G or is absent

SEQ ID NO: 28086 - protein, 37 aa, Artificial Sequence; identical to SEQ ID NO: 6901
  GFR-binding peptide
  MOD_RES (3)..(4): Xaa is C or S
  MOD_RES (18)..(19)..(20)..(21)..(22): Xaa is A or G
  MOD_RES (23)..(24)..(25)..(26): Xaa is A or G or is absent

SEQ ID NO: 28087 - protein, 40 aa, Artificial Sequence; identical to SEQ ID NO: 6902
  GFR-binding peptide
  MOD_RES (2)..(3)..(37)..(39): Xaa is C or S
  MOD_RES (17)..(18)..(19)..(20)..(21): Xaa is A or G
  MOD_RES (22)..(23)..(24)..(25): Xaa is A or G or is absent

SEQ ID NO: 28088 - protein, 33 aa, Artificial Sequence
  GFR-binding peptide
  MOD_RES (1)..(2): Xaa is C or S
XXVPTELEPISMLYLDEYDKVVKFKYEEMVVEG

SEQ ID NO: 28089 - protein, 36 aa, Artificial Sequence
  GFR-binding peptide
  MOD_RES (2)..(3)..(35): Xaa is C or S
PXXAPTQLSPISVLYIDDSSNVIYKQYENMVVRAXG

SEQ ID NO: 28090 - protein, 37 aa, Artificial Sequence
  GFR-binding peptide
  MOD_RES (2)..(3)..(36): Xaa is C or S
  MOD_RES (17)..(18)..(19)..(20)..(21): Xaa is A or G
  MOD_RES (22)..(23)..(24)..(25): Xaa is A or G or is absent
PXXVSQDLSPISILYIXXXXXXXXXYKQYEMIVKSXK

SEQ ID NO: 28091 - protein, 32 aa, Artificial Sequence; identical to SEQ ID NO: 6905
  GFR-binding peptide
  MOD_RES (14)..(15)..(16)..(17)..(18): Xaa is A or G
  MOD_RES (19)..(20)..(21)..(22): Xaa is A or G or is absent

SEQ ID NO: 28092 - protein, 37 aa, Artificial Sequence; identical to SEQ ID NO: 6906
  GFR-binding peptide
  MOD_RES (4)..(5): Xaa is C or S
  MOD_RES (19)..(20)..(21)..(22)..(23): Xaa is A or G
  MOD_RES (24)..(25)..(26)..(27): Xaa is A or G or is absent

SEQ ID NO: 28093 - protein, 34 aa, Artificial Sequence
  GFR-binding peptide
  MOD_RES (1)..(1): Xaa is C or S
  MOD_RES (15)..(16)..(17)..(18)..(19): Xaa is A or G
  MOD_RES (20)..(21)..(22)..(23): Xaa is A or G or is absent
XVPTELEPISMLYLXXXXXXXXXKFKYEEMVVEG

SEQ ID NO: 28094 - protein, 42 aa, Artificial Sequence
  GFR-binding peptide
  MOD_RES (4)..(5)..(39)..(41): Xaa is C or S
  MOD_RES (19)..(20)..(21)..(22)..(23): Xaa is A or G
  MOD_RES (24)..(25)..(26)..(27): Xaa is A or G or is absent
PASXXVPARLSPISILYIXXXXXXXXXYKQYEDMVVEAXGXR

SEQ ID NO: 28095 - protein, 40 aa, Artificial Sequence; identical to SEQ ID NO: 6908
  GFR-binding peptide
  MOD_RES (6)..(7)..(39): Xaa is C or S

SEQ ID NO: 28096 - protein, 39 aa, Artificial Sequence; identical to SEQ ID NO: 6909
  GFR-binding peptide
  MOD_RES (6)..(7)..(38): Xaa is C or S

SEQ ID NO: 28097 - protein, 42 aa, Artificial Sequence
  GFR-binding peptide
  MOD_RES (6)..(7)..(39)..(41): Xaa is C or S
TVPKPXXAPTQLEPISVLYLDDSSNVIKFKYENMVVRAXGXH

SEQ ID NO: 28098 - protein, 35 aa, Artificial Sequence
  GFR-binding peptide
  MOD_RES (1)..(34): Xaa is C or S
  MOD_RES (15)..(16)..(17)..(18)..(19): Xaa is A or G
  MOD_RES (20)..(21)..(22)..(23): Xaa is A or G or is absent
XVSQDLSPISILYIXXXXXXXXXYKQYEMIVKSXK

SEQ ID NO: 28099 - protein, 42 aa, Artificial Sequence
  GFR-binding peptide
  MOD_RES (6)..(7)..(39)..(41): Xaa is C or S
AVPKAXXAPTKLEPISVLYLDSSNNVIKFKYENMVVKAXGXH

SEQ ID NO: 28100 - protein, 38 aa, Artificial Sequence
  GFR-binding peptide
  MOD_RES (3)..(4)..(37): Xaa is C or S
KAXXVPTKLSPISVLYIDDMGVPTYKQYEEGMSVAEXG

SEQ ID NO: 28101 - protein, 39 aa, Artificial Sequence; identical to SEQ ID NO: 6914
  GFR-binding peptide
  MOD_RES (6)..(7)..(39): Xaa is C or S

SEQ ID NO: 28102 - protein, 35 aa, Artificial Sequence; identical to SEQ ID NO: 6915
  GFR-binding peptide
  MOD_RES (34)..(34): Xaa is C or S
  MOD_RES (14)..(15)..(16)..(17)..(18): Xaa is A or G
  MOD_RES (19)..(20)..(21)..(22): Xaa is A or G or is absent

SEQ ID NO: 28103 - protein, 31 aa, Artificial Sequence; identical to SEQ ID NO: 6916
  GFR-binding peptide
  MOD_RES (1)..(1): Xaa is C or S

SEQ ID NO: 28104 - protein, 41 aa, Artificial Sequence; identical to SEQ ID NO: 6917
  GFR-binding peptide
  MOD_RES (4)..(5)..(40): Xaa is C or S
  MOD_RES (19)..(20)..(21)..(22)..(23): Xaa is A or G
  MOD_RES (24)..(25)..(26)..(27): Xaa is A or G or is absent

SEQ ID NO: 28105 - protein, 34 aa, Artificial Sequence; identical to SEQ ID NO: 6920
  GFR-binding peptide
  MOD_RES (1)..(2): Xaa is C or S
  MOD_RES (16)..(17)..(18)..(19)..(20): Xaa is A or G
  MOD_RES (21)..(22)..(23)..(24): Xaa is A or G or is absent

SEQ ID NO: 28106 - protein, 34 aa, Artificial Sequence
  GFR-binding peptide
  MOD_RES (33)..(33): Xaa is C or S
  MOD_RES (14)..(15)..(16)..(17)..(18): Xaa is A or G
  MOD_RES (19)..(20)..(21)..(22): Xaa is A or G or is absent
VSQDLSPISILYIXXXXXXXXXYKQYEMIVKSXK

SEQ ID NO: 28107 - protein, 39 aa, Artificial Sequence
  GFR-binding peptide
  MOD_RES (6)..(7): Xaa is C or S
  MOD_RES (21)..(22)..(23)..(24)..(25): Xaa is A or G
  MOD_RES (26)..(27)..(28)..(29): Xaa is A or G or is absent
AVPKAXXAPTKLEPISVLYLXXXXXXXXXKFKYENMVVK

SEQ ID NO: 28108 - protein, 35 aa, Artificial Sequence
  GFR-binding peptide
  MOD_RES (32)..(34): Xaa is C or S
APTQLSPISVLYIDDSSNVIYKQYENMVVRAXGXH

SEQ ID NO: 28109 - protein, 35 aa, Artificial Sequence; identical to SEQ ID NO: 6927
  GFR-binding peptide
  MOD_RES (4)..(5): Xaa is C or S

SEQ ID NO: 28110 - protein, 43 aa, Artificial Sequence
  GFR-binding peptide
  MOD_RES (5)..(6)..(40)..(42): Xaa is C or S
  MOD_RES (20)..(21)..(22)..(23)..(24): Xaa is A or G
  MOD_RES (25)..(26)..(27)..(28): Xaa is A or G or is absent
APASXXVPARLSPISILYKXXXXXXXXXLKYHYDMVVEAXGXR

SEQ ID NO: 28111 - protein, 34 aa, Artificial Sequence
  GFR-binding peptide
  MOD_RES (1)..(2)..(34): Xaa is C or S
XXAPTKLEPISVLYLDDSSNVIKFKYENMVVRSX

SEQ ID NO: 28112 - protein, 38 aa, Artificial Sequence
  GFR-binding peptide
  MOD_RES (4)..(5): Xaa is C or S
  MOD_RES (19)..(20)..(21)..(22)..(23): Xaa is A or G
  MOD_RES (24)..(25)..(26)..(27): Xaa is A or G or is absent
SKAXXVPTKLEPISILYLXXXXXXXXXKFKYEGMAVSE

SEQ ID NO: 28113 - protein, 40 aa, Artificial Sequence
  GFR-binding peptide
  MOD_RES (4)..(5)..(37)..(39): Xaa is C or S
PASXXVPARLEPISILYLDAANNVVKFKYEDMVVEAXGXR

SEQ ID NO: 28114 - protein, 34 aa, Artificial Sequence; identical to SEQ ID NO: 6929
  GFR-binding peptide
  MOD_RES (2)..(3)..(34): Xaa is C or S

SEQ ID NO: 28115 - protein, 38 aa, Artificial Sequence; identical to SEQ ID NO: 6930
  GFR-binding peptide
  MOD_RES (6)..(7)..(38): Xaa is C or S

SEQ ID NO: 28116 - protein, 40 aa, Artificial Sequence
  GFR-binding peptide
  MOD_RES (6)..(7)..(39): Xaa is C or S
SIPKAXXVPTELSPISMLYIDEYDKVVYKQYEEMVVEGXG

SEQ ID NO: 28117 - protein, 36 aa, Artificial Sequence
  GFR-binding peptide
  MOD_RES (1)..(2)..(36): Xaa is C or S
  MOD_RES (16)..(17)..(18)..(19)..(20): Xaa is A or G
  MOD_RES (21)..(22)..(23)..(24): Xaa is A or G or is absent
XXVPTKLSPISILYIXXXXXXXXXYKQYEGMAVSEX

SEQ ID NO: 28118 - protein, 40 aa, Artificial Sequence; identical to SEQ ID NO: 6937
  GFR-binding peptide
  MOD_RES (4)..(5)..(39): Xaa is C or S
  MOD_RES (19)..(20)..(21)..(22)..(23): Xaa is A or G
  MOD_RES (24)..(25)..(26)..(27): Xaa is A or G or is absent

SEQ ID NO: 28119 - protein, 38 aa, Artificial Sequence
  GFR-binding peptide
  MOD_RES (2)..(3)..(35)..(37): Xaa is C or S
AXXVPTELSPISMLYIDENEKVVYKQYEDMVVEGXGXR

SEQ ID NO: 28120 - protein, 32 aa, Artificial Sequence; identical to SEQ ID NO: 6938
  GFR-binding peptide
  MOD_RES (14)..(15)..(16)..(17)..(18): Xaa is A or G
  MOD_RES (19)..(20)..(21)..(22): Xaa is A or G or is absent

SEQ ID NO: 28121 - protein, 40 aa, Artificial Sequence
  GFR-binding peptide
  MOD_RES (6)..(7)..(40): Xaa is C or S
KVGKAXXVPTKLEPISVLYLDDMGVPTKFKYEEGMSVAEX

SEQ ID NO: 28122 - protein, 39 aa, Artificial Sequence; identical to SEQ ID NO: 6939
  GFR-binding peptide
  MOD_RES (4)..(5)..(38): Xaa is C or S
  MOD_RES (19)..(20)..(21)..(22)..(23): Xaa is A or G
  MOD_RES (24)..(25)..(26)..(27): Xaa is A or G or is absent

SEQ ID NO: 28123 - protein, 39 aa, Artificial Sequence
  GFR-binding peptide
  MOD_RES (3)..(4)..(36)..(38): Xaa is C or S
KAXXVPTKLSPISILYKDKGVVTYLKYHYGMAVSEXGXR

SEQ ID NO: 28124 - protein, 38 aa, Artificial Sequence
  GFR-binding peptide
  MOD_RES (1)..(2)..(37): Xaa is C or S
  MOD_RES (16)..(17)..(18)..(19)..(20): Xaa is A or G
  MOD_RES (21)..(22)..(23)..(24): Xaa is A or G or is absent
XXVPTKLEPISVLYLXXXXXXXXXKFKYEEGMSVAEXG

SEQ ID NO: 28125 - protein, 37 aa, Artificial Sequence; identical to SEQ ID NO: 6941
  GFR-binding peptide
  MOD_RES (2)..(3)..(35)..(37): Xaa is C or S

SEQ ID NO: 28126 - protein, 38 aa, Artificial Sequence
  GFR-binding peptide
  MOD_RES (3)..(4)..(37): Xaa is C or S
  MOD_RES (18)..(19)..(20)..(21)..(22): Xaa is A or G
  MOD_RES (23)..(24)..(25)..(26): Xaa is A or G or is absent
SPXXVPQDLEPISILYLXXXXXXXXXKFKYEMVVKSXK

SEQ ID NO: 28127 - protein, 32 aa, Artificial Sequence
  GFR-binding peptide
  MOD_RES (1)..(1): Xaa is C or S
XAPTKLEPISVLYLDDSSNVIKFKYENMVVRS

SEQ ID NO: 28128 - protein, 38 aa, Artificial Sequence
  GFR-binding peptide
  MOD_RES (6)..(7): Xaa is C or S
AVPKAXXAPTKLSPISVLYIDSSNNVIYKQYENMVVKA

SEQ ID NO: 28129 - protein, 36 aa, Artificial Sequence
  GFR-binding peptide
  MOD_RES (2)..(3)..(35): Xaa is C or S
AXXVPTELEPISMLYLDEYDKVVKFKYEEMVVEGXG

SEQ ID NO: 28130 - protein, 37 aa, Artificial Sequence
  GFR-binding peptide
  MOD_RES (1)..(2)..(36): Xaa is C or S
  MOD_RES (16)..(17)..(18)..(19)..(20): Xaa is A or G
  MOD_RES (21)..(22)..(23)..(24): Xaa is A or G or is absent
XXAPTKLSPISVLYIXXXXXXXXXYKQYENMVVKAXG

SEQ ID NO: 28131 - protein, 37 aa, Artificial Sequence
  GFR-binding peptide
  MOD_RES (4)..(5): Xaa is C or S
  MOD_RES (19)..(20)..(21)..(22)..(23): Xaa is A or G
  MOD_RES (24)..(25)..(26)..(27): Xaa is A or G or is absent
PASXXVPARLSPISILYKXXXXXXXXXLKYHYDMVVE

SEQ ID NO: 28132 - protein, 40 aa, Artificial Sequence
  GFR-binding peptide
  MOD_RES (4)..(5)..(39): Xaa is C or S
  MOD_RES (19)..(20)..(21)..(22)..(23): Xaa is A or G
  MOD_RES (24)..(25)..(26)..(27): Xaa is A or G or is absent
PKAXXVPTELSPISMLYIXXXXXXXXXYKQYEEMVVEGXG

SEQ ID NO: 28133 - protein, 38 aa, Artificial Sequence
  GFR-binding peptide
  MOD_RES (4)..(5)..(38): Xaa is C or S
  MOD_RES (19)..(20)..(21)..(22)..(23): Xaa is A or G
  MOD_RES (24)..(25)..(26)..(27): Xaa is A or G or is absent
ASPXXVPQDLEPISILYLXXXXXXXXXKFKYEMVVKSX

SEQ ID NO: 28134 - protein, 36 aa, Artificial Sequence; identical to SEQ ID NO: 6949
  GFR-binding peptide
  MOD_RES (4)..(5): Xaa is C or S

SEQ ID NO: 28135 - protein, 40 aa, Artificial Sequence
  GFR-binding peptide
  MOD_RES (6)..(7)..(38)..(40): Xaa is C or S
ASASPXXVPQDLSPISILYIVGRTPKVYKQYEMVVKSXKX

SEQ ID NO: 28136 - protein, 34 aa, Artificial Sequence
  GFR-binding peptide
  MOD_RES (14)..(15)..(16)..(17)..(18): Xaa is A or G
  MOD_RES (19)..(20)..(21)..(22): Xaa is A or G or is absent
VPTKLEPISVLYLXXXXXXXXXKFKYEEGMSVAE

SEQ ID NO: 28137 - protein, 35 aa, Artificial Sequence; identical to SEQ ID NO: 6950
  GFR-binding peptide
  MOD_RES (33)..(35): Xaa is C or S
  MOD_RES (14)..(15)..(16)..(17)..(18): Xaa is A or G
  MOD_RES (19)..(20)..(21)..(22): Xaa is A or G or is absent

SEQ ID NO: 28138 - protein, 34 aa, Artificial Sequence; identical to SEQ ID NO: 6956
  GFR-binding peptide
  MOD_RES (3)..(4): Xaa is C or S

SEQ ID NO: 28139 - protein, 37 aa, Artificial Sequence; identical to SEQ ID NO: 6957
  GFR-binding peptide
  MOD_RES (4)..(5): Xaa is C or S
  MOD_RES (19)..(20)..(21)..(22)..(23): Xaa is A or G
  MOD_RES (24)..(25)..(26)..(27): Xaa is A or G or is absent

SEQ ID NO: 28140 - protein, 37 aa, Artificial Sequence
  GFR-binding peptide
  MOD_RES (4)..(5)..(37): Xaa is C or S
PKAXXVPTELEPISMLYLDEYDKVVKFKYEEMVVEGX

SEQ ID NO: 28141 - protein, 34 aa, Artificial Sequence; identical to SEQ ID NO: 6959
  GFR-binding peptide
  MOD_RES (3)..(3): Xaa is C or S

SEQ ID NO: 28142 - protein, 37 aa, Artificial Sequence; identical to SEQ ID NO: 6961
  GFR-binding peptide
  MOD_RES (1)..(34)..(36): Xaa is C or S
  MOD_RES (15)..(16)..(17)..(18)..(19): Xaa is A or G
  MOD_RES (20)..(21)..(22)..(23): Xaa is A or G or is absent

SEQ ID NO: 28143 - protein, 36 aa, Artificial Sequence
  GFR-binding peptide
  MOD_RES (5)..(6): Xaa is C or S
VPKPXXAPTKLEPISVLYLDDSSNVIKFKYENMVVR

SEQ ID NO: 28144 - protein, 38 aa, Artificial Sequence; identical to SEQ ID NO: 6963
  GFR-binding peptide
  MOD_RES (4)..(5)..(38): Xaa is C or S
  MOD_RES (19)..(20)..(21)..(22)..(23): Xaa is A or G
  MOD_RES (24)..(25)..(26)..(27): Xaa is A or G or is absent

SEQ ID NO: 28145 - protein, 36 aa, Artificial Sequence
  GFR-binding peptide
  MOD_RES (1)..(2)..(33)..(35): Xaa is C or S
XXVPQDLSPISILYIVGRTPKVYKQYEMVVKSXKXS

SEQ ID NO: 28146 - protein, 43 aa, Artificial Sequence
  GFR-binding peptide
  MOD_RES (6)..(7)..(41)..(43): Xaa is C or S
  MOD_RES (21)..(22)..(23)..(24)..(25): Xaa is A or G
  MOD_RES (26)..(27)..(28)..(29): Xaa is A or G or is absent
SIPKAXXVPTELEPISMLYLXXXXXXXXXKFKYEEMVVEGXGX

SEQ ID NO: 28147 - protein, 41 aa, Artificial Sequence; identical to SEQ ID NO: 6964
  GFR-binding peptide
  MOD_RES (6)..(40): Xaa is C or S
  MOD_RES (20)..(21)..(22)..(23)..(24): Xaa is A or G
  MOD_RES (25)..(26)..(27)..(28): Xaa is A or G or is absent

SEQ ID NO: 28148 - protein, 35 aa, Artificial Sequence
  GFR-binding peptide
  MOD_RES (34)..(34): Xaa is C or S
  MOD_RES (14)..(15)..(16)..(17)..(18): Xaa is A or G
  MOD_RES (19)..(20)..(21)..(22): Xaa is A or G or is absent
APTKLSPISVLYIXXXXXXXXXYKQYENMVVRSXG

SEQ ID NO: 28149 - protein, 40 aa, Artificial Sequence; identical to SEQ ID NO: 6967
  GFR-binding peptide
  MOD_RES (4)..(5)..(38)..(40): Xaa is C or S
  MOD_RES (19)..(20)..(21)..(22)..(23): Xaa is A or G
  MOD_RES (24)..(25)..(26)..(27): Xaa is A or G or is absent

SEQ ID NO: 28150 - protein, 37 aa, Artificial Sequence; identical to SEQ ID NO: 6968
  GFR-binding peptide
  MOD_RES (3)..(4)..(36): Xaa is C or S

SEQ ID NO: 28151 - protein, 38 aa, Artificial Sequence
  GFR-binding peptide
  MOD_RES (2)..(3)..(35)..(37): Xaa is C or S
AXXVPTKLSPISILYIDKGVVTYYKQYEGMAVSEXGXR

SEQ ID NO: 28152 - protein, 35 aa, Artificial Sequence
  GFR-binding peptide
  MOD_RES (1)..(2)..(33)..(35): Xaa is C or S
XXVPQALSPISILYIVGRKPKVYKQYEMIVRSXKX

SEQ ID NO: 28153 - protein, 34 aa, Artificial Sequence
  GFR-binding peptide
  MOD_RES (1)..(32)..(34): Xaa is C or S
XVPQALSPISILYIVGRKPKVYKQYEMIVRSXKX

SEQ ID NO: 28154 - protein, 45 aa, Artificial Sequence
  GFR-binding peptide
  MOD_RES (6)..(7)..(42)..(44): Xaa is C or S
  MOD_RES (21)..(22)..(23)..(24)..(25): Xaa is A or G
  MOD_RES (26)..(27)..(28)..(29): Xaa is A or G or is absent
KVGKAXXVPTKLSPISVLYIXXXXXXXXXYKQYEEGMSVAEXGXR

SEQ ID NO: 28155 - protein, 38 aa, Artificial Sequence; identical to SEQ ID NO: 6975
  GFR-binding peptide
  MOD_RES (4)..(5): Xaa is C or S
  MOD_RES (19)..(20)..(21)..(22)..(23): Xaa is A or G
  MOD_RES (24)..(25)..(26)..(27): Xaa is A or G or is absent

SEQ ID NO: 28156 - protein, 40 aa, Artificial Sequence
  GFR-binding peptide
  MOD_RES (5)..(6)..(39): Xaa is C or S
VGKAXXVPTKLSPISVLYIDDMGVPTYKQYEEGMSVAEXG

SEQ ID NO: 28157 - protein, 34 aa, Artificial Sequence
  GFR-binding peptide
  MOD_RES (2)..(3)..(34): Xaa is C or S
PXXVSQDLSPISILYIIGKTPKIYKQYEMIVKSX

SEQ ID NO: 28158 - protein, 41 aa, Artificial Sequence
  GFR-binding peptide
  MOD_RES (4)..(5)..(39)..(41): Xaa is C or S
  MOD_RES (19)..(20)..(21)..(22)..(23): Xaa is A or G
  MOD_RES (24)..(25)..(26)..(27): Xaa is A or G or is absent
PASXXVPARLSPISILYIXXXXXXXXXYKQYEDMVVEAXGX

SEQ ID NO: 28159 - protein, 38 aa, Artificial Sequence; identical to SEQ ID NO: 6977
  GFR-binding peptide
  MOD_RES (5)..(6)..(37): Xaa is C or S

SEQ ID NO: 28160 - protein, 37 aa, Artificial Sequence
  GFR-binding peptide
  MOD_RES (4)..(5): Xaa is C or S
  MOD_RES (19)..(20)..(21)..(22)..(23): Xaa is A or G
  MOD_RES (24)..(25)..(26)..(27): Xaa is A or G or is absent
PKAXXAPTKLEPISVLYLXXXXXXXXXKFKYENMVVK

SEQ ID NO: 28161 - protein, 38 aa, Artificial Sequence
  GFR-binding peptide
  MOD_RES (4)..(5)..(37): Xaa is C or S
PKAXXVPTELSPISMLYIDEYDKVVYKQYEEMVVEGXG

SEQ ID NO: 28162 - protein, 31 aa, Artificial Sequence; identical to SEQ ID NO: 6986
  GFR-binding peptide
  MOD_RES (1)..(1): Xaa is C or S

SEQ ID NO: 28163 - protein, 40 aa, Artificial Sequence
  GFR-binding peptide
  MOD_RES (6)..(7): Xaa is C or S
  MOD_RES (21)..(22)..(23)..(24)..(25): Xaa is A or G
  MOD_RES (26)..(27)..(28)..(29): Xaa is A or G or is absent
AAPASXXVPARLNAISILYFXXXXXXXXXLKKYRDMVVEA

SEQ ID NO: 28164 - protein, 38 aa, Artificial Sequence
  GFR-binding peptide
  MOD_RES (4)..(5)..(36)..(38): Xaa is C or S
ASPXXVPQDLEPISILYLVGRTPKVKFKYEMVVKSXKX

SEQ ID NO: 28165 - protein, 37 aa, Artificial Sequence
  GFR-binding peptide
  MOD_RES (34)..(36): Xaa is C or S
  MOD_RES (14)..(15)..(16)..(17)..(18): Xaa is A or G
  MOD_RES (19)..(20)..(21)..(22): Xaa is A or G or is absent
APTQLSPISVLYIXXXXXXXXXYKQYENMVVRAXGXH

SEQ ID NO: 28166 - protein, 33 aa, Artificial Sequence
  GFR-binding peptide
  MOD_RES (32)..(32): Xaa is C or S
APTKLEPISVLYLDDSSNVIKFKYENMVVRSXG

SEQ ID NO: 28167 - protein, 38 aa, Artificial Sequence; identical to SEQ ID NO: 6988
  GFR-binding peptide
  MOD_RES (1)..(35)..(37): Xaa is C or S
  MOD_RES (15)..(16)..(17)..(18)..(19): Xaa is A or G
  MOD_RES (20)..(21)..(22)..(23): Xaa is A or G or is absent

SEQ ID NO: 28168 - protein, 38 aa, Artificial Sequence; identical to SEQ ID NO: 6989
  GFR-binding peptide
  MOD_RES (4)..(5)..(37): Xaa is C or S

SEQ ID NO: 28169 - protein, 38 aa, Artificial Sequence; identical to SEQ ID NO: 6990
  GFR-binding peptide
  MOD_RES (1)..(2)..(36)..(38): Xaa is C or S
  MOD_RES (16)..(17)..(18)..(19)..(20): Xaa is A or G
  MOD_RES (21)..(22)..(23)..(24): Xaa is A or G or is absent

SEQ ID NO: 28170 - protein, 40 aa, Artificial Sequence
  GFR-binding peptide
  MOD_RES (4)..(5)..(39): Xaa is C or S
  MOD_RES (19)..(20)..(21)..(22)..(23): Xaa is A or G
  MOD_RES (24)..(25)..(26)..(27): Xaa is A or G or is absent
PASXXVPARLSPISILYKXXXXXXXXXLKYHYDMVVEAXG

SEQ ID NO: 28171 - protein, 38 aa, Artificial Sequence; identical to SEQ ID NO: 6992
  GFR-binding peptide
  MOD_RES (6)..(7)..(38): Xaa is C or S

SEQ ID NO: 28172 - protein, 38 aa, Artificial Sequence; identical to SEQ ID NO: 6994
  GFR-binding peptide
  MOD_RES (3)..(4)..(37): Xaa is C or S
  MOD_RES (18)..(19)..(20)..(21)..(22): Xaa is A or G
  MOD_RES (23)..(24)..(25)..(26): Xaa is A or G or is absent

SEQ ID NO: 28173 - protein, 37 aa, Artificial Sequence
  GFR-binding peptide
  MOD_RES (2)..(3)..(37): Xaa is C or S
  MOD_RES (17)..(18)..(19)..(20)..(21): Xaa is A or G
  MOD_RES (22)..(23)..(24)..(25): Xaa is A or G or is absent
AXXVPTKLEPISILYLXXXXXXXXXKFKYEGMAVSEX

SEQ ID NO: 28174 - protein, 36 aa, Artificial Sequence; identical to SEQ ID NO: 6996
  GFR-binding peptide
  MOD_RES (34)..(36): Xaa is C or S
  MOD_RES (14)..(15)..(16)..(17)..(18): Xaa is A or G
  MOD_RES (19)..(20)..(21)..(22): Xaa is A or G or is absent

SEQ ID NO: 28175 - protein, 37 aa, Artificial Sequence
  GFR-binding peptide
  MOD_RES (1)..(2)..(35)..(37): Xaa is C or S
XXVPTKLSPISVLYIDDMGVPTYKQYEEGMSVAEXGX

SEQ ID NO: 28176 - protein, 37 aa, Artificial Sequence; identical to SEQ ID NO: 6999
  GFR-binding peptide
  MOD_RES (4)..(5): Xaa is C or S
  MOD_RES (19)..(20)..(21)..(22)..(23): Xaa is A or G
  MOD_RES (24)..(25)..(26)..(27): Xaa is A or G or is absent

SEQ ID NO: 28177 - protein, 37 aa, Artificial Sequence
  GFR-binding peptide
  MOD_RES (1)..(2)..(35)..(37): Xaa is C or S
XXVPTKLEPISVLYLDDMGVPTKFKYEEGMSVAEXGX

SEQ ID NO: 28178 - protein, 38 aa, Artificial Sequence
  GFR-binding peptide
  MOD_RES (2)..(3)..(37): Xaa is C or S
  MOD_RES (17)..(18)..(19)..(20)..(21): Xaa is A or G
  MOD_RES (22)..(23)..(24)..(25): Xaa is A or G or is absent
AXXAPTKLSPISVLYIXXXXXXXXXYKQYENMVVKAXG

SEQ ID NO: 28179 - protein, 35 aa, Artificial Sequence
  GFR-binding peptide
  MOD_RES (1)..(2)..(34): Xaa is C or S
XXVPTELSPISMLYIDENEKVVYKQYEDMVVEGXG

SEQ ID NO: 28180 - protein, 38 aa, Artificial Sequence
  GFR-binding peptide
  MOD_RES (2)..(3)..(37): Xaa is C or S
  MOD_RES (17)..(18)..(19)..(20)..(21): Xaa is A or G
  MOD_RES (22)..(23)..(24)..(25): Xaa is A or G or is absent
AXXVPTELEPISMLYLXXXXXXXXXKFKYEDMVVEGXG

SEQ ID NO: 28181 - protein, 38 aa, Artificial Sequence
  GFR-binding peptide
  MOD_RES (5)..(6): Xaa is C or S
  MOD_RES (20)..(21)..(22)..(23)..(24): Xaa is A or G
  MOD_RES (25)..(26)..(27)..(28): Xaa is A or G or is absent
SASPXXVPQDLSPISILYIXXXXXXXXXYKQYEMVVKS

SEQ ID NO: 28182 - protein, 39 aa, Artificial Sequence
  GFR-binding peptide
  MOD_RES (6)..(7): Xaa is C or S
  MOD_RES (21)..(22)..(23)..(24)..(25): Xaa is A or G
  MOD_RES (26)..(27)..(28)..(29): Xaa is A or G or is absent
SIPKAXXVPTELSPISMLYIXXXXXXXXXYKQYEEMVVE

SEQ ID NO: 28183 - protein, 36 aa, Artificial Sequence
  GFR-binding peptide
  MOD_RES (33)..(35): Xaa is C or S
  MOD_RES (14)..(15)..(16)..(17)..(18): Xaa is A or G
  MOD_RES (19)..(20)..(21)..(22): Xaa is A or G or is absent
VSQDLSPISILYIXXXXXXXXXYKQYEMIVKSXKXS

SEQ ID NO: 28184 - protein, 37 aa, Artificial Sequence; identical to SEQ ID NO: 7005
  GFR-binding peptide
  MOD_RES (2)..(34)..(36): Xaa is C or S

SEQ ID NO: 28185 - protein, 35 aa, Artificial Sequence; identical to SEQ ID NO: 7006
  GFR-binding peptide
  MOD_RES (33)..(35): Xaa is C or S
  MOD_RES (14)..(15)..(16)..(17)..(18): Xaa is A or G
  MOD_RES (19)..(20)..(21)..(22): Xaa is A or G or is absent

SEQ ID NO: 28186 - protein, 36 aa, Artificial Sequence; identical to SEQ ID NO: 7007
  GFR-binding peptide
  MOD_RES (1)..(2)..(33)..(35): Xaa is C or S

SEQ ID NO: 28187 - protein, 32 aa, Artificial Sequence
  GFR-binding peptide
  MOD_RES (1)..(1): Xaa is C or S
XAPTQLEPISVLYLDDSSNVIKFKYENMVVRA

SEQ ID NO: 28188 - protein, 40 aa, Artificial Sequence; identical to SEQ ID NO: 7008
  GFR-binding peptide
  MOD_RES (3)..(4)..(37)..(39): Xaa is C or S

SEQ ID NO: 28189 - protein, 37 aa, Artificial Sequence
  GFR-binding peptide
  MOD_RES (4)..(5)..(36): Xaa is C or S
ASPXXVPQDLEPISILYLVGRTPKVKFKYEMVVKSXK

SEQ ID NO: 28190 - protein, 33 aa, Artificial Sequence; identical to SEQ ID NO: 7009
  GFR-binding peptide
  MOD_RES (1)..(32): Xaa is C or S

SEQ ID NO: 28191 - protein, 34 aa, Artificial Sequence
  GFR-binding peptide
  MOD_RES (1)..(2)..(34): Xaa is C or S
XXVPTKLSPISILYKDKGVVTYLKYHYGMAVSEX

SEQ ID NO: 28192 - protein, 40 aa, Artificial Sequence
  GFR-binding peptide
  MOD_RES (5)..(6)..(37)..(39): Xaa is C or S
SAAPXXVPQALSPISILYIVGRKPKVYKQYEMIVRSXKXS

SEQ ID NO: 28193 - protein, 34 aa, Artificial Sequence; identical to SEQ ID NO: 7016
  GFR-binding peptide
  MOD_RES (1)..(33): Xaa is C or S

SEQ ID NO: 28194 - protein, 37 aa, Artificial Sequence; identical to SEQ ID NO: 7017
  GFR-binding peptide
  MOD_RES (1)..(2)..(34)..(36): Xaa is C or S

SEQ ID NO: 28195 - protein, 36 aa, Artificial Sequence; identical to SEQ ID NO: 7018
  GFR-binding peptide
  MOD_RES (2)..(3)..(36): Xaa is C or S

SEQ ID NO: 28196 - protein, 39 aa, Artificial Sequence
  GFR-binding peptide
  MOD_RES (5)..(6)..(37)..(39): Xaa is C or S
SASPXXVSQDLSPISILYIIGKTPKIYKQYEMIVKSXKX

SEQ ID NO: 28197 - protein, 34 aa, Artificial Sequence
  GFR-binding peptide
  MOD_RES (1)..(33): Xaa is C or S
XVPARLNAISILYFDAANNVVLKKYRDMVVEAXG

SEQ ID NO: 28198 - protein, 38 aa, Artificial Sequence
  GFR-binding peptide
  MOD_RES (5)..(6)..(38): Xaa is C or S
IPKAXXVPTELSPISMLYIDEYDKVVYKQYEEMVVEGX

SEQ ID NO: 28199 - protein, 34 aa, Artificial Sequence; identical to SEQ ID NO: 7020
  GFR-binding peptide
  MOD_RES (34)..(34): Xaa is C or S
  MOD_RES (14)..(15)..(16)..(17)..(18): Xaa is A or G
  MOD_RES (19)..(20)..(21)..(22): Xaa is A or G or is absent

SEQ ID NO: 28200 - protein, 36 aa, Artificial Sequence; identical to SEQ ID NO: 7022
  GFR-binding peptide
  MOD_RES (34)..(36): Xaa is C or S
  MOD_RES (14)..(15)..(16)..(17)..(18): Xaa is A or G
  MOD_RES (19)..(20)..(21)..(22): Xaa is A or G or is absent

SEQ ID NO: 28201 - protein, 36 aa, Artificial Sequence; identical to SEQ ID NO: 7024
  GFR-binding peptide
  MOD_RES (2)..(3): Xaa is C or S
  MOD_RES (17)..(18)..(19)..(20)..(21): Xaa is A or G
  MOD_RES (22)..(23)..(24)..(25): Xaa is A or G or is absent

SEQ ID NO: 28202 - protein, 36 aa, Artificial Sequence; identical to SEQ ID NO: 7025
  GFR-binding peptide
  MOD_RES (1)..(2)..(34)..(36): Xaa is C or S

SEQ ID NO: 28203 - protein, 42 aa, Artificial Sequence; identical to SEQ ID NO: 7026
  GFR-binding peptide
  MOD_RES (4)..(5)..(39)..(41): Xaa is C or S
  MOD_RES (19)..(20)..(21)..(22)..(23): Xaa is A or G
  MOD_RES (24)..(25)..(26)..(27): Xaa is A or G or is absent

SEQ ID NO: 28204 - protein, 41 aa, Artificial Sequence; identical to SEQ ID NO: 7031
  GFR-binding peptide
  MOD_RES (5)..(6)..(39)..(41): Xaa is C or S
  MOD_RES (20)..(21)..(22)..(23)..(24): Xaa is A or G
  MOD_RES (25)..(26)..(27)..(28): Xaa is A or G or is absent

SEQ ID NO: 28205 - protein, 34 aa, Artificial Sequence
  GFR-binding peptide
  MOD_RES (32)..(34): Xaa is C or S
VPTELEPISMLYLDEYDKVVKFKYEEMVVEGXGX

SEQ ID NO: 28206 - protein, 33 aa, Artificial Sequence
  GFR-binding peptide
  MOD_RES (1)..(33): Xaa is C or S
XAPTKLSPISVLYIDDSSNVIYKQYENMVVRSX

SEQ ID NO: 28207 - protein, 34 aa, Artificial Sequence
  GFR-binding peptide
  MOD_RES (32)..(34): Xaa is C or S
VPARLSPISILYKDAANNVVLKYHYDMVVEAXGX

SEQ ID NO: 28208 - protein, 38 aa, Artificial Sequence; identical to SEQ ID NO: 7035
  GFR-binding peptide
  MOD_RES (1)..(2)..(37): Xaa is C or S
  MOD_RES (16)..(17)..(18)..(19)..(20): Xaa is A or G
  MOD_RES (21)..(22)..(23)..(24): Xaa is A or G or is absent

SEQ ID NO: 28209 - protein, 34 aa, Artificial Sequence; identical to SEQ ID NO: 7036
  GFR-binding peptide
  MOD_RES (33)..(33): Xaa is C or S
  MOD_RES (14)..(15)..(16)..(17)..(18): Xaa is A or G
  MOD_RES (19)..(20)..(21)..(22): Xaa is A or G or is absent

SEQ ID NO: 28210 - protein, 35 aa, Artificial Sequence
  GFR-binding peptide
  MOD_RES (2)..(3)..(34): Xaa is C or S
PXXVPQALSPISILYIVGRKPKVYKQYEMIVRSXK

SEQ ID NO: 28211 - protein, 36 aa, Artificial Sequence; identical to SEQ ID NO: 7038
  GFR-binding peptide
  MOD_RES (3)..(4)..(35): Xaa is C or S

SEQ ID NO: 28212 - protein, 38 aa, Artificial Sequence; identical to SEQ ID NO: 7039
  GFR-binding peptide
  MOD_RES (5)..(6): Xaa is C or S

SEQ ID NO: 28213 - protein, 39 aa, Artificial Sequence
  GFR-binding peptide
  MOD_RES (4)..(5)..(37)..(39): Xaa is C or S
PKPXXAPTKLSPISVLYIDDSSNVIYKQYENMVVRSXGX

SEQ ID NO: 28214 - protein, 32 aa, Artificial Sequence
  GFR-binding peptide
  MOD_RES (1)..(2): Xaa is C or S
XXVPTELEPISMLYLDEYDKVVKFKYEEMVVE

SEQ ID NO: 28215 - protein, 38 aa, Artificial Sequence
  GFR-binding peptide
  MOD_RES (1)..(35)..(37): Xaa is C or S
  MOD_RES (15)..(16)..(17)..(18)..(19): Xaa is A or G
  MOD_RES (20)..(21)..(22)..(23): Xaa is A or G or is absent
XVPARLSPISILYIXXXXXXXXXYKQYEDMVVEAXGXR

SEQ ID NO: 28216 - protein, 40 aa, Artificial Sequence; identical to SEQ ID NO: 7041
  GFR-binding peptide
  MOD_RES (4)..(5)..(37)..(39): Xaa is C or S

SEQ ID NO: 28217 - protein, 39 aa, Artificial Sequence; identical to SEQ ID NO: 7043
  GFR-binding peptide
  MOD_RES (5)..(6): Xaa is C or S
  MOD_RES (20)..(21)..(22)..(23)..(24): Xaa is A or G
  MOD_RES (25)..(26)..(27)..(28): Xaa is A or G or is absent

SEQ ID NO: 28218 - protein, 34 aa, Artificial Sequence; identical to SEQ ID NO: 7044
  GFR-binding peptide
  MOD_RES (1)..(2): Xaa is C or S
  MOD_RES (16)..(17)..(18)..(19)..(20): Xaa is A or G
  MOD_RES (21)..(22)..(23)..(24): Xaa is A or G or is absent

SEQ ID NO: 28219 - protein, 39 aa, Artificial Sequence
  GFR-binding peptide
  MOD_RES (4)..(5)..(38): Xaa is C or S
  MOD_RES (19)..(20)..(21)..(22)..(23): Xaa is A or G
  MOD_RES (24)..(25)..(26)..(27): Xaa is A or G or is absent
AAPXXVPQALEPISILYLXXXXXXXXXKFKYEMIVRSXK

SEQ ID NO: 28220 - protein, 38 aa, Artificial Sequence
  GFR-binding peptide
  MOD_RES (3)..(4)..(36)..(38): Xaa is C or S
KPXXAPTQLSPISVLYIDDSSNVIYKQYENMVVRAXGX

SEQ ID NO: 28221 - protein, 40 aa, Artificial Sequence
  GFR-binding peptide
  MOD_RES (6)..(7)..(40): Xaa is C or S
  MOD_RES (21)..(22)..(23)..(24)..(25): Xaa is A or G
  MOD_RES (26)..(27)..(28)..(29): Xaa is A or G or is absent
ASASPXXVPQDLSPISILYIXXXXXXXXXYKQYEMVVKSX

SEQ ID NO: 28222 - protein, 36 aa, Artificial Sequence
  GFR-binding peptide
  MOD_RES (33)..(35): Xaa is C or S
  MOD_RES (14)..(15)..(16)..(17)..(18): Xaa is A or G
  MOD_RES (19)..(20)..(21)..(22): Xaa is A or G or is absent
VPQDLSPISILYIXXXXXXXXXYKQYEMVVKSXKXS

SEQ ID NO: 28223 - protein, 41 aa, Artificial Sequence
  GFR-binding peptide
  MOD_RES (3)..(4)..(38)..(40): Xaa is C or S
  MOD_RES (18)..(19)..(20)..(21)..(22): Xaa is A or G
  MOD_RES (23)..(24)..(25)..(26): Xaa is A or G or is absent
KAXXVPTKLEPISILYLXXXXXXXXXKFKYEGMAVSEXGXR

SEQ ID NO: 28224 - protein, 38 aa, Artificial Sequence
  GFR-binding peptide
  MOD_RES (3)..(4)..(38): Xaa is C or S
  MOD_RES (18)..(19)..(20)..(21)..(22): Xaa is A or G
  MOD_RES (23)..(24)..(25)..(26): Xaa is A or G or is absent
KAXXVPTELSPISMLYIXXXXXXXXXYKQYEEMVVEGX

SEQ ID NO: 28225 - protein, 38 aa, Artificial Sequence
  GFR-binding peptide
  MOD_RES (2)..(3)..(36)..(38): Xaa is C or S
  MOD_RES (17)..(18)..(19)..(20)..(21): Xaa is A or G
  MOD_RES (22)..(23)..(24)..(25): Xaa is A or G or is absent
PXXVSQDLEPISILYLXXXXXXXXXKFKYEMIVKSXKX

SEQ ID NO: 28226 - protein, 34 aa, Artificial Sequence
  GFR-binding peptide
  MOD_RES (31)..(33): Xaa is C or S
VPQALEPISILYLVGRKPKVKFKYEMIVRSXKXS

SEQ ID NO: 28227 - protein, 43 aa, Artificial Sequence; identical to SEQ ID NO: 7048
  GFR-binding peptide
  MOD_RES (6)..(7)..(42): Xaa is C or S
  MOD_RES (21)..(22)..(23)..(24)..(25): Xaa is A or G
  MOD_RES (26)..(27)..(28)..(29): Xaa is A or G or is absent

SEQ ID NO: 28228 - protein, 43 aa, Artificial Sequence; identical to SEQ ID NO: 7049
  GFR-binding peptide
  MOD_RES (6)..(7)..(40)..(42): Xaa is C or S
  MOD_RES (21)..(22)..(23)..(24)..(25): Xaa is A or G
  MOD_RES (26)..(27)..(28)..(29): Xaa is A or G or is absent

SEQ ID NO: 28229 - protein, 34 aa, Artificial Sequence; identical to SEQ ID NO: 7050
  GFR-binding peptide
  MOD_RES (1)..(1): Xaa is C or S
  MOD_RES (15)..(16)..(17)..(18)..(19): Xaa is A or G
  MOD_RES (20)..(21)..(22)..(23): Xaa is A or G or is absent

SEQ ID NO: 28230 - protein, 32 aa, Artificial Sequence
  GFR-binding peptide
  MOD_RES (1)..(1): Xaa is C or S
XVPTKLNAISILYFDKGVVTYLKKYRGMAVSE

SEQ ID NO: 28231 - protein, 35 aa, Artificial Sequence; identical to SEQ ID NO: 7052
  GFR-binding peptide
  MOD_RES (1)..(2)..(35): Xaa is C or S

SEQ ID NO: 28232 - protein, 40 aa, Artificial Sequence; identical to SEQ ID NO: 7053
  GFR-binding peptide
  MOD_RES (5)..(6)..(38)..(40): Xaa is C or S

SEQ ID NO: 28233 - protein, 36 aa, Artificial Sequence
  GFR-binding peptide
  MOD_RES (1)..(2)..(36): Xaa is C or S
  MOD_RES (16)..(17)..(18)..(19)..(20): Xaa is A or G
  MOD_RES (21)..(22)..(23)..(24): Xaa is A or G or is absent
XXAPTKLSPISVLYIXXXXXXXXXYKQYENMVVRSX

SEQ ID NO: 28234 - protein, 37 aa, Artificial Sequence
  GFR-binding peptide
  MOD_RES (6)..(7): Xaa is C or S
SIPKAXXVPTELSPISMLYIDEYDKVVYKQYEEMVVE

SEQ ID NO: 28235 - protein, 39 aa, Artificial Sequence
  GFR-binding peptide
  MOD_RES (6)..(7): Xaa is C or S
KVGKAXXVPTKLSPISVLYIDDMGVPTYKQYEEGMSVAE

SEQ ID NO: 28236 - protein, 35 aa, Artificial Sequence
  GFR-binding peptide
  MOD_RES (4)..(5): Xaa is C or S
ASPXXVPQDLSPISILYIVGRTPKVYKQYEMVVKS

SEQ ID NO: 28237 - protein, 39 aa, Artificial Sequence; identical to SEQ ID NO: 7057
  GFR-binding peptide
  MOD_RES (4)..(5)..(38): Xaa is C or S
  MOD_RES (19)..(20)..(21)..(22)..(23): Xaa is A or G
  MOD_RES (24)..(25)..(26)..(27): Xaa is A or G or is absent

SEQ ID NO: 28238 - protein, 32 aa, Artificial Sequence
  GFR-binding peptide
  MOD_RES (1)..(1): Xaa is C or S
XVPTELSPISMLYIDEYDKVVYKQYEEMVVEG

SEQ ID NO: 28239 - protein, 34 aa, Artificial Sequence
  GFR-binding peptide
  MOD_RES (1)..(34): Xaa is C or S
XVPTKLEPISVLYLDDMGVPTKFKYEEGMSVAEX

SEQ ID NO: 28240 - protein, 41 aa, Artificial Sequence; identical to SEQ ID NO: 7059
  GFR-binding peptide
  MOD_RES (6)..(7)..(38)..(40): Xaa is C or S

SEQ ID NO: 28241 - protein, 40 aa, Artificial Sequence
  GFR-binding peptide
  MOD_RES (3)..(4)..(37)..(39): Xaa is C or S
  MOD_RES (18)..(19)..(20)..(21)..(22): Xaa is A or G
  MOD_RES (23)..(24)..(25)..(26): Xaa is A or G or is absent
SPXXVPQDLEPISILYLXXXXXXXXXKFKYEMVVKSXKXS

SEQ ID NO: 28242 - protein, 42 aa, Artificial Sequence; identical to SEQ ID NO: 7063
  GFR-binding peptide
  MOD_RES (6)..(7)..(39)..(41): Xaa is C or S

SEQ ID NO: 28243 - protein, 39 aa, Artificial Sequence; identical to SEQ ID NO: 7064
  GFR-binding peptide
  MOD_RES (6)..(7)..(39): Xaa is C or S

SEQ ID NO: 28244 - protein, 35 aa, Artificial Sequence
  GFR-binding peptide
  MOD_RES (2)..(3)..(35): Xaa is C or S
AXXVPTELSPISMLYIDEYDKVVYKQYEEMVVEGX

SEQ ID NO: 28245 - protein, 39 aa, Artificial Sequence; identical to SEQ ID NO: 7067
  GFR-binding peptide
  MOD_RES (3)..(4)..(37)..(39): Xaa is C or S
  MOD_RES (18)..(19)..(20)..(21)..(22): Xaa is A or G
  MOD_RES (23)..(24)..(25)..(26): Xaa is A or G or is absent

SEQ ID NO: 28246 - protein, 39 aa, Artificial Sequence; identical to SEQ ID NO: 7068
  GFR-binding peptide
  MOD_RES (2)..(36)..(38): Xaa is C or S
  MOD_RES (16)..(17)..(18)..(19)..(20): Xaa is A or G
  MOD_RES (21)..(22)..(23)..(24): Xaa is A or G or is absent

SEQ ID NO: 28247 - protein, 43 aa, Artificial Sequence
  GFR-binding peptide
  MOD_RES (6)..(7)..(42): Xaa is C or S
  MOD_RES (21)..(22)..(23)..(24)..(25): Xaa is A or G
  MOD_RES (26)..(27)..(28)..(29): Xaa is A or G or is absent
KVGKAXXVPTKLSPISVLYIXXXXXXXXXYKQYEEGMSVAEXG

SEQ ID NO: 28248 - protein, 35 aa, Artificial Sequence
  GFR-binding peptide
  MOD_RES (2)..(3): Xaa is C or S
  MOD_RES (17)..(18)..(19)..(20)..(21): Xaa is A or G
  MOD_RES (22)..(23)..(24)..(25): Xaa is A or G or is absent
PXXAPTQLSPISVLYIXXXXXXXXXYKQYENMVVR

SEQ ID NO: 28249 - protein, 36 aa, Artificial Sequence
  GFR-binding peptide
  MOD_RES (3)..(4)..(35): Xaa is C or S
APXXVPQALSPISILYIVGRKPKVYKQYEMIVRSXK

SEQ ID NO: 28250 - protein, 35 aa, Artificial Sequence; identical to SEQ ID NO: 7072
  GFR-binding peptide
  MOD_RES (1)..(2): Xaa is C or S
  MOD_RES (16)..(17)..(18)..(19)..(20): Xaa is A or G
  MOD_RES (21)..(22)..(23)..(24): Xaa is A or G or is absent

SEQ ID NO: 28251 - protein, 40 aa, Artificial Sequence
  GFR-binding peptide
  MOD_RES (3)..(4)..(38)..(40): Xaa is C or S
  MOD_RES (18)..(19)..(20)..(21)..(22): Xaa is A or G
  MOD_RES (23)..(24)..(25)..(26): Xaa is A or G or is absent
KAXXVPTELSPISMLYIXXXXXXXXXYKQYEEMVVEGXGX

SEQ ID NO: 28252 - protein, 31 aa, Artificial Sequence; identical to SEQ ID NO: 7074
  GFR-binding peptide
  MOD_RES (31)..(31): Xaa is C or S

SEQ ID NO: 28253 - protein, 39 aa, Artificial Sequence
  GFR-binding peptide
  MOD_RES (3)..(4)..(38): Xaa is C or S
  MOD_RES (18)..(19)..(20)..(21)..(22): Xaa is A or G
  MOD_RES (23)..(24)..(25)..(26): Xaa is A or G or is absent
ASXXVPARLSPISILYKXXXXXXXXXLKYHYDMVVEAXG

SEQ ID NO: 28254 - protein, 39 aa, Artificial Sequence
  GFR-binding peptide
  MOD_RES (4)..(5)..(38): Xaa is C or S
  MOD_RES (19)..(20)..(21)..(22)..(23): Xaa is A or G
  MOD_RES (24)..(25)..(26)..(27): Xaa is A or G or is absent
ASPXXVSQDLEPISILYLXXXXXXXXXKFKYEMIVKSXK

SEQ ID NO: 28255 - protein, 36 aa, Artificial Sequence
  GFR-binding peptide
  MOD_RES (1)..(33)..(35): Xaa is C or S
XVPTKLSPISILYKDKGVVTYLKYHYGMAVSEXGXR

SEQ ID NO: 28256 - protein, 41 aa, Artificial Sequence
  GFR-binding peptide
  MOD_RES (5)..(6)..(40): Xaa is C or S
  MOD_RES (20)..(21)..(22)..(23)..(24): Xaa is A or G
  MOD_RES (25)..(26)..(27)..(28): Xaa is A or G or is absent
APASXXVPARLSPISILYKXXXXXXXXXLKYHYDMVVEAXG

SEQ ID NO: 28257 - protein, 40 aa, Artificial Sequence; identical to SEQ ID NO: 7079
  GFR-binding peptide
  MOD_RES (2)..(3)..(37)..(39): Xaa is C or S
  MOD_RES (17)..(18)..(19)..(20)..(21): Xaa is A or G
  MOD_RES (22)..(23)..(24)..(25): Xaa is A or G or is absent

SEQ ID NO: 28258 - protein, 33 aa, Artificial Sequence; identical to SEQ ID NO: 7082
  GFR-binding peptide
  MOD_RES (2)..(3): Xaa is C or S

SEQ ID NO: 28259 - protein, 32 aa, Artificial Sequence; identical to SEQ ID NO: 7085
  GFR-binding peptide
  MOD_RES (32)..(32): Xaa is C or S

SEQ ID NO: 28260 - protein, 41 aa, Artificial Sequence; identical to SEQ ID NO: 7086
  GFR-binding peptide
  MOD_RES (4)..(5)..(39)..(41): Xaa is C or S
  MOD_RES (19)..(20)..(21)..(22)..(23): Xaa is A or G
  MOD_RES (24)..(25)..(26)..(27): Xaa is A or G or is absent

SEQ ID NO: 28261 - protein, 38 aa, Artificial Sequence
  GFR-binding peptide
  MOD_RES (2)..(3)..(38): Xaa is C or S
  MOD_RES (17)..(18)..(19)..(20)..(21): Xaa is A or G
  MOD_RES (22)..(23)..(24)..(25): Xaa is A or G or is absent
AXXVPTKLSPISVLYIXXXXXXXXXYKQYEEGMSVAEX

SEQ ID NO: 28262 - protein, 37 aa, Artificial Sequence
  GFR-binding peptide
  MOD_RES (3)..(4): Xaa is C or S
  MOD_RES (18)..(19)..(20)..(21)..(22): Xaa is A or G
  MOD_RES (23)..(24)..(25)..(26): Xaa is A or G or is absent
KAXXAPTKLSPISVLYIXXXXXXXXXYKQYENMVVKA

SEQ ID NO: 28263 - protein, 42 aa, Artificial Sequence
  GFR-binding peptide
  MOD_RES (6)..(7)..(40)..(42): Xaa is C or S
KVGKAXXVPTKLSPISVLYIDDMGVPTYKQYEEGMSVAEXGX

SEQ ID NO: 28264 - protein, 35 aa, Artificial Sequence; identical to SEQ ID NO: 7088
  GFR-binding peptide
  MOD_RES (1)..(35): Xaa is C or S
  MOD_RES (15)..(16)..(17)..(18)..(19): Xaa is A or G
  MOD_RES (20)..(21)..(22)..(23): Xaa is A or G or is absent

SEQ ID NO: 28265 - protein, 38 aa, Artificial Sequence
  GFR-binding peptide
  MOD_RES (5)..(6)..(38): Xaa is C or S
IPKAXXVPTELSPISMLYIDENEKVVYKQYEDMVVEGX

SEQ ID NO: 28266 - protein, 37 aa, Artificial Sequence; identical to SEQ ID NO: 7089
  GFR-binding peptide
  MOD_RES (1)..(34)..(36): Xaa is C or S
  MOD_RES (15)..(16)..(17)..(18)..(19): Xaa is A or G
  MOD_RES (20)..(21)..(22)..(23): Xaa is A or G or is absent

SEQ ID NO: 28267 - protein, 42 aa, Artificial Sequence
  GFR-binding peptide
  MOD_RES (3)..(4)..(39)..(41): Xaa is C or S
  MOD_RES (18)..(19)..(20)..(21)..(22): Xaa is A or G
  MOD_RES (23)..(24)..(25)..(26): Xaa is A or G or is absent
KAXXVPTKLEPISVLYLXXXXXXXXXKFKYEEGMSVAEXGXR

SEQ ID NO: 28268 - protein, 37 aa, Artificial Sequence
  GFR-binding peptide
  MOD_RES (6)..(7): Xaa is C or S
AVPKAXXAPTKLSPISVLYIDSSNNVIYKQYENMVVK

SEQ ID NO: 28269 - protein, 39 aa, Artificial Sequence
  GFR-binding peptide
  MOD_RES (5)..(6)..(37)..(39): Xaa is C or S
SASPXXVPQDLSPISILYIVGRTPKVYKQYEMVVKSXKX

SEQ ID NO: 28270 - protein, 36 aa, Artificial Sequence; identical to SEQ ID NO: 7093
  GFR-binding peptide
  MOD_RES (3)..(4)..(36): Xaa is C or S

SEQ ID NO: 28271 - protein, 39 aa, Artificial Sequence
  GFR-binding peptide
  MOD_RES (1)..(2)..(36)..(38): Xaa is C or S
  MOD_RES (16)..(17)..(18)..(19)..(20): Xaa is A or G
  MOD_RES (21)..(22)..(23)..(24): Xaa is A or G or is absent
XXVPARLEPISILYLXXXXXXXXXKFKYEDMVVEAXGXR

SEQ ID NO: 28272 - protein, 36 aa, Artificial Sequence
  GFR-binding peptide
  MOD_RES (3)..(4): Xaa is C or S
  MOD_RES (18)..(19)..(20)..(21)..(22): Xaa is A or G
  MOD_RES (23)..(24)..(25)..(26): Xaa is A or G or is absent
KAXXVPTKLSPISILYIXXXXXXXXXYKQYEGMAVS

SEQ ID NO: 28273 - protein, 37 aa, Artificial Sequence
  GFR-binding peptide
  MOD_RES (3)..(4)..(35)..(37): Xaa is C or S
APXXVPQALSPISILYIVGRKPKVYKQYEMIVRSXKX

SEQ ID NO: 28274 - protein, 32 aa, Artificial Sequence
  GFR-binding peptide
  MOD_RES (31)..(31): Xaa is C or S
VPQALEPISILYLVGRKPKVKFKYEMIVRSXK

SEQ ID NO: 28275 - protein, 35 aa, Artificial Sequence
  GFR-binding peptide
  MOD_RES (4)..(5): Xaa is C or S
PKAXXAPTKLSPISVLYIDSSNNVIYKQYENMVVK

SEQ ID NO: 28276 - protein, 37 aa, Artificial Sequence
  GFR-binding peptide
  MOD_RES (1)..(2)..(37): Xaa is C or S
  MOD_RES (16)..(17)..(18)..(19)..(20): Xaa is A or G
  MOD_RES (21)..(22)..(23)..(24): Xaa is A or G or is absent
XXVPTKLEPISVLYLXXXXXXXXXKFKYEEGMSVAEX

SEQ ID NO: 28277 - protein, 41 aa, Artificial Sequence
  GFR-binding peptide
  MOD_RES (5)..(6)..(40): Xaa is C or S
  MOD_RES (20)..(21)..(22)..(23)..(24): Xaa is A or G
  MOD_RES (25)..(26)..(27)..(28): Xaa is A or G or is absent
VPKPXXAPTQLSPISVLYIXXXXXXXXXYKQYENMVVRAXG

SEQ ID NO: 28278 - protein, 35 aa, Artificial Sequence; identical to SEQ ID NO: 7100
  GFR-binding peptide
  MOD_RES (32)..(34): Xaa is C or S

SEQ ID NO: 28279 - protein, 42 aa, Artificial Sequence
  GFR-binding peptide
  MOD_RES (6)..(7)..(39)..(41): Xaa is C or S
AVPKAXXAPTKLSPISVLYIDSSNNVIYKQYENMVVKAXGXH

SEQ ID NO: 28280 - protein, 32 aa, Artificial Sequence
  GFR-binding peptide
  MOD_RES (14)..(15)..(16)..(17)..(18): Xaa is A or G
  MOD_RES (19)..(20)..(21)..(22): Xaa is A or G or is absent
VPQDLEPISILYLXXXXXXXXXKFKYEMVVKS

SEQ ID NO: 28281 - protein, 36 aa, Artificial Sequence
  GFR-binding peptide
  MOD_RES (2)..(3)..(35): Xaa is C or S
SXXVPARLSPISILYKDAANNVVLKYHYDMVVEAXG

SEQ ID NO: 28282 - protein, 42 aa, Artificial Sequence; identical to SEQ ID NO: 7102
  GFR-binding peptide
  MOD_RES (6)..(7)..(39)..(41): Xaa is C or S

SEQ ID NO: 28283 - protein, 33 aa, Artificial Sequence
  GFR-binding peptide
  MOD_RES (1)..(33): Xaa is C or S
XVPTKLSPISILYKDKGVVTYLKYHYGMAVSEX

SEQ ID NO: 28284 - protein, 38 aa, Artificial Sequence
  GFR-binding peptide
  MOD_RES (1)..(35)..(37): Xaa is C or S
  MOD_RES (15)..(16)..(17)..(18)..(19): Xaa is A or G
  MOD_RES (20)..(21)..(22)..(23): Xaa is A or G or is absent
XAPTQLEPISVLYLXXXXXXXXXKFKYENMVVRAXGXH

SEQ ID NO: 28285 - protein, 37 aa, Artificial Sequence; identical to SEQ ID NO: 7103
  GFR-binding peptide
  MOD_RES (5)..(5): Xaa is C or S
  MOD_RES (19)..(20)..(21)..(22)..(23): Xaa is A or G
  MOD_RES (24)..(25)..(26)..(27): Xaa is A or G or is absent

SEQ ID NO: 28286 - protein, 39 aa, Artificial Sequence; identical to SEQ ID NO: 7107
  GFR-binding peptide
  MOD_RES (6)..(7)..(39): Xaa is C or S

SEQ ID NO: 28287 - protein, 41 aa, Artificial Sequence; identical to SEQ ID NO: 7108
  GFR-binding peptide
  MOD_RES (6)..(7)..(40): Xaa is C or S

SEQ ID NO: 28288 - protein, 39 aa, Artificial Sequence
  GFR-binding peptide
  MOD_RES (4)..(5)..(38): Xaa is C or S
GKAXXVPTKLEPISVLYLDDMGVPTKFKYEEGMSVAEXG

SEQ ID NO: 28289 - protein, 34 aa, Artificial Sequence
  GFR-binding peptide
  MOD_RES (2)..(3)..(34): Xaa is C or S
PXXVPQALSPISILYIVGRKPKVYKQYEMIVRSX

SEQ ID NO: 28290 - protein, 33 aa, Artificial Sequence; identical to SEQ ID NO: 7110
  GFR-binding peptide
  MOD_RES (1)..(32): Xaa is C or S

SEQ ID NO: 28291 - protein, 42 aa, Artificial Sequence
  GFR-binding peptide
  MOD_RES (6)..(7)..(41): Xaa is C or S
  MOD_RES (21)..(22)..(23)..(24)..(25): Xaa is A or G
  MOD_RES (26)..(27)..(28)..(29): Xaa is A or G or is absent
YVPKPXXAPTKLSPISVLYIXXXXXXXXXYKQYENMVVRSXG

SEQ ID NO: 28292 - protein, 35 aa, Artificial Sequence
  GFR-binding peptide
  MOD_RES (4)..(5): Xaa is C or S
PASXXVPARLEPISILYLDAANNVVKFKYEDMVVE

SEQ ID NO: 28293 - protein, 37 aa, Artificial Sequence
  GFR-binding peptide
  MOD_RES (1)..(2)..(36): Xaa is C or S
  MOD_RES (16)..(17)..(18)..(19)..(20): Xaa is A or G
  MOD_RES (21)..(22)..(23)..(24): Xaa is A or G or is absent
XXVPTKLSPISILYKXXXXXXXXXLKYHYGMAVSEXG

SEQ ID NO: 28294 - protein, 35 aa, Artificial Sequence; identical to SEQ ID NO: 7112
  GFR-binding peptide
  MOD_RES (1)..(35): Xaa is C or S
  MOD_RES (15)..(16)..(17)..(18)..(19): Xaa is A or G
  MOD_RES (20)..(21)..(22)..(23): Xaa is A or G or is absent

SEQ ID NO: 28295 - protein, 38 aa, Artificial Sequence
  GFR-binding peptide
  MOD_RES (7)..(7): Xaa is C or S
HVTKPTXAPTKLEPISVLYLDDSSNVIKFKYENMVVRS

SEQ ID NO: 28296 - protein, 35 aa, Artificial Sequence; identical to SEQ ID NO: 7115
  GFR-binding peptide
  MOD_RES (1)..(2)..(33)..(35): Xaa is C or S

SEQ ID NO: 28297 - protein, 37 aa, Artificial Sequence
  GFR-binding peptide
  MOD_RES (5)..(5): Xaa is C or S
  MOD_RES (19)..(20)..(21)..(22)..(23): Xaa is A or G
  MOD_RES (24)..(25)..(26)..(27): Xaa is A or G or is absent
TKPTXAPTKLEPISVLYLXXXXXXXXXKFKYENMVVR

SEQ ID NO: 28298 - protein, 34 aa, Artificial Sequence
  GFR-binding peptide
  MOD_RES (1)..(1): Xaa is C or S
  MOD_RES (15)..(16)..(17)..(18)..(19): Xaa is A or G
  MOD_RES (20)..(21)..(22)..(23): Xaa is A or G or is absent
XVPARLSPISILYKXXXXXXXXXLKYHYDMVVEA

SEQ ID NO: 28299 - protein, 34 aa, Artificial Sequence
  GFR-binding peptide
  MOD_RES (32)..(34): Xaa is C or S
VPTELSPISMLYIDEYDKVVYKQYEEMVVEGXGX

SEQ ID NO: 28300 - protein, 32 aa, Artificial Sequence; identical to SEQ ID NO: 7120
  GFR-binding peptide
  MOD_RES (32)..(32): Xaa is C or S

SEQ ID NO: 28301 - protein, 41 aa, Artificial Sequence; identical to SEQ ID NO: 7121
  GFR-binding peptide
  MOD_RES (5)..(6)..(39)..(41): Xaa is C or S
  MOD_RES (20)..(21)..(22)..(23)..(24): Xaa is A or G
  MOD_RES (25)..(26)..(27)..(28): Xaa is A or G or is absent

SEQ ID NO: 28302 - protein, 33 aa, Artificial Sequence; identical to SEQ ID NO: 7123
  GFR-binding peptide
  MOD_RES (1)..(32): Xaa is C or S

SEQ ID NO: 28303 - protein, 36 aa, Artificial Sequence; identical to SEQ ID NO: 7125
  GFR-binding peptide
  MOD_RES (1)..(2)..(36): Xaa is C or S
  MOD_RES (16)..(17)..(18)..(19)..(20): Xaa is A or G
  MOD_RES (21)..(22)..(23)..(24): Xaa is A or G or is absent

SEQ ID NO: 28304 - protein, 39 aa, Artificial Sequence
  GFR-binding peptide
  MOD_RES (1)..(2)..(36)..(38): Xaa is C or S
  MOD_RES (16)..(17)..(18)..(19)..(20): Xaa is A or G
  MOD_RES (21)..(22)..(23)..(24): Xaa is A or G or is absent
XXAPTKLEPISVLYLXXXXXXXXXKFKYENMVVRSXGXH

SEQ ID NO: 28305 - protein, 37 aa, Artificial Sequence
  GFR-binding peptide
  MOD_RES (1)..(2)..(36): Xaa is C or S
  MOD_RES (16)..(17)..(18)..(19)..(20): Xaa is A or G
  MOD_RES (21)..(22)..(23)..(24): Xaa is A or G or is absent
XXVPTKLEPISILYLXXXXXXXXXKFKYEGMAVSEXG

SEQ ID NO: 28306 - protein, 40 aa, Artificial Sequence
  GFR-binding peptide
  MOD_RES (6)..(7): Xaa is C or S
  MOD_RES (21)..(22)..(23)..(24)..(25): Xaa is A or G
  MOD_RES (26)..(27)..(28)..(29): Xaa is A or G or is absent
KASKAXXVPTKLNAISILYFXXXXXXXXXLKKYRGMAVSE

SEQ ID NO: 28307 - protein, 35 aa, Artificial Sequence
  GFR-binding peptide
  MOD_RES (1)..(2)..(35): Xaa is C or S
  MOD_RES (16)..(17)..(18)..(19)..(20): Xaa is A or G
  MOD_RES (21)..(22)..(23)..(24): Xaa is A or G or is absent
XXVPQALEPISILYLXXXXXXXXXKFKYEMIVRSX

SEQ ID NO: 28308 - protein, 34 aa, Artificial Sequence
  GFR-binding peptide
  MOD_RES (4)..(4): Xaa is C or S
KPTXAPTKLEPISVLYLDDSSNVIKFKYENMVVR

SEQ ID NO: 28309 - protein, 38 aa, Artificial Sequence
  GFR-binding peptide
  MOD_RES (5)..(6): Xaa is C or S
  MOD_RES (20)..(21)..(22)..(23)..(24): Xaa is A or G
  MOD_RES (25)..(26)..(27)..(28): Xaa is A or G or is absent
VPKAXXAPTKLEPISVLYLXXXXXXXXXKFKYENMVVK

SEQ ID NO: 28310 - protein, 40 aa, Artificial Sequence
  GFR-binding peptide
  MOD_RES (4)..(5)..(39): Xaa is C or S
  MOD_RES (19)..(20)..(21)..(22)..(23): Xaa is A or G
  MOD_RES (24)..(25)..(26)..(27): Xaa is A or G or is absent
SKAXXVPTKLEPISILYLXXXXXXXXXKFKYEGMAVSEXG

SEQ ID NO: 28311 - protein, 39 aa, Artificial Sequence
  GFR-binding peptide
  MOD_RES (3)..(4)..(36)..(38): Xaa is C or S
KPXXAPTQLSPISVLYIDDSSNVIYKQYENMVVRAXGXH

SEQ ID NO: 28312 - protein, 37 aa, Artificial Sequence
  GFR-binding peptide
  MOD_RES (3)..(4)..(36): Xaa is C or S
KPXXAPTKLSPISVLYIDDSSNVIYKQYENMVVRSXG

SEQ ID NO: 28313 - protein, 34 aa, Artificial Sequence
  GFR-binding peptide
  MOD_RES (1)..(1): Xaa is C or S
  MOD_RES (15)..(16)..(17)..(18)..(19): Xaa is A or G
  MOD_RES (20)..(21)..(22)..(23): Xaa is A or G or is absent
XVPTKLSPISILYIXXXXXXXXXYKQYEGMAVSE

SEQ ID NO: 28314 - protein, 39 aa, Artificial Sequence
  GFR-binding peptide
  MOD_RES (5)..(6)..(39): Xaa is C or S
  MOD_RES (20)..(21)..(22)..(23)..(24): Xaa is A or G
  MOD_RES (25)..(26)..(27)..(28): Xaa is A or G or is absent
SASPXXVSQDLSPISILYIXXXXXXXXXYKQYEMIVKSX

SEQ ID NO: 28315 - protein, 38 aa, Artificial Sequence
  GFR-binding peptide
  MOD_RES (1)..(2)..(35)..(37): Xaa is C or S
  MOD_RES (16)..(17)..(18)..(19)..(20): Xaa is A or G
  MOD_RES (21)..(22)..(23)..(24): Xaa is A or G or is absent
XXVPQALEPISILYLXXXXXXXXXKFKYEMIVRSXKXS

SEQ ID NO: 28316 - protein, 31 aa, Artificial Sequence; identical to SEQ ID NO: 7134
  GFR-binding peptide
  MOD_RES (1)..(1): Xaa is C or S

SEQ ID NO: 28317 - protein, 30 aa, Artificial Sequence
  GFR-binding peptide
VPTKLNAISILYFDKGVVTYLKKYRGMAVS

SEQ ID NO: 28318 - protein, 41 aa, Artificial Sequence; identical to SEQ ID NO: 7137
  GFR-binding peptide
  MOD_RES (3)..(4)..(38)..(40): Xaa is C or S
  MOD_RES (18)..(19)..(20)..(21)..(22): Xaa is A or G
  MOD_RES (23)..(24)..(25)..(26): Xaa is A or G or is absent

SEQ ID NO: 28319 - protein, 33 aa, Artificial Sequence
  GFR-binding peptide
  MOD_RES (1)..(2)..(33): Xaa is C or S
XXVSQDLEPISILYLIGKTPKIKFKYEMIVKSX

SEQ ID NO: 28320 - protein, 40 aa, Artificial Sequence; identical to SEQ ID NO: 7141
  GFR-binding peptide
  MOD_RES (5)..(6)..(40): Xaa is C or S
  MOD_RES (20)..(21)..(22)..(23)..(24): Xaa is A or G
  MOD_RES (25)..(26)..(27)..(28): Xaa is A or G or is absent

SEQ ID NO: 28321 - protein, 37 aa, Artificial Sequence; identical to SEQ ID NO: 7144
  GFR-binding peptide
  MOD_RES (5)..(6): Xaa is C or S

SEQ ID NO: 28322 - protein, 34 aa, Artificial Sequence; identical to SEQ ID NO: 7145
  GFR-binding peptide
  MOD_RES (33)..(33): Xaa is C or S

SEQ ID NO: 28323 - protein, 39 aa, Artificial Sequence
  GFR-binding peptide
  MOD_RES (5)..(6)..(39): Xaa is C or S
VGKAXXVPTKLSPISVLYIDDMGVPTYKQYEEGMSVAEX

SEQ ID NO: 28324 - protein, 37 aa, Artificial Sequence
  GFR-binding peptide
  MOD_RES (3)..(4)..(35)..(37): Xaa is C or S
SPXXVSQDLEPISILYLIGKTPKIKFKYEMIVKSXKX

SEQ ID NO: 28325 - protein, 35 aa, Artificial Sequence
  GFR-binding peptide
  MOD_RES (2)..(3): Xaa is C or S
  MOD_RES (17)..(18)..(19)..(20)..(21): Xaa is A or G
  MOD_RES (22)..(23)..(24)..(25): Xaa is A or G or is absent
AXXVPTKLEPISILYLXXXXXXXXXKFKYEGMAVS

SEQ ID NO: 28326 - protein, 35 aa, Artificial Sequence
  GFR-binding peptide
  MOD_RES (2)..(3): Xaa is C or S
  MOD_RES (17)..(18)..(19)..(20)..(21): Xaa is A or G
  MOD_RES (22)..(23)..(24)..(25): Xaa is A or G or is absent
PXXVPQDLEPISILYLXXXXXXXXXKFKYEMVVKS

SEQ ID NO: 28327 - protein, 38 aa, Artificial Sequence
  GFR-binding peptide
  MOD_RES (2)..(3)..(37): Xaa is C or S
  MOD_RES (17)..(18)..(19)..(20)..(21): Xaa is A or G
  MOD_RES (22)..(23)..(24)..(25): Xaa is A or G or is absent
SXXVPARLSPISILYIXXXXXXXXXYKQYEDMVVEAXG

SEQ ID NO: 28328 - protein, 36 aa, Artificial Sequence
  GFR-binding peptide
  MOD_RES (5)..(6): Xaa is C or S
VPKPXXAPTQLSPISVLYIDDSSNVIYKQYENMVVR

SEQ ID NO: 28329 - protein, 40 aa, Artificial Sequence
  GFR-binding peptide
  MOD_RES (5)..(37)..(39): Xaa is C or S
TKPTXAPTKLEPISVLYLDDSSNVIKFKYENMVVRSXGXH

SEQ ID NO: 28330 - protein, 40 aa, Artificial Sequence; identical to SEQ ID NO: 7150
  GFR-binding peptide
  MOD_RES (3)..(4)..(38)..(40): Xaa is C or S
  MOD_RES (18)..(19)..(20)..(21)..(22): Xaa is A or G
  MOD_RES (23)..(24)..(25)..(26): Xaa is A or G or is absent

SEQ ID NO: 28331 - protein, 38 aa, Artificial Sequence
  GFR-binding peptide
  MOD_RES (1)..(2)..(37): Xaa is C or S
  MOD_RES (16)..(17)..(18)..(19)..(20): Xaa is A or G
  MOD_RES (21)..(22)..(23)..(24): Xaa is A or G or is absent
XXVPTKLSPISVLYIXXXXXXXXXYKQYEEGMSVAEXG

SEQ ID NO: 28332 - protein, 38 aa, Artificial Sequence
  GFR-binding peptide
  MOD_RES (2)..(3)..(37): Xaa is C or S
  MOD_RES (17)..(18)..(19)..(20)..(21): Xaa is A or G
  MOD_RES (22)..(23)..(24)..(25): Xaa is A or G or is absent
AXXVPTELEPISMLYLXXXXXXXXXKFKYEEMVVEGXG

SEQ ID NO: 28333 - protein, 38 aa, Artificial Sequence; identical to SEQ ID NO: 7153
  GFR-binding peptide
  MOD_RES (2)..(3)..(37): Xaa is C or S
  MOD_RES (17)..(18)..(19)..(20)..(21): Xaa is A or G
  MOD_RES (22)..(23)..(24)..(25): Xaa is A or G or is absent

SEQ ID NO: 28334 - protein, 38 aa, Artificial Sequence
  GFR-binding peptide
  MOD_RES (5)..(6)..(37): Xaa is C or S
SASPXXVPQDLEPISILYLVGRTPKVKFKYEMVVKSXK

SEQ ID NO: 28335 - protein, 40 aa, Artificial Sequence; identical to SEQ ID NO: 7156
  GFR-binding peptide
  MOD_RES (4)..(5)..(38)..(40): Xaa is C or S
  MOD_RES (19)..(20)..(21)..(22)..(23): Xaa is A or G
  MOD_RES (24)..(25)..(26)..(27): Xaa is A or G or is absent

SEQ ID NO: 28336 - protein, 38 aa, Artificial Sequence; identical to SEQ ID NO: 7157
  GFR-binding peptide
  MOD_RES (5)..(5): Xaa is C or S
  MOD_RES (19)..(20)..(21)..(22)..(23): Xaa is A or G
  MOD_RES (24)..(25)..(26)..(27): Xaa is A or G or is absent

SEQ ID NO: 28337 - protein, 35 aa, Artificial Sequence; identical to SEQ ID NO: 7158
  GFR-binding peptide
  MOD_RES (32)..(34): Xaa is C or S

SEQ ID NO: 28338 - protein, 39 aa, Artificial Sequence; identical to SEQ ID NO: 7159
  GFR-binding peptide
  MOD_RES (6)..(7)..(39): Xaa is C or S

SEQ ID NO: 28339 - protein, 40 aa, Artificial Sequence; identical to SEQ ID NO: 7160
  GFR-binding peptide
  MOD_RES (3)..(4)..(37)..(39): Xaa is C or S
  MOD_RES (18)..(19)..(20)..(21)..(22): Xaa is A or G
  MOD_RES (23)..(24)..(25)..(26): Xaa is A or G or is absent

SEQ ID NO: 28340 - protein, 35 aa, Artificial Sequence
  GFR-binding peptide
  MOD_RES (1)..(2): Xaa is C or S
  MOD_RES (16)..(17)..(18)..(19)..(20): Xaa is A or G
  MOD_RES (21)..(22)..(23)..(24): Xaa is A or G or is absent
XXAPTKLEPISVLYLXXXXXXXXXKFKYENMVVKA

SEQ ID NO: 28341 - protein, 37 aa, Artificial Sequence; identical to SEQ ID NO: 7169
  GFR-binding peptide
  MOD_RES (1)..(34)..(36): Xaa is C or S
  MOD_RES (15)..(16)..(17)..(18)..(19): Xaa is A or G
  MOD_RES (20)..(21)..(22)..(23): Xaa is A or G or is absent

SEQ ID NO: 28342 - protein, 37 aa, Artificial Sequence; identical to SEQ ID NO: 7170
  GFR-binding peptide
  MOD_RES (2)..(3)..(36): Xaa is C or S
  MOD_RES (17)..(18)..(19)..(20)..(21): Xaa is A or G
  MOD_RES (22)..(23)..(24)..(25): Xaa is A or G or is absent

SEQ ID NO: 28343 - protein, 37 aa, Artificial Sequence; identical to SEQ ID NO: 7171
  GFR-binding peptide
  MOD_RES (5)..(6)..(37): Xaa is C or S

SEQ ID NO: 28344 - protein, 35 aa, Artificial Sequence
  GFR-binding peptide
  MOD_RES (2)..(3)..(35): Xaa is C or S
AXXVPTELEPISMLYLDENEKVVKFKYEDMVVEGX

SEQ ID NO: 28345 - protein, 37 aa, Artificial Sequence
  GFR-binding peptide
  MOD_RES (3)..(4)..(36): Xaa is C or S
KAXXAPTKLSPISVLYIDSSNNVIYKQYENMVVKAXG

SEQ ID NO: 28346 - protein, 35 aa, Artificial Sequence
  GFR-binding peptide
  MOD_RES (1)..(2): Xaa is C or S
  MOD_RES (16)..(17)..(18)..(19)..(20): Xaa is A or G
  MOD_RES (21)..(22)..(23)..(24): Xaa is A or G or is absent
XXVPTKLNAISILYFXXXXXXXXXLKKYRGMAVSE

SEQ ID NO: 28347 - protein, 38 aa, Artificial Sequence
  GFR-binding peptide
  MOD_RES (4)..(5): Xaa is C or S
  MOD_RES (19)..(20)..(21)..(22)..(23): Xaa is A or G
  MOD_RES (24)..(25)..(26)..(27): Xaa is A or G or is absent
PASXXVPARLEPISILYLXXXXXXXXXKFKYEDMVVEA

SEQ ID NO: 28348 - protein, 39 aa, Artificial Sequence
  GFR-binding peptide
  MOD_RES (5)..(6): Xaa is C or S
  MOD_RES (20)..(21)..(22)..(23)..(24): Xaa is A or G
  MOD_RES (25)..(26)..(27)..(28): Xaa is A or G or is absent
VPKAXXAPTKLSPISVLYIXXXXXXXXXYKQYENMVVKA

SEQ ID NO: 28349 - protein, 36 aa, Artificial Sequence; identical to SEQ ID NO: 7182
  GFR-binding peptide
  MOD_RES (2)..(3)..(35): Xaa is C or S

SEQ ID NO: 28350 - protein, 38 aa, Artificial Sequence; identical to SEQ ID NO: 7184
  GFR-binding peptide
  MOD_RES (1)..(2)..(35)..(37): Xaa is C or S
  MOD_RES (16)..(17)..(18)..(19)..(20): Xaa is A or G
  MOD_RES (21)..(22)..(23)..(24): Xaa is A or G or is absent

SEQ ID NO: 28351 - protein, 43 aa, Artificial Sequence; identical to SEQ ID NO: 7185
  GFR-binding peptide
  MOD_RES (6)..(7)..(41)..(43): Xaa is C or S
  MOD_RES (21)..(22)..(23)..(24)..(25): Xaa is A or G
  MOD_RES (26)..(27)..(28)..(29): Xaa is A or G or is absent

SEQ ID NO: 28352 - protein, 35 aa, Artificial Sequence
  GFR-binding peptide
  MOD_RES (4)..(5): Xaa is C or S
PASXXVPARLNAISILYFDAANNVVLKKYRDMVVE

SEQ ID NO: 28353 - protein, 41 aa, Artificial Sequence
  GFR-binding peptide
  MOD_RES (6)..(7)..(40): Xaa is C or S
  MOD_RES (21)..(22)..(23)..(24)..(25): Xaa is A or G
  MOD_RES (26)..(27)..(28)..(29): Xaa is A or G or is absent
ASAAPXXVPQALSPISILYIXXXXXXXXXYKQYEMIVRSXK

SEQ ID NO: 28354 - protein, 34 aa, Artificial Sequence
  GFR-binding peptide
  MOD_RES (3)..(4): Xaa is C or S
ASXXVPARLSPISILYKDAANNVVLKYHYDMVVE

SEQ ID NO: 28355 - protein, 34 aa, Artificial Sequence; identical to SEQ ID NO: 7189
  GFR-binding peptide
  MOD_RES (2)..(3)..(34): Xaa is C or S

SEQ ID NO: 28356 - protein, 39 aa, Artificial Sequence
  GFR-binding peptide
  MOD_RES (6)..(7)..(39): Xaa is C or S
AAPASXXVPARLNAISILYFDAANNVVLKKYRDMVVEAX

SEQ ID NO: 28357 - protein, 36 aa, Artificial Sequence
  GFR-binding peptide
  MOD_RES (33)..(35): Xaa is C or S
VPTKLEPISVLYLDDMGVPTKFKYEEGMSVAEXGXR

SEQ ID NO: 28358 - protein, 42 aa, Artificial Sequence; identical to SEQ ID NO: 7191
  GFR-binding peptide
  MOD_RES (5)..(6)..(39)..(41): Xaa is C or S
  MOD_RES (20)..(21)..(22)..(23)..(24): Xaa is A or G
  MOD_RES (25)..(26)..(27)..(28): Xaa is A or G or is absent

SEQ ID NO: 28359 - protein, 31 aa, Artificial Sequence; identical to SEQ ID NO: 7192
  GFR-binding peptide

SEQ ID NO: 28360 - protein, 33 aa, Artificial Sequence; identical to SEQ ID NO: 7193
  GFR-binding peptide
  MOD_RES (2)..(3): Xaa is C or S

SEQ ID NO: 28361 - protein, 36 aa, Artificial Sequence
  GFR-binding peptide
  MOD_RES (34)..(36): Xaa is C or S
  MOD_RES (14)..(15)..(16)..(17)..(18): Xaa is A or G
  MOD_RES (19)..(20)..(21)..(22): Xaa is A or G or is absent
VPTELSPISMLYIXXXXXXXXXYKQYEDMVVEGXGX

SEQ ID NO: 28362 - protein, 40 aa, Artificial Sequence
  GFR-binding peptide
  MOD_RES (4)..(5)..(39): Xaa is C or S
  MOD_RES (19)..(20)..(21)..(22)..(23): Xaa is A or G
  MOD_RES (24)..(25)..(26)..(27): Xaa is A or G or is absent
SKAXXVPTKLSPISILYKXXXXXXXXXLKYHYGMAVSEXG

SEQ ID NO: 28363 - protein, 37 aa, Artificial Sequence; identical to SEQ ID NO: 7195
  GFR-binding peptide
  MOD_RES (1)..(2)..(34)..(36): Xaa is C or S

SEQ ID NO: 28364 - protein, 37 aa, Artificial Sequence; identical to SEQ ID NO: 7196
  GFR-binding peptide
  MOD_RES (1)..(2)..(34)..(36): Xaa is C or S

SEQ ID NO: 28365 - protein, 36 aa, Artificial Sequence; identical to SEQ ID NO: 7197
  GFR-binding peptide
  MOD_RES (1)..(2)..(36): Xaa is C or S
  MOD_RES (16)..(17)..(18)..(19)..(20): Xaa is A or G
  MOD_RES (21)..(22)..(23)..(24): Xaa is A or G or is absent

SEQ ID NO: 28366 - protein, 41 aa, Artificial Sequence
  GFR-binding peptide
  MOD_RES (6)..(7)..(39)..(41): Xaa is C or S
KASKAXXVPTKLNAISILYFDKGVVTYLKKYRGMAVSEXGX

SEQ ID NO: 28367 - protein, 37 aa, Artificial Sequence
  GFR-binding peptide
  MOD_RES (6)..(7): Xaa is C or S
KIPKAXXVPTELSPISMLYIDENEKVVYKQYEDMVVE

SEQ ID NO: 28368 - protein, 37 aa, Artificial Sequence; identical to SEQ ID NO: 7199
  GFR-binding peptide
  MOD_RES (1)..(35)..(37): Xaa is C or S
  MOD_RES (15)..(16)..(17)..(18)..(19): Xaa is A or G
  MOD_RES (20)..(21)..(22)..(23): Xaa is A or G or is absent

SEQ ID NO: 28369 - protein, 39 aa, Artificial Sequence
  GFR-binding peptide
  MOD_RES (4)..(5)..(39): Xaa is C or S
  MOD_RES (19)..(20)..(21)..(22)..(23): Xaa is A or G
  MOD_RES (24)..(25)..(26)..(27): Xaa is A or G or is absent
PASXXVPARLSPISILYIXXXXXXXXXYKQYEDMVVEAX

SEQ ID NO: 28370 - protein, 37 aa, Artificial Sequence; identical to SEQ ID NO: 7200
  GFR-binding peptide
  MOD_RES (3)..(4)..(35)..(37): Xaa is C or S

SEQ ID NO: 28371 - protein, 42 aa, Artificial Sequence; identical to SEQ ID NO: 7204
  GFR-binding peptide
  MOD_RES (5)..(6)..(40)..(42): Xaa is C or S
  MOD_RES (20)..(21)..(22)..(23)..(24): Xaa is A or G
  MOD_RES (25)..(26)..(27)..(28): Xaa is A or G or is absent

SEQ ID NO: 28372 - protein, 40 aa, Artificial Sequence; identical to SEQ ID NO: 7205
  GFR-binding peptide
  MOD_RES (6)..(7)..(39): Xaa is C or S

SEQ ID NO: 28373 - protein, 34 aa, Artificial Sequence
  GFR-binding peptide
  MOD_RES (34)..(34): Xaa is C or S
  MOD_RES (14)..(15)..(16)..(17)..(18): Xaa is A or G
  MOD_RES (19)..(20)..(21)..(22): Xaa is A or G or is absent
VPTELEPISMLYLXXXXXXXXXKFKYEEMVVEGX

SEQ ID NO: 28374 - protein, 37 aa, Artificial Sequence
  GFR-binding peptide
  MOD_RES (6)..(7): Xaa is C or S
ASASPXXVSQDLEPISILYLIGKTPKIKFKYEMIVKS

SEQ ID NO: 28375 - protein, 39 aa, Artificial Sequence
  GFR-binding peptide
  MOD_RES (5)..(6)..(38): Xaa is C or S
APASXXVPARLSPISILYKDAANNVVLKYHYDMVVEAXG

SEQ ID NO: 28376 - protein, 38 aa, Artificial Sequence
  GFR-binding peptide
  MOD_RES (5)..(6): Xaa is C or S
  MOD_RES (20)..(21)..(22)..(23)..(24): Xaa is A or G
  MOD_RES (25)..(26)..(27)..(28): Xaa is A or G or is absent
SAAPXXVPQALSPISILYIXXXXXXXXXYKQYEMIVRS

SEQ ID NO: 28377 - protein, 32 aa, Artificial Sequence
  GFR-binding peptide
  MOD_RES (14)..(15)..(16)..(17)..(18): Xaa is A or G
  MOD_RES (19)..(20)..(21)..(22): Xaa is A or G or is absent
VPTKLSPISILYIXXXXXXXXXYKQYEGMAVS

SEQ ID NO: 28378 - protein, 36 aa, Artificial Sequence; identical to SEQ ID NO: 7208
  GFR-binding peptide
  MOD_RES (1)..(2)..(36): Xaa is C or S
  MOD_RES (16)..(17)..(18)..(19)..(20): Xaa is A or G
  MOD_RES (21)..(22)..(23)..(24): Xaa is A or G or is absent

SEQ ID NO: 28379 - protein, 37 aa, Artificial Sequence
  GFR-binding peptide
  MOD_RES (4)..(5): Xaa is C or S
  MOD_RES (19)..(20)..(21)..(22)..(23): Xaa is A or G
  MOD_RES (24)..(25)..(26)..(27): Xaa is A or G or is absent
PKAXXVPTELSPISMLYIXXXXXXXXXYKQYEEMVVE

SEQ ID NO: 28380 - protein, 36 aa, Artificial Sequence; identical to SEQ ID NO: 7214
  GFR-binding peptide
  MOD_RES (1)..(33)..(35): Xaa is C or S

SEQ ID NO: 28381 - protein, 38 aa, Artificial Sequence
  GFR-binding peptide
  MOD_RES (5)..(6): Xaa is C or S
  MOD_RES (20)..(21)..(22)..(23)..(24): Xaa is A or G
  MOD_RES (25)..(26)..(27)..(28): Xaa is A or G or is absent
APASXXVPARLEPISILYLXXXXXXXXXKFKYEDMVVE

SEQ ID NO: 28382 - protein, 33 aa, Artificial Sequence
  GFR-binding peptide
  MOD_RES (1)..(1): Xaa is C or S
XVPTKLEPISVLYLDDMGVPTKFKYEEGMSVAE

SEQ ID NO: 28383 - protein, 32 aa, Artificial Sequence
  GFR-binding peptide
  MOD_RES (1)..(1): Xaa is C or S
XVPARLSPISILYKDAANNVVLKYHYDMVVEA

SEQ ID NO: 28384 - protein, 43 aa, Artificial Sequence
  GFR-binding peptide
  MOD_RES (5)..(6)..(40)..(42): Xaa is C or S
  MOD_RES (20)..(21)..(22)..(23)..(24): Xaa is A or G
  MOD_RES (25)..(26)..(27)..(28): Xaa is A or G or is absent
ASKAXXVPTKLSPISILYKXXXXXXXXXLKYHYGMAVSEXGXR

SEQ ID NO: 28385 - protein, 41 aa, Artificial Sequence; identical to SEQ ID NO: 7220
  GFR-binding peptide
  MOD_RES (3)..(4)..(38)..(40): Xaa is C or S
  MOD_RES (18)..(19)..(20)..(21)..(22): Xaa is A or G
  MOD_RES (23)..(24)..(25)..(26): Xaa is A or G or is absent

SEQ ID NO: 28386 - protein, 41 aa, Artificial Sequence
  GFR-binding peptide
  MOD_RES (3)..(4)..(38)..(40): Xaa is C or S
  MOD_RES (18)..(19)..(20)..(21)..(22): Xaa is A or G
  MOD_RES (23)..(24)..(25)..(26): Xaa is A or G or is absent
KPXXAPTQLSPISVLYIXXXXXXXXXYKQYENMVVRAXGXH

SEQ ID NO: 28387 - protein, 37 aa, Artificial Sequence; identical to SEQ ID NO: 7224
  GFR-binding peptide
  MOD_RES (3)..(4)..(37): Xaa is C or S
  MOD_RES (18)..(19)..(20)..(21)..(22): Xaa is A or G
  MOD_RES (23)..(24)..(25)..(26): Xaa is A or G or is absent

SEQ ID NO: 28388 - protein, 44 aa, Artificial Sequence
  GFR-binding peptide
  MOD_RES (7)..(41)..(43): Xaa is C or S
  MOD_RES (21)..(22)..(23)..(24)..(25): Xaa is A or G
  MOD_RES (26)..(27)..(28)..(29): Xaa is A or G or is absent
HVTKPTXAPTKLSPISVLYIXXXXXXXXXYKQYENMVVRSXGXH

SEQ ID NO: 28389 - protein, 40 aa, Artificial Sequence
  GFR-binding peptide
  MOD_RES (5)..(6)..(40): Xaa is C or S
  MOD_RES (20)..(21)..(22)..(23)..(24): Xaa is A or G
  MOD_RES (25)..(26)..(27)..(28): Xaa is A or G or is absent
ASKAXXVPTKLEPISILYLXXXXXXXXXKFKYEGMAVSEX

SEQ ID NO: 28390 - protein, 42 aa, Artificial Sequence
  GFR-binding peptide
  MOD_RES (6)..(7)..(39)..(41): Xaa is C or S
SIPKAXXVPTELEPISMLYLDEYDKVVKFKYEEMVVEGXGXR

SEQ ID NO: 28391 - protein, 42 aa, Artificial Sequence
  GFR-binding peptide
  MOD_RES (4)..(5)..(39)..(41): Xaa is C or S
  MOD_RES (19)..(20)..(21)..(22)..(23): Xaa is A or G
  MOD_RES (24)..(25)..(26)..(27): Xaa is A or G or is absent
PKAXXAPTKLSPISVLYIXXXXXXXXXYKQYENMVVKAXGXH

SEQ ID NO: 28392 - protein, 44 aa, Artificial Sequence
  GFR-binding peptide
  MOD_RES (6)..(7)..(41)..(43): Xaa is C or S
  MOD_RES (21)..(22)..(23)..(24)..(25): Xaa is A or G
  MOD_RES (26)..(27)..(28)..(29): Xaa is A or G or is absent
AVPKAXXAPTKLSPISVLYIXXXXXXXXXYKQYENMVVKAXGXH

SEQ ID NO: 28393 - protein, 38 aa, Artificial Sequence
  GFR-binding peptide
  MOD_RES (4)..(5): Xaa is C or S
  MOD_RES (19)..(20)..(21)..(22)..(23): Xaa is A or G
  MOD_RES (24)..(25)..(26)..(27): Xaa is A or G or is absent
SKAXXVPTKLSPISILYKXXXXXXXXXLKYHYGMAVSE

SEQ ID NO: 28394 - protein, 38 aa, Artificial Sequence
  GFR-binding peptide
  MOD_RES (4)..(5): Xaa is C or S
  MOD_RES (19)..(20)..(21)..(22)..(23): Xaa is A or G
  MOD_RES (24)..(25)..(26)..(27): Xaa is A or G or is absent
PASXXVPARLSPISILYKXXXXXXXXXLKYHYDMVVEA

SEQ ID NO: 28395 - protein, 40 aa, Artificial Sequence
  GFR-binding peptide
  MOD_RES (6)..(7)..(38)..(40): Xaa is C or S
ASAAPXXVPQALSPISILYIVGRKPKVYKQYEMIVRSXKX

SEQ ID NO: 28396 - protein, 36 aa, Artificial Sequence
  GFR-binding peptide
  MOD_RES (1)..(2)..(35): Xaa is C or S
XXVPTKLEPISVLYLDDMGVPTKFKYEEGMSVAEXG

SEQ ID NO: 28397 - protein, 34 aa, Artificial Sequence
  GFR-binding peptide
  MOD_RES (34)..(34): Xaa is C or S
  MOD_RES (14)..(15)..(16)..(17)..(18): Xaa is A or G
  MOD_RES (19)..(20)..(21)..(22): Xaa is A or G or is absent
VPTKLNAISILYFXXXXXXXXXLKKYRGMAVSEX

SEQ ID NO: 28398 - protein, 43 aa, Artificial Sequence
  GFR-binding peptide
  MOD_RES (5)..(6)..(40)..(42): Xaa is C or S
  MOD_RES (20)..(21)..(22)..(23)..(24): Xaa is A or G
  MOD_RES (25)..(26)..(27)..(28): Xaa is A or G or is absent
ASKAXXVPTKLSPISILYIXXXXXXXXXYKQYEGMAVSEXGXR

SEQ ID NO: 28399 - protein, 39 aa, Artificial Sequence; identical to SEQ ID NO: 7229
  GFR-binding peptide
  MOD_RES (5)..(6)..(38): Xaa is C or S

SEQ ID NO: 28400 - protein, 38 aa, Artificial Sequence
  GFR-binding peptide
  MOD_RES (3)..(4)..(36)..(38): Xaa is C or S
KAXXVPTKLSPISILYKDKGVVTYLKYHYGMAVSEXGX

SEQ ID NO: 28401 - protein, 37 aa, Artificial Sequence
  GFR-binding peptide
  MOD_RES (4)..(5)..(37): Xaa is C or S
PKAXXVPTELSPISMLYIDENEKVVYKQYEDMVVEGX

SEQ ID NO: 28402 - protein, 37 aa, Artificial Sequence; identical to SEQ ID NO: 7231
  GFR-binding peptide
  MOD_RES (6)..(7): Xaa is C or S

SEQ ID NO: 28403 - protein, 34 aa, Artificial Sequence; identical to SEQ ID NO: 7232
  GFR-binding peptide
  MOD_RES (2)..(34): Xaa is C or S

SEQ ID NO: 28404 - protein, 39 aa, Artificial Sequence
  GFR-binding peptide
  MOD_RES (2)..(3)..(36)..(38): Xaa is C or S
  MOD_RES (17)..(18)..(19)..(20)..(21): Xaa is A or G
  MOD_RES (22)..(23)..(24)..(25): Xaa is A or G or is absent
PXXVSQDLEPISILYLXXXXXXXXXKFKYEMIVKSXKXS

SEQ ID NO: 28405 - protein, 35 aa, Artificial Sequence; identical to SEQ ID NO: 7233
  GFR-binding peptide
  MOD_RES (34)..(34): Xaa is C or S
  MOD_RES (14)..(15)..(16)..(17)..(18): Xaa is A or G
  MOD_RES (19)..(20)..(21)..(22): Xaa is A or G or is absent

SEQ ID NO: 28406 - protein, 40 aa, Artificial Sequence; identical to SEQ ID NO: 7234
  GFR-binding peptide
  MOD_RES (6)..(7)..(40): Xaa is C or S
  MOD_RES (21)..(22)..(23)..(24)..(25): Xaa is A or G
  MOD_RES (26)..(27)..(28)..(29): Xaa is A or G or is absent

SEQ ID NO: 28407 - protein, 37 aa, Artificial Sequence
  GFR-binding peptide
  MOD_RES (4)..(5)..(36): Xaa is C or S
AAPXXVPQALEPISILYLVGRKPKVKFKYEMIVRSXK

SEQ ID NO: 28408 - protein, 33 aa, Artificial Sequence
  GFR-binding peptide
  MOD_RES (2)..(3): Xaa is C or S
PXXAPTKLSPISVLYIDDSSNVIYKQYENMVVR

SEQ ID NO: 28409 - protein, 34 aa, Artificial Sequence
  GFR-binding peptide
  MOD_RES (1)..(33): Xaa is C or S
XVPTELEPISMLYLDEYDKVVKFKYEEMVVEGXG

SEQ ID NO: 28410 - protein, 38 aa, Artificial Sequence
  GFR-binding peptide
  MOD_RES (5)..(6)..(38): Xaa is C or S
IPKAXXVPTELEPISMLYLDEYDKVVKFKYEEMVVEGX

SEQ ID NO: 28411 - protein, 38 aa, Artificial Sequence
  GFR-binding peptide
  MOD_RES (2)..(3)..(36)..(38): Xaa is C or S
AXXVPTKLSPISVLYIDDMGVPTYKQYEEGMSVAEXGX

SEQ ID NO: 28412 - protein, 36 aa, Artificial Sequence; identical to SEQ ID NO: 7239
  GFR-binding peptide
  MOD_RES (3)..(4): Xaa is C or S
  MOD_RES (18)..(19)..(20)..(21)..(22): Xaa is A or G
  MOD_RES (23)..(24)..(25)..(26): Xaa is A or G or is absent

SEQ ID NO: 28413 - protein, 38 aa, Artificial Sequence
  GFR-binding peptide
  MOD_RES (1)..(2)..(35)..(37): Xaa is C or S
  MOD_RES (16)..(17)..(18)..(19)..(20): Xaa is A or G
  MOD_RES (21)..(22)..(23)..(24): Xaa is A or G or is absent
XXVPQALSPISILYIXXXXXXXXXYKQYEMIVRSXKXS

SEQ ID NO: 28414 - protein, 35 aa, Artificial Sequence; identical to SEQ ID NO: 7241
  GFR-binding peptide
  MOD_RES (3)..(4): Xaa is C or S

SEQ ID NO: 28415 - protein, 31 aa, Artificial Sequence
  GFR-binding peptide
VPTELSPISMLYIDENEKVVYKQYEDMVVEG

SEQ ID NO: 28416 - protein, 40 aa, Artificial Sequence
  GFR-binding peptide
  MOD_RES (4)..(5)..(39): Xaa is C or S
  MOD_RES (19)..(20)..(21)..(22)..(23): Xaa is A or G
  MOD_RES (24)..(25)..(26)..(27): Xaa is A or G or is absent
PKPXXAPTQLSPISVLYIXXXXXXXXXYKQYENMVVRAXG

SEQ ID NO: 28417 - protein, 38 aa, Artificial Sequence
  GFR-binding peptide
  MOD_RES (5)..(6): Xaa is C or S
  MOD_RES (20)..(21)..(22)..(23)..(24): Xaa is A or G
  MOD_RES (25)..(26)..(27)..(28): Xaa is A or G or is absent
VPKPXXAPTKLSPISVLYIXXXXXXXXXYKQYENMVVR

SEQ ID NO: 28418 - protein, 31 aa, Artificial Sequence; identical to SEQ ID NO: 7242
  GFR-binding peptide

SEQ ID NO: 28419 - protein, 35 aa, Artificial Sequence
  GFR-binding peptide
  MOD_RES (4)..(4): Xaa is C or S
KPTXAPTKLEPISVLYLDDSSNVIKFKYENMVVRS

SEQ ID NO: 28420 - protein, 37 aa, Artificial Sequence
  GFR-binding peptide
  MOD_RES (34)..(36): Xaa is C or S
  MOD_RES (14)..(15)..(16)..(17)..(18): Xaa is A or G
  MOD_RES (19)..(20)..(21)..(22): Xaa is A or G or is absent
VPTKLSPISILYKXXXXXXXXXLKYHYGMAVSEXGXR

SEQ ID NO: 28421 - protein, 35 aa, Artificial Sequence
  GFR-binding peptide
  MOD_RES (1)..(2): Xaa is C or S
  MOD_RES (16)..(17)..(18)..(19)..(20): Xaa is A or G
  MOD_RES (21)..(22)..(23)..(24): Xaa is A or G or is absent
XXAPTKLEPISVLYLXXXXXXXXXKFKYENMVVRS

SEQ ID NO: 28422 - protein, 39 aa, Artificial Sequence
  GFR-binding peptide
  MOD_RES (3)..(4)..(38): Xaa is C or S
  MOD_RES (18)..(19)..(20)..(21)..(22): Xaa is A or G
  MOD_RES (23)..(24)..(25)..(26): Xaa is A or G or is absent
KPXXAPTKLSPISVLYIXXXXXXXXXYKQYENMVVRSXG

SEQ ID NO: 28423 - protein, 36 aa, Artificial Sequence
  GFR-binding peptide
  MOD_RES (1)..(35): Xaa is C or S
  MOD_RES (15)..(16)..(17)..(18)..(19): Xaa is A or G
  MOD_RES (20)..(21)..(22)..(23): Xaa is A or G or is absent
XAPTQLSPISVLYIXXXXXXXXXYKQYENMVVRAXG

SEQ ID NO: 28424 - protein, 38 aa, Artificial Sequence
  GFR-binding peptide
  MOD_RES (5)..(6): Xaa is C or S
  MOD_RES (20)..(21)..(22)..(23)..(24): Xaa is A or G
  MOD_RES (25)..(26)..(27)..(28): Xaa is A or G or is absent
VPKPXXAPTQLEPISVLYLXXXXXXXXXKFKYENMVVR

SEQ ID NO: 28425 - protein, 36 aa, Artificial Sequence; identical to SEQ ID NO: 7244
  GFR-binding peptide
  MOD_RES (2)..(3)..(36): Xaa is C or S
  MOD_RES (17)..(18)..(19)..(20)..(21): Xaa is A or G
  MOD_RES (22)..(23)..(24)..(25): Xaa is A or G or is absent

SEQ ID NO: 28426 - protein, 38 aa, Artificial Sequence
  GFR-binding peptide
  MOD_RES (4)..(5): Xaa is C or S
  MOD_RES (19)..(20)..(21)..(22)..(23): Xaa is A or G
  MOD_RES (24)..(25)..(26)..(27): Xaa is A or G or is absent
SKAXXVPTKLSPISILYIXXXXXXXXXYKQYEGMAVSE

SEQ ID NO: 28427 - protein, 33 aa, Artificial Sequence; identical to SEQ ID NO: 7245
  GFR-binding peptide
  MOD_RES (14)..(15)..(16)..(17)..(18): Xaa is A or G
  MOD_RES (19)..(20)..(21)..(22): Xaa is A or G or is absent

SEQ ID NO: 28428 - protein, 35 aa, Artificial Sequence
  GFR-binding peptide
  MOD_RES (32)..(34): Xaa is C or S
VPTELEPISMLYLDEYDKVVKFKYEEMVVEGXGXR

SEQ ID NO: 28429 - protein, 35 aa, Artificial Sequence
  GFR-binding peptide
  MOD_RES (1)..(35): Xaa is C or S
  MOD_RES (15)..(16)..(17)..(18)..(19): Xaa is A or G
  MOD_RES (20)..(21)..(22)..(23): Xaa is A or G or is absent
XAPTKLSPISVLYIXXXXXXXXXYKQYENMVVRSX

SEQ ID NO: 28430 - protein, 32 aa, Artificial Sequence
  GFR-binding peptide
  MOD_RES (1)..(2): Xaa is C or S
XXVPQDLEPISILYLVGRTPKVKFKYEMVVKS

SEQ ID NO: 28431 - protein, 41 aa, Artificial Sequence
  GFR-binding peptide
  MOD_RES (5)..(6)..(38)..(40): Xaa is C or S
ASKAXXVPTKLSPISILYIDKGVVTYYKQYEGMAVSEXGXR

SEQ ID NO: 28432 - protein, 40 aa, Artificial Sequence; identical to SEQ ID NO: 7247
  GFR-binding peptide
  MOD_RES (5)..(37)..(39): Xaa is C or S

SEQ ID NO: 28433 - protein, 43 aa, Artificial Sequence; identical to SEQ ID NO: 7248
  GFR-binding peptide
  MOD_RES (5)..(6)..(40)..(42): Xaa is C or S
  MOD_RES (20)..(21)..(22)..(23)..(24): Xaa is A or G
  MOD_RES (25)..(26)..(27)..(28): Xaa is A or G or is absent

SEQ ID NO: 28434 - protein, 37 aa, Artificial Sequence; identical to SEQ ID NO: 7250
  GFR-binding peptide
  MOD_RES (5)..(37): Xaa is C or S

SEQ ID NO: 28435 - protein, 35 aa, Artificial Sequence
  GFR-binding peptide
  MOD_RES (2)..(3)..(35): Xaa is C or S
AXXVPTKLSPISILYKDKGVVTYLKYHYGMAVSEX

SEQ ID NO: 28436 - protein, 37 aa, Artificial Sequence
  GFR-binding peptide
  MOD_RES (35)..(37): Xaa is C or S
  MOD_RES (14)..(15)..(16)..(17)..(18): Xaa is A or G
  MOD_RES (19)..(20)..(21)..(22): Xaa is A or G or is absent
VPTKLSPISVLYIXXXXXXXXXYKQYEEGMSVAEXGX

SEQ ID NO: 28437 - protein, 37 aa, Artificial Sequence
  GFR-binding peptide
  MOD_RES (1)..(34)..(36): Xaa is C or S
  MOD_RES (15)..(16)..(17)..(18)..(19): Xaa is A or G
  MOD_RES (20)..(21)..(22)..(23): Xaa is A or G or is absent
XVSQDLEPISILYLXXXXXXXXXKFKYEMIVKSXKXS

SEQ ID NO: 28438 - protein, 40 aa, Artificial Sequence
  GFR-binding peptide
  MOD_RES (5)..(6)..(38)..(40): Xaa is C or S
ASKAXXVPTKLNAISILYFDKGVVTYLKKYRGMAVSEXGX

SEQ ID NO: 28439 - protein, 40 aa, Artificial Sequence; identical to SEQ ID NO: 7256
  GFR-binding peptide
  MOD_RES (5)..(6)..(37)..(39): Xaa is C or S

SEQ ID NO: 28440 - protein, 38 aa, Artificial Sequence
  GFR-binding peptide
  MOD_RES (4)..(5)..(37): Xaa is C or S
PKAXXVPTELSPISMLYIDENEKVVYKQYEDMVVEGXG

SEQ ID NO: 28441 - protein, 40 aa, Artificial Sequence; identical to SEQ ID NO: 7257
  GFR-binding peptide
  MOD_RES (4)..(5)..(39): Xaa is C or S
  MOD_RES (19)..(20)..(21)..(22)..(23): Xaa is A or G
  MOD_RES (24)..(25)..(26)..(27): Xaa is A or G or is absent

SEQ ID NO: 28442 - protein, 37 aa, Artificial Sequence
  GFR-binding peptide
  MOD_RES (2)..(3)..(37): Xaa is C or S
  MOD_RES (17)..(18)..(19)..(20)..(21): Xaa is A or G
  MOD_RES (22)..(23)..(24)..(25): Xaa is A or G or is absent
AXXVPTKLSPISILYIXXXXXXXXXYKQYEGMAVSEX

SEQ ID NO: 28443 - protein, 32 aa, Artificial Sequence; identical to SEQ ID NO: 7261
  GFR-binding peptide
  MOD_RES (14)..(15)..(16)..(17)..(18): Xaa is A or G
  MOD_RES (19)..(20)..(21)..(22): Xaa is A or G or is absent

SEQ ID NO: 28444 - protein, 40 aa, Artificial Sequence
  GFR-binding peptide
  MOD_RES (5)..(6)..(38)..(40): Xaa is C or S
VPKAXXAPTKLSPISVLYIDSSNNVIYKQYENMVVKAXGX

SEQ ID NO: 28445 - protein, 38 aa, Artificial Sequence
  GFR-binding peptide
  MOD_RES (5)..(6)..(37): Xaa is C or S
SASPXXVSQDLEPISILYLIGKTPKIKFKYEMIVKSXK

SEQ ID NO: 28446 - protein, 37 aa, Artificial Sequence
  GFR-binding peptide
  MOD_RES (1)..(35)..(37): Xaa is C or S
  MOD_RES (15)..(16)..(17)..(18)..(19): Xaa is A or G
  MOD_RES (20)..(21)..(22)..(23): Xaa is A or G or is absent
XVPTKLSPISILYIXXXXXXXXXYKQYEGMAVSEXGX

SEQ ID NO: 28447 - protein, 33 aa, Artificial Sequence; identical to SEQ ID NO: 7267
  GFR-binding peptide
  MOD_RES (1)..(2): Xaa is C or S

SEQ ID NO: 28448 - protein, 43 aa, Artificial Sequence
  GFR-binding peptide
  MOD_RES (5)..(6)..(40)..(42): Xaa is C or S
  MOD_RES (20)..(21)..(22)..(23)..(24): Xaa is A or G
  MOD_RES (25)..(26)..(27)..(28): Xaa is A or G or is absent
IPKAXXVPTELEPISMLYLXXXXXXXXXKFKYEDMVVEGXGXR

SEQ ID NO: 28449 - protein, 32 aa, Artificial Sequence
  GFR-binding peptide
  MOD_RES (32)..(32): Xaa is C or S
VPTKLNAISILYFDKGVVTYLKKYRGMAVSEX

SEQ ID NO: 28450 - protein, 38 aa, Artificial Sequence; identical to SEQ ID NO: 7275
  GFR-binding peptide
  MOD_RES (3)..(4)..(37): Xaa is C or S
  MOD_RES (18)..(19)..(20)..(21)..(22): Xaa is A or G
  MOD_RES (23)..(24)..(25)..(26): Xaa is A or G or is absent

SEQ ID NO: 28451 - protein, 40 aa, Artificial Sequence
  GFR-binding peptide
  MOD_RES (4)..(5)..(39): Xaa is C or S
  MOD_RES (19)..(20)..(21)..(22)..(23): Xaa is A or G
  MOD_RES (24)..(25)..(26)..(27): Xaa is A or G or is absent
SKAXXVPTKLNAISILYFXXXXXXXXXLKKYRGMAVSEXG

SEQ ID NO: 28452 - protein, 33 aa, Artificial Sequence
  GFR-binding peptide
  MOD_RES (1)..(1): Xaa is C or S
  MOD_RES (15)..(16)..(17)..(18)..(19): Xaa is A or G
  MOD_RES (20)..(21)..(22)..(23): Xaa is A or G or is absent
XVSQDLSPISILYIXXXXXXXXXYKQYEMIVKS

SEQ ID NO: 28453 - protein, 36 aa, Artificial Sequence
  GFR-binding peptide
  MOD_RES (2)..(3)..(35): Xaa is C or S
SXXVPARLEPISILYLDAANNVVKFKYEDMVVEAXG

SEQ ID NO: 28454 - protein, 33 aa, Artificial Sequence
  GFR-binding peptide
  MOD_RES (1)..(1): Xaa is C or S
  MOD_RES (15)..(16)..(17)..(18)..(19): Xaa is A or G
  MOD_RES (20)..(21)..(22)..(23): Xaa is A or G or is absent
XVPARLSPISILYKXXXXXXXXXLKYHYDMVVE

SEQ ID NO: 28455 - protein, 41 aa, Artificial Sequence; identical to SEQ ID NO: 7278
  GFR-binding peptide
  MOD_RES (4)..(5)..(38)..(40): Xaa is C or S
  MOD_RES (19)..(20)..(21)..(22)..(23): Xaa is A or G
  MOD_RES (24)..(25)..(26)..(27): Xaa is A or G or is absent

SEQ ID NO: 28456 - protein, 34 aa, Artificial Sequence; identical to SEQ ID NO: 7279
  GFR-binding peptide
  MOD_RES (3)..(4): Xaa is C or S

SEQ ID NO: 28457 - protein, 36 aa, Artificial Sequence; identical to SEQ ID NO: 7280
  GFR-binding peptide
  MOD_RES (1)..(33)..(35): Xaa is C or S

SEQ ID NO: 28458 - protein, 39 aa, Artificial Sequence; identical to SEQ ID NO: 7281
  GFR-binding peptide
  MOD_RES (5)..(6)..(38): Xaa is C or S

SEQ ID NO: 28459 - protein, 32 aa, Artificial Sequence
  GFR-binding peptide
  MOD_RES (14)..(15)..(16)..(17)..(18): Xaa is A or G
  MOD_RES (19)..(20)..(21)..(22): Xaa is A or G or is absent
VPTELEPISMLYLXXXXXXXXXKFKYEDMVVE

SEQ ID NO: 28460 - protein, 33 aa, Artificial Sequence; identical to SEQ ID NO: 7284
  GFR-binding peptide
  MOD_RES (32)..(32): Xaa is C or S

SEQ ID NO: 28461 - protein, 36 aa, Artificial Sequence
  GFR-binding peptide
  MOD_RES (3)..(35): Xaa is C or S
PTXAPTKLSPISVLYIDDSSNVIYKQYENMVVRSXG

SEQ ID NO: 28462 - protein, 34 aa, Artificial Sequence
  GFR-binding peptide
  MOD_RES (2)..(3): Xaa is C or S
SXXVPARLNAISILYFDAANNVVLKKYRDMVVEA

SEQ ID NO: 28463 - protein, 32 aa, Artificial Sequence
  GFR-binding peptide
  MOD_RES (32)..(32): Xaa is C or S
VPTKLSPISILYKDKGVVTYLKYHYGMAVSEX

SEQ ID NO: 28464 - protein, 39 aa, Artificial Sequence
  GFR-binding peptide
  MOD_RES (4)..(5)..(37)..(39): Xaa is C or S
PASXXVPARLEPISILYLDAANNVVKFKYEDMVVEAXGX

SEQ ID NO: 28465 - protein, 37 aa, Artificial Sequence; identical to SEQ ID NO: 7287
  GFR-binding peptide
  MOD_RES (3)..(4): Xaa is C or S
  MOD_RES (18)..(19)..(20)..(21)..(22): Xaa is A or G
  MOD_RES (23)..(24)..(25)..(26): Xaa is A or G or is absent

SEQ ID NO: 28466 - protein, 33 aa, Artificial Sequence
  GFR-binding peptide
  MOD_RES (14)..(15)..(16)..(17)..(18): Xaa is A or G
  MOD_RES (19)..(20)..(21)..(22): Xaa is A or G or is absent
VPARLNAISILYFXXXXXXXXXLKKYRDMVVEA

SEQ ID NO: 28467 - protein, 42 aa, Artificial Sequence; identical to SEQ ID NO: 7288
  GFR-binding peptide
  MOD_RES (5)..(6)..(40)..(42): Xaa is C or S
  MOD_RES (20)..(21)..(22)..(23)..(24): Xaa is A or G
  MOD_RES (25)..(26)..(27)..(28): Xaa is A or G or is absent

SEQ ID NO: 28468 - protein, 37 aa, Artificial Sequence
  GFR-binding peptide
  MOD_RES (4)..(5): Xaa is C or S
  MOD_RES (19)..(20)..(21)..(22)..(23): Xaa is A or G
  MOD_RES (24)..(25)..(26)..(27): Xaa is A or G or is absent
SKAXXVPTKLEPISILYLXXXXXXXXXKFKYEGMAVS

SEQ ID NO: 28469 - protein, 34 aa, Artificial Sequence; identical to SEQ ID NO: 7289
  GFR-binding peptide
  MOD_RES (31)..(33): Xaa is C or S

SEQ ID NO: 28470 - protein, 39 aa, Artificial Sequence; identical to SEQ ID NO: 7290
  GFR-binding peptide
  MOD_RES (4)..(5)..(37)..(39): Xaa is C or S

SEQ ID NO: 28471 - protein, 35 aa, Artificial Sequence; identical to SEQ ID NO: 7292
  GFR-binding peptide
  MOD_RES (2)..(3): Xaa is C or S
  MOD_RES (17)..(18)..(19)..(20)..(21): Xaa is A or G
  MOD_RES (22)..(23)..(24)..(25): Xaa is A or G or is absent

SEQ ID NO: 28472 - protein, 35 aa, Artificial Sequence; identical to SEQ ID NO: 7293
  GFR-binding peptide
  MOD_RES (4)..(5): Xaa is C or S

SEQ ID NO: 28473 - protein, 36 aa, Artificial Sequence
  GFR-binding peptide
  MOD_RES (1)..(2)..(35): Xaa is C or S
  MOD_RES (16)..(17)..(18)..(19)..(20): Xaa is A or G
  MOD_RES (21)..(22)..(23)..(24): Xaa is A or G or is absent
XXVSQDLEPISILYLXXXXXXXXXKFKYEMIVKSXK

SEQ ID NO: 28474 - protein, 36 aa, Artificial Sequence
  GFR-binding peptide
  MOD_RES (3)..(4)..(36): Xaa is C or S
KAXXAPTKLSPISVLYIDSSNNVIYKQYENMVVKAX

SEQ ID NO: 28475 - protein, 34 aa, Artificial Sequence
  GFR-binding peptide
  MOD_RES (33)..(33): Xaa is C or S
  MOD_RES (14)..(15)..(16)..(17)..(18): Xaa is A or G
  MOD_RES (19)..(20)..(21)..(22): Xaa is A or G or is absent
VPQDLEPISILYLXXXXXXXXXKFKYEMVVKSXK

SEQ ID NO: 28476 - protein, 35 aa, Artificial Sequence; identical to SEQ ID NO: 7296
  GFR-binding peptide
  MOD_RES (2)..(34): Xaa is C or S

SEQ ID NO: 28477 - protein, 31 aa, Artificial Sequence
  GFR-binding peptide
  MOD_RES (1)..(1): Xaa is C or S
XVPQDLEPISILYLVGRTPKVKFKYEMVVKS

SEQ ID NO: 28478 - protein, 35 aa, Artificial Sequence; identical to SEQ ID NO: 7297
  GFR-binding peptide
  MOD_RES (1)..(2): Xaa is C or S
  MOD_RES (16)..(17)..(18)..(19)..(20): Xaa is A or G
  MOD_RES (21)..(22)..(23)..(24): Xaa is A or G or is absent

SEQ ID NO: 28479 - protein, 40 aa, Artificial Sequence; identical to SEQ ID NO: 7298
  GFR-binding peptide
  MOD_RES (4)..(5)..(38)..(40): Xaa is C or S
  MOD_RES (19)..(20)..(21)..(22)..(23): Xaa is A or G
  MOD_RES (24)..(25)..(26)..(27): Xaa is A or G or is absent

SEQ ID NO: 28480 - protein, 37 aa, Artificial Sequence
  GFR-binding peptide
  MOD_RES (4)..(5)..(36): Xaa is C or S
ASPXXVPQDLSPISILYIVGRTPKVYKQYEMVVKSXK

SEQ ID NO: 28481 - protein, 41 aa, Artificial Sequence; identical to SEQ ID NO: 7302
  GFR-binding peptide
  MOD_RES (5)..(6)..(39)..(41): Xaa is C or S
  MOD_RES (20)..(21)..(22)..(23)..(24): Xaa is A or G
  MOD_RES (25)..(26)..(27)..(28): Xaa is A or G or is absent

SEQ ID NO: 28482 - protein, 36 aa, Artificial Sequence
  GFR-binding peptide
  MOD_RES (34)..(36): Xaa is C or S
  MOD_RES (14)..(15)..(16)..(17)..(18): Xaa is A or G
  MOD_RES (19)..(20)..(21)..(22): Xaa is A or G or is absent
VPTELEPISMLYLXXXXXXXXXKFKYEDMVVEGXGX

SEQ ID NO: 28483 - protein, 30 aa, Artificial Sequence; identical to SEQ ID NO: 7304
  GFR-binding peptide

SEQ ID NO: 28484 - protein, 34 aa, Artificial Sequence
  GFR-binding peptide
  MOD_RES (1)..(2)..(33): Xaa is C or S
XXVSQDLSPISILYIIGKTPKIYKQYEMIVKSXK

SEQ ID NO: 28485 - protein, 34 aa, Artificial Sequence; identical to SEQ ID NO: 7305
  GFR-binding peptide
  MOD_RES (1)..(2): Xaa is C or S
  MOD_RES (16)..(17)..(18)..(19)..(20): Xaa is A or G
  MOD_RES (21)..(22)..(23)..(24): Xaa is A or G or is absent

SEQ ID NO: 28486 - protein, 41 aa, Artificial Sequence
  GFR-binding peptide
  MOD_RES (5)..(6)..(38)..(40): Xaa is C or S
VPKPXXAPTKLSPISVLYIDDSSNVIYKQYENMVVRSXGXH

SEQ ID NO: 28487 - protein, 42 aa, Artificial Sequence
  GFR-binding peptide
  MOD_RES (5)..(6)..(40)..(42): Xaa is C or S
  MOD_RES (20)..(21)..(22)..(23)..(24): Xaa is A or G
  MOD_RES (25)..(26)..(27)..(28): Xaa is A or G or is absent
VPKPXXAPTKLSPISVLYIXXXXXXXXXYKQYENMVVRSXGX

SEQ ID NO: 28488 - protein, 32 aa, Artificial Sequence; identical to SEQ ID NO: 7306
  GFR-binding peptide
  MOD_RES (14)..(15)..(16)..(17)..(18): Xaa is A or G
  MOD_RES (19)..(20)..(21)..(22): Xaa is A or G or is absent

SEQ ID NO: 28489 - protein, 33 aa, Artificial Sequence; identical to SEQ ID NO: 7307
  GFR-binding peptide
  MOD_RES (1)..(1): Xaa is C or S
  MOD_RES (15)..(16)..(17)..(18)..(19): Xaa is A or G
  MOD_RES (20)..(21)..(22)..(23): Xaa is A or G or is absent

SEQ ID NO: 28490 - protein, 35 aa, Artificial Sequence
  GFR-binding peptide
  MOD_RES (2)..(3)..(35): Xaa is C or S
AXXVPTKLNAISILYFDKGVVTYLKKYRGMAVSEX

SEQ ID NO: 28491 - protein, 36 aa, Artificial Sequence; identical to SEQ ID NO: 7309
  GFR-binding peptide
  MOD_RES (2)..(3): Xaa is C or S
  MOD_RES (17)..(18)..(19)..(20)..(21): Xaa is A or G
  MOD_RES (22)..(23)..(24)..(25): Xaa is A or G or is absent

SEQ ID NO: 28492 - protein, 37 aa, Artificial Sequence; identical to SEQ ID NO: 7310
  GFR-binding peptide
  MOD_RES (3)..(4)..(35)..(37): Xaa is C or S

SEQ ID NO: 28493 - protein, 40 aa, Artificial Sequence
  GFR-binding peptide
  MOD_RES (6)..(38)..(40): Xaa is C or S
VTKPTXAPTKLEPISVLYLDDSSNVIKFKYENMVVRSXGX

SEQ ID NO: 28494 - protein, 36 aa, Artificial Sequence
  GFR-binding peptide
  MOD_RES (3)..(4)..(36): Xaa is C or S
KPXXAPTQLSPISVLYIDDSSNVIYKQYENMVVRAX

SEQ ID NO: 28495 - protein, 37 aa, Artificial Sequence
  GFR-binding peptide
  MOD_RES (1)..(35)..(37): Xaa is C or S
  MOD_RES (15)..(16)..(17)..(18)..(19): Xaa is A or G
  MOD_RES (20)..(21)..(22)..(23): Xaa is A or G or is absent
XVPTKLEPISILYLXXXXXXXXXKFKYEGMAVSEXGX

SEQ ID NO: 28496 - protein, 37 aa, Artificial Sequence
  GFR-binding peptide
  MOD_RES (3)..(4)..(37): Xaa is C or S
  MOD_RES (18)..(19)..(20)..(21)..(22): Xaa is A or G
  MOD_RES (23)..(24)..(25)..(26): Xaa is A or G or is absent
APXXVPQALEPISILYLXXXXXXXXXKFKYEMIVRSX

SEQ ID NO: 28497 - protein, 35 aa, Artificial Sequence
  GFR-binding peptide
  MOD_RES (32)..(34): Xaa is C or S
VPTELEPISMLYLDENEKVVKFKYEDMVVEGXGXR

SEQ ID NO: 28498 - protein, 38 aa, Artificial Sequence; identical to SEQ ID NO: 7312
  GFR-binding peptide
  MOD_RES (4)..(5)..(36)..(38): Xaa is C or S

SEQ ID NO: 28499 - protein, 40 aa, Artificial Sequence
  GFR-binding peptide
  MOD_RES (4)..(5)..(37)..(39): Xaa is C or S
PKAXXAPTKLSPISVLYIDSSNNVIYKQYENMVVKAXGXH

SEQ ID NO: 28500 - protein, 40 aa, Artificial Sequence; identical to SEQ ID NO: 7313
  GFR-binding peptide
  MOD_RES (4)..(5)..(37)..(39): Xaa is C or S

SEQ ID NO: 28501 - protein, 34 aa, Artificial Sequence
  GFR-binding peptide
  MOD_RES (1)..(2)..(33): Xaa is C or S
XXVPQDLSPISILYIVGRTPKVYKQYEMVVKSXK

SEQ ID NO: 28502 - protein, 42 aa, Artificial Sequence; identical to SEQ ID NO: 7314
  GFR-binding peptide
  MOD_RES (4)..(5)..(39)..(41): Xaa is C or S
  MOD_RES (19)..(20)..(21)..(22)..(23): Xaa is A or G
  MOD_RES (24)..(25)..(26)..(27): Xaa is A or G or is absent

SEQ ID NO: 28503 - protein, 35 aa, Artificial Sequence; identical to SEQ ID NO: 7316
  GFR-binding peptide
  MOD_RES (34)..(34): Xaa is C or S
  MOD_RES (14)..(15)..(16)..(17)..(18): Xaa is A or G
  MOD_RES (19)..(20)..(21)..(22): Xaa is A or G or is absent

SEQ ID NO: 28504 - protein, 43 aa, Artificial Sequence; identical to SEQ ID NO: 7317
  GFR-binding peptide
  MOD_RES (5)..(6)..(41)..(43): Xaa is C or S
  MOD_RES (20)..(21)..(22)..(23)..(24): Xaa is A or G
  MOD_RES (25)..(26)..(27)..(28): Xaa is A or G or is absent

SEQ ID NO: 28505 - protein, 39 aa, Artificial Sequence; identical to SEQ ID NO: 7318
  GFR-binding peptide
  MOD_RES (5)..(39): Xaa is C or S
  MOD_RES (19)..(20)..(21)..(22)..(23): Xaa is A or G
  MOD_RES (24)..(25)..(26)..(27): Xaa is A or G or is absent

SEQ ID NO: 28506 - protein, 36 aa, Artificial Sequence
  GFR-binding peptide
  MOD_RES (34)..(36): Xaa is C or S
  MOD_RES (14)..(15)..(16)..(17)..(18): Xaa is A or G
  MOD_RES (19)..(20)..(21)..(22): Xaa is A or G or is absent
VPTKLNAISILYFXXXXXXXXXLKKYRGMAVSEXGX

SEQ ID NO: 28507 - protein, 39 aa, Artificial Sequence
  GFR-binding peptide
  MOD_RES (4)..(5)..(39): Xaa is C or S
  MOD_RES (19)..(20)..(21)..(22)..(23): Xaa is A or G
  MOD_RES (24)..(25)..(26)..(27): Xaa is A or G or is absent
SKAXXVPTKLNAISILYFXXXXXXXXXLKKYRGMAVSEX

SEQ ID NO: 28508 - protein, 34 aa, Artificial Sequence; identical to SEQ ID NO: 7321
  GFR-binding peptide
  MOD_RES (1)..(1): Xaa is C or S
  MOD_RES (15)..(16)..(17)..(18)..(19): Xaa is A or G
  MOD_RES (20)..(21)..(22)..(23): Xaa is A or G or is absent

SEQ ID NO: 28509 - protein, 37 aa, Artificial Sequence; identical to SEQ ID NO: 7322
  GFR-binding peptide
  MOD_RES (2)..(3)..(34)..(36): Xaa is C or S

SEQ ID NO: 28510 - protein, 37 aa, Artificial Sequence
  GFR-binding peptide
  MOD_RES (2)..(3)..(37): Xaa is C or S
  MOD_RES (17)..(18)..(19)..(20)..(21): Xaa is A or G
  MOD_RES (22)..(23)..(24)..(25): Xaa is A or G or is absent
SXXVPARLSPISILYIXXXXXXXXXYKQYEDMVVEAX

SEQ ID NO: 28511 - protein, 35 aa, Artificial Sequence
  GFR-binding peptide
  MOD_RES (1)..(2)..(34): Xaa is C or S
XXVPTELEPISMLYLDENEKVVKFKYEDMVVEGXG

SEQ ID NO: 28512 - protein, 42 aa, Artificial Sequence
  GFR-binding peptide
  MOD_RES (5)..(6)..(39)..(41): Xaa is C or S
  MOD_RES (20)..(21)..(22)..(23)..(24): Xaa is A or G
  MOD_RES (25)..(26)..(27)..(28): Xaa is A or G or is absent
SASPXXVSQDLSPISILYIXXXXXXXXXYKQYEMIVKSXKXS

SEQ ID NO: 28513 - protein, 35 aa, Artificial Sequence
  GFR-binding peptide
  MOD_RES (34)..(34): Xaa is C or S
  MOD_RES (14)..(15)..(16)..(17)..(18): Xaa is A or G
  MOD_RES (19)..(20)..(21)..(22): Xaa is A or G or is absent
APTKLEPISVLYLXXXXXXXXXKFKYENMVVKAXG

SEQ ID NO: 28514 - protein, 41 aa, Artificial Sequence; identical to SEQ ID NO: 7327
  GFR-binding peptide
  MOD_RES (4)..(5)..(38)..(40): Xaa is C or S
  MOD_RES (19)..(20)..(21)..(22)..(23): Xaa is A or G
  MOD_RES (24)..(25)..(26)..(27): Xaa is A or G or is absent

SEQ ID NO: 28515 - protein, 40 aa, Artificial Sequence; identical to SEQ ID NO: 7328
  GFR-binding peptide
  MOD_RES (6)..(7)..(39): Xaa is C or S

SEQ ID NO: 28516 - protein, 42 aa, Artificial Sequence
  GFR-binding peptide
  MOD_RES (6)..(7)..(41): Xaa is C or S
  MOD_RES (21)..(22)..(23)..(24)..(25): Xaa is A or G
  MOD_RES (26)..(27)..(28)..(29): Xaa is A or G or is absent
KASKAXXVPTKLEPISILYLXXXXXXXXXKFKYEGMAVSEXG

SEQ ID NO: 28517 - protein, 35 aa, Artificial Sequence
  GFR-binding peptide
  MOD_RES (2)..(3)..(34): Xaa is C or S
PXXVPQDLEPISILYLVGRTPKVKFKYEMVVKSXK

SEQ ID NO: 28518 - protein, 36 aa, Artificial Sequence
  GFR-binding peptide
  MOD_RES (2)..(3)..(35): Xaa is C or S
AXXAPTKLEPISVLYLDSSNNVIKFKYENMVVKAXG

SEQ ID NO: 28519 - protein, 32 aa, Artificial Sequence; identical to SEQ ID NO: 7331
  GFR-binding peptide
  MOD_RES (32)..(32): Xaa is C or S

SEQ ID NO: 28520 - protein, 38 aa, Artificial Sequence
  GFR-binding peptide
  MOD_RES (2)..(3)..(35)..(37): Xaa is C or S
SXXVPARLNAISILYFDAANNVVLKKYRDMVVEAXGXR

SEQ ID NO: 28521 - protein, 32 aa, Artificial Sequence
  GFR-binding peptide
  MOD_RES (32)..(32): Xaa is C or S
APTKLEPISVLYLDDSSNVIKFKYENMVVRSX

SEQ ID NO: 28522 - protein, 41 aa, Artificial Sequence
  GFR-binding peptide
  MOD_RES (7)..(41): Xaa is C or S
  MOD_RES (21)..(22)..(23)..(24)..(25): Xaa is A or G
  MOD_RES (26)..(27)..(28)..(29): Xaa is A or G or is absent
HVTKPTXAPTKLEPISVLYLXXXXXXXXXKFKYENMVVRSX

SEQ ID NO: 28523 - protein, 36 aa, Artificial Sequence; identical to SEQ ID NO: 7332
  GFR-binding peptide
  MOD_RES (2)..(3)..(34)..(36): Xaa is C or S

SEQ ID NO: 28524 - protein, 35 aa, Artificial Sequence
  GFR-binding peptide
  MOD_RES (2)..(3)..(35): Xaa is C or S
SXXVPARLNAISILYFDAANNVVLKKYRDMVVEAX

SEQ ID NO: 28525 - protein, 40 aa, Artificial Sequence
  GFR-binding peptide
  MOD_RES (2)..(3)..(37)..(39): Xaa is C or S
  MOD_RES (17)..(18)..(19)..(20)..(21): Xaa is A or G
  MOD_RES (22)..(23)..(24)..(25): Xaa is A or G or is absent
SXXVPARLSPISILYIXXXXXXXXXYKQYEDMVVEAXGXR

SEQ ID NO: 28526 - protein, 35 aa, Artificial Sequence
  GFR-binding peptide
  MOD_RES (3)..(4): Xaa is C or S
KAXXVPTKLSPISILYKDKGVVTYLKYHYGMAVSE

SEQ ID NO: 28527 - protein, 38 aa, Artificial Sequence; identical to SEQ ID NO: 7336
  GFR-binding peptide
  MOD_RES (4)..(5): Xaa is C or S
  MOD_RES (19)..(20)..(21)..(22)..(23): Xaa is A or G
  MOD_RES (24)..(25)..(26)..(27): Xaa is A or G or is absent

SEQ ID NO: 28528 - protein, 35 aa, Artificial Sequence; identical to SEQ ID NO: 7338
  GFR-binding peptide
  MOD_RES (1)..(2)..(35): Xaa is C or S
  MOD_RES (16)..(17)..(18)..(19)..(20): Xaa is A or G
  MOD_RES (21)..(22)..(23)..(24): Xaa is A or G or is absent

SEQ ID NO: 28529 - protein, 34 aa, Artificial Sequence
  GFR-binding peptide
  MOD_RES (3)..(4): Xaa is C or S
KAXXVPTKLNAISILYFDKGVVTYLKKYRGMAVS

SEQ ID NO: 28530 - protein, 36 aa, Artificial Sequence; identical to SEQ ID NO: 7339
  GFR-binding peptide
  MOD_RES (1)..(34)..(36): Xaa is C or S
  MOD_RES (15)..(16)..(17)..(18)..(19): Xaa is A or G
  MOD_RES (20)..(21)..(22)..(23): Xaa is A or G or is absent

SEQ ID NO: 28531 - protein, 34 aa, Artificial Sequence; identical to SEQ ID NO: 7340
  GFR-binding peptide
  MOD_RES (1)..(34): Xaa is C or S
  MOD_RES (15)..(16)..(17)..(18)..(19): Xaa is A or G
  MOD_RES (20)..(21)..(22)..(23): Xaa is A or G or is absent

SEQ ID NO: 28532 - protein, 38 aa, Artificial Sequence
  GFR-binding peptide
  MOD_RES (4)..(5)..(37): Xaa is C or S
SKAXXVPTKLNAISILYFDKGVVTYLKKYRGMAVSEXG

SEQ ID NO: 28533 - protein, 39 aa, Artificial Sequence
  GFR-binding peptide
  MOD_RES (6)..(7)..(39): Xaa is C or S
SIPKAXXVPTELEPISMLYLDEYDKVVKFKYEEMVVEGX

SEQ ID NO: 28534 - protein, 39 aa, Artificial Sequence
  GFR-binding peptide
  MOD_RES (5)..(6)..(37)..(39): Xaa is C or S
SAAPXXVPQALSPISILYIVGRKPKVYKQYEMIVRSXKX

SEQ ID NO: 28535 - protein, 36 aa, Artificial Sequence
  GFR-binding peptide
  MOD_RES (1)..(2)..(34)..(36): Xaa is C or S
XXAPTQLSPISVLYIDDSSNVIYKQYENMVVRAXGX

SEQ ID NO: 28536 - protein, 36 aa, Artificial Sequence
  GFR-binding peptide
  MOD_RES (2)..(3): Xaa is C or S
  MOD_RES (17)..(18)..(19)..(20)..(21): Xaa is A or G
  MOD_RES (22)..(23)..(24)..(25): Xaa is A or G or is absent
AXXAPTKLSPISVLYIXXXXXXXXXYKQYENMVVKA

SEQ ID NO: 28537 - protein, 38 aa, Artificial Sequence
  GFR-binding peptide
  MOD_RES (1)..(2)..(36)..(38): Xaa is C or S
  MOD_RES (16)..(17)..(18)..(19)..(20): Xaa is A or G
  MOD_RES (21)..(22)..(23)..(24): Xaa is A or G or is absent
XXVPARLNAISILYFXXXXXXXXXLKKYRDMVVEAXGX

SEQ ID NO: 28538 - protein, 38 aa, Artificial Sequence
  GFR-binding peptide
  MOD_RES (5)..(6): Xaa is C or S
  MOD_RES (20)..(21)..(22)..(23)..(24): Xaa is A or G
  MOD_RES (25)..(26)..(27)..(28): Xaa is A or G or is absent
SASPXXVPQDLEPISILYLXXXXXXXXXKFKYEMVVKS

SEQ ID NO: 28539 - protein, 37 aa, Artificial Sequence
  GFR-binding peptide
  MOD_RES (6)..(7): Xaa is C or S
YVPKPXXAPTKLEPISVLYLDDSSNVIKFKYENMVVR

SEQ ID NO: 28540 - protein, 34 aa, Artificial Sequence
  GFR-binding peptide
  MOD_RES (2)..(3): Xaa is C or S
AXXVPTELEPISMLYLDEYDKVVKFKYEEMVVEG

SEQ ID NO: 28541 - protein, 41 aa, Artificial Sequence
  GFR-binding peptide
  MOD_RES (4)..(38)..(40): Xaa is C or S
  MOD_RES (18)..(19)..(20)..(21)..(22): Xaa is A or G
  MOD_RES (23)..(24)..(25)..(26): Xaa is A or G or is absent
KPTXAPTKLSPISVLYIXXXXXXXXXYKQYENMVVRSXGXH

SEQ ID NO: 28542 - protein, 40 aa, Artificial Sequence
  GFR-binding peptide
  MOD_RES (4)..(5)..(39): Xaa is C or S
  MOD_RES (19)..(20)..(21)..(22)..(23): Xaa is A or G
  MOD_RES (24)..(25)..(26)..(27): Xaa is A or G or is absent
PKAXXAPTKLSPISVLYIXXXXXXXXXYKQYENMVVKAXG

SEQ ID NO: 28543 - protein, 38 aa, Artificial Sequence; identical to SEQ ID NO: 7347
  GFR-binding peptide
  MOD_RES (3)..(4)..(36)..(38): Xaa is C or S

SEQ ID NO: 28544 - protein, 38 aa, Artificial Sequence
  GFR-binding peptide
  MOD_RES (3)..(4)..(38): Xaa is C or S
  MOD_RES (18)..(19)..(20)..(21)..(22): Xaa is A or G
  MOD_RES (23)..(24)..(25)..(26): Xaa is A or G or is absent
ASXXVPARLEPISILYLXXXXXXXXXKFKYEDMVVEAX

SEQ ID NO: 28545 - protein, 35 aa, Artificial Sequence
  GFR-binding peptide
  MOD_RES (1)..(33)..(35): Xaa is C or S
XAPTKLEPISVLYLDDSSNVIKFKYENMVVRSXGX

SEQ ID NO: 28546 - protein, 37 aa, Artificial Sequence
  GFR-binding peptide
  MOD_RES (1)..(2)..(34)..(36): Xaa is C or S
XXVPTELEPISMLYLDENEKVVKFKYEDMVVEGXGXR

SEQ ID NO: 28547 - protein, 33 aa, Artificial Sequence
  GFR-binding peptide
  MOD_RES (32)..(32): Xaa is C or S
VPTELEPISMLYLDEYDKVVKFKYEEMVVEGXG

SEQ ID NO: 28548 - protein, 38 aa, Artificial Sequence
  GFR-binding peptide
  MOD_RES (3)..(37): Xaa is C or S
  MOD_RES (17)..(18)..(19)..(20)..(21): Xaa is A or G
  MOD_RES (22)..(23)..(24)..(25): Xaa is A or G or is absent
PTXAPTKLSPISVLYIXXXXXXXXXYKQYENMVVRSXG

SEQ ID NO: 28549 - protein, 42 aa, Artificial Sequence
  GFR-binding peptide
  MOD_RES (6)..(7)..(41): Xaa is C or S
  MOD_RES (21)..(22)..(23)..(24)..(25): Xaa is A or G
  MOD_RES (26)..(27)..(28)..(29): Xaa is A or G or is absent
KASKAXXVPTKLSPISILYKXXXXXXXXXLKYHYGMAVSEXG

SEQ ID NO: 28550 - protein, 36 aa, Artificial Sequence
  GFR-binding peptide
  MOD_RES (2)..(3)..(34)..(36): Xaa is C or S
PXXVPQDLSPISILYIVGRTPKVYKQYEMVVKSXKX

SEQ ID NO: 28551 - protein, 36 aa, Artificial Sequence
  GFR-binding peptide
  MOD_RES (2)..(34)..(36): Xaa is C or S
TXAPTKLSPISVLYIDDSSNVIYKQYENMVVRSXGX

SEQ ID NO: 28552 - protein, 34 aa, Artificial Sequence; identical to SEQ ID NO: 7352
  GFR-binding peptide
  MOD_RES (33)..(33): Xaa is C or S
  MOD_RES (14)..(15)..(16)..(17)..(18): Xaa is A or G
  MOD_RES (19)..(20)..(21)..(22): Xaa is A or G or is absent

SEQ ID NO: 28553 - protein, 35 aa, Artificial Sequence
  GFR-binding peptide
  MOD_RES (1)..(32)..(34): Xaa is C or S
XVPQDLSPISILYIVGRTPKVYKQYEMVVKSXKXS

SEQ ID NO: 28554 - protein, 36 aa, Artificial Sequence
  GFR-binding peptide
  MOD_RES (1)..(2)..(36): Xaa is C or S
  MOD_RES (16)..(17)..(18)..(19)..(20): Xaa is A or G
  MOD_RES (21)..(22)..(23)..(24): Xaa is A or G or is absent
XXAPTKLSPISVLYIXXXXXXXXXYKQYENMVVKAX

SEQ ID NO: 28555 - protein, 40 aa, Artificial Sequence
  GFR-binding peptide
  MOD_RES (6)..(7): Xaa is C or S
  MOD_RES (21)..(22)..(23)..(24)..(25): Xaa is A or G
  MOD_RES (26)..(27)..(28)..(29): Xaa is A or G or is absent
AAPASXXVPARLEPISILYLXXXXXXXXXKFKYEDMVVEA

SEQ ID NO: 28556 - protein, 40 aa, Artificial Sequence; identical to SEQ ID NO: 7353
  GFR-binding peptide
  MOD_RES (2)..(3)..(37)..(39): Xaa is C or S
  MOD_RES (17)..(18)..(19)..(20)..(21): Xaa is A or G
  MOD_RES (22)..(23)..(24)..(25): Xaa is A or G or is absent

SEQ ID NO: 28557 - protein, 37 aa, Artificial Sequence
  GFR-binding peptide
  MOD_RES (3)..(4): Xaa is C or S
  MOD_RES (18)..(19)..(20)..(21)..(22): Xaa is A or G
  MOD_RES (23)..(24)..(25)..(26): Xaa is A or G or is absent
KAXXVPTELSPISMLYIXXXXXXXXXYKQYEEMVVEG

SEQ ID NO: 28558 - protein, 34 aa, Artificial Sequence
  GFR-binding peptide
  MOD_RES (2)..(3): Xaa is C or S
PXXAPTKLSPISVLYIDDSSNVIYKQYENMVVRS

SEQ ID NO: 28559 - protein, 39 aa, Artificial Sequence
  GFR-binding peptide
  MOD_RES (3)..(4)..(38): Xaa is C or S
  MOD_RES (18)..(19)..(20)..(21)..(22): Xaa is A or G
  MOD_RES (23)..(24)..(25)..(26): Xaa is A or G or is absent
ASXXVPARLNAISILYFXXXXXXXXXLKKYRDMVVEAXG

SEQ ID NO: 28560 - protein, 42 aa, Artificial Sequence
  GFR-binding peptide
  MOD_RES (6)..(7)..(41): Xaa is C or S
  MOD_RES (21)..(22)..(23)..(24)..(25): Xaa is A or G
  MOD_RES (26)..(27)..(28)..(29): Xaa is A or G or is absent
SIPKAXXVPTELSPISMLYIXXXXXXXXXYKQYEEMVVEGXG

SEQ ID NO: 28561 - protein, 37 aa, Artificial Sequence; identical to SEQ ID NO: 7355
  GFR-binding peptide
  MOD_RES (1)..(34)..(36): Xaa is C or S

SEQ ID NO: 28562 - protein, 33 aa, Artificial Sequence; identical to SEQ ID NO: 7356
  GFR-binding peptide
  MOD_RES (32)..(32): Xaa is C or S

SEQ ID NO: 28563 - protein, 42 aa, Artificial Sequence
  GFR-binding peptide
  MOD_RES (5)..(6)..(40)..(42): Xaa is C or S
  MOD_RES (20)..(21)..(22)..(23)..(24): Xaa is A or G
  MOD_RES (25)..(26)..(27)..(28): Xaa is A or G or is absent
VPKPXXAPTKLEPISVLYLXXXXXXXXXKFKYENMVVRSXGX

SEQ ID NO: 28564 - protein, 40 aa, Artificial Sequence
  GFR-binding peptide
  MOD_RES (3)..(4)..(38)..(40): Xaa is C or S
  MOD_RES (18)..(19)..(20)..(21)..(22): Xaa is A or G
  MOD_RES (23)..(24)..(25)..(26): Xaa is A or G or is absent
ASXXVPARLSPISILYKXXXXXXXXXLKYHYDMVVEAXGX

SEQ ID NO: 28565 - protein, 40 aa, Artificial Sequence
  GFR-binding peptide
  MOD_RES (6)..(7)..(39): Xaa is C or S
AVPKAXXAPTKLEPISVLYLDSSNNVIKFKYENMVVKAXG

SEQ ID NO: 28566 - protein, 35 aa, Artificial Sequence
  GFR-binding peptide
  MOD_RES (2)..(3)..(35): Xaa is C or S
SXXVPARLSPISILYKDAANNVVLKYHYDMVVEAX

SEQ ID NO: 28567 - protein, 39 aa, Artificial Sequence; identical to SEQ ID NO: 7359
  GFR-binding peptide
  MOD_RES (6)..(7)..(38): Xaa is C or S

SEQ ID NO: 28568 - protein, 39 aa, Artificial Sequence
  GFR-binding peptide
  MOD_RES (4)..(5)..(37)..(39): Xaa is C or S
PASXXVPARLSPISILYKDAANNVVLKYHYDMVVEAXGX

SEQ ID NO: 28569 - protein, 35 aa, Artificial Sequence; identical to SEQ ID NO: 7360
  GFR-binding peptide
  MOD_RES (3)..(4): Xaa is C or S

SEQ ID NO: 28570 - protein, 42 aa, Artificial Sequence
  GFR-binding peptide
  MOD_RES (5)..(6)..(40)..(42): Xaa is C or S
  MOD_RES (20)..(21)..(22)..(23)..(24): Xaa is A or G
  MOD_RES (25)..(26)..(27)..(28): Xaa is A or G or is absent
IPKAXXVPTELEPISMLYLXXXXXXXXXKFKYEEMVVEGXGX

SEQ ID NO: 28571 - protein, 33 aa, Artificial Sequence; identical to SEQ ID NO: 7361
  GFR-binding peptide
  MOD_RES (14)..(15)..(16)..(17)..(18): Xaa is A or G
  MOD_RES (19)..(20)..(21)..(22): Xaa is A or G or is absent

SEQ ID NO: 28572 - protein, 35 aa, Artificial Sequence
  GFR-binding peptide
  MOD_RES (1)..(2): Xaa is C or S
  MOD_RES (16)..(17)..(18)..(19)..(20): Xaa is A or G
  MOD_RES (21)..(22)..(23)..(24): Xaa is A or G or is absent
XXVPARLNAISILYFXXXXXXXXXLKKYRDMVVEA

SEQ ID NO: 28573 - protein, 38 aa, Artificial Sequence
  GFR-binding peptide
  MOD_RES (1)..(35)..(37): Xaa is C or S
  MOD_RES (15)..(16)..(17)..(18)..(19): Xaa is A or G
  MOD_RES (20)..(21)..(22)..(23): Xaa is A or G or is absent
XAPTKLSPISVLYIXXXXXXXXXYKQYENMVVRSXGXH

SEQ ID NO: 28574 - protein, 33 aa, Artificial Sequence; identical to SEQ ID NO: 7364
  GFR-binding peptide
  MOD_RES (1)..(33): Xaa is C or S

SEQ ID NO: 28575 - protein, 35 aa, Artificial Sequence; identical to SEQ ID NO: 7365
  GFR-binding peptide
  MOD_RES (32)..(34): Xaa is C or S

SEQ ID NO: 28576 - protein, 35 aa, Artificial Sequence
  GFR-binding peptide
  MOD_RES (3)..(4): Xaa is C or S
KAXXVPTKLSPISILYIDKGVVTYYKQYEGMAVSE

SEQ ID NO: 28577 - protein, 36 aa, Artificial Sequence; identical to SEQ ID NO: 7366
  GFR-binding peptide
  MOD_RES (5)..(6): Xaa is C or S

SEQ ID NO: 28578 - protein, 36 aa, Artificial Sequence
  GFR-binding peptide
  MOD_RES (1)..(36): Xaa is C or S
  MOD_RES (15)..(16)..(17)..(18)..(19): Xaa is A or G
  MOD_RES (20)..(21)..(22)..(23): Xaa is A or G or is absent
XVPTKLEPISVLYLXXXXXXXXXKFKYEEGMSVAEX

SEQ ID NO: 28579 - protein, 34 aa, Artificial Sequence
  GFR-binding peptide
  MOD_RES (34)..(34): Xaa is C or S
  MOD_RES (14)..(15)..(16)..(17)..(18): Xaa is A or G
  MOD_RES (19)..(20)..(21)..(22): Xaa is A or G or is absent
VPTELSPISMLYIXXXXXXXXXYKQYEDMVVEGX

SEQ ID NO: 28580 - protein, 41 aa, Artificial Sequence
  GFR-binding peptide
  MOD_RES (3)..(4)..(38)..(40): Xaa is C or S
  MOD_RES (18)..(19)..(20)..(21)..(22): Xaa is A or G
  MOD_RES (23)..(24)..(25)..(26): Xaa is A or G or is absent
KAXXVPTELSPISMLYIXXXXXXXXXYKQYEDMVVEGXGXR

SEQ ID NO: 28581 - protein, 39 aa, Artificial Sequence
  GFR-binding peptide
  MOD_RES (6)..(7)..(38): Xaa is C or S
ASASPXXVSQDLEPISILYLIGKTPKIKFKYEMIVKSXK

SEQ ID NO: 28582 - protein, 30 aa, Artificial Sequence; identical to SEQ ID NO: 7373
  GFR-binding peptide

SEQ ID NO: 28583 - protein, 38 aa, Artificial Sequence; identical to SEQ ID NO: 7374
  GFR-binding peptide
  MOD_RES (1)..(35)..(37): Xaa is C or S
  MOD_RES (15)..(16)..(17)..(18)..(19): Xaa is A or G
  MOD_RES (20)..(21)..(22)..(23): Xaa is A or G or is absent

SEQ ID NO: 28584 - protein, 38 aa, Artificial Sequence; identical to SEQ ID NO: 7375
  GFR-binding peptide
  MOD_RES (3)..(4)..(35)..(37): Xaa is C or S

SEQ ID NO: 28585 - protein, 40 aa, Artificial Sequence
  GFR-binding peptide
  MOD_RES (6)..(7)..(39): Xaa is C or S
KASKAXXVPTKLNAISILYFDKGVVTYLKKYRGMAVSEXG

SEQ ID NO: 28586 - protein, 40 aa, Artificial Sequence; identical to SEQ ID NO: 7378
  GFR-binding peptide
  MOD_RES (4)..(5)..(39): Xaa is C or S
  MOD_RES (19)..(20)..(21)..(22)..(23): Xaa is A or G
  MOD_RES (24)..(25)..(26)..(27): Xaa is A or G or is absent

SEQ ID NO: 28587 - protein, 37 aa, Artificial Sequence; identical to SEQ ID NO: 7381
  GFR-binding peptide
  MOD_RES (1)..(2)..(36): Xaa is C or S
  MOD_RES (16)..(17)..(18)..(19)..(20): Xaa is A or G
  MOD_RES (21)..(22)..(23)..(24): Xaa is A or G or is absent

SEQ ID NO: 28588 - protein, 34 aa, Artificial Sequence
  GFR-binding peptide
  MOD_RES (3)..(4): Xaa is C or S
SPXXVSQDLEPISILYLIGKTPKIKFKYEMIVKS

SEQ ID NO: 28589 - protein, 44 aa, Artificial Sequence
  GFR-binding peptide
  MOD_RES (6)..(7)..(42)..(44): Xaa is C or S
  MOD_RES (21)..(22)..(23)..(24)..(25): Xaa is A or G
  MOD_RES (26)..(27)..(28)..(29): Xaa is A or G or is absent
KVGKAXXVPTKLSPISVLYIXXXXXXXXXYKQYEEGMSVAEXGX

SEQ ID NO: 28590 - protein, 42 aa, Artificial Sequence; identical to SEQ ID NO: 7382
  GFR-binding peptide
  MOD_RES (6)..(7)..(42): Xaa is C or S
  MOD_RES (21)..(22)..(23)..(24)..(25): Xaa is A or G
  MOD_RES (26)..(27)..(28)..(29): Xaa is A or G or is absent

SEQ ID NO: 28591 - protein, 33 aa, Artificial Sequence
  GFR-binding peptide
  MOD_RES (1)..(1): Xaa is C or S
  MOD_RES (15)..(16)..(17)..(18)..(19): Xaa is A or G
  MOD_RES (20)..(21)..(22)..(23): Xaa is A or G or is absent
XVPARLEPISILYLXXXXXXXXXKFKYEDMVVE

SEQ ID NO: 28592 - protein, 42 aa, Artificial Sequence
  GFR-binding peptide
  MOD_RES (5)..(6)..(40)..(42): Xaa is C or S
  MOD_RES (20)..(21)..(22)..(23)..(24): Xaa is A or G
  MOD_RES (25)..(26)..(27)..(28): Xaa is A or G or is absent
APASXXVPARLSPISILYKXXXXXXXXXLKYHYDMVVEAXGX

SEQ ID NO: 28593 - protein, 34 aa, Artificial Sequence
  GFR-binding peptide
  MOD_RES (32)..(34): Xaa is C or S
APTQLSPISVLYIDDSSNVIYKQYENMVVRAXGX

SEQ ID NO: 28594 - protein, 40 aa, Artificial Sequence
  GFR-binding peptide
  MOD_RES (7)..(39): Xaa is C or S
HVTKPTXAPTKLSPISVLYIDDSSNVIYKQYENMVVRSXG

SEQ ID NO: 28595 - protein, 37 aa, Artificial Sequence; identical to SEQ ID NO: 7383
  GFR-binding peptide
  MOD_RES (3)..(4): Xaa is C or S
  MOD_RES (18)..(19)..(20)..(21)..(22): Xaa is A or G
  MOD_RES (23)..(24)..(25)..(26): Xaa is A or G or is absent

SEQ ID NO: 28596 - protein, 41 aa, Artificial Sequence
  GFR-binding peptide
  MOD_RES (6)..(7)..(41): Xaa is C or S
  MOD_RES (21)..(22)..(23)..(24)..(25): Xaa is A or G
  MOD_RES (26)..(27)..(28)..(29): Xaa is A or G or is absent
SIPKAXXVPTELEPISMLYLXXXXXXXXXKFKYEEMVVEGX

SEQ ID NO: 28597 - protein, 38 aa, Artificial Sequence
  GFR-binding peptide
  MOD_RES (6)..(7): Xaa is C or S
KASKAXXVPTKLSPISILYIDKGVVTYYKQYEGMAVSE

SEQ ID NO: 28598 - protein, 36 aa, Artificial Sequence
  GFR-binding peptide
  MOD_RES (3)..(4): Xaa is C or S
KAXXVPTKLSPISVLYIDDMGVPTYKQYEEGMSVAE

SEQ ID NO: 28599 - protein, 34 aa, Artificial Sequence; identical to SEQ ID NO: 7386
  GFR-binding peptide
  MOD_RES (1)..(2)..(34): Xaa is C or S

SEQ ID NO: 28600 - protein, 36 aa, Artificial Sequence; identical to SEQ ID NO: 7390
  GFR-binding peptide
  MOD_RES (1)..(34)..(36): Xaa is C or S
  MOD_RES (15)..(16)..(17)..(18)..(19): Xaa is A or G
  MOD_RES (20)..(21)..(22)..(23): Xaa is A or G or is absent

SEQ ID NO: 28601 - protein, 41 aa, Artificial Sequence
  GFR-binding peptide
  MOD_RES (6)..(7)..(41): Xaa is C or S
  MOD_RES (21)..(22)..(23)..(24)..(25): Xaa is A or G
  MOD_RES (26)..(27)..(28)..(29): Xaa is A or G or is absent
TVPKPXXAPTQLEPISVLYLXXXXXXXXXKFKYENMVVRAX

SEQ ID NO: 28602 - protein, 40 aa, Artificial Sequence; identical to SEQ ID NO: 7392
  GFR-binding peptide
  MOD_RES (3)..(4)..(38)..(40): Xaa is C or S
  MOD_RES (18)..(19)..(20)..(21)..(22): Xaa is A or G
  MOD_RES (23)..(24)..(25)..(26): Xaa is A or G or is absent

SEQ ID NO: 28603 - protein, 40 aa, Artificial Sequence; identical to SEQ ID NO: 7393
  GFR-binding peptide
  MOD_RES (6)..(7)..(38)..(40): Xaa is C or S

SEQ ID NO: 28604 - protein, 41 aa, Artificial Sequence; identical to SEQ ID NO: 7394
  GFR-binding peptide
  MOD_RES (5)..(6)..(39)..(41): Xaa is C or S

SEQ ID NO: 28605 - protein, 39 aa, Artificial Sequence
  GFR-binding peptide
  MOD_RES (2)..(3)..(36)..(38): Xaa is C or S
AXXVPTKLSPISVLYIDDMGVPTYKQYEEGMSVAEXGXR

SEQ ID NO: 28606 - protein, 40 aa, Artificial Sequence
  GFR-binding peptide
  MOD_RES (2)..(3)..(38)..(40): Xaa is C or S
  MOD_RES (17)..(18)..(19)..(20)..(21): Xaa is A or G
  MOD_RES (22)..(23)..(24)..(25): Xaa is A or G or is absent
AXXVPTKLEPISVLYLXXXXXXXXXKFKYEEGMSVAEXGX

SEQ ID NO: 28607 - protein, 35 aa, Artificial Sequence
  GFR-binding peptide
  MOD_RES (1)..(2)..(34): Xaa is C or S
XXVPTKLSPISILYIDKGVVTYYKQYEGMAVSEXG

SEQ ID NO: 28608 - protein, 41 aa, Artificial Sequence
  GFR-binding peptide
  MOD_RES (6)..(7)..(41): Xaa is C or S
  MOD_RES (21)..(22)..(23)..(24)..(25): Xaa is A or G
  MOD_RES (26)..(27)..(28)..(29): Xaa is A or G or is absent
KIPKAXXVPTELSPISMLYIXXXXXXXXXYKQYEDMVVEGX

SEQ ID NO: 28609 - protein, 36 aa, Artificial Sequence
  GFR-binding peptide
  MOD_RES (4)..(5): Xaa is C or S
SKAXXVPTKLNAISILYFDKGVVTYLKKYRGMAVSE

SEQ ID NO: 28610 - protein, 36 aa, Artificial Sequence; identical to SEQ ID NO: 7398
  GFR-binding peptide
  MOD_RES (1)..(2)..(34)..(36): Xaa is C or S

SEQ ID NO: 28611 - protein, 38 aa, Artificial Sequence
  GFR-binding peptide
  MOD_RES (1)..(2)..(36)..(38): Xaa is C or S
  MOD_RES (16)..(17)..(18)..(19)..(20): Xaa is A or G
  MOD_RES (21)..(22)..(23)..(24): Xaa is A or G or is absent
XXVPTELEPISMLYLXXXXXXXXXKFKYEDMVVEGXGX

SEQ ID NO: 28612 - protein, 40 aa, Artificial Sequence
  GFR-binding peptide
  MOD_RES (6)..(38)..(40): Xaa is C or S
VTKPTXAPTKLSPISVLYIDDSSNVIYKQYENMVVRSXGX

SEQ ID NO: 28613 - protein, 37 aa, Artificial Sequence
  GFR-binding peptide
  MOD_RES (3)..(4)..(35)..(37): Xaa is C or S
SPXXVPQDLEPISILYLVGRTPKVKFKYEMVVKSXKX

SEQ ID NO: 28614 - protein, 35 aa, Artificial Sequence
  GFR-binding peptide
  MOD_RES (1)..(33)..(35): Xaa is C or S
XVPTKLSPISILYIDKGVVTYYKQYEGMAVSEXGX

SEQ ID NO: 28615 - protein, 34 aa, Artificial Sequence
  GFR-binding peptide
  MOD_RES (34)..(34): Xaa is C or S
  MOD_RES (14)..(15)..(16)..(17)..(18): Xaa is A or G
  MOD_RES (19)..(20)..(21)..(22): Xaa is A or G or is absent
VPARLNAISILYFXXXXXXXXXLKKYRDMVVEAX

SEQ ID NO: 28616 - protein, 37 aa, Artificial Sequence; identical to SEQ ID NO: 7406
  GFR-binding peptide
  MOD_RES (1)..(35)..(37): Xaa is C or S
  MOD_RES (15)..(16)..(17)..(18)..(19): Xaa is A or G
  MOD_RES (20)..(21)..(22)..(23): Xaa is A or G or is absent

SEQ ID NO: 28617 - protein, 34 aa, Artificial Sequence
  GFR-binding peptide
  MOD_RES (1)..(1): Xaa is C or S
  MOD_RES (15)..(16)..(17)..(18)..(19): Xaa is A or G
  MOD_RES (20)..(21)..(22)..(23): Xaa is A or G or is absent
XVPTKLNAISILYFXXXXXXXXXLKKYRGMAVSE

SEQ ID NO: 28618 - protein, 38 aa, Artificial Sequence; identical to SEQ ID NO: 7407
  GFR-binding peptide
  MOD_RES (4)..(5)..(38): Xaa is C or S

SEQ ID NO: 28619 - protein, 39 aa, Artificial Sequence; identical to SEQ ID NO: 7408
  GFR-binding peptide
  MOD_RES (5)..(6)..(37)..(39): Xaa is C or S

SEQ ID NO: 28620 - protein, 33 aa, Artificial Sequence
  GFR-binding peptide
  MOD_RES (14)..(15)..(16)..(17)..(18): Xaa is A or G
  MOD_RES (19)..(20)..(21)..(22): Xaa is A or G or is absent
APTKLEPISVLYLXXXXXXXXXKFKYENMVVRS

SEQ ID NO: 28621 - protein, 38 aa, Artificial Sequence
  GFR-binding peptide
  MOD_RES (2)..(3)..(35)..(37): Xaa is C or S
SXXVPARLEPISILYLDAANNVVKFKYEDMVVEAXGXR

SEQ ID NO: 28622 - protein, 36 aa, Artificial Sequence; identical to SEQ ID NO: 7409
  GFR-binding peptide
  MOD_RES (5)..(6): Xaa is C or S

SEQ ID NO: 28623 - protein, 39 aa, Artificial Sequence
  GFR-binding peptide
  MOD_RES (4)..(5)..(36)..(38): Xaa is C or S
ASPXXVPQDLSPISILYIVGRTPKVYKQYEMVVKSXKXS

SEQ ID NO: 28624 - protein, 34 aa, Artificial Sequence; identical to SEQ ID NO: 7413
  GFR-binding peptide
  MOD_RES (3)..(4): Xaa is C or S

SEQ ID NO: 28625 - protein, 35 aa, Artificial Sequence
  GFR-binding peptide
  MOD_RES (34)..(34): Xaa is C or S
  MOD_RES (14)..(15)..(16)..(17)..(18): Xaa is A or G
  MOD_RES (19)..(20)..(21)..(22): Xaa is A or G or is absent
VPTELEPISMLYLXXXXXXXXXKFKYEDMVVEGXG

SEQ ID NO: 28626 - protein, 42 aa, Artificial Sequence; identical to SEQ ID NO: 7415
  GFR-binding peptide
  MOD_RES (6)..(7)..(39)..(41): Xaa is C or S

SEQ ID NO: 28627 - protein, 38 aa, Artificial Sequence
  GFR-binding peptide
  MOD_RES (1)..(2)..(36)..(38): Xaa is C or S
  MOD_RES (16)..(17)..(18)..(19)..(20): Xaa is A or G
  MOD_RES (21)..(22)..(23)..(24): Xaa is A or G or is absent
XXVPTKLNAISILYFXXXXXXXXXLKKYRGMAVSEXGX

SEQ ID NO: 28628 - protein, 38 aa, Artificial Sequence
  GFR-binding peptide
  MOD_RES (2)..(3)..(36)..(38): Xaa is C or S
  MOD_RES (17)..(18)..(19)..(20)..(21): Xaa is A or G
  MOD_RES (22)..(23)..(24)..(25): Xaa is A or G or is absent
PXXVPQDLSPISILYIXXXXXXXXXYKQYEMVVKSXKX

SEQ ID NO: 28629 - protein, 37 aa, Artificial Sequence
  GFR-binding peptide
  MOD_RES (1)..(34)..(36): Xaa is C or S
  MOD_RES (15)..(16)..(17)..(18)..(19): Xaa is A or G
  MOD_RES (20)..(21)..(22)..(23): Xaa is A or G or is absent
XVSQDLSPISILYIXXXXXXXXXYKQYEMIVKSXKXS

SEQ ID NO: 28630 - protein, 39 aa, Artificial Sequence; identical to SEQ ID NO: 7418
  GFR-binding peptide
  MOD_RES (3)..(4)..(36)..(38): Xaa is C or S

SEQ ID NO: 28631 - protein, 36 aa, Artificial Sequence
  GFR-binding peptide
  MOD_RES (5)..(6): Xaa is C or S
APASXXVPARLNAISILYFDAANNVVLKKYRDMVVE

SEQ ID NO: 28632 - protein, 35 aa, Artificial Sequence; identical to SEQ ID NO: 7420
  GFR-binding peptide
  MOD_RES (1)..(34): Xaa is C or S

SEQ ID NO: 28633 - protein, 35 aa, Artificial Sequence
  GFR-binding peptide
  MOD_RES (1)..(2)..(33)..(35): Xaa is C or S
XXVSQDLSPISILYIIGKTPKIYKQYEMIVKSXKX

SEQ ID NO: 28634 - protein, 37 aa, Artificial Sequence
  GFR-binding peptide
  MOD_RES (4)..(5): Xaa is C or S
  MOD_RES (19)..(20)..(21)..(22)..(23): Xaa is A or G
  MOD_RES (24)..(25)..(26)..(27): Xaa is A or G or is absent
SKAXXVPTKLSPISILYKXXXXXXXXXLKYHYGMAVS

SEQ ID NO: 28635 - protein, 40 aa, Artificial Sequence
  GFR-binding peptide
  MOD_RES (5)..(6)..(40): Xaa is C or S
  MOD_RES (20)..(21)..(22)..(23)..(24): Xaa is A or G
  MOD_RES (25)..(26)..(27)..(28): Xaa is A or G or is absent
VPKPXXAPTKLSPISVLYIXXXXXXXXXYKQYENMVVRSX

SEQ ID NO: 28636 - protein, 33 aa, Artificial Sequence
  GFR-binding peptide
  MOD_RES (2)..(3): Xaa is C or S
PXXAPTQLEPISVLYLDDSSNVIKFKYENMVVR

SEQ ID NO: 28637 - protein, 33 aa, Artificial Sequence; identical to SEQ ID NO: 7423
  GFR-binding peptide
  MOD_RES (1)..(33): Xaa is C or S

SEQ ID NO: 28638 - protein, 37 aa, Artificial Sequence; identical to SEQ ID NO: 7424
  GFR-binding peptide
  MOD_RES (1)..(2)..(35)..(37): Xaa is C or S
  MOD_RES (16)..(17)..(18)..(19)..(20): Xaa is A or G
  MOD_RES (21)..(22)..(23)..(24): Xaa is A or G or is absent

SEQ ID NO: 28639 - protein, 43 aa, Artificial Sequence; identical to SEQ ID NO: 7425
  GFR-binding peptide
  MOD_RES (6)..(7)..(41)..(43): Xaa is C or S
  MOD_RES (21)..(22)..(23)..(24)..(25): Xaa is A or G
  MOD_RES (26)..(27)..(28)..(29): Xaa is A or G or is absent

SEQ ID NO: 28640 - protein, 40 aa, Artificial Sequence
  GFR-binding peptide
  MOD_RES (4)..(5)..(39): Xaa is C or S
  MOD_RES (19)..(20)..(21)..(22)..(23): Xaa is A or G
  MOD_RES (24)..(25)..(26)..(27): Xaa is A or G or is absent
PKAXXVPTELSPISMLYIXXXXXXXXXYKQYEDMVVEGXG

SEQ ID NO: 28641 - protein, 37 aa, Artificial Sequence
  GFR-binding peptide
  MOD_RES (4)..(5)..(37): Xaa is C or S
PKPXXAPTQLSPISVLYIDDSSNVIYKQYENMVVRAX

SEQ ID NO: 28642 - protein, 38 aa, Artificial Sequence; identical to SEQ ID NO: 7427
  GFR-binding peptide
  MOD_RES (5)..(6): Xaa is C or S
  MOD_RES (20)..(21)..(22)..(23)..(24): Xaa is A or G
  MOD_RES (25)..(26)..(27)..(28): Xaa is A or G or is absent

SEQ ID NO: 28643 - protein, 34 aa, Artificial Sequence; identical to SEQ ID NO: 7428
  GFR-binding peptide
  MOD_RES (1)..(2)..(34): Xaa is C or S

SEQ ID NO: 28644 - protein, 39 aa, Artificial Sequence; identical to SEQ ID NO: 7429
  GFR-binding peptide
  MOD_RES (6)..(7): Xaa is C or S

SEQ ID NO: 28645 - protein, 38 aa, Artificial Sequence
  GFR-binding peptide
  MOD_RES (5)..(6): Xaa is C or S
VGKAXXVPTKLSPISVLYIDDMGVPTYKQYEEGMSVAE

SEQ ID NO: 28646 - protein, 37 aa, Artificial Sequence
  GFR-binding peptide
  MOD_RES (1)..(35)..(37): Xaa is C or S
  MOD_RES (15)..(16)..(17)..(18)..(19): Xaa is A or G
  MOD_RES (20)..(21)..(22)..(23): Xaa is A or G or is absent
XAPTKLEPISVLYLXXXXXXXXXKFKYENMVVRSXGX

SEQ ID NO: 28647 - protein, 32 aa, Artificial Sequence
  GFR-binding peptide
  MOD_RES (14)..(15)..(16)..(17)..(18): Xaa is A or G
  MOD_RES (19)..(20)..(21)..(22): Xaa is A or G or is absent
VPTKLEPISILYLXXXXXXXXXKFKYEGMAVS

SEQ ID NO: 28648 - protein, 37 aa, Artificial Sequence; identical to SEQ ID NO: 7431
  GFR-binding peptide
  MOD_RES (3)..(4)..(35)..(37): Xaa is C or S

SEQ ID NO: 28649 - protein, 35 aa, Artificial Sequence
  GFR-binding peptide
  MOD_RES (33)..(35): Xaa is C or S
  MOD_RES (14)..(15)..(16)..(17)..(18): Xaa is A or G
  MOD_RES (19)..(20)..(21)..(22): Xaa is A or G or is absent
VPQALSPISILYIXXXXXXXXXYKQYEMIVRSXKX

SEQ ID NO: 28650 - protein, 41 aa, Artificial Sequence
  GFR-binding peptide
  MOD_RES (6)..(7)..(40): Xaa is C or S
  MOD_RES (21)..(22)..(23)..(24)..(25): Xaa is A or G
  MOD_RES (26)..(27)..(28)..(29): Xaa is A or G or is absent
ASAAPXXVPQALEPISILYLXXXXXXXXXKFKYEMIVRSXK

SEQ ID NO: 28651 - protein, 31 aa, Artificial Sequence
  GFR-binding peptide
  MOD_RES (31)..(31): Xaa is C or S
VPQALSPISILYIVGRKPKVYKQYEMIVRSX

SEQ ID NO: 28652 - protein, 40 aa, Artificial Sequence; identical to SEQ ID NO: 7433
  GFR-binding peptide
  MOD_RES (6)..(7)..(40): Xaa is C or S
  MOD_RES (21)..(22)..(23)..(24)..(25): Xaa is A or G
  MOD_RES (26)..(27)..(28)..(29): Xaa is A or G or is absent

SEQ ID NO: 28653 - protein, 34 aa, Artificial Sequence
  GFR-binding peptide
  MOD_RES (1)..(1): Xaa is C or S
  MOD_RES (15)..(16)..(17)..(18)..(19): Xaa is A or G
  MOD_RES (20)..(21)..(22)..(23): Xaa is A or G or is absent
XAPTKLEPISVLYLXXXXXXXXXKFKYENMVVKA

SEQ ID NO: 28654 - protein, 35 aa, Artificial Sequence; identical to SEQ ID NO: 7434
  GFR-binding peptide
  MOD_RES (1)..(34): Xaa is C or S
  MOD_RES (15)..(16)..(17)..(18)..(19): Xaa is A or G
  MOD_RES (20)..(21)..(22)..(23): Xaa is A or G or is absent

SEQ ID NO: 28655 - protein, 34 aa, Artificial Sequence; identical to SEQ ID NO: 7435
  GFR-binding peptide
  MOD_RES (1)..(2)..(34): Xaa is C or S

SEQ ID NO: 28656 - protein, 36 aa, Artificial Sequence; identical to SEQ ID NO: 7436
  GFR-binding peptide
  MOD_RES (1)..(2)..(33)..(35): Xaa is C or S

SEQ ID NO: 28657 - protein, 37 aa, Artificial Sequence
  GFR-binding peptide
  MOD_RES (1)..(34)..(36): Xaa is C or S
XVPTKLSPISVLYIDDMGVPTYKQYEEGMSVAEXGXR

SEQ ID NO: 28658 - protein, 36 aa, Artificial Sequence; identical to SEQ ID NO: 7437
  GFR-binding peptide
  MOD_RES (1)..(2)..(36): Xaa is C or S
  MOD_RES (16)..(17)..(18)..(19)..(20): Xaa is A or G
  MOD_RES (21)..(22)..(23)..(24): Xaa is A or G or is absent

SEQ ID NO: 28659 - protein, 38 aa, Artificial Sequence; identical to SEQ ID NO: 7438
  GFR-binding peptide
  MOD_RES (1)..(36)..(38): Xaa is C or S
  MOD_RES (15)..(16)..(17)..(18)..(19): Xaa is A or G
  MOD_RES (20)..(21)..(22)..(23): Xaa is A or G or is absent

SEQ ID NO: 28660 - protein, 38 aa, Artificial Sequence
  GFR-binding peptide
  MOD_RES (6)..(7): Xaa is C or S
KIPKAXXVPTELSPISMLYIDENEKVVYKQYEDMVVEG

SEQ ID NO: 28661 - protein, 41 aa, Artificial Sequence
  GFR-binding peptide
  MOD_RES (5)..(6)..(40): Xaa is C or S
  MOD_RES (20)..(21)..(22)..(23)..(24): Xaa is A or G
  MOD_RES (25)..(26)..(27)..(28): Xaa is A or G or is absent
VPKPXXAPTKLSPISVLYIXXXXXXXXXYKQYENMVVRSXG

SEQ ID NO: 28662 - protein, 38 aa, Artificial Sequence; identical to SEQ ID NO: 7441
  GFR-binding peptide
  MOD_RES (5)..(6)..(38): Xaa is C or S

SEQ ID NO: 28663 - protein, 32 aa, Artificial Sequence
  GFR-binding peptide
  MOD_RES (1)..(2): Xaa is C or S
XXVPTELSPISMLYIDEYDKVVYKQYEEMVVE

SEQ ID NO: 28664 - protein, 43 aa, Artificial Sequence; identical to SEQ ID NO: 7444
  GFR-binding peptide
  MOD_RES (5)..(6)..(40)..(42): Xaa is C or S
  MOD_RES (20)..(21)..(22)..(23)..(24): Xaa is A or G
  MOD_RES (25)..(26)..(27)..(28): Xaa is A or G or is absent

SEQ ID NO: 28665 - protein, 38 aa, Artificial Sequence; identical to SEQ ID NO: 7445
  GFR-binding peptide
  MOD_RES (2)..(3)..(37): Xaa is C or S
  MOD_RES (17)..(18)..(19)..(20)..(21): Xaa is A or G
  MOD_RES (22)..(23)..(24)..(25): Xaa is A or G or is absent

SEQ ID NO: 28666 - protein, 39 aa, Artificial Sequence; identical to SEQ ID NO: 7447
  GFR-binding peptide
  MOD_RES (5)..(37)..(39): Xaa is C or S

SEQ ID NO: 28667 - protein, 37 aa, Artificial Sequence
  GFR-binding peptide
  MOD_RES (5)..(6)..(37): Xaa is C or S
SASPXXVPQDLSPISILYIVGRTPKVYKQYEMVVKSX

SEQ ID NO: 28668 - protein, 32 aa, Artificial Sequence
  GFR-binding peptide
  MOD_RES (32)..(32): Xaa is C or S
VPTELSPISMLYIDEYDKVVYKQYEEMVVEGX

SEQ ID NO: 28669 - protein, 33 aa, Artificial Sequence
  GFR-binding peptide
  MOD_RES (1)..(33): Xaa is C or S
XVPTELEPISMLYLDEYDKVVKFKYEEMVVEGX

SEQ ID NO: 28670 - protein, 33 aa, Artificial Sequence
  GFR-binding peptide
  MOD_RES (2)..(3): Xaa is C or S
AXXAPTKLEPISVLYLDSSNNVIKFKYENMVVK

SEQ ID NO: 28671 - protein, 35 aa, Artificial Sequence; identical to SEQ ID NO: 7448
  GFR-binding peptide
  MOD_RES (33)..(35): Xaa is C or S
  MOD_RES (14)..(15)..(16)..(17)..(18): Xaa is A or G
  MOD_RES (19)..(20)..(21)..(22): Xaa is A or G or is absent

SEQ ID NO: 28672 - protein, 34 aa, Artificial Sequence
  GFR-binding peptide
  MOD_RES (1)..(2): Xaa is C or S
  MOD_RES (16)..(17)..(18)..(19)..(20): Xaa is A or G
  MOD_RES (21)..(22)..(23)..(24): Xaa is A or G or is absent
XXVPTELSPISMLYIXXXXXXXXXYKQYEDMVVE

SEQ ID NO: 28673 - protein, 44 aa, Artificial Sequence; identical to SEQ ID NO: 7449
  GFR-binding peptide
  MOD_RES (6)..(7)..(42)..(44): Xaa is C or S
  MOD_RES (21)..(22)..(23)..(24)..(25): Xaa is A or G
  MOD_RES (26)..(27)..(28)..(29): Xaa is A or G or is absent

SEQ ID NO: 28674 - protein, 36 aa, Artificial Sequence
  GFR-binding peptide
  MOD_RES (2)..(3): Xaa is C or S
  MOD_RES (17)..(18)..(19)..(20)..(21): Xaa is A or G
  MOD_RES (22)..(23)..(24)..(25): Xaa is A or G or is absent
AXXVPTELEPISMLYLXXXXXXXXXKFKYEEMVVEG

SEQ ID NO: 28675 - protein, 39 aa, Artificial Sequence; identical to SEQ ID NO: 7450
  GFR-binding peptide
  MOD_RES (1)..(36)..(38): Xaa is C or S
  MOD_RES (15)..(16)..(17)..(18)..(19): Xaa is A or G
  MOD_RES (20)..(21)..(22)..(23): Xaa is A or G or is absent

SEQ ID NO: 28676 - protein, 42 aa, Artificial Sequence
  GFR-binding peptide
  MOD_RES (4)..(5)..(39)..(41): Xaa is C or S
  MOD_RES (19)..(20)..(21)..(22)..(23): Xaa is A or G
  MOD_RES (24)..(25)..(26)..(27): Xaa is A or G or is absent
PKPXXAPTKLEPISVLYLXXXXXXXXXKFKYENMVVRSXGXH

SEQ ID NO: 28677 - protein, 39 aa, Artificial Sequence
  GFR-binding peptide
  MOD_RES (4)..(5)..(39): Xaa is C or S
  MOD_RES (19)..(20)..(21)..(22)..(23): Xaa is A or G
  MOD_RES (24)..(25)..(26)..(27): Xaa is A or G or is absent
PASXXVPARLSPISILYKXXXXXXXXXLKYHYDMVVEAX

SEQ ID NO: 28678 - protein, 32 aa, Artificial Sequence
  GFR-binding peptide
  MOD_RES (1)..(32): Xaa is C or S
XVPQALSPISILYIVGRKPKVYKQYEMIVRSX

SEQ ID NO: 28679 - protein, 39 aa, Artificial Sequence; identical to SEQ ID NO: 7453
  GFR-binding peptide
  MOD_RES (5)..(6)..(37)..(39): Xaa is C or S

SEQ ID NO: 28680 - protein, 41 aa, Artificial Sequence
  GFR-binding peptide
  MOD_RES (5)..(6)..(38)..(40): Xaa is C or S
IPKAXXVPTELSPISMLYIDENEKVVYKQYEDMVVEGXGXR

SEQ ID NO: 28681 - protein, 38 aa, Artificial Sequence
  GFR-binding peptide
  MOD_RES (6)..(6): Xaa is C or S
  MOD_RES (20)..(21)..(22)..(23)..(24): Xaa is A or G
  MOD_RES (25)..(26)..(27)..(28): Xaa is A or G or is absent
VTKPTXAPTKLSPISVLYIXXXXXXXXXYKQYENMVVR

SEQ ID NO: 28682 - protein, 34 aa, Artificial Sequence; identical to SEQ ID NO: 7456
  GFR-binding peptide
  MOD_RES (1)..(2): Xaa is C or S
  MOD_RES (16)..(17)..(18)..(19)..(20): Xaa is A or G
  MOD_RES (21)..(22)..(23)..(24): Xaa is A or G or is absent

SEQ ID NO: 28683 - protein, 31 aa, Artificial Sequence
  GFR-binding peptide
  MOD_RES (1)..(1): Xaa is C or S
XVPTELSPISMLYIDENEKVVYKQYEDMVVE

SEQ ID NO: 28684 - protein, 40 aa, Artificial Sequence
  GFR-binding peptide
  MOD_RES (6)..(7)..(39): Xaa is C or S
AAPASXXVPARLNAISILYFDAANNVVLKKYRDMVVEAXG

SEQ ID NO: 28685 - protein, 35 aa, Artificial Sequence; identical to SEQ ID NO: 7459
  GFR-binding peptide
  MOD_RES (1)..(2)..(35): Xaa is C or S
  MOD_RES (16)..(17)..(18)..(19)..(20): Xaa is A or G
  MOD_RES (21)..(22)..(23)..(24): Xaa is A or G or is absent

SEQ ID NO: 28686 - protein, 32 aa, Artificial Sequence
  GFR-binding peptide
  MOD_RES (1)..(2): Xaa is C or S
XXVPTELSPISMLYIDENEKVVYKQYEDMVVE

SEQ ID NO: 28687 - protein, 36 aa, Artificial Sequence; identical to SEQ ID NO: 7460
  GFR-binding peptide
  MOD_RES (5)..(5): Xaa is C or S

SEQ ID NO: 28688 - protein, 39 aa, Artificial Sequence; identical to SEQ ID NO: 7461
  GFR-binding peptide
  MOD_RES (5)..(6): Xaa is C or S
  MOD_RES (20)..(21)..(22)..(23)..(24): Xaa is A or G
  MOD_RES (25)..(26)..(27)..(28): Xaa is A or G or is absent

SEQ ID NO: 28689 - protein, 34 aa, Artificial Sequence
  GFR-binding peptide
  MOD_RES (2)..(3): Xaa is C or S
AXXVPTKLSPISILYKDKGVVTYLKYHYGMAVSE

SEQ ID NO: 28690 - protein, 41 aa, Artificial Sequence; identical to SEQ ID NO: 7462
  GFR-binding peptide
  MOD_RES (6)..(7)..(39)..(41): Xaa is C or S

SEQ ID NO: 28691 - protein, 34 aa, Artificial Sequence
  GFR-binding peptide
  MOD_RES (1)..(2): Xaa is C or S
XXVPTKLSPISVLYIDDMGVPTYKQYEEGMSVAE

SEQ ID NO: 28692 - protein, 35 aa, Artificial Sequence
  GFR-binding peptide
  MOD_RES (1)..(2)..(34): Xaa is C or S
XXAPTQLEPISVLYLDDSSNVIKFKYENMVVRAXG

SEQ ID NO: 28693 - protein, 37 aa, Artificial Sequence; identical to SEQ ID NO: 7466
  GFR-binding peptide
  MOD_RES (1)..(35)..(37): Xaa is C or S
  MOD_RES (15)..(16)..(17)..(18)..(19): Xaa is A or G
  MOD_RES (20)..(21)..(22)..(23): Xaa is A or G or is absent

SEQ ID NO: 28694 - protein, 39 aa, Artificial Sequence; identical to SEQ ID NO: 7470
  GFR-binding peptide
  MOD_RES (2)..(3)..(37)..(39): Xaa is C or S
  MOD_RES (17)..(18)..(19)..(20)..(21): Xaa is A or G
  MOD_RES (22)..(23)..(24)..(25): Xaa is A or G or is absent

SEQ ID NO: 28695 - protein, 41 aa, Artificial Sequence; identical to SEQ ID NO: 7471
  GFR-binding peptide
  MOD_RES (4)..(5)..(39)..(41): Xaa is C or S
  MOD_RES (19)..(20)..(21)..(22)..(23): Xaa is A or G
  MOD_RES (24)..(25)..(26)..(27): Xaa is A or G or is absent

SEQ ID NO: 28696 - protein, 39 aa, Artificial Sequence
  GFR-binding peptide
  MOD_RES (1)..(2)..(36)..(38): Xaa is C or S
  MOD_RES (16)..(17)..(18)..(19)..(20): Xaa is A or G
  MOD_RES (21)..(22)..(23)..(24): Xaa is A or G or is absent
XXAPTQLSPISVLYIXXXXXXXXXYKQYENMVVRAXGXH

SEQ ID NO: 28697 - protein, 39 aa, Artificial Sequence
  GFR-binding peptide
  MOD_RES (5)..(6)..(39): Xaa is C or S
  MOD_RES (20)..(21)..(22)..(23)..(24): Xaa is A or G
  MOD_RES (25)..(26)..(27)..(28): Xaa is A or G or is absent
SASPXXVPQDLSPISILYIXXXXXXXXXYKQYEMVVKSX

SEQ ID NO: 28698 - protein, 39 aa, Artificial Sequence; identical to SEQ ID NO: 7474
  GFR-binding peptide
  MOD_RES (4)..(5)..(39): Xaa is C or S
  MOD_RES (19)..(20)..(21)..(22)..(23): Xaa is A or G
  MOD_RES (24)..(25)..(26)..(27): Xaa is A or G or is absent

SEQ ID NO: 28699 - protein, 34 aa, Artificial Sequence; identical to SEQ ID NO: 7475
  GFR-binding peptide
  MOD_RES (2)..(3)..(34): Xaa is C or S

SEQ ID NO: 28700 - protein, 37 aa, Artificial Sequence
  GFR-binding peptide
  MOD_RES (4)..(5): Xaa is C or S
  MOD_RES (19)..(20)..(21)..(22)..(23): Xaa is A or G
  MOD_RES (24)..(25)..(26)..(27): Xaa is A or G or is absent
PKAXXVPTELEPISMLYLXXXXXXXXXKFKYEEMVVE

SEQ ID NO: 28701 - protein, 36 aa, Artificial Sequence
  GFR-binding peptide
  MOD_RES (3)..(4): Xaa is C or S
  MOD_RES (18)..(19)..(20)..(21)..(22): Xaa is A or G
  MOD_RES (23)..(24)..(25)..(26): Xaa is A or G or is absent
KAXXVPTKLNAISILYFXXXXXXXXXLKKYRGMAVS

SEQ ID NO: 28702 - protein, 38 aa, Artificial Sequence
  GFR-binding peptide
  MOD_RES (3)..(4)..(35)..(37): Xaa is C or S
SPXXVSQDLSPISILYIIGKTPKIYKQYEMIVKSXKXS

SEQ ID NO: 28703 - protein, 41 aa, Artificial Sequence
  GFR-binding peptide
  MOD_RES (4)..(5)..(40): Xaa is C or S
  MOD_RES (19)..(20)..(21)..(22)..(23): Xaa is A or G
  MOD_RES (24)..(25)..(26)..(27): Xaa is A or G or is absent
GKAXXVPTKLEPISVLYLXXXXXXXXXKFKYEEGMSVAEXG

SEQ ID NO: 28704 - protein, 37 aa, Artificial Sequence; identical to SEQ ID NO: 7479
  GFR-binding peptide
  MOD_RES (4)..(5): Xaa is C or S
  MOD_RES (19)..(20)..(21)..(22)..(23): Xaa is A or G
  MOD_RES (24)..(25)..(26)..(27): Xaa is A or G or is absent

SEQ ID NO: 28705 - protein, 37 aa, Artificial Sequence
  GFR-binding peptide
  MOD_RES (1)..(2)..(36): Xaa is C or S
  MOD_RES (16)..(17)..(18)..(19)..(20): Xaa is A or G
  MOD_RES (21)..(22)..(23)..(24): Xaa is A or G or is absent
XXAPTKLSPISVLYIXXXXXXXXXYKQYENMVVRSXG

SEQ ID NO: 28706 - protein, 38 aa, Artificial Sequence; identical to SEQ ID NO: 7480
  GFR-binding peptide
  MOD_RES (1)..(2)..(36)..(38): Xaa is C or S
  MOD_RES (16)..(17)..(18)..(19)..(20): Xaa is A or G
  MOD_RES (21)..(22)..(23)..(24): Xaa is A or G or is absent

SEQ ID NO: 28707 - protein, 33 aa, Artificial Sequence
  GFR-binding peptide
  MOD_RES (2)..(3): Xaa is C or S
AXXVPTKLSPISILYIDKGVVTYYKQYEGMAVS

SEQ ID NO: 28708 - protein, 36 aa, Artificial Sequence
  GFR-binding peptide
  MOD_RES (1)..(2)..(36): Xaa is C or S
  MOD_RES (16)..(17)..(18)..(19)..(20): Xaa is A or G
  MOD_RES (21)..(22)..(23)..(24): Xaa is A or G or is absent
XXVPTELSPISMLYIXXXXXXXXXYKQYEEMVVEGX

SEQ ID NO: 28709 - protein, 38 aa, Artificial Sequence
  GFR-binding peptide
  MOD_RES (4)..(5)..(38): Xaa is C or S
  MOD_RES (19)..(20)..(21)..(22)..(23): Xaa is A or G
  MOD_RES (24)..(25)..(26)..(27): Xaa is A or G or is absent
ASPXXVSQDLSPISILYIXXXXXXXXXYKQYEMIVKSX

SEQ ID NO: 28710 - protein, 41 aa, Artificial Sequence; identical to SEQ ID NO: 7483
  GFR-binding peptide
  MOD_RES (6)..(7)..(41): Xaa is C or S
  MOD_RES (21)..(22)..(23)..(24)..(25): Xaa is A or G
  MOD_RES (26)..(27)..(28)..(29): Xaa is A or G or is absent

SEQ ID NO: 28711 - protein, 34 aa, Artificial Sequence; identical to SEQ ID NO: 7485
  GFR-binding peptide
  MOD_RES (1)..(33): Xaa is C or S

SEQ ID NO: 28712 - protein, 41 aa, Artificial Sequence
  GFR-binding peptide
  MOD_RES (5)..(6)..(40): Xaa is C or S
  MOD_RES (20)..(21)..(22)..(23)..(24): Xaa is A or G
  MOD_RES (25)..(26)..(27)..(28): Xaa is A or G or is absent
ASKAXXVPTKLSPISILYKXXXXXXXXXLKYHYGMAVSEXG

SEQ ID NO: 28713 - protein, 37 aa, Artificial Sequence; identical to SEQ ID NO: 7489
  GFR-binding peptide
  MOD_RES (6)..(7): Xaa is C or S

SEQ ID NO: 28714 - protein, 36 aa, Artificial Sequence; identical to SEQ ID NO: 7490
  GFR-binding peptide
  MOD_RES (1)..(36): Xaa is C or S
  MOD_RES (15)..(16)..(17)..(18)..(19): Xaa is A or G
  MOD_RES (20)..(21)..(22)..(23): Xaa is A or G or is absent

SEQ ID NO: 28715 - protein, 41 aa, Artificial Sequence; identical to SEQ ID NO: 7491
  GFR-binding peptide
  MOD_RES (4)..(5)..(38)..(40): Xaa is C or S

SEQ ID NO: 28716 - protein, 34 aa, Artificial Sequence
  GFR-binding peptide
  MOD_RES (1)..(32)..(34): Xaa is C or S
XVPQALEPISILYLVGRKPKVKFKYEMIVRSXKX

SEQ ID NO: 28717 - protein, 31 aa, Artificial Sequence; identical to SEQ ID NO: 7495
  GFR-binding peptide

SEQ ID NO: 28718 - protein, 36 aa, Artificial Sequence
  GFR-binding peptide
  MOD_RES (5)..(5): Xaa is C or S
TKPTXAPTKLEPISVLYLDDSSNVIKFKYENMVVRS

SEQ ID NO: 28719 - protein, 34 aa, Artificial Sequence
  GFR-binding peptide
  MOD_RES (2)..(3): Xaa is C or S
PXXAPTQLEPISVLYLDDSSNVIKFKYENMVVRA

SEQ ID NO: 28720 - protein, 38 aa, Artificial Sequence
  GFR-binding peptide
  MOD_RES (1)..(2)..(36)..(38): Xaa is C or S
  MOD_RES (16)..(17)..(18)..(19)..(20): Xaa is A or G
  MOD_RES (21)..(22)..(23)..(24): Xaa is A or G or is absent
XXAPTKLEPISVLYLXXXXXXXXXKFKYENMVVKAXGX

SEQ ID NO: 28721 - protein, 33 aa, Artificial Sequence; identical to SEQ ID NO: 7497
  GFR-binding peptide
  MOD_RES (1)..(2): Xaa is C or S

SEQ ID NO: 28722 - protein, 38 aa, Artificial Sequence
  GFR-binding peptide
  MOD_RES (1)..(36)..(38): Xaa is C or S
  MOD_RES (15)..(16)..(17)..(18)..(19): Xaa is A or G
  MOD_RES (20)..(21)..(22)..(23): Xaa is A or G or is absent
XVPTKLSPISVLYIXXXXXXXXXYKQYEEGMSVAEXGX

SEQ ID NO: 28723 - protein, 33 aa, Artificial Sequence
  GFR-binding peptide
  MOD_RES (32)..(32): Xaa is C or S
APTKLSPISVLYIDSSNNVIYKQYENMVVKAXG

SEQ ID NO: 28724 - protein, 40 aa, Artificial Sequence
  GFR-binding peptide
  MOD_RES (5)..(6)..(39): Xaa is C or S
  MOD_RES (20)..(21)..(22)..(23)..(24): Xaa is A or G
  MOD_RES (25)..(26)..(27)..(28): Xaa is A or G or is absent
SAAPXXVPQALSPISILYIXXXXXXXXXYKQYEMIVRSXK

SEQ ID NO: 28725 - protein, 40 aa, Artificial Sequence
  GFR-binding peptide
  MOD_RES (2)..(3)..(37)..(39): Xaa is C or S
  MOD_RES (17)..(18)..(19)..(20)..(21): Xaa is A or G
  MOD_RES (22)..(23)..(24)..(25): Xaa is A or G or is absent
PXXAPTQLSPISVLYIXXXXXXXXXYKQYENMVVRAXGXH

SEQ ID NO: 28726 - protein, 38 aa, Artificial Sequence
  GFR-binding peptide
  MOD_RES (4)..(5): Xaa is C or S
  MOD_RES (19)..(20)..(21)..(22)..(23): Xaa is A or G
  MOD_RES (24)..(25)..(26)..(27): Xaa is A or G or is absent
PKAXXVPTELEPISMLYLXXXXXXXXXKFKYEDMVVEG

SEQ ID NO: 28727 - protein, 41 aa, Artificial Sequence
  GFR-binding peptide
  MOD_RES (4)..(5)..(39)..(41): Xaa is C or S
  MOD_RES (19)..(20)..(21)..(22)..(23): Xaa is A or G
  MOD_RES (24)..(25)..(26)..(27): Xaa is A or G or is absent
PASXXVPARLNAISILYFXXXXXXXXXLKKYRDMVVEAXGX

SEQ ID NO: 28728 - protein, 42 aa, Artificial Sequence; identical to SEQ ID NO: 7500
  GFR-binding peptide
  MOD_RES (3)..(4)..(39)..(41): Xaa is C or S
  MOD_RES (18)..(19)..(20)..(21)..(22): Xaa is A or G
  MOD_RES (23)..(24)..(25)..(26): Xaa is A or G or is absent

SEQ ID NO: 28729 - protein, 37 aa, Artificial Sequence; identical to SEQ ID NO: 7501
  GFR-binding peptide
  MOD_RES (1)..(2)..(34)..(36): Xaa is C or S

SEQ ID NO: 28730 - protein, 35 aa, Artificial Sequence
  GFR-binding peptide
  MOD_RES (3)..(4)..(35): Xaa is C or S
APXXVPQALEPISILYLVGRKPKVKFKYEMIVRSX

SEQ ID NO: 28731 - protein, 34 aa, Artificial Sequence
  GFR-binding peptide
  MOD_RES (2)..(3): Xaa is C or S
SXXVPARLSPISILYKDAANNVVLKYHYDMVVEA

SEQ ID NO: 28732 - protein, 45 aa, Artificial Sequence; identical to SEQ ID NO: 7504
  GFR-binding peptide
  MOD_RES (6)..(7)..(42)..(44): Xaa is C or S
  MOD_RES (21)..(22)..(23)..(24)..(25): Xaa is A or G
  MOD_RES (26)..(27)..(28)..(29): Xaa is A or G or is absent

SEQ ID NO: 28733 - protein, 36 aa, Artificial Sequence; identical to SEQ ID NO: 7507
  GFR-binding peptide
  MOD_RES (5)..(6): Xaa is C or S

SEQ ID NO: 28734 - protein, 36 aa, Artificial Sequence
  GFR-binding peptide
  MOD_RES (3)..(4): Xaa is C or S
  MOD_RES (18)..(19)..(20)..(21)..(22): Xaa is A or G
  MOD_RES (23)..(24)..(25)..(26): Xaa is A or G or is absent
ASXXVPARLSPISILYKXXXXXXXXXLKYHYDMVVE

SEQ ID NO: 28735 - protein, 32 aa, Artificial Sequence
  GFR-binding peptide
  MOD_RES (31)..(31): Xaa is C or S
VSQDLSPISILYIIGKTPKIYKQYEMIVKSXK

SEQ ID NO: 28736 - protein, 40 aa, Artificial Sequence
  GFR-binding peptide
  MOD_RES (3)..(4)..(37)..(39): Xaa is C or S
  MOD_RES (18)..(19)..(20)..(21)..(22): Xaa is A or G
  MOD_RES (23)..(24)..(25)..(26): Xaa is A or G or is absent
SPXXVPQDLSPISILYIXXXXXXXXXYKQYEMVVKSXKXS

SEQ ID NO: 28737 - protein, 36 aa, Artificial Sequence
  GFR-binding peptide
  MOD_RES (2)..(3)..(34)..(36): Xaa is C or S
PXXVSQDLSPISILYIIGKTPKIYKQYEMIVKSXKX

SEQ ID NO: 28738 - protein, 35 aa, Artificial Sequence; identical to SEQ ID NO: 7510
  GFR-binding peptide
  MOD_RES (1)..(32)..(34): Xaa is C or S

SEQ ID NO: 28739 - protein, 39 aa, Artificial Sequence; identical to SEQ ID NO: 7511
  GFR-binding peptide
  MOD_RES (1)..(2)..(36)..(38): Xaa is C or S
  MOD_RES (16)..(17)..(18)..(19)..(20): Xaa is A or G
  MOD_RES (21)..(22)..(23)..(24): Xaa is A or G or is absent

SEQ ID NO: 28740 - protein, 37 aa, Artificial Sequence
  GFR-binding peptide
  MOD_RES (4)..(5): Xaa is C or S
  MOD_RES (19)..(20)..(21)..(22)..(23): Xaa is A or G
  MOD_RES (24)..(25)..(26)..(27): Xaa is A or G or is absent
PKAXXAPTKLSPISVLYIXXXXXXXXXYKQYENMVVK

SEQ ID NO: 28741 - protein, 38 aa, Artificial Sequence
  GFR-binding peptide
  MOD_RES (2)..(3)..(35)..(37): Xaa is C or S
PXXAPTKLSPISVLYIDDSSNVIYKQYENMVVRSXGXH

SEQ ID NO: 28742 - protein, 39 aa, Artificial Sequence; identical to SEQ ID NO: 7512
  GFR-binding peptide
  MOD_RES (5)..(6)..(37)..(39): Xaa is C or S

SEQ ID NO: 28743 - protein, 39 aa, Artificial Sequence; identical to SEQ ID NO: 7513
  GFR-binding peptide
  MOD_RES (5)..(6)..(38): Xaa is C or S

SEQ ID NO: 28744 - protein, 38 aa, Artificial Sequence
  GFR-binding peptide
  MOD_RES (6)..(7)..(38): Xaa is C or S
ASAAPXXVPQALSPISILYIVGRKPKVYKQYEMIVRSX

SEQ ID NO: 28745 - protein, 39 aa, Artificial Sequence; identical to SEQ ID NO: 7515
  GFR-binding peptide
  MOD_RES (6)..(7)..(38): Xaa is C or S

SEQ ID NO: 28746 - protein, 36 aa, Artificial Sequence
  GFR-binding peptide
  MOD_RES (5)..(6): Xaa is C or S
VPKPXXAPTKLSPISVLYIDDSSNVIYKQYENMVVR

SEQ ID NO: 28747 - protein, 40 aa, Artificial Sequence; identical to SEQ ID NO: 7518
  GFR-binding peptide
  MOD_RES (6)..(38)..(40): Xaa is C or S

SEQ ID NO: 28748 - protein, 38 aa, Artificial Sequence
  GFR-binding peptide
  MOD_RES (6)..(7): Xaa is C or S
YVPKPXXAPTKLEPISVLYLDDSSNVIKFKYENMVVRS

SEQ ID NO: 28749 - protein, 34 aa, Artificial Sequence
  GFR-binding peptide
  MOD_RES (1)..(2)..(34): Xaa is C or S
XXVPTELEPISMLYLDEYDKVVKFKYEEMVVEGX

SEQ ID NO: 28750 - protein, 42 aa, Artificial Sequence; identical to SEQ ID NO: 7519
  GFR-binding peptide
  MOD_RES (5)..(6)..(41): Xaa is C or S
  MOD_RES (20)..(21)..(22)..(23)..(24): Xaa is A or G
  MOD_RES (25)..(26)..(27)..(28): Xaa is A or G or is absent

SEQ ID NO: 28751 - protein, 34 aa, Artificial Sequence
  GFR-binding peptide
  MOD_RES (34)..(34): Xaa is C or S
  MOD_RES (14)..(15)..(16)..(17)..(18): Xaa is A or G
  MOD_RES (19)..(20)..(21)..(22): Xaa is A or G or is absent
APTKLEPISVLYLXXXXXXXXXKFKYENMVVKAX

SEQ ID NO: 28752 - protein, 38 aa, Artificial Sequence; identical to SEQ ID NO: 7521
  GFR-binding peptide
  MOD_RES (3)..(4)..(38): Xaa is C or S
  MOD_RES (18)..(19)..(20)..(21)..(22): Xaa is A or G
  MOD_RES (23)..(24)..(25)..(26): Xaa is A or G or is absent

SEQ ID NO: 28753 - protein, 34 aa, Artificial Sequence
  GFR-binding peptide
  MOD_RES (1)..(2): Xaa is C or S
  MOD_RES (16)..(17)..(18)..(19)..(20): Xaa is A or G
  MOD_RES (21)..(22)..(23)..(24): Xaa is A or G or is absent
XXVSQDLSPISILYIXXXXXXXXXYKQYEMIVKS

SEQ ID NO: 28754 - protein, 37 aa, Artificial Sequence
  GFR-binding peptide
  MOD_RES (5)..(6)..(37): Xaa is C or S
SASPXXVSQDLSPISILYIIGKTPKIYKQYEMIVKSX

SEQ ID NO: 28755 - protein, 39 aa, Artificial Sequence
  GFR-binding peptide
  MOD_RES (4)..(5)..(37)..(39): Xaa is C or S
PKAXXAPTKLEPISVLYLDSSNNVIKFKYENMVVKAXGX

SEQ ID NO: 28756 - protein, 39 aa, Artificial Sequence; identical to SEQ ID NO: 7522
  GFR-binding peptide
  MOD_RES (6)..(7): Xaa is C or S
  MOD_RES (21)..(22)..(23)..(24)..(25): Xaa is A or G
  MOD_RES (26)..(27)..(28)..(29): Xaa is A or G or is absent

SEQ ID NO: 28757 - protein, 37 aa, Artificial Sequence; identical to SEQ ID NO: 7523
  GFR-binding peptide
  MOD_RES (1)..(2)..(36): Xaa is C or S
  MOD_RES (16)..(17)..(18)..(19)..(20): Xaa is A or G
  MOD_RES (21)..(22)..(23)..(24): Xaa is A or G or is absent

SEQ ID NO: 28758 - protein, 40 aa, Artificial Sequence; identical to SEQ ID NO: 7524
  GFR-binding peptide
  MOD_RES (4)..(5)..(39): Xaa is C or S
  MOD_RES (19)..(20)..(21)..(22)..(23): Xaa is A or G
  MOD_RES (24)..(25)..(26)..(27): Xaa is A or G or is absent

SEQ ID NO: 28759 - protein, 39 aa, Artificial Sequence
  GFR-binding peptide
  MOD_RES (1)..(2)..(37)..(39): Xaa is C or S
  MOD_RES (16)..(17)..(18)..(19)..(20): Xaa is A or G
  MOD_RES (21)..(22)..(23)..(24): Xaa is A or G or is absent
XXVPTKLEPISVLYLXXXXXXXXXKFKYEEGMSVAEXGX

SEQ ID NO: 28760 - protein, 37 aa, Artificial Sequence; identical to SEQ ID NO: 7525
  GFR-binding peptide
  MOD_RES (7)..(7): Xaa is C or S

SEQ ID NO: 28761 - protein, 33 aa, Artificial Sequence; identical to SEQ ID NO: 7526
  GFR-binding peptide
  MOD_RES (33)..(33): Xaa is C or S

SEQ ID NO: 28762 - protein, 39 aa, Artificial Sequence; identical to SEQ ID NO: 7527
  GFR-binding peptide
  MOD_RES (5)..(6): Xaa is C or S
  MOD_RES (20)..(21)..(22)..(23)..(24): Xaa is A or G
  MOD_RES (25)..(26)..(27)..(28): Xaa is A or G or is absent

SEQ ID NO: 28763 - protein, 37 aa, Artificial Sequence; identical to SEQ ID NO: 7528
  GFR-binding peptide
  MOD_RES (2)..(3): Xaa is C or S
  MOD_RES (17)..(18)..(19)..(20)..(21): Xaa is A or G
  MOD_RES (22)..(23)..(24)..(25): Xaa is A or G or is absent

SEQ ID NO: 28764 - protein, 37 aa, Artificial Sequence
  GFR-binding peptide
  MOD_RES (2)..(3)..(35)..(37): Xaa is C or S
SXXVPARLEPISILYLDAANNVVKFKYEDMVVEAXGX

SEQ ID NO: 28765 - protein, 32 aa, Artificial Sequence
  GFR-binding peptide
  MOD_RES (1)..(2): Xaa is C or S
XXVSQDLEPISILYLIGKTPKIKFKYEMIVKS

SEQ ID NO: 28766 - protein, 37 aa, Artificial Sequence; identical to SEQ ID NO: 7532
  GFR-binding peptide
  MOD_RES (6)..(7): Xaa is C or S

SEQ ID NO: 28767 - protein, 37 aa, Artificial Sequence
  GFR-binding peptide
  MOD_RES (6)..(7): Xaa is C or S
KASKAXXVPTKLNAISILYFDKGVVTYLKKYRGMAVS

SEQ ID NO: 28768 - protein, 38 aa, Artificial Sequence; identical to SEQ ID NO: 7534
  GFR-binding peptide
  MOD_RES (6)..(7): Xaa is C or S

SEQ ID NO: 28769 - protein, 41 aa, Artificial Sequence
  GFR-binding peptide
  MOD_RES (4)..(5)..(39)..(41): Xaa is C or S
  MOD_RES (19)..(20)..(21)..(22)..(23): Xaa is A or G
  MOD_RES (24)..(25)..(26)..(27): Xaa is A or G or is absent
PKPXXAPTKLEPISVLYLXXXXXXXXXKFKYENMVVRSXGX

SEQ ID NO: 28770 - protein, 37 aa, Artificial Sequence
  GFR-binding peptide
  MOD_RES (2)..(3)..(35)..(37): Xaa is C or S
PXXAPTKLSPISVLYIDDSSNVIYKQYENMVVRSXGX

SEQ ID NO: 28771 - protein, 31 aa, Artificial Sequence
  GFR-binding peptide
VPARLNAISILYFDAANNVVLKKYRDMVVEA

SEQ ID NO: 28772 - protein, 38 aa, Artificial Sequence; identical to SEQ ID NO: 7536
  GFR-binding peptide
  MOD_RES (3)..(4): Xaa is C or S
  MOD_RES (18)..(19)..(20)..(21)..(22): Xaa is A or G
  MOD_RES (23)..(24)..(25)..(26): Xaa is A or G or is absent

SEQ ID NO: 28773 - protein, 38 aa, Artificial Sequence
  GFR-binding peptide
  MOD_RES (2)..(3)..(35)..(37): Xaa is C or S
PXXAPTKLEPISVLYLDDSSNVIKFKYENMVVRSXGXH

SEQ ID NO: 28774 - protein, 33 aa, Artificial Sequence
  GFR-binding peptide
  MOD_RES (33)..(33): Xaa is C or S
VPTKLEPISVLYLDDMGVPTKFKYEEGMSVAEX

SEQ ID NO: 28775 - protein, 38 aa, Artificial Sequence
  GFR-binding peptide
  MOD_RES (3)..(4)..(38): Xaa is C or S
  MOD_RES (18)..(19)..(20)..(21)..(22): Xaa is A or G
  MOD_RES (23)..(24)..(25)..(26): Xaa is A or G or is absent
KAXXVPTELEPISMLYLXXXXXXXXXKFKYEEMVVEGX

SEQ ID NO: 28776 - protein, 37 aa, Artificial Sequence; identical to SEQ ID NO: 7537
  GFR-binding peptide
  MOD_RES (1)..(34)..(36): Xaa is C or S
  MOD_RES (15)..(16)..(17)..(18)..(19): Xaa is A or G
  MOD_RES (20)..(21)..(22)..(23): Xaa is A or G or is absent

SEQ ID NO: 28777 - protein, 35 aa, Artificial Sequence
  GFR-binding peptide
  MOD_RES (2)..(3): Xaa is C or S
  MOD_RES (17)..(18)..(19)..(20)..(21): Xaa is A or G
  MOD_RES (22)..(23)..(24)..(25): Xaa is A or G or is absent
AXXVPTKLNAISILYFXXXXXXXXXLKKYRGMAVS

SEQ ID NO: 28778 - protein, 39 aa, Artificial Sequence; identical to SEQ ID NO: 7538
  GFR-binding peptide
  MOD_RES (5)..(6)..(37)..(39): Xaa is C or S

SEQ ID NO: 28779 - protein, 39 aa, Artificial Sequence
  GFR-binding peptide
  MOD_RES (3)..(37)..(39): Xaa is C or S
  MOD_RES (17)..(18)..(19)..(20)..(21): Xaa is A or G
  MOD_RES (22)..(23)..(24)..(25): Xaa is A or G or is absent
PTXAPTKLSPISVLYIXXXXXXXXXYKQYENMVVRSXGX

SEQ ID NO: 28780 - protein, 34 aa, Artificial Sequence; identical to SEQ ID NO: 7541
  GFR-binding peptide
  MOD_RES (32)..(34): Xaa is C or S

SEQ ID NO: 28781 - protein, 38 aa, Artificial Sequence; identical to SEQ ID NO: 7543
  GFR-binding peptide
  MOD_RES (2)..(3)..(37): Xaa is C or S
  MOD_RES (17)..(18)..(19)..(20)..(21): Xaa is A or G
  MOD_RES (22)..(23)..(24)..(25): Xaa is A or G or is absent

SEQ ID NO: 28782 - protein, 35 aa, Artificial Sequence
  GFR-binding peptide
  MOD_RES (2)..(3)..(35): Xaa is C or S
SXXVPARLEPISILYLDAANNVVKFKYEDMVVEAX

SEQ ID NO: 28783 - protein, 37 aa, Artificial Sequence
  GFR-binding peptide
  MOD_RES (3)..(4): Xaa is C or S
  MOD_RES (18)..(19)..(20)..(21)..(22): Xaa is A or G
  MOD_RES (23)..(24)..(25)..(26): Xaa is A or G or is absent
KAXXVPTKLEPISILYLXXXXXXXXXKFKYEGMAVSE

SEQ ID NO: 28784 - protein, 40 aa, Artificial Sequence; identical to SEQ ID NO: 7545
  GFR-binding peptide
  MOD_RES (3)..(4)..(38)..(40): Xaa is C or S
  MOD_RES (18)..(19)..(20)..(21)..(22): Xaa is A or G
  MOD_RES (23)..(24)..(25)..(26): Xaa is A or G or is absent

SEQ ID NO: 28785 - protein, 37 aa, Artificial Sequence
  GFR-binding peptide
  MOD_RES (5)..(6): Xaa is C or S
APASXXVPARLNAISILYFDAANNVVLKKYRDMVVEA

SEQ ID NO: 28786 - protein, 38 aa, Artificial Sequence; identical to SEQ ID NO: 7546
  GFR-binding peptide
  MOD_RES (1)..(35)..(37): Xaa is C or S
  MOD_RES (15)..(16)..(17)..(18)..(19): Xaa is A or G
  MOD_RES (20)..(21)..(22)..(23): Xaa is A or G or is absent

SEQ ID NO: 28787 - protein, 41 aa, Artificial Sequence
  GFR-binding peptide
  MOD_RES (4)..(5)..(39)..(41): Xaa is C or S
  MOD_RES (19)..(20)..(21)..(22)..(23): Xaa is A or G
  MOD_RES (24)..(25)..(26)..(27): Xaa is A or G or is absent
PKPXXAPTKLSPISVLYIXXXXXXXXXYKQYENMVVRSXGX

SEQ ID NO: 28788 - protein, 37 aa, Artificial Sequence; identical to SEQ ID NO: 7549
  GFR-binding peptide
  MOD_RES (6)..(7): Xaa is C or S

SEQ ID NO: 28789 - protein, 35 aa, Artificial Sequence; identical to SEQ ID NO: 7551
  GFR-binding peptide
  MOD_RES (32)..(34): Xaa is C or S

SEQ ID NO: 28790 - protein, 41 aa, Artificial Sequence; identical to SEQ ID NO: 7553
  GFR-binding peptide
  MOD_RES (5)..(6)..(40): Xaa is C or S
  MOD_RES (20)..(21)..(22)..(23)..(24): Xaa is A or G
  MOD_RES (25)..(26)..(27)..(28): Xaa is A or G or is absent

SEQ ID NO: 28791 - protein, 35 aa, Artificial Sequence
  GFR-binding peptide
  MOD_RES (1)..(1): Xaa is C or S
  MOD_RES (15)..(16)..(17)..(18)..(19): Xaa is A or G
  MOD_RES (20)..(21)..(22)..(23): Xaa is A or G or is absent
XVPTKLSPISVLYIXXXXXXXXXYKQYEEGMSVAE

SEQ ID NO: 28792 - protein, 35 aa, Artificial Sequence; identical to SEQ ID NO: 7555
  GFR-binding peptide
  MOD_RES (1)..(34): Xaa is C or S
  MOD_RES (15)..(16)..(17)..(18)..(19): Xaa is A or G
  MOD_RES (20)..(21)..(22)..(23): Xaa is A or G or is absent

SEQ ID NO: 28793 - protein, 33 aa, Artificial Sequence
  GFR-binding peptide
  MOD_RES (1)..(2)..(33): Xaa is C or S
XXVPQALSPISILYIVGRKPKVYKQYEMIVRSX

SEQ ID NO: 28794 - protein, 37 aa, Artificial Sequence; identical to SEQ ID NO: 7556
  GFR-binding peptide
  MOD_RES (4)..(5): Xaa is C or S
  MOD_RES (19)..(20)..(21)..(22)..(23): Xaa is A or G
  MOD_RES (24)..(25)..(26)..(27): Xaa is A or G or is absent

SEQ ID NO: 28795 - protein, 40 aa, Artificial Sequence; identical to SEQ ID NO: 7557
  GFR-binding peptide
  MOD_RES (5)..(6): Xaa is C or S
  MOD_RES (20)..(21)..(22)..(23)..(24): Xaa is A or G
  MOD_RES (25)..(26)..(27)..(28): Xaa is A or G or is absent

SEQ ID NO: 28796 - protein, 32 aa, Artificial Sequence
  GFR-binding peptide
  MOD_RES (14)..(15)..(16)..(17)..(18): Xaa is A or G
  MOD_RES (19)..(20)..(21)..(22): Xaa is A or G or is absent
VSQDLSPISILYIXXXXXXXXXYKQYEMIVKS

SEQ ID NO: 28797 - protein, 39 aa, Artificial Sequence
  GFR-binding peptide
  MOD_RES (5)..(6): Xaa is C or S
  MOD_RES (20)..(21)..(22)..(23)..(24): Xaa is A or G
  MOD_RES (25)..(26)..(27)..(28): Xaa is A or G or is absent
VPKAXXAPTKLEPISVLYLXXXXXXXXXKFKYENMVVKA

SEQ ID NO: 28798 - protein, 38 aa, Artificial Sequence
  GFR-binding peptide
  MOD_RES (1)..(35)..(37): Xaa is C or S
  MOD_RES (15)..(16)..(17)..(18)..(19): Xaa is A or G
  MOD_RES (20)..(21)..(22)..(23): Xaa is A or G or is absent
XVPTELSPISMLYIXXXXXXXXXYKQYEDMVVEGXGXR

SEQ ID NO: 28799 - protein, 38 aa, Artificial Sequence; identical to SEQ ID NO: 7561
  GFR-binding peptide
  MOD_RES (4)..(5)..(37): Xaa is C or S

SEQ ID NO: 28800 - protein, 37 aa, Artificial Sequence
  GFR-binding peptide
  MOD_RES (2)..(3)..(35)..(37): Xaa is C or S
PXXAPTQLSPISVLYIDDSSNVIYKQYENMVVRAXGX

SEQ ID NO: 28801 - protein, 39 aa, Artificial Sequence
  GFR-binding peptide
  MOD_RES (4)..(5)..(39): Xaa is C or S
  MOD_RES (19)..(20)..(21)..(22)..(23): Xaa is A or G
  MOD_RES (24)..(25)..(26)..(27): Xaa is A or G or is absent
PKPXXAPTQLEPISVLYLXXXXXXXXXKFKYENMVVRAX

SEQ ID NO: 28802 - protein, 33 aa, Artificial Sequence
  GFR-binding peptide
  MOD_RES (2)..(3): Xaa is C or S
PXXVPQALEPISILYLVGRKPKVKFKYEMIVRS

SEQ ID NO: 28803 - protein, 36 aa, Artificial Sequence
  GFR-binding peptide
  MOD_RES (1)..(2)..(33)..(35): Xaa is C or S
XXVPQDLEPISILYLVGRTPKVKFKYEMVVKSXKXS

SEQ ID NO: 28804 - protein, 37 aa, Artificial Sequence
  GFR-binding peptide
  MOD_RES (1)..(35)..(37): Xaa is C or S
  MOD_RES (15)..(16)..(17)..(18)..(19): Xaa is A or G
  MOD_RES (20)..(21)..(22)..(23): Xaa is A or G or is absent
XVPARLSPISILYIXXXXXXXXXYKQYEDMVVEAXGX

SEQ ID NO: 28805 - protein, 42 aa, Artificial Sequence; identical to SEQ ID NO: 7568
  GFR-binding peptide
  MOD_RES (6)..(7)..(41): Xaa is C or S
  MOD_RES (21)..(22)..(23)..(24)..(25): Xaa is A or G
  MOD_RES (26)..(27)..(28)..(29): Xaa is A or G or is absent

SEQ ID NO: 28806 - protein, 32 aa, Artificial Sequence
  GFR-binding peptide
  MOD_RES (14)..(15)..(16)..(17)..(18): Xaa is A or G
  MOD_RES (19)..(20)..(21)..(22): Xaa is A or G or is absent
VPARLSPISILYKXXXXXXXXXLKYHYDMVVE

SEQ ID NO: 28807 - protein, 34 aa, Artificial Sequence; identical to SEQ ID NO: 7569
  GFR-binding peptide
  MOD_RES (1)..(34): Xaa is C or S

SEQ ID NO: 28808 - protein, 41 aa, Artificial Sequence; identical to SEQ ID NO: 7570
  GFR-binding peptide
  MOD_RES (5)..(6)..(38)..(40): Xaa is C or S

SEQ ID NO: 28809 - protein, 36 aa, Artificial Sequence; identical to SEQ ID NO: 7572
  GFR-binding peptide
  MOD_RES (34)..(36): Xaa is C or S
  MOD_RES (14)..(15)..(16)..(17)..(18): Xaa is A or G
  MOD_RES (19)..(20)..(21)..(22): Xaa is A or G or is absent

SEQ ID NO: 28810 - protein, 40 aa, Artificial Sequence
  GFR-binding peptide
  MOD_RES (6)..(7): Xaa is C or S
  MOD_RES (21)..(22)..(23)..(24)..(25): Xaa is A or G
  MOD_RES (26)..(27)..(28)..(29): Xaa is A or G or is absent
AAPASXXVPARLSPISILYKXXXXXXXXXLKYHYDMVVEA

SEQ ID NO: 28811 - protein, 37 aa, Artificial Sequence
  GFR-binding peptide
  MOD_RES (3)..(4)..(37): Xaa is C or S
  MOD_RES (18)..(19)..(20)..(21)..(22): Xaa is A or G
  MOD_RES (23)..(24)..(25)..(26): Xaa is A or G or is absent
SPXXVSQDLEPISILYLXXXXXXXXXKFKYEMIVKSX

SEQ ID NO: 28812 - protein, 35 aa, Artificial Sequence
  GFR-binding peptide
  MOD_RES (1)..(32)..(34): Xaa is C or S
XVPQALEPISILYLVGRKPKVKFKYEMIVRSXKXS

SEQ ID NO: 28813 - protein, 39 aa, Artificial Sequence
  GFR-binding peptide
  MOD_RES (4)..(5)..(38): Xaa is C or S
  MOD_RES (19)..(20)..(21)..(22)..(23): Xaa is A or G
  MOD_RES (24)..(25)..(26)..(27): Xaa is A or G or is absent
ASPXXVSQDLSPISILYIXXXXXXXXXYKQYEMIVKSXK

SEQ ID NO: 28814 - protein, 31 aa, Artificial Sequence
  GFR-binding peptide
APTKLSPISVLYIDSSNNVIYKQYENMVVKA

SEQ ID NO: 28815 - protein, 33 aa, Artificial Sequence
  GFR-binding peptide
  MOD_RES (1)..(1): Xaa is C or S
  MOD_RES (15)..(16)..(17)..(18)..(19): Xaa is A or G
  MOD_RES (20)..(21)..(22)..(23): Xaa is A or G or is absent
XVPTELEPISMLYLXXXXXXXXXKFKYEDMVVE

SEQ ID NO: 28816 - protein, 37 aa, Artificial Sequence; identical to SEQ ID NO: 7576
  GFR-binding peptide
  MOD_RES (2)..(3)..(35)..(37): Xaa is C or S

SEQ ID NO: 28817 - protein, 38 aa, Artificial Sequence; identical to SEQ ID NO: 7578
  GFR-binding peptide
  MOD_RES (5)..(6): Xaa is C or S
  MOD_RES (20)..(21)..(22)..(23)..(24): Xaa is A or G
  MOD_RES (25)..(26)..(27)..(28): Xaa is A or G or is absent

SEQ ID NO: 28818 - protein, 37 aa, Artificial Sequence
  GFR-binding peptide
  MOD_RES (2)..(3)..(35)..(37): Xaa is C or S
AXXAPTKLEPISVLYLDSSNNVIKFKYENMVVKAXGX

SEQ ID NO: 28819 - protein, 41 aa, Artificial Sequence
  GFR-binding peptide
  MOD_RES (5)..(6)..(39)..(41): Xaa is C or S
  MOD_RES (20)..(21)..(22)..(23)..(24): Xaa is A or G
  MOD_RES (25)..(26)..(27)..(28): Xaa is A or G or is absent
SAAPXXVPQALSPISILYIXXXXXXXXXYKQYEMIVRSXKX

SEQ ID NO: 28820 - protein, 40 aa, Artificial Sequence; identical to SEQ ID NO: 7580
  GFR-binding peptide
  MOD_RES (4)..(5)..(39): Xaa is C or S
  MOD_RES (19)..(20)..(21)..(22)..(23): Xaa is A or G
  MOD_RES (24)..(25)..(26)..(27): Xaa is A or G or is absent

SEQ ID NO: 28821 - protein, 43 aa, Artificial Sequence; identical to SEQ ID NO: 7581
  GFR-binding peptide
  MOD_RES (6)..(7)..(41)..(43): Xaa is C or S
  MOD_RES (21)..(22)..(23)..(24)..(25): Xaa is A or G
  MOD_RES (26)..(27)..(28)..(29): Xaa is A or G or is absent

SEQ ID NO: 28822 - protein, 40 aa, Artificial Sequence; identical to SEQ ID NO: 7582
  GFR-binding peptide
  MOD_RES (5)..(6)..(37)..(39): Xaa is C or S

SEQ ID NO: 28823 - protein, 33 aa, Artificial Sequence; identical to SEQ ID NO: 7583
  GFR-binding peptide
  MOD_RES (1)..(1): Xaa is C or S
  MOD_RES (15)..(16)..(17)..(18)..(19): Xaa is A or G
  MOD_RES (20)..(21)..(22)..(23): Xaa is A or G or is absent

SEQ ID NO: 28824 - protein, 42 aa, Artificial Sequence
  GFR-binding peptide
  MOD_RES (4)..(5)..(39)..(41): Xaa is C or S
  MOD_RES (19)..(20)..(21)..(22)..(23): Xaa is A or G
  MOD_RES (24)..(25)..(26)..(27): Xaa is A or G or is absent
PKAXXVPTELSPISMLYIXXXXXXXXXYKQYEEMVVEGXGXR

SEQ ID NO: 28825 - protein, 34 aa, Artificial Sequence; identical to SEQ ID NO: 7584
  GFR-binding peptide
  MOD_RES (2)..(2): Xaa is C or S
  MOD_RES (16)..(17)..(18)..(19)..(20): Xaa is A or G
  MOD_RES (21)..(22)..(23)..(24): Xaa is A or G or is absent

SEQ ID NO: 28826 - protein, 34 aa, Artificial Sequence
  GFR-binding peptide
  MOD_RES (34)..(34): Xaa is C or S
  MOD_RES (14)..(15)..(16)..(17)..(18): Xaa is A or G
  MOD_RES (19)..(20)..(21)..(22): Xaa is A or G or is absent
VPTKLSPISILYKXXXXXXXXXLKYHYGMAVSEX

SEQ ID NO: 28827 - protein, 39 aa, Artificial Sequence; identical to SEQ ID NO: 7585
  GFR-binding peptide
  MOD_RES (6)..(7): Xaa is C or S
  MOD_RES (21)..(22)..(23)..(24)..(25): Xaa is A or G
  MOD_RES (26)..(27)..(28)..(29): Xaa is A or G or is absent

SEQ ID NO: 28828 - protein, 39 aa, Artificial Sequence
  GFR-binding peptide
  MOD_RES (3)..(4)..(38): Xaa is C or S
  MOD_RES (18)..(19)..(20)..(21)..(22): Xaa is A or G
  MOD_RES (23)..(24)..(25)..(26): Xaa is A or G or is absent
KAXXVPTKLEPISILYLXXXXXXXXXKFKYEGMAVSEXG

SEQ ID NO: 28829 - protein, 38 aa, Artificial Sequence
  GFR-binding peptide
  MOD_RES (4)..(5)..(37): Xaa is C or S
PASXXVPARLSPISILYKDAANNVVLKYHYDMVVEAXG

SEQ ID NO: 28830 - protein, 36 aa, Artificial Sequence
  GFR-binding peptide
  MOD_RES (35)..(35): Xaa is C or S
  MOD_RES (14)..(15)..(16)..(17)..(18): Xaa is A or G
  MOD_RES (19)..(20)..(21)..(22): Xaa is A or G or is absent
VPTKLEPISVLYLXXXXXXXXXKFKYEEGMSVAEXG

SEQ ID NO: 28831 - protein, 35 aa, Artificial Sequence
  GFR-binding peptide
  MOD_RES (35)..(35): Xaa is C or S
  MOD_RES (14)..(15)..(16)..(17)..(18): Xaa is A or G
  MOD_RES (19)..(20)..(21)..(22): Xaa is A or G or is absent
VPTKLSPISVLYIXXXXXXXXXYKQYEEGMSVAEX

SEQ ID NO: 28832 - protein, 36 aa, Artificial Sequence; identical to SEQ ID NO: 7591
  GFR-binding peptide
  MOD_RES (2)..(3)..(34)..(36): Xaa is C or S

SEQ ID NO: 28833 - protein, 39 aa, Artificial Sequence
  GFR-binding peptide
  MOD_RES (3)..(4)..(36)..(38): Xaa is C or S
KPXXAPTKLEPISVLYLDDSSNVIKFKYENMVVRSXGXH

SEQ ID NO: 28834 - protein, 35 aa, Artificial Sequence; identical to SEQ ID NO: 7592
  GFR-binding peptide
  MOD_RES (1)..(2)..(35): Xaa is C or S
  MOD_RES (16)..(17)..(18)..(19)..(20): Xaa is A or G
  MOD_RES (21)..(22)..(23)..(24): Xaa is A or G or is absent

SEQ ID NO: 28835 - protein, 39 aa, Artificial Sequence
  GFR-binding peptide
  MOD_RES (3)..(4)..(38): Xaa is C or S
  MOD_RES (18)..(19)..(20)..(21)..(22): Xaa is A or G
  MOD_RES (23)..(24)..(25)..(26): Xaa is A or G or is absent
KAXXVPTKLSPISILYKXXXXXXXXXLKYHYGMAVSEXG

SEQ ID NO: 28836 - protein, 35 aa, Artificial Sequence
  GFR-binding peptide
  MOD_RES (1)..(34): Xaa is C or S
  MOD_RES (15)..(16)..(17)..(18)..(19): Xaa is A or G
  MOD_RES (20)..(21)..(22)..(23): Xaa is A or G or is absent
XVPQDLEPISILYLXXXXXXXXXKFKYEMVVKSXK

SEQ ID NO: 28837 - protein, 36 aa, Artificial Sequence
  GFR-binding peptide
  MOD_RES (4)..(5)..(36): Xaa is C or S
ASPXXVSQDLEPISILYLIGKTPKIKFKYEMIVKSX

SEQ ID NO: 28838 - protein, 40 aa, Artificial Sequence; identical to SEQ ID NO: 7597
  GFR-binding peptide
  MOD_RES (5)..(6)..(38)..(40): Xaa is C or S

SEQ ID NO: 28839 - protein, 41 aa, Artificial Sequence
  GFR-binding peptide
  MOD_RES (5)..(6)..(41): Xaa is C or S
  MOD_RES (20)..(21)..(22)..(23)..(24): Xaa is A or G
  MOD_RES (25)..(26)..(27)..(28): Xaa is A or G or is absent
VGKAXXVPTKLSPISVLYIXXXXXXXXXYKQYEEGMSVAEX

SEQ ID NO: 28840 - protein, 37 aa, Artificial Sequence; identical to SEQ ID NO: 7598
  GFR-binding peptide
  MOD_RES (3)..(4): Xaa is C or S
  MOD_RES (18)..(19)..(20)..(21)..(22): Xaa is A or G
  MOD_RES (23)..(24)..(25)..(26): Xaa is A or G or is absent

SEQ ID NO: 28841 - protein, 41 aa, Artificial Sequence
  GFR-binding peptide
  MOD_RES (6)..(7)..(39)..(41): Xaa is C or S
AVPKAXXAPTKLEPISVLYLDSSNNVIKFKYENMVVKAXGX

SEQ ID NO: 28842 - protein, 37 aa, Artificial Sequence
  GFR-binding peptide
  MOD_RES (6)..(7): Xaa is C or S
SIPKAXXVPTELEPISMLYLDEYDKVVKFKYEEMVVE

SEQ ID NO: 28843 - protein, 40 aa, Artificial Sequence
  GFR-binding peptide
  MOD_RES (5)..(6)..(38)..(40): Xaa is C or S
APASXXVPARLEPISILYLDAANNVVKFKYEDMVVEAXGX

SEQ ID NO: 28844 - protein, 39 aa, Artificial Sequence
  GFR-binding peptide
  MOD_RES (5)..(6)..(38): Xaa is C or S
VPKPXXAPTKLEPISVLYLDDSSNVIKFKYENMVVRSXG

SEQ ID NO: 28845 - protein, 40 aa, Artificial Sequence
  GFR-binding peptide
  MOD_RES (4)..(5)..(37)..(39): Xaa is C or S
PKPXXAPTQLSPISVLYIDDSSNVIYKQYENMVVRAXGXH

SEQ ID NO: 28846 - protein, 37 aa, Artificial Sequence
  GFR-binding peptide
  MOD_RES (2)..(3)..(37): Xaa is C or S
  MOD_RES (17)..(18)..(19)..(20)..(21): Xaa is A or G
  MOD_RES (22)..(23)..(24)..(25): Xaa is A or G or is absent
SXXVPARLEPISILYLXXXXXXXXXKFKYEDMVVEAX

SEQ ID NO: 28847 - protein, 35 aa, Artificial Sequence; identical to SEQ ID NO: 7603
  GFR-binding peptide
  MOD_RES (2)..(3)..(34): Xaa is C or S

SEQ ID NO: 28848 - protein, 35 aa, Artificial Sequence
  GFR-binding peptide
  MOD_RES (1)..(2)..(34): Xaa is C or S
XXVPARLSPISILYKDAANNVVLKYHYDMVVEAXG

SEQ ID NO: 28849 - protein, 31 aa, Artificial Sequence; identical to SEQ ID NO: 7604
  GFR-binding peptide

SEQ ID NO: 28850 - protein, 38 aa, Artificial Sequence; identical to SEQ ID NO: 7605
  GFR-binding peptide
  MOD_RES (6)..(7)..(38): Xaa is C or S

SEQ ID NO: 28851 - protein, 34 aa, Artificial Sequence; identical to SEQ ID NO: 7606
  GFR-binding peptide
  MOD_RES (32)..(34): Xaa is C or S

SEQ ID NO: 28852 - protein, 35 aa, Artificial Sequence; identical to SEQ ID NO: 7607
  GFR-binding peptide
  MOD_RES (4)..(5): Xaa is C or S

SEQ ID NO: 28853 - protein, 35 aa, Artificial Sequence; identical to SEQ ID NO: 7608
  GFR-binding peptide
  MOD_RES (2)..(3)..(34): Xaa is C or S

SEQ ID NO: 28854 - protein, 35 aa, Artificial Sequence
  GFR-binding peptide
  MOD_RES (4)..(5): Xaa is C or S
PASXXVPARLSPISILYKDAANNVVLKYHYDMVVE

SEQ ID NO: 28855 - protein, 37 aa, Artificial Sequence
  GFR-binding peptide
  MOD_RES (5)..(37): Xaa is C or S
TKPTXAPTKLEPISVLYLDDSSNVIKFKYENMVVRSX

SEQ ID NO: 28856 - protein, 38 aa, Artificial Sequence
  GFR-binding peptide
  MOD_RES (3)..(4)..(36)..(38): Xaa is C or S
KAXXVPTKLSPISILYIDKGVVTYYKQYEGMAVSEXGX

SEQ ID NO: 28857 - protein, 43 aa, Artificial Sequence
  GFR-binding peptide
  MOD_RES (5)..(6)..(40)..(42): Xaa is C or S
  MOD_RES (20)..(21)..(22)..(23)..(24): Xaa is A or G
  MOD_RES (25)..(26)..(27)..(28): Xaa is A or G or is absent
VPKAXXAPTKLEPISVLYLXXXXXXXXXKFKYENMVVKAXGXH

SEQ ID NO: 28858 - protein, 37 aa, Artificial Sequence
  GFR-binding peptide
  MOD_RES (2)..(3)..(35)..(37): Xaa is C or S
AXXVPTKLSPISILYKDKGVVTYLKYHYGMAVSEXGX

SEQ ID NO: 28859 - protein, 36 aa, Artificial Sequence
  GFR-binding peptide
  MOD_RES (34)..(36): Xaa is C or S
  MOD_RES (14)..(15)..(16)..(17)..(18): Xaa is A or G
  MOD_RES (19)..(20)..(21)..(22): Xaa is A or G or is absent
APTKLSPISVLYIXXXXXXXXXYKQYENMVVKAXGX

SEQ ID NO: 28860 - protein, 35 aa, Artificial Sequence
  GFR-binding peptide
  MOD_RES (5)..(5): Xaa is C or S
TKPTXAPTKLSPISVLYIDDSSNVIYKQYENMVVR

SEQ ID NO: 28861 - protein, 37 aa, Artificial Sequence; identical to SEQ ID NO: 7610
  GFR-binding peptide
  MOD_RES (4)..(5): Xaa is C or S
  MOD_RES (19)..(20)..(21)..(22)..(23): Xaa is A or G
  MOD_RES (24)..(25)..(26)..(27): Xaa is A or G or is absent

SEQ ID NO: 28862 - protein, 32 aa, Artificial Sequence; identical to SEQ ID NO: 7611
  GFR-binding peptide
  MOD_RES (32)..(32): Xaa is C or S

SEQ ID NO: 28863 - protein, 37 aa, Artificial Sequence
  GFR-binding peptide
  MOD_RES (3)..(4): Xaa is C or S
  MOD_RES (18)..(19)..(20)..(21)..(22): Xaa is A or G
  MOD_RES (23)..(24)..(25)..(26): Xaa is A or G or is absent
ASXXVPARLSPISILYKXXXXXXXXXLKYHYDMVVEA

SEQ ID NO: 28864 - protein, 34 aa, Artificial Sequence
  GFR-binding peptide
  MOD_RES (2)..(2): Xaa is C or S
  MOD_RES (16)..(17)..(18)..(19)..(20): Xaa is A or G
  MOD_RES (21)..(22)..(23)..(24): Xaa is A or G or is absent
TXAPTKLEPISVLYLXXXXXXXXXKFKYENMVVR

SEQ ID NO: 28865 - protein, 35 aa, Artificial Sequence; identical to SEQ ID NO: 7613
  GFR-binding peptide
  MOD_RES (1)..(2)..(34): Xaa is C or S

SEQ ID NO: 28866 - protein, 38 aa, Artificial Sequence
  GFR-binding peptide
  MOD_RES (5)..(6): Xaa is C or S
  MOD_RES (20)..(21)..(22)..(23)..(24): Xaa is A or G
  MOD_RES (25)..(26)..(27)..(28): Xaa is A or G or is absent
IPKAXXVPTELEPISMLYLXXXXXXXXXKFKYEEMVVE

SEQ ID NO: 28867 - protein, 39 aa, Artificial Sequence
  GFR-binding peptide
  MOD_RES (5)..(6): Xaa is C or S
  MOD_RES (20)..(21)..(22)..(23)..(24): Xaa is A or G
  MOD_RES (25)..(26)..(27)..(28): Xaa is A or G or is absent
IPKAXXVPTELSPISMLYIXXXXXXXXXYKQYEDMVVEG

SEQ ID NO: 28868 - protein, 40 aa, Artificial Sequence
  GFR-binding peptide
  MOD_RES (5)..(6)..(40): Xaa is C or S
  MOD_RES (20)..(21)..(22)..(23)..(24): Xaa is A or G
  MOD_RES (25)..(26)..(27)..(28): Xaa is A or G or is absent
IPKAXXVPTELEPISMLYLXXXXXXXXXKFKYEEMVVEGX

SEQ ID NO: 28869 - protein, 40 aa, Artificial Sequence
  GFR-binding peptide
  MOD_RES (5)..(6)..(38)..(40): Xaa is C or S
VPKAXXAPTKLEPISVLYLDSSNNVIKFKYENMVVKAXGX

SEQ ID NO: 28870 - protein, 36 aa, Artificial Sequence
  GFR-binding peptide
  MOD_RES (5)..(6): Xaa is C or S
SASPXXVSQDLSPISILYIIGKTPKIYKQYEMIVKS

SEQ ID NO: 28871 - protein, 40 aa, Artificial Sequence
  GFR-binding peptide
  MOD_RES (5)..(39): Xaa is C or S
  MOD_RES (19)..(20)..(21)..(22)..(23): Xaa is A or G
  MOD_RES (24)..(25)..(26)..(27): Xaa is A or G or is absent
TKPTXAPTKLEPISVLYLXXXXXXXXXKFKYENMVVRSXG

SEQ ID NO: 28872 - protein, 36 aa, Artificial Sequence; identical to SEQ ID NO: 7615
  GFR-binding peptide
  MOD_RES (1)..(2)..(36): Xaa is C or S
  MOD_RES (16)..(17)..(18)..(19)..(20): Xaa is A or G
  MOD_RES (21)..(22)..(23)..(24): Xaa is A or G or is absent

SEQ ID NO: 28873 - protein, 40 aa, Artificial Sequence
  GFR-binding peptide
  MOD_RES (2)..(3)..(37)..(39): Xaa is C or S
  MOD_RES (17)..(18)..(19)..(20)..(21): Xaa is A or G
  MOD_RES (22)..(23)..(24)..(25): Xaa is A or G or is absent
PXXAPTKLEPISVLYLXXXXXXXXXKFKYENMVVRSXGXH

SEQ ID NO: 28874 - protein, 37 aa, Artificial Sequence
  GFR-binding peptide
  MOD_RES (4)..(5): Xaa is C or S
  MOD_RES (19)..(20)..(21)..(22)..(23): Xaa is A or G
  MOD_RES (24)..(25)..(26)..(27): Xaa is A or G or is absent
ASPXXVSQDLSPISILYIXXXXXXXXXYKQYEMIVKS

SEQ ID NO: 28875 - protein, 42 aa, Artificial Sequence
  GFR-binding peptide
  MOD_RES (6)..(7)..(39)..(41): Xaa is C or S
KASKAXXVPTKLSPISILYKDKGVVTYLKYHYGMAVSEXGXR

SEQ ID NO: 28876 - protein, 41 aa, Artificial Sequence
  GFR-binding peptide
  MOD_RES (6)..(7)..(40): Xaa is C or S
KVGKAXXVPTKLSPISVLYIDDMGVPTYKQYEEGMSVAEXG

SEQ ID NO: 28877 - protein, 38 aa, Artificial Sequence; identical to SEQ ID NO: 7619
  GFR-binding peptide
  MOD_RES (5)..(6)..(38): Xaa is C or S

SEQ ID NO: 28878 - protein, 32 aa, Artificial Sequence
  GFR-binding peptide
  MOD_RES (32)..(32): Xaa is C or S
VPARLSPISILYKDAANNVVLKYHYDMVVEAX

SEQ ID NO: 28879 - protein, 39 aa, Artificial Sequence
  GFR-binding peptide
  MOD_RES (2)..(3)..(37)..(39): Xaa is C or S
  MOD_RES (17)..(18)..(19)..(20)..(21): Xaa is A or G
  MOD_RES (22)..(23)..(24)..(25): Xaa is A or G or is absent
PXXAPTQLEPISVLYLXXXXXXXXXKFKYENMVVRAXGX

SEQ ID NO: 28880 - protein, 38 aa, Artificial Sequence
  GFR-binding peptide
  MOD_RES (1)..(2)..(36)..(38): Xaa is C or S
  MOD_RES (16)..(17)..(18)..(19)..(20): Xaa is A or G
  MOD_RES (21)..(22)..(23)..(24): Xaa is A or G or is absent
XXVPTKLSPISILYKXXXXXXXXXLKYHYGMAVSEXGX

SEQ ID NO: 28881 - protein, 39 aa, Artificial Sequence
  GFR-binding peptide
  MOD_RES (6)..(7)..(38): Xaa is C or S
ASASPXXVPQDLSPISILYIVGRTPKVYKQYEMVVKSXK

SEQ ID NO: 28882 - protein, 38 aa, Artificial Sequence
  GFR-binding peptide
  MOD_RES (2)..(3)..(37): Xaa is C or S
  MOD_RES (17)..(18)..(19)..(20)..(21): Xaa is A or G
  MOD_RES (22)..(23)..(24)..(25): Xaa is A or G or is absent
PXXAPTKLSPISVLYIXXXXXXXXXYKQYENMVVRSXG

SEQ ID NO: 28883 - protein, 42 aa, Artificial Sequence; identical to SEQ ID NO: 7623
  GFR-binding peptide
  MOD_RES (6)..(7)..(40)..(42): Xaa is C or S
  MOD_RES (21)..(22)..(23)..(24)..(25): Xaa is A or G
  MOD_RES (26)..(27)..(28)..(29): Xaa is A or G or is absent

SEQ ID NO: 28884 - protein, 40 aa, Artificial Sequence
  GFR-binding peptide
  MOD_RES (4)..(38)..(40): Xaa is C or S
  MOD_RES (18)..(19)..(20)..(21)..(22): Xaa is A or G
  MOD_RES (23)..(24)..(25)..(26): Xaa is A or G or is absent
KPTXAPTKLSPISVLYIXXXXXXXXXYKQYENMVVRSXGX

SEQ ID NO: 28885 - protein, 38 aa, Artificial Sequence
  GFR-binding peptide
  MOD_RES (35)..(37): Xaa is C or S
  MOD_RES (14)..(15)..(16)..(17)..(18): Xaa is A or G
  MOD_RES (19)..(20)..(21)..(22): Xaa is A or G or is absent
VPTKLEPISVLYLXXXXXXXXXKFKYEEGMSVAEXGXR

SEQ ID NO: 28886 - protein, 41 aa, Artificial Sequence
  GFR-binding peptide
  MOD_RES (6)..(7)..(41): Xaa is C or S
  MOD_RES (21)..(22)..(23)..(24)..(25): Xaa is A or G
  MOD_RES (26)..(27)..(28)..(29): Xaa is A or G or is absent
KASKAXXVPTKLEPISILYLXXXXXXXXXKFKYEGMAVSEX

SEQ ID NO: 28887 - protein, 38 aa, Artificial Sequence
  GFR-binding peptide
  MOD_RES (5)..(6): Xaa is C or S
  MOD_RES (20)..(21)..(22)..(23)..(24): Xaa is A or G
  MOD_RES (25)..(26)..(27)..(28): Xaa is A or G or is absent
ASKAXXVPTKLNAISILYFXXXXXXXXXLKKYRGMAVS

SEQ ID NO: 28888 - protein, 35 aa, Artificial Sequence; identical to SEQ ID NO: 7624
  GFR-binding peptide
  MOD_RES (3)..(35): Xaa is C or S

SEQ ID NO: 28889 - protein, 39 aa, Artificial Sequence
  GFR-binding peptide
  MOD_RES (6)..(7)..(38): Xaa is C or S
ASASPXXVPQDLEPISILYLVGRTPKVKFKYEMVVKSXK

SEQ ID NO: 28890 - protein, 40 aa, Artificial Sequence
  GFR-binding peptide
  MOD_RES (6)..(7)..(39): Xaa is C or S
KIPKAXXVPTELSPISMLYIDENEKVVYKQYEDMVVEGXG

SEQ ID NO: 28891 - protein, 38 aa, Artificial Sequence
  GFR-binding peptide
  MOD_RES (6)..(7)..(38): Xaa is C or S
ASASPXXVPQDLSPISILYIVGRTPKVYKQYEMVVKSX

SEQ ID NO: 28892 - protein, 38 aa, Artificial Sequence
  GFR-binding peptide
  MOD_RES (3)..(4)..(38): Xaa is C or S
  MOD_RES (18)..(19)..(20)..(21)..(22): Xaa is A or G
  MOD_RES (23)..(24)..(25)..(26): Xaa is A or G or is absent
KAXXVPTKLNAISILYFXXXXXXXXXLKKYRGMAVSEX

SEQ ID NO: 28893 - protein, 34 aa, Artificial Sequence; identical to SEQ ID NO: 7626
  GFR-binding peptide
  MOD_RES (1)..(2)..(33): Xaa is C or S

SEQ ID NO: 28894 - protein, 34 aa, Artificial Sequence
  GFR-binding peptide
  MOD_RES (3)..(4): Xaa is C or S
KAXXVPTKLSPISILYKDKGVVTYLKYHYGMAVS

SEQ ID NO: 28895 - protein, 40 aa, Artificial Sequence
  GFR-binding peptide
  MOD_RES (5)..(37)..(39): Xaa is C or S
TKPTXAPTKLSPISVLYIDDSSNVIYKQYENMVVRSXGXH

SEQ ID NO: 28896 - protein, 39 aa, Artificial Sequence; identical to SEQ ID NO: 7627
  GFR-binding peptide
  MOD_RES (3)..(4)..(37)..(39): Xaa is C or S
  MOD_RES (18)..(19)..(20)..(21)..(22): Xaa is A or G
  MOD_RES (23)..(24)..(25)..(26): Xaa is A or G or is absent

SEQ ID NO: 28897 - protein, 36 aa, Artificial Sequence
  GFR-binding peptide
  MOD_RES (1)..(35): Xaa is C or S
  MOD_RES (15)..(16)..(17)..(18)..(19): Xaa is A or G
  MOD_RES (20)..(21)..(22)..(23): Xaa is A or G or is absent
XAPTKLEPISVLYLXXXXXXXXXKFKYENMVVRSXG

SEQ ID NO: 28898 - protein, 35 aa, Artificial Sequence
  GFR-binding peptide
  MOD_RES (1)..(2): Xaa is C or S
  MOD_RES (16)..(17)..(18)..(19)..(20): Xaa is A or G
  MOD_RES (21)..(22)..(23)..(24): Xaa is A or G or is absent
XXVPARLSPISILYKXXXXXXXXXLKYHYDMVVEA

SEQ ID NO: 28899 - protein, 42 aa, Artificial Sequence; identical to SEQ ID NO: 7628
  GFR-binding peptide
  MOD_RES (5)..(6)..(40)..(42): Xaa is C or S
  MOD_RES (20)..(21)..(22)..(23)..(24): Xaa is A or G
  MOD_RES (25)..(26)..(27)..(28): Xaa is A or G or is absent

SEQ ID NO: 28900 - protein, 36 aa, Artificial Sequence; identical to SEQ ID NO: 7629
  GFR-binding peptide
  MOD_RES (3)..(4): Xaa is C or S
  MOD_RES (18)..(19)..(20)..(21)..(22): Xaa is A or G
  MOD_RES (23)..(24)..(25)..(26): Xaa is A or G or is absent

SEQ ID NO: 28901 - protein, 31 aa, Artificial Sequence
  GFR-binding peptide
VPTKLSPISILYKDKGVVTYLKYHYGMAVSE

SEQ ID NO: 28902 - protein, 34 aa, Artificial Sequence
  GFR-binding peptide
  MOD_RES (31)..(33): Xaa is C or S
VPQALSPISILYIVGRKPKVYKQYEMIVRSXKXS

SEQ ID NO: 28903 - protein, 38 aa, Artificial Sequence
  GFR-binding peptide
  MOD_RES (4)..(5): Xaa is C or S
  MOD_RES (19)..(20)..(21)..(22)..(23): Xaa is A or G
  MOD_RES (24)..(25)..(26)..(27): Xaa is A or G or is absent
PKPXXAPTQLEPISVLYLXXXXXXXXXKFKYENMVVRA

SEQ ID NO: 28904 - protein, 44 aa, Artificial Sequence
  GFR-binding peptide
  MOD_RES (6)..(7)..(41)..(43): Xaa is C or S
  MOD_RES (21)..(22)..(23)..(24)..(25): Xaa is A or G
  MOD_RES (26)..(27)..(28)..(29): Xaa is A or G or is absent
SIPKAXXVPTELSPISMLYIXXXXXXXXXYKQYEEMVVEGXGXR

SEQ ID NO: 28905 - protein, 38 aa, Artificial Sequence
  GFR-binding peptide
  MOD_RES (4)..(5)..(37): Xaa is C or S
PKPXXAPTQLSPISVLYIDDSSNVIYKQYENMVVRAXG

SEQ ID NO: 28906 - protein, 36 aa, Artificial Sequence
  GFR-binding peptide
  MOD_RES (1)..(2)..(34)..(36): Xaa is C or S
XXVPARLSPISILYKDAANNVVLKYHYDMVVEAXGX

SEQ ID NO: 28907 - protein, 43 aa, Artificial Sequence
  GFR-binding peptide
  MOD_RES (6)..(7)..(41)..(43): Xaa is C or S
  MOD_RES (21)..(22)..(23)..(24)..(25): Xaa is A or G
  MOD_RES (26)..(27)..(28)..(29): Xaa is A or G or is absent
KASKAXXVPTKLSPISILYIXXXXXXXXXYKQYEGMAVSEXGX

SEQ ID NO: 28908 - protein, 38 aa, Artificial Sequence
  GFR-binding peptide
  MOD_RES (2)..(3)..(35)..(37): Xaa is C or S
SXXVPARLSPISILYKDAANNVVLKYHYDMVVEAXGXR

SEQ ID NO: 28909 - protein, 42 aa, Artificial Sequence
  GFR-binding peptide
  MOD_RES (4)..(5)..(39)..(41): Xaa is C or S
  MOD_RES (19)..(20)..(21)..(22)..(23): Xaa is A or G
  MOD_RES (24)..(25)..(26)..(27): Xaa is A or G or is absent
PASXXVPARLEPISILYLXXXXXXXXXKFKYEDMVVEAXGXR

SEQ ID NO: 28910 - protein, 37 aa, Artificial Sequence; identical to SEQ ID NO: 7634
  GFR-binding peptide
  MOD_RES (2)..(3)..(37): Xaa is C or S
  MOD_RES (17)..(18)..(19)..(20)..(21): Xaa is A or G
  MOD_RES (22)..(23)..(24)..(25): Xaa is A or G or is absent

SEQ ID NO: 28911 - protein, 36 aa, Artificial Sequence; identical to SEQ ID NO: 7635
  GFR-binding peptide
  MOD_RES (2)..(3)..(34)..(36): Xaa is C or S

SEQ ID NO: 28912 - protein, 31 aa, Artificial Sequence
  GFR-binding peptide
  MOD_RES (31)..(31): Xaa is C or S
VPQDLEPISILYLVGRTPKVKFKYEMVVKSX

SEQ ID NO: 28913 - protein, 37 aa, Artificial Sequence; identical to SEQ ID NO: 7636
  GFR-binding peptide
  MOD_RES (3)..(4)..(36): Xaa is C or S

SEQ ID NO: 28914 - protein, 34 aa, Artificial Sequence
  GFR-binding peptide
  MOD_RES (33)..(33): Xaa is C or S
VPTKLSPISVLYIDDMGVPTYKQYEEGMSVAEXG

SEQ ID NO: 28915 - protein, 38 aa, Artificial Sequence; identical to SEQ ID NO: 7637
  GFR-binding peptide
  MOD_RES (2)..(3)..(37): Xaa is C or S
  MOD_RES (17)..(18)..(19)..(20)..(21): Xaa is A or G
  MOD_RES (22)..(23)..(24)..(25): Xaa is A or G or is absent

SEQ ID NO: 28916 - protein, 35 aa, Artificial Sequence
  GFR-binding peptide
  MOD_RES (1)..(2)..(34): Xaa is C or S
XXVPTELSPISMLYIDEYDKVVYKQYEEMVVEGXG

SEQ ID NO: 28917 - protein, 38 aa, Artificial Sequence; identical to SEQ ID NO: 7639
  GFR-binding peptide
  MOD_RES (4)..(5): Xaa is C or S
  MOD_RES (19)..(20)..(21)..(22)..(23): Xaa is A or G
  MOD_RES (24)..(25)..(26)..(27): Xaa is A or G or is absent

SEQ ID NO: 28918 - protein, 41 aa, Artificial Sequence; identical to SEQ ID NO: 7640
  GFR-binding peptide
  MOD_RES (3)..(4)..(38)..(40): Xaa is C or S
  MOD_RES (18)..(19)..(20)..(21)..(22): Xaa is A or G
  MOD_RES (23)..(24)..(25)..(26): Xaa is A or G or is absent

SEQ ID NO: 28919 - protein, 40 aa, Artificial Sequence; identical to SEQ ID NO: 7641
  GFR-binding peptide
  MOD_RES (6)..(7): Xaa is C or S
  MOD_RES (21)..(22)..(23)..(24)..(25): Xaa is A or G
  MOD_RES (26)..(27)..(28)..(29): Xaa is A or G or is absent

SEQ ID NO: 28920 - protein, 38 aa, Artificial Sequence
  GFR-binding peptide
  MOD_RES (4)..(5): Xaa is C or S
  MOD_RES (19)..(20)..(21)..(22)..(23): Xaa is A or G
  MOD_RES (24)..(25)..(26)..(27): Xaa is A or G or is absent
PKAXXVPTELSPISMLYIXXXXXXXXXYKQYEDMVVEG

SEQ ID NO: 28921 - protein, 42 aa, Artificial Sequence; identical to SEQ ID NO: 7643
  GFR-binding peptide
  MOD_RES (6)..(7)..(41): Xaa is C or S
  MOD_RES (21)..(22)..(23)..(24)..(25): Xaa is A or G
  MOD_RES (26)..(27)..(28)..(29): Xaa is A or G or is absent

SEQ ID NO: 28922 - protein, 37 aa, Artificial Sequence
  GFR-binding peptide
  MOD_RES (1)..(35)..(37): Xaa is C or S
  MOD_RES (15)..(16)..(17)..(18)..(19): Xaa is A or G
  MOD_RES (20)..(21)..(22)..(23): Xaa is A or G or is absent
XVPARLEPISILYLXXXXXXXXXKFKYEDMVVEAXGX

SEQ ID NO: 28923 - protein, 33 aa, Artificial Sequence
  GFR-binding peptide
  MOD_RES (1)..(32): Xaa is C or S
XVSQDLSPISILYIIGKTPKIYKQYEMIVKSXK

SEQ ID NO: 28924 - protein, 43 aa, Artificial Sequence
  GFR-binding peptide
  MOD_RES (6)..(7)..(41)..(43): Xaa is C or S
  MOD_RES (21)..(22)..(23)..(24)..(25): Xaa is A or G
  MOD_RES (26)..(27)..(28)..(29): Xaa is A or G or is absent
KASKAXXVPTKLEPISILYLXXXXXXXXXKFKYEGMAVSEXGX

SEQ ID NO: 28925 - protein, 38 aa, Artificial Sequence
  GFR-binding peptide
  MOD_RES (3)..(4)..(38): Xaa is C or S
  MOD_RES (18)..(19)..(20)..(21)..(22): Xaa is A or G
  MOD_RES (23)..(24)..(25)..(26): Xaa is A or G or is absent
KPXXAPTKLSPISVLYIXXXXXXXXXYKQYENMVVRSX

SEQ ID NO: 28926 - protein, 42 aa, Artificial Sequence; identical to SEQ ID NO: 7645
  GFR-binding peptide
  MOD_RES (5)..(6)..(39)..(41): Xaa is C or S
  MOD_RES (20)..(21)..(22)..(23)..(24): Xaa is A or G
  MOD_RES (25)..(26)..(27)..(28): Xaa is A or G or is absent

SEQ ID NO: 28927 - protein, 40 aa, Artificial Sequence
  GFR-binding peptide
  MOD_RES (2)..(3)..(37)..(39): Xaa is C or S
  MOD_RES (17)..(18)..(19)..(20)..(21): Xaa is A or G
  MOD_RES (22)..(23)..(24)..(25): Xaa is A or G or is absent
AXXVPTELEPISMLYLXXXXXXXXXKFKYEDMVVEGXGXR

SEQ ID NO: 28928 - protein, 40 aa, Artificial Sequence
  GFR-binding peptide
  MOD_RES (1)..(2)..(37)..(39): Xaa is C or S
  MOD_RES (16)..(17)..(18)..(19)..(20): Xaa is A or G
  MOD_RES (21)..(22)..(23)..(24): Xaa is A or G or is absent
XXVPTKLEPISVLYLXXXXXXXXXKFKYEEGMSVAEXGXR

SEQ ID NO: 28929 - protein, 36 aa, Artificial Sequence
  GFR-binding peptide
  MOD_RES (4)..(5): Xaa is C or S
PKAXXVPTELSPISMLYIDEYDKVVYKQYEEMVVEG

SEQ ID NO: 28930 - protein, 36 aa, Artificial Sequence
  GFR-binding peptide
  MOD_RES (5)..(6): Xaa is C or S
APASXXVPARLSPISILYKDAANNVVLKYHYDMVVE

SEQ ID NO: 28931 - protein, 38 aa, Artificial Sequence
  GFR-binding peptide
  MOD_RES (3)..(4)..(38): Xaa is C or S
  MOD_RES (18)..(19)..(20)..(21)..(22): Xaa is A or G
  MOD_RES (23)..(24)..(25)..(26): Xaa is A or G or is absent
KAXXAPTKLEPISVLYLXXXXXXXXXKFKYENMVVKAX

SEQ ID NO: 28932 - protein, 37 aa, Artificial Sequence
  GFR-binding peptide
  MOD_RES (4)..(5): Xaa is C or S
  MOD_RES (19)..(20)..(21)..(22)..(23): Xaa is A or G
  MOD_RES (24)..(25)..(26)..(27): Xaa is A or G or is absent
PKPXXAPTQLSPISVLYIXXXXXXXXXYKQYENMVVR

SEQ ID NO: 28933 - protein, 41 aa, Artificial Sequence; identical to SEQ ID NO: 7651
  GFR-binding peptide
  MOD_RES (5)..(6)..(40): Xaa is C or S
  MOD_RES (20)..(21)..(22)..(23)..(24): Xaa is A or G
  MOD_RES (25)..(26)..(27)..(28): Xaa is A or G or is absent

SEQ ID NO: 28934 - protein, 34 aa, Artificial Sequence
  GFR-binding peptide
  MOD_RES (1)..(33): Xaa is C or S
XVPARLEPISILYLDAANNVVKFKYEDMVVEAXG

SEQ ID NO: 28935 - protein, 37 aa, Artificial Sequence; identical to SEQ ID NO: 7653
  GFR-binding peptide
  MOD_RES (1)..(2)..(35)..(37): Xaa is C or S
  MOD_RES (16)..(17)..(18)..(19)..(20): Xaa is A or G
  MOD_RES (21)..(22)..(23)..(24): Xaa is A or G or is absent

SEQ ID NO: 28936 - protein, 35 aa, Artificial Sequence
  GFR-binding peptide
  MOD_RES (32)..(34): Xaa is C or S
APTKLEPISVLYLDDSSNVIKFKYENMVVRSXGXH

SEQ ID NO: 28937 - protein, 33 aa, Artificial Sequence
  GFR-binding peptide
  MOD_RES (32)..(32): Xaa is C or S
VPTKLSPISILYKDKGVVTYLKYHYGMAVSEXG

SEQ ID NO: 28938 - protein, 36 aa, Artificial Sequence
  GFR-binding peptide
  MOD_RES (4)..(5): Xaa is C or S
PKAXXVPTELEPISMLYLDENEKVVKFKYEDMVVEG

SEQ ID NO: 28939 - protein, 37 aa, Artificial Sequence
  GFR-binding peptide
  MOD_RES (3)..(4): Xaa is C or S
  MOD_RES (18)..(19)..(20)..(21)..(22): Xaa is A or G
  MOD_RES (23)..(24)..(25)..(26): Xaa is A or G or is absent
KAXXVPTELEPISMLYLXXXXXXXXXKFKYEDMVVEG

SEQ ID NO: 28940 - protein, 40 aa, Artificial Sequence
  GFR-binding peptide
  MOD_RES (4)..(38)..(40): Xaa is C or S
  MOD_RES (18)..(19)..(20)..(21)..(22): Xaa is A or G
  MOD_RES (23)..(24)..(25)..(26): Xaa is A or G or is absent
KPTXAPTKLEPISVLYLXXXXXXXXXKFKYENMVVRSXGX

SEQ ID NO: 28941 - protein, 33 aa, Artificial Sequence
  GFR-binding peptide
  MOD_RES (1)..(1): Xaa is C or S
  MOD_RES (15)..(16)..(17)..(18)..(19): Xaa is A or G
  MOD_RES (20)..(21)..(22)..(23): Xaa is A or G or is absent
XVPTKLSPISILYKXXXXXXXXXLKYHYGMAVS

SEQ ID NO: 28942 - protein, 36 aa, Artificial Sequence; identical to SEQ ID NO: 7658
  GFR-binding peptide
  MOD_RES (5)..(6): Xaa is C or S

SEQ ID NO: 28943 - protein, 36 aa, Artificial Sequence
  GFR-binding peptide
  MOD_RES (33)..(35): Xaa is C or S
  MOD_RES (14)..(15)..(16)..(17)..(18): Xaa is A or G
  MOD_RES (19)..(20)..(21)..(22): Xaa is A or G or is absent
VPQALEPISILYLXXXXXXXXXKFKYEMIVRSXKXS

SEQ ID NO: 28944 - protein, 40 aa, Artificial Sequence; identical to SEQ ID NO: 7660
  GFR-binding peptide
  MOD_RES (3)..(4)..(38)..(40): Xaa is C or S
  MOD_RES (18)..(19)..(20)..(21)..(22): Xaa is A or G
  MOD_RES (23)..(24)..(25)..(26): Xaa is A or G or is absent

SEQ ID NO: 28945 - protein, 37 aa, Artificial Sequence
  GFR-binding peptide
  MOD_RES (34)..(36): Xaa is C or S
  MOD_RES (14)..(15)..(16)..(17)..(18): Xaa is A or G
  MOD_RES (19)..(20)..(21)..(22): Xaa is A or G or is absent
VPARLSPISILYIXXXXXXXXXYKQYEDMVVEAXGXR

SEQ ID NO: 28946 - protein, 36 aa, Artificial Sequence
  GFR-binding peptide
  MOD_RES (3)..(4): Xaa is C or S
  MOD_RES (18)..(19)..(20)..(21)..(22): Xaa is A or G
  MOD_RES (23)..(24)..(25)..(26): Xaa is A or G or is absent
SPXXVSQDLEPISILYLXXXXXXXXXKFKYEMIVKS

SEQ ID NO: 28947 - protein, 39 aa, Artificial Sequence
  GFR-binding peptide
  MOD_RES (3)..(4)..(39): Xaa is C or S
  MOD_RES (18)..(19)..(20)..(21)..(22): Xaa is A or G
  MOD_RES (23)..(24)..(25)..(26): Xaa is A or G or is absent
KAXXVPTKLEPISVLYLXXXXXXXXXKFKYEEGMSVAEX

SEQ ID NO: 28948 - protein, 35 aa, Artificial Sequence
  GFR-binding peptide
  MOD_RES (34)..(34): Xaa is C or S
  MOD_RES (14)..(15)..(16)..(17)..(18): Xaa is A or G
  MOD_RES (19)..(20)..(21)..(22): Xaa is A or G or is absent
VPTKLSPISILYIXXXXXXXXXYKQYEGMAVSEXG

SEQ ID NO: 28949 - protein, 40 aa, Artificial Sequence; identical to SEQ ID NO: 7662
  GFR-binding peptide
  MOD_RES (5)..(6): Xaa is C or S
  MOD_RES (20)..(21)..(22)..(23)..(24): Xaa is A or G
  MOD_RES (25)..(26)..(27)..(28): Xaa is A or G or is absent

SEQ ID NO: 28950 - protein, 38 aa, Artificial Sequence; identical to SEQ ID NO: 7663
  GFR-binding peptide
  MOD_RES (4)..(5)..(36)..(38): Xaa is C or S

SEQ ID NO: 28951 - protein, 42 aa, Artificial Sequence
  GFR-binding peptide
  MOD_RES (6)..(7)..(40)..(42): Xaa is C or S
  MOD_RES (21)..(22)..(23)..(24)..(25): Xaa is A or G
  MOD_RES (26)..(27)..(28)..(29): Xaa is A or G or is absent
ASASPXXVSQDLEPISILYLXXXXXXXXXKFKYEMIVKSXKX

SEQ ID NO: 28952 - protein, 30 aa, Artificial Sequence
  GFR-binding peptide
VPTELSPISMLYIDEYDKVVYKQYEEMVVE

SEQ ID NO: 28953 - protein, 37 aa, Artificial Sequence; identical to SEQ ID NO: 7666
  GFR-binding peptide
  MOD_RES (2)..(3)..(34)..(36): Xaa is C or S

SEQ ID NO: 28954 - protein, 37 aa, Artificial Sequence
  GFR-binding peptide
  MOD_RES (3)..(4)..(36): Xaa is C or S
KPXXAPTQLSPISVLYIDDSSNVIYKQYENMVVRAXG

SEQ ID NO: 28955 - protein, 39 aa, Artificial Sequence
  GFR-binding peptide
  MOD_RES (4)..(5)..(36)..(38): Xaa is C or S
AAPXXVPQALEPISILYLVGRKPKVKFKYEMIVRSXKXS

SEQ ID NO: 28956 - protein, 35 aa, Artificial Sequence
  GFR-binding peptide
  MOD_RES (2)..(3)..(35): Xaa is C or S
PXXAPTKLEPISVLYLDDSSNVIKFKYENMVVRSX

SEQ ID NO: 28957 - protein, 34 aa, Artificial Sequence; identical to SEQ ID NO: 7669
  GFR-binding peptide
  MOD_RES (1)..(2): Xaa is C or S
  MOD_RES (16)..(17)..(18)..(19)..(20): Xaa is A or G
  MOD_RES (21)..(22)..(23)..(24): Xaa is A or G or is absent

SEQ ID NO: 28958 - protein, 37 aa, Artificial Sequence
  GFR-binding peptide
  MOD_RES (2)..(3): Xaa is C or S
  MOD_RES (17)..(18)..(19)..(20)..(21): Xaa is A or G
  MOD_RES (22)..(23)..(24)..(25): Xaa is A or G or is absent
AXXVPTKLEPISVLYLXXXXXXXXXKFKYEEGMSVAE

SEQ ID NO: 28959 - protein, 40 aa, Artificial Sequence
  GFR-binding peptide
  MOD_RES (3)..(37)..(39): Xaa is C or S
  MOD_RES (17)..(18)..(19)..(20)..(21): Xaa is A or G
  MOD_RES (22)..(23)..(24)..(25): Xaa is A or G or is absent
PTXAPTKLSPISVLYIXXXXXXXXXYKQYENMVVRSXGXH

SEQ ID NO: 28960 - protein, 34 aa, Artificial Sequence; identical to SEQ ID NO: 7671
  GFR-binding peptide
  MOD_RES (32)..(34): Xaa is C or S

SEQ ID NO: 28961 - protein, 38 aa, Artificial Sequence
  GFR-binding peptide
  MOD_RES (3)..(4)..(37): Xaa is C or S
  MOD_RES (18)..(19)..(20)..(21)..(22): Xaa is A or G
  MOD_RES (23)..(24)..(25)..(26): Xaa is A or G or is absent
APXXVPQALSPISILYIXXXXXXXXXYKQYEMIVRSXK

SEQ ID NO: 28962 - protein, 36 aa, Artificial Sequence
  GFR-binding peptide
  MOD_RES (1)..(35): Xaa is C or S
  MOD_RES (15)..(16)..(17)..(18)..(19): Xaa is A or G
  MOD_RES (20)..(21)..(22)..(23): Xaa is A or G or is absent
XVPARLEPISILYLXXXXXXXXXKFKYEDMVVEAXG

SEQ ID NO: 28963 - protein, 38 aa, Artificial Sequence
  GFR-binding peptide
  MOD_RES (1)..(2)..(35)..(37): Xaa is C or S
XXVPTKLEPISVLYLDDMGVPTKFKYEEGMSVAEXGXR

SEQ ID NO: 28964 - protein, 35 aa, Artificial Sequence
  GFR-binding peptide
  MOD_RES (32)..(34): Xaa is C or S
VPTELSPISMLYIDENEKVVYKQYEDMVVEGXGXR

SEQ ID NO: 28965 - protein, 44 aa, Artificial Sequence
  GFR-binding peptide
  MOD_RES (7)..(41)..(43): Xaa is C or S
  MOD_RES (21)..(22)..(23)..(24)..(25): Xaa is A or G
  MOD_RES (26)..(27)..(28)..(29): Xaa is A or G or is absent
HVTKPTXAPTKLEPISVLYLXXXXXXXXXKFKYENMVVRSXGXH

SEQ ID NO: 28966 - protein, 42 aa, Artificial Sequence
  GFR-binding peptide
  MOD_RES (5)..(6)..(40)..(42): Xaa is C or S
  MOD_RES (20)..(21)..(22)..(23)..(24): Xaa is A or G
  MOD_RES (25)..(26)..(27)..(28): Xaa is A or G or is absent
ASKAXXVPTKLEPISILYLXXXXXXXXXKFKYEGMAVSEXGX

SEQ ID NO: 28967 - protein, 36 aa, Artificial Sequence; identical to SEQ ID NO: 7673
  GFR-binding peptide
  MOD_RES (2)..(3)..(35): Xaa is C or S

SEQ ID NO: 28968 - protein, 32 aa, Artificial Sequence
  GFR-binding peptide
  MOD_RES (14)..(15)..(16)..(17)..(18): Xaa is A or G
  MOD_RES (19)..(20)..(21)..(22): Xaa is A or G or is absent
VPTKLSPISILYKXXXXXXXXXLKYHYGMAVS

SEQ ID NO: 28969 - protein, 36 aa, Artificial Sequence; identical to SEQ ID NO: 7676
  GFR-binding peptide
  MOD_RES (5)..(6): Xaa is C or S

SEQ ID NO: 28970 - protein, 32 aa, Artificial Sequence
  GFR-binding peptide
  MOD_RES (32)..(32): Xaa is C or S
VPARLNAISILYFDAANNVVLKKYRDMVVEAX

SEQ ID NO: 28971 - protein, 40 aa, Artificial Sequence
  GFR-binding peptide
  MOD_RES (3)..(4)..(37)..(39): Xaa is C or S
  MOD_RES (18)..(19)..(20)..(21)..(22): Xaa is A or G
  MOD_RES (23)..(24)..(25)..(26): Xaa is A or G or is absent
APXXVPQALEPISILYLXXXXXXXXXKFKYEMIVRSXKXS

SEQ ID NO: 28972 - protein, 34 aa, Artificial Sequence; identical to SEQ ID NO: 7677
  GFR-binding peptide
  MOD_RES (1)..(2)..(34): Xaa is C or S

SEQ ID NO: 28973 - protein, 37 aa, Artificial Sequence
  GFR-binding peptide
  MOD_RES (5)..(6): Xaa is C or S
VPKAXXAPTKLEPISVLYLDSSNNVIKFKYENMVVKA

SEQ ID NO: 28974 - protein, 36 aa, Artificial Sequence
  GFR-binding peptide
  MOD_RES (5)..(6): Xaa is C or S
ASKAXXVPTKLSPISILYIDKGVVTYYKQYEGMAVS

SEQ ID NO: 28975 - protein, 32 aa, Artificial Sequence; identical to SEQ ID NO: 7678
  GFR-binding peptide
  MOD_RES (32)..(32): Xaa is C or S

SEQ ID NO: 28976 - protein, 39 aa, Artificial Sequence; identical to SEQ ID NO: 7679
  GFR-binding peptide
  MOD_RES (3)..(4)..(37)..(39): Xaa is C or S
  MOD_RES (18)..(19)..(20)..(21)..(22): Xaa is A or G
  MOD_RES (23)..(24)..(25)..(26): Xaa is A or G or is absent

SEQ ID NO: 28977 - protein, 37 aa, Artificial Sequence; identical to SEQ ID NO: 7680
  GFR-binding peptide
  MOD_RES (1)..(35)..(37): Xaa is C or S
  MOD_RES (15)..(16)..(17)..(18)..(19): Xaa is A or G
  MOD_RES (20)..(21)..(22)..(23): Xaa is A or G or is absent

SEQ ID NO: 28978 - protein, 35 aa, Artificial Sequence; identical to SEQ ID NO: 7682
  GFR-binding peptide
  MOD_RES (4)..(5): Xaa is C or S

SEQ ID NO: 28979 - protein, 41 aa, Artificial Sequence; identical to SEQ ID NO: 7683
  GFR-binding peptide
  MOD_RES (6)..(7)..(40): Xaa is C or S
  MOD_RES (21)..(22)..(23)..(24)..(25): Xaa is A or G
  MOD_RES (26)..(27)..(28)..(29): Xaa is A or G or is absent

SEQ ID NO: 28980 - protein, 35 aa, Artificial Sequence
  GFR-binding peptide
  MOD_RES (1)..(35): Xaa is C or S
  MOD_RES (15)..(16)..(17)..(18)..(19): Xaa is A or G
  MOD_RES (20)..(21)..(22)..(23): Xaa is A or G or is absent
XVPTELSPISMLYIXXXXXXXXXYKQYEDMVVEGX

SEQ ID NO: 28981 - protein, 41 aa, Artificial Sequence; identical to SEQ ID NO: 7684
  GFR-binding peptide
  MOD_RES (6)..(7)..(40): Xaa is C or S
  MOD_RES (21)..(22)..(23)..(24)..(25): Xaa is A or G
  MOD_RES (26)..(27)..(28)..(29): Xaa is A or G or is absent

SEQ ID NO: 28982 - protein, 33 aa, Artificial Sequence; identical to SEQ ID NO: 7685
  GFR-binding peptide
  MOD_RES (2)..(3): Xaa is C or S

SEQ ID NO: 28983 - protein, 40 aa, Artificial Sequence; identical to SEQ ID NO: 7686
  GFR-binding peptide
  MOD_RES (5)..(6)..(39): Xaa is C or S

SEQ ID NO: 28984 - protein, 33 aa, Artificial Sequence
  GFR-binding peptide
  MOD_RES (14)..(15)..(16)..(17)..(18): Xaa is A or G
  MOD_RES (19)..(20)..(21)..(22): Xaa is A or G or is absent
VPARLSPISILYIXXXXXXXXXYKQYEDMVVEA

SEQ ID NO: 28985 - protein, 39 aa, Artificial Sequence; identical to SEQ ID NO: 7690
  GFR-binding peptide
  MOD_RES (6)..(7): Xaa is C or S
  MOD_RES (21)..(22)..(23)..(24)..(25): Xaa is A or G
  MOD_RES (26)..(27)..(28)..(29): Xaa is A or G or is absent

SEQ ID NO: 28986 - protein, 34 aa, Artificial Sequence; identical to SEQ ID NO: 7691
  GFR-binding peptide
  MOD_RES (1)..(2)..(33): Xaa is C or S

SEQ ID NO: 28987 - protein, 34 aa, Artificial Sequence
  GFR-binding peptide
  MOD_RES (1)..(2): Xaa is C or S
  MOD_RES (16)..(17)..(18)..(19)..(20): Xaa is A or G
  MOD_RES (21)..(22)..(23)..(24): Xaa is A or G or is absent
XXVPQDLEPISILYLXXXXXXXXXKFKYEMVVKS

SEQ ID NO: 28988 - protein, 40 aa, Artificial Sequence; identical to SEQ ID NO: 7697
  GFR-binding peptide
  MOD_RES (2)..(3)..(37)..(39): Xaa is C or S
  MOD_RES (17)..(18)..(19)..(20)..(21): Xaa is A or G
  MOD_RES (22)..(23)..(24)..(25): Xaa is A or G or is absent

SEQ ID NO: 28989 - protein, 40 aa, Artificial Sequence
  GFR-binding peptide
  MOD_RES (5)..(6)..(40): Xaa is C or S
  MOD_RES (20)..(21)..(22)..(23)..(24): Xaa is A or G
  MOD_RES (25)..(26)..(27)..(28): Xaa is A or G or is absent
ASKAXXVPTKLSPISILYIXXXXXXXXXYKQYEGMAVSEX

SEQ ID NO: 28990 - protein, 38 aa, Artificial Sequence; identical to SEQ ID NO: 7698
  GFR-binding peptide
  MOD_RES (5)..(6): Xaa is C or S
  MOD_RES (20)..(21)..(22)..(23)..(24): Xaa is A or G
  MOD_RES (25)..(26)..(27)..(28): Xaa is A or G or is absent

SEQ ID NO: 28991 - protein, 39 aa, Artificial Sequence
  GFR-binding peptide
  MOD_RES (1)..(2)..(36)..(38): Xaa is C or S
  MOD_RES (16)..(17)..(18)..(19)..(20): Xaa is A or G
  MOD_RES (21)..(22)..(23)..(24): Xaa is A or G or is absent
XXVPTKLSPISILYKXXXXXXXXXLKYHYGMAVSEXGXR

SEQ ID NO: 28992 - protein, 38 aa, Artificial Sequence
  GFR-binding peptide
  MOD_RES (1)..(2)..(36)..(38): Xaa is C or S
  MOD_RES (16)..(17)..(18)..(19)..(20): Xaa is A or G
  MOD_RES (21)..(22)..(23)..(24): Xaa is A or G or is absent
XXVPTELSPISMLYIXXXXXXXXXYKQYEDMVVEGXGX

SEQ ID NO: 28993 - protein, 32 aa, Artificial Sequence
  GFR-binding peptide
  MOD_RES (14)..(15)..(16)..(17)..(18): Xaa is A or G
  MOD_RES (19)..(20)..(21)..(22): Xaa is A or G or is absent
APTKLSPISVLYIXXXXXXXXXYKQYENMVVK

SEQ ID NO: 28994 - protein, 42 aa, Artificial Sequence; identical to SEQ ID NO: 7700
  GFR-binding peptide
  MOD_RES (5)..(39)..(41): Xaa is C or S
  MOD_RES (19)..(20)..(21)..(22)..(23): Xaa is A or G
  MOD_RES (24)..(25)..(26)..(27): Xaa is A or G or is absent

SEQ ID NO: 28995 - protein, 35 aa, Artificial Sequence; identical to SEQ ID NO: 7701
  GFR-binding peptide
  MOD_RES (2)..(3)..(35): Xaa is C or S

SEQ ID NO: 28996 - protein, 35 aa, Artificial Sequence; identical to SEQ ID NO: 7702
  GFR-binding peptide
  MOD_RES (2)..(3): Xaa is C or S
  MOD_RES (17)..(18)..(19)..(20)..(21): Xaa is A or G
  MOD_RES (22)..(23)..(24)..(25): Xaa is A or G or is absent

SEQ ID NO: 28997 - protein, 36 aa, Artificial Sequence
  GFR-binding peptide
  MOD_RES (1)..(33)..(35): Xaa is C or S
XVPARLNAISILYFDAANNVVLKKYRDMVVEAXGXR

SEQ ID NO: 28998 - protein, 35 aa, Artificial Sequence; identical to SEQ ID NO: 7703
  GFR-binding peptide
  MOD_RES (2)..(3)..(35): Xaa is C or S

SEQ ID NO: 28999 - protein, 33 aa, Artificial Sequence
  GFR-binding peptide
  MOD_RES (1)..(1): Xaa is C or S
  MOD_RES (15)..(16)..(17)..(18)..(19): Xaa is A or G
  MOD_RES (20)..(21)..(22)..(23): Xaa is A or G or is absent
XAPTKLSPISVLYIXXXXXXXXXYKQYENMVVK

SEQ ID NO: 29000 - protein, 35 aa, Artificial Sequence
  GFR-binding peptide
  MOD_RES (1)..(33)..(35): Xaa is C or S
XAPTKLSPISVLYIDSSNNVIYKQYENMVVKAXGX

SEQ ID NO: 29001 - protein, 32 aa, Artificial Sequence
  GFR-binding peptide
  MOD_RES (14)..(15)..(16)..(17)..(18): Xaa is A or G
  MOD_RES (19)..(20)..(21)..(22): Xaa is A or G or is absent
APTKLSPISVLYIXXXXXXXXXYKQYENMVVR

SEQ ID NO: 29002 - protein, 35 aa, Artificial Sequence; identical to SEQ ID NO: 7704
  GFR-binding peptide
  MOD_RES (1)..(2)..(33)..(35): Xaa is C or S

SEQ ID NO: 29003 - protein, 33 aa, Artificial Sequence
  GFR-binding peptide
  MOD_RES (1)..(1): Xaa is C or S
  MOD_RES (15)..(16)..(17)..(18)..(19): Xaa is A or G
  MOD_RES (20)..(21)..(22)..(23): Xaa is A or G or is absent
XAPTKLSPISVLYIXXXXXXXXXYKQYENMVVR

SEQ ID NO: 29004 - protein, 34 aa, Artificial Sequence; identical to SEQ ID NO: 7705
  GFR-binding peptide
  MOD_RES (34)..(34): Xaa is C or S
  MOD_RES (14)..(15)..(16)..(17)..(18): Xaa is A or G
  MOD_RES (19)..(20)..(21)..(22): Xaa is A or G or is absent

SEQ ID NO: 29005 - protein, 39 aa, Artificial Sequence
  GFR-binding peptide
  MOD_RES (4)..(5): Xaa is C or S
  MOD_RES (19)..(20)..(21)..(22)..(23): Xaa is A or G
  MOD_RES (24)..(25)..(26)..(27): Xaa is A or G or is absent
GKAXXVPTKLSPISVLYIXXXXXXXXXYKQYEEGMSVAE

SEQ ID NO: 29006 - protein, 36 aa, Artificial Sequence
  GFR-binding peptide
  MOD_RES (2)..(36): Xaa is C or S
  MOD_RES (16)..(17)..(18)..(19)..(20): Xaa is A or G
  MOD_RES (21)..(22)..(23)..(24): Xaa is A or G or is absent
TXAPTKLEPISVLYLXXXXXXXXXKFKYENMVVRSX

SEQ ID NO: 29007 - protein, 33 aa, Artificial Sequence
  GFR-binding peptide
  MOD_RES (14)..(15)..(16)..(17)..(18): Xaa is A or G
  MOD_RES (19)..(20)..(21)..(22): Xaa is A or G or is absent
APTKLEPISVLYLXXXXXXXXXKFKYENMVVKA

SEQ ID NO: 29008 - protein, 33 aa, Artificial Sequence; identical to SEQ ID NO: 7711
  GFR-binding peptide
  MOD_RES (1)..(2)..(33): Xaa is C or S

SEQ ID NO: 29009 - protein, 39 aa, Artificial Sequence
  GFR-binding peptide
  MOD_RES (5)..(6): Xaa is C or S
  MOD_RES (20)..(21)..(22)..(23)..(24): Xaa is A or G
  MOD_RES (25)..(26)..(27)..(28): Xaa is A or G or is absent
ASKAXXVPTKLNAISILYFXXXXXXXXXLKKYRGMAVSE

SEQ ID NO: 29010 - protein, 35 aa, Artificial Sequence; identical to SEQ ID NO: 7714
  GFR-binding peptide
  MOD_RES (1)..(2)..(33)..(35): Xaa is C or S

SEQ ID NO: 29011 - protein, 39 aa, Artificial Sequence
  GFR-binding peptide
  MOD_RES (5)..(6)..(38): Xaa is C or S
VPKAXXAPTKLSPISVLYIDSSNNVIYKQYENMVVKAXG

SEQ ID NO: 29012 - protein, 32 aa, Artificial Sequence
  GFR-binding peptide
  MOD_RES (1)..(1): Xaa is C or S
XAPTKLEPISVLYLDSSNNVIKFKYENMVVKA

SEQ ID NO: 29013 - protein, 39 aa, Artificial Sequence
  GFR-binding peptide
  MOD_RES (4)..(38): Xaa is C or S
  MOD_RES (18)..(19)..(20)..(21)..(22): Xaa is A or G
  MOD_RES (23)..(24)..(25)..(26): Xaa is A or G or is absent
KPTXAPTKLEPISVLYLXXXXXXXXXKFKYENMVVRSXG

SEQ ID NO: 29014 - protein, 39 aa, Artificial Sequence
  GFR-binding peptide
  MOD_RES (4)..(5): Xaa is C or S
  MOD_RES (19)..(20)..(21)..(22)..(23): Xaa is A or G
  MOD_RES (24)..(25)..(26)..(27): Xaa is A or G or is absent
GKAXXVPTKLEPISVLYLXXXXXXXXXKFKYEEGMSVAE

SEQ ID NO: 29015 - protein, 37 aa, Artificial Sequence
  GFR-binding peptide
  MOD_RES (7)..(7): Xaa is C or S
HVTKPTXAPTKLEPISVLYLDDSSNVIKFKYENMVVR

SEQ ID NO: 29016 - protein, 39 aa, Artificial Sequence; identical to SEQ ID NO: 7720
  GFR-binding peptide
  MOD_RES (3)..(4)..(38): Xaa is C or S
  MOD_RES (18)..(19)..(20)..(21)..(22): Xaa is A or G
  MOD_RES (23)..(24)..(25)..(26): Xaa is A or G or is absent

SEQ ID NO: 29017 - protein, 34 aa, Artificial Sequence; identical to SEQ ID NO: 7721
  GFR-binding peptide
  MOD_RES (32)..(34): Xaa is C or S

SEQ ID NO: 29018 - protein, 40 aa, Artificial Sequence
  GFR-binding peptide
  MOD_RES (3)..(4)..(39): Xaa is C or S
  MOD_RES (18)..(19)..(20)..(21)..(22): Xaa is A or G
  MOD_RES (23)..(24)..(25)..(26): Xaa is A or G or is absent
KAXXVPTKLSPISVLYIXXXXXXXXXYKQYEEGMSVAEXG

SEQ ID NO: 29019 - protein, 32 aa, Artificial Sequence
  GFR-binding peptide
  MOD_RES (1)..(2): Xaa is C or S
XXVPQALSPISILYIVGRKPKVYKQYEMIVRS

SEQ ID NO: 29020 - protein, 35 aa, Artificial Sequence
  GFR-binding peptide
  MOD_RES (3)..(4): Xaa is C or S
KAXXAPTKLSPISVLYIDSSNNVIYKQYENMVVKA

SEQ ID NO: 29021 - protein, 40 aa, Artificial Sequence
  GFR-binding peptide
  MOD_RES (6)..(7)..(39): Xaa is C or S
AAPASXXVPARLEPISILYLDAANNVVKFKYEDMVVEAXG

SEQ ID NO: 29022 - protein, 39 aa, Artificial Sequence; identical to SEQ ID NO: 7726
  GFR-binding peptide
  MOD_RES (3)..(4)..(36)..(38): Xaa is C or S

SEQ ID NO: 29023 - protein, 37 aa, Artificial Sequence; identical to SEQ ID NO: 7728
  GFR-binding peptide
  MOD_RES (34)..(36): Xaa is C or S
  MOD_RES (14)..(15)..(16)..(17)..(18): Xaa is A or G
  MOD_RES (19)..(20)..(21)..(22): Xaa is A or G or is absent

SEQ ID NO: 29024 - protein, 35 aa, Artificial Sequence
  GFR-binding peptide
  MOD_RES (2)..(3): Xaa is C or S
  MOD_RES (17)..(18)..(19)..(20)..(21): Xaa is A or G
  MOD_RES (22)..(23)..(24)..(25): Xaa is A or G or is absent
AXXAPTKLEPISVLYLXXXXXXXXXKFKYENMVVK

SEQ ID NO: 29025 - protein, 40 aa, Artificial Sequence
  GFR-binding peptide
  MOD_RES (5)..(6)..(37)..(39): Xaa is C or S
SAAPXXVPQALEPISILYLVGRKPKVKFKYEMIVRSXKXS

SEQ ID NO: 29026 - protein, 41 aa, Artificial Sequence; identical to SEQ ID NO: 7729
  GFR-binding peptide
  MOD_RES (6)..(7)..(39)..(41): Xaa is C or S

SEQ ID NO: 29027 - protein, 39 aa, Artificial Sequence
  GFR-binding peptide
  MOD_RES (4)..(5)..(39): Xaa is C or S
  MOD_RES (19)..(20)..(21)..(22)..(23): Xaa is A or G
  MOD_RES (24)..(25)..(26)..(27): Xaa is A or G or is absent
SKAXXVPTKLSPISILYKXXXXXXXXXLKYHYGMAVSEX

SEQ ID NO: 29028 - protein, 39 aa, Artificial Sequence
  GFR-binding peptide
  MOD_RES (2)..(3)..(37)..(39): Xaa is C or S
  MOD_RES (17)..(18)..(19)..(20)..(21): Xaa is A or G
  MOD_RES (22)..(23)..(24)..(25): Xaa is A or G or is absent
AXXVPTELSPISMLYIXXXXXXXXXYKQYEEMVVEGXGX

SEQ ID NO: 29029 - protein, 37 aa, Artificial Sequence; identical to SEQ ID NO: 7733
  GFR-binding peptide
  MOD_RES (3)..(4)..(36): Xaa is C or S

SEQ ID NO: 29030 - protein, 32 aa, Artificial Sequence
  GFR-binding peptide
  MOD_RES (31)..(31): Xaa is C or S
VPQDLEPISILYLVGRTPKVKFKYEMVVKSXK

SEQ ID NO: 29031 - protein, 35 aa, Artificial Sequence; identical to SEQ ID NO: 7736
  GFR-binding peptide
  MOD_RES (1)..(35): Xaa is C or S
  MOD_RES (15)..(16)..(17)..(18)..(19): Xaa is A or G
  MOD_RES (20)..(21)..(22)..(23): Xaa is A or G or is absent

SEQ ID NO: 29032 - protein, 38 aa, Artificial Sequence
  GFR-binding peptide
  MOD_RES (4)..(5): Xaa is C or S
  MOD_RES (19)..(20)..(21)..(22)..(23): Xaa is A or G
  MOD_RES (24)..(25)..(26)..(27): Xaa is A or G or is absent
SKAXXVPTKLNAISILYFXXXXXXXXXLKKYRGMAVSE

SEQ ID NO: 29033 - protein, 43 aa, Artificial Sequence
  GFR-binding peptide
  MOD_RES (5)..(6)..(40)..(42): Xaa is C or S
  MOD_RES (20)..(21)..(22)..(23)..(24): Xaa is A or G
  MOD_RES (25)..(26)..(27)..(28): Xaa is A or G or is absent
APASXXVPARLSPISILYIXXXXXXXXXYKQYEDMVVEAXGXR

SEQ ID NO: 29034 - protein, 39 aa, Artificial Sequence
  GFR-binding peptide
  MOD_RES (1)..(2)..(36)..(38): Xaa is C or S
  MOD_RES (16)..(17)..(18)..(19)..(20): Xaa is A or G
  MOD_RES (21)..(22)..(23)..(24): Xaa is A or G or is absent
XXVPTELEPISMLYLXXXXXXXXXKFKYEDMVVEGXGXR

SEQ ID NO: 29035 - protein, 36 aa, Artificial Sequence
  GFR-binding peptide
  MOD_RES (5)..(6): Xaa is C or S
VPKAXXAPTKLEPISVLYLDSSNNVIKFKYENMVVK

SEQ ID NO: 29036 - protein, 36 aa, Artificial Sequence
  GFR-binding peptide
  MOD_RES (3)..(4): Xaa is C or S
  MOD_RES (18)..(19)..(20)..(21)..(22): Xaa is A or G
  MOD_RES (23)..(24)..(25)..(26): Xaa is A or G or is absent
KPXXAPTQLEPISVLYLXXXXXXXXXKFKYENMVVR

SEQ ID NO: 29037 - protein, 42 aa, Artificial Sequence
  GFR-binding peptide
  MOD_RES (6)..(7)..(40)..(42): Xaa is C or S
  MOD_RES (21)..(22)..(23)..(24)..(25): Xaa is A or G
  MOD_RES (26)..(27)..(28)..(29): Xaa is A or G or is absent
ASAAPXXVPQALEPISILYLXXXXXXXXXKFKYEMIVRSXKX

SEQ ID NO: 29038 - protein, 39 aa, Artificial Sequence; identical to SEQ ID NO: 7738
  GFR-binding peptide
  MOD_RES (2)..(3)..(37)..(39): Xaa is C or S
  MOD_RES (17)..(18)..(19)..(20)..(21): Xaa is A or G
  MOD_RES (22)..(23)..(24)..(25): Xaa is A or G or is absent

SEQ ID NO: 29039 - protein, 41 aa, Artificial Sequence
  GFR-binding peptide
  MOD_RES (3)..(4)..(38)..(40): Xaa is C or S
  MOD_RES (18)..(19)..(20)..(21)..(22): Xaa is A or G
  MOD_RES (23)..(24)..(25)..(26): Xaa is A or G or is absent
ASXXVPARLSPISILYIXXXXXXXXXYKQYEDMVVEAXGXR

SEQ ID NO: 29040 - protein, 39 aa, Artificial Sequence
  GFR-binding peptide
  MOD_RES (1)..(2)..(36)..(38): Xaa is C or S
  MOD_RES (16)..(17)..(18)..(19)..(20): Xaa is A or G
  MOD_RES (21)..(22)..(23)..(24): Xaa is A or G or is absent
XXVPTELSPISMLYIXXXXXXXXXYKQYEEMVVEGXGXR

SEQ ID NO: 29041 - protein, 40 aa, Artificial Sequence
  GFR-binding peptide
  MOD_RES (5)..(6)..(40): Xaa is C or S
  MOD_RES (20)..(21)..(22)..(23)..(24): Xaa is A or G
  MOD_RES (25)..(26)..(27)..(28): Xaa is A or G or is absent
IPKAXXVPTELSPISMLYIXXXXXXXXXYKQYEDMVVEGX

SEQ ID NO: 29042 - protein, 34 aa, Artificial Sequence; identical to SEQ ID NO: 7743
  GFR-binding peptide
  MOD_RES (3)..(4): Xaa is C or S

SEQ ID NO: 29043 - protein, 38 aa, Artificial Sequence
  GFR-binding peptide
  MOD_RES (4)..(5)..(37): Xaa is C or S
PKPXXAPTKLSPISVLYIDDSSNVIYKQYENMVVRSXG

SEQ ID NO: 29044 - protein, 40 aa, Artificial Sequence
  GFR-binding peptide
  MOD_RES (4)..(5)..(40): Xaa is C or S
  MOD_RES (19)..(20)..(21)..(22)..(23): Xaa is A or G
  MOD_RES (24)..(25)..(26)..(27): Xaa is A or G or is absent
GKAXXVPTKLSPISVLYIXXXXXXXXXYKQYEEGMSVAEX

SEQ ID NO: 29045 - protein, 36 aa, Artificial Sequence; identical to SEQ ID NO: 7745
  GFR-binding peptide
  MOD_RES (2)..(3)..(34)..(36): Xaa is C or S

SEQ ID NO: 29046 - protein, 41 aa, Artificial Sequence; identical to SEQ ID NO: 7748
  GFR-binding peptide
  MOD_RES (4)..(5)..(39)..(41): Xaa is C or S
  MOD_RES (19)..(20)..(21)..(22)..(23): Xaa is A or G
  MOD_RES (24)..(25)..(26)..(27): Xaa is A or G or is absent

SEQ ID NO: 29047 - protein, 39 aa, Artificial Sequence; identical to SEQ ID NO: 7749
  GFR-binding peptide
  MOD_RES (4)..(5)..(38): Xaa is C or S
  MOD_RES (19)..(20)..(21)..(22)..(23): Xaa is A or G
  MOD_RES (24)..(25)..(26)..(27): Xaa is A or G or is absent

SEQ ID NO: 29048 - protein, 36 aa, Artificial Sequence
  GFR-binding peptide
  MOD_RES (4)..(5): Xaa is C or S
PKPXXAPTQLSPISVLYIDDSSNVIYKQYENMVVRA

SEQ ID NO: 29049 - protein, 38 aa, Artificial Sequence; identical to SEQ ID NO: 7751
  GFR-binding peptide
  MOD_RES (5)..(6): Xaa is C or S
  MOD_RES (20)..(21)..(22)..(23)..(24): Xaa is A or G
  MOD_RES (25)..(26)..(27)..(28): Xaa is A or G or is absent

SEQ ID NO: 29050 - protein, 42 aa, Artificial Sequence
  GFR-binding peptide
  MOD_RES (5)..(6)..(40)..(42): Xaa is C or S
  MOD_RES (20)..(21)..(22)..(23)..(24): Xaa is A or G
  MOD_RES (25)..(26)..(27)..(28): Xaa is A or G or is absent
ASKAXXVPTKLSPISILYIXXXXXXXXXYKQYEGMAVSEXGX

SEQ ID NO: 29051 - protein, 36 aa, Artificial Sequence; identical to SEQ ID NO: 7752
  GFR-binding peptide
  MOD_RES (2)..(3)..(36): Xaa is C or S
  MOD_RES (17)..(18)..(19)..(20)..(21): Xaa is A or G
  MOD_RES (22)..(23)..(24)..(25): Xaa is A or G or is absent

SEQ ID NO: 29052 - protein, 32 aa, Artificial Sequence; identical to SEQ ID NO: 7753
  GFR-binding peptide
  MOD_RES (1)..(1): Xaa is C or S

SEQ ID NO: 29053 - protein, 39 aa, Artificial Sequence
  GFR-binding peptide
  MOD_RES (5)..(6): Xaa is C or S
  MOD_RES (20)..(21)..(22)..(23)..(24): Xaa is A or G
  MOD_RES (25)..(26)..(27)..(28): Xaa is A or G or is absent
APASXXVPARLEPISILYLXXXXXXXXXKFKYEDMVVEA

SEQ ID NO: 29054 - protein, 33 aa, Artificial Sequence
  GFR-binding peptide
  MOD_RES (1)..(32): Xaa is C or S
XVPQDLSPISILYIVGRTPKVYKQYEMVVKSXK

SEQ ID NO: 29055 - protein, 37 aa, Artificial Sequence
  GFR-binding peptide
  MOD_RES (4)..(5)..(37): Xaa is C or S
PKAXXAPTKLSPISVLYIDSSNNVIYKQYENMVVKAX

SEQ ID NO: 29056 - protein, 34 aa, Artificial Sequence
  GFR-binding peptide
  MOD_RES (1)..(2)..(33): Xaa is C or S
XXVPQDLEPISILYLVGRTPKVKFKYEMVVKSXK

SEQ ID NO: 29057 - protein, 36 aa, Artificial Sequence
  GFR-binding peptide
  MOD_RES (33)..(35): Xaa is C or S
  MOD_RES (14)..(15)..(16)..(17)..(18): Xaa is A or G
  MOD_RES (19)..(20)..(21)..(22): Xaa is A or G or is absent
VPQALSPISILYIXXXXXXXXXYKQYEMIVRSXKXS

SEQ ID NO: 29058 - protein, 38 aa, Artificial Sequence; identical to SEQ ID NO: 7757
  GFR-binding peptide
  MOD_RES (3)..(4)..(35)..(37): Xaa is C or S

SEQ ID NO: 29059 - protein, 41 aa, Artificial Sequence
  GFR-binding peptide
  MOD_RES (6)..(38)..(40): Xaa is C or S
VTKPTXAPTKLEPISVLYLDDSSNVIKFKYENMVVRSXGXH

SEQ ID NO: 29060 - protein, 42 aa, Artificial Sequence
  GFR-binding peptide
  MOD_RES (6)..(7)..(39)..(41): Xaa is C or S
KASKAXXVPTKLNAISILYFDKGVVTYLKKYRGMAVSEXGXR

SEQ ID NO: 29061 - protein, 37 aa, Artificial Sequence
  GFR-binding peptide
  MOD_RES (4)..(5): Xaa is C or S
  MOD_RES (19)..(20)..(21)..(22)..(23): Xaa is A or G
  MOD_RES (24)..(25)..(26)..(27): Xaa is A or G or is absent
PASXXVPARLSPISILYIXXXXXXXXXYKQYEDMVVE

SEQ ID NO: 29062 - protein, 38 aa, Artificial Sequence
  GFR-binding peptide
  MOD_RES (5)..(6)..(37): Xaa is C or S
SASPXXVSQDLSPISILYIIGKTPKIYKQYEMIVKSXK

SEQ ID NO: 29063 - protein, 36 aa, Artificial Sequence
  GFR-binding peptide
  MOD_RES (34)..(36): Xaa is C or S
  MOD_RES (14)..(15)..(16)..(17)..(18): Xaa is A or G
  MOD_RES (19)..(20)..(21)..(22): Xaa is A or G or is absent
VPARLSPISILYKXXXXXXXXXLKYHYDMVVEAXGX

SEQ ID NO: 29064 - protein, 32 aa, Artificial Sequence; identical to SEQ ID NO: 7761
  GFR-binding peptide
  MOD_RES (1)..(1): Xaa is C or S

SEQ ID NO: 29065 - protein, 39 aa, Artificial Sequence
  GFR-binding peptide
  MOD_RES (6)..(7): Xaa is C or S
  MOD_RES (21)..(22)..(23)..(24)..(25): Xaa is A or G
  MOD_RES (26)..(27)..(28)..(29): Xaa is A or G or is absent
KASKAXXVPTKLSPISILYIXXXXXXXXXYKQYEGMAVS

SEQ ID NO: 29066 - protein, 38 aa, Artificial Sequence; identical to SEQ ID NO: 7764
  GFR-binding peptide
  MOD_RES (4)..(5)..(36)..(38): Xaa is C or S

SEQ ID NO: 29067 - protein, 37 aa, Artificial Sequence
  GFR-binding peptide
  MOD_RES (2)..(3)..(36): Xaa is C or S
  MOD_RES (17)..(18)..(19)..(20)..(21): Xaa is A or G
  MOD_RES (22)..(23)..(24)..(25): Xaa is A or G or is absent
PXXVPQALSPISILYIXXXXXXXXXYKQYEMIVRSXK

SEQ ID NO: 29068 - protein, 39 aa, Artificial Sequence
  GFR-binding peptide
  MOD_RES (3)..(4)..(37)..(39): Xaa is C or S
KAXXVPTKLEPISVLYLDDMGVPTKFKYEEGMSVAEXGX

SEQ ID NO: 29069 - protein, 37 aa, Artificial Sequence; identical to SEQ ID NO: 7770
  GFR-binding peptide
  MOD_RES (3)..(4)..(35)..(37): Xaa is C or S

SEQ ID NO: 29070 - protein, 39 aa, Artificial Sequence
  GFR-binding peptide
  MOD_RES (5)..(6)..(38): Xaa is C or S
ASKAXXVPTKLNAISILYFDKGVVTYLKKYRGMAVSEXG

SEQ ID NO: 29071 - protein, 36 aa, Artificial Sequence; identical to SEQ ID NO: 7771
  GFR-binding peptide
  MOD_RES (4)..(5)..(36): Xaa is C or S

SEQ ID NO: 29072 - protein, 34 aa, Artificial Sequence
  GFR-binding peptide
  MOD_RES (3)..(4): Xaa is C or S
SPXXVPQDLEPISILYLVGRTPKVKFKYEMVVKS

SEQ ID NO: 29073 - protein, 41 aa, Artificial Sequence; identical to SEQ ID NO: 7774
  GFR-binding peptide
  MOD_RES (2)..(3)..(38)..(40): Xaa is C or S
  MOD_RES (17)..(18)..(19)..(20)..(21): Xaa is A or G
  MOD_RES (22)..(23)..(24)..(25): Xaa is A or G or is absent

SEQ ID NO: 29074 - protein, 36 aa, Artificial Sequence; identical to SEQ ID NO: 7775
  GFR-binding peptide
  MOD_RES (2)..(3)..(35): Xaa is C or S

SEQ ID NO: 29075 - protein, 38 aa, Artificial Sequence; identical to SEQ ID NO: 7776
  GFR-binding peptide
  MOD_RES (5)..(6)..(37): Xaa is C or S

SEQ ID NO: 29076 - protein, 34 aa, Artificial Sequence
  GFR-binding peptide
  MOD_RES (1)..(1): Xaa is C or S
  MOD_RES (15)..(16)..(17)..(18)..(19): Xaa is A or G
  MOD_RES (20)..(21)..(22)..(23): Xaa is A or G or is absent
XVPARLSPISILYIXXXXXXXXXYKQYEDMVVEA

SEQ ID NO: 29077 - protein, 41 aa, Artificial Sequence
  GFR-binding peptide
  MOD_RES (3)..(4)..(38)..(40): Xaa is C or S
  MOD_RES (18)..(19)..(20)..(21)..(22): Xaa is A or G
  MOD_RES (23)..(24)..(25)..(26): Xaa is A or G or is absent
KAXXVPTKLNAISILYFXXXXXXXXXLKKYRGMAVSEXGXR

SEQ ID NO: 29078 - protein, 40 aa, Artificial Sequence
  GFR-binding peptide
  MOD_RES (4)..(5)..(37)..(39): Xaa is C or S
PKAXXAPTKLEPISVLYLDSSNNVIKFKYENMVVKAXGXH

SEQ ID NO: 29079 - protein, 41 aa, Artificial Sequence
  GFR-binding peptide
  MOD_RES (4)..(5)..(39)..(41): Xaa is C or S
  MOD_RES (19)..(20)..(21)..(22)..(23): Xaa is A or G
  MOD_RES (24)..(25)..(26)..(27): Xaa is A or G or is absent
SKAXXVPTKLSPISILYKXXXXXXXXXLKYHYGMAVSEXGX

SEQ ID NO: 29080 - protein, 36 aa, Artificial Sequence
  GFR-binding peptide
  MOD_RES (1)..(34)..(36): Xaa is C or S
XVPTKLEPISVLYLDDMGVPTKFKYEEGMSVAEXGX

SEQ ID NO: 29081 - protein, 37 aa, Artificial Sequence; identical to SEQ ID NO: 7787
  GFR-binding peptide
  MOD_RES (1)..(2)..(36): Xaa is C or S
  MOD_RES (16)..(17)..(18)..(19)..(20): Xaa is A or G
  MOD_RES (21)..(22)..(23)..(24): Xaa is A or G or is absent

SEQ ID NO: 29082 - protein, 40 aa, Artificial Sequence
  GFR-binding peptide
  MOD_RES (3)..(4)..(38)..(40): Xaa is C or S
  MOD_RES (18)..(19)..(20)..(21)..(22): Xaa is A or G
  MOD_RES (23)..(24)..(25)..(26): Xaa is A or G or is absent
KAXXVPTKLSPISILYIXXXXXXXXXYKQYEGMAVSEXGX

SEQ ID NO: 29083 - protein, 33 aa, Artificial Sequence
  GFR-binding peptide
  MOD_RES (2)..(3): Xaa is C or S
PXXVPQDLSPISILYIVGRTPKVYKQYEMVVKS

SEQ ID NO: 29084 - protein, 36 aa, Artificial Sequence
  GFR-binding peptide
  MOD_RES (5)..(6): Xaa is C or S
APASXXVPARLEPISILYLDAANNVVKFKYEDMVVE

SEQ ID NO: 29085 - protein, 36 aa, Artificial Sequence; identical to SEQ ID NO: 7790
  GFR-binding peptide
  MOD_RES (1)..(36): Xaa is C or S
  MOD_RES (15)..(16)..(17)..(18)..(19): Xaa is A or G
  MOD_RES (20)..(21)..(22)..(23): Xaa is A or G or is absent

SEQ ID NO: 29086 - protein, 39 aa, Artificial Sequence
  GFR-binding peptide
  MOD_RES (2)..(3)..(37)..(39): Xaa is C or S
  MOD_RES (17)..(18)..(19)..(20)..(21): Xaa is A or G
  MOD_RES (22)..(23)..(24)..(25): Xaa is A or G or is absent
AXXVPTELEPISMLYLXXXXXXXXXKFKYEEMVVEGXGX

SEQ ID NO: 29087 - protein, 41 aa, Artificial Sequence
  GFR-binding peptide
  MOD_RES (5)..(6)..(38)..(40): Xaa is C or S
VPKPXXAPTKLEPISVLYLDDSSNVIKFKYENMVVRSXGXH

SEQ ID NO: 29088 - protein, 41 aa, Artificial Sequence; identical to SEQ ID NO: 7793
  GFR-binding peptide
  MOD_RES (4)..(5)..(39)..(41): Xaa is C or S
  MOD_RES (19)..(20)..(21)..(22)..(23): Xaa is A or G
  MOD_RES (24)..(25)..(26)..(27): Xaa is A or G or is absent

SEQ ID NO: 29089 - protein, 40 aa, Artificial Sequence
  GFR-binding peptide
  MOD_RES (5)..(6)..(40): Xaa is C or S
  MOD_RES (20)..(21)..(22)..(23)..(24): Xaa is A or G
  MOD_RES (25)..(26)..(27)..(28): Xaa is A or G or is absent
APASXXVPARLEPISILYLXXXXXXXXXKFKYEDMVVEAX

SEQ ID NO: 29090 - protein, 33 aa, Artificial Sequence; identical to SEQ ID NO: 7794
  GFR-binding peptide
  MOD_RES (33)..(33): Xaa is C or S
  MOD_RES (14)..(15)..(16)..(17)..(18): Xaa is A or G
  MOD_RES (19)..(20)..(21)..(22): Xaa is A or G or is absent

SEQ ID NO: 29091 - protein, 35 aa, Artificial Sequence; identical to SEQ ID NO: 7795
  GFR-binding peptide
  MOD_RES (2)..(3): Xaa is C or S
  MOD_RES (17)..(18)..(19)..(20)..(21): Xaa is A or G
  MOD_RES (22)..(23)..(24)..(25): Xaa is A or G or is absent

SEQ ID NO: 29092 - protein, 37 aa, Artificial Sequence; identical to SEQ ID NO: 7796
  GFR-binding peptide
  MOD_RES (2)..(3)..(36): Xaa is C or S
  MOD_RES (17)..(18)..(19)..(20)..(21): Xaa is A or G
  MOD_RES (22)..(23)..(24)..(25): Xaa is A or G or is absent

SEQ ID NO: 29093 - protein, 39 aa, Artificial Sequence
  GFR-binding peptide
  MOD_RES (5)..(6)..(39): Xaa is C or S
  MOD_RES (20)..(21)..(22)..(23)..(24): Xaa is A or G
  MOD_RES (25)..(26)..(27)..(28): Xaa is A or G or is absent
SASPXXVSQDLEPISILYLXXXXXXXXXKFKYEMIVKSX

SEQ ID NO: 29094 - protein, 37 aa, Artificial Sequence
  GFR-binding peptide
  MOD_RES (34)..(36): Xaa is C or S
  MOD_RES (14)..(15)..(16)..(17)..(18): Xaa is A or G
  MOD_RES (19)..(20)..(21)..(22): Xaa is A or G or is absent
APTKLSPISVLYIXXXXXXXXXYKQYENMVVRSXGXH

SEQ ID NO: 29095 - protein, 37 aa, Artificial Sequence
  GFR-binding peptide
  MOD_RES (1)..(2)..(34)..(36): Xaa is C or S
XXAPTQLEPISVLYLDDSSNVIKFKYENMVVRAXGXH

SEQ ID NO: 29096 - protein, 36 aa, Artificial Sequence
  GFR-binding peptide
  MOD_RES (1)..(35): Xaa is C or S
  MOD_RES (15)..(16)..(17)..(18)..(19): Xaa is A or G
  MOD_RES (20)..(21)..(22)..(23): Xaa is A or G or is absent
XVPTKLNAISILYFXXXXXXXXXLKKYRGMAVSEXG

SEQ ID NO: 29097 - protein, 38 aa, Artificial Sequence; identical to SEQ ID NO: 7800
  GFR-binding peptide
  MOD_RES (4)..(5)..(38): Xaa is C or S
  MOD_RES (19)..(20)..(21)..(22)..(23): Xaa is A or G
  MOD_RES (24)..(25)..(26)..(27): Xaa is A or G or is absent

SEQ ID NO: 29098 - protein, 39 aa, Artificial Sequence
  GFR-binding peptide
  MOD_RES (4)..(5)..(37)..(39): Xaa is C or S
SKAXXVPTKLNAISILYFDKGVVTYLKKYRGMAVSEXGX

SEQ ID NO: 29099 - protein, 36 aa, Artificial Sequence; identical to SEQ ID NO: 7804
  GFR-binding peptide
  MOD_RES (35)..(35): Xaa is C or S
  MOD_RES (14)..(15)..(16)..(17)..(18): Xaa is A or G
  MOD_RES (19)..(20)..(21)..(22): Xaa is A or G or is absent

SEQ ID NO: 29100 - protein, 33 aa, Artificial Sequence
  GFR-binding peptide
  MOD_RES (2)..(3): Xaa is C or S
PXXVSQDLSPISILYIIGKTPKIYKQYEMIVKS

SEQ ID NO: 29101 - protein, 40 aa, Artificial Sequence; identical to SEQ ID NO: 7809
  GFR-binding peptide
  MOD_RES (5)..(6)..(39): Xaa is C or S
  MOD_RES (20)..(21)..(22)..(23)..(24): Xaa is A or G
  MOD_RES (25)..(26)..(27)..(28): Xaa is A or G or is absent

SEQ ID NO: 29102 - protein, 34 aa, Artificial Sequence
  GFR-binding peptide
  MOD_RES (1)..(2): Xaa is C or S
  MOD_RES (16)..(17)..(18)..(19)..(20): Xaa is A or G
  MOD_RES (21)..(22)..(23)..(24): Xaa is A or G or is absent
XXVPTKLSPISILYIXXXXXXXXXYKQYEGMAVS

SEQ ID NO: 29103 - protein, 37 aa, Artificial Sequence
  GFR-binding peptide
  MOD_RES (3)..(4)..(36): Xaa is C or S
ASXXVPARLSPISILYKDAANNVVLKYHYDMVVEAXG

SEQ ID NO: 29104 - protein, 39 aa, Artificial Sequence; identical to SEQ ID NO: 7813
  GFR-binding peptide
  MOD_RES (6)..(7): Xaa is C or S
  MOD_RES (21)..(22)..(23)..(24)..(25): Xaa is A or G
  MOD_RES (26)..(27)..(28)..(29): Xaa is A or G or is absent

SEQ ID NO: 29105 - protein, 42 aa, Artificial Sequence; identical to SEQ ID NO: 7814
  GFR-binding peptide
  MOD_RES (6)..(7)..(42): Xaa is C or S
  MOD_RES (21)..(22)..(23)..(24)..(25): Xaa is A or G
  MOD_RES (26)..(27)..(28)..(29): Xaa is A or G or is absent

SEQ ID NO: 29106 - protein, 37 aa, Artificial Sequence
  GFR-binding peptide
  MOD_RES (2)..(3)..(36): Xaa is C or S
  MOD_RES (17)..(18)..(19)..(20)..(21): Xaa is A or G
  MOD_RES (22)..(23)..(24)..(25): Xaa is A or G or is absent
PXXVSQDLEPISILYLXXXXXXXXXKFKYEMIVKSXK

SEQ ID NO: 29107 - protein, 38 aa, Artificial Sequence; identical to SEQ ID NO: 7817
  GFR-binding peptide
  MOD_RES (2)..(3)..(35)..(37): Xaa is C or S

SEQ ID NO: 29108 - protein, 39 aa, Artificial Sequence
  GFR-binding peptide
  MOD_RES (4)..(5)..(39): Xaa is C or S
  MOD_RES (19)..(20)..(21)..(22)..(23): Xaa is A or G
  MOD_RES (24)..(25)..(26)..(27): Xaa is A or G or is absent
PKAXXVPTELSPISMLYIXXXXXXXXXYKQYEEMVVEGX

SEQ ID NO: 29109 - protein, 40 aa, Artificial Sequence
  GFR-binding peptide
  MOD_RES (3)..(4)..(37)..(39): Xaa is C or S
KAXXVPTKLSPISVLYIDDMGVPTYKQYEEGMSVAEXGXR

SEQ ID NO: 29110 - protein, 40 aa, Artificial Sequence; identical to SEQ ID NO: 7821
  GFR-binding peptide
  MOD_RES (3)..(4)..(38)..(40): Xaa is C or S
  MOD_RES (18)..(19)..(20)..(21)..(22): Xaa is A or G
  MOD_RES (23)..(24)..(25)..(26): Xaa is A or G or is absent

SEQ ID NO: 29111 - protein, 36 aa, Artificial Sequence
  GFR-binding peptide
  MOD_RES (2)..(3): Xaa is C or S
  MOD_RES (17)..(18)..(19)..(20)..(21): Xaa is A or G
  MOD_RES (22)..(23)..(24)..(25): Xaa is A or G or is absent
AXXAPTKLEPISVLYLXXXXXXXXXKFKYENMVVKA

SEQ ID NO: 29112 - protein, 37 aa, Artificial Sequence
  GFR-binding peptide
  MOD_RES (6)..(7): Xaa is C or S
KASKAXXVPTKLSPISILYKDKGVVTYLKYHYGMAVS

SEQ ID NO: 29113 - protein, 37 aa, Artificial Sequence; identical to SEQ ID NO: 7822
  GFR-binding peptide
  MOD_RES (3)..(4)..(37): Xaa is C or S
  MOD_RES (18)..(19)..(20)..(21)..(22): Xaa is A or G
  MOD_RES (23)..(24)..(25)..(26): Xaa is A or G or is absent

SEQ ID NO: 29114 - protein, 39 aa, Artificial Sequence
  GFR-binding peptide
  MOD_RES (2)..(3)..(36)..(38): Xaa is C or S
  MOD_RES (17)..(18)..(19)..(20)..(21): Xaa is A or G
  MOD_RES (22)..(23)..(24)..(25): Xaa is A or G or is absent
PXXVPQALSPISILYIXXXXXXXXXYKQYEMIVRSXKXS

SEQ ID NO: 29115 - protein, 32 aa, Artificial Sequence; identical to SEQ ID NO: 7823
  GFR-binding peptide
  MOD_RES (31)..(31): Xaa is C or S

SEQ ID NO: 29116 - protein, 35 aa, Artificial Sequence; identical to SEQ ID NO: 7825
  GFR-binding peptide
  MOD_RES (3)..(4)..(35): Xaa is C or S

SEQ ID NO: 29117 - protein, 36 aa, Artificial Sequence
  GFR-binding peptide
  MOD_RES (1)..(34)..(36): Xaa is C or S
XVPTKLSPISVLYIDDMGVPTYKQYEEGMSVAEXGX

SEQ ID NO: 29118 - protein, 35 aa, Artificial Sequence
  GFR-binding peptide
  MOD_RES (2)..(3): Xaa is C or S
  MOD_RES (17)..(18)..(19)..(20)..(21): Xaa is A or G
  MOD_RES (22)..(23)..(24)..(25): Xaa is A or G or is absent
AXXVPTELEPISMLYLXXXXXXXXXKFKYEEMVVE

SEQ ID NO: 29119 - protein, 35 aa, Artificial Sequence; identical to SEQ ID NO: 7828
  GFR-binding peptide
  MOD_RES (2)..(3): Xaa is C or S
  MOD_RES (17)..(18)..(19)..(20)..(21): Xaa is A or G
  MOD_RES (22)..(23)..(24)..(25): Xaa is A or G or is absent

SEQ ID NO: 29120 - protein, 38 aa, Artificial Sequence
  GFR-binding peptide
  MOD_RES (5)..(5): Xaa is C or S
  MOD_RES (19)..(20)..(21)..(22)..(23): Xaa is A or G
  MOD_RES (24)..(25)..(26)..(27): Xaa is A or G or is absent
TKPTXAPTKLEPISVLYLXXXXXXXXXKFKYENMVVRS

SEQ ID NO: 29121 - protein, 39 aa, Artificial Sequence
  GFR-binding peptide
  MOD_RES (2)..(36)..(38): Xaa is C or S
  MOD_RES (16)..(17)..(18)..(19)..(20): Xaa is A or G
  MOD_RES (21)..(22)..(23)..(24): Xaa is A or G or is absent
TXAPTKLSPISVLYIXXXXXXXXXYKQYENMVVRSXGXH

SEQ ID NO: 29122 - protein, 39 aa, Artificial Sequence; identical to SEQ ID NO: 7832
  GFR-binding peptide
  MOD_RES (4)..(5)..(39): Xaa is C or S
  MOD_RES (19)..(20)..(21)..(22)..(23): Xaa is A or G
  MOD_RES (24)..(25)..(26)..(27): Xaa is A or G or is absent

SEQ ID NO: 29123 - protein, 37 aa, Artificial Sequence
  GFR-binding peptide
  MOD_RES (34)..(36): Xaa is C or S
  MOD_RES (14)..(15)..(16)..(17)..(18): Xaa is A or G
  MOD_RES (19)..(20)..(21)..(22): Xaa is A or G or is absent
VPTELEPISMLYLXXXXXXXXXKFKYEDMVVEGXGXR

SEQ ID NO: 29124 - protein, 32 aa, Artificial Sequence
  GFR-binding peptide
  MOD_RES (1)..(32): Xaa is C or S
XVPQDLEPISILYLVGRTPKVKFKYEMVVKSX

SEQ ID NO: 29125 - protein, 37 aa, Artificial Sequence; identical to SEQ ID NO: 7835
  GFR-binding peptide
  MOD_RES (5)..(6)..(37): Xaa is C or S

SEQ ID NO: 29126 - protein, 38 aa, Artificial Sequence
  GFR-binding peptide
  MOD_RES (6)..(7): Xaa is C or S
AAPASXXVPARLSPISILYKDAANNVVLKYHYDMVVEA

SEQ ID NO: 29127 - protein, 36 aa, Artificial Sequence
  GFR-binding peptide
  MOD_RES (4)..(5): Xaa is C or S
PKPXXAPTKLEPISVLYLDDSSNVIKFKYENMVVRS

SEQ ID NO: 29128 - protein, 33 aa, Artificial Sequence
  GFR-binding peptide
  MOD_RES (32)..(32): Xaa is C or S
VPARLSPISILYKDAANNVVLKYHYDMVVEAXG

SEQ ID NO: 29129 - protein, 38 aa, Artificial Sequence
  GFR-binding peptide
  MOD_RES (3)..(4)..(35)..(37): Xaa is C or S
SPXXVPQDLEPISILYLVGRTPKVKFKYEMVVKSXKXS

SEQ ID NO: 29130 - protein, 38 aa, Artificial Sequence
  GFR-binding peptide
  MOD_RES (2)..(3)..(37): Xaa is C or S
  MOD_RES (17)..(18)..(19)..(20)..(21): Xaa is A or G
  MOD_RES (22)..(23)..(24)..(25): Xaa is A or G or is absent
SXXVPARLNAISILYFXXXXXXXXXLKKYRDMVVEAXG

SEQ ID NO: 29131 - protein, 39 aa, Artificial Sequence
  GFR-binding peptide
  MOD_RES (5)..(37)..(39): Xaa is C or S
TKPTXAPTKLEPISVLYLDDSSNVIKFKYENMVVRSXGX

SEQ ID NO: 29132 - protein, 36 aa, Artificial Sequence
  GFR-binding peptide
  MOD_RES (3)..(4): Xaa is C or S
  MOD_RES (18)..(19)..(20)..(21)..(22): Xaa is A or G
  MOD_RES (23)..(24)..(25)..(26): Xaa is A or G or is absent
ASXXVPARLEPISILYLXXXXXXXXXKFKYEDMVVE

SEQ ID NO: 29133 - protein, 41 aa, Artificial Sequence
  GFR-binding peptide
  MOD_RES (5)..(6)..(40): Xaa is C or S
  MOD_RES (20)..(21)..(22)..(23)..(24): Xaa is A or G
  MOD_RES (25)..(26)..(27)..(28): Xaa is A or G or is absent
ASKAXXVPTKLNAISILYFXXXXXXXXXLKKYRGMAVSEXG

SEQ ID NO: 29134 - protein, 34 aa, Artificial Sequence
  GFR-binding peptide
  MOD_RES (3)..(3): Xaa is C or S
PTXAPTKLSPISVLYIDDSSNVIYKQYENMVVRS

SEQ ID NO: 29135 - protein, 39 aa, Artificial Sequence; identical to SEQ ID NO: 7837
  GFR-binding peptide
  MOD_RES (1)..(2)..(36)..(38): Xaa is C or S
  MOD_RES (16)..(17)..(18)..(19)..(20): Xaa is A or G
  MOD_RES (21)..(22)..(23)..(24): Xaa is A or G or is absent

SEQ ID NO: 29136 - protein, 41 aa, Artificial Sequence; identical to SEQ ID NO: 7838
  GFR-binding peptide
  MOD_RES (6)..(7): Xaa is C or S
  MOD_RES (21)..(22)..(23)..(24)..(25): Xaa is A or G
  MOD_RES (26)..(27)..(28)..(29): Xaa is A or G or is absent

SEQ ID NO: 29137 - protein, 37 aa, Artificial Sequence; identical to SEQ ID NO: 7841
  GFR-binding peptide
  MOD_RES (34)..(36): Xaa is C or S
  MOD_RES (14)..(15)..(16)..(17)..(18): Xaa is A or G
  MOD_RES (19)..(20)..(21)..(22): Xaa is A or G or is absent

SEQ ID NO: 29138 - protein, 35 aa, Artificial Sequence
  GFR-binding peptide
  MOD_RES (4)..(5): Xaa is C or S
PKAXXVPTELSPISMLYIDENEKVVYKQYEDMVVE

SEQ ID NO: 29139 - protein, 36 aa, Artificial Sequence; identical to SEQ ID NO: 7847
  GFR-binding peptide
  MOD_RES (3)..(4): Xaa is C or S
  MOD_RES (18)..(19)..(20)..(21)..(22): Xaa is A or G
  MOD_RES (23)..(24)..(25)..(26): Xaa is A or G or is absent

SEQ ID NO: 29140 - protein, 39 aa, Artificial Sequence; identical to SEQ ID NO: 7848
  GFR-binding peptide
  MOD_RES (6)..(38): Xaa is C or S

SEQ ID NO: 29141 - protein, 40 aa, Artificial Sequence; identical to SEQ ID NO: 7854
  GFR-binding peptide
  MOD_RES (6)..(7)..(38)..(40): Xaa is C or S

SEQ ID NO: 29142 - protein, 34 aa, Artificial Sequence; identical to SEQ ID NO: 7856
  GFR-binding peptide
  MOD_RES (1)..(34): Xaa is C or S
  MOD_RES (15)..(16)..(17)..(18)..(19): Xaa is A or G
  MOD_RES (20)..(21)..(22)..(23): Xaa is A or G or is absent

SEQ ID NO: 29143 - protein, 38 aa, Artificial Sequence; identical to SEQ ID NO: 7857
  GFR-binding peptide
  MOD_RES (6)..(7)..(38): Xaa is C or S

SEQ ID NO: 29144 - protein, 37 aa, Artificial Sequence; identical to SEQ ID NO: 7858
  GFR-binding peptide
  MOD_RES (1)..(36): Xaa is C or S
  MOD_RES (15)..(16)..(17)..(18)..(19): Xaa is A or G
  MOD_RES (20)..(21)..(22)..(23): Xaa is A or G or is absent

SEQ ID NO: 29145 - protein, 39 aa, Artificial Sequence; identical to SEQ ID NO: 7860
  GFR-binding peptide
  MOD_RES (5)..(6)..(37)..(39): Xaa is C or S

SEQ ID NO: 29146 - protein, 38 aa, Artificial Sequence; identical to SEQ ID NO: 7861
  GFR-binding peptide
  MOD_RES (3)..(4)..(37): Xaa is C or S

SEQ ID NO: 29147 - protein, 38 aa, Artificial Sequence
  GFR-binding peptide
  MOD_RES (1)..(2)..(36)..(38): Xaa is C or S
  MOD_RES (16)..(17)..(18)..(19)..(20): Xaa is A or G
  MOD_RES (21)..(22)..(23)..(24): Xaa is A or G or is absent
XXVPARLSPISILYKXXXXXXXXXLKYHYDMVVEAXGX

SEQ ID NO: 29148 - protein, 36 aa, Artificial Sequence
  GFR-binding peptide
  MOD_RES (1)..(2)..(36): Xaa is C or S
  MOD_RES (16)..(17)..(18)..(19)..(20): Xaa is A or G
  MOD_RES (21)..(22)..(23)..(24): Xaa is A or G or is absent
XXAPTKLEPISVLYLXXXXXXXXXKFKYENMVVRSX

SEQ ID NO: 29149 - protein, 44 aa, Artificial Sequence
  GFR-binding peptide
  MOD_RES (6)..(7)..(41)..(43): Xaa is C or S
  MOD_RES (21)..(22)..(23)..(24)..(25): Xaa is A or G
  MOD_RES (26)..(27)..(28)..(29): Xaa is A or G or is absent
TVPKPXXAPTQLSPISVLYIXXXXXXXXXYKQYENMVVRAXGXH

SEQ ID NO: 29150 - protein, 44 aa, Artificial Sequence
  GFR-binding peptide
  MOD_RES (6)..(7)..(41)..(43): Xaa is C or S
  MOD_RES (21)..(22)..(23)..(24)..(25): Xaa is A or G
  MOD_RES (26)..(27)..(28)..(29): Xaa is A or G or is absent
KASKAXXVPTKLSPISILYIXXXXXXXXXYKQYEGMAVSEXGXR

SEQ ID NO: 29151 - protein, 41 aa, Artificial Sequence; identical to SEQ ID NO: 7866
  GFR-binding peptide
  MOD_RES (5)..(6)..(40): Xaa is C or S
  MOD_RES (20)..(21)..(22)..(23)..(24): Xaa is A or G
  MOD_RES (25)..(26)..(27)..(28): Xaa is A or G or is absent

SEQ ID NO: 29152 - protein, 37 aa, Artificial Sequence
  GFR-binding peptide
  MOD_RES (1)..(36): Xaa is C or S
  MOD_RES (15)..(16)..(17)..(18)..(19): Xaa is A or G
  MOD_RES (20)..(21)..(22)..(23): Xaa is A or G or is absent
XVPTKLSPISVLYIXXXXXXXXXYKQYEEGMSVAEXG

SEQ ID NO: 29153 - protein, 38 aa, Artificial Sequence; identical to SEQ ID NO: 7867
  GFR-binding peptide
  MOD_RES (4)..(5)..(36)..(38): Xaa is C or S

SEQ ID NO: 29154 - protein, 37 aa, Artificial Sequence; identical to SEQ ID NO: 7870
  GFR-binding peptide
  MOD_RES (4)..(5)..(37): Xaa is C or S

SEQ ID NO: 29155 - protein, 35 aa, Artificial Sequence
  GFR-binding peptide
  MOD_RES (1)..(2): Xaa is C or S
  MOD_RES (16)..(17)..(18)..(19)..(20): Xaa is A or G
  MOD_RES (21)..(22)..(23)..(24): Xaa is A or G or is absent
XXVPARLSPISILYIXXXXXXXXXYKQYEDMVVEA

SEQ ID NO: 29156 - protein, 40 aa, Artificial Sequence
  GFR-binding peptide
  MOD_RES (2)..(3)..(37)..(39): Xaa is C or S
  MOD_RES (17)..(18)..(19)..(20)..(21): Xaa is A or G
  MOD_RES (22)..(23)..(24)..(25): Xaa is A or G or is absent
AXXVPTELSPISMLYIXXXXXXXXXYKQYEEMVVEGXGXR

SEQ ID NO: 29157 - protein, 36 aa, Artificial Sequence; identical to SEQ ID NO: 7875
  GFR-binding peptide
  MOD_RES (3)..(4)..(36): Xaa is C or S

SEQ ID NO: 29158 - protein, 32 aa, Artificial Sequence
  GFR-binding peptide
  MOD_RES (31)..(31): Xaa is C or S
VPQDLSPISILYIVGRTPKVYKQYEMVVKSXK

SEQ ID NO: 29159 - protein, 37 aa, Artificial Sequence; identical to SEQ ID NO: 7879
  GFR-binding peptide
  MOD_RES (1)..(2)..(34)..(36): Xaa is C or S

SEQ ID NO: 29160 - protein, 35 aa, Artificial Sequence; identical to SEQ ID NO: 7880
  GFR-binding peptide
  MOD_RES (3)..(4)..(35): Xaa is C or S

SEQ ID NO: 29161 - protein, 37 aa, Artificial Sequence
  GFR-binding peptide
  MOD_RES (3)..(4)..(37): Xaa is C or S
KAXXVPTKLSPISVLYIDDMGVPTYKQYEEGMSVAEX

SEQ ID NO: 29162 - protein, 38 aa, Artificial Sequence; identical to SEQ ID NO: 7883
  GFR-binding peptide
  MOD_RES (4)..(5): Xaa is C or S
  MOD_RES (19)..(20)..(21)..(22)..(23): Xaa is A or G
  MOD_RES (24)..(25)..(26)..(27): Xaa is A or G or is absent

SEQ ID NO: 29163 - protein, 37 aa, Artificial Sequence; identical to SEQ ID NO: 7884
  GFR-binding peptide
  MOD_RES (5)..(6)..(37): Xaa is C or S

SEQ ID NO: 29164 - protein, 37 aa, Artificial Sequence; identical to SEQ ID NO: 7888
  GFR-binding peptide
  MOD_RES (4)..(5)..(37): Xaa is C or S

SEQ ID NO: 29165 - protein, 35 aa, Artificial Sequence
  GFR-binding peptide
  MOD_RES (1)..(2)..(34): Xaa is C or S
XXAPTKLSPISVLYIDSSNNVIYKQYENMVVKAXG

SEQ ID NO: 29166 - protein, 37 aa, Artificial Sequence; identical to SEQ ID NO: 7890
  GFR-binding peptide
  MOD_RES (1)..(2)..(36): Xaa is C or S
  MOD_RES (16)..(17)..(18)..(19)..(20): Xaa is A or G
  MOD_RES (21)..(22)..(23)..(24): Xaa is A or G or is absent

SEQ ID NO: 29167 - protein, 38 aa, Artificial Sequence; identical to SEQ ID NO: 7891
  GFR-binding peptide
  MOD_RES (4)..(5)..(37): Xaa is C or S

SEQ ID NO: 29168 - protein, 43 aa, Artificial Sequence
  GFR-binding peptide
  MOD_RES (4)..(5)..(40)..(42): Xaa is C or S
  MOD_RES (19)..(20)..(21)..(22)..(23): Xaa is A or G
  MOD_RES (24)..(25)..(26)..(27): Xaa is A or G or is absent
GKAXXVPTKLSPISVLYIXXXXXXXXXYKQYEEGMSVAEXGXR

SEQ ID NO: 29169 - protein, 31 aa, Artificial Sequence
  GFR-binding peptide
  MOD_RES (1)..(1): Xaa is C or S
XVPTKLSPISILYKDKGVVTYLKYHYGMAVS

SEQ ID NO: 29170 - protein, 37 aa, Artificial Sequence
  GFR-binding peptide
  MOD_RES (2)..(3)..(37): Xaa is C or S
  MOD_RES (17)..(18)..(19)..(20)..(21): Xaa is A or G
  MOD_RES (22)..(23)..(24)..(25): Xaa is A or G or is absent
PXXAPTKLEPISVLYLXXXXXXXXXKFKYENMVVRSX

SEQ ID NO: 29171 - protein, 40 aa, Artificial Sequence; identical to SEQ ID NO: 7894
  GFR-binding peptide
  MOD_RES (3)..(4)..(39): Xaa is C or S
  MOD_RES (18)..(19)..(20)..(21)..(22): Xaa is A or G
  MOD_RES (23)..(24)..(25)..(26): Xaa is A or G or is absent

SEQ ID NO: 29172 - protein, 35 aa, Artificial Sequence
  GFR-binding peptide
  MOD_RES (34)..(34): Xaa is C or S
  MOD_RES (14)..(15)..(16)..(17)..(18): Xaa is A or G
  MOD_RES (19)..(20)..(21)..(22): Xaa is A or G or is absent
VPARLNAISILYFXXXXXXXXXLKKYRDMVVEAXG

SEQ ID NO: 29173 - protein, 36 aa, Artificial Sequence
  GFR-binding peptide
  MOD_RES (1)..(34)..(36): Xaa is C or S
  MOD_RES (15)..(16)..(17)..(18)..(19): Xaa is A or G
  MOD_RES (20)..(21)..(22)..(23): Xaa is A or G or is absent
XVPQALEPISILYLXXXXXXXXXKFKYEMIVRSXKX

SEQ ID NO: 29174 - protein, 38 aa, Artificial Sequence; identical to SEQ ID NO: 7900
  GFR-binding peptide
  MOD_RES (4)..(5): Xaa is C or S
  MOD_RES (19)..(20)..(21)..(22)..(23): Xaa is A or G
  MOD_RES (24)..(25)..(26)..(27): Xaa is A or G or is absent

SEQ ID NO: 29175 - protein, 37 aa, Artificial Sequence
  GFR-binding peptide
  MOD_RES (1)..(2)..(34)..(36): Xaa is C or S
XXAPTQLSPISVLYIDDSSNVIYKQYENMVVRAXGXH

SEQ ID NO: 29176 - protein, 35 aa, Artificial Sequence
  GFR-binding peptide
  MOD_RES (1)..(33)..(35): Xaa is C or S
XVPTELEPISMLYLDENEKVVKFKYEDMVVEGXGX

SEQ ID NO: 29177 - protein, 44 aa, Artificial Sequence
  GFR-binding peptide
  MOD_RES (6)..(7)..(41)..(43): Xaa is C or S
  MOD_RES (21)..(22)..(23)..(24)..(25): Xaa is A or G
  MOD_RES (26)..(27)..(28)..(29): Xaa is A or G or is absent
AAPASXXVPARLSPISILYKXXXXXXXXXLKYHYDMVVEAXGXR

SEQ ID NO: 29178 - protein, 37 aa, Artificial Sequence
  GFR-binding peptide
  MOD_RES (4)..(5)..(36): Xaa is C or S
AAPXXVPQALSPISILYIVGRKPKVYKQYEMIVRSXK

SEQ ID NO: 29179 - protein, 38 aa, Artificial Sequence
  GFR-binding peptide
  MOD_RES (1)..(35)..(37): Xaa is C or S
  MOD_RES (15)..(16)..(17)..(18)..(19): Xaa is A or G
  MOD_RES (20)..(21)..(22)..(23): Xaa is A or G or is absent
XVPARLSPISILYKXXXXXXXXXLKYHYDMVVEAXGXR

SEQ ID NO: 29180 - protein, 34 aa, Artificial Sequence
  GFR-binding peptide
  MOD_RES (1)..(32)..(34): Xaa is C or S
XVPQDLEPISILYLVGRTPKVKFKYEMVVKSXKX

SEQ ID NO: 29181 - protein, 32 aa, Artificial Sequence
  GFR-binding peptide
  MOD_RES (1)..(2): Xaa is C or S
XXVPTKLSPISILYKDKGVVTYLKYHYGMAVS

SEQ ID NO: 29182 - protein, 40 aa, Artificial Sequence; identical to SEQ ID NO: 7904
  GFR-binding peptide
  MOD_RES (6)..(7)..(40): Xaa is C or S
  MOD_RES (21)..(22)..(23)..(24)..(25): Xaa is A or G
  MOD_RES (26)..(27)..(28)..(29): Xaa is A or G or is absent

SEQ ID NO: 29183 - protein, 35 aa, Artificial Sequence; identical to SEQ ID NO: 7905
  GFR-binding peptide
  MOD_RES (1)..(33)..(35): Xaa is C or S

SEQ ID NO: 29184 - protein, 34 aa, Artificial Sequence; identical to SEQ ID NO: 7906
  GFR-binding peptide
  MOD_RES (33)..(33): Xaa is C or S
  MOD_RES (14)..(15)..(16)..(17)..(18): Xaa is A or G
  MOD_RES (19)..(20)..(21)..(22): Xaa is A or G or is absent

SEQ ID NO: 29185 - protein, 32 aa, Artificial Sequence; identical to SEQ ID NO: 7907
  GFR-binding peptide
  MOD_RES (31)..(31): Xaa is C or S

SEQ ID NO: 29186 - protein, 37 aa, Artificial Sequence
  GFR-binding peptide
  MOD_RES (4)..(5)..(37): Xaa is C or S
PKAXXAPTKLEPISVLYLDSSNNVIKFKYENMVVKAX

SEQ ID NO: 29187 - protein, 34 aa, Artificial Sequence
  GFR-binding peptide
  MOD_RES (1)..(33): Xaa is C or S
XAPTKLEPISVLYLDSSNNVIKFKYENMVVKAXG

SEQ ID NO: 29188 - protein, 34 aa, Artificial Sequence
  GFR-binding peptide
  MOD_RES (1)..(2): Xaa is C or S
  MOD_RES (16)..(17)..(18)..(19)..(20): Xaa is A or G
  MOD_RES (21)..(22)..(23)..(24): Xaa is A or G or is absent
XXAPTQLEPISVLYLXXXXXXXXXKFKYENMVVR

SEQ ID NO: 29189 - protein, 36 aa, Artificial Sequence
  GFR-binding peptide
  MOD_RES (1)..(2)..(34)..(36): Xaa is C or S
XXVPTKLSPISILYKDKGVVTYLKYHYGMAVSEXGX

SEQ ID NO: 29190 - protein, 36 aa, Artificial Sequence
  GFR-binding peptide
  MOD_RES (3)..(4)..(36): Xaa is C or S
KAXXAPTKLEPISVLYLDSSNNVIKFKYENMVVKAX

SEQ ID NO: 29191 - protein, 42 aa, Artificial Sequence
  GFR-binding peptide
  MOD_RES (6)..(7)..(39)..(41): Xaa is C or S
SIPKAXXVPTELSPISMLYIDEYDKVVYKQYEEMVVEGXGXR

SEQ ID NO: 29192 - protein, 38 aa, Artificial Sequence; identical to SEQ ID NO: 7912
  GFR-binding peptide
  MOD_RES (2)..(3)..(37): Xaa is C or S
  MOD_RES (17)..(18)..(19)..(20)..(21): Xaa is A or G
  MOD_RES (22)..(23)..(24)..(25): Xaa is A or G or is absent

SEQ ID NO: 29193 - protein, 36 aa, Artificial Sequence
  GFR-binding peptide
  MOD_RES (1)..(2)..(34)..(36): Xaa is C or S
XXAPTKLEPISVLYLDSSNNVIKFKYENMVVKAXGX

SEQ ID NO: 29194 - protein, 40 aa, Artificial Sequence; identical to SEQ ID NO: 7913
  GFR-binding peptide
  MOD_RES (6)..(7)..(39): Xaa is C or S

SEQ ID NO: 29195 - protein, 37 aa, Artificial Sequence; identical to SEQ ID NO: 7914
  GFR-binding peptide
  MOD_RES (1)..(2)..(34)..(36): Xaa is C or S

SEQ ID NO: 29196 - protein, 36 aa, Artificial Sequence
  GFR-binding peptide
  MOD_RES (3)..(4): Xaa is C or S
  MOD_RES (18)..(19)..(20)..(21)..(22): Xaa is A or G
  MOD_RES (23)..(24)..(25)..(26): Xaa is A or G or is absent
SPXXVPQDLSPISILYIXXXXXXXXXYKQYEMVVKS

SEQ ID NO: 29197 - protein, 35 aa, Artificial Sequence; identical to SEQ ID NO: 7915
  GFR-binding peptide
  MOD_RES (4)..(5): Xaa is C or S

SEQ ID NO: 29198 - protein, 40 aa, Artificial Sequence; identical to SEQ ID NO: 7916
  GFR-binding peptide
  MOD_RES (5)..(39): Xaa is C or S
  MOD_RES (19)..(20)..(21)..(22)..(23): Xaa is A or G
  MOD_RES (24)..(25)..(26)..(27): Xaa is A or G or is absent

SEQ ID NO: 29199 - protein, 41 aa, Artificial Sequence
  GFR-binding peptide
  MOD_RES (6)..(7)..(39)..(41): Xaa is C or S
TVPKPXXAPTQLEPISVLYLDDSSNVIKFKYENMVVRAXGX

SEQ ID NO: 29200 - protein, 34 aa, Artificial Sequence; identical to SEQ ID NO: 7922
  GFR-binding peptide
  MOD_RES (1)..(2): Xaa is C or S

SEQ ID NO: 29201 - protein, 35 aa, Artificial Sequence; identical to SEQ ID NO: 7923
  GFR-binding peptide
  MOD_RES (3)..(4): Xaa is C or S

SEQ ID NO: 29202 - protein, 34 aa, Artificial Sequence
  GFR-binding peptide
  MOD_RES (1)..(32)..(34): Xaa is C or S
XVSQDLEPISILYLIGKTPKIKFKYEMIVKSXKX

SEQ ID NO: 29203 - protein, 38 aa, Artificial Sequence; identical to SEQ ID NO: 7925
  GFR-binding peptide
  MOD_RES (1)..(35)..(37): Xaa is C or S
  MOD_RES (15)..(16)..(17)..(18)..(19): Xaa is A or G
  MOD_RES (20)..(21)..(22)..(23): Xaa is A or G or is absent

SEQ ID NO: 29204 - protein, 43 aa, Artificial Sequence; identical to SEQ ID NO: 7929
  GFR-binding peptide
  MOD_RES (5)..(6)..(40)..(42): Xaa is C or S
  MOD_RES (20)..(21)..(22)..(23)..(24): Xaa is A or G
  MOD_RES (25)..(26)..(27)..(28): Xaa is A or G or is absent

SEQ ID NO: 29205 - protein, 39 aa, Artificial Sequence; identical to SEQ ID NO: 7931
  GFR-binding peptide
  MOD_RES (5)..(6)..(39): Xaa is C or S
  MOD_RES (20)..(21)..(22)..(23)..(24): Xaa is A or G
  MOD_RES (25)..(26)..(27)..(28): Xaa is A or G or is absent

SEQ ID NO: 29206 - protein, 36 aa, Artificial Sequence
  GFR-binding peptide
  MOD_RES (3)..(4)..(36): Xaa is C or S
KAXXVPTKLSPISILYIDKGVVTYYKQYEGMAVSEX

SEQ ID NO: 29207 - protein, 38 aa, Artificial Sequence; identical to SEQ ID NO: 7934
  GFR-binding peptide
  MOD_RES (6)..(7)..(38): Xaa is C or S

SEQ ID NO: 29208 - protein, 44 aa, Artificial Sequence; identical to SEQ ID NO: 7936
  GFR-binding peptide
  MOD_RES (5)..(6)..(41)..(43): Xaa is C or S
  MOD_RES (20)..(21)..(22)..(23)..(24): Xaa is A or G
  MOD_RES (25)..(26)..(27)..(28): Xaa is A or G or is absent

SEQ ID NO: 29209 - protein, 33 aa, Artificial Sequence
  GFR-binding peptide
  MOD_RES (1)..(2): Xaa is C or S
XXAPTKLEPISVLYLDSSNNVIKFKYENMVVKA

SEQ ID NO: 29210 - protein, 41 aa, Artificial Sequence
  GFR-binding peptide
  MOD_RES (6)..(7)..(41): Xaa is C or S
  MOD_RES (21)..(22)..(23)..(24)..(25): Xaa is A or G
  MOD_RES (26)..(27)..(28)..(29): Xaa is A or G or is absent
AAPASXXVPARLEPISILYLXXXXXXXXXKFKYEDMVVEAX

SEQ ID NO: 29211 - protein, 34 aa, Artificial Sequence; identical to SEQ ID NO: 7937
  GFR-binding peptide
  MOD_RES (2)..(3): Xaa is C or S

SEQ ID NO: 29212 - protein, 38 aa, Artificial Sequence
  GFR-binding peptide
  MOD_RES (1)..(2)..(36)..(38): Xaa is C or S
  MOD_RES (16)..(17)..(18)..(19)..(20): Xaa is A or G
  MOD_RES (21)..(22)..(23)..(24): Xaa is A or G or is absent
XXAPTKLSPISVLYIXXXXXXXXXYKQYENMVVKAXGX

SEQ ID NO: 29213 - protein, 31 aa, Artificial Sequence
  GFR-binding peptide
  MOD_RES (31)..(31): Xaa is C or S
VSQDLEPISILYLIGKTPKIKFKYEMIVKSX

SEQ ID NO: 29214 - protein, 36 aa, Artificial Sequence; identical to SEQ ID NO: 7939
  GFR-binding peptide
  MOD_RES (5)..(6): Xaa is C or S

SEQ ID NO: 29215 - protein, 33 aa, Artificial Sequence
  GFR-binding peptide
  MOD_RES (31)..(33): Xaa is C or S
VPQDLEPISILYLVGRTPKVKFKYEMVVKSXKX

SEQ ID NO: 29216 - protein, 41 aa, Artificial Sequence; identical to SEQ ID NO: 7941
  GFR-binding peptide
  MOD_RES (4)..(5)..(39)..(41): Xaa is C or S
  MOD_RES (19)..(20)..(21)..(22)..(23): Xaa is A or G
  MOD_RES (24)..(25)..(26)..(27): Xaa is A or G or is absent

SEQ ID NO: 29217 - protein, 37 aa, Artificial Sequence; identical to SEQ ID NO: 7942
  GFR-binding peptide
  MOD_RES (3)..(4)..(36): Xaa is C or S

SEQ ID NO: 29218 - protein, 42 aa, Artificial Sequence; identical to SEQ ID NO: 7943
  GFR-binding peptide
  MOD_RES (6)..(7)..(40)..(42): Xaa is C or S
  MOD_RES (21)..(22)..(23)..(24)..(25): Xaa is A or G
  MOD_RES (26)..(27)..(28)..(29): Xaa is A or G or is absent

SEQ ID NO: 29219 - protein, 37 aa, Artificial Sequence
  GFR-binding peptide
  MOD_RES (2)..(3)..(37): Xaa is C or S
  MOD_RES (17)..(18)..(19)..(20)..(21): Xaa is A or G
  MOD_RES (22)..(23)..(24)..(25): Xaa is A or G or is absent
AXXVPTELEPISMLYLXXXXXXXXXKFKYEDMVVEGX

SEQ ID NO: 29220 - protein, 38 aa, Artificial Sequence
  GFR-binding peptide
  MOD_RES (4)..(5)..(38): Xaa is C or S
  MOD_RES (19)..(20)..(21)..(22)..(23): Xaa is A or G
  MOD_RES (24)..(25)..(26)..(27): Xaa is A or G or is absent
ASPXXVSQDLEPISILYLXXXXXXXXXKFKYEMIVKSX

SEQ ID NO: 29221 - protein, 43 aa, Artificial Sequence
  GFR-binding peptide
  MOD_RES (6)..(7)..(41)..(43): Xaa is C or S
  MOD_RES (21)..(22)..(23)..(24)..(25): Xaa is A or G
  MOD_RES (26)..(27)..(28)..(29): Xaa is A or G or is absent
AAPASXXVPARLSPISILYIXXXXXXXXXYKQYEDMVVEAXGX

SEQ ID NO: 29222 - protein, 36 aa, Artificial Sequence
  GFR-binding peptide
  MOD_RES (1)..(35): Xaa is C or S
  MOD_RES (15)..(16)..(17)..(18)..(19): Xaa is A or G
  MOD_RES (20)..(21)..(22)..(23): Xaa is A or G or is absent
XVPTELSPISMLYIXXXXXXXXXYKQYEEMVVEGXG

SEQ ID NO: 29223 - protein, 35 aa, Artificial Sequence; identical to SEQ ID NO: 7946
  GFR-binding peptide
  MOD_RES (2)..(3)..(35): Xaa is C or S

SEQ ID NO: 29224 - protein, 34 aa, Artificial Sequence
  GFR-binding peptide
  MOD_RES (32)..(34): Xaa is C or S
VPTELSPISMLYIDENEKVVYKQYEDMVVEGXGX

SEQ ID NO: 29225 - protein, 41 aa, Artificial Sequence; identical to SEQ ID NO: 7948
  GFR-binding peptide
  MOD_RES (6)..(7)..(38)..(40): Xaa is C or S

SEQ ID NO: 29226 - protein, 32 aa, Artificial Sequence; identical to SEQ ID NO: 7949
  GFR-binding peptide
  MOD_RES (14)..(15)..(16)..(17)..(18): Xaa is A or G
  MOD_RES (19)..(20)..(21)..(22): Xaa is A or G or is absent

SEQ ID NO: 29227 - protein, 38 aa, Artificial Sequence
  GFR-binding peptide
  MOD_RES (5)..(6): Xaa is C or S
  MOD_RES (20)..(21)..(22)..(23)..(24): Xaa is A or G
  MOD_RES (25)..(26)..(27)..(28): Xaa is A or G or is absent
APASXXVPARLSPISILYKXXXXXXXXXLKYHYDMVVE

SEQ ID NO: 29228 - protein, 44 aa, Artificial Sequence
  GFR-binding peptide
  MOD_RES (6)..(7)..(41)..(43): Xaa is C or S
  MOD_RES (21)..(22)..(23)..(24)..(25): Xaa is A or G
  MOD_RES (26)..(27)..(28)..(29): Xaa is A or G or is absent
KIPKAXXVPTELEPISMLYLXXXXXXXXXKFKYEDMVVEGXGXR

SEQ ID NO: 29229 - protein, 37 aa, Artificial Sequence
  GFR-binding peptide
  MOD_RES (2)..(3)..(34)..(36): Xaa is C or S
PXXVPQDLEPISILYLVGRTPKVKFKYEMVVKSXKXS

SEQ ID NO: 29230 - protein, 36 aa, Artificial Sequence
  GFR-binding peptide
  MOD_RES (4)..(5): Xaa is C or S
PASXXVPARLEPISILYLDAANNVVKFKYEDMVVEA

SEQ ID NO: 29231 - protein, 34 aa, Artificial Sequence; identical to SEQ ID NO: 7951
  GFR-binding peptide
  MOD_RES (3)..(4): Xaa is C or S

SEQ ID NO: 29232 - protein, 33 aa, Artificial Sequence
  GFR-binding peptide
  MOD_RES (31)..(33): Xaa is C or S
VSQDLEPISILYLIGKTPKIKFKYEMIVKSXKX

SEQ ID NO: 29233 - protein, 37 aa, Artificial Sequence; identical to SEQ ID NO: 7952
  GFR-binding peptide
  MOD_RES (1)..(35)..(37): Xaa is C or S
  MOD_RES (15)..(16)..(17)..(18)..(19): Xaa is A or G
  MOD_RES (20)..(21)..(22)..(23): Xaa is A or G or is absent

SEQ ID NO: 29234 - protein, 38 aa, Artificial Sequence; identical to SEQ ID NO: 7954
  GFR-binding peptide
  MOD_RES (2)..(3)..(37): Xaa is C or S
  MOD_RES (17)..(18)..(19)..(20)..(21): Xaa is A or G
  MOD_RES (22)..(23)..(24)..(25): Xaa is A or G or is absent

SEQ ID NO: 29235 - protein, 40 aa, Artificial Sequence
  GFR-binding peptide
  MOD_RES (4)..(5)..(37)..(39): Xaa is C or S
SKAXXVPTKLSPISILYIDKGVVTYYKQYEGMAVSEXGXR

SEQ ID NO: 29236 - protein, 33 aa, Artificial Sequence
  GFR-binding peptide
  MOD_RES (2)..(2): Xaa is C or S
TXAPTKLEPISVLYLDDSSNVIKFKYENMVVRS

SEQ ID NO: 29237 - protein, 32 aa, Artificial Sequence
  GFR-binding peptide
  MOD_RES (1)..(32): Xaa is C or S
XVSQDLEPISILYLIGKTPKIKFKYEMIVKSX

SEQ ID NO: 29238 - protein, 37 aa, Artificial Sequence
  GFR-binding peptide
  MOD_RES (3)..(4): Xaa is C or S
  MOD_RES (18)..(19)..(20)..(21)..(22): Xaa is A or G
  MOD_RES (23)..(24)..(25)..(26): Xaa is A or G or is absent
ASXXVPARLEPISILYLXXXXXXXXXKFKYEDMVVEA

SEQ ID NO: 29239 - protein, 33 aa, Artificial Sequence; identical to SEQ ID NO: 7958
  GFR-binding peptide
  MOD_RES (1)..(1): Xaa is C or S
  MOD_RES (15)..(16)..(17)..(18)..(19): Xaa is A or G
  MOD_RES (20)..(21)..(22)..(23): Xaa is A or G or is absent

SEQ ID NO: 29240 - protein, 37 aa, Artificial Sequence
  GFR-binding peptide
  MOD_RES (3)..(4)..(36): Xaa is C or S
KAXXVPTELSPISMLYIDENEKVVYKQYEDMVVEGXG

SEQ ID NO: 29241 - protein, 33 aa, Artificial Sequence
  GFR-binding peptide
  MOD_RES (1)..(32): Xaa is C or S
XVPQDLEPISILYLVGRTPKVKFKYEMVVKSXK

SEQ ID NO: 29242 - protein, 36 aa, Artificial Sequence; identical to SEQ ID NO: 7960
  GFR-binding peptide
  MOD_RES (1)..(2)..(35): Xaa is C or S
  MOD_RES (16)..(17)..(18)..(19)..(20): Xaa is A or G
  MOD_RES (21)..(22)..(23)..(24): Xaa is A or G or is absent

SEQ ID NO: 29243 - protein, 39 aa, Artificial Sequence
  GFR-binding peptide
  MOD_RES (6)..(38): Xaa is C or S
VTKPTXAPTKLSPISVLYIDDSSNVIYKQYENMVVRSXG

SEQ ID NO: 29244 - protein, 37 aa, Artificial Sequence; identical to SEQ ID NO: 7962
  GFR-binding peptide
  MOD_RES (2)..(3)..(37): Xaa is C or S
  MOD_RES (17)..(18)..(19)..(20)..(21): Xaa is A or G
  MOD_RES (22)..(23)..(24)..(25): Xaa is A or G or is absent

SEQ ID NO: 29245 - protein, 36 aa, Artificial Sequence
  GFR-binding peptide
  MOD_RES (1)..(2)..(36): Xaa is C or S
  MOD_RES (16)..(17)..(18)..(19)..(20): Xaa is A or G
  MOD_RES (21)..(22)..(23)..(24): Xaa is A or G or is absent
XXVPTKLEPISILYLXXXXXXXXXKFKYEGMAVSEX

SEQ ID NO: 29246 - protein, 30 aa, Artificial Sequence; identical to SEQ ID NO: 7964
  GFR-binding peptide

SEQ ID NO: 29247 - protein, 32 aa, Artificial Sequence; identical to SEQ ID NO: 7966
  GFR-binding peptide
  MOD_RES (1)..(32): Xaa is C or S

SEQ ID NO: 29248 - protein, 31 aa, Artificial Sequence; identical to SEQ ID NO: 7967
  GFR-binding peptide
  MOD_RES (31)..(31): Xaa is C or S

SEQ ID NO: 29249 - protein, 37 aa, Artificial Sequence; identical to SEQ ID NO: 7969
  GFR-binding peptide
  MOD_RES (1)..(2)..(36): Xaa is C or S
  MOD_RES (16)..(17)..(18)..(19)..(20): Xaa is A or G
  MOD_RES (21)..(22)..(23)..(24): Xaa is A or G or is absent

SEQ ID NO: 29250 - protein, 36 aa, Artificial Sequence
  GFR-binding peptide
  MOD_RES (34)..(36): Xaa is C or S
  MOD_RES (14)..(15)..(16)..(17)..(18): Xaa is A or G
  MOD_RES (19)..(20)..(21)..(22): Xaa is A or G or is absent
VPTKLSPISILYKXXXXXXXXXLKYHYGMAVSEXGX

SEQ ID NO: 29251 - protein, 36 aa, Artificial Sequence; identical to SEQ ID NO: 7970
  GFR-binding peptide
  MOD_RES (1)..(2)..(33)..(35): Xaa is C or S

SEQ ID NO: 29252 - protein, 34 aa, Artificial Sequence
  GFR-binding peptide
  MOD_RES (1)..(2): Xaa is C or S
  MOD_RES (16)..(17)..(18)..(19)..(20): Xaa is A or G
  MOD_RES (21)..(22)..(23)..(24): Xaa is A or G or is absent
XXVPARLSPISILYIXXXXXXXXXYKQYEDMVVE

SEQ ID NO: 29253 - protein, 39 aa, Artificial Sequence
  GFR-binding peptide
  MOD_RES (6)..(7): Xaa is C or S
  MOD_RES (21)..(22)..(23)..(24)..(25): Xaa is A or G
  MOD_RES (26)..(27)..(28)..(29): Xaa is A or G or is absent
AAPASXXVPARLSPISILYKXXXXXXXXXLKYHYDMVVE

SEQ ID NO: 29254 - protein, 40 aa, Artificial Sequence; identical to SEQ ID NO: 7972
  GFR-binding peptide
  MOD_RES (6)..(7)..(38)..(40): Xaa is C or S

SEQ ID NO: 29255 - protein, 38 aa, Artificial Sequence; identical to SEQ ID NO: 7973
  GFR-binding peptide
  MOD_RES (4)..(5)..(38): Xaa is C or S
  MOD_RES (19)..(20)..(21)..(22)..(23): Xaa is A or G
  MOD_RES (24)..(25)..(26)..(27): Xaa is A or G or is absent

SEQ ID NO: 29256 - protein, 37 aa, Artificial Sequence
  GFR-binding peptide
  MOD_RES (34)..(36): Xaa is C or S
  MOD_RES (14)..(15)..(16)..(17)..(18): Xaa is A or G
  MOD_RES (19)..(20)..(21)..(22): Xaa is A or G or is absent
VPTKLEPISILYLXXXXXXXXXKFKYEGMAVSEXGXR

SEQ ID NO: 29257 - protein, 38 aa, Artificial Sequence
  GFR-binding peptide
  MOD_RES (1)..(35)..(37): Xaa is C or S
  MOD_RES (15)..(16)..(17)..(18)..(19): Xaa is A or G
  MOD_RES (20)..(21)..(22)..(23): Xaa is A or G or is absent
XVPTKLNAISILYFXXXXXXXXXLKKYRGMAVSEXGXR

SEQ ID NO: 29258 - protein, 37 aa, Artificial Sequence; identical to SEQ ID NO: 7974
  GFR-binding peptide
  MOD_RES (2)..(3)..(34)..(36): Xaa is C or S

SEQ ID NO: 29259 - protein, 35 aa, Artificial Sequence
  GFR-binding peptide
  MOD_RES (4)..(5): Xaa is C or S
PKPXXAPTKLSPISVLYIDDSSNVIYKQYENMVVR

SEQ ID NO: 29260 - protein, 39 aa, Artificial Sequence
  GFR-binding peptide
  MOD_RES (5)..(6)..(39): Xaa is C or S
  MOD_RES (20)..(21)..(22)..(23)..(24): Xaa is A or G
  MOD_RES (25)..(26)..(27)..(28): Xaa is A or G or is absent
SAAPXXVPQALEPISILYLXXXXXXXXXKFKYEMIVRSX

SEQ ID NO: 29261 - protein, 40 aa, Artificial Sequence
  GFR-binding peptide
  MOD_RES (6)..(7): Xaa is C or S
  MOD_RES (21)..(22)..(23)..(24)..(25): Xaa is A or G
  MOD_RES (26)..(27)..(28)..(29): Xaa is A or G or is absent
AVPKAXXAPTKLEPISVLYLXXXXXXXXXKFKYENMVVKA

SEQ ID NO: 29262 - protein, 35 aa, Artificial Sequence; identical to SEQ ID NO: 7976
  GFR-binding peptide
  MOD_RES (1)..(2)..(33)..(35): Xaa is C or S

SEQ ID NO: 29263 - protein, 42 aa, Artificial Sequence; identical to SEQ ID NO: 7977
  GFR-binding peptide
  MOD_RES (5)..(6)..(39)..(41): Xaa is C or S
  MOD_RES (20)..(21)..(22)..(23)..(24): Xaa is A or G
  MOD_RES (25)..(26)..(27)..(28): Xaa is A or G or is absent

SEQ ID NO: 29264 - protein, 38 aa, Artificial Sequence; identical to SEQ ID NO: 7979
  GFR-binding peptide
  MOD_RES (5)..(6)..(38): Xaa is C or S

SEQ ID NO: 29265 - protein, 41 aa, Artificial Sequence
  GFR-binding peptide
  MOD_RES (4)..(38)..(40): Xaa is C or S
  MOD_RES (18)..(19)..(20)..(21)..(22): Xaa is A or G
  MOD_RES (23)..(24)..(25)..(26): Xaa is A or G or is absent
KPTXAPTKLEPISVLYLXXXXXXXXXKFKYENMVVRSXGXH

SEQ ID NO: 29266 - protein, 37 aa, Artificial Sequence; identical to SEQ ID NO: 7989
  GFR-binding peptide
  MOD_RES (2)..(3)..(36): Xaa is C or S
  MOD_RES (17)..(18)..(19)..(20)..(21): Xaa is A or G
  MOD_RES (22)..(23)..(24)..(25): Xaa is A or G or is absent

SEQ ID NO: 29267 - protein, 38 aa, Artificial Sequence; identical to SEQ ID NO: 7992
  GFR-binding peptide
  MOD_RES (6)..(38): Xaa is C or S

SEQ ID NO: 29268 - protein, 37 aa, Artificial Sequence
  GFR-binding peptide
  MOD_RES (3)..(4)..(35)..(37): Xaa is C or S
SPXXVSQDLSPISILYIIGKTPKIYKQYEMIVKSXKX

SEQ ID NO: 29269 - protein, 35 aa, Artificial Sequence
  GFR-binding peptide
  MOD_RES (1)..(33)..(35): Xaa is C or S
XVPARLNAISILYFDAANNVVLKKYRDMVVEAXGX

SEQ ID NO: 29270 - protein, 35 aa, Artificial Sequence; identical to SEQ ID NO: 7994
  GFR-binding peptide
  MOD_RES (1)..(32)..(34): Xaa is C or S

SEQ ID NO: 29271 - protein, 34 aa, Artificial Sequence
  GFR-binding peptide
  MOD_RES (1)..(2)..(34): Xaa is C or S
XXVPARLNAISILYFDAANNVVLKKYRDMVVEAX

SEQ ID NO: 29272 - protein, 35 aa, Artificial Sequence; identical to SEQ ID NO: 7995
  GFR-binding peptide
  MOD_RES (1)..(33)..(35): Xaa is C or S

SEQ ID NO: 29273 - protein, 39 aa, Artificial Sequence
  GFR-binding peptide
  MOD_RES (2)..(3)..(37)..(39): Xaa is C or S
  MOD_RES (17)..(18)..(19)..(20)..(21): Xaa is A or G
  MOD_RES (22)..(23)..(24)..(25): Xaa is A or G or is absent
AXXVPTKLNAISILYFXXXXXXXXXLKKYRGMAVSEXGX

SEQ ID NO: 29274 - protein, 33 aa, Artificial Sequence
  GFR-binding peptide
  MOD_RES (14)..(15)..(16)..(17)..(18): Xaa is A or G
  MOD_RES (19)..(20)..(21)..(22): Xaa is A or G or is absent
VPARLEPISILYLXXXXXXXXXKFKYEDMVVEA

SEQ ID NO: 29275 - protein, 38 aa, Artificial Sequence
  GFR-binding peptide
  MOD_RES (7)..(7): Xaa is C or S
HVTKPTXAPTKLSPISVLYIDDSSNVIYKQYENMVVRS

SEQ ID NO: 29276 - protein, 37 aa, Artificial Sequence
  GFR-binding peptide
  MOD_RES (2)..(3)..(37): Xaa is C or S
  MOD_RES (17)..(18)..(19)..(20)..(21): Xaa is A or G
  MOD_RES (22)..(23)..(24)..(25): Xaa is A or G or is absent
AXXAPTKLSPISVLYIXXXXXXXXXYKQYENMVVKAX

SEQ ID NO: 29277 - protein, 41 aa, Artificial Sequence; identical to SEQ ID NO: 7999
  GFR-binding peptide
  MOD_RES (5)..(6)..(38)..(40): Xaa is C or S

SEQ ID NO: 29278 - protein, 33 aa, Artificial Sequence
  GFR-binding peptide
  MOD_RES (1)..(2)..(33): Xaa is C or S
XXVPQDLSPISILYIVGRTPKVYKQYEMVVKSX

SEQ ID NO: 29279 - protein, 32 aa, Artificial Sequence
  GFR-binding peptide
  MOD_RES (14)..(15)..(16)..(17)..(18): Xaa is A or G
  MOD_RES (19)..(20)..(21)..(22): Xaa is A or G or is absent
VPARLNAISILYFXXXXXXXXXLKKYRDMVVE

SEQ ID NO: 29280 - protein, 39 aa, Artificial Sequence; identical to SEQ ID NO: 8000
  GFR-binding peptide
  MOD_RES (5)..(6): Xaa is C or S
  MOD_RES (20)..(21)..(22)..(23)..(24): Xaa is A or G
  MOD_RES (25)..(26)..(27)..(28): Xaa is A or G or is absent

SEQ ID NO: 29281 - protein, 39 aa, Artificial Sequence
  GFR-binding peptide
  MOD_RES (5)..(6): Xaa is C or S
  MOD_RES (20)..(21)..(22)..(23)..(24): Xaa is A or G
  MOD_RES (25)..(26)..(27)..(28): Xaa is A or G or is absent
ASKAXXVPTKLSPISILYIXXXXXXXXXYKQYEGMAVSE

SEQ ID NO: 29282 - protein, 43 aa, Artificial Sequence
  GFR-binding peptide
  MOD_RES (6)..(7)..(40)..(42): Xaa is C or S
  MOD_RES (21)..(22)..(23)..(24)..(25): Xaa is A or G
  MOD_RES (26)..(27)..(28)..(29): Xaa is A or G or is absent
ASASPXXVPQDLSPISILYIXXXXXXXXXYKQYEMVVKSXKXS

SEQ ID NO: 29283 - protein, 40 aa, Artificial Sequence
  GFR-binding peptide
  MOD_RES (2)..(3)..(37)..(39): Xaa is C or S
  MOD_RES (17)..(18)..(19)..(20)..(21): Xaa is A or G
  MOD_RES (22)..(23)..(24)..(25): Xaa is A or G or is absent
SXXVPARLEPISILYLXXXXXXXXXKFKYEDMVVEAXGXR

SEQ ID NO: 29284 - protein, 39 aa, Artificial Sequence; identical to SEQ ID NO: 8004
  GFR-binding peptide
  MOD_RES (7)..(7): Xaa is C or S
  MOD_RES (21)..(22)..(23)..(24)..(25): Xaa is A or G
  MOD_RES (26)..(27)..(28)..(29): Xaa is A or G or is absent

SEQ ID NO: 29285 - protein, 34 aa, Artificial Sequence; identical to SEQ ID NO: 8006
  GFR-binding peptide
  MOD_RES (1)..(32)..(34): Xaa is C or S

SEQ ID NO: 29286 - protein, 37 aa, Artificial Sequence
  GFR-binding peptide
  MOD_RES (4)..(5): Xaa is C or S
  MOD_RES (19)..(20)..(21)..(22)..(23): Xaa is A or G
  MOD_RES (24)..(25)..(26)..(27): Xaa is A or G or is absent
PKAXXVPTELSPISMLYIXXXXXXXXXYKQYEDMVVE

SEQ ID NO: 29287 - protein, 35 aa, Artificial Sequence
  GFR-binding peptide
  MOD_RES (2)..(3)..(34): Xaa is C or S
PXXVSQDLSPISILYIIGKTPKIYKQYEMIVKSXK

SEQ ID NO: 29288 - protein, 33 aa, Artificial Sequence
  GFR-binding peptide
  MOD_RES (14)..(15)..(16)..(17)..(18): Xaa is A or G
  MOD_RES (19)..(20)..(21)..(22): Xaa is A or G or is absent
VPTELSPISMLYIXXXXXXXXXYKQYEDMVVEG

SEQ ID NO: 29289 - protein, 40 aa, Artificial Sequence
  GFR-binding peptide
  MOD_RES (2)..(3)..(37)..(39): Xaa is C or S
  MOD_RES (17)..(18)..(19)..(20)..(21): Xaa is A or G
  MOD_RES (22)..(23)..(24)..(25): Xaa is A or G or is absent
SXXVPARLNAISILYFXXXXXXXXXLKKYRDMVVEAXGXR

SEQ ID NO: 29290 - protein, 42 aa, Artificial Sequence; identical to SEQ ID NO: 8016
  GFR-binding peptide
  MOD_RES (5)..(6)..(39)..(41): Xaa is C or S

SEQ ID NO: 29291 - protein, 38 aa, Artificial Sequence
  GFR-binding peptide
  MOD_RES (4)..(5)..(37): Xaa is C or S
PKAXXAPTKLEPISVLYLDSSNNVIKFKYENMVVKAXG

SEQ ID NO: 29292 - protein, 36 aa, Artificial Sequence; identical to SEQ ID NO: 8018
  GFR-binding peptide
  MOD_RES (2)..(36): Xaa is C or S
  MOD_RES (16)..(17)..(18)..(19)..(20): Xaa is A or G
  MOD_RES (21)..(22)..(23)..(24): Xaa is A or G or is absent

SEQ ID NO: 29293 - protein, 34 aa, Artificial Sequence; identical to SEQ ID NO: 8019
  GFR-binding peptide
  MOD_RES (34)..(34): Xaa is C or S
  MOD_RES (14)..(15)..(16)..(17)..(18): Xaa is A or G
  MOD_RES (19)..(20)..(21)..(22): Xaa is A or G or is absent

SEQ ID NO: 29294 - protein, 38 aa, Artificial Sequence
  GFR-binding peptide
  MOD_RES (6)..(7): Xaa is C or S
YVPKPXXAPTKLSPISVLYIDDSSNVIYKQYENMVVRS

SEQ ID NO: 29295 - protein, 33 aa, Artificial Sequence; identical to SEQ ID NO: 8023
  GFR-binding peptide
  MOD_RES (3)..(3): Xaa is C or S

SEQ ID NO: 29296 - protein, 44 aa, Artificial Sequence; identical to SEQ ID NO: 8024
  GFR-binding peptide
  MOD_RES (6)..(7)..(41)..(43): Xaa is C or S
  MOD_RES (21)..(22)..(23)..(24)..(25): Xaa is A or G
  MOD_RES (26)..(27)..(28)..(29): Xaa is A or G or is absent

SEQ ID NO: 29297 - protein, 38 aa, Artificial Sequence
  GFR-binding peptide
  MOD_RES (6)..(7): Xaa is C or S
KASKAXXVPTKLNAISILYFDKGVVTYLKKYRGMAVSE

SEQ ID NO: 29298 - protein, 41 aa, Artificial Sequence
  GFR-binding peptide
  MOD_RES (6)..(7)..(39)..(41): Xaa is C or S
SIPKAXXVPTELSPISMLYIDEYDKVVYKQYEEMVVEGXGX

SEQ ID NO: 29299 - protein, 32 aa, Artificial Sequence
  GFR-binding peptide
  MOD_RES (32)..(32): Xaa is C or S
APTQLSPISVLYIDDSSNVIYKQYENMVVRAX

SEQ ID NO: 29300 - protein, 39 aa, Artificial Sequence
  GFR-binding peptide
  MOD_RES (6)..(7)..(39): Xaa is C or S
KIPKAXXVPTELEPISMLYLDENEKVVKFKYEDMVVEGX

SEQ ID NO: 29301 - protein, 42 aa, Artificial Sequence
  GFR-binding peptide
  MOD_RES (6)..(7)..(39)..(41): Xaa is C or S
KIPKAXXVPTELSPISMLYIDENEKVVYKQYEDMVVEGXGXR

SEQ ID NO: 29302 - protein, 43 aa, Artificial Sequence; identical to SEQ ID NO: 8030
  GFR-binding peptide
  MOD_RES (6)..(7)..(41)..(43): Xaa is C or S
  MOD_RES (21)..(22)..(23)..(24)..(25): Xaa is A or G
  MOD_RES (26)..(27)..(28)..(29): Xaa is A or G or is absent

SEQ ID NO: 29303 - protein, 35 aa, Artificial Sequence
  GFR-binding peptide
  MOD_RES (4)..(4): Xaa is C or S
KPTXAPTKLSPISVLYIDDSSNVIYKQYENMVVRS

SEQ ID NO: 29304 - protein, 38 aa, Artificial Sequence
  GFR-binding peptide
  MOD_RES (5)..(6)..(37): Xaa is C or S
SASPXXVPQDLSPISILYIVGRTPKVYKQYEMVVKSXK

SEQ ID NO: 29305 - protein, 40 aa, Artificial Sequence; identical to SEQ ID NO: 8032
  GFR-binding peptide
  MOD_RES (5)..(6)..(39): Xaa is C or S
  MOD_RES (20)..(21)..(22)..(23)..(24): Xaa is A or G
  MOD_RES (25)..(26)..(27)..(28): Xaa is A or G or is absent

SEQ ID NO: 29306 - protein, 44 aa, Artificial Sequence
  GFR-binding peptide
  MOD_RES (6)..(7)..(41)..(43): Xaa is C or S
  MOD_RES (21)..(22)..(23)..(24)..(25): Xaa is A or G
  MOD_RES (26)..(27)..(28)..(29): Xaa is A or G or is absent
AVPKAXXAPTKLEPISVLYLXXXXXXXXXKFKYENMVVKAXGXH

SEQ ID NO: 29307 - protein, 37 aa, Artificial Sequence
  GFR-binding peptide
  MOD_RES (4)..(5): Xaa is C or S
  MOD_RES (19)..(20)..(21)..(22)..(23): Xaa is A or G
  MOD_RES (24)..(25)..(26)..(27): Xaa is A or G or is absent
ASPXXVPQDLEPISILYLXXXXXXXXXKFKYEMVVKS

SEQ ID NO: 29308 - protein, 35 aa, Artificial Sequence
  GFR-binding peptide
  MOD_RES (4)..(5): Xaa is C or S
ASPXXVSQDLEPISILYLIGKTPKIKFKYEMIVKS

SEQ ID NO: 29309 - protein, 37 aa, Artificial Sequence; identical to SEQ ID NO: 8034
  GFR-binding peptide
  MOD_RES (3)..(4): Xaa is C or S
  MOD_RES (18)..(19)..(20)..(21)..(22): Xaa is A or G
  MOD_RES (23)..(24)..(25)..(26): Xaa is A or G or is absent

SEQ ID NO: 29310 - protein, 41 aa, Artificial Sequence; identical to SEQ ID NO: 8035
  GFR-binding peptide
  MOD_RES (4)..(5)..(40): Xaa is C or S
  MOD_RES (19)..(20)..(21)..(22)..(23): Xaa is A or G
  MOD_RES (24)..(25)..(26)..(27): Xaa is A or G or is absent

SEQ ID NO: 29311 - protein, 36 aa, Artificial Sequence
  GFR-binding peptide
  MOD_RES (4)..(5): Xaa is C or S
SKAXXVPTKLSPISILYIDKGVVTYYKQYEGMAVSE

SEQ ID NO: 29312 - protein, 38 aa, Artificial Sequence; identical to SEQ ID NO: 8036
  GFR-binding peptide
  MOD_RES (5)..(6): Xaa is C or S
  MOD_RES (20)..(21)..(22)..(23)..(24): Xaa is A or G
  MOD_RES (25)..(26)..(27)..(28): Xaa is A or G or is absent

SEQ ID NO: 29313 - protein, 33 aa, Artificial Sequence; identical to SEQ ID NO: 8037
  GFR-binding peptide
  MOD_RES (1)..(32): Xaa is C or S

SEQ ID NO: 29314 - protein, 39 aa, Artificial Sequence; identical to SEQ ID NO: 8038
  GFR-binding peptide
  MOD_RES (1)..(2)..(36)..(38): Xaa is C or S
  MOD_RES (16)..(17)..(18)..(19)..(20): Xaa is A or G
  MOD_RES (21)..(22)..(23)..(24): Xaa is A or G or is absent

SEQ ID NO: 29315 - protein, 43 aa, Artificial Sequence
  GFR-binding peptide
  MOD_RES (5)..(6)..(40)..(42): Xaa is C or S
  MOD_RES (20)..(21)..(22)..(23)..(24): Xaa is A or G
  MOD_RES (25)..(26)..(27)..(28): Xaa is A or G or is absent
ASKAXXVPTKLEPISILYLXXXXXXXXXKFKYEGMAVSEXGXR

SEQ ID NO: 29316 - protein, 38 aa, Artificial Sequence
  GFR-binding peptide
  MOD_RES (4)..(5)..(36)..(38): Xaa is C or S
ASPXXVPQDLSPISILYIVGRTPKVYKQYEMVVKSXKX

SEQ ID NO: 29317 - protein, 37 aa, Artificial Sequence
  GFR-binding peptide
  MOD_RES (1)..(2)..(35)..(37): Xaa is C or S
  MOD_RES (16)..(17)..(18)..(19)..(20): Xaa is A or G
  MOD_RES (21)..(22)..(23)..(24): Xaa is A or G or is absent
XXVSQDLEPISILYLXXXXXXXXXKFKYEMIVKSXKX

SEQ ID NO: 29318 - protein, 33 aa, Artificial Sequence; identical to SEQ ID NO: 8039
  GFR-binding peptide
  MOD_RES (1)..(32): Xaa is C or S

SEQ ID NO: 29319 - protein, 37 aa, Artificial Sequence; identical to SEQ ID NO: 8040
  GFR-binding peptide
  MOD_RES (1)..(2)..(36): Xaa is C or S
  MOD_RES (16)..(17)..(18)..(19)..(20): Xaa is A or G
  MOD_RES (21)..(22)..(23)..(24): Xaa is A or G or is absent

SEQ ID NO: 29320 - protein, 33 aa, Artificial Sequence
  GFR-binding peptide
  MOD_RES (32)..(32): Xaa is C or S
VPTELSPISMLYIDEYDKVVYKQYEEMVVEGXG

SEQ ID NO: 29321 - protein, 33 aa, Artificial Sequence
  GFR-binding peptide
  MOD_RES (2)..(3): Xaa is C or S
AXXVPTELEPISMLYLDENEKVVKFKYEDMVVE

SEQ ID NO: 29322 - protein, 34 aa, Artificial Sequence
  GFR-binding peptide
  MOD_RES (3)..(4): Xaa is C or S
SPXXVPQDLSPISILYIVGRTPKVYKQYEMVVKS

SEQ ID NO: 29323 - protein, 40 aa, Artificial Sequence; identical to SEQ ID NO: 8042
  GFR-binding peptide
  MOD_RES (7)..(39): Xaa is C or S

SEQ ID NO: 29324 - protein, 36 aa, Artificial Sequence; identical to SEQ ID NO: 8043
  GFR-binding peptide
  MOD_RES (2)..(3): Xaa is C or S
  MOD_RES (17)..(18)..(19)..(20)..(21): Xaa is A or G
  MOD_RES (22)..(23)..(24)..(25): Xaa is A or G or is absent

SEQ ID NO: 29325 - protein, 40 aa, Artificial Sequence; identical to SEQ ID NO: 8045
  GFR-binding peptide
  MOD_RES (4)..(5)..(37)..(39): Xaa is C or S

SEQ ID NO: 29326 - protein, 32 aa, Artificial Sequence; identical to SEQ ID NO: 8048
  GFR-binding peptide
  MOD_RES (1)..(2): Xaa is C or S

SEQ ID NO: 29327 - protein, 41 aa, Artificial Sequence; identical to SEQ ID NO: 8051
  GFR-binding peptide
  MOD_RES (6)..(7)..(41): Xaa is C or S
  MOD_RES (21)..(22)..(23)..(24)..(25): Xaa is A or G
  MOD_RES (26)..(27)..(28)..(29): Xaa is A or G or is absent

SEQ ID NO: 29328 - protein, 32 aa, Artificial Sequence; identical to SEQ ID NO: 8053
  GFR-binding peptide
  MOD_RES (32)..(32): Xaa is C or S

SEQ ID NO: 29329 - protein, 34 aa, Artificial Sequence
  GFR-binding peptide
  MOD_RES (1)..(1): Xaa is C or S
  MOD_RES (15)..(16)..(17)..(18)..(19): Xaa is A or G
  MOD_RES (20)..(21)..(22)..(23): Xaa is A or G or is absent
XAPTKLSPISVLYIXXXXXXXXXYKQYENMVVRS

SEQ ID NO: 29330 - protein, 39 aa, Artificial Sequence
  GFR-binding peptide
  MOD_RES (1)..(2)..(36)..(38): Xaa is C or S
  MOD_RES (16)..(17)..(18)..(19)..(20): Xaa is A or G
  MOD_RES (21)..(22)..(23)..(24): Xaa is A or G or is absent
XXVPTELEPISMLYLXXXXXXXXXKFKYEEMVVEGXGXR

SEQ ID NO: 29331 - protein, 38 aa, Artificial Sequence; identical to SEQ ID NO: 8055
  GFR-binding peptide
  MOD_RES (3)..(4)..(36)..(38): Xaa is C or S

SEQ ID NO: 29332 - protein, 42 aa, Artificial Sequence
  GFR-binding peptide
  MOD_RES (4)..(5)..(39)..(41): Xaa is C or S
  MOD_RES (19)..(20)..(21)..(22)..(23): Xaa is A or G
  MOD_RES (24)..(25)..(26)..(27): Xaa is A or G or is absent
PKAXXVPTELEPISMLYLXXXXXXXXXKFKYEDMVVEGXGXR

SEQ ID NO: 29333 - protein, 39 aa, Artificial Sequence; identical to SEQ ID NO: 8056
  GFR-binding peptide
  MOD_RES (4)..(5): Xaa is C or S
  MOD_RES (19)..(20)..(21)..(22)..(23): Xaa is A or G
  MOD_RES (24)..(25)..(26)..(27): Xaa is A or G or is absent

SEQ ID NO: 29334 - protein, 32 aa, Artificial Sequence
  GFR-binding peptide
  MOD_RES (14)..(15)..(16)..(17)..(18): Xaa is A or G
  MOD_RES (19)..(20)..(21)..(22): Xaa is A or G or is absent
APTQLSPISVLYIXXXXXXXXXYKQYENMVVR

SEQ ID NO: 29335 - protein, 39 aa, Artificial Sequence
  GFR-binding peptide
  MOD_RES (5)..(6)..(38): Xaa is C or S
VPKPXXAPTQLEPISVLYLDDSSNVIKFKYENMVVRAXG

SEQ ID NO: 29336 - protein, 41 aa, Artificial Sequence; identical to SEQ ID NO: 8057
  GFR-binding peptide
  MOD_RES (7)..(41): Xaa is C or S
  MOD_RES (21)..(22)..(23)..(24)..(25): Xaa is A or G
  MOD_RES (26)..(27)..(28)..(29): Xaa is A or G or is absent

SEQ ID NO: 29337 - protein, 38 aa, Artificial Sequence
  GFR-binding peptide
  MOD_RES (3)..(4)..(38): Xaa is C or S
  MOD_RES (18)..(19)..(20)..(21)..(22): Xaa is A or G
  MOD_RES (23)..(24)..(25)..(26): Xaa is A or G or is absent
KAXXVPTKLSPISILYKXXXXXXXXXLKYHYGMAVSEX

SEQ ID NO: 29338 - protein, 38 aa, Artificial Sequence
  GFR-binding peptide
  MOD_RES (2)..(3)..(35)..(37): Xaa is C or S
PXXAPTQLSPISVLYIDDSSNVIYKQYENMVVRAXGXH

SEQ ID NO: 29339 - protein, 36 aa, Artificial Sequence; identical to SEQ ID NO: 8059
  GFR-binding peptide
  MOD_RES (1)..(35): Xaa is C or S
  MOD_RES (15)..(16)..(17)..(18)..(19): Xaa is A or G
  MOD_RES (20)..(21)..(22)..(23): Xaa is A or G or is absent

SEQ ID NO: 29340 - protein, 32 aa, Artificial Sequence
  GFR-binding peptide
  MOD_RES (1)..(2): Xaa is C or S
XXAPTQLEPISVLYLDDSSNVIKFKYENMVVR

SEQ ID NO: 29341 - protein, 39 aa, Artificial Sequence
  GFR-binding peptide
  MOD_RES (4)..(5)..(36)..(38): Xaa is C or S
AAPXXVPQALSPISILYIVGRKPKVYKQYEMIVRSXKXS

SEQ ID NO: 29342 - protein, 38 aa, Artificial Sequence; identical to SEQ ID NO: 8060
  GFR-binding peptide
  MOD_RES (4)..(38): Xaa is C or S
  MOD_RES (18)..(19)..(20)..(21)..(22): Xaa is A or G
  MOD_RES (23)..(24)..(25)..(26): Xaa is A or G or is absent

SEQ ID NO: 29343 - protein, 39 aa, Artificial Sequence
  GFR-binding peptide
  MOD_RES (5)..(6): Xaa is C or S
  MOD_RES (20)..(21)..(22)..(23)..(24): Xaa is A or G
  MOD_RES (25)..(26)..(27)..(28): Xaa is A or G or is absent
VPKPXXAPTQLEPISVLYLXXXXXXXXXKFKYENMVVRA

SEQ ID NO: 29344 - protein, 40 aa, Artificial Sequence
  GFR-binding peptide
  MOD_RES (6)..(7)..(40): Xaa is C or S
KVGKAXXVPTKLSPISVLYIDDMGVPTYKQYEEGMSVAEX

SEQ ID NO: 29345 - protein, 39 aa, Artificial Sequence
  GFR-binding peptide
  MOD_RES (3)..(4)..(38): Xaa is C or S
  MOD_RES (18)..(19)..(20)..(21)..(22): Xaa is A or G
  MOD_RES (23)..(24)..(25)..(26): Xaa is A or G or is absent
KAXXVPTELSPISMLYIXXXXXXXXXYKQYEDMVVEGXG

SEQ ID NO: 29346 - protein, 38 aa, Artificial Sequence; identical to SEQ ID NO: 8063
  GFR-binding peptide
  MOD_RES (4)..(5)..(37): Xaa is C or S

SEQ ID NO: 29347 - protein, 37 aa, Artificial Sequence
  GFR-binding peptide
  MOD_RES (4)..(5)..(37): Xaa is C or S
SKAXXVPTKLSPISILYKDKGVVTYLKYHYGMAVSEX

SEQ ID NO: 29348 - protein, 37 aa, Artificial Sequence; identical to SEQ ID NO: 8064
  GFR-binding peptide
  MOD_RES (6)..(7): Xaa is C or S

SEQ ID NO: 29349 - protein, 33 aa, Artificial Sequence; identical to SEQ ID NO: 8065
  GFR-binding peptide
  MOD_RES (2)..(3): Xaa is C or S

SEQ ID NO: 29350 - protein, 38 aa, Artificial Sequence
  GFR-binding peptide
  MOD_RES (5)..(6)..(37): Xaa is C or S
SAAPXXVPQALEPISILYLVGRKPKVKFKYEMIVRSXK

SEQ ID NO: 29351 - protein, 38 aa, Artificial Sequence; identical to SEQ ID NO: 8067
  GFR-binding peptide
  MOD_RES (2)..(3)..(36)..(38): Xaa is C or S
  MOD_RES (17)..(18)..(19)..(20)..(21): Xaa is A or G
  MOD_RES (22)..(23)..(24)..(25): Xaa is A or G or is absent

SEQ ID NO: 29352 - protein, 37 aa, Artificial Sequence
  GFR-binding peptide
  MOD_RES (6)..(7): Xaa is C or S
YVPKPXXAPTKLSPISVLYIDDSSNVIYKQYENMVVR

SEQ ID NO: 29353 - protein, 38 aa, Artificial Sequence
  GFR-binding peptide
  MOD_RES (5)..(6): Xaa is C or S
  MOD_RES (20)..(21)..(22)..(23)..(24): Xaa is A or G
  MOD_RES (25)..(26)..(27)..(28): Xaa is A or G or is absent
ASKAXXVPTKLEPISILYLXXXXXXXXXKFKYEGMAVS

SEQ ID NO: 29354 - protein, 37 aa, Artificial Sequence; identical to SEQ ID NO: 8068
  GFR-binding peptide
  MOD_RES (2)..(3)..(34)..(36): Xaa is C or S

SEQ ID NO: 29355 - protein, 35 aa, Artificial Sequence; identical to SEQ ID NO: 8069
  GFR-binding peptide
  MOD_RES (1)..(2): Xaa is C or S
  MOD_RES (16)..(17)..(18)..(19)..(20): Xaa is A or G
  MOD_RES (21)..(22)..(23)..(24): Xaa is A or G or is absent

SEQ ID NO: 29356 - protein, 39 aa, Artificial Sequence
  GFR-binding peptide
  MOD_RES (5)..(6): Xaa is C or S
  MOD_RES (20)..(21)..(22)..(23)..(24): Xaa is A or G
  MOD_RES (25)..(26)..(27)..(28): Xaa is A or G or is absent
IPKAXXVPTELEPISMLYLXXXXXXXXXKFKYEDMVVEG

SEQ ID NO: 29357 - protein, 38 aa, Artificial Sequence
  GFR-binding peptide
  MOD_RES (4)..(5): Xaa is C or S
  MOD_RES (19)..(20)..(21)..(22)..(23): Xaa is A or G
  MOD_RES (24)..(25)..(26)..(27): Xaa is A or G or is absent
PKPXXAPTQLSPISVLYIXXXXXXXXXYKQYENMVVRA

SEQ ID NO: 29358 - protein, 37 aa, Artificial Sequence
  GFR-binding peptide
  MOD_RES (3)..(4): Xaa is C or S
  MOD_RES (18)..(19)..(20)..(21)..(22): Xaa is A or G
  MOD_RES (23)..(24)..(25)..(26): Xaa is A or G or is absent
KPXXAPTQLEPISVLYLXXXXXXXXXKFKYENMVVRA

SEQ ID NO: 29359 - protein, 35 aa, Artificial Sequence
  GFR-binding peptide
  MOD_RES (1)..(35): Xaa is C or S
  MOD_RES (15)..(16)..(17)..(18)..(19): Xaa is A or G
  MOD_RES (20)..(21)..(22)..(23): Xaa is A or G or is absent
XVPTELEPISMLYLXXXXXXXXXKFKYEDMVVEGX

SEQ ID NO: 29360 - protein, 33 aa, Artificial Sequence; identical to SEQ ID NO: 8073
  GFR-binding peptide
  MOD_RES (33)..(33): Xaa is C or S
  MOD_RES (14)..(15)..(16)..(17)..(18): Xaa is A or G
  MOD_RES (19)..(20)..(21)..(22): Xaa is A or G or is absent

SEQ ID NO: 29361 - protein, 36 aa, Artificial Sequence
  GFR-binding peptide
  MOD_RES (3)..(4)..(36): Xaa is C or S
KAXXVPTELEPISMLYLDEYDKVVKFKYEEMVVEGX

SEQ ID NO: 29362 - protein, 34 aa, Artificial Sequence; identical to SEQ ID NO: 8076
  GFR-binding peptide
  MOD_RES (1)..(34): Xaa is C or S
  MOD_RES (15)..(16)..(17)..(18)..(19): Xaa is A or G
  MOD_RES (20)..(21)..(22)..(23): Xaa is A or G or is absent

SEQ ID NO: 29363 - protein, 36 aa, Artificial Sequence; identical to SEQ ID NO: 8077
  GFR-binding peptide
  MOD_RES (4)..(5): Xaa is C or S

SEQ ID NO: 29364 - protein, 36 aa, Artificial Sequence; identical to SEQ ID NO: 8080
  GFR-binding peptide
  MOD_RES (2)..(3)..(35): Xaa is C or S

SEQ ID NO: 29365 - protein, 36 aa, Artificial Sequence; identical to SEQ ID NO: 8082
  GFR-binding peptide
  MOD_RES (4)..(5)..(36): Xaa is C or S

SEQ ID NO: 29366 - protein, 38 aa, Artificial Sequence
  GFR-binding peptide
  MOD_RES (4)..(5)..(37): Xaa is C or S
PKPXXAPTKLEPISVLYLDDSSNVIKFKYENMVVRSXG

SEQ ID NO: 29367 - protein, 31 aa, Artificial Sequence
  GFR-binding peptide
VPARLSPISILYKDAANNVVLKYHYDMVVEA

SEQ ID NO: 29368 - protein, 40 aa, Artificial Sequence; identical to SEQ ID NO: 8085
  GFR-binding peptide
  MOD_RES (3)..(4)..(37)..(39): Xaa is C or S
  MOD_RES (18)..(19)..(20)..(21)..(22): Xaa is A or G
  MOD_RES (23)..(24)..(25)..(26): Xaa is A or G or is absent

SEQ ID NO: 29369 - protein, 31 aa, Artificial Sequence
  GFR-binding peptide
  MOD_RES (1)..(1): Xaa is C or S
XVPTELEPISMLYLDENEKVVKFKYEDMVVE

SEQ ID NO: 29370 - protein, 33 aa, Artificial Sequence; identical to SEQ ID NO: 8088
  GFR-binding peptide
  MOD_RES (1)..(1): Xaa is C or S
  MOD_RES (15)..(16)..(17)..(18)..(19): Xaa is A or G
  MOD_RES (20)..(21)..(22)..(23): Xaa is A or G or is absent

SEQ ID NO: 29371 - protein, 34 aa, Artificial Sequence; identical to SEQ ID NO: 8089
  GFR-binding peptide
  MOD_RES (2)..(3)..(34): Xaa is C or S

SEQ ID NO: 29372 - protein, 37 aa, Artificial Sequence; identical to SEQ ID NO: 8091
  GFR-binding peptide
  MOD_RES (1)..(2)..(34)..(36): Xaa is C or S

SEQ ID NO: 29373 - protein, 40 aa, Artificial Sequence
  GFR-binding peptide
  MOD_RES (5)..(6)..(37)..(39): Xaa is C or S
SASPXXVPQDLSPISILYIVGRTPKVYKQYEMVVKSXKXS

SEQ ID NO: 29374 - protein, 37 aa, Artificial Sequence
  GFR-binding peptide
  MOD_RES (5)..(6): Xaa is C or S
APASXXVPARLSPISILYKDAANNVVLKYHYDMVVEA

SEQ ID NO: 29375 - protein, 37 aa, Artificial Sequence; identical to SEQ ID NO: 8094
  GFR-binding peptide
  MOD_RES (34)..(36): Xaa is C or S
  MOD_RES (14)..(15)..(16)..(17)..(18): Xaa is A or G
  MOD_RES (19)..(20)..(21)..(22): Xaa is A or G or is absent

SEQ ID NO: 29376 - protein, 39 aa, Artificial Sequence
  GFR-binding peptide
  MOD_RES (6)..(7): Xaa is C or S
  MOD_RES (21)..(22)..(23)..(24)..(25): Xaa is A or G
  MOD_RES (26)..(27)..(28)..(29): Xaa is A or G or is absent
ASAAPXXVPQALSPISILYIXXXXXXXXXYKQYEMIVRS

SEQ ID NO: 29377 - protein, 42 aa, Artificial Sequence; identical to SEQ ID NO: 8096
  GFR-binding peptide
  MOD_RES (4)..(5)..(39)..(41): Xaa is C or S
  MOD_RES (19)..(20)..(21)..(22)..(23): Xaa is A or G
  MOD_RES (24)..(25)..(26)..(27): Xaa is A or G or is absent

SEQ ID NO: 29378 - protein, 42 aa, Artificial Sequence; identical to SEQ ID NO: 8097
  GFR-binding peptide
  MOD_RES (6)..(7)..(41): Xaa is C or S
  MOD_RES (21)..(22)..(23)..(24)..(25): Xaa is A or G
  MOD_RES (26)..(27)..(28)..(29): Xaa is A or G or is absent

SEQ ID NO: 29379 - protein, 35 aa, Artificial Sequence; identical to SEQ ID NO: 8098
  GFR-binding peptide
  MOD_RES (4)..(5): Xaa is C or S

SEQ ID NO: 29380 - protein, 32 aa, Artificial Sequence; identical to SEQ ID NO: 8099
  GFR-binding peptide
  MOD_RES (1)..(1): Xaa is C or S

SEQ ID NO: 29381 - protein, 40 aa, Artificial Sequence; identical to SEQ ID NO: 8100
  GFR-binding peptide
  MOD_RES (5)..(6)..(38)..(40): Xaa is C or S

SEQ ID NO: 29382 - protein, 31 aa, Artificial Sequence
  GFR-binding peptide
VPTELEPISMLYLDENEKVVKFKYEDMVVEG

SEQ ID NO: 29383 - protein, 36 aa, Artificial Sequence
  GFR-binding peptide
  MOD_RES (2)..(3)..(35): Xaa is C or S
AXXVPTKLNAISILYFDKGVVTYLKKYRGMAVSEXG

SEQ ID NO: 29384 - protein, 38 aa, Artificial Sequence
  GFR-binding peptide
  MOD_RES (6)..(7): Xaa is C or S
TVPKPXXAPTQLEPISVLYLDDSSNVIKFKYENMVVRA

SEQ ID NO: 29385 - protein, 41 aa, Artificial Sequence
  GFR-binding peptide
  MOD_RES (5)..(6)..(40): Xaa is C or S
  MOD_RES (20)..(21)..(22)..(23)..(24): Xaa is A or G
  MOD_RES (25)..(26)..(27)..(28): Xaa is A or G or is absent
IPKAXXVPTELEPISMLYLXXXXXXXXXKFKYEDMVVEGXG

SEQ ID NO: 29386 - protein, 38 aa, Artificial Sequence
  GFR-binding peptide
  MOD_RES (3)..(4)..(38): Xaa is C or S
  MOD_RES (18)..(19)..(20)..(21)..(22): Xaa is A or G
  MOD_RES (23)..(24)..(25)..(26): Xaa is A or G or is absent
KAXXVPTKLSPISILYIXXXXXXXXXYKQYEGMAVSEX

SEQ ID NO: 29387 - protein, 38 aa, Artificial Sequence
  GFR-binding peptide
  MOD_RES (3)..(4)..(36)..(38): Xaa is C or S
KAXXVPTKLNAISILYFDKGVVTYLKKYRGMAVSEXGX

SEQ ID NO: 29388 - protein, 37 aa, Artificial Sequence
  GFR-binding peptide
  MOD_RES (2)..(3)..(35)..(37): Xaa is C or S
AXXAPTKLSPISVLYIDSSNNVIYKQYENMVVKAXGX

SEQ ID NO: 29389 - protein, 40 aa, Artificial Sequence
  GFR-binding peptide
  MOD_RES (3)..(4)..(38)..(40): Xaa is C or S
  MOD_RES (18)..(19)..(20)..(21)..(22): Xaa is A or G
  MOD_RES (23)..(24)..(25)..(26): Xaa is A or G or is absent
KPXXAPTKLEPISVLYLXXXXXXXXXKFKYENMVVRSXGX

SEQ ID NO: 29390 - protein, 42 aa, Artificial Sequence
  GFR-binding peptide
  MOD_RES (6)..(7)..(41): Xaa is C or S
  MOD_RES (21)..(22)..(23)..(24)..(25): Xaa is A or G
  MOD_RES (26)..(27)..(28)..(29): Xaa is A or G or is absent
AAPASXXVPARLSPISILYIXXXXXXXXXYKQYEDMVVEAXG

SEQ ID NO: 29391 - protein, 40 aa, Artificial Sequence
  GFR-binding peptide
  MOD_RES (5)..(6)..(38)..(40): Xaa is C or S
IPKAXXVPTELSPISMLYIDENEKVVYKQYEDMVVEGXGX

SEQ ID NO: 29392 - protein, 42 aa, Artificial Sequence
  GFR-binding peptide
  MOD_RES (6)..(7)..(39)..(41): Xaa is C or S
AAPASXXVPARLNAISILYFDAANNVVLKKYRDMVVEAXGXR

SEQ ID NO: 29393 - protein, 31 aa, Artificial Sequence
  GFR-binding peptide
  MOD_RES (1)..(1): Xaa is C or S
XAPTKLSPISVLYIDDSSNVIYKQYENMVVR

SEQ ID NO: 29394 - protein, 35 aa, Artificial Sequence
  GFR-binding peptide
  MOD_RES (1)..(2): Xaa is C or S
  MOD_RES (16)..(17)..(18)..(19)..(20): Xaa is A or G
  MOD_RES (21)..(22)..(23)..(24): Xaa is A or G or is absent
XXVPTKLEPISILYLXXXXXXXXXKFKYEGMAVSE

SEQ ID NO: 29395 - protein, 39 aa, Artificial Sequence
  GFR-binding peptide
  MOD_RES (3)..(4)..(38): Xaa is C or S
  MOD_RES (18)..(19)..(20)..(21)..(22): Xaa is A or G
  MOD_RES (23)..(24)..(25)..(26): Xaa is A or G or is absent
KAXXVPTKLSPISILYIXXXXXXXXXYKQYEGMAVSEXG

SEQ ID NO: 29396 - protein, 41 aa, Artificial Sequence
  GFR-binding peptide
  MOD_RES (3)..(4)..(38)..(40): Xaa is C or S
  MOD_RES (18)..(19)..(20)..(21)..(22): Xaa is A or G
  MOD_RES (23)..(24)..(25)..(26): Xaa is A or G or is absent
KPXXAPTQLEPISVLYLXXXXXXXXXKFKYENMVVRAXGXH

SEQ ID NO: 29397 - protein, 35 aa, Artificial Sequence; identical to SEQ ID NO: 8109
  GFR-binding peptide
  MOD_RES (1)..(1): Xaa is C or S
  MOD_RES (15)..(16)..(17)..(18)..(19): Xaa is A or G
  MOD_RES (20)..(21)..(22)..(23): Xaa is A or G or is absent

SEQ ID NO: 29398 - protein, 35 aa, Artificial Sequence
  GFR-binding peptide
  MOD_RES (1)..(35): Xaa is C or S
  MOD_RES (15)..(16)..(17)..(18)..(19): Xaa is A or G
  MOD_RES (20)..(21)..(22)..(23): Xaa is A or G or is absent
XVPARLSPISILYKXXXXXXXXXLKYHYDMVVEAX

SEQ ID NO: 29399 - protein, 33 aa, Artificial Sequence
  GFR-binding peptide
  MOD_RES (1)..(1): Xaa is C or S
  MOD_RES (15)..(16)..(17)..(18)..(19): Xaa is A or G
  MOD_RES (20)..(21)..(22)..(23): Xaa is A or G or is absent
XVPTELSPISMLYIXXXXXXXXXYKQYEEMVVE

SEQ ID NO: 29400 - protein, 35 aa, Artificial Sequence
  GFR-binding peptide
  MOD_RES (35)..(35): Xaa is C or S
  MOD_RES (14)..(15)..(16)..(17)..(18): Xaa is A or G
  MOD_RES (19)..(20)..(21)..(22): Xaa is A or G or is absent
VPTKLEPISVLYLXXXXXXXXXKFKYEEGMSVAEX

SEQ ID NO: 29401 - protein, 36 aa, Artificial Sequence
  GFR-binding peptide
  MOD_RES (2)..(3)..(34)..(36): Xaa is C or S
PXXVPQDLEPISILYLVGRTPKVKFKYEMVVKSXKX

SEQ ID NO: 29402 - protein, 40 aa, Artificial Sequence
  GFR-binding peptide
  MOD_RES (6)..(7)..(38)..(40): Xaa is C or S
ASAAPXXVPQALEPISILYLVGRKPKVKFKYEMIVRSXKX

SEQ ID NO: 29403 - protein, 41 aa, Artificial Sequence
  GFR-binding peptide
  MOD_RES (3)..(4)..(39)..(41): Xaa is C or S
  MOD_RES (18)..(19)..(20)..(21)..(22): Xaa is A or G
  MOD_RES (23)..(24)..(25)..(26): Xaa is A or G or is absent
KAXXVPTKLSPISVLYIXXXXXXXXXYKQYEEGMSVAEXGX

SEQ ID NO: 29404 - protein, 36 aa, Artificial Sequence
  GFR-binding peptide
  MOD_RES (34)..(36): Xaa is C or S
  MOD_RES (14)..(15)..(16)..(17)..(18): Xaa is A or G
  MOD_RES (19)..(20)..(21)..(22): Xaa is A or G or is absent
APTQLEPISVLYLXXXXXXXXXKFKYENMVVRAXGX

SEQ ID NO: 29405 - protein, 30 aa, Artificial Sequence
  GFR-binding peptide
VPARLNAISILYFDAANNVVLKKYRDMVVE

SEQ ID NO: 29406 - protein, 41 aa, Artificial Sequence
  GFR-binding peptide
  MOD_RES (6)..(7)..(40): Xaa is C or S
  MOD_RES (21)..(22)..(23)..(24)..(25): Xaa is A or G
  MOD_RES (26)..(27)..(28)..(29): Xaa is A or G or is absent
ASASPXXVPQDLSPISILYIXXXXXXXXXYKQYEMVVKSXK

SEQ ID NO: 29407 - protein, 36 aa, Artificial Sequence; identical to SEQ ID NO: 8121
  GFR-binding peptide
  MOD_RES (33)..(35): Xaa is C or S
  MOD_RES (14)..(15)..(16)..(17)..(18): Xaa is A or G
  MOD_RES (19)..(20)..(21)..(22): Xaa is A or G or is absent

SEQ ID NO: 29408 - protein, 36 aa, Artificial Sequence
  GFR-binding peptide
  MOD_RES (1)..(2)..(34)..(36): Xaa is C or S
XXVPTKLSPISILYIDKGVVTYYKQYEGMAVSEXGX

SEQ ID NO: 29409 - protein, 42 aa, Artificial Sequence; identical to SEQ ID NO: 8123
  GFR-binding peptide
  MOD_RES (4)..(5)..(39)..(41): Xaa is C or S
  MOD_RES (19)..(20)..(21)..(22)..(23): Xaa is A or G
  MOD_RES (24)..(25)..(26)..(27): Xaa is A or G or is absent

SEQ ID NO: 29410 - protein, 40 aa, Artificial Sequence
  GFR-binding peptide
  MOD_RES (4)..(5)..(38)..(40): Xaa is C or S
GKAXXVPTKLEPISVLYLDDMGVPTKFKYEEGMSVAEXGX

SEQ ID NO: 29411 - protein, 38 aa, Artificial Sequence
  GFR-binding peptide
  MOD_RES (3)..(4)..(36)..(38): Xaa is C or S
ASXXVPARLEPISILYLDAANNVVKFKYEDMVVEAXGX

SEQ ID NO: 29412 - protein, 37 aa, Artificial Sequence
  GFR-binding peptide
  MOD_RES (1)..(2)..(36): Xaa is C or S
  MOD_RES (16)..(17)..(18)..(19)..(20): Xaa is A or G
  MOD_RES (21)..(22)..(23)..(24): Xaa is A or G or is absent
XXVPARLEPISILYLXXXXXXXXXKFKYEDMVVEAXG

SEQ ID NO: 29413 - protein, 35 aa, Artificial Sequence
  GFR-binding peptide
  MOD_RES (2)..(3): Xaa is C or S
  MOD_RES (17)..(18)..(19)..(20)..(21): Xaa is A or G
  MOD_RES (22)..(23)..(24)..(25): Xaa is A or G or is absent
SXXVPARLSPISILYIXXXXXXXXXYKQYEDMVVE

SEQ ID NO: 29414 - protein, 33 aa, Artificial Sequence; identical to SEQ ID NO: 8128
  GFR-binding peptide
  MOD_RES (1)..(2): Xaa is C or S

SEQ ID NO: 29415 - protein, 40 aa, Artificial Sequence; identical to SEQ ID NO: 8131
  GFR-binding peptide
  MOD_RES (6)..(7): Xaa is C or S
  MOD_RES (21)..(22)..(23)..(24)..(25): Xaa is A or G
  MOD_RES (26)..(27)..(28)..(29): Xaa is A or G or is absent

SEQ ID NO: 29416 - protein, 35 aa, Artificial Sequence
  GFR-binding peptide
  MOD_RES (3)..(3): Xaa is C or S
  MOD_RES (17)..(18)..(19)..(20)..(21): Xaa is A or G
  MOD_RES (22)..(23)..(24)..(25): Xaa is A or G or is absent
PTXAPTKLSPISVLYIXXXXXXXXXYKQYENMVVR

SEQ ID NO: 29417 - protein, 36 aa, Artificial Sequence
  GFR-binding peptide
  MOD_RES (34)..(36): Xaa is C or S
  MOD_RES (14)..(15)..(16)..(17)..(18): Xaa is A or G
  MOD_RES (19)..(20)..(21)..(22): Xaa is A or G or is absent
APTQLSPISVLYIXXXXXXXXXYKQYENMVVRAXGX

SEQ ID NO: 29418 - protein, 33 aa, Artificial Sequence; identical to SEQ ID NO: 8134
  GFR-binding peptide
  MOD_RES (1)..(33): Xaa is C or S

SEQ ID NO: 29419 - protein, 33 aa, Artificial Sequence
  GFR-binding peptide
  MOD_RES (1)..(33): Xaa is C or S
XVPTELSPISMLYIDEYDKVVYKQYEEMVVEGX

SEQ ID NO: 29420 - protein, 34 aa, Artificial Sequence; identical to SEQ ID NO: 8137
  GFR-binding peptide
  MOD_RES (32)..(34): Xaa is C or S

SEQ ID NO: 29421 - protein, 34 aa, Artificial Sequence
  GFR-binding peptide
  MOD_RES (31)..(33): Xaa is C or S
VPQDLSPISILYIVGRTPKVYKQYEMVVKSXKXS

SEQ ID NO: 29422 - protein, 39 aa, Artificial Sequence
  GFR-binding peptide
  MOD_RES (5)..(6): Xaa is C or S
  MOD_RES (20)..(21)..(22)..(23)..(24): Xaa is A or G
  MOD_RES (25)..(26)..(27)..(28): Xaa is A or G or is absent
APASXXVPARLSPISILYKXXXXXXXXXLKYHYDMVVEA

SEQ ID NO: 29423 - protein, 35 aa, Artificial Sequence; identical to SEQ ID NO: 8138
  GFR-binding peptide
  MOD_RES (35)..(35): Xaa is C or S
  MOD_RES (14)..(15)..(16)..(17)..(18): Xaa is A or G
  MOD_RES (19)..(20)..(21)..(22): Xaa is A or G or is absent

SEQ ID NO: 29424 - protein, 39 aa, Artificial Sequence
  GFR-binding peptide
  MOD_RES (2)..(3)..(36)..(38): Xaa is C or S
  MOD_RES (17)..(18)..(19)..(20)..(21): Xaa is A or G
  MOD_RES (22)..(23)..(24)..(25): Xaa is A or G or is absent
PXXVPQALEPISILYLXXXXXXXXXKFKYEMIVRSXKXS

SEQ ID NO: 29425 - protein, 43 aa, Artificial Sequence; identical to SEQ ID NO: 8140
  GFR-binding peptide
  MOD_RES (6)..(7)..(42): Xaa is C or S
  MOD_RES (21)..(22)..(23)..(24)..(25): Xaa is A or G
  MOD_RES (26)..(27)..(28)..(29): Xaa is A or G or is absent

SEQ ID NO: 29426 - protein, 34 aa, Artificial Sequence
  GFR-binding peptide
  MOD_RES (2)..(3): Xaa is C or S
AXXVPTELSPISMLYIDEYDKVVYKQYEEMVVEG

SEQ ID NO: 29427 - protein, 42 aa, Artificial Sequence
  GFR-binding peptide
  MOD_RES (5)..(6)..(41): Xaa is C or S
  MOD_RES (20)..(21)..(22)..(23)..(24): Xaa is A or G
  MOD_RES (25)..(26)..(27)..(28): Xaa is A or G or is absent
VGKAXXVPTKLEPISVLYLXXXXXXXXXKFKYEEGMSVAEXG

SEQ ID NO: 29428 - protein, 35 aa, Artificial Sequence
  GFR-binding peptide
  MOD_RES (2)..(3)..(34): Xaa is C or S
PXXVPQALEPISILYLVGRKPKVKFKYEMIVRSXK

SEQ ID NO: 29429 - protein, 34 aa, Artificial Sequence; identical to SEQ ID NO: 8142
  GFR-binding peptide
  MOD_RES (1)..(33): Xaa is C or S

SEQ ID NO: 29430 - protein, 40 aa, Artificial Sequence
  GFR-binding peptide
  MOD_RES (4)..(5)..(39): Xaa is C or S
  MOD_RES (19)..(20)..(21)..(22)..(23): Xaa is A or G
  MOD_RES (24)..(25)..(26)..(27): Xaa is A or G or is absent
PKPXXAPTKLSPISVLYIXXXXXXXXXYKQYENMVVRSXG

SEQ ID NO: 29431 - protein, 38 aa, Artificial Sequence
  GFR-binding peptide
  MOD_RES (5)..(37): Xaa is C or S
TKPTXAPTKLEPISVLYLDDSSNVIKFKYENMVVRSXG

SEQ ID NO: 29432 - protein, 33 aa, Artificial Sequence; identical to SEQ ID NO: 8146
  GFR-binding peptide
  MOD_RES (1)..(2)..(33): Xaa is C or S

SEQ ID NO: 29433 - protein, 41 aa, Artificial Sequence
  GFR-binding peptide
  MOD_RES (5)..(6)..(38)..(40): Xaa is C or S
ASKAXXVPTKLNAISILYFDKGVVTYLKKYRGMAVSEXGXR

SEQ ID NO: 29434 - protein, 35 aa, Artificial Sequence; identical to SEQ ID NO: 8147
  GFR-binding peptide
  MOD_RES (1)..(2)..(33)..(35): Xaa is C or S

SEQ ID NO: 29435 - protein, 35 aa, Artificial Sequence
  GFR-binding peptide
  MOD_RES (34)..(34): Xaa is C or S
  MOD_RES (14)..(15)..(16)..(17)..(18): Xaa is A or G
  MOD_RES (19)..(20)..(21)..(22): Xaa is A or G or is absent
VPTELEPISMLYLXXXXXXXXXKFKYEEMVVEGXG

SEQ ID NO: 29436 - protein, 31 aa, Artificial Sequence
  GFR-binding peptide
  MOD_RES (1)..(1): Xaa is C or S
XVPQALSPISILYIVGRKPKVYKQYEMIVRS

SEQ ID NO: 29437 - protein, 35 aa, Artificial Sequence; identical to SEQ ID NO: 8148
  GFR-binding peptide
  MOD_RES (4)..(5): Xaa is C or S

SEQ ID NO: 29438 - protein, 37 aa, Artificial Sequence
  GFR-binding peptide
  MOD_RES (1)..(34)..(36): Xaa is C or S
  MOD_RES (15)..(16)..(17)..(18)..(19): Xaa is A or G
  MOD_RES (20)..(21)..(22)..(23): Xaa is A or G or is absent
XVPQALEPISILYLXXXXXXXXXKFKYEMIVRSXKXS

SEQ ID NO: 29439 - protein, 34 aa, Artificial Sequence
  GFR-binding peptide
  MOD_RES (1)..(2)..(34): Xaa is C or S
XXVPTELSPISMLYIDENEKVVYKQYEDMVVEGX

SEQ ID NO: 29440 - protein, 40 aa, Artificial Sequence
  GFR-binding peptide
  MOD_RES (5)..(6)..(40): Xaa is C or S
  MOD_RES (20)..(21)..(22)..(23)..(24): Xaa is A or G
  MOD_RES (25)..(26)..(27)..(28): Xaa is A or G or is absent
VPKPXXAPTQLSPISVLYIXXXXXXXXXYKQYENMVVRAX

SEQ ID NO: 29441 - protein, 33 aa, Artificial Sequence; identical to SEQ ID NO: 8150
  GFR-binding peptide
  MOD_RES (2)..(3): Xaa is C or S

SEQ ID NO: 29442 - protein, 36 aa, Artificial Sequence; identical to SEQ ID NO: 8151
  GFR-binding peptide
  MOD_RES (1)..(2)..(35): Xaa is C or S
  MOD_RES (16)..(17)..(18)..(19)..(20): Xaa is A or G
  MOD_RES (21)..(22)..(23)..(24): Xaa is A or G or is absent

SEQ ID NO: 29443 - protein, 38 aa, Artificial Sequence
  GFR-binding peptide
  MOD_RES (1)..(2)..(36)..(38): Xaa is C or S
  MOD_RES (16)..(17)..(18)..(19)..(20): Xaa is A or G
  MOD_RES (21)..(22)..(23)..(24): Xaa is A or G or is absent
XXVPTKLSPISILYIXXXXXXXXXYKQYEGMAVSEXGX

SEQ ID NO: 29444 - protein, 34 aa, Artificial Sequence
  GFR-binding peptide
  MOD_RES (2)..(3): Xaa is C or S
AXXVPTELSPISMLYIDENEKVVYKQYEDMVVEG

SEQ ID NO: 29445 - protein, 39 aa, Artificial Sequence
  GFR-binding peptide
  MOD_RES (6)..(7): Xaa is C or S
  MOD_RES (21)..(22)..(23)..(24)..(25): Xaa is A or G
  MOD_RES (26)..(27)..(28)..(29): Xaa is A or G or is absent
ASASPXXVSQDLEPISILYLXXXXXXXXXKFKYEMIVKS

SEQ ID NO: 29446 - protein, 37 aa, Artificial Sequence
  GFR-binding peptide
  MOD_RES (6)..(7): Xaa is C or S
KASKAXXVPTKLSPISILYIDKGVVTYYKQYEGMAVS

SEQ ID NO: 29447 - protein, 34 aa, Artificial Sequence; identical to SEQ ID NO: 8156
  GFR-binding peptide
  MOD_RES (1)..(34): Xaa is C or S
  MOD_RES (15)..(16)..(17)..(18)..(19): Xaa is A or G
  MOD_RES (20)..(21)..(22)..(23): Xaa is A or G or is absent

SEQ ID NO: 29448 - protein, 38 aa, Artificial Sequence
  GFR-binding peptide
  MOD_RES (1)..(35)..(37): Xaa is C or S
  MOD_RES (15)..(16)..(17)..(18)..(19): Xaa is A or G
  MOD_RES (20)..(21)..(22)..(23): Xaa is A or G or is absent
XVPTKLEPISILYLXXXXXXXXXKFKYEGMAVSEXGXR

SEQ ID NO: 29449 - protein, 41 aa, Artificial Sequence; identical to SEQ ID NO: 8157
  GFR-binding peptide
  MOD_RES (4)..(5)..(39)..(41): Xaa is C or S
  MOD_RES (19)..(20)..(21)..(22)..(23): Xaa is A or G
  MOD_RES (24)..(25)..(26)..(27): Xaa is A or G or is absent

SEQ ID NO: 29450 - protein, 36 aa, Artificial Sequence; identical to SEQ ID NO: 8158
  GFR-binding peptide
  MOD_RES (33)..(35): Xaa is C or S

SEQ ID NO: 29451 - protein, 34 aa, Artificial Sequence
  GFR-binding peptide
  MOD_RES (3)..(4): Xaa is C or S
KAXXAPTKLEPISVLYLDSSNNVIKFKYENMVVK

SEQ ID NO: 29452 - protein, 38 aa, Artificial Sequence
  GFR-binding peptide
  MOD_RES (3)..(4)..(35)..(37): Xaa is C or S
SPXXVSQDLEPISILYLIGKTPKIKFKYEMIVKSXKXS

SEQ ID NO: 29453 - protein, 38 aa, Artificial Sequence; identical to SEQ ID NO: 8161
  GFR-binding peptide
  MOD_RES (5)..(6)..(37): Xaa is C or S

SEQ ID NO: 29454 - protein, 36 aa, Artificial Sequence; identical to SEQ ID NO: 8162
  GFR-binding peptide
  MOD_RES (2)..(3)..(36): Xaa is C or S
  MOD_RES (17)..(18)..(19)..(20)..(21): Xaa is A or G
  MOD_RES (22)..(23)..(24)..(25): Xaa is A or G or is absent

SEQ ID NO: 29455 - protein, 39 aa, Artificial Sequence
  GFR-binding peptide
  MOD_RES (6)..(6): Xaa is C or S
  MOD_RES (20)..(21)..(22)..(23)..(24): Xaa is A or G
  MOD_RES (25)..(26)..(27)..(28): Xaa is A or G or is absent
VTKPTXAPTKLSPISVLYIXXXXXXXXXYKQYENMVVRS

SEQ ID NO: 29456 - protein, 35 aa, Artificial Sequence
  GFR-binding peptide
  MOD_RES (1)..(34): Xaa is C or S
XVPTKLSPISVLYIDDMGVPTYKQYEEGMSVAEXG

SEQ ID NO: 29457 - protein, 34 aa, Artificial Sequence
  GFR-binding peptide
  MOD_RES (1)..(1): Xaa is C or S
  MOD_RES (15)..(16)..(17)..(18)..(19): Xaa is A or G
  MOD_RES (20)..(21)..(22)..(23): Xaa is A or G or is absent
XAPTKLSPISVLYIXXXXXXXXXYKQYENMVVKA

SEQ ID NO: 29458 - protein, 44 aa, Artificial Sequence
  GFR-binding peptide
  MOD_RES (6)..(7)..(41)..(43): Xaa is C or S
  MOD_RES (21)..(22)..(23)..(24)..(25): Xaa is A or G
  MOD_RES (26)..(27)..(28)..(29): Xaa is A or G or is absent
KASKAXXVPTKLEPISILYLXXXXXXXXXKFKYEGMAVSEXGXR

SEQ ID NO: 29459 - protein, 36 aa, Artificial Sequence; identical to SEQ ID NO: 8163
  GFR-binding peptide
  MOD_RES (3)..(4): Xaa is C or S
  MOD_RES (18)..(19)..(20)..(21)..(22): Xaa is A or G
  MOD_RES (23)..(24)..(25)..(26): Xaa is A or G or is absent

SEQ ID NO: 29460 - protein, 34 aa, Artificial Sequence; identical to SEQ ID NO: 8165
  GFR-binding peptide
  MOD_RES (33)..(33): Xaa is C or S
  MOD_RES (14)..(15)..(16)..(17)..(18): Xaa is A or G
  MOD_RES (19)..(20)..(21)..(22): Xaa is A or G or is absent

SEQ ID NO: 29461 - protein, 43 aa, Artificial Sequence
  GFR-binding peptide
  MOD_RES (6)..(7)..(40)..(42): Xaa is C or S
KVGKAXXVPTKLEPISVLYLDDMGVPTKFKYEEGMSVAEXGXR

SEQ ID NO: 29462 - protein, 40 aa, Artificial Sequence
  GFR-binding peptide
  MOD_RES (6)..(7)..(39): Xaa is C or S
YVPKPXXAPTKLSPISVLYIDDSSNVIYKQYENMVVRSXG

SEQ ID NO: 29463 - protein, 35 aa, Artificial Sequence; identical to SEQ ID NO: 8167
  GFR-binding peptide
  MOD_RES (1)..(2)..(34): Xaa is C or S

SEQ ID NO: 29464 - protein, 40 aa, Artificial Sequence
  GFR-binding peptide
  MOD_RES (6)..(7)..(39): Xaa is C or S
KASKAXXVPTKLSPISILYIDKGVVTYYKQYEGMAVSEXG

SEQ ID NO: 29465 - protein, 33 aa, Artificial Sequence; identical to SEQ ID NO: 8168
  GFR-binding peptide
  MOD_RES (1)..(2)..(33): Xaa is C or S

SEQ ID NO: 29466 - protein, 36 aa, Artificial Sequence
  GFR-binding peptide
  MOD_RES (2)..(3): Xaa is C or S
  MOD_RES (17)..(18)..(19)..(20)..(21): Xaa is A or G
  MOD_RES (22)..(23)..(24)..(25): Xaa is A or G or is absent
AXXVPTELEPISMLYLXXXXXXXXXKFKYEDMVVEG

SEQ ID NO: 29467 - protein, 38 aa, Artificial Sequence; identical to SEQ ID NO: 8170
  GFR-binding peptide
  MOD_RES (2)..(3)..(36)..(38): Xaa is C or S

SEQ ID NO: 29468 - protein, 34 aa, Artificial Sequence
  GFR-binding peptide
  MOD_RES (1)..(2)..(34): Xaa is C or S
XXVPTELSPISMLYIDEYDKVVYKQYEEMVVEGX

SEQ ID NO: 29469 - protein, 36 aa, Artificial Sequence; identical to SEQ ID NO: 8172
  GFR-binding peptide
  MOD_RES (4)..(5): Xaa is C or S

SEQ ID NO: 29470 - protein, 33 aa, Artificial Sequence
  GFR-binding peptide
  MOD_RES (1)..(1): Xaa is C or S
  MOD_RES (15)..(16)..(17)..(18)..(19): Xaa is A or G
  MOD_RES (20)..(21)..(22)..(23): Xaa is A or G or is absent
XVPQALSPISILYIXXXXXXXXXYKQYEMIVRS

SEQ ID NO: 29471 - protein, 38 aa, Artificial Sequence
  GFR-binding peptide
  MOD_RES (5)..(6): Xaa is C or S
  MOD_RES (20)..(21)..(22)..(23)..(24): Xaa is A or G
  MOD_RES (25)..(26)..(27)..(28): Xaa is A or G or is absent
SASPXXVSQDLSPISILYIXXXXXXXXXYKQYEMIVKS

SEQ ID NO: 29472 - protein, 35 aa, Artificial Sequence
  GFR-binding peptide
  MOD_RES (32)..(34): Xaa is C or S
APTKLSPISVLYIDDSSNVIYKQYENMVVRSXGXH

SEQ ID NO: 29473 - protein, 42 aa, Artificial Sequence
  GFR-binding peptide
  MOD_RES (6)..(7)..(41): Xaa is C or S
  MOD_RES (21)..(22)..(23)..(24)..(25): Xaa is A or G
  MOD_RES (26)..(27)..(28)..(29): Xaa is A or G or is absent
AAPASXXVPARLNAISILYFXXXXXXXXXLKKYRDMVVEAXG

SEQ ID NO: 29474 - protein, 41 aa, Artificial Sequence
  GFR-binding peptide
  MOD_RES (3)..(4)..(38)..(40): Xaa is C or S
  MOD_RES (18)..(19)..(20)..(21)..(22): Xaa is A or G
  MOD_RES (23)..(24)..(25)..(26): Xaa is A or G or is absent
ASXXVPARLNAISILYFXXXXXXXXXLKKYRDMVVEAXGXR

SEQ ID NO: 29475 - protein, 44 aa, Artificial Sequence
  GFR-binding peptide
  MOD_RES (6)..(7)..(41)..(43): Xaa is C or S
  MOD_RES (21)..(22)..(23)..(24)..(25): Xaa is A or G
  MOD_RES (26)..(27)..(28)..(29): Xaa is A or G or is absent
KASKAXXVPTKLNAISILYFXXXXXXXXXLKKYRGMAVSEXGXR

SEQ ID NO: 29476 - protein, 40 aa, Artificial Sequence
  GFR-binding peptide
  MOD_RES (3)..(4)..(37)..(39): Xaa is C or S
  MOD_RES (18)..(19)..(20)..(21)..(22): Xaa is A or G
  MOD_RES (23)..(24)..(25)..(26): Xaa is A or G or is absent
APXXVPQALSPISILYIXXXXXXXXXYKQYEMIVRSXKXS

SEQ ID NO: 29477 - protein, 40 aa, Artificial Sequence
  GFR-binding peptide
  MOD_RES (5)..(6)..(38)..(40): Xaa is C or S
ASKAXXVPTKLSPISILYKDKGVVTYLKYHYGMAVSEXGX

SEQ ID NO: 29478 - protein, 35 aa, Artificial Sequence
  GFR-binding peptide
  MOD_RES (1)..(33)..(35): Xaa is C or S
XVPTELSPISMLYIDENEKVVYKQYEDMVVEGXGX

SEQ ID NO: 29479 - protein, 41 aa, Artificial Sequence; identical to SEQ ID NO: 8181
  GFR-binding peptide
  MOD_RES (3)..(4)..(39)..(41): Xaa is C or S
  MOD_RES (18)..(19)..(20)..(21)..(22): Xaa is A or G
  MOD_RES (23)..(24)..(25)..(26): Xaa is A or G or is absent

SEQ ID NO: 29480 - protein, 44 aa, Artificial Sequence
  GFR-binding peptide
  MOD_RES (6)..(7)..(41)..(43): Xaa is C or S
  MOD_RES (21)..(22)..(23)..(24)..(25): Xaa is A or G
  MOD_RES (26)..(27)..(28)..(29): Xaa is A or G or is absent
YVPKPXXAPTKLSPISVLYIXXXXXXXXXYKQYENMVVRSXGXH

SEQ ID NO: 29481 - protein, 35 aa, Artificial Sequence; identical to SEQ ID NO: 8183
  GFR-binding peptide
  MOD_RES (2)..(3): Xaa is C or S
  MOD_RES (17)..(18)..(19)..(20)..(21): Xaa is A or G
  MOD_RES (22)..(23)..(24)..(25): Xaa is A or G or is absent

SEQ ID NO: 29482 - protein, 41 aa, Artificial Sequence
  GFR-binding peptide
  MOD_RES (3)..(4)..(38)..(40): Xaa is C or S
  MOD_RES (18)..(19)..(20)..(21)..(22): Xaa is A or G
  MOD_RES (23)..(24)..(25)..(26): Xaa is A or G or is absent
ASXXVPARLEPISILYLXXXXXXXXXKFKYEDMVVEAXGXR

SEQ ID NO: 29483 - protein, 35 aa, Artificial Sequence
  GFR-binding peptide
  MOD_RES (33)..(35): Xaa is C or S
  MOD_RES (14)..(15)..(16)..(17)..(18): Xaa is A or G
  MOD_RES (19)..(20)..(21)..(22): Xaa is A or G or is absent
VSQDLEPISILYLXXXXXXXXXKFKYEMIVKSXKX

SEQ ID NO: 29484 - protein, 36 aa, Artificial Sequence
  GFR-binding peptide
  MOD_RES (2)..(3)..(36): Xaa is C or S
  MOD_RES (17)..(18)..(19)..(20)..(21): Xaa is A or G
  MOD_RES (22)..(23)..(24)..(25): Xaa is A or G or is absent
PXXVPQDLEPISILYLXXXXXXXXXKFKYEMVVKSX

SEQ ID NO: 29485 - protein, 39 aa, Artificial Sequence
  GFR-binding peptide
  MOD_RES (4)..(5)..(39): Xaa is C or S
  MOD_RES (19)..(20)..(21)..(22)..(23): Xaa is A or G
  MOD_RES (24)..(25)..(26)..(27): Xaa is A or G or is absent
PKAXXVPTELEPISMLYLXXXXXXXXXKFKYEEMVVEGX

SEQ ID NO: 29486 - protein, 41 aa, Artificial Sequence
  GFR-binding peptide
  MOD_RES (6)..(7)..(39)..(41): Xaa is C or S
KASKAXXVPTKLSPISILYIDKGVVTYYKQYEGMAVSEXGX

SEQ ID NO: 29487 - protein, 32 aa, Artificial Sequence; identical to SEQ ID NO: 8185
  GFR-binding peptide
  MOD_RES (14)..(15)..(16)..(17)..(18): Xaa is A or G
  MOD_RES (19)..(20)..(21)..(22): Xaa is A or G or is absent

SEQ ID NO: 29488 - protein, 41 aa, Artificial Sequence
  GFR-binding peptide
  MOD_RES (6)..(40): Xaa is C or S
  MOD_RES (20)..(21)..(22)..(23)..(24): Xaa is A or G
  MOD_RES (25)..(26)..(27)..(28): Xaa is A or G or is absent
VTKPTXAPTKLSPISVLYIXXXXXXXXXYKQYENMVVRSXG

SEQ ID NO: 29489 - protein, 43 aa, Artificial Sequence; identical to SEQ ID NO: 8186
  GFR-binding peptide
  MOD_RES (6)..(7)..(40)..(42): Xaa is C or S
  MOD_RES (21)..(22)..(23)..(24)..(25): Xaa is A or G
  MOD_RES (26)..(27)..(28)..(29): Xaa is A or G or is absent

SEQ ID NO: 29490 - protein, 39 aa, Artificial Sequence
  GFR-binding peptide
  MOD_RES (3)..(4)..(37)..(39): Xaa is C or S
  MOD_RES (18)..(19)..(20)..(21)..(22): Xaa is A or G
  MOD_RES (23)..(24)..(25)..(26): Xaa is A or G or is absent
APXXVPQALEPISILYLXXXXXXXXXKFKYEMIVRSXKX

SEQ ID NO: 29491 - protein, 38 aa, Artificial Sequence
  GFR-binding peptide
  MOD_RES (2)..(3)..(36)..(38): Xaa is C or S
  MOD_RES (17)..(18)..(19)..(20)..(21): Xaa is A or G
  MOD_RES (22)..(23)..(24)..(25): Xaa is A or G or is absent
PXXVPQALSPISILYIXXXXXXXXXYKQYEMIVRSXKX

SEQ ID NO: 29492 - protein, 35 aa, Artificial Sequence
  GFR-binding peptide
  MOD_RES (4)..(5): Xaa is C or S
AAPXXVPQALEPISILYLVGRKPKVKFKYEMIVRS

SEQ ID NO: 29493 - protein, 38 aa, Artificial Sequence
  GFR-binding peptide
  MOD_RES (4)..(5): Xaa is C or S
  MOD_RES (19)..(20)..(21)..(22)..(23): Xaa is A or G
  MOD_RES (24)..(25)..(26)..(27): Xaa is A or G or is absent
PKAXXVPTELSPISMLYIXXXXXXXXXYKQYEEMVVEG

SEQ ID NO: 29494 - protein, 36 aa, Artificial Sequence; identical to SEQ ID NO: 8191
  GFR-binding peptide
  MOD_RES (33)..(35): Xaa is C or S
  MOD_RES (14)..(15)..(16)..(17)..(18): Xaa is A or G
  MOD_RES (19)..(20)..(21)..(22): Xaa is A or G or is absent

SEQ ID NO: 29495 - protein, 31 aa, Artificial Sequence
  GFR-binding peptide
  MOD_RES (1)..(1): Xaa is C or S
XVSQDLEPISILYLIGKTPKIKFKYEMIVKS

SEQ ID NO: 29496 - protein, 32 aa, Artificial Sequence
  GFR-binding peptide
  MOD_RES (14)..(15)..(16)..(17)..(18): Xaa is A or G
  MOD_RES (19)..(20)..(21)..(22): Xaa is A or G or is absent
VPTELEPISMLYLXXXXXXXXXKFKYEEMVVE

SEQ ID NO: 29497 - protein, 34 aa, Artificial Sequence
  GFR-binding peptide
  MOD_RES (4)..(4): Xaa is C or S
KPTXAPTKLSPISVLYIDDSSNVIYKQYENMVVR

SEQ ID NO: 29498 - protein, 36 aa, Artificial Sequence
  GFR-binding peptide
  MOD_RES (3)..(4): Xaa is C or S
  MOD_RES (18)..(19)..(20)..(21)..(22): Xaa is A or G
  MOD_RES (23)..(24)..(25)..(26): Xaa is A or G or is absent
SPXXVPQDLEPISILYLXXXXXXXXXKFKYEMVVKS

SEQ ID NO: 29499 - protein, 33 aa, Artificial Sequence
  GFR-binding peptide
  MOD_RES (1)..(2): Xaa is C or S
XXVPARLEPISILYLDAANNVVKFKYEDMVVEA

SEQ ID NO: 29500 - protein, 37 aa, Artificial Sequence
  GFR-binding peptide
  MOD_RES (5)..(6): Xaa is C or S
ASKAXXVPTKLSPISILYKDKGVVTYLKYHYGMAVSE

SEQ ID NO: 29501 - protein, 34 aa, Artificial Sequence; identical to SEQ ID NO: 8193
  GFR-binding peptide
  MOD_RES (1)..(32)..(34): Xaa is C or S

SEQ ID NO: 29502 - protein, 37 aa, Artificial Sequence
  GFR-binding peptide
  MOD_RES (1)..(2)..(34)..(36): Xaa is C or S
XXAPTKLEPISVLYLDDSSNVIKFKYENMVVRSXGXH

SEQ ID NO: 29503 - protein, 35 aa, Artificial Sequence
  GFR-binding peptide
  MOD_RES (1)..(2): Xaa is C or S
  MOD_RES (16)..(17)..(18)..(19)..(20): Xaa is A or G
  MOD_RES (21)..(22)..(23)..(24): Xaa is A or G or is absent
XXAPTQLSPISVLYIXXXXXXXXXYKQYENMVVRA

SEQ ID NO: 29504 - protein, 38 aa, Artificial Sequence
  GFR-binding peptide
  MOD_RES (6)..(7): Xaa is C or S
AAPASXXVPARLNAISILYFDAANNVVLKKYRDMVVEA

SEQ ID NO: 29505 - protein, 41 aa, Artificial Sequence
  GFR-binding peptide
  MOD_RES (4)..(5)..(38)..(40): Xaa is C or S
  MOD_RES (19)..(20)..(21)..(22)..(23): Xaa is A or G
  MOD_RES (24)..(25)..(26)..(27): Xaa is A or G or is absent
ASPXXVSQDLEPISILYLXXXXXXXXXKFKYEMIVKSXKXS

SEQ ID NO: 29506 - protein, 35 aa, Artificial Sequence; identical to SEQ ID NO: 8196
  GFR-binding peptide
  MOD_RES (2)..(3)..(35): Xaa is C or S

SEQ ID NO: 29507 - protein, 39 aa, Artificial Sequence
  GFR-binding peptide
  MOD_RES (6)..(7)..(38): Xaa is C or S
ASASPXXVSQDLSPISILYIIGKTPKIYKQYEMIVKSXK

SEQ ID NO: 29508 - protein, 41 aa, Artificial Sequence
  GFR-binding peptide
  MOD_RES (6)..(38)..(40): Xaa is C or S
VTKPTXAPTKLSPISVLYIDDSSNVIYKQYENMVVRSXGXH

SEQ ID NO: 29509 - protein, 39 aa, Artificial Sequence
  GFR-binding peptide
  MOD_RES (3)..(4)..(37)..(39): Xaa is C or S
  MOD_RES (18)..(19)..(20)..(21)..(22): Xaa is A or G
  MOD_RES (23)..(24)..(25)..(26): Xaa is A or G or is absent
SPXXVSQDLEPISILYLXXXXXXXXXKFKYEMIVKSXKX

SEQ ID NO: 29510 - protein, 35 aa, Artificial Sequence
  GFR-binding peptide
  MOD_RES (1)..(2)..(35): Xaa is C or S
  MOD_RES (16)..(17)..(18)..(19)..(20): Xaa is A or G
  MOD_RES (21)..(22)..(23)..(24): Xaa is A or G or is absent
XXVSQDLEPISILYLXXXXXXXXXKFKYEMIVKSX

SEQ ID NO: 29511 - protein, 38 aa, Artificial Sequence; identical to SEQ ID NO: 8199
  GFR-binding peptide
  MOD_RES (3)..(4)..(37): Xaa is C or S
  MOD_RES (18)..(19)..(20)..(21)..(22): Xaa is A or G
  MOD_RES (23)..(24)..(25)..(26): Xaa is A or G or is absent

SEQ ID NO: 29512 - protein, 39 aa, Artificial Sequence
  GFR-binding peptide
  MOD_RES (6)..(7)..(39): Xaa is C or S
AVPKAXXAPTKLEPISVLYLDSSNNVIKFKYENMVVKAX

SEQ ID NO: 29513 - protein, 34 aa, Artificial Sequence
  GFR-binding peptide
  MOD_RES (32)..(34): Xaa is C or S
APTKLSPISVLYIDDSSNVIYKQYENMVVRSXGX

SEQ ID NO: 29514 - protein, 40 aa, Artificial Sequence; identical to SEQ ID NO: 8203
  GFR-binding peptide
  MOD_RES (1)..(2)..(37)..(39): Xaa is C or S
  MOD_RES (16)..(17)..(18)..(19)..(20): Xaa is A or G
  MOD_RES (21)..(22)..(23)..(24): Xaa is A or G or is absent

SEQ ID NO: 29515 - protein, 42 aa, Artificial Sequence
  GFR-binding peptide
  MOD_RES (4)..(5)..(39)..(41): Xaa is C or S
  MOD_RES (19)..(20)..(21)..(22)..(23): Xaa is A or G
  MOD_RES (24)..(25)..(26)..(27): Xaa is A or G or is absent
PKAXXVPTELEPISMLYLXXXXXXXXXKFKYEEMVVEGXGXR

SEQ ID NO: 29516 - protein, 38 aa, Artificial Sequence
  GFR-binding peptide
  MOD_RES (4)..(5)..(37): Xaa is C or S
PKAXXVPTELEPISMLYLDENEKVVKFKYEDMVVEGXG

SEQ ID NO: 29517 - protein, 39 aa, Artificial Sequence; identical to SEQ ID NO: 8204
  GFR-binding peptide
  MOD_RES (5)..(6)..(39): Xaa is C or S
  MOD_RES (20)..(21)..(22)..(23)..(24): Xaa is A or G
  MOD_RES (25)..(26)..(27)..(28): Xaa is A or G or is absent

SEQ ID NO: 29518 - protein, 32 aa, Artificial Sequence
  GFR-binding peptide
  MOD_RES (1)..(2): Xaa is C or S
XXVPTKLNAISILYFDKGVVTYLKKYRGMAVS

SEQ ID NO: 29519 - protein, 36 aa, Artificial Sequence; identical to SEQ ID NO: 8205
  GFR-binding peptide
  MOD_RES (3)..(4): Xaa is C or S
  MOD_RES (18)..(19)..(20)..(21)..(22): Xaa is A or G
  MOD_RES (23)..(24)..(25)..(26): Xaa is A or G or is absent

SEQ ID NO: 29520 - protein, 33 aa, Artificial Sequence
  GFR-binding peptide
  MOD_RES (31)..(33): Xaa is C or S
VSQDLSPISILYIIGKTPKIYKQYEMIVKSXKX

SEQ ID NO: 29521 - protein, 40 aa, Artificial Sequence
  GFR-binding peptide
  MOD_RES (5)..(6)..(40): Xaa is C or S
  MOD_RES (20)..(21)..(22)..(23)..(24): Xaa is A or G
  MOD_RES (25)..(26)..(27)..(28): Xaa is A or G or is absent
VPKAXXAPTKLEPISVLYLXXXXXXXXXKFKYENMVVKAX

SEQ ID NO: 29522 - protein, 38 aa, Artificial Sequence; identical to SEQ ID NO: 8206
  GFR-binding peptide
  MOD_RES (1)..(35)..(37): Xaa is C or S
  MOD_RES (15)..(16)..(17)..(18)..(19): Xaa is A or G
  MOD_RES (20)..(21)..(22)..(23): Xaa is A or G or is absent

SEQ ID NO: 29523 - protein, 34 aa, Artificial Sequence
  GFR-binding peptide
  MOD_RES (1)..(2): Xaa is C or S
  MOD_RES (16)..(17)..(18)..(19)..(20): Xaa is A or G
  MOD_RES (21)..(22)..(23)..(24): Xaa is A or G or is absent
XXVPTKLEPISILYLXXXXXXXXXKFKYEGMAVS

SEQ ID NO: 29524 - protein, 39 aa, Artificial Sequence
  GFR-binding peptide
  MOD_RES (5)..(6): Xaa is C or S
  MOD_RES (20)..(21)..(22)..(23)..(24): Xaa is A or G
  MOD_RES (25)..(26)..(27)..(28): Xaa is A or G or is absent
VPKPXXAPTKLEPISVLYLXXXXXXXXXKFKYENMVVRS

SEQ ID NO: 29525 - protein, 34 aa, Artificial Sequence
  GFR-binding peptide
  MOD_RES (1)..(32)..(34): Xaa is C or S
XVPQDLSPISILYIVGRTPKVYKQYEMVVKSXKX

SEQ ID NO: 29526 - protein, 42 aa, Artificial Sequence
  GFR-binding peptide
  MOD_RES (4)..(5)..(39)..(41): Xaa is C or S
  MOD_RES (19)..(20)..(21)..(22)..(23): Xaa is A or G
  MOD_RES (24)..(25)..(26)..(27): Xaa is A or G or is absent
SKAXXVPTKLEPISILYLXXXXXXXXXKFKYEGMAVSEXGXR

SEQ ID NO: 29527 - protein, 40 aa, Artificial Sequence; identical to SEQ ID NO: 8211
  GFR-binding peptide
  MOD_RES (5)..(6)..(39): Xaa is C or S
  MOD_RES (20)..(21)..(22)..(23)..(24): Xaa is A or G
  MOD_RES (25)..(26)..(27)..(28): Xaa is A or G or is absent

SEQ ID NO: 29528 - protein, 39 aa, Artificial Sequence; identical to SEQ ID NO: 8212
  GFR-binding peptide
  MOD_RES (5)..(6)..(39): Xaa is C or S
  MOD_RES (20)..(21)..(22)..(23)..(24): Xaa is A or G
  MOD_RES (25)..(26)..(27)..(28): Xaa is A or G or is absent

SEQ ID NO: 29529 - protein, 39 aa, Artificial Sequence; identical to SEQ ID NO: 8213
  GFR-binding peptide
  MOD_RES (6)..(7): Xaa is C or S
  MOD_RES (21)..(22)..(23)..(24)..(25): Xaa is A or G
  MOD_RES (26)..(27)..(28)..(29): Xaa is A or G or is absent

SEQ ID NO: 29530 - protein, 37 aa, Artificial Sequence; identical to SEQ ID NO: 8214
  GFR-binding peptide
  MOD_RES (4)..(5)..(36): Xaa is C or S

SEQ ID NO: 29531 - protein, 40 aa, Artificial Sequence
  GFR-binding peptide
  MOD_RES (5)..(6)..(37)..(39): Xaa is C or S
SASPXXVSQDLEPISILYLIGKTPKIKFKYEMIVKSXKXS

SEQ ID NO: 29532 - protein, 40 aa, Artificial Sequence
  GFR-binding peptide
  MOD_RES (5)..(6)..(39): Xaa is C or S
  MOD_RES (20)..(21)..(22)..(23)..(24): Xaa is A or G
  MOD_RES (25)..(26)..(27)..(28): Xaa is A or G or is absent
SASPXXVPQDLSPISILYIXXXXXXXXXYKQYEMVVKSXK

SEQ ID NO: 29533 - protein, 39 aa, Artificial Sequence
  GFR-binding peptide
  MOD_RES (3)..(4)..(36)..(38): Xaa is C or S
KAXXAPTKLSPISVLYIDSSNNVIYKQYENMVVKAXGXH

SEQ ID NO: 29534 - protein, 41 aa, Artificial Sequence
  GFR-binding peptide
  MOD_RES (4)..(5)..(38)..(40): Xaa is C or S
  MOD_RES (19)..(20)..(21)..(22)..(23): Xaa is A or G
  MOD_RES (24)..(25)..(26)..(27): Xaa is A or G or is absent
AAPXXVPQALSPISILYIXXXXXXXXXYKQYEMIVRSXKXS

SEQ ID NO: 29535 - protein, 40 aa, Artificial Sequence
  GFR-binding peptide
  MOD_RES (4)..(5)..(39): Xaa is C or S
  MOD_RES (19)..(20)..(21)..(22)..(23): Xaa is A or G
  MOD_RES (24)..(25)..(26)..(27): Xaa is A or G or is absent
PASXXVPARLNAISILYFXXXXXXXXXLKKYRDMVVEAXG

SEQ ID NO: 29536 - protein, 35 aa, Artificial Sequence
  GFR-binding peptide
  MOD_RES (3)..(4): Xaa is C or S
KPXXAPTQLSPISVLYIDDSSNVIYKQYENMVVRA

SEQ ID NO: 29537 - protein, 35 aa, Artificial Sequence; identical to SEQ ID NO: 8219
  GFR-binding peptide
  MOD_RES (2)..(3)..(35): Xaa is C or S

SEQ ID NO: 29538 - protein, 41 aa, Artificial Sequence
  GFR-binding peptide
  MOD_RES (5)..(6)..(39)..(41): Xaa is C or S
  MOD_RES (20)..(21)..(22)..(23)..(24): Xaa is A or G
  MOD_RES (25)..(26)..(27)..(28): Xaa is A or G or is absent
SASPXXVPQDLEPISILYLXXXXXXXXXKFKYEMVVKSXKX

SEQ ID NO: 29539 - protein, 38 aa, Artificial Sequence
  GFR-binding peptide
  MOD_RES (2)..(3)..(37): Xaa is C or S
  MOD_RES (17)..(18)..(19)..(20)..(21): Xaa is A or G
  MOD_RES (22)..(23)..(24)..(25): Xaa is A or G or is absent
AXXVPTKLNAISILYFXXXXXXXXXLKKYRGMAVSEXG

SEQ ID NO: 29540 - protein, 41 aa, Artificial Sequence; identical to SEQ ID NO: 8221
  GFR-binding peptide
  MOD_RES (6)..(7)..(39)..(41): Xaa is C or S

SEQ ID NO: 29541 - protein, 40 aa, Artificial Sequence
  GFR-binding peptide
  MOD_RES (5)..(6)..(39): Xaa is C or S
  MOD_RES (20)..(21)..(22)..(23)..(24): Xaa is A or G
  MOD_RES (25)..(26)..(27)..(28): Xaa is A or G or is absent
SAAPXXVPQALEPISILYLXXXXXXXXXKFKYEMIVRSXK

SEQ ID NO: 29542 - protein, 36 aa, Artificial Sequence
  GFR-binding peptide
  MOD_RES (2)..(3): Xaa is C or S
  MOD_RES (17)..(18)..(19)..(20)..(21): Xaa is A or G
  MOD_RES (22)..(23)..(24)..(25): Xaa is A or G or is absent
SXXVPARLSPISILYKXXXXXXXXXLKYHYDMVVEA

SEQ ID NO: 29543 - protein, 42 aa, Artificial Sequence; identical to SEQ ID NO: 8224
  GFR-binding peptide
  MOD_RES (6)..(7)..(40)..(42): Xaa is C or S
  MOD_RES (21)..(22)..(23)..(24)..(25): Xaa is A or G
  MOD_RES (26)..(27)..(28)..(29): Xaa is A or G or is absent

SEQ ID NO: 29544 - protein, 41 aa, Artificial Sequence
  GFR-binding peptide
  MOD_RES (6)..(7)..(41): Xaa is C or S
  MOD_RES (21)..(22)..(23)..(24)..(25): Xaa is A or G
  MOD_RES (26)..(27)..(28)..(29): Xaa is A or G or is absent
TVPKPXXAPTQLSPISVLYIXXXXXXXXXYKQYENMVVRAX

SEQ ID NO: 29545 - protein, 34 aa, Artificial Sequence
  GFR-binding peptide
  MOD_RES (2)..(3): Xaa is C or S
PXXAPTKLEPISVLYLDDSSNVIKFKYENMVVRS

SEQ ID NO: 29546 - protein, 37 aa, Artificial Sequence
  GFR-binding peptide
  MOD_RES (34)..(36): Xaa is C or S
  MOD_RES (14)..(15)..(16)..(17)..(18): Xaa is A or G
  MOD_RES (19)..(20)..(21)..(22): Xaa is A or G or is absent
VPTELSPISMLYIXXXXXXXXXYKQYEEMVVEGXGXR

SEQ ID NO: 29547 - protein, 37 aa, Artificial Sequence; identical to SEQ ID NO: 8227
  GFR-binding peptide
  MOD_RES (3)..(4)..(36): Xaa is C or S

SEQ ID NO: 29548 - protein, 37 aa, Artificial Sequence
  GFR-binding peptide
  MOD_RES (1)..(2)..(36): Xaa is C or S
  MOD_RES (16)..(17)..(18)..(19)..(20): Xaa is A or G
  MOD_RES (21)..(22)..(23)..(24): Xaa is A or G or is absent
XXVPTELSPISMLYIXXXXXXXXXYKQYEEMVVEGXG

SEQ ID NO: 29549 - protein, 39 aa, Artificial Sequence; identical to SEQ ID NO: 8228
  GFR-binding peptide
  MOD_RES (5)..(6): Xaa is C or S
  MOD_RES (20)..(21)..(22)..(23)..(24): Xaa is A or G
  MOD_RES (25)..(26)..(27)..(28): Xaa is A or G or is absent

SEQ ID NO: 29550 - protein, 38 aa, Artificial Sequence
  GFR-binding peptide
  MOD_RES (6)..(7)..(38): Xaa is C or S
ASASPXXVPQDLEPISILYLVGRTPKVKFKYEMVVKSX

SEQ ID NO: 29551 - protein, 34 aa, Artificial Sequence; identical to SEQ ID NO: 8229
  GFR-binding peptide
  MOD_RES (33)..(33): Xaa is C or S
  MOD_RES (14)..(15)..(16)..(17)..(18): Xaa is A or G
  MOD_RES (19)..(20)..(21)..(22): Xaa is A or G or is absent

SEQ ID NO: 29552 - protein, 37 aa, Artificial Sequence
  GFR-binding peptide
  MOD_RES (5)..(6): Xaa is C or S
ASKAXXVPTKLSPISILYIDKGVVTYYKQYEGMAVSE

SEQ ID NO: 29553 - protein, 40 aa, Artificial Sequence
  GFR-binding peptide
  MOD_RES (4)..(5)..(37)..(39): Xaa is C or S
PKAXXVPTELEPISMLYLDENEKVVKFKYEDMVVEGXGXR

SEQ ID NO: 29554 - protein, 39 aa, Artificial Sequence
  GFR-binding peptide
  MOD_RES (5)..(6)..(39): Xaa is C or S
  MOD_RES (20)..(21)..(22)..(23)..(24): Xaa is A or G
  MOD_RES (25)..(26)..(27)..(28): Xaa is A or G or is absent
SAAPXXVPQALSPISILYIXXXXXXXXXYKQYEMIVRSX

SEQ ID NO: 29555 - protein, 38 aa, Artificial Sequence
  GFR-binding peptide
  MOD_RES (1)..(2)..(36)..(38): Xaa is C or S
  MOD_RES (16)..(17)..(18)..(19)..(20): Xaa is A or G
  MOD_RES (21)..(22)..(23)..(24): Xaa is A or G or is absent
XXAPTKLSPISVLYIXXXXXXXXXYKQYENMVVRSXGX

SEQ ID NO: 29556 - protein, 35 aa, Artificial Sequence
  GFR-binding peptide
  MOD_RES (2)..(3)..(34): Xaa is C or S
PXXVPQDLSPISILYIVGRTPKVYKQYEMVVKSXK

SEQ ID NO: 29557 - protein, 41 aa, Artificial Sequence
  GFR-binding peptide
  MOD_RES (7)..(41): Xaa is C or S
  MOD_RES (21)..(22)..(23)..(24)..(25): Xaa is A or G
  MOD_RES (26)..(27)..(28)..(29): Xaa is A or G or is absent
HVTKPTXAPTKLSPISVLYIXXXXXXXXXYKQYENMVVRSX

SEQ ID NO: 29558 - protein, 35 aa, Artificial Sequence; identical to SEQ ID NO: 8240
  GFR-binding peptide
  MOD_RES (1)..(2): Xaa is C or S
  MOD_RES (16)..(17)..(18)..(19)..(20): Xaa is A or G
  MOD_RES (21)..(22)..(23)..(24): Xaa is A or G or is absent

SEQ ID NO: 29559 - protein, 41 aa, Artificial Sequence
  GFR-binding peptide
  MOD_RES (4)..(5)..(39)..(41): Xaa is C or S
  MOD_RES (19)..(20)..(21)..(22)..(23): Xaa is A or G
  MOD_RES (24)..(25)..(26)..(27): Xaa is A or G or is absent
PKAXXAPTKLEPISVLYLXXXXXXXXXKFKYENMVVKAXGX

SEQ ID NO: 29560 - protein, 38 aa, Artificial Sequence
  GFR-binding peptide
  MOD_RES (1)..(35)..(37): Xaa is C or S
  MOD_RES (15)..(16)..(17)..(18)..(19): Xaa is A or G
  MOD_RES (20)..(21)..(22)..(23): Xaa is A or G or is absent
XVPTELSPISMLYIXXXXXXXXXYKQYEEMVVEGXGXR

SEQ ID NO: 29561 - protein, 37 aa, Artificial Sequence
  GFR-binding peptide
  MOD_RES (1)..(34)..(36): Xaa is C or S
  MOD_RES (15)..(16)..(17)..(18)..(19): Xaa is A or G
  MOD_RES (20)..(21)..(22)..(23): Xaa is A or G or is absent
XVPQALSPISILYIXXXXXXXXXYKQYEMIVRSXKXS

SEQ ID NO: 29562 - protein, 35 aa, Artificial Sequence
  GFR-binding peptide
  MOD_RES (1)..(2)..(34): Xaa is C or S
XXAPTQLSPISVLYIDDSSNVIYKQYENMVVRAXG

SEQ ID NO: 29563 - protein, 39 aa, Artificial Sequence; identical to SEQ ID NO: 8241
  GFR-binding peptide
  MOD_RES (3)..(4)..(38): Xaa is C or S
  MOD_RES (18)..(19)..(20)..(21)..(22): Xaa is A or G
  MOD_RES (23)..(24)..(25)..(26): Xaa is A or G or is absent

SEQ ID NO: 29564 - protein, 34 aa, Artificial Sequence
  GFR-binding peptide
  MOD_RES (1)..(2)..(34): Xaa is C or S
XXAPTKLSPISVLYIDSSNNVIYKQYENMVVKAX

SEQ ID NO: 29565 - protein, 36 aa, Artificial Sequence
  GFR-binding peptide
  MOD_RES (34)..(36): Xaa is C or S
  MOD_RES (14)..(15)..(16)..(17)..(18): Xaa is A or G
  MOD_RES (19)..(20)..(21)..(22): Xaa is A or G or is absent
APTKLEPISVLYLXXXXXXXXXKFKYENMVVKAXGX

SEQ ID NO: 29566 - protein, 36 aa, Artificial Sequence
  GFR-binding peptide
  MOD_RES (1)..(35): Xaa is C or S
  MOD_RES (15)..(16)..(17)..(18)..(19): Xaa is A or G
  MOD_RES (20)..(21)..(22)..(23): Xaa is A or G or is absent
XAPTKLSPISVLYIXXXXXXXXXYKQYENMVVKAXG

SEQ ID NO: 29567 - protein, 35 aa, Artificial Sequence; identical to SEQ ID NO: 8249
  GFR-binding peptide
  MOD_RES (2)..(3): Xaa is C or S
  MOD_RES (17)..(18)..(19)..(20)..(21): Xaa is A or G
  MOD_RES (22)..(23)..(24)..(25): Xaa is A or G or is absent

SEQ ID NO: 29568 - protein, 38 aa, Artificial Sequence
  GFR-binding peptide
  MOD_RES (4)..(38): Xaa is C or S
  MOD_RES (18)..(19)..(20)..(21)..(22): Xaa is A or G
  MOD_RES (23)..(24)..(25)..(26): Xaa is A or G or is absent
KPTXAPTKLSPISVLYIXXXXXXXXXYKQYENMVVRSX

SEQ ID NO: 29569 - protein, 37 aa, Artificial Sequence; identical to SEQ ID NO: 8253
  GFR-binding peptide
  MOD_RES (1)..(35)..(37): Xaa is C or S
  MOD_RES (15)..(16)..(17)..(18)..(19): Xaa is A or G
  MOD_RES (20)..(21)..(22)..(23): Xaa is A or G or is absent

SEQ ID NO: 29570 - protein, 36 aa, Artificial Sequence
  GFR-binding peptide
  MOD_RES (1)..(35): Xaa is C or S
  MOD_RES (15)..(16)..(17)..(18)..(19): Xaa is A or G
  MOD_RES (20)..(21)..(22)..(23): Xaa is A or G or is absent
XVPTELEPISMLYLXXXXXXXXXKFKYEDMVVEGXG

SEQ ID NO: 29571 - protein, 34 aa, Artificial Sequence
  GFR-binding peptide
  MOD_RES (1)..(1): Xaa is C or S
  MOD_RES (15)..(16)..(17)..(18)..(19): Xaa is A or G
  MOD_RES (20)..(21)..(22)..(23): Xaa is A or G or is absent
XAPTQLSPISVLYIXXXXXXXXXYKQYENMVVRA

SEQ ID NO: 29572 - protein, 36 aa, Artificial Sequence
  GFR-binding peptide
  MOD_RES (5)..(6): Xaa is C or S
VPKPXXAPTQLEPISVLYLDDSSNVIKFKYENMVVR

SEQ ID NO: 29573 - protein, 38 aa, Artificial Sequence; identical to SEQ ID NO: 8254
  GFR-binding peptide
  MOD_RES (2)..(3)..(35)..(37): Xaa is C or S

SEQ ID NO: 29574 - protein, 39 aa, Artificial Sequence
  GFR-binding peptide
  MOD_RES (6)..(7): Xaa is C or S
  MOD_RES (21)..(22)..(23)..(24)..(25): Xaa is A or G
  MOD_RES (26)..(27)..(28)..(29): Xaa is A or G or is absent
AVPKAXXAPTKLSPISVLYIXXXXXXXXXYKQYENMVVK

SEQ ID NO: 29575 - protein, 36 aa, Artificial Sequence
  GFR-binding peptide
  MOD_RES (4)..(36): Xaa is C or S
KPTXAPTKLEPISVLYLDDSSNVIKFKYENMVVRSX

SEQ ID NO: 29576 - protein, 35 aa, Artificial Sequence
  GFR-binding peptide
  MOD_RES (1)..(1): Xaa is C or S
  MOD_RES (15)..(16)..(17)..(18)..(19): Xaa is A or G
  MOD_RES (20)..(21)..(22)..(23): Xaa is A or G or is absent
XVPTKLEPISVLYLXXXXXXXXXKFKYEEGMSVAE

SEQ ID NO: 29577 - protein, 39 aa, Artificial Sequence
  GFR-binding peptide
  MOD_RES (2)..(3)..(36)..(38): Xaa is C or S
  MOD_RES (17)..(18)..(19)..(20)..(21): Xaa is A or G
  MOD_RES (22)..(23)..(24)..(25): Xaa is A or G or is absent
PXXVPQDLEPISILYLXXXXXXXXXKFKYEMVVKSXKXS

SEQ ID NO: 29578 - protein, 41 aa, Artificial Sequence
  GFR-binding peptide
  MOD_RES (5)..(39)..(41): Xaa is C or S
  MOD_RES (19)..(20)..(21)..(22)..(23): Xaa is A or G
  MOD_RES (24)..(25)..(26)..(27): Xaa is A or G or is absent
TKPTXAPTKLEPISVLYLXXXXXXXXXKFKYENMVVRSXGX

SEQ ID NO: 29579 - protein, 38 aa, Artificial Sequence
  GFR-binding peptide
  MOD_RES (5)..(6)..(38): Xaa is C or S
APASXXVPARLEPISILYLDAANNVVKFKYEDMVVEAX

SEQ ID NO: 29580 - protein, 39 aa, Artificial Sequence; identical to SEQ ID NO: 8258
  GFR-binding peptide
  MOD_RES (4)..(5)..(39): Xaa is C or S
  MOD_RES (19)..(20)..(21)..(22)..(23): Xaa is A or G
  MOD_RES (24)..(25)..(26)..(27): Xaa is A or G or is absent

SEQ ID NO: 29581 - protein, 39 aa, Artificial Sequence
  GFR-binding peptide
  MOD_RES (6)..(7): Xaa is C or S
  MOD_RES (21)..(22)..(23)..(24)..(25): Xaa is A or G
  MOD_RES (26)..(27)..(28)..(29): Xaa is A or G or is absent
KIPKAXXVPTELSPISMLYIXXXXXXXXXYKQYEDMVVE

SEQ ID NO: 29582 - protein, 38 aa, Artificial Sequence
  GFR-binding peptide
  MOD_RES (3)..(4)..(36)..(38): Xaa is C or S
KAXXAPTKLEPISVLYLDSSNNVIKFKYENMVVKAXGX

SEQ ID NO: 29583 - protein, 36 aa, Artificial Sequence
  GFR-binding peptide
  MOD_RES (3)..(4)..(35): Xaa is C or S
SPXXVPQDLSPISILYIVGRTPKVYKQYEMVVKSXK

SEQ ID NO: 29584 - protein, 35 aa, Artificial Sequence; identical to SEQ ID NO: 8261
  GFR-binding peptide
  MOD_RES (32)..(34): Xaa is C or S

SEQ ID NO: 29585 - protein, 34 aa, Artificial Sequence; identical to SEQ ID NO: 8262
  GFR-binding peptide
  MOD_RES (1)..(2)..(33): Xaa is C or S

SEQ ID NO: 29586 - protein, 34 aa, Artificial Sequence; identical to SEQ ID NO: 8263
  GFR-binding peptide
  MOD_RES (2)..(3): Xaa is C or S

SEQ ID NO: 29587 - protein, 34 aa, Artificial Sequence; identical to SEQ ID NO: 8264
  GFR-binding peptide
  MOD_RES (1)..(33): Xaa is C or S

SEQ ID NO: 29588 - protein, 37 aa, Artificial Sequence
  GFR-binding peptide
  MOD_RES (1)..(2)..(34)..(36): Xaa is C or S
XXVPARLNAISILYFDAANNVVLKKYRDMVVEAXGXR

SEQ ID NO: 29589 - protein, 38 aa, Artificial Sequence
  GFR-binding peptide
  MOD_RES (2)..(3)..(35)..(37): Xaa is C or S
AXXAPTKLEPISVLYLDSSNNVIKFKYENMVVKAXGXH

SEQ ID NO: 29590 - protein, 34 aa, Artificial Sequence
  GFR-binding peptide
  MOD_RES (2)..(3): Xaa is C or S
AXXAPTKLSPISVLYIDSSNNVIYKQYENMVVKA

SEQ ID NO: 29591 - protein, 36 aa, Artificial Sequence
  GFR-binding peptide
  MOD_RES (4)..(5)..(36): Xaa is C or S
ASPXXVSQDLSPISILYIIGKTPKIYKQYEMIVKSX

SEQ ID NO: 29592 - protein, 38 aa, Artificial Sequence
  GFR-binding peptide
  MOD_RES (1)..(2)..(36)..(38): Xaa is C or S
  MOD_RES (16)..(17)..(18)..(19)..(20): Xaa is A or G
  MOD_RES (21)..(22)..(23)..(24): Xaa is A or G or is absent
XXVPTKLEPISILYLXXXXXXXXXKFKYEGMAVSEXGX

SEQ ID NO: 29593 - protein, 33 aa, Artificial Sequence
  GFR-binding peptide
  MOD_RES (14)..(15)..(16)..(17)..(18): Xaa is A or G
  MOD_RES (19)..(20)..(21)..(22): Xaa is A or G or is absent
VPARLSPISILYKXXXXXXXXXLKYHYDMVVEA

SEQ ID NO: 29594 - protein, 37 aa, Artificial Sequence
  GFR-binding peptide
  MOD_RES (1)..(2)..(34)..(36): Xaa is C or S
XXAPTKLSPISVLYIDDSSNVIYKQYENMVVRSXGXH

SEQ ID NO: 29595 - protein, 39 aa, Artificial Sequence
  GFR-binding peptide
  MOD_RES (4)..(5)..(37)..(39): Xaa is C or S
PASXXVPARLNAISILYFDAANNVVLKKYRDMVVEAXGX

SEQ ID NO: 29596 - protein, 34 aa, Artificial Sequence; identical to SEQ ID NO: 8274
  GFR-binding peptide
  MOD_RES (3)..(4): Xaa is C or S

SEQ ID NO: 29597 - protein, 40 aa, Artificial Sequence; identical to SEQ ID NO: 8275
  GFR-binding peptide
  MOD_RES (6)..(7): Xaa is C or S
  MOD_RES (21)..(22)..(23)..(24)..(25): Xaa is A or G
  MOD_RES (26)..(27)..(28)..(29): Xaa is A or G or is absent

SEQ ID NO: 29598 - protein, 36 aa, Artificial Sequence
  GFR-binding peptide
  MOD_RES (2)..(3): Xaa is C or S
  MOD_RES (17)..(18)..(19)..(20)..(21): Xaa is A or G
  MOD_RES (22)..(23)..(24)..(25): Xaa is A or G or is absent
AXXVPTKLSPISILYIXXXXXXXXXYKQYEGMAVSE

SEQ ID NO: 29599 - protein, 36 aa, Artificial Sequence
  GFR-binding peptide
  MOD_RES (1)..(2)..(36): Xaa is C or S
  MOD_RES (16)..(17)..(18)..(19)..(20): Xaa is A or G
  MOD_RES (21)..(22)..(23)..(24): Xaa is A or G or is absent
XXVPARLSPISILYIXXXXXXXXXYKQYEDMVVEAX

SEQ ID NO: 29600 - protein, 35 aa, Artificial Sequence; identical to SEQ ID NO: 8278
  GFR-binding peptide
  MOD_RES (34)..(34): Xaa is C or S
  MOD_RES (14)..(15)..(16)..(17)..(18): Xaa is A or G
  MOD_RES (19)..(20)..(21)..(22): Xaa is A or G or is absent

SEQ ID NO: 29601 - protein, 37 aa, Artificial Sequence
  GFR-binding peptide
  MOD_RES (4)..(5): Xaa is C or S
GKAXXVPTKLSPISVLYIDDMGVPTYKQYEEGMSVAE

SEQ ID NO: 29602 - protein, 42 aa, Artificial Sequence
  GFR-binding peptide
  MOD_RES (5)..(6)..(40)..(42): Xaa is C or S
  MOD_RES (20)..(21)..(22)..(23)..(24): Xaa is A or G
  MOD_RES (25)..(26)..(27)..(28): Xaa is A or G or is absent
VPKAXXAPTKLSPISVLYIXXXXXXXXXYKQYENMVVKAXGX

SEQ ID NO: 29603 - protein, 41 aa, Artificial Sequence
  GFR-binding peptide
  MOD_RES (6)..(7)..(41): Xaa is C or S
  MOD_RES (21)..(22)..(23)..(24)..(25): Xaa is A or G
  MOD_RES (26)..(27)..(28)..(29): Xaa is A or G or is absent
AVPKAXXAPTKLEPISVLYLXXXXXXXXXKFKYENMVVKAX

SEQ ID NO: 29604 - protein, 37 aa, Artificial Sequence; identical to SEQ ID NO: 8282
  GFR-binding peptide
  MOD_RES (2)..(3)..(37): Xaa is C or S
  MOD_RES (17)..(18)..(19)..(20)..(21): Xaa is A or G
  MOD_RES (22)..(23)..(24)..(25): Xaa is A or G or is absent

SEQ ID NO: 29605 - protein, 40 aa, Artificial Sequence
  GFR-binding peptide
  MOD_RES (5)..(6)..(40): Xaa is C or S
  MOD_RES (20)..(21)..(22)..(23)..(24): Xaa is A or G
  MOD_RES (25)..(26)..(27)..(28): Xaa is A or G or is absent
VPKAXXAPTKLSPISVLYIXXXXXXXXXYKQYENMVVKAX

SEQ ID NO: 29606 - protein, 38 aa, Artificial Sequence; identical to SEQ ID NO: 8286
  GFR-binding peptide
  MOD_RES (2)..(3)..(36)..(38): Xaa is C or S
  MOD_RES (17)..(18)..(19)..(20)..(21): Xaa is A or G
  MOD_RES (22)..(23)..(24)..(25): Xaa is A or G or is absent

SEQ ID NO: 29607 - protein, 39 aa, Artificial Sequence
  GFR-binding peptide
  MOD_RES (4)..(5)..(39): Xaa is C or S
  MOD_RES (19)..(20)..(21)..(22)..(23): Xaa is A or G
  MOD_RES (24)..(25)..(26)..(27): Xaa is A or G or is absent
PKPXXAPTKLEPISVLYLXXXXXXXXXKFKYENMVVRSX

SEQ ID NO: 29608 - protein, 39 aa, Artificial Sequence; identical to SEQ ID NO: 8290
  GFR-binding peptide
  MOD_RES (4)..(5)..(37)..(39): Xaa is C or S

SEQ ID NO: 29609 - protein, 34 aa, Artificial Sequence
  GFR-binding peptide
  MOD_RES (1)..(2): Xaa is C or S
  MOD_RES (16)..(17)..(18)..(19)..(20): Xaa is A or G
  MOD_RES (21)..(22)..(23)..(24): Xaa is A or G or is absent
XXAPTQLSPISVLYIXXXXXXXXXYKQYENMVVR

SEQ ID NO: 29610 - protein, 37 aa, Artificial Sequence; identical to SEQ ID NO: 8292
  GFR-binding peptide
  MOD_RES (34)..(36): Xaa is C or S
  MOD_RES (14)..(15)..(16)..(17)..(18): Xaa is A or G
  MOD_RES (19)..(20)..(21)..(22): Xaa is A or G or is absent

SEQ ID NO: 29611 - protein, 36 aa, Artificial Sequence
  GFR-binding peptide
  MOD_RES (3)..(4): Xaa is C or S
  MOD_RES (18)..(19)..(20)..(21)..(22): Xaa is A or G
  MOD_RES (23)..(24)..(25)..(26): Xaa is A or G or is absent
KAXXAPTKLEPISVLYLXXXXXXXXXKFKYENMVVK

SEQ ID NO: 29612 - protein, 33 aa, Artificial Sequence
  GFR-binding peptide
  MOD_RES (31)..(33): Xaa is C or S
VPQDLSPISILYIVGRTPKVYKQYEMVVKSXKX

SEQ ID NO: 29613 - protein, 41 aa, Artificial Sequence; identical to SEQ ID NO: 8295
  GFR-binding peptide
  MOD_RES (6)..(7)..(39)..(41): Xaa is C or S

SEQ ID NO: 29614 - protein, 36 aa, Artificial Sequence
  GFR-binding peptide
  MOD_RES (5)..(6): Xaa is C or S
ASKAXXVPTKLSPISILYKDKGVVTYLKYHYGMAVS

SEQ ID NO: 29615 - protein, 38 aa, Artificial Sequence; identical to SEQ ID NO: 8299
  GFR-binding peptide
  MOD_RES (6)..(7): Xaa is C or S

SEQ ID NO: 29616 - protein, 38 aa, Artificial Sequence
  GFR-binding peptide
  MOD_RES (5)..(6)..(38): Xaa is C or S
VPKPXXAPTQLEPISVLYLDDSSNVIKFKYENMVVRAX

SEQ ID NO: 29617 - protein, 37 aa, Artificial Sequence
  GFR-binding peptide
  MOD_RES (5)..(6): Xaa is C or S
IPKAXXVPTELEPISMLYLDEYDKVVKFKYEEMVVEG

SEQ ID NO: 29618 - protein, 42 aa, Artificial Sequence
  GFR-binding peptide
  MOD_RES (4)..(5)..(39)..(41): Xaa is C or S
  MOD_RES (19)..(20)..(21)..(22)..(23): Xaa is A or G
  MOD_RES (24)..(25)..(26)..(27): Xaa is A or G or is absent
SKAXXVPTKLNAISILYFXXXXXXXXXLKKYRGMAVSEXGXR

SEQ ID NO: 29619 - protein, 41 aa, Artificial Sequence
  GFR-binding peptide
  MOD_RES (5)..(6)..(38)..(40): Xaa is C or S
IPKAXXVPTELEPISMLYLDENEKVVKFKYEDMVVEGXGXR

SEQ ID NO: 29620 - protein, 34 aa, Artificial Sequence
  GFR-binding peptide
  MOD_RES (1)..(1): Xaa is C or S
  MOD_RES (15)..(16)..(17)..(18)..(19): Xaa is A or G
  MOD_RES (20)..(21)..(22)..(23): Xaa is A or G or is absent
XVPARLNAISILYFXXXXXXXXXLKKYRDMVVEA

SEQ ID NO: 29621 - protein, 35 aa, Artificial Sequence
  GFR-binding peptide
  MOD_RES (3)..(4)..(35): Xaa is C or S
SPXXVSQDLSPISILYIIGKTPKIYKQYEMIVKSX

SEQ ID NO: 29622 - protein, 43 aa, Artificial Sequence
  GFR-binding peptide
  MOD_RES (6)..(7)..(40)..(42): Xaa is C or S
KVGKAXXVPTKLSPISVLYIDDMGVPTYKQYEEGMSVAEXGXR

SEQ ID NO: 29623 - protein, 38 aa, Artificial Sequence
  GFR-binding peptide
  MOD_RES (35)..(37): Xaa is C or S
  MOD_RES (14)..(15)..(16)..(17)..(18): Xaa is A or G
  MOD_RES (19)..(20)..(21)..(22): Xaa is A or G or is absent
VPTKLSPISVLYIXXXXXXXXXYKQYEEGMSVAEXGXR

SEQ ID NO: 29624 - protein, 39 aa, Artificial Sequence
  GFR-binding peptide
  MOD_RES (2)..(3)..(37)..(39): Xaa is C or S
  MOD_RES (17)..(18)..(19)..(20)..(21): Xaa is A or G
  MOD_RES (22)..(23)..(24)..(25): Xaa is A or G or is absent
AXXAPTKLSPISVLYIXXXXXXXXXYKQYENMVVKAXGX

SEQ ID NO: 29625 - protein, 36 aa, Artificial Sequence
  GFR-binding peptide
  MOD_RES (1)..(2)..(36): Xaa is C or S
  MOD_RES (16)..(17)..(18)..(19)..(20): Xaa is A or G
  MOD_RES (21)..(22)..(23)..(24): Xaa is A or G or is absent
XXVPARLSPISILYKXXXXXXXXXLKYHYDMVVEAX

SEQ ID NO: 29626 - protein, 35 aa, Artificial Sequence; identical to SEQ ID NO: 8308
  GFR-binding peptide
  MOD_RES (1)..(34): Xaa is C or S
  MOD_RES (15)..(16)..(17)..(18)..(19): Xaa is A or G
  MOD_RES (20)..(21)..(22)..(23): Xaa is A or G or is absent

SEQ ID NO: 29627 - protein, 43 aa, Artificial Sequence
  GFR-binding peptide
  MOD_RES (6)..(40)..(42): Xaa is C or S
  MOD_RES (20)..(21)..(22)..(23)..(24): Xaa is A or G
  MOD_RES (25)..(26)..(27)..(28): Xaa is A or G or is absent
VTKPTXAPTKLSPISVLYIXXXXXXXXXYKQYENMVVRSXGXH

SEQ ID NO: 29628 - protein, 32 aa, Artificial Sequence
  GFR-binding peptide
  MOD_RES (32)..(32): Xaa is C or S
VPARLEPISILYLDAANNVVKFKYEDMVVEAX

SEQ ID NO: 29629 - protein, 37 aa, Artificial Sequence; identical to SEQ ID NO: 8309
  GFR-binding peptide
  MOD_RES (2)..(3)..(37): Xaa is C or S
  MOD_RES (17)..(18)..(19)..(20)..(21): Xaa is A or G
  MOD_RES (22)..(23)..(24)..(25): Xaa is A or G or is absent

SEQ ID NO: 29630 - protein, 41 aa, Artificial Sequence
  GFR-binding peptide
  MOD_RES (5)..(6)..(40): Xaa is C or S
  MOD_RES (20)..(21)..(22)..(23)..(24): Xaa is A or G
  MOD_RES (25)..(26)..(27)..(28): Xaa is A or G or is absent
APASXXVPARLSPISILYIXXXXXXXXXYKQYEDMVVEAXG

SEQ ID NO: 29631 - protein, 39 aa, Artificial Sequence
  GFR-binding peptide
  MOD_RES (5)..(6)..(38): Xaa is C or S
IPKAXXVPTELSPISMLYIDENEKVVYKQYEDMVVEGXG

SEQ ID NO: 29632 - protein, 40 aa, Artificial Sequence
  GFR-binding peptide
  MOD_RES (4)..(5)..(38)..(40): Xaa is C or S
  MOD_RES (19)..(20)..(21)..(22)..(23): Xaa is A or G
  MOD_RES (24)..(25)..(26)..(27): Xaa is A or G or is absent
AAPXXVPQALEPISILYLXXXXXXXXXKFKYEMIVRSXKX

SEQ ID NO: 29633 - protein, 37 aa, Artificial Sequence; identical to SEQ ID NO: 8314
  GFR-binding peptide
  MOD_RES (2)..(3)..(37): Xaa is C or S
  MOD_RES (17)..(18)..(19)..(20)..(21): Xaa is A or G
  MOD_RES (22)..(23)..(24)..(25): Xaa is A or G or is absent

SEQ ID NO: 29634 - protein, 33 aa, Artificial Sequence
  GFR-binding peptide
  MOD_RES (14)..(15)..(16)..(17)..(18): Xaa is A or G
  MOD_RES (19)..(20)..(21)..(22): Xaa is A or G or is absent
VPTKLSPISILYKXXXXXXXXXLKYHYGMAVSE

SEQ ID NO: 29635 - protein, 38 aa, Artificial Sequence
  GFR-binding peptide
  MOD_RES (2)..(3)..(37): Xaa is C or S
  MOD_RES (17)..(18)..(19)..(20)..(21): Xaa is A or G
  MOD_RES (22)..(23)..(24)..(25): Xaa is A or G or is absent
PXXAPTQLEPISVLYLXXXXXXXXXKFKYENMVVRAXG

SEQ ID NO: 29636 - protein, 36 aa, Artificial Sequence; identical to SEQ ID NO: 8317
  GFR-binding peptide
  MOD_RES (3)..(4): Xaa is C or S
  MOD_RES (18)..(19)..(20)..(21)..(22): Xaa is A or G
  MOD_RES (23)..(24)..(25)..(26): Xaa is A or G or is absent

SEQ ID NO: 29637 - protein, 40 aa, Artificial Sequence
  GFR-binding peptide
  MOD_RES (6)..(7)..(40): Xaa is C or S
  MOD_RES (21)..(22)..(23)..(24)..(25): Xaa is A or G
  MOD_RES (26)..(27)..(28)..(29): Xaa is A or G or is absent
ASASPXXVSQDLEPISILYLXXXXXXXXXKFKYEMIVKSX

SEQ ID NO: 29638 - protein, 41 aa, Artificial Sequence
  GFR-binding peptide
  MOD_RES (6)..(7)..(40): Xaa is C or S
  MOD_RES (21)..(22)..(23)..(24)..(25): Xaa is A or G
  MOD_RES (26)..(27)..(28)..(29): Xaa is A or G or is absent
ASASPXXVSQDLSPISILYIXXXXXXXXXYKQYEMIVKSXK

SEQ ID NO: 29639 - protein, 40 aa, Artificial Sequence
  GFR-binding peptide
  MOD_RES (6)..(7)..(39): Xaa is C or S
AAPASXXVPARLSPISILYKDAANNVVLKYHYDMVVEAXG

SEQ ID NO: 29640 - protein, 37 aa, Artificial Sequence
  GFR-binding peptide
  MOD_RES (1)..(34)..(36): Xaa is C or S
  MOD_RES (15)..(16)..(17)..(18)..(19): Xaa is A or G
  MOD_RES (20)..(21)..(22)..(23): Xaa is A or G or is absent
XVPQDLSPISILYIXXXXXXXXXYKQYEMVVKSXKXS

SEQ ID NO: 29641 - protein, 34 aa, Artificial Sequence; identical to SEQ ID NO: 8320
  GFR-binding peptide
  MOD_RES (1)..(32)..(34): Xaa is C or S

SEQ ID NO: 29642 - protein, 38 aa, Artificial Sequence; identical to SEQ ID NO: 8321
  GFR-binding peptide
  MOD_RES (3)..(4)..(38): Xaa is C or S
  MOD_RES (18)..(19)..(20)..(21)..(22): Xaa is A or G
  MOD_RES (23)..(24)..(25)..(26): Xaa is A or G or is absent

SEQ ID NO: 29643 - protein, 37 aa, Artificial Sequence
  GFR-binding peptide
  MOD_RES (3)..(4): Xaa is C or S
  MOD_RES (18)..(19)..(20)..(21)..(22): Xaa is A or G
  MOD_RES (23)..(24)..(25)..(26): Xaa is A or G or is absent
KAXXVPTELSPISMLYIXXXXXXXXXYKQYEDMVVEG

SEQ ID NO: 29644 - protein, 36 aa, Artificial Sequence; identical to SEQ ID NO: 8325
  GFR-binding peptide
  MOD_RES (1)..(2)..(33)..(35): Xaa is C or S

SEQ ID NO: 29645 - protein, 34 aa, Artificial Sequence; identical to SEQ ID NO: 8327
  GFR-binding peptide
  MOD_RES (3)..(4): Xaa is C or S

SEQ ID NO: 29646 - protein, 40 aa, Artificial Sequence
  GFR-binding peptide
  MOD_RES (3)..(4)..(37)..(39): Xaa is C or S
  MOD_RES (18)..(19)..(20)..(21)..(22): Xaa is A or G
  MOD_RES (23)..(24)..(25)..(26): Xaa is A or G or is absent
SPXXVSQDLSPISILYIXXXXXXXXXYKQYEMIVKSXKXS

SEQ ID NO: 29647 - protein, 37 aa, Artificial Sequence
  GFR-binding peptide
  MOD_RES (2)..(3)..(37): Xaa is C or S
  MOD_RES (17)..(18)..(19)..(20)..(21): Xaa is A or G
  MOD_RES (22)..(23)..(24)..(25): Xaa is A or G or is absent
PXXAPTQLSPISVLYIXXXXXXXXXYKQYENMVVRAX

SEQ ID NO: 29648 - protein, 34 aa, Artificial Sequence
  GFR-binding peptide
  MOD_RES (31)..(33): Xaa is C or S
VSQDLEPISILYLIGKTPKIKFKYEMIVKSXKXS

SEQ ID NO: 29649 - protein, 35 aa, Artificial Sequence
  GFR-binding peptide
  MOD_RES (1)..(2)..(34): Xaa is C or S
XXAPTKLEPISVLYLDDSSNVIKFKYENMVVRSXG

SEQ ID NO: 29650 - protein, 37 aa, Artificial Sequence
  GFR-binding peptide
  MOD_RES (3)..(4)..(37): Xaa is C or S
  MOD_RES (18)..(19)..(20)..(21)..(22): Xaa is A or G
  MOD_RES (23)..(24)..(25)..(26): Xaa is A or G or is absent
SPXXVPQDLSPISILYIXXXXXXXXXYKQYEMVVKSX

SEQ ID NO: 29651 - protein, 43 aa, Artificial Sequence; identical to SEQ ID NO: 8332
  GFR-binding peptide
  MOD_RES (7)..(41)..(43): Xaa is C or S
  MOD_RES (21)..(22)..(23)..(24)..(25): Xaa is A or G
  MOD_RES (26)..(27)..(28)..(29): Xaa is A or G or is absent

SEQ ID NO: 29652 - protein, 37 aa, Artificial Sequence
  GFR-binding peptide
  MOD_RES (34)..(36): Xaa is C or S
  MOD_RES (14)..(15)..(16)..(17)..(18): Xaa is A or G
  MOD_RES (19)..(20)..(21)..(22): Xaa is A or G or is absent
VPTKLNAISILYFXXXXXXXXXLKKYRGMAVSEXGXR

SEQ ID NO: 29653 - protein, 36 aa, Artificial Sequence
  GFR-binding peptide
  MOD_RES (1)..(33)..(35): Xaa is C or S
XAPTKLEPISVLYLDDSSNVIKFKYENMVVRSXGXH

SEQ ID NO: 29654 - protein, 35 aa, Artificial Sequence
  GFR-binding peptide
  MOD_RES (34)..(34): Xaa is C or S
  MOD_RES (14)..(15)..(16)..(17)..(18): Xaa is A or G
  MOD_RES (19)..(20)..(21)..(22): Xaa is A or G or is absent
APTKLSPISVLYIXXXXXXXXXYKQYENMVVKAXG

SEQ ID NO: 29655 - protein, 40 aa, Artificial Sequence; identical to SEQ ID NO: 8335
  GFR-binding peptide
  MOD_RES (5)..(6)..(40): Xaa is C or S
  MOD_RES (20)..(21)..(22)..(23)..(24): Xaa is A or G
  MOD_RES (25)..(26)..(27)..(28): Xaa is A or G or is absent

SEQ ID NO: 29656 - protein, 33 aa, Artificial Sequence; identical to SEQ ID NO: 8336
  GFR-binding peptide
  MOD_RES (1)..(33): Xaa is C or S

SEQ ID NO: 29657 - protein, 37 aa, Artificial Sequence
  GFR-binding peptide
  MOD_RES (1)..(35)..(37): Xaa is C or S
  MOD_RES (15)..(16)..(17)..(18)..(19): Xaa is A or G
  MOD_RES (20)..(21)..(22)..(23): Xaa is A or G or is absent
XVPTKLSPISILYKXXXXXXXXXLKYHYGMAVSEXGX

SEQ ID NO: 29658 - protein, 31 aa, Artificial Sequence
  GFR-binding peptide
  MOD_RES (1)..(1): Xaa is C or S
XVPTELSPISMLYIDEYDKVVYKQYEEMVVE

SEQ ID NO: 29659 - protein, 34 aa, Artificial Sequence
  GFR-binding peptide
  MOD_RES (1)..(34): Xaa is C or S
  MOD_RES (15)..(16)..(17)..(18)..(19): Xaa is A or G
  MOD_RES (20)..(21)..(22)..(23): Xaa is A or G or is absent
XVPQALEPISILYLXXXXXXXXXKFKYEMIVRSX

SEQ ID NO: 29660 - protein, 41 aa, Artificial Sequence; identical to SEQ ID NO: 8340
  GFR-binding peptide
  MOD_RES (3)..(4)..(38)..(40): Xaa is C or S
  MOD_RES (18)..(19)..(20)..(21)..(22): Xaa is A or G
  MOD_RES (23)..(24)..(25)..(26): Xaa is A or G or is absent

SEQ ID NO: 29661 - protein, 33 aa, Artificial Sequence; identical to SEQ ID NO: 8344
  GFR-binding peptide
  MOD_RES (31)..(33): Xaa is C or S

SEQ ID NO: 29662 - protein, 39 aa, Artificial Sequence; identical to SEQ ID NO: 8347
  GFR-binding peptide
  MOD_RES (5)..(6)..(39): Xaa is C or S
  MOD_RES (20)..(21)..(22)..(23)..(24): Xaa is A or G
  MOD_RES (25)..(26)..(27)..(28): Xaa is A or G or is absent

SEQ ID NO: 29663 - protein, 39 aa, Artificial Sequence
  GFR-binding peptide
  MOD_RES (2)..(3)..(37)..(39): Xaa is C or S
  MOD_RES (17)..(18)..(19)..(20)..(21): Xaa is A or G
  MOD_RES (22)..(23)..(24)..(25): Xaa is A or G or is absent
SXXVPARLSPISILYKXXXXXXXXXLKYHYDMVVEAXGX

SEQ ID NO: 29664 - protein, 42 aa, Artificial Sequence; identical to SEQ ID NO: 8349
  GFR-binding peptide
  MOD_RES (5)..(6)..(40)..(42): Xaa is C or S
  MOD_RES (20)..(21)..(22)..(23)..(24): Xaa is A or G
  MOD_RES (25)..(26)..(27)..(28): Xaa is A or G or is absent

SEQ ID NO: 29665 - protein, 41 aa, Artificial Sequence
  GFR-binding peptide
  MOD_RES (5)..(6)..(40): Xaa is C or S
  MOD_RES (20)..(21)..(22)..(23)..(24): Xaa is A or G
  MOD_RES (25)..(26)..(27)..(28): Xaa is A or G or is absent
APASXXVPARLNAISILYFXXXXXXXXXLKKYRDMVVEAXG

SEQ ID NO: 29666 - protein, 34 aa, Artificial Sequence
  GFR-binding peptide
  MOD_RES (1)..(2): Xaa is C or S
  MOD_RES (16)..(17)..(18)..(19)..(20): Xaa is A or G
  MOD_RES (21)..(22)..(23)..(24): Xaa is A or G or is absent
XXVPARLNAISILYFXXXXXXXXXLKKYRDMVVE

SEQ ID NO: 29667 - protein, 37 aa, Artificial Sequence
  GFR-binding peptide
  MOD_RES (5)..(6)..(37): Xaa is C or S
SASPXXVSQDLEPISILYLIGKTPKIKFKYEMIVKSX

SEQ ID NO: 29668 - protein, 35 aa, Artificial Sequence; identical to SEQ ID NO: 8352
  GFR-binding peptide
  MOD_RES (3)..(4): Xaa is C or S

SEQ ID NO: 29669 - protein, 39 aa, Artificial Sequence
  GFR-binding peptide
  MOD_RES (4)..(5)..(39): Xaa is C or S
  MOD_RES (19)..(20)..(21)..(22)..(23): Xaa is A or G
  MOD_RES (24)..(25)..(26)..(27): Xaa is A or G or is absent
PKAXXVPTELSPISMLYIXXXXXXXXXYKQYEDMVVEGX

SEQ ID NO: 29670 - protein, 38 aa, Artificial Sequence; identical to SEQ ID NO: 8353
  GFR-binding peptide
  MOD_RES (6)..(6): Xaa is C or S
  MOD_RES (20)..(21)..(22)..(23)..(24): Xaa is A or G
  MOD_RES (25)..(26)..(27)..(28): Xaa is A or G or is absent

SEQ ID NO: 29671 - protein, 35 aa, Artificial Sequence
  GFR-binding peptide
  MOD_RES (2)..(3): Xaa is C or S
  MOD_RES (17)..(18)..(19)..(20)..(21): Xaa is A or G
  MOD_RES (22)..(23)..(24)..(25): Xaa is A or G or is absent
PXXAPTQLEPISVLYLXXXXXXXXXKFKYENMVVR

SEQ ID NO: 29672 - protein, 39 aa, Artificial Sequence
  GFR-binding peptide
  MOD_RES (3)..(4)..(38): Xaa is C or S
  MOD_RES (18)..(19)..(20)..(21)..(22): Xaa is A or G
  MOD_RES (23)..(24)..(25)..(26): Xaa is A or G or is absent
KAXXAPTKLEPISVLYLXXXXXXXXXKFKYENMVVKAXG

SEQ ID NO: 29673 - protein, 41 aa, Artificial Sequence; identical to SEQ ID NO: 8355
  GFR-binding peptide
  MOD_RES (5)..(6)..(38)..(40): Xaa is C or S

SEQ ID NO: 29674 - protein, 33 aa, Artificial Sequence; identical to SEQ ID NO: 8356
  GFR-binding peptide
  MOD_RES (32)..(32): Xaa is C or S

SEQ ID NO: 29675 - protein, 36 aa, Artificial Sequence
  GFR-binding peptide
  MOD_RES (1)..(33)..(35): Xaa is C or S
XAPTKLSPISVLYIDDSSNVIYKQYENMVVRSXGXH

SEQ ID NO: 29676 - protein, 38 aa, Artificial Sequence; identical to SEQ ID NO: 8357
  GFR-binding peptide
  MOD_RES (4)..(5)..(36)..(38): Xaa is C or S

SEQ ID NO: 29677 - protein, 39 aa, Artificial Sequence; identical to SEQ ID NO: 8359
  GFR-binding peptide
  MOD_RES (4)..(5)..(38): Xaa is C or S
  MOD_RES (19)..(20)..(21)..(22)..(23): Xaa is A or G
  MOD_RES (24)..(25)..(26)..(27): Xaa is A or G or is absent

SEQ ID NO: 29678 - protein, 34 aa, Artificial Sequence
  GFR-binding peptide
  MOD_RES (3)..(4): Xaa is C or S
ASXXVPARLNAISILYFDAANNVVLKKYRDMVVE

SEQ ID NO: 29679 - protein, 40 aa, Artificial Sequence; identical to SEQ ID NO: 8360
  GFR-binding peptide
  MOD_RES (5)..(6)..(38)..(40): Xaa is C or S

SEQ ID NO: 29680 - protein, 33 aa, Artificial Sequence
  GFR-binding peptide
  MOD_RES (1)..(32): Xaa is C or S
XVSQDLEPISILYLIGKTPKIKFKYEMIVKSXK

SEQ ID NO: 29681 - protein, 37 aa, Artificial Sequence
  GFR-binding peptide
  MOD_RES (4)..(5): Xaa is C or S
GKAXXVPTKLEPISVLYLDDMGVPTKFKYEEGMSVAE

SEQ ID NO: 29682 - protein, 33 aa, Artificial Sequence
  GFR-binding peptide
  MOD_RES (1)..(33): Xaa is C or S
XVPARLNAISILYFDAANNVVLKKYRDMVVEAX

SEQ ID NO: 29683 - protein, 41 aa, Artificial Sequence
  GFR-binding peptide
  MOD_RES (6)..(7)..(39)..(41): Xaa is C or S
SIPKAXXVPTELEPISMLYLDEYDKVVKFKYEEMVVEGXGX

SEQ ID NO: 29684 - protein, 38 aa, Artificial Sequence; identical to SEQ ID NO: 8365
  GFR-binding peptide
  MOD_RES (4)..(5)..(36)..(38): Xaa is C or S

SEQ ID NO: 29685 - protein, 37 aa, Artificial Sequence; identical to SEQ ID NO: 8367
  GFR-binding peptide
  MOD_RES (6)..(6): Xaa is C or S

SEQ ID NO: 29686 - protein, 37 aa, Artificial Sequence
  GFR-binding peptide
  MOD_RES (3)..(4): Xaa is C or S
  MOD_RES (18)..(19)..(20)..(21)..(22): Xaa is A or G
  MOD_RES (23)..(24)..(25)..(26): Xaa is A or G or is absent
KAXXVPTKLSPISILYKXXXXXXXXXLKYHYGMAVSE

SEQ ID NO: 29687 - protein, 35 aa, Artificial Sequence; identical to SEQ ID NO: 8368
  GFR-binding peptide
  MOD_RES (2)..(3): Xaa is C or S
  MOD_RES (17)..(18)..(19)..(20)..(21): Xaa is A or G
  MOD_RES (22)..(23)..(24)..(25): Xaa is A or G or is absent

SEQ ID NO: 29688 - protein, 31 aa, Artificial Sequence
  GFR-binding peptide
  MOD_RES (1)..(1): Xaa is C or S
XAPTKLSPISVLYIDSSNNVIYKQYENMVVK

SEQ ID NO: 29689 - protein, 37 aa, Artificial Sequence; identical to SEQ ID NO: 8370
  GFR-binding peptide
  MOD_RES (3)..(35)..(37): Xaa is C or S

SEQ ID NO: 29690 - protein, 31 aa, Artificial Sequence; identical to SEQ ID NO: 8371
  GFR-binding peptide
  MOD_RES (31)..(31): Xaa is C or S

SEQ ID NO: 29691 - protein, 38 aa, Artificial Sequence
  GFR-binding peptide
  MOD_RES (1)..(2)..(36)..(38): Xaa is C or S
  MOD_RES (16)..(17)..(18)..(19)..(20): Xaa is A or G
  MOD_RES (21)..(22)..(23)..(24): Xaa is A or G or is absent
XXAPTQLEPISVLYLXXXXXXXXXKFKYENMVVRAXGX

SEQ ID NO: 29692 - protein, 33 aa, Artificial Sequence
  GFR-binding peptide
  MOD_RES (1)..(33): Xaa is C or S
XAPTKLSPISVLYIDSSNNVIYKQYENMVVKAX

SEQ ID NO: 29693 - protein, 36 aa, Artificial Sequence
  GFR-binding peptide
  MOD_RES (1)..(2)..(36): Xaa is C or S
  MOD_RES (16)..(17)..(18)..(19)..(20): Xaa is A or G
  MOD_RES (21)..(22)..(23)..(24): Xaa is A or G or is absent
XXVPTKLNAISILYFXXXXXXXXXLKKYRGMAVSEX

SEQ ID NO: 29694 - protein, 37 aa, Artificial Sequence
  GFR-binding peptide
  MOD_RES (3)..(4): Xaa is C or S
  MOD_RES (18)..(19)..(20)..(21)..(22): Xaa is A or G
  MOD_RES (23)..(24)..(25)..(26): Xaa is A or G or is absent
KPXXAPTKLEPISVLYLXXXXXXXXXKFKYENMVVRS

SEQ ID NO: 29695 - protein, 38 aa, Artificial Sequence
  GFR-binding peptide
  MOD_RES (5)..(6): Xaa is C or S
  MOD_RES (20)..(21)..(22)..(23)..(24): Xaa is A or G
  MOD_RES (25)..(26)..(27)..(28): Xaa is A or G or is absent
ASKAXXVPTKLSPISILYKXXXXXXXXXLKYHYGMAVS

SEQ ID NO: 29696 - protein, 41 aa, Artificial Sequence
  GFR-binding peptide
  MOD_RES (5)..(6)..(40): Xaa is C or S
  MOD_RES (20)..(21)..(22)..(23)..(24): Xaa is A or G
  MOD_RES (25)..(26)..(27)..(28): Xaa is A or G or is absent
VPKPXXAPTKLEPISVLYLXXXXXXXXXKFKYENMVVRSXG

SEQ ID NO: 29697 - protein, 41 aa, Artificial Sequence
  GFR-binding peptide
  MOD_RES (5)..(6)..(39)..(41): Xaa is C or S
VGKAXXVPTKLSPISVLYIDDMGVPTYKQYEEGMSVAEXGX

SEQ ID NO: 29698 - protein, 34 aa, Artificial Sequence; identical to SEQ ID NO: 8374
  GFR-binding peptide
  MOD_RES (1)..(1): Xaa is C or S
  MOD_RES (15)..(16)..(17)..(18)..(19): Xaa is A or G
  MOD_RES (20)..(21)..(22)..(23): Xaa is A or G or is absent

SEQ ID NO: 29699 - protein, 39 aa, Artificial Sequence; identical to SEQ ID NO: 8375
  GFR-binding peptide
  MOD_RES (2)..(3)..(38): Xaa is C or S
  MOD_RES (17)..(18)..(19)..(20)..(21): Xaa is A or G
  MOD_RES (22)..(23)..(24)..(25): Xaa is A or G or is absent

SEQ ID NO: 29700 - protein, 43 aa, Artificial Sequence; identical to SEQ ID NO: 8377
  GFR-binding peptide
  MOD_RES (6)..(40)..(42): Xaa is C or S
  MOD_RES (20)..(21)..(22)..(23)..(24): Xaa is A or G
  MOD_RES (25)..(26)..(27)..(28): Xaa is A or G or is absent

SEQ ID NO: 29701 - protein, 31 aa, Artificial Sequence; identical to SEQ ID NO: 8378
  GFR-binding peptide

SEQ ID NO: 29702 - protein, 38 aa, Artificial Sequence; identical to SEQ ID NO: 8380
  GFR-binding peptide
  MOD_RES (2)..(3)..(37): Xaa is C or S
  MOD_RES (17)..(18)..(19)..(20)..(21): Xaa is A or G
  MOD_RES (22)..(23)..(24)..(25): Xaa is A or G or is absent

SEQ ID NO: 29703 - protein, 40 aa, Artificial Sequence; identical to SEQ ID NO: 8381
  GFR-binding peptide
  MOD_RES (6)..(7): Xaa is C or S
  MOD_RES (21)..(22)..(23)..(24)..(25): Xaa is A or G
  MOD_RES (26)..(27)..(28)..(29): Xaa is A or G or is absent

SEQ ID NO: 29704 - protein, 38 aa, Artificial Sequence; identical to SEQ ID NO: 8383
  GFR-binding peptide
  MOD_RES (5)..(6): Xaa is C or S
  MOD_RES (20)..(21)..(22)..(23)..(24): Xaa is A or G
  MOD_RES (25)..(26)..(27)..(28): Xaa is A or G or is absent

SEQ ID NO: 29705 - protein, 41 aa, Artificial Sequence
  GFR-binding peptide
  MOD_RES (3)..(4)..(38)..(40): Xaa is C or S
  MOD_RES (18)..(19)..(20)..(21)..(22): Xaa is A or G
  MOD_RES (23)..(24)..(25)..(26): Xaa is A or G or is absent
KPXXAPTKLSPISVLYIXXXXXXXXXYKQYENMVVRSXGXH

SEQ ID NO: 29706 - protein, 34 aa, Artificial Sequence
  GFR-binding peptide
  MOD_RES (1)..(2)..(33): Xaa is C or S
XXVSQDLEPISILYLIGKTPKIKFKYEMIVKSXK

SEQ ID NO: 29707 - protein, 37 aa, Artificial Sequence; identical to SEQ ID NO: 8386
  GFR-binding peptide
  MOD_RES (1)..(2)..(36): Xaa is C or S
  MOD_RES (16)..(17)..(18)..(19)..(20): Xaa is A or G
  MOD_RES (21)..(22)..(23)..(24): Xaa is A or G or is absent

SEQ ID NO: 29708 - protein, 39 aa, Artificial Sequence
  GFR-binding peptide
  MOD_RES (5)..(6)..(39): Xaa is C or S
VGKAXXVPTKLEPISVLYLDDMGVPTKFKYEEGMSVAEX

SEQ ID NO: 29709 - protein, 36 aa, Artificial Sequence
  GFR-binding peptide
  MOD_RES (3)..(4)..(36): Xaa is C or S
KPXXAPTQLEPISVLYLDDSSNVIKFKYENMVVRAX

SEQ ID NO: 29710 - protein, 36 aa, Artificial Sequence
  GFR-binding peptide
  MOD_RES (3)..(4)..(36): Xaa is C or S
KAXXVPTELSPISMLYIDENEKVVYKQYEDMVVEGX

SEQ ID NO: 29711 - protein, 37 aa, Artificial Sequence
  GFR-binding peptide
  MOD_RES (2)..(3)..(35)..(37): Xaa is C or S
PXXAPTQLEPISVLYLDDSSNVIKFKYENMVVRAXGX

SEQ ID NO: 29712 - protein, 38 aa, Artificial Sequence
  GFR-binding peptide
  MOD_RES (4)..(5)..(37): Xaa is C or S
SKAXXVPTKLSPISILYIDKGVVTYYKQYEGMAVSEXG

SEQ ID NO: 29713 - protein, 37 aa, Artificial Sequence
  GFR-binding peptide
  MOD_RES (6)..(6): Xaa is C or S
VTKPTXAPTKLSPISVLYIDDSSNVIYKQYENMVVRS

SEQ ID NO: 29714 - protein, 36 aa, Artificial Sequence; identical to SEQ ID NO: 8397
  GFR-binding peptide
  MOD_RES (3)..(4)..(35): Xaa is C or S

SEQ ID NO: 29715 - protein, 32 aa, Artificial Sequence; identical to SEQ ID NO: 8400
  GFR-binding peptide
  MOD_RES (1)..(32): Xaa is C or S

SEQ ID NO: 29716 - protein, 36 aa, Artificial Sequence
  GFR-binding peptide
  MOD_RES (1)..(2)..(35): Xaa is C or S
XXVPTKLSPISVLYIDDMGVPTYKQYEEGMSVAEXG

SEQ ID NO: 29717 - protein, 36 aa, Artificial Sequence; identical to SEQ ID NO: 8401
  GFR-binding peptide
  MOD_RES (1)..(2)..(35): Xaa is C or S
  MOD_RES (16)..(17)..(18)..(19)..(20): Xaa is A or G
  MOD_RES (21)..(22)..(23)..(24): Xaa is A or G or is absent

SEQ ID NO: 29718 - protein, 43 aa, Artificial Sequence
  GFR-binding peptide
  MOD_RES (6)..(7)..(40)..(42): Xaa is C or S
  MOD_RES (21)..(22)..(23)..(24)..(25): Xaa is A or G
  MOD_RES (26)..(27)..(28)..(29): Xaa is A or G or is absent
ASASPXXVPQDLEPISILYLXXXXXXXXXKFKYEMVVKSXKXS

SEQ ID NO: 29719 - protein, 40 aa, Artificial Sequence
  GFR-binding peptide
  MOD_RES (5)..(6)..(39): Xaa is C or S
  MOD_RES (20)..(21)..(22)..(23)..(24): Xaa is A or G
  MOD_RES (25)..(26)..(27)..(28): Xaa is A or G or is absent
SASPXXVSQDLSPISILYIXXXXXXXXXYKQYEMIVKSXK

SEQ ID NO: 29720 - protein, 41 aa, Artificial Sequence
  GFR-binding peptide
  MOD_RES (6)..(7)..(40): Xaa is C or S
  MOD_RES (21)..(22)..(23)..(24)..(25): Xaa is A or G
  MOD_RES (26)..(27)..(28)..(29): Xaa is A or G or is absent
ASASPXXVSQDLEPISILYLXXXXXXXXXKFKYEMIVKSXK

SEQ ID NO: 29721 - protein, 32 aa, Artificial Sequence
  GFR-binding peptide
  MOD_RES (32)..(32): Xaa is C or S
VPTELSPISMLYIDENEKVVYKQYEDMVVEGX

SEQ ID NO: 29722 - protein, 36 aa, Artificial Sequence; identical to SEQ ID NO: 8403
  GFR-binding peptide
  MOD_RES (1)..(35): Xaa is C or S
  MOD_RES (15)..(16)..(17)..(18)..(19): Xaa is A or G
  MOD_RES (20)..(21)..(22)..(23): Xaa is A or G or is absent

SEQ ID NO: 29723 - protein, 40 aa, Artificial Sequence
  GFR-binding peptide
  MOD_RES (4)..(5)..(38)..(40): Xaa is C or S
  MOD_RES (19)..(20)..(21)..(22)..(23): Xaa is A or G
  MOD_RES (24)..(25)..(26)..(27): Xaa is A or G or is absent
ASPXXVSQDLEPISILYLXXXXXXXXXKFKYEMIVKSXKX

SEQ ID NO: 29724 - protein, 40 aa, Artificial Sequence
  GFR-binding peptide
  MOD_RES (2)..(3)..(37)..(39): Xaa is C or S
  MOD_RES (17)..(18)..(19)..(20)..(21): Xaa is A or G
  MOD_RES (22)..(23)..(24)..(25): Xaa is A or G or is absent
AXXAPTKLSPISVLYIXXXXXXXXXYKQYENMVVKAXGXH

SEQ ID NO: 29725 - protein, 35 aa, Artificial Sequence
  GFR-binding peptide
  MOD_RES (1)..(35): Xaa is C or S
  MOD_RES (15)..(16)..(17)..(18)..(19): Xaa is A or G
  MOD_RES (20)..(21)..(22)..(23): Xaa is A or G or is absent
XVPTELEPISMLYLXXXXXXXXXKFKYEEMVVEGX

SEQ ID NO: 29726 - protein, 38 aa, Artificial Sequence
  GFR-binding peptide
  MOD_RES (2)..(3)..(37): Xaa is C or S
  MOD_RES (17)..(18)..(19)..(20)..(21): Xaa is A or G
  MOD_RES (22)..(23)..(24)..(25): Xaa is A or G or is absent
AXXAPTKLEPISVLYLXXXXXXXXXKFKYENMVVKAXG

SEQ ID NO: 29727 - protein, 41 aa, Artificial Sequence; identical to SEQ ID NO: 8406
  GFR-binding peptide
  MOD_RES (5)..(6)..(40): Xaa is C or S
  MOD_RES (20)..(21)..(22)..(23)..(24): Xaa is A or G
  MOD_RES (25)..(26)..(27)..(28): Xaa is A or G or is absent

SEQ ID NO: 29728 - protein, 39 aa, Artificial Sequence; identical to SEQ ID NO: 8410
  GFR-binding peptide
  MOD_RES (6)..(7)..(39): Xaa is C or S

SEQ ID NO: 29729 - protein, 34 aa, Artificial Sequence; identical to SEQ ID NO: 8411
  GFR-binding peptide
  MOD_RES (1)..(2)..(33): Xaa is C or S

SEQ ID NO: 29730 - protein, 39 aa, Artificial Sequence
  GFR-binding peptide
  MOD_RES (3)..(4)..(38): Xaa is C or S
  MOD_RES (18)..(19)..(20)..(21)..(22): Xaa is A or G
  MOD_RES (23)..(24)..(25)..(26): Xaa is A or G or is absent
KPXXAPTKLEPISVLYLXXXXXXXXXKFKYENMVVRSXG

SEQ ID NO: 29731 - protein, 36 aa, Artificial Sequence; identical to SEQ ID NO: 8417
  GFR-binding peptide
  MOD_RES (1)..(2)..(36): Xaa is C or S
  MOD_RES (16)..(17)..(18)..(19)..(20): Xaa is A or G
  MOD_RES (21)..(22)..(23)..(24): Xaa is A or G or is absent

SEQ ID NO: 29732 - protein, 36 aa, Artificial Sequence
  GFR-binding peptide
  MOD_RES (1)..(33)..(35): Xaa is C or S
XVPTELSPISMLYIDEYDKVVYKQYEEMVVEGXGXR

SEQ ID NO: 29733 - protein, 38 aa, Artificial Sequence; identical to SEQ ID NO: 8420
  GFR-binding peptide
  MOD_RES (3)..(4)..(35)..(37): Xaa is C or S

SEQ ID NO: 29734 - protein, 37 aa, Artificial Sequence
  GFR-binding peptide
  MOD_RES (5)..(37): Xaa is C or S
TKPTXAPTKLSPISVLYIDDSSNVIYKQYENMVVRSX

SEQ ID NO: 29735 - protein, 34 aa, Artificial Sequence; identical to SEQ ID NO: 8421
  GFR-binding peptide
  MOD_RES (1)..(2)..(34): Xaa is C or S

SEQ ID NO: 29736 - protein, 42 aa, Artificial Sequence
  GFR-binding peptide
  MOD_RES (6)..(7)..(40)..(42): Xaa is C or S
  MOD_RES (21)..(22)..(23)..(24)..(25): Xaa is A or G
  MOD_RES (26)..(27)..(28)..(29): Xaa is A or G or is absent
ASASPXXVPQDLEPISILYLXXXXXXXXXKFKYEMVVKSXKX

SEQ ID NO: 29737 - protein, 37 aa, Artificial Sequence
  GFR-binding peptide
  MOD_RES (5)..(6): Xaa is C or S
VPKPXXAPTKLEPISVLYLDDSSNVIKFKYENMVVRS

SEQ ID NO: 29738 - protein, 38 aa, Artificial Sequence; identical to SEQ ID NO: 8425
  GFR-binding peptide
  MOD_RES (1)..(2)..(37): Xaa is C or S
  MOD_RES (16)..(17)..(18)..(19)..(20): Xaa is A or G
  MOD_RES (21)..(22)..(23)..(24): Xaa is A or G or is absent

SEQ ID NO: 29739 - protein, 35 aa, Artificial Sequence
  GFR-binding peptide
  MOD_RES (32)..(34): Xaa is C or S
VPTKLNAISILYFDKGVVTYLKKYRGMAVSEXGXR

SEQ ID NO: 29740 - protein, 32 aa, Artificial Sequence
  GFR-binding peptide
  MOD_RES (1)..(2): Xaa is C or S
XXVPARLNAISILYFDAANNVVLKKYRDMVVE

SEQ ID NO: 29741 - protein, 36 aa, Artificial Sequence; identical to SEQ ID NO: 8428
  GFR-binding peptide
  MOD_RES (1)..(2)..(34)..(36): Xaa is C or S

SEQ ID NO: 29742 - protein, 39 aa, Artificial Sequence
  GFR-binding peptide
  MOD_RES (4)..(5)..(37)..(39): Xaa is C or S
PKAXXAPTKLSPISVLYIDSSNNVIYKQYENMVVKAXGX

SEQ ID NO: 29743 - protein, 41 aa, Artificial Sequence; identical to SEQ ID NO: 8429
  GFR-binding peptide
  MOD_RES (4)..(5)..(39)..(41): Xaa is C or S
  MOD_RES (19)..(20)..(21)..(22)..(23): Xaa is A or G
  MOD_RES (24)..(25)..(26)..(27): Xaa is A or G or is absent

SEQ ID NO: 29744 - protein, 37 aa, Artificial Sequence
  GFR-binding peptide
  MOD_RES (6)..(7): Xaa is C or S
AAPASXXVPARLNAISILYFDAANNVVLKKYRDMVVE

SEQ ID NO: 29745 - protein, 41 aa, Artificial Sequence
  GFR-binding peptide
  MOD_RES (5)..(6)..(39)..(41): Xaa is C or S
  MOD_RES (20)..(21)..(22)..(23)..(24): Xaa is A or G
  MOD_RES (25)..(26)..(27)..(28): Xaa is A or G or is absent
SASPXXVSQDLSPISILYIXXXXXXXXXYKQYEMIVKSXKX

SEQ ID NO: 29746 - protein, 37 aa, Artificial Sequence; identical to SEQ ID NO: 8432
  GFR-binding peptide
  MOD_RES (5)..(6)..(37): Xaa is C or S

SEQ ID NO: 29747 - protein, 33 aa, Artificial Sequence; identical to SEQ ID NO: 8433
  GFR-binding peptide
  MOD_RES (1)..(1): Xaa is C or S
  MOD_RES (15)..(16)..(17)..(18)..(19): Xaa is A or G
  MOD_RES (20)..(21)..(22)..(23): Xaa is A or G or is absent

SEQ ID NO: 29748 - protein, 37 aa, Artificial Sequence
  GFR-binding peptide
  MOD_RES (2)..(3)..(35)..(37): Xaa is C or S
AXXVPTKLNAISILYFDKGVVTYLKKYRGMAVSEXGX

SEQ ID NO: 29749 - protein, 33 aa, Artificial Sequence
  GFR-binding peptide
  MOD_RES (3)..(3): Xaa is C or S
PTXAPTKLEPISVLYLDDSSNVIKFKYENMVVR

SEQ ID NO: 29750 - protein, 39 aa, Artificial Sequence
  GFR-binding peptide
  MOD_RES (2)..(3)..(37)..(39): Xaa is C or S
  MOD_RES (17)..(18)..(19)..(20)..(21): Xaa is A or G
  MOD_RES (22)..(23)..(24)..(25): Xaa is A or G or is absent
AXXAPTKLEPISVLYLXXXXXXXXXKFKYENMVVKAXGX

SEQ ID NO: 29751 - protein, 36 aa, Artificial Sequence
  GFR-binding peptide
  MOD_RES (1)..(35): Xaa is C or S
  MOD_RES (15)..(16)..(17)..(18)..(19): Xaa is A or G
  MOD_RES (20)..(21)..(22)..(23): Xaa is A or G or is absent
XVPARLNAISILYFXXXXXXXXXLKKYRDMVVEAXG

SEQ ID NO: 29752 - protein, 34 aa, Artificial Sequence
  GFR-binding peptide
  MOD_RES (32)..(34): Xaa is C or S
VPTELEPISMLYLDENEKVVKFKYEDMVVEGXGX

SEQ ID NO: 29753 - protein, 38 aa, Artificial Sequence; identical to SEQ ID NO: 8442
  GFR-binding peptide
  MOD_RES (1)..(2)..(35)..(37): Xaa is C or S
  MOD_RES (16)..(17)..(18)..(19)..(20): Xaa is A or G
  MOD_RES (21)..(22)..(23)..(24): Xaa is A or G or is absent

SEQ ID NO: 29754 - protein, 40 aa, Artificial Sequence
  GFR-binding peptide
  MOD_RES (4)..(5)..(39): Xaa is C or S
  MOD_RES (19)..(20)..(21)..(22)..(23): Xaa is A or G
  MOD_RES (24)..(25)..(26)..(27): Xaa is A or G or is absent
PASXXVPARLSPISILYIXXXXXXXXXYKQYEDMVVEAXG

SEQ ID NO: 29755 - protein, 33 aa, Artificial Sequence
  GFR-binding peptide
  MOD_RES (1)..(2): Xaa is C or S
XXVPTKLNAISILYFDKGVVTYLKKYRGMAVSE

SEQ ID NO: 29756 - protein, 33 aa, Artificial Sequence; identical to SEQ ID NO: 8443
  GFR-binding peptide
  MOD_RES (2)..(3): Xaa is C or S

SEQ ID NO: 29757 - protein, 32 aa, Artificial Sequence; identical to SEQ ID NO: 8444
  GFR-binding peptide
  MOD_RES (1)..(2): Xaa is C or S

SEQ ID NO: 29758 - protein, 37 aa, Artificial Sequence
  GFR-binding peptide
  MOD_RES (1)..(35)..(37): Xaa is C or S
  MOD_RES (15)..(16)..(17)..(18)..(19): Xaa is A or G
  MOD_RES (20)..(21)..(22)..(23): Xaa is A or G or is absent
XVPTELEPISMLYLXXXXXXXXXKFKYEEMVVEGXGX

SEQ ID NO: 29759 - protein, 34 aa, Artificial Sequence; identical to SEQ ID NO: 8446
  GFR-binding peptide
  MOD_RES (1)..(1): Xaa is C or S
  MOD_RES (15)..(16)..(17)..(18)..(19): Xaa is A or G
  MOD_RES (20)..(21)..(22)..(23): Xaa is A or G or is absent

SEQ ID NO: 29760 - protein, 41 aa, Artificial Sequence; identical to SEQ ID NO: 8447
  GFR-binding peptide
  MOD_RES (5)..(6)..(40): Xaa is C or S
  MOD_RES (20)..(21)..(22)..(23)..(24): Xaa is A or G
  MOD_RES (25)..(26)..(27)..(28): Xaa is A or G or is absent

SEQ ID NO: 29761 - protein, 40 aa, Artificial Sequence; identical to SEQ ID NO: 8451
  GFR-binding peptide
  MOD_RES (6)..(7)..(38)..(40): Xaa is C or S

SEQ ID NO: 29762 - protein, 41 aa, Artificial Sequence
  GFR-binding peptide
  MOD_RES (5)..(6)..(40): Xaa is C or S
  MOD_RES (20)..(21)..(22)..(23)..(24): Xaa is A or G
  MOD_RES (25)..(26)..(27)..(28): Xaa is A or G or is absent
VPKAXXAPTKLEPISVLYLXXXXXXXXXKFKYENMVVKAXG

SEQ ID NO: 29763 - protein, 36 aa, Artificial Sequence
  GFR-binding peptide
  MOD_RES (1)..(2)..(33)..(35): Xaa is C or S
XXVPQALSPISILYIVGRKPKVYKQYEMIVRSXKXS

SEQ ID NO: 29764 - protein, 35 aa, Artificial Sequence
  GFR-binding peptide
  MOD_RES (1)..(32)..(34): Xaa is C or S
XVSQDLEPISILYLIGKTPKIKFKYEMIVKSXKXS

SEQ ID NO: 29765 - protein, 41 aa, Artificial Sequence
  GFR-binding peptide
  MOD_RES (5)..(6)..(40): Xaa is C or S
  MOD_RES (20)..(21)..(22)..(23)..(24): Xaa is A or G
  MOD_RES (25)..(26)..(27)..(28): Xaa is A or G or is absent
IPKAXXVPTELEPISMLYLXXXXXXXXXKFKYEEMVVEGXG

SEQ ID NO: 29766 - protein, 43 aa, Artificial Sequence
  GFR-binding peptide
  MOD_RES (6)..(7)..(41)..(43): Xaa is C or S
  MOD_RES (21)..(22)..(23)..(24)..(25): Xaa is A or G
  MOD_RES (26)..(27)..(28)..(29): Xaa is A or G or is absent
AVPKAXXAPTKLSPISVLYIXXXXXXXXXYKQYENMVVKAXGX

SEQ ID NO: 29767 - protein, 39 aa, Artificial Sequence
  GFR-binding peptide
  MOD_RES (1)..(2)..(36)..(38): Xaa is C or S
  MOD_RES (16)..(17)..(18)..(19)..(20): Xaa is A or G
  MOD_RES (21)..(22)..(23)..(24): Xaa is A or G or is absent
XXVPTKLNAISILYFXXXXXXXXXLKKYRGMAVSEXGXR

SEQ ID NO: 29768 - protein, 34 aa, Artificial Sequence; identical to SEQ ID NO: 8456
  GFR-binding peptide
  MOD_RES (1)..(2): Xaa is C or S
  MOD_RES (16)..(17)..(18)..(19)..(20): Xaa is A or G
  MOD_RES (21)..(22)..(23)..(24): Xaa is A or G or is absent

SEQ ID NO: 29769 - protein, 38 aa, Artificial Sequence
  GFR-binding peptide
  MOD_RES (2)..(3)..(35)..(37): Xaa is C or S
PXXAPTQLEPISVLYLDDSSNVIKFKYENMVVRAXGXH

SEQ ID NO: 29770 - protein, 32 aa, Artificial Sequence
  GFR-binding peptide
  MOD_RES (14)..(15)..(16)..(17)..(18): Xaa is A or G
  MOD_RES (19)..(20)..(21)..(22): Xaa is A or G or is absent
VPARLEPISILYLXXXXXXXXXKFKYEDMVVE

SEQ ID NO: 29771 - protein, 38 aa, Artificial Sequence
  GFR-binding peptide
  MOD_RES (3)..(4)..(36)..(38): Xaa is C or S
KAXXAPTKLSPISVLYIDSSNNVIYKQYENMVVKAXGX

SEQ ID NO: 29772 - protein, 39 aa, Artificial Sequence; identical to SEQ ID NO: 8457
  GFR-binding peptide
  MOD_RES (2)..(3)..(37)..(39): Xaa is C or S
  MOD_RES (17)..(18)..(19)..(20)..(21): Xaa is A or G
  MOD_RES (22)..(23)..(24)..(25): Xaa is A or G or is absent

SEQ ID NO: 29773 - protein, 37 aa, Artificial Sequence; identical to SEQ ID NO: 8458
  GFR-binding peptide
  MOD_RES (6)..(7): Xaa is C or S

SEQ ID NO: 29774 - protein, 39 aa, Artificial Sequence
  GFR-binding peptide
  MOD_RES (6)..(7)..(38): Xaa is C or S
ASAAPXXVPQALEPISILYLVGRKPKVKFKYEMIVRSXK

SEQ ID NO: 29775 - protein, 33 aa, Artificial Sequence
  GFR-binding peptide
  MOD_RES (2)..(3): Xaa is C or S
AXXVPTELEPISMLYLDEYDKVVKFKYEEMVVE

SEQ ID NO: 29776 - protein, 33 aa, Artificial Sequence; identical to SEQ ID NO: 8460
  GFR-binding peptide
  MOD_RES (2)..(3): Xaa is C or S

SEQ ID NO: 29777 - protein, 35 aa, Artificial Sequence
  GFR-binding peptide
  MOD_RES (1)..(2): Xaa is C or S
  MOD_RES (16)..(17)..(18)..(19)..(20): Xaa is A or G
  MOD_RES (21)..(22)..(23)..(24): Xaa is A or G or is absent
XXAPTKLSPISVLYIXXXXXXXXXYKQYENMVVKA

SEQ ID NO: 29778 - protein, 36 aa, Artificial Sequence; identical to SEQ ID NO: 8461
  GFR-binding peptide
  MOD_RES (33)..(35): Xaa is C or S
  MOD_RES (14)..(15)..(16)..(17)..(18): Xaa is A or G
  MOD_RES (19)..(20)..(21)..(22): Xaa is A or G or is absent

SEQ ID NO: 29779 - protein, 37 aa, Artificial Sequence; identical to SEQ ID NO: 8462
  GFR-binding peptide
  MOD_RES (2)..(3)..(35)..(37): Xaa is C or S

SEQ ID NO: 29780 - protein, 38 aa, Artificial Sequence
  GFR-binding peptide
  MOD_RES (1)..(2)..(36)..(38): Xaa is C or S
  MOD_RES (16)..(17)..(18)..(19)..(20): Xaa is A or G
  MOD_RES (21)..(22)..(23)..(24): Xaa is A or G or is absent
XXAPTQLSPISVLYIXXXXXXXXXYKQYENMVVRAXGX

SEQ ID NO: 29781 - protein, 36 aa, Artificial Sequence
  GFR-binding peptide
  MOD_RES (1)..(33)..(35): Xaa is C or S
XVPTKLNAISILYFDKGVVTYLKKYRGMAVSEXGXR

SEQ ID NO: 29782 - protein, 38 aa, Artificial Sequence
  GFR-binding peptide
  MOD_RES (5)..(6): Xaa is C or S
  MOD_RES (20)..(21)..(22)..(23)..(24): Xaa is A or G
  MOD_RES (25)..(26)..(27)..(28): Xaa is A or G or is absent
APASXXVPARLNAISILYFXXXXXXXXXLKKYRDMVVE

SEQ ID NO: 29783 - protein, 43 aa, Artificial Sequence
  GFR-binding peptide
  MOD_RES (4)..(5)..(40)..(42): Xaa is C or S
  MOD_RES (19)..(20)..(21)..(22)..(23): Xaa is A or G
  MOD_RES (24)..(25)..(26)..(27): Xaa is A or G or is absent
GKAXXVPTKLEPISVLYLXXXXXXXXXKFKYEEGMSVAEXGXR

SEQ ID NO: 29784 - protein, 34 aa, Artificial Sequence; identical to SEQ ID NO: 8464
  GFR-binding peptide
  MOD_RES (3)..(4): Xaa is C or S

SEQ ID NO: 29785 - protein, 37 aa, Artificial Sequence; identical to SEQ ID NO: 8465
  GFR-binding peptide
  MOD_RES (1)..(35)..(37): Xaa is C or S
  MOD_RES (15)..(16)..(17)..(18)..(19): Xaa is A or G
  MOD_RES (20)..(21)..(22)..(23): Xaa is A or G or is absent

SEQ ID NO: 29786 - protein, 38 aa, Artificial Sequence
  GFR-binding peptide
  MOD_RES (6)..(7): Xaa is C or S
SIPKAXXVPTELEPISMLYLDEYDKVVKFKYEEMVVEG

SEQ ID NO: 29787 - protein, 35 aa, Artificial Sequence
  GFR-binding peptide
  MOD_RES (1)..(2): Xaa is C or S
  MOD_RES (16)..(17)..(18)..(19)..(20): Xaa is A or G
  MOD_RES (21)..(22)..(23)..(24): Xaa is A or G or is absent
XXAPTKLSPISVLYIXXXXXXXXXYKQYENMVVRS

SEQ ID NO: 29788 - protein, 42 aa, Artificial Sequence
  GFR-binding peptide
  MOD_RES (4)..(5)..(39)..(41): Xaa is C or S
  MOD_RES (19)..(20)..(21)..(22)..(23): Xaa is A or G
  MOD_RES (24)..(25)..(26)..(27): Xaa is A or G or is absent
SKAXXVPTKLSPISILYIXXXXXXXXXYKQYEGMAVSEXGXR

SEQ ID NO: 29789 - protein, 37 aa, Artificial Sequence; identical to SEQ ID NO: 8467
  GFR-binding peptide
  MOD_RES (3)..(4): Xaa is C or S
  MOD_RES (18)..(19)..(20)..(21)..(22): Xaa is A or G
  MOD_RES (23)..(24)..(25)..(26): Xaa is A or G or is absent

SEQ ID NO: 29790 - protein, 38 aa, Artificial Sequence
  GFR-binding peptide
  MOD_RES (4)..(5)..(37): Xaa is C or S
PKPXXAPTQLEPISVLYLDDSSNVIKFKYENMVVRAXG

SEQ ID NO: 29791 - protein, 38 aa, Artificial Sequence; identical to SEQ ID NO: 8470
  GFR-binding peptide
  MOD_RES (6)..(7): Xaa is C or S

SEQ ID NO: 29792 - protein, 40 aa, Artificial Sequence
  GFR-binding peptide
  MOD_RES (5)..(6)..(39): Xaa is C or S
  MOD_RES (20)..(21)..(22)..(23)..(24): Xaa is A or G
  MOD_RES (25)..(26)..(27)..(28): Xaa is A or G or is absent
SASPXXVSQDLEPISILYLXXXXXXXXXKFKYEMIVKSXK

SEQ ID NO: 29793 - protein, 39 aa, Artificial Sequence; identical to SEQ ID NO: 8471
  GFR-binding peptide
  MOD_RES (4)..(38): Xaa is C or S
  MOD_RES (18)..(19)..(20)..(21)..(22): Xaa is A or G
  MOD_RES (23)..(24)..(25)..(26): Xaa is A or G or is absent

SEQ ID NO: 29794 - protein, 33 aa, Artificial Sequence
  GFR-binding peptide
  MOD_RES (32)..(32): Xaa is C or S
APTQLEPISVLYLDDSSNVIKFKYENMVVRAXG

SEQ ID NO: 29795 - protein, 36 aa, Artificial Sequence
  GFR-binding peptide
  MOD_RES (2)..(3)..(36): Xaa is C or S
AXXVPTKLSPISVLYIDDMGVPTYKQYEEGMSVAEX

SEQ ID NO: 29796 - protein, 38 aa, Artificial Sequence
  GFR-binding peptide
  MOD_RES (5)..(6)..(38): Xaa is C or S
VPKPXXAPTKLSPISVLYIDDSSNVIYKQYENMVVRSX

SEQ ID NO: 29797 - protein, 37 aa, Artificial Sequence; identical to SEQ ID NO: 8475
  GFR-binding peptide
  MOD_RES (3)..(4): Xaa is C or S
  MOD_RES (18)..(19)..(20)..(21)..(22): Xaa is A or G
  MOD_RES (23)..(24)..(25)..(26): Xaa is A or G or is absent

SEQ ID NO: 29798 - protein, 33 aa, Artificial Sequence; identical to SEQ ID NO: 8478
  GFR-binding peptide
  MOD_RES (31)..(33): Xaa is C or S

SEQ ID NO: 29799 - protein, 41 aa, Artificial Sequence
  GFR-binding peptide
  MOD_RES (3)..(4)..(38)..(40): Xaa is C or S
  MOD_RES (18)..(19)..(20)..(21)..(22): Xaa is A or G
  MOD_RES (23)..(24)..(25)..(26): Xaa is A or G or is absent
KAXXAPTKLEPISVLYLXXXXXXXXXKFKYENMVVKAXGXH

SEQ ID NO: 29800 - protein, 40 aa, Artificial Sequence; identical to SEQ ID NO: 8480
  GFR-binding peptide
  MOD_RES (5)..(6)..(37)..(39): Xaa is C or S

SEQ ID NO: 29801 - protein, 40 aa, Artificial Sequence
  GFR-binding peptide
  MOD_RES (3)..(37)..(39): Xaa is C or S
  MOD_RES (17)..(18)..(19)..(20)..(21): Xaa is A or G
  MOD_RES (22)..(23)..(24)..(25): Xaa is A or G or is absent
PTXAPTKLEPISVLYLXXXXXXXXXKFKYENMVVRSXGXH

SEQ ID NO: 29802 - protein, 35 aa, Artificial Sequence
  GFR-binding peptide
  MOD_RES (2)..(3): Xaa is C or S
  MOD_RES (17)..(18)..(19)..(20)..(21): Xaa is A or G
  MOD_RES (22)..(23)..(24)..(25): Xaa is A or G or is absent
PXXAPTKLEPISVLYLXXXXXXXXXKFKYENMVVR

SEQ ID NO: 29803 - protein, 35 aa, Artificial Sequence; identical to SEQ ID NO: 8482
  GFR-binding peptide
  MOD_RES (4)..(4): Xaa is C or S

SEQ ID NO: 29804 - protein, 33 aa, Artificial Sequence
  GFR-binding peptide
  MOD_RES (1)..(2): Xaa is C or S
XXAPTQLSPISVLYIDDSSNVIYKQYENMVVRA

SEQ ID NO: 29805 - protein, 34 aa, Artificial Sequence
  GFR-binding peptide
  MOD_RES (32)..(34): Xaa is C or S
VPARLEPISILYLDAANNVVKFKYEDMVVEAXGX

SEQ ID NO: 29806 - protein, 32 aa, Artificial Sequence
  GFR-binding peptide
  MOD_RES (1)..(1): Xaa is C or S
XVPTELEPISMLYLDEYDKVVKFKYEEMVVEG

SEQ ID NO: 29807 - protein, 36 aa, Artificial Sequence; identical to SEQ ID NO: 8489
  GFR-binding peptide
  MOD_RES (3)..(3): Xaa is C or S
  MOD_RES (17)..(18)..(19)..(20)..(21): Xaa is A or G
  MOD_RES (22)..(23)..(24)..(25): Xaa is A or G or is absent

SEQ ID NO: 29808 - protein, 35 aa, Artificial Sequence; identical to SEQ ID NO: 8490
  GFR-binding peptide
  MOD_RES (1)..(35): Xaa is C or S
  MOD_RES (15)..(16)..(17)..(18)..(19): Xaa is A or G
  MOD_RES (20)..(21)..(22)..(23): Xaa is A or G or is absent

SEQ ID NO: 29809 - protein, 35 aa, Artificial Sequence; identical to SEQ ID NO: 8491
  GFR-binding peptide
  MOD_RES (1)..(2)..(35): Xaa is C or S
  MOD_RES (16)..(17)..(18)..(19)..(20): Xaa is A or G
  MOD_RES (21)..(22)..(23)..(24): Xaa is A or G or is absent

SEQ ID NO: 29810 - protein, 42 aa, Artificial Sequence; identical to SEQ ID NO: 8493
  GFR-binding peptide
  MOD_RES (6)..(7)..(39)..(41): Xaa is C or S

SEQ ID NO: 29811 - protein, 42 aa, Artificial Sequence
  GFR-binding peptide
  MOD_RES (6)..(7)..(41): Xaa is C or S
  MOD_RES (21)..(22)..(23)..(24)..(25): Xaa is A or G
  MOD_RES (26)..(27)..(28)..(29): Xaa is A or G or is absent
AVPKAXXAPTKLEPISVLYLXXXXXXXXXKFKYENMVVKAXG

SEQ ID NO: 29812 - protein, 38 aa, Artificial Sequence
  GFR-binding peptide
  MOD_RES (4)..(5): Xaa is C or S
  MOD_RES (19)..(20)..(21)..(22)..(23): Xaa is A or G
  MOD_RES (24)..(25)..(26)..(27): Xaa is A or G or is absent
PASXXVPARLSPISILYIXXXXXXXXXYKQYEDMVVEA

SEQ ID NO: 29813 - protein, 42 aa, Artificial Sequence
  GFR-binding peptide
  MOD_RES (5)..(39)..(41): Xaa is C or S
  MOD_RES (19)..(20)..(21)..(22)..(23): Xaa is A or G
  MOD_RES (24)..(25)..(26)..(27): Xaa is A or G or is absent
TKPTXAPTKLSPISVLYIXXXXXXXXXYKQYENMVVRSXGXH

SEQ ID NO: 29814 - protein, 38 aa, Artificial Sequence
  GFR-binding peptide
  MOD_RES (1)..(35)..(37): Xaa is C or S
  MOD_RES (15)..(16)..(17)..(18)..(19): Xaa is A or G
  MOD_RES (20)..(21)..(22)..(23): Xaa is A or G or is absent
XVPTELEPISMLYLXXXXXXXXXKFKYEEMVVEGXGXR

SEQ ID NO: 29815 - protein, 39 aa, Artificial Sequence
  GFR-binding peptide
  MOD_RES (6)..(7): Xaa is C or S
  MOD_RES (21)..(22)..(23)..(24)..(25): Xaa is A or G
  MOD_RES (26)..(27)..(28)..(29): Xaa is A or G or is absent
ASASPXXVPQDLSPISILYIXXXXXXXXXYKQYEMVVKS

SEQ ID NO: 29816 - protein, 40 aa, Artificial Sequence
  GFR-binding peptide
  MOD_RES (4)..(5)..(38)..(40): Xaa is C or S
GKAXXVPTKLSPISVLYIDDMGVPTYKQYEEGMSVAEXGX

SEQ ID NO: 29817 - protein, 33 aa, Artificial Sequence; identical to SEQ ID NO: 8501
  GFR-binding peptide
  MOD_RES (1)..(1): Xaa is C or S
  MOD_RES (15)..(16)..(17)..(18)..(19): Xaa is A or G
  MOD_RES (20)..(21)..(22)..(23): Xaa is A or G or is absent

SEQ ID NO: 29818 - protein, 38 aa, Artificial Sequence
  GFR-binding peptide
  MOD_RES (4)..(5)..(36)..(38): Xaa is C or S
ASPXXVSQDLSPISILYIIGKTPKIYKQYEMIVKSXKX

SEQ ID NO: 29819 - protein, 33 aa, Artificial Sequence; identical to SEQ ID NO: 8503
  GFR-binding peptide
  MOD_RES (31)..(33): Xaa is C or S

SEQ ID NO: 29820 - protein, 34 aa, Artificial Sequence
  GFR-binding peptide
  MOD_RES (1)..(34): Xaa is C or S
  MOD_RES (15)..(16)..(17)..(18)..(19): Xaa is A or G
  MOD_RES (20)..(21)..(22)..(23): Xaa is A or G or is absent
XVSQDLEPISILYLXXXXXXXXXKFKYEMIVKSX

SEQ ID NO: 29821 - protein, 36 aa, Artificial Sequence
  GFR-binding peptide
  MOD_RES (2)..(3): Xaa is C or S
  MOD_RES (17)..(18)..(19)..(20)..(21): Xaa is A or G
  MOD_RES (22)..(23)..(24)..(25): Xaa is A or G or is absent
PXXAPTKLSPISVLYIXXXXXXXXXYKQYENMVVRS

SEQ ID NO: 29822 - protein, 40 aa, Artificial Sequence; identical to SEQ ID NO: 8506
  GFR-binding peptide
  MOD_RES (1)..(2)..(37)..(39): Xaa is C or S
  MOD_RES (16)..(17)..(18)..(19)..(20): Xaa is A or G
  MOD_RES (21)..(22)..(23)..(24): Xaa is A or G or is absent

SEQ ID NO: 29823 - protein, 39 aa, Artificial Sequence; identical to SEQ ID NO: 8507
  GFR-binding peptide
  MOD_RES (2)..(3)..(37)..(39): Xaa is C or S
  MOD_RES (17)..(18)..(19)..(20)..(21): Xaa is A or G
  MOD_RES (22)..(23)..(24)..(25): Xaa is A or G or is absent

SEQ ID NO: 29824 - protein, 34 aa, Artificial Sequence
  GFR-binding peptide
  MOD_RES (31)..(33): Xaa is C or S
VSQDLSPISILYIIGKTPKIYKQYEMIVKSXKXS

SEQ ID NO: 29825 - protein, 41 aa, Artificial Sequence; identical to SEQ ID NO: 8508
  GFR-binding peptide
  MOD_RES (5)..(6)..(39)..(41): Xaa is C or S
  MOD_RES (20)..(21)..(22)..(23)..(24): Xaa is A or G
  MOD_RES (25)..(26)..(27)..(28): Xaa is A or G or is absent

SEQ ID NO: 29826 - protein, 41 aa, Artificial Sequence; identical to SEQ ID NO: 8510
  GFR-binding peptide
  MOD_RES (5)..(6)..(40): Xaa is C or S
  MOD_RES (20)..(21)..(22)..(23)..(24): Xaa is A or G
  MOD_RES (25)..(26)..(27)..(28): Xaa is A or G or is absent

SEQ ID NO: 29827 - protein, 39 aa, Artificial Sequence; identical to SEQ ID NO: 8511
  GFR-binding peptide
  MOD_RES (4)..(5)..(36)..(38): Xaa is C or S

SEQ ID NO: 29828 - protein, 39 aa, Artificial Sequence
  GFR-binding peptide
  MOD_RES (3)..(4)..(38): Xaa is C or S
  MOD_RES (18)..(19)..(20)..(21)..(22): Xaa is A or G
  MOD_RES (23)..(24)..(25)..(26): Xaa is A or G or is absent
KAXXVPTKLNAISILYFXXXXXXXXXLKKYRGMAVSEXG

SEQ ID NO: 29829 - protein, 37 aa, Artificial Sequence; identical to SEQ ID NO: 8513
  GFR-binding peptide
  MOD_RES (2)..(3)..(35)..(37): Xaa is C or S

SEQ ID NO: 29830 - protein, 37 aa, Artificial Sequence
  GFR-binding peptide
  MOD_RES (3)..(4)..(37): Xaa is C or S
  MOD_RES (18)..(19)..(20)..(21)..(22): Xaa is A or G
  MOD_RES (23)..(24)..(25)..(26): Xaa is A or G or is absent
SPXXVPQDLEPISILYLXXXXXXXXXKFKYEMVVKSX

SEQ ID NO: 29831 - protein, 39 aa, Artificial Sequence
  GFR-binding peptide
  MOD_RES (3)..(4)..(38): Xaa is C or S
  MOD_RES (18)..(19)..(20)..(21)..(22): Xaa is A or G
  MOD_RES (23)..(24)..(25)..(26): Xaa is A or G or is absent
ASXXVPARLSPISILYIXXXXXXXXXYKQYEDMVVEAXG

SEQ ID NO: 29832 - protein, 37 aa, Artificial Sequence
  GFR-binding peptide
  MOD_RES (2)..(3): Xaa is C or S
  MOD_RES (17)..(18)..(19)..(20)..(21): Xaa is A or G
  MOD_RES (22)..(23)..(24)..(25): Xaa is A or G or is absent
AXXVPTKLSPISVLYIXXXXXXXXXYKQYEEGMSVAE

SEQ ID NO: 29833 - protein, 36 aa, Artificial Sequence
  GFR-binding peptide
  MOD_RES (1)..(34)..(36): Xaa is C or S
  MOD_RES (15)..(16)..(17)..(18)..(19): Xaa is A or G
  MOD_RES (20)..(21)..(22)..(23): Xaa is A or G or is absent
XVPQDLSPISILYIXXXXXXXXXYKQYEMVVKSXKX

SEQ ID NO: 29834 - protein, 41 aa, Artificial Sequence
  GFR-binding peptide
  MOD_RES (6)..(7)..(41): Xaa is C or S
  MOD_RES (21)..(22)..(23)..(24)..(25): Xaa is A or G
  MOD_RES (26)..(27)..(28)..(29): Xaa is A or G or is absent
AAPASXXVPARLSPISILYIXXXXXXXXXYKQYEDMVVEAX

SEQ ID NO: 29835 - protein, 40 aa, Artificial Sequence
  GFR-binding peptide
  MOD_RES (4)..(5)..(39): Xaa is C or S
  MOD_RES (19)..(20)..(21)..(22)..(23): Xaa is A or G
  MOD_RES (24)..(25)..(26)..(27): Xaa is A or G or is absent
PKAXXVPTELEPISMLYLXXXXXXXXXKFKYEEMVVEGXG

SEQ ID NO: 29836 - protein, 33 aa, Artificial Sequence; identical to SEQ ID NO: 8516
  GFR-binding peptide
  MOD_RES (14)..(15)..(16)..(17)..(18): Xaa is A or G
  MOD_RES (19)..(20)..(21)..(22): Xaa is A or G or is absent

SEQ ID NO: 29837 - protein, 37 aa, Artificial Sequence
  GFR-binding peptide
  MOD_RES (34)..(36): Xaa is C or S
  MOD_RES (14)..(15)..(16)..(17)..(18): Xaa is A or G
  MOD_RES (19)..(20)..(21)..(22): Xaa is A or G or is absent
VPARLEPISILYLXXXXXXXXXKFKYEDMVVEAXGXR

SEQ ID NO: 29838 - protein, 41 aa, Artificial Sequence
  GFR-binding peptide
  MOD_RES (6)..(7)..(39)..(41): Xaa is C or S
AAPASXXVPARLEPISILYLDAANNVVKFKYEDMVVEAXGX

SEQ ID NO: 29839 - protein, 40 aa, Artificial Sequence; identical to SEQ ID NO: 8520
  GFR-binding peptide
  MOD_RES (3)..(37)..(39): Xaa is C or S
  MOD_RES (17)..(18)..(19)..(20)..(21): Xaa is A or G
  MOD_RES (22)..(23)..(24)..(25): Xaa is A or G or is absent

SEQ ID NO: 29840 - protein, 37 aa, Artificial Sequence; identical to SEQ ID NO: 8521
  GFR-binding peptide
  MOD_RES (4)..(5)..(37): Xaa is C or S

SEQ ID NO: 29841 - protein, 40 aa, Artificial Sequence; identical to SEQ ID NO: 8523
  GFR-binding peptide
  MOD_RES (4)..(5)..(40): Xaa is C or S
  MOD_RES (19)..(20)..(21)..(22)..(23): Xaa is A or G
  MOD_RES (24)..(25)..(26)..(27): Xaa is A or G or is absent

SEQ ID NO: 29842 - protein, 37 aa, Artificial Sequence; identical to SEQ ID NO: 8524
  GFR-binding peptide
  MOD_RES (5)..(6): Xaa is C or S

SEQ ID NO: 29843 - protein, 39 aa, Artificial Sequence; identical to SEQ ID NO: 8525
  GFR-binding peptide
  MOD_RES (4)..(5)..(38): Xaa is C or S

SEQ ID NO: 29844 - protein, 33 aa, Artificial Sequence; identical to SEQ ID NO: 8526
  GFR-binding peptide
  MOD_RES (1)..(2)..(33): Xaa is C or S

SEQ ID NO: 29845 - protein, 37 aa, Artificial Sequence; identical to SEQ ID NO: 8527
  GFR-binding peptide
  MOD_RES (6)..(7): Xaa is C or S

SEQ ID NO: 29846 - protein, 35 aa, Artificial Sequence; identical to SEQ ID NO: 8532
  GFR-binding peptide
  MOD_RES (1)..(2)..(33)..(35): Xaa is C or S

SEQ ID NO: 29847 - protein, 40 aa, Artificial Sequence
  GFR-binding peptide
  MOD_RES (5)..(6)..(40): Xaa is C or S
  MOD_RES (20)..(21)..(22)..(23)..(24): Xaa is A or G
  MOD_RES (25)..(26)..(27)..(28): Xaa is A or G or is absent
VPKPXXAPTQLEPISVLYLXXXXXXXXXKFKYENMVVRAX

SEQ ID NO: 29848 - protein, 38 aa, Artificial Sequence; identical to SEQ ID NO: 8534
  GFR-binding peptide
  MOD_RES (1)..(2)..(35)..(37): Xaa is C or S
  MOD_RES (16)..(17)..(18)..(19)..(20): Xaa is A or G
  MOD_RES (21)..(22)..(23)..(24): Xaa is A or G or is absent

SEQ ID NO: 29849 - protein, 38 aa, Artificial Sequence
  GFR-binding peptide
  MOD_RES (5)..(6)..(38): Xaa is C or S
VPKPXXAPTKLEPISVLYLDDSSNVIKFKYENMVVRSX

SEQ ID NO: 29850 - protein, 34 aa, Artificial Sequence
  GFR-binding peptide
  MOD_RES (32)..(34): Xaa is C or S
APTKLEPISVLYLDDSSNVIKFKYENMVVRSXGX

SEQ ID NO: 29851 - protein, 32 aa, Artificial Sequence
  GFR-binding peptide
  MOD_RES (1)..(2): Xaa is C or S
XXAPTQLSPISVLYIDDSSNVIYKQYENMVVR

SEQ ID NO: 29852 - protein, 32 aa, Artificial Sequence
  GFR-binding peptide
  MOD_RES (1)..(1): Xaa is C or S
XAPTQLSPISVLYIDDSSNVIYKQYENMVVRA

SEQ ID NO: 29853 - protein, 38 aa, Artificial Sequence
  GFR-binding peptide
  MOD_RES (3)..(37): Xaa is C or S
  MOD_RES (17)..(18)..(19)..(20)..(21): Xaa is A or G
  MOD_RES (22)..(23)..(24)..(25): Xaa is A or G or is absent
PTXAPTKLEPISVLYLXXXXXXXXXKFKYENMVVRSXG

SEQ ID NO: 29854 - protein, 39 aa, Artificial Sequence
  GFR-binding peptide
  MOD_RES (5)..(6)..(38): Xaa is C or S
IPKAXXVPTELSPISMLYIDEYDKVVYKQYEEMVVEGXG

SEQ ID NO: 29855 - protein, 38 aa, Artificial Sequence; identical to SEQ ID NO: 8542
  GFR-binding peptide
  MOD_RES (2)..(3)..(35)..(37): Xaa is C or S

SEQ ID NO: 29856 - protein, 36 aa, Artificial Sequence; identical to SEQ ID NO: 8544
  GFR-binding peptide
  MOD_RES (3)..(4): Xaa is C or S
  MOD_RES (18)..(19)..(20)..(21)..(22): Xaa is A or G
  MOD_RES (23)..(24)..(25)..(26): Xaa is A or G or is absent

SEQ ID NO: 29857 - protein, 31 aa, Artificial Sequence
  GFR-binding peptide
VPTELSPISMLYIDEYDKVVYKQYEEMVVEG

SEQ ID NO: 29858 - protein, 35 aa, Artificial Sequence
  GFR-binding peptide
  MOD_RES (32)..(34): Xaa is C or S
APTKLEPISVLYLDSSNNVIKFKYENMVVKAXGXH

SEQ ID NO: 29859 - protein, 41 aa, Artificial Sequence
  GFR-binding peptide
  MOD_RES (4)..(5)..(39)..(41): Xaa is C or S
  MOD_RES (19)..(20)..(21)..(22)..(23): Xaa is A or G
  MOD_RES (24)..(25)..(26)..(27): Xaa is A or G or is absent
SKAXXVPTKLEPISILYLXXXXXXXXXKFKYEGMAVSEXGX

SEQ ID NO: 29860 - protein, 36 aa, Artificial Sequence
  GFR-binding peptide
  MOD_RES (34)..(36): Xaa is C or S
  MOD_RES (14)..(15)..(16)..(17)..(18): Xaa is A or G
  MOD_RES (19)..(20)..(21)..(22): Xaa is A or G or is absent
VPTKLEPISILYLXXXXXXXXXKFKYEGMAVSEXGX

SEQ ID NO: 29861 - protein, 36 aa, Artificial Sequence
  GFR-binding peptide
  MOD_RES (34)..(36): Xaa is C or S
  MOD_RES (14)..(15)..(16)..(17)..(18): Xaa is A or G
  MOD_RES (19)..(20)..(21)..(22): Xaa is A or G or is absent
VPARLNAISILYFXXXXXXXXXLKKYRDMVVEAXGX

SEQ ID NO: 29862 - protein, 32 aa, Artificial Sequence; identical to SEQ ID NO: 8549
  GFR-binding peptide
  MOD_RES (1)..(1): Xaa is C or S

SEQ ID NO: 29863 - protein, 40 aa, Artificial Sequence
  GFR-binding peptide
  MOD_RES (2)..(3)..(37)..(39): Xaa is C or S
  MOD_RES (17)..(18)..(19)..(20)..(21): Xaa is A or G
  MOD_RES (22)..(23)..(24)..(25): Xaa is A or G or is absent
AXXVPTELEPISMLYLXXXXXXXXXKFKYEEMVVEGXGXR

SEQ ID NO: 29864 - protein, 38 aa, Artificial Sequence
  GFR-binding peptide
  MOD_RES (5)..(6)..(38): Xaa is C or S
APASXXVPARLNAISILYFDAANNVVLKKYRDMVVEAX

SEQ ID NO: 29865 - protein, 36 aa, Artificial Sequence; identical to SEQ ID NO: 8552
  GFR-binding peptide
  MOD_RES (4)..(4): Xaa is C or S
  MOD_RES (18)..(19)..(20)..(21)..(22): Xaa is A or G
  MOD_RES (23)..(24)..(25)..(26): Xaa is A or G or is absent

SEQ ID NO: 29866 - protein, 35 aa, Artificial Sequence
  GFR-binding peptide
  MOD_RES (1)..(2): Xaa is C or S
  MOD_RES (16)..(17)..(18)..(19)..(20): Xaa is A or G
  MOD_RES (21)..(22)..(23)..(24): Xaa is A or G or is absent
XXVPARLEPISILYLXXXXXXXXXKFKYEDMVVEA

SEQ ID NO: 29867 - protein, 36 aa, Artificial Sequence; identical to SEQ ID NO: 8555
  GFR-binding peptide
  MOD_RES (3)..(4): Xaa is C or S
  MOD_RES (18)..(19)..(20)..(21)..(22): Xaa is A or G
  MOD_RES (23)..(24)..(25)..(26): Xaa is A or G or is absent

SEQ ID NO: 29868 - protein, 41 aa, Artificial Sequence; identical to SEQ ID NO: 8556
  GFR-binding peptide
  MOD_RES (6)..(7)..(41): Xaa is C or S
  MOD_RES (21)..(22)..(23)..(24)..(25): Xaa is A or G
  MOD_RES (26)..(27)..(28)..(29): Xaa is A or G or is absent

SEQ ID NO: 29869 - protein, 32 aa, Artificial Sequence; identical to SEQ ID NO: 8558
  GFR-binding peptide
  MOD_RES (1)..(1): Xaa is C or S

SEQ ID NO: 29870 - protein, 37 aa, Artificial Sequence
  GFR-binding peptide
  MOD_RES (3)..(4)..(36): Xaa is C or S
KAXXVPTKLSPISILYIDKGVVTYYKQYEGMAVSEXG

SEQ ID NO: 29871 - protein, 39 aa, Artificial Sequence; identical to SEQ ID NO: 8562
  GFR-binding peptide
  MOD_RES (4)..(5)..(39): Xaa is C or S
  MOD_RES (19)..(20)..(21)..(22)..(23): Xaa is A or G
  MOD_RES (24)..(25)..(26)..(27): Xaa is A or G or is absent

SEQ ID NO: 29872 - protein, 37 aa, Artificial Sequence; identical to SEQ ID NO: 8563
  GFR-binding peptide
  MOD_RES (34)..(36): Xaa is C or S
  MOD_RES (14)..(15)..(16)..(17)..(18): Xaa is A or G
  MOD_RES (19)..(20)..(21)..(22): Xaa is A or G or is absent

SEQ ID NO: 29873 - protein, 36 aa, Artificial Sequence
  GFR-binding peptide
  MOD_RES (2)..(34)..(36): Xaa is C or S
TXAPTKLEPISVLYLDDSSNVIKFKYENMVVRSXGX

SEQ ID NO: 29874 - protein, 36 aa, Artificial Sequence; identical to SEQ ID NO: 8565
  GFR-binding peptide
  MOD_RES (1)..(34)..(36): Xaa is C or S

SEQ ID NO: 29875 - protein, 40 aa, Artificial Sequence
  GFR-binding peptide
  MOD_RES (5)..(6)..(40): Xaa is C or S
  MOD_RES (20)..(21)..(22)..(23)..(24): Xaa is A or G
  MOD_RES (25)..(26)..(27)..(28): Xaa is A or G or is absent
ASKAXXVPTKLSPISILYKXXXXXXXXXLKYHYGMAVSEX

SEQ ID NO: 29876 - protein, 40 aa, Artificial Sequence; identical to SEQ ID NO: 8566
  GFR-binding peptide
  MOD_RES (6)..(7)..(39): Xaa is C or S

SEQ ID NO: 29877 - protein, 38 aa, Artificial Sequence
  GFR-binding peptide
  MOD_RES (1)..(2)..(36)..(38): Xaa is C or S
  MOD_RES (16)..(17)..(18)..(19)..(20): Xaa is A or G
  MOD_RES (21)..(22)..(23)..(24): Xaa is A or G or is absent
XXVPTELSPISMLYIXXXXXXXXXYKQYEEMVVEGXGX

SEQ ID NO: 29878 - protein, 39 aa, Artificial Sequence
  GFR-binding peptide
  MOD_RES (6)..(7): Xaa is C or S
  MOD_RES (21)..(22)..(23)..(24)..(25): Xaa is A or G
  MOD_RES (26)..(27)..(28)..(29): Xaa is A or G or is absent
YVPKPXXAPTKLEPISVLYLXXXXXXXXXKFKYENMVVR

SEQ ID NO: 29879 - protein, 30 aa, Artificial Sequence
  GFR-binding peptide
APTQLEPISVLYLDDSSNVIKFKYENMVVR

SEQ ID NO: 29880 - protein, 31 aa, Artificial Sequence
  GFR-binding peptide
VPTELEPISMLYLDEYDKVVKFKYEEMVVEG

SEQ ID NO: 29881 - protein, 37 aa, Artificial Sequence
  GFR-binding peptide
  MOD_RES (2)..(3)..(37): Xaa is C or S
  MOD_RES (17)..(18)..(19)..(20)..(21): Xaa is A or G
  MOD_RES (22)..(23)..(24)..(25): Xaa is A or G or is absent
AXXAPTKLEPISVLYLXXXXXXXXXKFKYENMVVKAX

SEQ ID NO: 29882 - protein, 35 aa, Artificial Sequence
  GFR-binding peptide
  MOD_RES (32)..(34): Xaa is C or S
APTQLEPISVLYLDDSSNVIKFKYENMVVRAXGXH

SEQ ID NO: 29883 - protein, 41 aa, Artificial Sequence
  GFR-binding peptide
  MOD_RES (5)..(6)..(38)..(40): Xaa is C or S
APASXXVPARLNAISILYFDAANNVVLKKYRDMVVEAXGXR

SEQ ID NO: 29884 - protein, 34 aa, Artificial Sequence; identical to SEQ ID NO: 8568
  GFR-binding peptide
  MOD_RES (3)..(4): Xaa is C or S

SEQ ID NO: 29885 - protein, 31 aa, Artificial Sequence
  GFR-binding peptide
  MOD_RES (1)..(1): Xaa is C or S
XVPTKLSPISILYIDKGVVTYYKQYEGMAVS

SEQ ID NO: 29886 - protein, 33 aa, Artificial Sequence
  GFR-binding peptide
  MOD_RES (1)..(1): Xaa is C or S
  MOD_RES (15)..(16)..(17)..(18)..(19): Xaa is A or G
  MOD_RES (20)..(21)..(22)..(23): Xaa is A or G or is absent
XAPTQLEPISVLYLXXXXXXXXXKFKYENMVVR

SEQ ID NO: 29887 - protein, 35 aa, Artificial Sequence
  GFR-binding peptide
  MOD_RES (1)..(2)..(33)..(35): Xaa is C or S
XXVPQDLSPISILYIVGRTPKVYKQYEMVVKSXKX

SEQ ID NO: 29888 - protein, 36 aa, Artificial Sequence
  GFR-binding peptide
  MOD_RES (3)..(4)..(35): Xaa is C or S
APXXVPQALEPISILYLVGRKPKVKFKYEMIVRSXK

SEQ ID NO: 29889 - protein, 44 aa, Artificial Sequence
  GFR-binding peptide
  MOD_RES (6)..(7)..(41)..(43): Xaa is C or S
  MOD_RES (21)..(22)..(23)..(24)..(25): Xaa is A or G
  MOD_RES (26)..(27)..(28)..(29): Xaa is A or G or is absent
SIPKAXXVPTELEPISMLYLXXXXXXXXXKFKYEEMVVEGXGXR

SEQ ID NO: 29890 - protein, 39 aa, Artificial Sequence
  GFR-binding peptide
  MOD_RES (6)..(7)..(39): Xaa is C or S
SIPKAXXVPTELSPISMLYIDEYDKVVYKQYEEMVVEGX

SEQ ID NO: 29891 - protein, 35 aa, Artificial Sequence; identical to SEQ ID NO: 8570
  GFR-binding peptide
  MOD_RES (33)..(35): Xaa is C or S
  MOD_RES (14)..(15)..(16)..(17)..(18): Xaa is A or G
  MOD_RES (19)..(20)..(21)..(22): Xaa is A or G or is absent

SEQ ID NO: 29892 - protein, 38 aa, Artificial Sequence
  GFR-binding peptide
  MOD_RES (2)..(3)..(37): Xaa is C or S
  MOD_RES (17)..(18)..(19)..(20)..(21): Xaa is A or G
  MOD_RES (22)..(23)..(24)..(25): Xaa is A or G or is absent
SXXVPARLSPISILYKXXXXXXXXXLKYHYDMVVEAXG

SEQ ID NO: 29893 - protein, 41 aa, Artificial Sequence; identical to SEQ ID NO: 8571
  GFR-binding peptide
  MOD_RES (6)..(7)..(39)..(41): Xaa is C or S

SEQ ID NO: 29894 - protein, 36 aa, Artificial Sequence; identical to SEQ ID NO: 8572
  GFR-binding peptide
  MOD_RES (5)..(6): Xaa is C or S

SEQ ID NO: 29895 - protein, 40 aa, Artificial Sequence; identical to SEQ ID NO: 8573
  GFR-binding peptide
  MOD_RES (4)..(5)..(37)..(39): Xaa is C or S

SEQ ID NO: 29896 - protein, 37 aa, Artificial Sequence
  GFR-binding peptide
  MOD_RES (2)..(36): Xaa is C or S
  MOD_RES (16)..(17)..(18)..(19)..(20): Xaa is A or G
  MOD_RES (21)..(22)..(23)..(24): Xaa is A or G or is absent
TXAPTKLSPISVLYIXXXXXXXXXYKQYENMVVRSXG

SEQ ID NO: 29897 - protein, 39 aa, Artificial Sequence
  GFR-binding peptide
  MOD_RES (3)..(37)..(39): Xaa is C or S
  MOD_RES (17)..(18)..(19)..(20)..(21): Xaa is A or G
  MOD_RES (22)..(23)..(24)..(25): Xaa is A or G or is absent
PTXAPTKLEPISVLYLXXXXXXXXXKFKYENMVVRSXGX

SEQ ID NO: 29898 - protein, 39 aa, Artificial Sequence; identical to SEQ ID NO: 8580
  GFR-binding peptide
  MOD_RES (3)..(4)..(36)..(38): Xaa is C or S

SEQ ID NO: 29899 - protein, 41 aa, Artificial Sequence
  GFR-binding peptide
  MOD_RES (4)..(5)..(39)..(41): Xaa is C or S
  MOD_RES (19)..(20)..(21)..(22)..(23): Xaa is A or G
  MOD_RES (24)..(25)..(26)..(27): Xaa is A or G or is absent
PKAXXAPTKLSPISVLYIXXXXXXXXXYKQYENMVVKAXGX

SEQ ID NO: 29900 - protein, 35 aa, Artificial Sequence
  GFR-binding peptide
  MOD_RES (2)..(3): Xaa is C or S
  MOD_RES (17)..(18)..(19)..(20)..(21): Xaa is A or G
  MOD_RES (22)..(23)..(24)..(25): Xaa is A or G or is absent
PXXVPQDLSPISILYIXXXXXXXXXYKQYEMVVKS

SEQ ID NO: 29901 - protein, 35 aa, Artificial Sequence
  GFR-binding peptide
  MOD_RES (32)..(34): Xaa is C or S
VPTELSPISMLYIDEYDKVVYKQYEEMVVEGXGXR

SEQ ID NO: 29902 - protein, 33 aa, Artificial Sequence
  GFR-binding peptide
  MOD_RES (1)..(1): Xaa is C or S
XVPTKLSPISVLYIDDMGVPTYKQYEEGMSVAE

SEQ ID NO: 29903 - protein, 34 aa, Artificial Sequence
  GFR-binding peptide
  MOD_RES (1)..(1): Xaa is C or S
  MOD_RES (15)..(16)..(17)..(18)..(19): Xaa is A or G
  MOD_RES (20)..(21)..(22)..(23): Xaa is A or G or is absent
XVPTKLSPISILYKXXXXXXXXXLKYHYGMAVSE

SEQ ID NO: 29904 - protein, 34 aa, Artificial Sequence; identical to SEQ ID NO: 8582
  GFR-binding peptide
  MOD_RES (2)..(3): Xaa is C or S

SEQ ID NO: 29905 - protein, 37 aa, Artificial Sequence; identical to SEQ ID NO: 8584
  GFR-binding peptide
  MOD_RES (1)..(35)..(37): Xaa is C or S
  MOD_RES (15)..(16)..(17)..(18)..(19): Xaa is A or G
  MOD_RES (20)..(21)..(22)..(23): Xaa is A or G or is absent

SEQ ID NO: 29906 - protein, 39 aa, Artificial Sequence
  GFR-binding peptide
  MOD_RES (2)..(36)..(38): Xaa is C or S
  MOD_RES (16)..(17)..(18)..(19)..(20): Xaa is A or G
  MOD_RES (21)..(22)..(23)..(24): Xaa is A or G or is absent
TXAPTKLEPISVLYLXXXXXXXXXKFKYENMVVRSXGXH

SEQ ID NO: 29907 - protein, 33 aa, Artificial Sequence
  GFR-binding peptide
  MOD_RES (1)..(2): Xaa is C or S
XXAPTQLEPISVLYLDDSSNVIKFKYENMVVRA

SEQ ID NO: 29908 - protein, 33 aa, Artificial Sequence
  GFR-binding peptide
  MOD_RES (2)..(3): Xaa is C or S
PXXAPTQLSPISVLYIDDSSNVIYKQYENMVVR

SEQ ID NO: 29909 - protein, 38 aa, Artificial Sequence
  GFR-binding peptide
  MOD_RES (6)..(7): Xaa is C or S
AVPKAXXAPTKLEPISVLYLDSSNNVIKFKYENMVVKA

SEQ ID NO: 29910 - protein, 34 aa, Artificial Sequence
  GFR-binding peptide
  MOD_RES (1)..(34): Xaa is C or S
  MOD_RES (15)..(16)..(17)..(18)..(19): Xaa is A or G
  MOD_RES (20)..(21)..(22)..(23): Xaa is A or G or is absent
XVSQDLSPISILYIXXXXXXXXXYKQYEMIVKSX

SEQ ID NO: 29911 - protein, 34 aa, Artificial Sequence
  GFR-binding peptide
  MOD_RES (34)..(34): Xaa is C or S
  MOD_RES (14)..(15)..(16)..(17)..(18): Xaa is A or G
  MOD_RES (19)..(20)..(21)..(22): Xaa is A or G or is absent
VPARLEPISILYLXXXXXXXXXKFKYEDMVVEAX

SEQ ID NO: 29912 - protein, 36 aa, Artificial Sequence
  GFR-binding peptide
  MOD_RES (5)..(6): Xaa is C or S
SASPXXVSQDLEPISILYLIGKTPKIKFKYEMIVKS

SEQ ID NO: 29913 - protein, 31 aa, Artificial Sequence; identical to SEQ ID NO: 8589
  GFR-binding peptide
  MOD_RES (1)..(1): Xaa is C or S

SEQ ID NO: 29914 - protein, 37 aa, Artificial Sequence; identical to SEQ ID NO: 8590
  GFR-binding peptide
  MOD_RES (3)..(4)..(35)..(37): Xaa is C or S

SEQ ID NO: 29915 - protein, 38 aa, Artificial Sequence
  GFR-binding peptide
  MOD_RES (1)..(2)..(36)..(38): Xaa is C or S
  MOD_RES (16)..(17)..(18)..(19)..(20): Xaa is A or G
  MOD_RES (21)..(22)..(23)..(24): Xaa is A or G or is absent
XXVPARLEPISILYLXXXXXXXXXKFKYEDMVVEAXGX

SEQ ID NO: 29916 - protein, 41 aa, Artificial Sequence
  GFR-binding peptide
  MOD_RES (3)..(4)..(38)..(40): Xaa is C or S
  MOD_RES (18)..(19)..(20)..(21)..(22): Xaa is A or G
  MOD_RES (23)..(24)..(25)..(26): Xaa is A or G or is absent
KPXXAPTKLEPISVLYLXXXXXXXXXKFKYENMVVRSXGXH

SEQ ID NO: 29917 - protein, 35 aa, Artificial Sequence
  GFR-binding peptide
  MOD_RES (1)..(2): Xaa is C or S
  MOD_RES (16)..(17)..(18)..(19)..(20): Xaa is A or G
  MOD_RES (21)..(22)..(23)..(24): Xaa is A or G or is absent
XXVPTELSPISMLYIXXXXXXXXXYKQYEDMVVEG

SEQ ID NO: 29918 - protein, 41 aa, Artificial Sequence
  GFR-binding peptide
  MOD_RES (4)..(5)..(39)..(41): Xaa is C or S
  MOD_RES (19)..(20)..(21)..(22)..(23): Xaa is A or G
  MOD_RES (24)..(25)..(26)..(27): Xaa is A or G or is absent
PASXXVPARLSPISILYKXXXXXXXXXLKYHYDMVVEAXGX

SEQ ID NO: 29919 - protein, 39 aa, Artificial Sequence; identical to SEQ ID NO: 8592
  GFR-binding peptide
  MOD_RES (2)..(3)..(36)..(38): Xaa is C or S
  MOD_RES (17)..(18)..(19)..(20)..(21): Xaa is A or G
  MOD_RES (22)..(23)..(24)..(25): Xaa is A or G or is absent

SEQ ID NO: 29920 - protein, 35 aa, Artificial Sequence; identical to SEQ ID NO: 8594
  GFR-binding peptide
  MOD_RES (1)..(34): Xaa is C or S
  MOD_RES (15)..(16)..(17)..(18)..(19): Xaa is A or G
  MOD_RES (20)..(21)..(22)..(23): Xaa is A or G or is absent

SEQ ID NO: 29921 - protein, 35 aa, Artificial Sequence
  GFR-binding peptide
  MOD_RES (1)..(2)..(35): Xaa is C or S
  MOD_RES (16)..(17)..(18)..(19)..(20): Xaa is A or G
  MOD_RES (21)..(22)..(23)..(24): Xaa is A or G or is absent
XXVPQALSPISILYIXXXXXXXXXYKQYEMIVRSX

SEQ ID NO: 29922 - protein, 37 aa, Artificial Sequence
  GFR-binding peptide
  MOD_RES (4)..(5)..(37): Xaa is C or S
PASXXVPARLNAISILYFDAANNVVLKKYRDMVVEAX

SEQ ID NO: 29923 - protein, 41 aa, Artificial Sequence
  GFR-binding peptide
  MOD_RES (6)..(7)..(41): Xaa is C or S
  MOD_RES (21)..(22)..(23)..(24)..(25): Xaa is A or G
  MOD_RES (26)..(27)..(28)..(29): Xaa is A or G or is absent
AVPKAXXAPTKLSPISVLYIXXXXXXXXXYKQYENMVVKAX

SEQ ID NO: 29924 - protein, 34 aa, Artificial Sequence; identical to SEQ ID NO: 8595
  GFR-binding peptide
  MOD_RES (2)..(3): Xaa is C or S

SEQ ID NO: 29925 - protein, 34 aa, Artificial Sequence; identical to SEQ ID NO: 8596
  GFR-binding peptide
  MOD_RES (32)..(34): Xaa is C or S

SEQ ID NO: 29926 - protein, 38 aa, Artificial Sequence; identical to SEQ ID NO: 8598
  GFR-binding peptide
  MOD_RES (7)..(7): Xaa is C or S

SEQ ID NO: 29927 - protein, 42 aa, Artificial Sequence; identical to SEQ ID NO: 8599
  GFR-binding peptide
  MOD_RES (6)..(7)..(41): Xaa is C or S
  MOD_RES (21)..(22)..(23)..(24)..(25): Xaa is A or G
  MOD_RES (26)..(27)..(28)..(29): Xaa is A or G or is absent

SEQ ID NO: 29928 - protein, 35 aa, Artificial Sequence
  GFR-binding peptide
  MOD_RES (5)..(5): Xaa is C or S
TKPTXAPTKLEPISVLYLDDSSNVIKFKYENMVVR

SEQ ID NO: 29929 - protein, 37 aa, Artificial Sequence
  GFR-binding peptide
  MOD_RES (3)..(4)..(36): Xaa is C or S
KAXXVPTELEPISMLYLDENEKVVKFKYEDMVVEGXG

SEQ ID NO: 29930 - protein, 33 aa, Artificial Sequence
  GFR-binding peptide
  MOD_RES (1)..(2): Xaa is C or S
XXAPTKLSPISVLYIDDSSNVIYKQYENMVVRS

SEQ ID NO: 29931 - protein, 36 aa, Artificial Sequence
  GFR-binding peptide
  MOD_RES (3)..(3): Xaa is C or S
  MOD_RES (17)..(18)..(19)..(20)..(21): Xaa is A or G
  MOD_RES (22)..(23)..(24)..(25): Xaa is A or G or is absent
PTXAPTKLEPISVLYLXXXXXXXXXKFKYENMVVRS

SEQ ID NO: 29932 - protein, 35 aa, Artificial Sequence
  GFR-binding peptide
  MOD_RES (1)..(35): Xaa is C or S
  MOD_RES (15)..(16)..(17)..(18)..(19): Xaa is A or G
  MOD_RES (20)..(21)..(22)..(23): Xaa is A or G or is absent
XVPTKLNAISILYFXXXXXXXXXLKKYRGMAVSEX

SEQ ID NO: 29933 - protein, 38 aa, Artificial Sequence; identical to SEQ ID NO: 8602
  GFR-binding peptide
  MOD_RES (1)..(35)..(37): Xaa is C or S
  MOD_RES (15)..(16)..(17)..(18)..(19): Xaa is A or G
  MOD_RES (20)..(21)..(22)..(23): Xaa is A or G or is absent

SEQ ID NO: 29934 - protein, 40 aa, Artificial Sequence; identical to SEQ ID NO: 8603
  GFR-binding peptide
  MOD_RES (4)..(5)..(39): Xaa is C or S
  MOD_RES (19)..(20)..(21)..(22)..(23): Xaa is A or G
  MOD_RES (24)..(25)..(26)..(27): Xaa is A or G or is absent

SEQ ID NO: 29935 - protein, 36 aa, Artificial Sequence
  GFR-binding peptide
  MOD_RES (1)..(35): Xaa is C or S
  MOD_RES (15)..(16)..(17)..(18)..(19): Xaa is A or G
  MOD_RES (20)..(21)..(22)..(23): Xaa is A or G or is absent
XVPTKLSPISILYKXXXXXXXXXLKYHYGMAVSEXG

SEQ ID NO: 29936 - protein, 32 aa, Artificial Sequence
  GFR-binding peptide
  MOD_RES (32)..(32): Xaa is C or S
VPTELEPISMLYLDENEKVVKFKYEDMVVEGX

SEQ ID NO: 29937 - protein, 41 aa, Artificial Sequence
  GFR-binding peptide
  MOD_RES (3)..(4)..(38)..(40): Xaa is C or S
  MOD_RES (18)..(19)..(20)..(21)..(22): Xaa is A or G
  MOD_RES (23)..(24)..(25)..(26): Xaa is A or G or is absent
KAXXVPTKLSPISILYKXXXXXXXXXLKYHYGMAVSEXGXR

SEQ ID NO: 29938 - protein, 33 aa, Artificial Sequence
  GFR-binding peptide
  MOD_RES (33)..(33): Xaa is C or S
  MOD_RES (14)..(15)..(16)..(17)..(18): Xaa is A or G
  MOD_RES (19)..(20)..(21)..(22): Xaa is A or G or is absent
VPQDLEPISILYLXXXXXXXXXKFKYEMVVKSX

SEQ ID NO: 29939 - protein, 44 aa, Artificial Sequence
  GFR-binding peptide
  MOD_RES (6)..(7)..(41)..(43): Xaa is C or S
  MOD_RES (21)..(22)..(23)..(24)..(25): Xaa is A or G
  MOD_RES (26)..(27)..(28)..(29): Xaa is A or G or is absent
AAPASXXVPARLNAISILYFXXXXXXXXXLKKYRDMVVEAXGXR

SEQ ID NO: 29940 - protein, 37 aa, Artificial Sequence
  GFR-binding peptide
  MOD_RES (2)..(3)..(36): Xaa is C or S
  MOD_RES (17)..(18)..(19)..(20)..(21): Xaa is A or G
  MOD_RES (22)..(23)..(24)..(25): Xaa is A or G or is absent
PXXVPQALEPISILYLXXXXXXXXXKFKYEMIVRSXK

SEQ ID NO: 29941 - protein, 39 aa, Artificial Sequence
  GFR-binding peptide
  MOD_RES (3)..(4)..(38): Xaa is C or S
  MOD_RES (18)..(19)..(20)..(21)..(22): Xaa is A or G
  MOD_RES (23)..(24)..(25)..(26): Xaa is A or G or is absent
KPXXAPTQLEPISVLYLXXXXXXXXXKFKYENMVVRAXG

SEQ ID NO: 29942 - protein, 35 aa, Artificial Sequence
  GFR-binding peptide
  MOD_RES (1)..(2): Xaa is C or S
  MOD_RES (16)..(17)..(18)..(19)..(20): Xaa is A or G
  MOD_RES (21)..(22)..(23)..(24): Xaa is A or G or is absent
XXVPTKLSPISILYKXXXXXXXXXLKYHYGMAVSE

SEQ ID NO: 29943 - protein, 39 aa, Artificial Sequence; identical to SEQ ID NO: 8610
  GFR-binding peptide
  MOD_RES (6)..(7)..(38): Xaa is C or S

SEQ ID NO: 29944 - protein, 41 aa, Artificial Sequence; identical to SEQ ID NO: 8611
  GFR-binding peptide
  MOD_RES (6)..(7)..(38)..(40): Xaa is C or S

SEQ ID NO: 29945 - protein, 38 aa, Artificial Sequence; identical to SEQ ID NO: 8613
  GFR-binding peptide
  MOD_RES (3)..(4)..(37): Xaa is C or S
  MOD_RES (18)..(19)..(20)..(21)..(22): Xaa is A or G
  MOD_RES (23)..(24)..(25)..(26): Xaa is A or G or is absent

SEQ ID NO: 29946 - protein, 33 aa, Artificial Sequence
  GFR-binding peptide
  MOD_RES (1)..(1): Xaa is C or S
  MOD_RES (15)..(16)..(17)..(18)..(19): Xaa is A or G
  MOD_RES (20)..(21)..(22)..(23): Xaa is A or G or is absent
XVPARLSPISILYIXXXXXXXXXYKQYEDMVVE

SEQ ID NO: 29947 - protein, 43 aa, Artificial Sequence
  GFR-binding peptide
  MOD_RES (6)..(40)..(42): Xaa is C or S
  MOD_RES (20)..(21)..(22)..(23)..(24): Xaa is A or G
  MOD_RES (25)..(26)..(27)..(28): Xaa is A or G or is absent
VTKPTXAPTKLEPISVLYLXXXXXXXXXKFKYENMVVRSXGXH

SEQ ID NO: 29948 - protein, 35 aa, Artificial Sequence
  GFR-binding peptide
  MOD_RES (4)..(5): Xaa is C or S
ASPXXVSQDLSPISILYIIGKTPKIYKQYEMIVKS

SEQ ID NO: 29949 - protein, 39 aa, Artificial Sequence; identical to SEQ ID NO: 8615
  GFR-binding peptide
  MOD_RES (1)..(2)..(36)..(38): Xaa is C or S
  MOD_RES (16)..(17)..(18)..(19)..(20): Xaa is A or G
  MOD_RES (21)..(22)..(23)..(24): Xaa is A or G or is absent

SEQ ID NO: 29950 - protein, 38 aa, Artificial Sequence; identical to SEQ ID NO: 8616
  GFR-binding peptide
  MOD_RES (2)..(36)..(38): Xaa is C or S
  MOD_RES (16)..(17)..(18)..(19)..(20): Xaa is A or G
  MOD_RES (21)..(22)..(23)..(24): Xaa is A or G or is absent

SEQ ID NO: 29951 - protein, 38 aa, Artificial Sequence
  GFR-binding peptide
  MOD_RES (5)..(6)..(38): Xaa is C or S
IPKAXXVPTELEPISMLYLDENEKVVKFKYEDMVVEGX

SEQ ID NO: 29952 - protein, 35 aa, Artificial Sequence; identical to SEQ ID NO: 8618
  GFR-binding peptide
  MOD_RES (1)..(35): Xaa is C or S
  MOD_RES (15)..(16)..(17)..(18)..(19): Xaa is A or G
  MOD_RES (20)..(21)..(22)..(23): Xaa is A or G or is absent

SEQ ID NO: 29953 - protein, 36 aa, Artificial Sequence; identical to SEQ ID NO: 8619
  GFR-binding peptide
  MOD_RES (5)..(6): Xaa is C or S

SEQ ID NO: 29954 - protein, 37 aa, Artificial Sequence
  GFR-binding peptide
  MOD_RES (4)..(5): Xaa is C or S
  MOD_RES (19)..(20)..(21)..(22)..(23): Xaa is A or G
  MOD_RES (24)..(25)..(26)..(27): Xaa is A or G or is absent
SKAXXVPTKLNAISILYFXXXXXXXXXLKKYRGMAVS

SEQ ID NO: 29955 - protein, 32 aa, Artificial Sequence
  GFR-binding peptide
  MOD_RES (1)..(1): Xaa is C or S
XVPARLEPISILYLDAANNVVKFKYEDMVVEA

SEQ ID NO: 29956 - protein, 38 aa, Artificial Sequence; identical to SEQ ID NO: 8621
  GFR-binding peptide
  MOD_RES (5)..(6): Xaa is C or S
  MOD_RES (20)..(21)..(22)..(23)..(24): Xaa is A or G
  MOD_RES (25)..(26)..(27)..(28): Xaa is A or G or is absent

SEQ ID NO: 29957 - protein, 40 aa, Artificial Sequence; identical to SEQ ID NO: 8622
  GFR-binding peptide
  MOD_RES (5)..(6)..(40): Xaa is C or S
  MOD_RES (20)..(21)..(22)..(23)..(24): Xaa is A or G
  MOD_RES (25)..(26)..(27)..(28): Xaa is A or G or is absent

SEQ ID NO: 29958 - protein, 35 aa, Artificial Sequence
  GFR-binding peptide
  MOD_RES (1)..(35): Xaa is C or S
  MOD_RES (15)..(16)..(17)..(18)..(19): Xaa is A or G
  MOD_RES (20)..(21)..(22)..(23): Xaa is A or G or is absent
XVPARLEPISILYLXXXXXXXXXKFKYEDMVVEAX

SEQ ID NO: 29959 - protein, 42 aa, Artificial Sequence
  GFR-binding peptide
  MOD_RES (5)..(6)..(39)..(41): Xaa is C or S
  MOD_RES (20)..(21)..(22)..(23)..(24): Xaa is A or G
  MOD_RES (25)..(26)..(27)..(28): Xaa is A or G or is absent
SASPXXVPQDLSPISILYIXXXXXXXXXYKQYEMVVKSXKXS

SEQ ID NO: 29960 - protein, 36 aa, Artificial Sequence
  GFR-binding peptide
  MOD_RES (3)..(4)..(36): Xaa is C or S
KAXXVPTELEPISMLYLDENEKVVKFKYEDMVVEGX

SEQ ID NO: 29961 - protein, 38 aa, Artificial Sequence
  GFR-binding peptide
  MOD_RES (1)..(35)..(37): Xaa is C or S
  MOD_RES (15)..(16)..(17)..(18)..(19): Xaa is A or G
  MOD_RES (20)..(21)..(22)..(23): Xaa is A or G or is absent
XVPARLNAISILYFXXXXXXXXXLKKYRDMVVEAXGXR

SEQ ID NO: 29962 - protein, 40 aa, Artificial Sequence
  GFR-binding peptide
  MOD_RES (6)..(7): Xaa is C or S
  MOD_RES (21)..(22)..(23)..(24)..(25): Xaa is A or G
  MOD_RES (26)..(27)..(28)..(29): Xaa is A or G or is absent
KIPKAXXVPTELSPISMLYIXXXXXXXXXYKQYEDMVVEG

SEQ ID NO: 29963 - protein, 32 aa, Artificial Sequence
  GFR-binding peptide
  MOD_RES (32)..(32): Xaa is C or S
VPTELEPISMLYLDEYDKVVKFKYEEMVVEGX

SEQ ID NO: 29964 - protein, 38 aa, Artificial Sequence; identical to SEQ ID NO: 8628
  GFR-binding peptide
  MOD_RES (1)..(36)..(38): Xaa is C or S
  MOD_RES (15)..(16)..(17)..(18)..(19): Xaa is A or G
  MOD_RES (20)..(21)..(22)..(23): Xaa is A or G or is absent

SEQ ID NO: 29965 - protein, 37 aa, Artificial Sequence
  GFR-binding peptide
  MOD_RES (1)..(35)..(37): Xaa is C or S
  MOD_RES (15)..(16)..(17)..(18)..(19): Xaa is A or G
  MOD_RES (20)..(21)..(22)..(23): Xaa is A or G or is absent
XVPTELSPISMLYIXXXXXXXXXYKQYEEMVVEGXGX

SEQ ID NO: 29966 - protein, 36 aa, Artificial Sequence; identical to SEQ ID NO: 8629
  GFR-binding peptide
  MOD_RES (34)..(36): Xaa is C or S
  MOD_RES (14)..(15)..(16)..(17)..(18): Xaa is A or G
  MOD_RES (19)..(20)..(21)..(22): Xaa is A or G or is absent

SEQ ID NO: 29967 - protein, 38 aa, Artificial Sequence; identical to SEQ ID NO: 8630
  GFR-binding peptide
  MOD_RES (1)..(2)..(36)..(38): Xaa is C or S
  MOD_RES (16)..(17)..(18)..(19)..(20): Xaa is A or G
  MOD_RES (21)..(22)..(23)..(24): Xaa is A or G or is absent

SEQ ID NO: 29968 - protein, 37 aa, Artificial Sequence; identical to SEQ ID NO: 8631
  GFR-binding peptide
  MOD_RES (1)..(34)..(36): Xaa is C or S
  MOD_RES (15)..(16)..(17)..(18)..(19): Xaa is A or G
  MOD_RES (20)..(21)..(22)..(23): Xaa is A or G or is absent

SEQ ID NO: 29969 - protein, 36 aa, Artificial Sequence
  GFR-binding peptide
  MOD_RES (3)..(4)..(36): Xaa is C or S
KPXXAPTKLEPISVLYLDDSSNVIKFKYENMVVRSX

SEQ ID NO: 29970 - protein, 40 aa, Artificial Sequence; identical to SEQ ID NO: 8635
  GFR-binding peptide
  MOD_RES (4)..(5)..(39): Xaa is C or S
  MOD_RES (19)..(20)..(21)..(22)..(23): Xaa is A or G
  MOD_RES (24)..(25)..(26)..(27): Xaa is A or G or is absent

SEQ ID NO: 29971 - protein, 35 aa, Artificial Sequence; identical to SEQ ID NO: 8637
  GFR-binding peptide
  MOD_RES (2)..(3)..(35): Xaa is C or S

SEQ ID NO: 29972 - protein, 41 aa, Artificial Sequence; identical to SEQ ID NO: 8638
  GFR-binding peptide
  MOD_RES (6)..(7): Xaa is C or S
  MOD_RES (21)..(22)..(23)..(24)..(25): Xaa is A or G
  MOD_RES (26)..(27)..(28)..(29): Xaa is A or G or is absent

SEQ ID NO: 29973 - protein, 32 aa, Artificial Sequence
  GFR-binding peptide
  MOD_RES (31)..(31): Xaa is C or S
VSQDLEPISILYLIGKTPKIKFKYEMIVKSXK

SEQ ID NO: 29974 - protein, 36 aa, Artificial Sequence
  GFR-binding peptide
  MOD_RES (3)..(4)..(36): Xaa is C or S
KAXXVPTKLSPISILYKDKGVVTYLKYHYGMAVSEX

SEQ ID NO: 29975 - protein, 34 aa, Artificial Sequence
  GFR-binding peptide
  MOD_RES (32)..(34): Xaa is C or S
VPTKLSPISILYKDKGVVTYLKYHYGMAVSEXGX

SEQ ID NO: 29976 - protein, 33 aa, Artificial Sequence
  GFR-binding peptide
  MOD_RES (1)..(2)..(33): Xaa is C or S
XXVPQDLEPISILYLVGRTPKVKFKYEMVVKSX

SEQ ID NO: 29977 - protein, 33 aa, Artificial Sequence
  GFR-binding peptide
  MOD_RES (1)..(32): Xaa is C or S
XVPQALEPISILYLVGRKPKVKFKYEMIVRSXK

SEQ ID NO: 29978 - protein, 35 aa, Artificial Sequence
  GFR-binding peptide
  MOD_RES (4)..(5): Xaa is C or S
PKPXXAPTKLEPISVLYLDDSSNVIKFKYENMVVR

SEQ ID NO: 29979 - protein, 37 aa, Artificial Sequence
  GFR-binding peptide
  MOD_RES (1)..(34)..(36): Xaa is C or S
  MOD_RES (15)..(16)..(17)..(18)..(19): Xaa is A or G
  MOD_RES (20)..(21)..(22)..(23): Xaa is A or G or is absent
XVPQDLEPISILYLXXXXXXXXXKFKYEMVVKSXKXS

SEQ ID NO: 29980 - protein, 44 aa, Artificial Sequence
  GFR-binding peptide
  MOD_RES (6)..(7)..(41)..(43): Xaa is C or S
  MOD_RES (21)..(22)..(23)..(24)..(25): Xaa is A or G
  MOD_RES (26)..(27)..(28)..(29): Xaa is A or G or is absent
AAPASXXVPARLSPISILYIXXXXXXXXXYKQYEDMVVEAXGXR

SEQ ID NO: 29981 - protein, 35 aa, Artificial Sequence
  GFR-binding peptide
  MOD_RES (2)..(3): Xaa is C or S
  MOD_RES (17)..(18)..(19)..(20)..(21): Xaa is A or G
  MOD_RES (22)..(23)..(24)..(25): Xaa is A or G or is absent
PXXVPQALSPISILYIXXXXXXXXXYKQYEMIVRS

SEQ ID NO: 29982 - protein, 38 aa, Artificial Sequence; identical to SEQ ID NO: 8644
  GFR-binding peptide
  MOD_RES (4)..(36)..(38): Xaa is C or S

SEQ ID NO: 29983 - protein, 39 aa, Artificial Sequence
  GFR-binding peptide
  MOD_RES (6)..(7)..(39): Xaa is C or S
TVPKPXXAPTQLEPISVLYLDDSSNVIKFKYENMVVRAX

SEQ ID NO: 29984 - protein, 40 aa, Artificial Sequence
  GFR-binding peptide
  MOD_RES (3)..(4)..(38)..(40): Xaa is C or S
  MOD_RES (18)..(19)..(20)..(21)..(22): Xaa is A or G
  MOD_RES (23)..(24)..(25)..(26): Xaa is A or G or is absent
KPXXAPTKLSPISVLYIXXXXXXXXXYKQYENMVVRSXGX

SEQ ID NO: 29985 - protein, 39 aa, Artificial Sequence
  GFR-binding peptide
  MOD_RES (2)..(3)..(36)..(38): Xaa is C or S
AXXVPTKLEPISVLYLDDMGVPTKFKYEEGMSVAEXGXR

SEQ ID NO: 29986 - protein, 37 aa, Artificial Sequence
  GFR-binding peptide
  MOD_RES (3)..(4): Xaa is C or S
  MOD_RES (18)..(19)..(20)..(21)..(22): Xaa is A or G
  MOD_RES (23)..(24)..(25)..(26): Xaa is A or G or is absent
KAXXVPTELEPISMLYLXXXXXXXXXKFKYEEMVVEG

SEQ ID NO: 29987 - protein, 43 aa, Artificial Sequence
  GFR-binding peptide
  MOD_RES (6)..(7)..(42): Xaa is C or S
  MOD_RES (21)..(22)..(23)..(24)..(25): Xaa is A or G
  MOD_RES (26)..(27)..(28)..(29): Xaa is A or G or is absent
KVGKAXXVPTKLEPISVLYLXXXXXXXXXKFKYEEGMSVAEXG

SEQ ID NO: 29988 - protein, 34 aa, Artificial Sequence
  GFR-binding peptide
  MOD_RES (1)..(2)..(34): Xaa is C or S
XXAPTKLSPISVLYIDDSSNVIYKQYENMVVRSX

SEQ ID NO: 29989 - protein, 34 aa, Artificial Sequence
  GFR-binding peptide
  MOD_RES (3)..(4): Xaa is C or S
APXXVPQALSPISILYIVGRKPKVYKQYEMIVRS

SEQ ID NO: 29990 - protein, 37 aa, Artificial Sequence; identical to SEQ ID NO: 8647
  GFR-binding peptide
  MOD_RES (3)..(4)..(36): Xaa is C or S

SEQ ID NO: 29991 - protein, 36 aa, Artificial Sequence; identical to SEQ ID NO: 8648
  GFR-binding peptide
  MOD_RES (2)..(3)..(35): Xaa is C or S

SEQ ID NO: 29992 - protein, 34 aa, Artificial Sequence; identical to SEQ ID NO: 8650
  GFR-binding peptide
  MOD_RES (31)..(33): Xaa is C or S

SEQ ID NO: 29993 - protein, 36 aa, Artificial Sequence; identical to SEQ ID NO: 8653
  GFR-binding peptide
  MOD_RES (3)..(4): Xaa is C or S
  MOD_RES (18)..(19)..(20)..(21)..(22): Xaa is A or G
  MOD_RES (23)..(24)..(25)..(26): Xaa is A or G or is absent

SEQ ID NO: 29994 - protein, 32 aa, Artificial Sequence; identical to SEQ ID NO: 8655
  GFR-binding peptide
  MOD_RES (14)..(15)..(16)..(17)..(18): Xaa is A or G
  MOD_RES (19)..(20)..(21)..(22): Xaa is A or G or is absent

SEQ ID NO: 29995 - protein, 38 aa, Artificial Sequence; identical to SEQ ID NO: 8656
  GFR-binding peptide
  MOD_RES (4)..(5): Xaa is C or S
  MOD_RES (19)..(20)..(21)..(22)..(23): Xaa is A or G
  MOD_RES (24)..(25)..(26)..(27): Xaa is A or G or is absent

SEQ ID NO: 29996 - protein, 33 aa, Artificial Sequence
  GFR-binding peptide
  MOD_RES (2)..(3): Xaa is C or S
AXXVPTELSPISMLYIDEYDKVVYKQYEEMVVE

SEQ ID NO: 29997 - protein, 39 aa, Artificial Sequence
  GFR-binding peptide
  MOD_RES (3)..(4)..(38): Xaa is C or S
  MOD_RES (18)..(19)..(20)..(21)..(22): Xaa is A or G
  MOD_RES (23)..(24)..(25)..(26): Xaa is A or G or is absent
KAXXVPTELSPISMLYIXXXXXXXXXYKQYEEMVVEGXG

SEQ ID NO: 29998 - protein, 40 aa, Artificial Sequence
  GFR-binding peptide
  MOD_RES (3)..(4)..(37)..(39): Xaa is C or S
  MOD_RES (18)..(19)..(20)..(21)..(22): Xaa is A or G
  MOD_RES (23)..(24)..(25)..(26): Xaa is A or G or is absent
SPXXVSQDLEPISILYLXXXXXXXXXKFKYEMIVKSXKXS

SEQ ID NO: 29999 - protein, 39 aa, Artificial Sequence
  GFR-binding peptide
  MOD_RES (4)..(5)..(38): Xaa is C or S
  MOD_RES (19)..(20)..(21)..(22)..(23): Xaa is A or G
  MOD_RES (24)..(25)..(26)..(27): Xaa is A or G or is absent
ASPXXVPQDLEPISILYLXXXXXXXXXKFKYEMVVKSXK

SEQ ID NO: 30000 - protein, 37 aa, Artificial Sequence
  GFR-binding peptide
  MOD_RES (2)..(3)..(35)..(37): Xaa is C or S
AXXVPTELSPISMLYIDEYDKVVYKQYEEMVVEGXGX

SEQ ID NO: 30001 - protein, 36 aa, Artificial Sequence; identical to SEQ ID NO: 8664
  GFR-binding peptide
  MOD_RES (1)..(33)..(35): Xaa is C or S

SEQ ID NO: 30002 - protein, 35 aa, Artificial Sequence; identical to SEQ ID NO: 8666
  GFR-binding peptide
  MOD_RES (34)..(34): Xaa is C or S
  MOD_RES (14)..(15)..(16)..(17)..(18): Xaa is A or G
  MOD_RES (19)..(20)..(21)..(22): Xaa is A or G or is absent

SEQ ID NO: 30003 - protein, 37 aa, Artificial Sequence
  GFR-binding peptide
  MOD_RES (3)..(4)..(36): Xaa is C or S
KPXXAPTQLEPISVLYLDDSSNVIKFKYENMVVRAXG

SEQ ID NO: 30004 - protein, 32 aa, Artificial Sequence; identical to SEQ ID NO: 8668
  GFR-binding peptide
  MOD_RES (14)..(15)..(16)..(17)..(18): Xaa is A or G
  MOD_RES (19)..(20)..(21)..(22): Xaa is A or G or is absent

SEQ ID NO: 30005 - protein, 36 aa, Artificial Sequence
  GFR-binding peptide
  MOD_RES (2)..(3): Xaa is C or S
  MOD_RES (17)..(18)..(19)..(20)..(21): Xaa is A or G
  MOD_RES (22)..(23)..(24)..(25): Xaa is A or G or is absent
AXXVPTKLNAISILYFXXXXXXXXXLKKYRGMAVSE

SEQ ID NO: 30006 - protein, 43 aa, Artificial Sequence; identical to SEQ ID NO: 8670
  GFR-binding peptide
  MOD_RES (6)..(7)..(41)..(43): Xaa is C or S
  MOD_RES (21)..(22)..(23)..(24)..(25): Xaa is A or G
  MOD_RES (26)..(27)..(28)..(29): Xaa is A or G or is absent

SEQ ID NO: 30007 - protein, 37 aa, Artificial Sequence
  GFR-binding peptide
  MOD_RES (2)..(3)..(34)..(36): Xaa is C or S
PXXVPQALSPISILYIVGRKPKVYKQYEMIVRSXKXS

SEQ ID NO: 30008 - protein, 40 aa, Artificial Sequence
  GFR-binding peptide
  MOD_RES (4)..(5)..(39): Xaa is C or S
  MOD_RES (19)..(20)..(21)..(22)..(23): Xaa is A or G
  MOD_RES (24)..(25)..(26)..(27): Xaa is A or G or is absent
PKPXXAPTQLEPISVLYLXXXXXXXXXKFKYENMVVRAXG

SEQ ID NO: 30009 - protein, 40 aa, Artificial Sequence; identical to SEQ ID NO: 8671
  GFR-binding peptide
  MOD_RES (7)..(7): Xaa is C or S
  MOD_RES (21)..(22)..(23)..(24)..(25): Xaa is A or G
  MOD_RES (26)..(27)..(28)..(29): Xaa is A or G or is absent

SEQ ID NO: 30010 - protein, 35 aa, Artificial Sequence
  GFR-binding peptide
  MOD_RES (2)..(3): Xaa is C or S
  MOD_RES (17)..(18)..(19)..(20)..(21): Xaa is A or G
  MOD_RES (22)..(23)..(24)..(25): Xaa is A or G or is absent
AXXVPTELEPISMLYLXXXXXXXXXKFKYEDMVVE

SEQ ID NO: 30011 - protein, 34 aa, Artificial Sequence
  GFR-binding peptide
  MOD_RES (34)..(34): Xaa is C or S
  MOD_RES (14)..(15)..(16)..(17)..(18): Xaa is A or G
  MOD_RES (19)..(20)..(21)..(22): Xaa is A or G or is absent
VPTELEPISMLYLXXXXXXXXXKFKYEDMVVEGX

SEQ ID NO: 30012 - protein, 38 aa, Artificial Sequence; identical to SEQ ID NO: 8674
  GFR-binding peptide
  MOD_RES (3)..(4)..(35)..(37): Xaa is C or S

SEQ ID NO: 30013 - protein, 43 aa, Artificial Sequence
  GFR-binding peptide
  MOD_RES (5)..(6)..(40)..(42): Xaa is C or S
  MOD_RES (20)..(21)..(22)..(23)..(24): Xaa is A or G
  MOD_RES (25)..(26)..(27)..(28): Xaa is A or G or is absent
VPKAXXAPTKLSPISVLYIXXXXXXXXXYKQYENMVVKAXGXH

SEQ ID NO: 30014 - protein, 39 aa, Artificial Sequence; identical to SEQ ID NO: 8676
  GFR-binding peptide
  MOD_RES (3)..(4)..(38): Xaa is C or S
  MOD_RES (18)..(19)..(20)..(21)..(22): Xaa is A or G
  MOD_RES (23)..(24)..(25)..(26): Xaa is A or G or is absent

SEQ ID NO: 30015 - protein, 38 aa, Artificial Sequence
  GFR-binding peptide
  MOD_RES (4)..(5): Xaa is C or S
  MOD_RES (19)..(20)..(21)..(22)..(23): Xaa is A or G
  MOD_RES (24)..(25)..(26)..(27): Xaa is A or G or is absent
PASXXVPARLNAISILYFXXXXXXXXXLKKYRDMVVEA

SEQ ID NO: 30016 - protein, 36 aa, Artificial Sequence; identical to SEQ ID NO: 8677
  GFR-binding peptide
  MOD_RES (1)..(2): Xaa is C or S
  MOD_RES (16)..(17)..(18)..(19)..(20): Xaa is A or G
  MOD_RES (21)..(22)..(23)..(24): Xaa is A or G or is absent

SEQ ID NO: 30017 - protein, 36 aa, Artificial Sequence
  GFR-binding peptide
  MOD_RES (4)..(5): Xaa is C or S
PKAXXAPTKLSPISVLYIDSSNNVIYKQYENMVVKA

SEQ ID NO: 30018 - protein, 32 aa, Artificial Sequence
  GFR-binding peptide
  MOD_RES (14)..(15)..(16)..(17)..(18): Xaa is A or G
  MOD_RES (19)..(20)..(21)..(22): Xaa is A or G or is absent
VPQALEPISILYLXXXXXXXXXKFKYEMIVRS

SEQ ID NO: 30019 - protein, 42 aa, Artificial Sequence
  GFR-binding peptide
  MOD_RES (5)..(6)..(39)..(41): Xaa is C or S
  MOD_RES (20)..(21)..(22)..(23)..(24): Xaa is A or G
  MOD_RES (25)..(26)..(27)..(28): Xaa is A or G or is absent
SASPXXVPQDLEPISILYLXXXXXXXXXKFKYEMVVKSXKXS

SEQ ID NO: 30020 - protein, 42 aa, Artificial Sequence
  GFR-binding peptide
  MOD_RES (6)..(7)..(42): Xaa is C or S
  MOD_RES (21)..(22)..(23)..(24)..(25): Xaa is A or G
  MOD_RES (26)..(27)..(28)..(29): Xaa is A or G or is absent
KVGKAXXVPTKLEPISVLYLXXXXXXXXXKFKYEEGMSVAEX

SEQ ID NO: 30021 - protein, 38 aa, Artificial Sequence
  GFR-binding peptide
  MOD_RES (3)..(4)..(38): Xaa is C or S
  MOD_RES (18)..(19)..(20)..(21)..(22): Xaa is A or G
  MOD_RES (23)..(24)..(25)..(26): Xaa is A or G or is absent
KPXXAPTQLEPISVLYLXXXXXXXXXKFKYENMVVRAX

SEQ ID NO: 30022 - protein, 34 aa, Artificial Sequence
  GFR-binding peptide
  MOD_RES (1)..(2): Xaa is C or S
  MOD_RES (16)..(17)..(18)..(19)..(20): Xaa is A or G
  MOD_RES (21)..(22)..(23)..(24): Xaa is A or G or is absent
XXVPTKLSPISILYKXXXXXXXXXLKYHYGMAVS

SEQ ID NO: 30023 - protein, 38 aa, Artificial Sequence; identical to SEQ ID NO: 8680
  GFR-binding peptide
  MOD_RES (5)..(6)..(37): Xaa is C or S

SEQ ID NO: 30024 - protein, 43 aa, Artificial Sequence; identical to SEQ ID NO: 8683
  GFR-binding peptide
  MOD_RES (6)..(7)..(41)..(43): Xaa is C or S
  MOD_RES (21)..(22)..(23)..(24)..(25): Xaa is A or G
  MOD_RES (26)..(27)..(28)..(29): Xaa is A or G or is absent

SEQ ID NO: 30025 - protein, 32 aa, Artificial Sequence
  GFR-binding peptide
  MOD_RES (1)..(1): Xaa is C or S
XVPTKLSPISILYIDKGVVTYYKQYEGMAVSE

SEQ ID NO: 30026 - protein, 41 aa, Artificial Sequence
  GFR-binding peptide
  MOD_RES (5)..(39)..(41): Xaa is C or S
  MOD_RES (19)..(20)..(21)..(22)..(23): Xaa is A or G
  MOD_RES (24)..(25)..(26)..(27): Xaa is A or G or is absent
TKPTXAPTKLSPISVLYIXXXXXXXXXYKQYENMVVRSXGX

SEQ ID NO: 30027 - protein, 33 aa, Artificial Sequence
  GFR-binding peptide
  MOD_RES (1)..(33): Xaa is C or S
XVPTKLNAISILYFDKGVVTYLKKYRGMAVSEX

SEQ ID NO: 30028 - protein, 35 aa, Artificial Sequence; identical to SEQ ID NO: 8688
  GFR-binding peptide
  MOD_RES (1)..(2)..(34): Xaa is C or S

SEQ ID NO: 30029 - protein, 34 aa, Artificial Sequence
  GFR-binding peptide
  MOD_RES (1)..(1): Xaa is C or S
  MOD_RES (15)..(16)..(17)..(18)..(19): Xaa is A or G
  MOD_RES (20)..(21)..(22)..(23): Xaa is A or G or is absent
XVPARLEPISILYLXXXXXXXXXKFKYEDMVVEA

SEQ ID NO: 30030 - protein, 31 aa, Artificial Sequence; identical to SEQ ID NO: 8690
  GFR-binding peptide
  MOD_RES (1)..(1): Xaa is C or S

SEQ ID NO: 30031 - protein, 39 aa, Artificial Sequence; identical to SEQ ID NO: 8691
  GFR-binding peptide
  MOD_RES (4)..(5)..(37)..(39): Xaa is C or S

SEQ ID NO: 30032 - protein, 37 aa, Artificial Sequence; identical to SEQ ID NO: 8693
  GFR-binding peptide
  MOD_RES (3)..(4)..(35)..(37): Xaa is C or S

SEQ ID NO: 30033 - protein, 32 aa, Artificial Sequence
  GFR-binding peptide
  MOD_RES (32)..(32): Xaa is C or S
APTKLSPISVLYIDDSSNVIYKQYENMVVRSX

SEQ ID NO: 30034 - protein, 36 aa, Artificial Sequence
  GFR-binding peptide
  MOD_RES (3)..(4): Xaa is C or S
  MOD_RES (18)..(19)..(20)..(21)..(22): Xaa is A or G
  MOD_RES (23)..(24)..(25)..(26): Xaa is A or G or is absent
ASXXVPARLNAISILYFXXXXXXXXXLKKYRDMVVE

SEQ ID NO: 30035 - protein, 36 aa, Artificial Sequence
  GFR-binding peptide
  MOD_RES (3)..(35): Xaa is C or S
PTXAPTKLEPISVLYLDDSSNVIKFKYENMVVRSXG

SEQ ID NO: 30036 - protein, 41 aa, Artificial Sequence
  GFR-binding peptide
  MOD_RES (6)..(7)..(39)..(41): Xaa is C or S
TVPKPXXAPTQLSPISVLYIDDSSNVIYKQYENMVVRAXGX

SEQ ID NO: 30037 - protein, 37 aa, Artificial Sequence; identical to SEQ ID NO: 8698
  GFR-binding peptide
  MOD_RES (5)..(6)..(37): Xaa is C or S

SEQ ID NO: 30038 - protein, 39 aa, Artificial Sequence
  GFR-binding peptide
  MOD_RES (7)..(39): Xaa is C or S
HVTKPTXAPTKLEPISVLYLDDSSNVIKFKYENMVVRSX

SEQ ID NO: 30039 - protein, 37 aa, Artificial Sequence; identical to SEQ ID NO: 8700
  GFR-binding peptide
  MOD_RES (6)..(7): Xaa is C or S

SEQ ID NO: 30040 - protein, 39 aa, Artificial Sequence; identical to SEQ ID NO: 8702
  GFR-binding peptide
  MOD_RES (4)..(5)..(39): Xaa is C or S
  MOD_RES (19)..(20)..(21)..(22)..(23): Xaa is A or G
  MOD_RES (24)..(25)..(26)..(27): Xaa is A or G or is absent

SEQ ID NO: 30041 - protein, 37 aa, Artificial Sequence
  GFR-binding peptide
  MOD_RES (1)..(2)..(36): Xaa is C or S
  MOD_RES (16)..(17)..(18)..(19)..(20): Xaa is A or G
  MOD_RES (21)..(22)..(23)..(24): Xaa is A or G or is absent
XXAPTQLEPISVLYLXXXXXXXXXKFKYENMVVRAXG

SEQ ID NO: 30042 - protein, 43 aa, Artificial Sequence
  GFR-binding peptide
  MOD_RES (5)..(6)..(40)..(42): Xaa is C or S
  MOD_RES (20)..(21)..(22)..(23)..(24): Xaa is A or G
  MOD_RES (25)..(26)..(27)..(28): Xaa is A or G or is absent
ASKAXXVPTKLNAISILYFXXXXXXXXXLKKYRGMAVSEXGXR

SEQ ID NO: 30043 - protein, 37 aa, Artificial Sequence
  GFR-binding peptide
  MOD_RES (1)..(2)..(36): Xaa is C or S
  MOD_RES (16)..(17)..(18)..(19)..(20): Xaa is A or G
  MOD_RES (21)..(22)..(23)..(24): Xaa is A or G or is absent
XXAPTKLEPISVLYLXXXXXXXXXKFKYENMVVKAXG

SEQ ID NO: 30044 - protein, 40 aa, Artificial Sequence
  GFR-binding peptide
  MOD_RES (4)..(5)..(37)..(39): Xaa is C or S
SKAXXVPTKLNAISILYFDKGVVTYLKKYRGMAVSEXGXR

SEQ ID NO: 30045 - protein, 40 aa, Artificial Sequence; identical to SEQ ID NO: 8707
  GFR-binding peptide
  MOD_RES (4)..(5)..(39): Xaa is C or S
  MOD_RES (19)..(20)..(21)..(22)..(23): Xaa is A or G
  MOD_RES (24)..(25)..(26)..(27): Xaa is A or G or is absent

SEQ ID NO: 30046 - protein, 34 aa, Artificial Sequence
  GFR-binding peptide
  MOD_RES (1)..(33): Xaa is C or S
XVPTKLSPISILYIDKGVVTYYKQYEGMAVSEXG

SEQ ID NO: 30047 - protein, 34 aa, Artificial Sequence
  GFR-binding peptide
  MOD_RES (34)..(34): Xaa is C or S
  MOD_RES (14)..(15)..(16)..(17)..(18): Xaa is A or G
  MOD_RES (19)..(20)..(21)..(22): Xaa is A or G or is absent
VPARLSPISILYKXXXXXXXXXLKYHYDMVVEAX

SEQ ID NO: 30048 - protein, 38 aa, Artificial Sequence
  GFR-binding peptide
  MOD_RES (4)..(5): Xaa is C or S
  MOD_RES (19)..(20)..(21)..(22)..(23): Xaa is A or G
  MOD_RES (24)..(25)..(26)..(27): Xaa is A or G or is absent
PKPXXAPTKLSPISVLYIXXXXXXXXXYKQYENMVVRS

SEQ ID NO: 30049 - protein, 36 aa, Artificial Sequence; identical to SEQ ID NO: 8711
  GFR-binding peptide
  MOD_RES (1)..(2)..(35): Xaa is C or S
  MOD_RES (16)..(17)..(18)..(19)..(20): Xaa is A or G
  MOD_RES (21)..(22)..(23)..(24): Xaa is A or G or is absent

SEQ ID NO: 30050 - protein, 32 aa, Artificial Sequence
  GFR-binding peptide
  MOD_RES (1)..(1): Xaa is C or S
XVPTELEPISMLYLDENEKVVKFKYEDMVVEG

SEQ ID NO: 30051 - protein, 39 aa, Artificial Sequence
  GFR-binding peptide
  MOD_RES (4)..(5)..(37)..(39): Xaa is C or S
PKPXXAPTQLSPISVLYIDDSSNVIYKQYENMVVRAXGX

SEQ ID NO: 30052 - protein, 33 aa, Artificial Sequence; identical to SEQ ID NO: 8712
  GFR-binding peptide
  MOD_RES (2)..(2): Xaa is C or S

SEQ ID NO: 30053 - protein, 33 aa, Artificial Sequence; identical to SEQ ID NO: 8713
  GFR-binding peptide
  MOD_RES (2)..(3): Xaa is C or S

SEQ ID NO: 30054 - protein, 38 aa, Artificial Sequence
  GFR-binding peptide
  MOD_RES (5)..(5): Xaa is C or S
  MOD_RES (19)..(20)..(21)..(22)..(23): Xaa is A or G
  MOD_RES (24)..(25)..(26)..(27): Xaa is A or G or is absent
TKPTXAPTKLSPISVLYIXXXXXXXXXYKQYENMVVRS

SEQ ID NO: 30055 - protein, 36 aa, Artificial Sequence
  GFR-binding peptide
  MOD_RES (1)..(33)..(35): Xaa is C or S
XAPTKLSPISVLYIDSSNNVIYKQYENMVVKAXGXH

SEQ ID NO: 30056 - protein, 41 aa, Artificial Sequence; identical to SEQ ID NO: 8719
  GFR-binding peptide
  MOD_RES (3)..(4)..(38)..(40): Xaa is C or S
  MOD_RES (18)..(19)..(20)..(21)..(22): Xaa is A or G
  MOD_RES (23)..(24)..(25)..(26): Xaa is A or G or is absent

SEQ ID NO: 30057 - protein, 34 aa, Artificial Sequence
  GFR-binding peptide
  MOD_RES (1)..(33): Xaa is C or S
XAPTKLSPISVLYIDDSSNVIYKQYENMVVRSXG

SEQ ID NO: 30058 - protein, 34 aa, Artificial Sequence
  GFR-binding peptide
  MOD_RES (1)..(33): Xaa is C or S
XVPARLSPISILYKDAANNVVLKYHYDMVVEAXG

SEQ ID NO: 30059 - protein, 30 aa, Artificial Sequence
  GFR-binding peptide
VPTELSPISMLYIDENEKVVYKQYEDMVVE

SEQ ID NO: 30060 - protein, 37 aa, Artificial Sequence; identical to SEQ ID NO: 8721
  GFR-binding peptide
  MOD_RES (6)..(7): Xaa is C or S

SEQ ID NO: 30061 - protein, 35 aa, Artificial Sequence; identical to SEQ ID NO: 8722
  GFR-binding peptide
  MOD_RES (1)..(33)..(35): Xaa is C or S

SEQ ID NO: 30062 - protein, 36 aa, Artificial Sequence
  GFR-binding peptide
  MOD_RES (1)..(33)..(35): Xaa is C or S
XAPTKLEPISVLYLDSSNNVIKFKYENMVVKAXGXH

SEQ ID NO: 30063 - protein, 38 aa, Artificial Sequence; identical to SEQ ID NO: 8724
  GFR-binding peptide
  MOD_RES (1)..(2)..(35)..(37): Xaa is C or S

SEQ ID NO: 30064 - protein, 32 aa, Artificial Sequence
  GFR-binding peptide
  MOD_RES (2)..(2): Xaa is C or S
TXAPTKLSPISVLYIDDSSNVIYKQYENMVVR

SEQ ID NO: 30065 - protein, 39 aa, Artificial Sequence; identical to SEQ ID NO: 8727
  GFR-binding peptide
  MOD_RES (2)..(3)..(37)..(39): Xaa is C or S
  MOD_RES (17)..(18)..(19)..(20)..(21): Xaa is A or G
  MOD_RES (22)..(23)..(24)..(25): Xaa is A or G or is absent

SEQ ID NO: 30066 - protein, 37 aa, Artificial Sequence; identical to SEQ ID NO: 8728
  GFR-binding peptide
  MOD_RES (5)..(6): Xaa is C or S

SEQ ID NO: 30067 - protein, 42 aa, Artificial Sequence
  GFR-binding peptide
  MOD_RES (6)..(7)..(41): Xaa is C or S
  MOD_RES (21)..(22)..(23)..(24)..(25): Xaa is A or G
  MOD_RES (26)..(27)..(28)..(29): Xaa is A or G or is absent
TVPKPXXAPTQLEPISVLYLXXXXXXXXXKFKYENMVVRAXG

SEQ ID NO: 30068 - protein, 39 aa, Artificial Sequence
  GFR-binding peptide
  MOD_RES (4)..(5)..(37)..(39): Xaa is C or S
SKAXXVPTKLSPISILYKDKGVVTYLKYHYGMAVSEXGX

SEQ ID NO: 30069 - protein, 37 aa, Artificial Sequence
  GFR-binding peptide
  MOD_RES (2)..(3)..(37): Xaa is C or S
  MOD_RES (17)..(18)..(19)..(20)..(21): Xaa is A or G
  MOD_RES (22)..(23)..(24)..(25): Xaa is A or G or is absent
AXXVPTKLSPISILYKXXXXXXXXXLKYHYGMAVSEX

SEQ ID NO: 30070 - protein, 42 aa, Artificial Sequence
  GFR-binding peptide
  MOD_RES (5)..(6)..(40)..(42): Xaa is C or S
  MOD_RES (20)..(21)..(22)..(23)..(24): Xaa is A or G
  MOD_RES (25)..(26)..(27)..(28): Xaa is A or G or is absent
APASXXVPARLNAISILYFXXXXXXXXXLKKYRDMVVEAXGX

SEQ ID NO: 30071 - protein, 39 aa, Artificial Sequence; identical to SEQ ID NO: 8731
  GFR-binding peptide
  MOD_RES (5)..(6): Xaa is C or S
  MOD_RES (20)..(21)..(22)..(23)..(24): Xaa is A or G
  MOD_RES (25)..(26)..(27)..(28): Xaa is A or G or is absent

SEQ ID NO: 30072 - protein, 38 aa, Artificial Sequence
  GFR-binding peptide
  MOD_RES (3)..(4)..(38): Xaa is C or S
  MOD_RES (18)..(19)..(20)..(21)..(22): Xaa is A or G
  MOD_RES (23)..(24)..(25)..(26): Xaa is A or G or is absent
KAXXAPTKLSPISVLYIXXXXXXXXXYKQYENMVVKAX

SEQ ID NO: 30073 - protein, 40 aa, Artificial Sequence
  GFR-binding peptide
  MOD_RES (5)..(6)..(38)..(40): Xaa is C or S
IPKAXXVPTELEPISMLYLDENEKVVKFKYEDMVVEGXGX

SEQ ID NO: 30074 - protein, 39 aa, Artificial Sequence
  GFR-binding peptide
  MOD_RES (2)..(3)..(36)..(38): Xaa is C or S
  MOD_RES (17)..(18)..(19)..(20)..(21): Xaa is A or G
  MOD_RES (22)..(23)..(24)..(25): Xaa is A or G or is absent
PXXVSQDLSPISILYIXXXXXXXXXYKQYEMIVKSXKXS

SEQ ID NO: 30075 - protein, 34 aa, Artificial Sequence
  GFR-binding peptide
  MOD_RES (3)..(4): Xaa is C or S
KAXXVPTELEPISMLYLDEYDKVVKFKYEEMVVE

SEQ ID NO: 30076 - protein, 41 aa, Artificial Sequence; identical to SEQ ID NO: 8735
  GFR-binding peptide
  MOD_RES (4)..(5)..(38)..(40): Xaa is C or S
  MOD_RES (19)..(20)..(21)..(22)..(23): Xaa is A or G
  MOD_RES (24)..(25)..(26)..(27): Xaa is A or G or is absent

SEQ ID NO: 30077 - protein, 39 aa, Artificial Sequence; identical to SEQ ID NO: 8736
  GFR-binding peptide
  MOD_RES (1)..(2)..(36)..(38): Xaa is C or S
  MOD_RES (16)..(17)..(18)..(19)..(20): Xaa is A or G
  MOD_RES (21)..(22)..(23)..(24): Xaa is A or G or is absent

SEQ ID NO: 30078 - protein, 41 aa, Artificial Sequence
  GFR-binding peptide
  MOD_RES (4)..(5)..(38)..(40): Xaa is C or S
  MOD_RES (19)..(20)..(21)..(22)..(23): Xaa is A or G
  MOD_RES (24)..(25)..(26)..(27): Xaa is A or G or is absent
AAPXXVPQALEPISILYLXXXXXXXXXKFKYEMIVRSXKXS

SEQ ID NO: 30079 - protein, 36 aa, Artificial Sequence
  GFR-binding peptide
  MOD_RES (4)..(5): Xaa is C or S
PASXXVPARLSPISILYKDAANNVVLKYHYDMVVEA

SEQ ID NO: 30080 - protein, 32 aa, Artificial Sequence
  GFR-binding peptide
VPTKLEPISVLYLDDMGVPTKFKYEEGMSVAE

SEQ ID NO: 30081 - protein, 38 aa, Artificial Sequence
  GFR-binding peptide
  MOD_RES (1)..(2)..(35)..(37): Xaa is C or S
  MOD_RES (16)..(17)..(18)..(19)..(20): Xaa is A or G
  MOD_RES (21)..(22)..(23)..(24): Xaa is A or G or is absent
XXVPQDLSPISILYIXXXXXXXXXYKQYEMVVKSXKXS

SEQ ID NO: 30082 - protein, 35 aa, Artificial Sequence
  GFR-binding peptide
  MOD_RES (2)..(2): Xaa is C or S
  MOD_RES (16)..(17)..(18)..(19)..(20): Xaa is A or G
  MOD_RES (21)..(22)..(23)..(24): Xaa is A or G or is absent
TXAPTKLEPISVLYLXXXXXXXXXKFKYENMVVRS

SEQ ID NO: 30083 - protein, 40 aa, Artificial Sequence
  GFR-binding peptide
  MOD_RES (4)..(5)..(38)..(40): Xaa is C or S
  MOD_RES (19)..(20)..(21)..(22)..(23): Xaa is A or G
  MOD_RES (24)..(25)..(26)..(27): Xaa is A or G or is absent
ASPXXVPQDLSPISILYIXXXXXXXXXYKQYEMVVKSXKX

SEQ ID NO: 30084 - protein, 33 aa, Artificial Sequence
  GFR-binding peptide
  MOD_RES (1)..(1): Xaa is C or S
  MOD_RES (15)..(16)..(17)..(18)..(19): Xaa is A or G
  MOD_RES (20)..(21)..(22)..(23): Xaa is A or G or is absent
XVPTKLSPISILYIXXXXXXXXXYKQYEGMAVS

SEQ ID NO: 30085 - protein, 35 aa, Artificial Sequence
  GFR-binding peptide
  MOD_RES (33)..(35): Xaa is C or S
  MOD_RES (14)..(15)..(16)..(17)..(18): Xaa is A or G
  MOD_RES (19)..(20)..(21)..(22): Xaa is A or G or is absent
VPQDLSPISILYIXXXXXXXXXYKQYEMVVKSXKX

SEQ ID NO: 30086 - protein, 39 aa, Artificial Sequence; identical to SEQ ID NO: 8742
  GFR-binding peptide
  MOD_RES (3)..(4)..(38): Xaa is C or S
  MOD_RES (18)..(19)..(20)..(21)..(22): Xaa is A or G
  MOD_RES (23)..(24)..(25)..(26): Xaa is A or G or is absent

SEQ ID NO: 30087 - protein, 36 aa, Artificial Sequence
  GFR-binding peptide
  MOD_RES (2)..(36): Xaa is C or S
  MOD_RES (16)..(17)..(18)..(19)..(20): Xaa is A or G
  MOD_RES (21)..(22)..(23)..(24): Xaa is A or G or is absent
TXAPTKLSPISVLYIXXXXXXXXXYKQYENMVVRSX

SEQ ID NO: 30088 - protein, 33 aa, Artificial Sequence
  GFR-binding peptide
  MOD_RES (32)..(32): Xaa is C or S
VPARLEPISILYLDAANNVVKFKYEDMVVEAXG

SEQ ID NO: 30089 - protein, 41 aa, Artificial Sequence
  GFR-binding peptide
  MOD_RES (4)..(5)..(38)..(40): Xaa is C or S
  MOD_RES (19)..(20)..(21)..(22)..(23): Xaa is A or G
  MOD_RES (24)..(25)..(26)..(27): Xaa is A or G or is absent
ASPXXVSQDLSPISILYIXXXXXXXXXYKQYEMIVKSXKXS

SEQ ID NO: 30090 - protein, 34 aa, Artificial Sequence
  GFR-binding peptide
  MOD_RES (1)..(33): Xaa is C or S
XAPTQLSPISVLYIDDSSNVIYKQYENMVVRAXG

SEQ ID NO: 30091 - protein, 36 aa, Artificial Sequence; identical to SEQ ID NO: 8744
  GFR-binding peptide
  MOD_RES (5)..(6): Xaa is C or S

SEQ ID NO: 30092 - protein, 43 aa, Artificial Sequence
  GFR-binding peptide
  MOD_RES (6)..(7)..(41)..(43): Xaa is C or S
  MOD_RES (21)..(22)..(23)..(24)..(25): Xaa is A or G
  MOD_RES (26)..(27)..(28)..(29): Xaa is A or G or is absent
AVPKAXXAPTKLEPISVLYLXXXXXXXXXKFKYENMVVKAXGX

SEQ ID NO: 30093 - protein, 35 aa, Artificial Sequence
  GFR-binding peptide
  MOD_RES (3)..(35): Xaa is C or S
PTXAPTKLEPISVLYLDDSSNVIKFKYENMVVRSX

SEQ ID NO: 30094 - protein, 42 aa, Artificial Sequence
  GFR-binding peptide
  MOD_RES (6)..(7)..(41): Xaa is C or S
  MOD_RES (21)..(22)..(23)..(24)..(25): Xaa is A or G
  MOD_RES (26)..(27)..(28)..(29): Xaa is A or G or is absent
TVPKPXXAPTQLSPISVLYIXXXXXXXXXYKQYENMVVRAXG

SEQ ID NO: 30095 - protein, 40 aa, Artificial Sequence
  GFR-binding peptide
  MOD_RES (5)..(6)..(40): Xaa is C or S
  MOD_RES (20)..(21)..(22)..(23)..(24): Xaa is A or G
  MOD_RES (25)..(26)..(27)..(28): Xaa is A or G or is absent
APASXXVPARLSPISILYIXXXXXXXXXYKQYEDMVVEAX

SEQ ID NO: 30096 - protein, 38 aa, Artificial Sequence
  GFR-binding peptide
  MOD_RES (4)..(5): Xaa is C or S
  MOD_RES (19)..(20)..(21)..(22)..(23): Xaa is A or G
  MOD_RES (24)..(25)..(26)..(27): Xaa is A or G or is absent
PKAXXAPTKLSPISVLYIXXXXXXXXXYKQYENMVVKA

SEQ ID NO: 30097 - protein, 36 aa, Artificial Sequence; identical to SEQ ID NO: 8749
  GFR-binding peptide
  MOD_RES (5)..(6): Xaa is C or S

SEQ ID NO: 30098 - protein, 34 aa, Artificial Sequence
  GFR-binding peptide
  MOD_RES (1)..(33): Xaa is C or S
XVPTELEPISMLYLDENEKVVKFKYEDMVVEGXG

SEQ ID NO: 30099 - protein, 42 aa, Artificial Sequence
  GFR-binding peptide
  MOD_RES (6)..(7)..(39)..(41): Xaa is C or S
YVPKPXXAPTKLSPISVLYIDDSSNVIYKQYENMVVRSXGXH

SEQ ID NO: 30100 - protein, 39 aa, Artificial Sequence
  GFR-binding peptide
  MOD_RES (5)..(6)..(39): Xaa is C or S
  MOD_RES (20)..(21)..(22)..(23)..(24): Xaa is A or G
  MOD_RES (25)..(26)..(27)..(28): Xaa is A or G or is absent
SASPXXVPQDLEPISILYLXXXXXXXXXKFKYEMVVKSX

SEQ ID NO: 30101 - protein, 33 aa, Artificial Sequence
  GFR-binding peptide
  MOD_RES (2)..(3): Xaa is C or S
AXXAPTKLSPISVLYIDSSNNVIYKQYENMVVK

SEQ ID NO: 30102 - protein, 36 aa, Artificial Sequence; identical to SEQ ID NO: 8752
  GFR-binding peptide
  MOD_RES (3)..(4)..(36): Xaa is C or S

SEQ ID NO: 30103 - protein, 37 aa, Artificial Sequence
  GFR-binding peptide
  MOD_RES (2)..(3)..(36): Xaa is C or S
AXXVPTKLEPISVLYLDDMGVPTKFKYEEGMSVAEXG

SEQ ID NO: 30104 - protein, 41 aa, Artificial Sequence; identical to SEQ ID NO: 8753
  GFR-binding peptide
  MOD_RES (5)..(6)..(41): Xaa is C or S
  MOD_RES (20)..(21)..(22)..(23)..(24): Xaa is A or G
  MOD_RES (25)..(26)..(27)..(28): Xaa is A or G or is absent

SEQ ID NO: 30105 - protein, 35 aa, Artificial Sequence; identical to SEQ ID NO: 8755
  GFR-binding peptide
  MOD_RES (5)..(5): Xaa is C or S

SEQ ID NO: 30106 - protein, 35 aa, Artificial Sequence
  GFR-binding peptide
  MOD_RES (4)..(5): Xaa is C or S
PKAXXVPTELSPISMLYIDEYDKVVYKQYEEMVVE

SEQ ID NO: 30107 - protein, 35 aa, Artificial Sequence
  GFR-binding peptide
  MOD_RES (3)..(4): Xaa is C or S
KAXXVPTKLNAISILYFDKGVVTYLKKYRGMAVSE

SEQ ID NO: 30108 - protein, 34 aa, Artificial Sequence
  GFR-binding peptide
  MOD_RES (1)..(2): Xaa is C or S
  MOD_RES (16)..(17)..(18)..(19)..(20): Xaa is A or G
  MOD_RES (21)..(22)..(23)..(24): Xaa is A or G or is absent
XXVPARLSPISILYKXXXXXXXXXLKYHYDMVVE

SEQ ID NO: 30109 - protein, 39 aa, Artificial Sequence
  GFR-binding peptide
  MOD_RES (1)..(2)..(36)..(38): Xaa is C or S
  MOD_RES (16)..(17)..(18)..(19)..(20): Xaa is A or G
  MOD_RES (21)..(22)..(23)..(24): Xaa is A or G or is absent
XXAPTKLSPISVLYIXXXXXXXXXYKQYENMVVKAXGXH

SEQ ID NO: 30110 - protein, 36 aa, Artificial Sequence; identical to SEQ ID NO: 8759
  GFR-binding peptide
  MOD_RES (2)..(3)..(35): Xaa is C or S

SEQ ID NO: 30111 - protein, 37 aa, Artificial Sequence
  GFR-binding peptide
  MOD_RES (35)..(37): Xaa is C or S
  MOD_RES (14)..(15)..(16)..(17)..(18): Xaa is A or G
  MOD_RES (19)..(20)..(21)..(22): Xaa is A or G or is absent
VPTKLEPISVLYLXXXXXXXXXKFKYEEGMSVAEXGX

SEQ ID NO: 30112 - protein, 37 aa, Artificial Sequence
  GFR-binding peptide
  MOD_RES (1)..(2)..(36): Xaa is C or S
  MOD_RES (16)..(17)..(18)..(19)..(20): Xaa is A or G
  MOD_RES (21)..(22)..(23)..(24): Xaa is A or G or is absent
XXVPTELSPISMLYIXXXXXXXXXYKQYEDMVVEGXG

SEQ ID NO: 30113 - protein, 35 aa, Artificial Sequence
  GFR-binding peptide
  MOD_RES (34)..(34): Xaa is C or S
  MOD_RES (14)..(15)..(16)..(17)..(18): Xaa is A or G
  MOD_RES (19)..(20)..(21)..(22): Xaa is A or G or is absent
VPARLSPISILYIXXXXXXXXXYKQYEDMVVEAXG

SEQ ID NO: 30114 - protein, 35 aa, Artificial Sequence
  GFR-binding peptide
  MOD_RES (32)..(34): Xaa is C or S
APTKLSPISVLYIDSSNNVIYKQYENMVVKAXGXH

SEQ ID NO: 30115 - protein, 38 aa, Artificial Sequence
  GFR-binding peptide
  MOD_RES (4)..(5)..(38): Xaa is C or S
GKAXXVPTKLEPISVLYLDDMGVPTKFKYEEGMSVAEX

SEQ ID NO: 30116 - protein, 38 aa, Artificial Sequence; identical to SEQ ID NO: 8763
  GFR-binding peptide
  MOD_RES (6)..(7): Xaa is C or S

SEQ ID NO: 30117 - protein, 37 aa, Artificial Sequence; identical to SEQ ID NO: 8765
  GFR-binding peptide
  MOD_RES (6)..(7): Xaa is C or S

SEQ ID NO: 30118 - protein, 33 aa, Artificial Sequence
  GFR-binding peptide
  MOD_RES (1)..(2): Xaa is C or S
XXVPTKLSPISILYIDKGVVTYYKQYEGMAVSE

SEQ ID NO: 30119 - protein, 34 aa, Artificial Sequence
  GFR-binding peptide
  MOD_RES (1)..(2)..(34): Xaa is C or S
XXVPTKLNAISILYFDKGVVTYLKKYRGMAVSEX

SEQ ID NO: 30120 - protein, 38 aa, Artificial Sequence; identical to SEQ ID NO: 8766
  GFR-binding peptide
  MOD_RES (3)..(37): Xaa is C or S
  MOD_RES (17)..(18)..(19)..(20)..(21): Xaa is A or G
  MOD_RES (22)..(23)..(24)..(25): Xaa is A or G or is absent

SEQ ID NO: 30121 - protein, 35 aa, Artificial Sequence; identical to SEQ ID NO: 8767
  GFR-binding peptide
  MOD_RES (1)..(33)..(35): Xaa is C or S

SEQ ID NO: 30122 - protein, 35 aa, Artificial Sequence
  GFR-binding peptide
  MOD_RES (2)..(3)..(34): Xaa is C or S
PXXVSQDLEPISILYLIGKTPKIKFKYEMIVKSXK

SEQ ID NO: 30123 - protein, 41 aa, Artificial Sequence; identical to SEQ ID NO: 8771
  GFR-binding peptide
  MOD_RES (5)..(6)..(40): Xaa is C or S
  MOD_RES (20)..(21)..(22)..(23)..(24): Xaa is A or G
  MOD_RES (25)..(26)..(27)..(28): Xaa is A or G or is absent

SEQ ID NO: 30124 - protein, 42 aa, Artificial Sequence
  GFR-binding peptide
  MOD_RES (5)..(6)..(39)..(41): Xaa is C or S
  MOD_RES (20)..(21)..(22)..(23)..(24): Xaa is A or G
  MOD_RES (25)..(26)..(27)..(28): Xaa is A or G or is absent
SASPXXVSQDLEPISILYLXXXXXXXXXKFKYEMIVKSXKXS

SEQ ID NO: 30125 - protein, 38 aa, Artificial Sequence; identical to SEQ ID NO: 8775
  GFR-binding peptide
  MOD_RES (5)..(6): Xaa is C or S
  MOD_RES (20)..(21)..(22)..(23)..(24): Xaa is A or G
  MOD_RES (25)..(26)..(27)..(28): Xaa is A or G or is absent

SEQ ID NO: 30126 - protein, 36 aa, Artificial Sequence
  GFR-binding peptide
  MOD_RES (1)..(35): Xaa is C or S
  MOD_RES (15)..(16)..(17)..(18)..(19): Xaa is A or G
  MOD_RES (20)..(21)..(22)..(23): Xaa is A or G or is absent
XVPTKLEPISILYLXXXXXXXXXKFKYEGMAVSEXG

SEQ ID NO: 30127 - protein, 38 aa, Artificial Sequence
  GFR-binding peptide
  MOD_RES (5)..(6)..(38): Xaa is C or S
ASKAXXVPTKLSPISILYIDKGVVTYYKQYEGMAVSEX

SEQ ID NO: 30128 - protein, 36 aa, Artificial Sequence; identical to SEQ ID NO: 8778
  GFR-binding peptide
  MOD_RES (4)..(5)..(36): Xaa is C or S

SEQ ID NO: 30129 - protein, 38 aa, Artificial Sequence
  GFR-binding peptide
  MOD_RES (5)..(6)..(37): Xaa is C or S
SAAPXXVPQALSPISILYIVGRKPKVYKQYEMIVRSXK

SEQ ID NO: 30130 - protein, 37 aa, Artificial Sequence; identical to SEQ ID NO: 8781
  GFR-binding peptide
  MOD_RES (1)..(2)..(34)..(36): Xaa is C or S

SEQ ID NO: 30131 - protein, 31 aa, Artificial Sequence
  GFR-binding peptide
  MOD_RES (1)..(1): Xaa is C or S
XVPTELEPISMLYLDEYDKVVKFKYEEMVVE

SEQ ID NO: 30132 - protein, 38 aa, Artificial Sequence; identical to SEQ ID NO: 8782
  GFR-binding peptide
  MOD_RES (3)..(4)..(38): Xaa is C or S
  MOD_RES (18)..(19)..(20)..(21)..(22): Xaa is A or G
  MOD_RES (23)..(24)..(25)..(26): Xaa is A or G or is absent

SEQ ID NO: 30133 - protein, 41 aa, Artificial Sequence
  GFR-binding peptide
  MOD_RES (6)..(7)..(41): Xaa is C or S
  MOD_RES (21)..(22)..(23)..(24)..(25): Xaa is A or G
  MOD_RES (26)..(27)..(28)..(29): Xaa is A or G or is absent
KASKAXXVPTKLSPISILYIXXXXXXXXXYKQYEGMAVSEX

SEQ ID NO: 30134 - protein, 39 aa, Artificial Sequence
  GFR-binding peptide
  MOD_RES (6)..(7): Xaa is C or S
  MOD_RES (21)..(22)..(23)..(24)..(25): Xaa is A or G
  MOD_RES (26)..(27)..(28)..(29): Xaa is A or G or is absent
KASKAXXVPTKLSPISILYKXXXXXXXXXLKYHYGMAVS

SEQ ID NO: 30135 - protein, 38 aa, Artificial Sequence; identical to SEQ ID NO: 8783
  GFR-binding peptide
  MOD_RES (5)..(6): Xaa is C or S
  MOD_RES (20)..(21)..(22)..(23)..(24): Xaa is A or G
  MOD_RES (25)..(26)..(27)..(28): Xaa is A or G or is absent

SEQ ID NO: 30136 - protein, 30 aa, Artificial Sequence; identical to SEQ ID NO: 8785
  GFR-binding peptide

SEQ ID NO: 30137 - protein, 33 aa, Artificial Sequence
  GFR-binding peptide
  MOD_RES (2)..(3): Xaa is C or S
PXXAPTKLEPISVLYLDDSSNVIKFKYENMVVR

SEQ ID NO: 30138 - protein, 39 aa, Artificial Sequence
  GFR-binding peptide
  MOD_RES (4)..(5)..(37)..(39): Xaa is C or S
PKAXXVPTELEPISMLYLDENEKVVKFKYEDMVVEGXGX

SEQ ID NO: 30139 - protein, 36 aa, Artificial Sequence
  GFR-binding peptide
  MOD_RES (2)..(3)..(35): Xaa is C or S
SXXVPARLNAISILYFDAANNVVLKKYRDMVVEAXG

SEQ ID NO: 30140 - protein, 35 aa, Artificial Sequence
  GFR-binding peptide
  MOD_RES (1)..(2)..(35): Xaa is C or S
XXVPTKLSPISVLYIDDMGVPTYKQYEEGMSVAEX

SEQ ID NO: 30141 - protein, 34 aa, Artificial Sequence
  GFR-binding peptide
  MOD_RES (3)..(4): Xaa is C or S
KPXXAPTQLEPISVLYLDDSSNVIKFKYENMVVR

SEQ ID NO: 30142 - protein, 34 aa, Artificial Sequence; identical to SEQ ID NO: 8790
  GFR-binding peptide
  MOD_RES (1)..(33): Xaa is C or S

SEQ ID NO: 30143 - protein, 35 aa, Artificial Sequence; identical to SEQ ID NO: 8792
  GFR-binding peptide
  MOD_RES (33)..(35): Xaa is C or S

SEQ ID NO: 30144 - protein, 31 aa, Artificial Sequence
  GFR-binding peptide
  MOD_RES (1)..(1): Xaa is C or S
XAPTKLEPISVLYLDDSSNVIKFKYENMVVR

SEQ ID NO: 30145 - protein, 38 aa, Artificial Sequence
  GFR-binding peptide
  MOD_RES (2)..(3)..(37): Xaa is C or S
  MOD_RES (17)..(18)..(19)..(20)..(21): Xaa is A or G
  MOD_RES (22)..(23)..(24)..(25): Xaa is A or G or is absent
SXXVPARLEPISILYLXXXXXXXXXKFKYEDMVVEAXG

SEQ ID NO: 30146 - protein, 32 aa, Artificial Sequence; identical to SEQ ID NO: 8795
  GFR-binding peptide
  MOD_RES (1)..(2): Xaa is C or S

SEQ ID NO: 30147 - protein, 36 aa, Artificial Sequence
  GFR-binding peptide
  MOD_RES (4)..(4): Xaa is C or S
  MOD_RES (18)..(19)..(20)..(21)..(22): Xaa is A or G
  MOD_RES (23)..(24)..(25)..(26): Xaa is A or G or is absent
KPTXAPTKLEPISVLYLXXXXXXXXXKFKYENMVVR

SEQ ID NO: 30148 - protein, 33 aa, Artificial Sequence; identical to SEQ ID NO: 8797
  GFR-binding peptide
  MOD_RES (31)..(33): Xaa is C or S

SEQ ID NO: 30149 - protein, 41 aa, Artificial Sequence; identical to SEQ ID NO: 8798
  GFR-binding peptide
  MOD_RES (5)..(6)..(38)..(40): Xaa is C or S

SEQ ID NO: 30150 - protein, 34 aa, Artificial Sequence
  GFR-binding peptide
  MOD_RES (3)..(4): Xaa is C or S
SPXXVSQDLSPISILYIIGKTPKIYKQYEMIVKS

SEQ ID NO: 30151 - protein, 40 aa, Artificial Sequence
  GFR-binding peptide
  MOD_RES (6)..(7): Xaa is C or S
  MOD_RES (21)..(22)..(23)..(24)..(25): Xaa is A or G
  MOD_RES (26)..(27)..(28)..(29): Xaa is A or G or is absent
TVPKPXXAPTQLEPISVLYLXXXXXXXXXKFKYENMVVRA

SEQ ID NO: 30152 - protein, 36 aa, Artificial Sequence; identical to SEQ ID NO: 8800
  GFR-binding peptide
  MOD_RES (3)..(4): Xaa is C or S
  MOD_RES (18)..(19)..(20)..(21)..(22): Xaa is A or G
  MOD_RES (23)..(24)..(25)..(26): Xaa is A or G or is absent

SEQ ID NO: 30153 - protein, 39 aa, Artificial Sequence
  GFR-binding peptide
  MOD_RES (3)..(4)..(36)..(38): Xaa is C or S
ASXXVPARLNAISILYFDAANNVVLKKYRDMVVEAXGXR

SEQ ID NO: 30154 - protein, 34 aa, Artificial Sequence; identical to SEQ ID NO: 8802
  GFR-binding peptide
  MOD_RES (1)..(2): Xaa is C or S
  MOD_RES (16)..(17)..(18)..(19)..(20): Xaa is A or G
  MOD_RES (21)..(22)..(23)..(24): Xaa is A or G or is absent

SEQ ID NO: 30155 - protein, 36 aa, Artificial Sequence
  GFR-binding peptide
  MOD_RES (1)..(2)..(36): Xaa is C or S
  MOD_RES (16)..(17)..(18)..(19)..(20): Xaa is A or G
  MOD_RES (21)..(22)..(23)..(24): Xaa is A or G or is absent
XXVPTELEPISMLYLXXXXXXXXXKFKYEDMVVEGX

SEQ ID NO: 30156 - protein, 36 aa, Artificial Sequence
  GFR-binding peptide
  MOD_RES (3)..(4): Xaa is C or S
  MOD_RES (18)..(19)..(20)..(21)..(22): Xaa is A or G
  MOD_RES (23)..(24)..(25)..(26): Xaa is A or G or is absent
APXXVPQALEPISILYLXXXXXXXXXKFKYEMIVRS

SEQ ID NO: 30157 - protein, 40 aa, Artificial Sequence
  GFR-binding peptide
  MOD_RES (6)..(7): Xaa is C or S
  MOD_RES (21)..(22)..(23)..(24)..(25): Xaa is A or G
  MOD_RES (26)..(27)..(28)..(29): Xaa is A or G or is absent
SIPKAXXVPTELSPISMLYIXXXXXXXXXYKQYEEMVVEG

SEQ ID NO: 30158 - protein, 37 aa, Artificial Sequence
  GFR-binding peptide
  MOD_RES (34)..(36): Xaa is C or S
  MOD_RES (14)..(15)..(16)..(17)..(18): Xaa is A or G
  MOD_RES (19)..(20)..(21)..(22): Xaa is A or G or is absent
VPTELSPISMLYIXXXXXXXXXYKQYEDMVVEGXGXR

SEQ ID NO: 30159 - protein, 37 aa, Artificial Sequence; identical to SEQ ID NO: 8806
  GFR-binding peptide
  MOD_RES (3)..(4): Xaa is C or S
  MOD_RES (18)..(19)..(20)..(21)..(22): Xaa is A or G
  MOD_RES (23)..(24)..(25)..(26): Xaa is A or G or is absent

SEQ ID NO: 30160 - protein, 39 aa, Artificial Sequence
  GFR-binding peptide
  MOD_RES (6)..(7)..(39): Xaa is C or S
TVPKPXXAPTQLSPISVLYIDDSSNVIYKQYENMVVRAX

SEQ ID NO: 30161 - protein, 44 aa, Artificial Sequence; identical to SEQ ID NO: 8808
  GFR-binding peptide
  MOD_RES (6)..(7)..(41)..(43): Xaa is C or S
  MOD_RES (21)..(22)..(23)..(24)..(25): Xaa is A or G
  MOD_RES (26)..(27)..(28)..(29): Xaa is A or G or is absent

SEQ ID NO: 30162 - protein, 42 aa, Artificial Sequence; identical to SEQ ID NO: 8809
  GFR-binding peptide
  MOD_RES (5)..(6)..(39)..(41): Xaa is C or S
  MOD_RES (20)..(21)..(22)..(23)..(24): Xaa is A or G
  MOD_RES (25)..(26)..(27)..(28): Xaa is A or G or is absent

SEQ ID NO: 30163 - protein, 39 aa, Artificial Sequence
  GFR-binding peptide
  MOD_RES (6)..(7): Xaa is C or S
  MOD_RES (21)..(22)..(23)..(24)..(25): Xaa is A or G
  MOD_RES (26)..(27)..(28)..(29): Xaa is A or G or is absent
AAPASXXVPARLSPISILYIXXXXXXXXXYKQYEDMVVE

SEQ ID NO: 30164 - protein, 33 aa, Artificial Sequence; identical to SEQ ID NO: 8812
  GFR-binding peptide
  MOD_RES (33)..(33): Xaa is C or S
  MOD_RES (14)..(15)..(16)..(17)..(18): Xaa is A or G
  MOD_RES (19)..(20)..(21)..(22): Xaa is A or G or is absent

SEQ ID NO: 30165 - protein, 37 aa, Artificial Sequence
  GFR-binding peptide
  MOD_RES (6)..(7): Xaa is C or S
KIPKAXXVPTELEPISMLYLDENEKVVKFKYEDMVVE

SEQ ID NO: 30166 - protein, 40 aa, Artificial Sequence
  GFR-binding peptide
  MOD_RES (2)..(3)..(37)..(39): Xaa is C or S
  MOD_RES (17)..(18)..(19)..(20)..(21): Xaa is A or G
  MOD_RES (22)..(23)..(24)..(25): Xaa is A or G or is absent
AXXVPTKLNAISILYFXXXXXXXXXLKKYRGMAVSEXGXR

SEQ ID NO: 30167 - protein, 36 aa, Artificial Sequence
  GFR-binding peptide
  MOD_RES (3)..(4)..(36): Xaa is C or S
KPXXAPTKLSPISVLYIDDSSNVIYKQYENMVVRSX

SEQ ID NO: 30168 - protein, 38 aa, Artificial Sequence; identical to SEQ ID NO: 8816
  GFR-binding peptide
  MOD_RES (4)..(5)..(37): Xaa is C or S

SEQ ID NO: 30169 - protein, 36 aa, Artificial Sequence
  GFR-binding peptide
  MOD_RES (1)..(2)..(35): Xaa is C or S
  MOD_RES (16)..(17)..(18)..(19)..(20): Xaa is A or G
  MOD_RES (21)..(22)..(23)..(24): Xaa is A or G or is absent
XXVPQDLSPISILYIXXXXXXXXXYKQYEMVVKSXK

SEQ ID NO: 30170 - protein, 33 aa, Artificial Sequence; identical to SEQ ID NO: 8817
  GFR-binding peptide
  MOD_RES (14)..(15)..(16)..(17)..(18): Xaa is A or G
  MOD_RES (19)..(20)..(21)..(22): Xaa is A or G or is absent

SEQ ID NO: 30171 - protein, 32 aa, Artificial Sequence; identical to SEQ ID NO: 8818
  GFR-binding peptide
  MOD_RES (32)..(32): Xaa is C or S

SEQ ID NO: 30172 - protein, 39 aa, Artificial Sequence
  GFR-binding peptide
  MOD_RES (6)..(7)..(39): Xaa is C or S
KASKAXXVPTKLSPISILYKDKGVVTYLKYHYGMAVSEX

SEQ ID NO: 30173 - protein, 41 aa, Artificial Sequence
  GFR-binding peptide
  MOD_RES (7)..(39)..(41): Xaa is C or S
HVTKPTXAPTKLSPISVLYIDDSSNVIYKQYENMVVRSXGX

SEQ ID NO: 30174 - protein, 38 aa, Artificial Sequence
  GFR-binding peptide
  MOD_RES (3)..(4)..(36)..(38): Xaa is C or S
KAXXVPTELEPISMLYLDEYDKVVKFKYEEMVVEGXGX

SEQ ID NO: 30175 - protein, 39 aa, Artificial Sequence
  GFR-binding peptide
  MOD_RES (3)..(4)..(37)..(39): Xaa is C or S
  MOD_RES (18)..(19)..(20)..(21)..(22): Xaa is A or G
  MOD_RES (23)..(24)..(25)..(26): Xaa is A or G or is absent
SPXXVPQDLSPISILYIXXXXXXXXXYKQYEMVVKSXKX

SEQ ID NO: 30176 - protein, 32 aa, Artificial Sequence; identical to SEQ ID NO: 8821
  GFR-binding peptide
  MOD_RES (1)..(32): Xaa is C or S

SEQ ID NO: 30177 - protein, 41 aa, Artificial Sequence
  GFR-binding peptide
  MOD_RES (3)..(4)..(38)..(40): Xaa is C or S
  MOD_RES (18)..(19)..(20)..(21)..(22): Xaa is A or G
  MOD_RES (23)..(24)..(25)..(26): Xaa is A or G or is absent
ASXXVPARLSPISILYKXXXXXXXXXLKYHYDMVVEAXGXR

SEQ ID NO: 30178 - protein, 33 aa, Artificial Sequence
  GFR-binding peptide
  MOD_RES (14)..(15)..(16)..(17)..(18): Xaa is A or G
  MOD_RES (19)..(20)..(21)..(22): Xaa is A or G or is absent
VPTELEPISMLYLXXXXXXXXXKFKYEEMVVEG

SEQ ID NO: 30179 - protein, 39 aa, Artificial Sequence
  GFR-binding peptide
  MOD_RES (2)..(3)..(36)..(38): Xaa is C or S
  MOD_RES (17)..(18)..(19)..(20)..(21): Xaa is A or G
  MOD_RES (22)..(23)..(24)..(25): Xaa is A or G or is absent
PXXVPQDLSPISILYIXXXXXXXXXYKQYEMVVKSXKXS

SEQ ID NO: 30180 - protein, 39 aa, Artificial Sequence; identical to SEQ ID NO: 8823
  GFR-binding peptide
  MOD_RES (6)..(7)..(39): Xaa is C or S

SEQ ID NO: 30181 - protein, 36 aa, Artificial Sequence
  GFR-binding peptide
  MOD_RES (1)..(2): Xaa is C or S
  MOD_RES (16)..(17)..(18)..(19)..(20): Xaa is A or G
  MOD_RES (21)..(22)..(23)..(24): Xaa is A or G or is absent
XXVPTKLSPISVLYIXXXXXXXXXYKQYEEGMSVAE

SEQ ID NO: 30182 - protein, 36 aa, Artificial Sequence
  GFR-binding peptide
  MOD_RES (1)..(33)..(35): Xaa is C or S
XAPTQLEPISVLYLDDSSNVIKFKYENMVVRAXGXH

SEQ ID NO: 30183 - protein, 36 aa, Artificial Sequence; identical to SEQ ID NO: 8824
  GFR-binding peptide
  MOD_RES (1)..(2)..(33)..(35): Xaa is C or S

SEQ ID NO: 30184 - protein, 37 aa, Artificial Sequence
  GFR-binding peptide
  MOD_RES (4)..(5): Xaa is C or S
  MOD_RES (19)..(20)..(21)..(22)..(23): Xaa is A or G
  MOD_RES (24)..(25)..(26)..(27): Xaa is A or G or is absent
AAPXXVPQALEPISILYLXXXXXXXXXKFKYEMIVRS

SEQ ID NO: 30185 - protein, 34 aa, Artificial Sequence
  GFR-binding peptide
  MOD_RES (31)..(33): Xaa is C or S
VPQDLEPISILYLVGRTPKVKFKYEMVVKSXKXS

SEQ ID NO: 30186 - protein, 34 aa, Artificial Sequence
  GFR-binding peptide
  MOD_RES (1)..(2): Xaa is C or S
  MOD_RES (16)..(17)..(18)..(19)..(20): Xaa is A or G
  MOD_RES (21)..(22)..(23)..(24): Xaa is A or G or is absent
XXVPTELEPISMLYLXXXXXXXXXKFKYEDMVVE

SEQ ID NO: 30187 - protein, 44 aa, Artificial Sequence
  GFR-binding peptide
  MOD_RES (6)..(7)..(41)..(43): Xaa is C or S
  MOD_RES (21)..(22)..(23)..(24)..(25): Xaa is A or G
  MOD_RES (26)..(27)..(28)..(29): Xaa is A or G or is absent
KASKAXXVPTKLSPISILYKXXXXXXXXXLKYHYGMAVSEXGXR

SEQ ID NO: 30188 - protein, 37 aa, Artificial Sequence
  GFR-binding peptide
  MOD_RES (34)..(36): Xaa is C or S
  MOD_RES (14)..(15)..(16)..(17)..(18): Xaa is A or G
  MOD_RES (19)..(20)..(21)..(22): Xaa is A or G or is absent
APTKLEPISVLYLXXXXXXXXXKFKYENMVVRSXGXH

SEQ ID NO: 30189 - protein, 36 aa, Artificial Sequence; identical to SEQ ID NO: 8830
  GFR-binding peptide
  MOD_RES (2)..(3)..(35): Xaa is C or S

SEQ ID NO: 30190 - protein, 38 aa, Artificial Sequence
  GFR-binding peptide
  MOD_RES (3)..(4)..(35)..(37): Xaa is C or S
SPXXVPQDLSPISILYIVGRTPKVYKQYEMVVKSXKXS

SEQ ID NO: 30191 - protein, 40 aa, Artificial Sequence
  GFR-binding peptide
  MOD_RES (6)..(7): Xaa is C or S
  MOD_RES (21)..(22)..(23)..(24)..(25): Xaa is A or G
  MOD_RES (26)..(27)..(28)..(29): Xaa is A or G or is absent
KASKAXXVPTKLSPISILYIXXXXXXXXXYKQYEGMAVSE

SEQ ID NO: 30192 - protein, 35 aa, Artificial Sequence; identical to SEQ ID NO: 8833
  GFR-binding peptide
  MOD_RES (1)..(33)..(35): Xaa is C or S

SEQ ID NO: 30193 - protein, 39 aa, Artificial Sequence
  GFR-binding peptide
  MOD_RES (6)..(7)..(39): Xaa is C or S
AAPASXXVPARLSPISILYKDAANNVVLKYHYDMVVEAX

SEQ ID NO: 30194 - protein, 35 aa, Artificial Sequence; identical to SEQ ID NO: 8835
  GFR-binding peptide
  MOD_RES (32)..(34): Xaa is C or S

SEQ ID NO: 30195 - protein, 36 aa, Artificial Sequence
  GFR-binding peptide
  MOD_RES (1)..(2)..(34)..(36): Xaa is C or S
XXVPTKLNAISILYFDKGVVTYLKKYRGMAVSEXGX

SEQ ID NO: 30196 - protein, 41 aa, Artificial Sequence; identical to SEQ ID NO: 8836
  GFR-binding peptide
  MOD_RES (6)..(38)..(40): Xaa is C or S

SEQ ID NO: 30197 - protein, 39 aa, Artificial Sequence
  GFR-binding peptide
  MOD_RES (5)..(6)..(38): Xaa is C or S
VPKAXXAPTKLEPISVLYLDSSNNVIKFKYENMVVKAXG

SEQ ID NO: 30198 - protein, 37 aa, Artificial Sequence
  GFR-binding peptide
  MOD_RES (3)..(4)..(36): Xaa is C or S
KPXXAPTKLEPISVLYLDDSSNVIKFKYENMVVRSXG

SEQ ID NO: 30199 - protein, 38 aa, Artificial Sequence
  GFR-binding peptide
  MOD_RES (2)..(3)..(37): Xaa is C or S
  MOD_RES (17)..(18)..(19)..(20)..(21): Xaa is A or G
  MOD_RES (22)..(23)..(24)..(25): Xaa is A or G or is absent
AXXVPTELSPISMLYIXXXXXXXXXYKQYEDMVVEGXG

SEQ ID NO: 30200 - protein, 42 aa, Artificial Sequence
  GFR-binding peptide
  MOD_RES (6)..(7)..(39)..(41): Xaa is C or S
YVPKPXXAPTKLEPISVLYLDDSSNVIKFKYENMVVRSXGXH

SEQ ID NO: 30201 - protein, 38 aa, Artificial Sequence
  GFR-binding peptide
  MOD_RES (1)..(35)..(37): Xaa is C or S
  MOD_RES (15)..(16)..(17)..(18)..(19): Xaa is A or G
  MOD_RES (20)..(21)..(22)..(23): Xaa is A or G or is absent
XVPTKLSPISILYKXXXXXXXXXLKYHYGMAVSEXGXR

SEQ ID NO: 30202 - protein, 37 aa, Artificial Sequence; identical to SEQ ID NO: 8842
  GFR-binding peptide
  MOD_RES (3)..(4): Xaa is C or S
  MOD_RES (18)..(19)..(20)..(21)..(22): Xaa is A or G
  MOD_RES (23)..(24)..(25)..(26): Xaa is A or G or is absent

SEQ ID NO: 30203 - protein, 36 aa, Artificial Sequence
  GFR-binding peptide
  MOD_RES (1)..(34)..(36): Xaa is C or S
  MOD_RES (15)..(16)..(17)..(18)..(19): Xaa is A or G
  MOD_RES (20)..(21)..(22)..(23): Xaa is A or G or is absent
XVSQDLEPISILYLXXXXXXXXXKFKYEMIVKSXKX

SEQ ID NO: 30204 - protein, 34 aa, Artificial Sequence
  GFR-binding peptide
  MOD_RES (1)..(2): Xaa is C or S
  MOD_RES (16)..(17)..(18)..(19)..(20): Xaa is A or G
  MOD_RES (21)..(22)..(23)..(24): Xaa is A or G or is absent
XXAPTKLSPISVLYIXXXXXXXXXYKQYENMVVK

SEQ ID NO: 30205 - protein, 36 aa, Artificial Sequence; identical to SEQ ID NO: 8843
  GFR-binding peptide
  MOD_RES (1)..(2)..(36): Xaa is C or S
  MOD_RES (16)..(17)..(18)..(19)..(20): Xaa is A or G
  MOD_RES (21)..(22)..(23)..(24): Xaa is A or G or is absent

SEQ ID NO: 30206 - protein, 32 aa, Artificial Sequence; identical to SEQ ID NO: 8845
  GFR-binding peptide
  MOD_RES (1)..(2): Xaa is C or S

SEQ ID NO: 30207 - protein, 35 aa, Artificial Sequence; identical to SEQ ID NO: 8848
  GFR-binding peptide
  MOD_RES (1)..(2)..(34): Xaa is C or S

SEQ ID NO: 30208 - protein, 34 aa, Artificial Sequence
  GFR-binding peptide
  MOD_RES (1)..(2): Xaa is C or S
  MOD_RES (16)..(17)..(18)..(19)..(20): Xaa is A or G
  MOD_RES (21)..(22)..(23)..(24): Xaa is A or G or is absent
XXAPTKLSPISVLYIXXXXXXXXXYKQYENMVVR

SEQ ID NO: 30209 - protein, 34 aa, Artificial Sequence; identical to SEQ ID NO: 8849
  GFR-binding peptide
  MOD_RES (1)..(32)..(34): Xaa is C or S

SEQ ID NO: 30210 - protein, 38 aa, Artificial Sequence
  GFR-binding peptide
  MOD_RES (2)..(3)..(38): Xaa is C or S
  MOD_RES (17)..(18)..(19)..(20)..(21): Xaa is A or G
  MOD_RES (22)..(23)..(24)..(25): Xaa is A or G or is absent
AXXVPTKLEPISVLYLXXXXXXXXXKFKYEEGMSVAEX

SEQ ID NO: 30211 - protein, 34 aa, Artificial Sequence; identical to SEQ ID NO: 8851
  GFR-binding peptide
  MOD_RES (1)..(2): Xaa is C or S
  MOD_RES (16)..(17)..(18)..(19)..(20): Xaa is A or G
  MOD_RES (21)..(22)..(23)..(24): Xaa is A or G or is absent

SEQ ID NO: 30212 - protein, 38 aa, Artificial Sequence
  GFR-binding peptide
  MOD_RES (1)..(35)..(37): Xaa is C or S
  MOD_RES (15)..(16)..(17)..(18)..(19): Xaa is A or G
  MOD_RES (20)..(21)..(22)..(23): Xaa is A or G or is absent
XVPTELEPISMLYLXXXXXXXXXKFKYEDMVVEGXGXR

SEQ ID NO: 30213 - protein, 37 aa, Artificial Sequence
  GFR-binding peptide
  MOD_RES (1)..(2)..(37): Xaa is C or S
  MOD_RES (16)..(17)..(18)..(19)..(20): Xaa is A or G
  MOD_RES (21)..(22)..(23)..(24): Xaa is A or G or is absent
XXVPTKLSPISVLYIXXXXXXXXXYKQYEEGMSVAEX

SEQ ID NO: 30214 - protein, 35 aa, Artificial Sequence
  GFR-binding peptide
  MOD_RES (4)..(5): Xaa is C or S
SKAXXVPTKLSPISILYIDKGVVTYYKQYEGMAVS

SEQ ID NO: 30215 - protein, 41 aa, Artificial Sequence
  GFR-binding peptide
  MOD_RES (5)..(6)..(40): Xaa is C or S
  MOD_RES (20)..(21)..(22)..(23)..(24): Xaa is A or G
  MOD_RES (25)..(26)..(27)..(28): Xaa is A or G or is absent
VPKPXXAPTQLEPISVLYLXXXXXXXXXKFKYENMVVRAXG

SEQ ID NO: 30216 - protein, 37 aa, Artificial Sequence; identical to SEQ ID NO: 8853
  GFR-binding peptide
  MOD_RES (4)..(5): Xaa is C or S
  MOD_RES (19)..(20)..(21)..(22)..(23): Xaa is A or G
  MOD_RES (24)..(25)..(26)..(27): Xaa is A or G or is absent

SEQ ID NO: 30217 - protein, 33 aa, Artificial Sequence; identical to SEQ ID NO: 8854
  GFR-binding peptide
  MOD_RES (14)..(15)..(16)..(17)..(18): Xaa is A or G
  MOD_RES (19)..(20)..(21)..(22): Xaa is A or G or is absent

SEQ ID NO: 30218 - protein, 37 aa, Artificial Sequence
  GFR-binding peptide
  MOD_RES (1)..(35)..(37): Xaa is C or S
  MOD_RES (15)..(16)..(17)..(18)..(19): Xaa is A or G
  MOD_RES (20)..(21)..(22)..(23): Xaa is A or G or is absent
XAPTKLSPISVLYIXXXXXXXXXYKQYENMVVRSXGX

SEQ ID NO: 30219 - protein, 39 aa, Artificial Sequence
  GFR-binding peptide
  MOD_RES (1)..(36)..(38): Xaa is C or S
  MOD_RES (15)..(16)..(17)..(18)..(19): Xaa is A or G
  MOD_RES (20)..(21)..(22)..(23): Xaa is A or G or is absent
XVPTKLSPISVLYIXXXXXXXXXYKQYEEGMSVAEXGXR

SEQ ID NO: 30220 - protein, 38 aa, Artificial Sequence
  GFR-binding peptide
  MOD_RES (6)..(7): Xaa is C or S
AAPASXXVPARLEPISILYLDAANNVVKFKYEDMVVEA

SEQ ID NO: 30221 - protein, 38 aa, Artificial Sequence; identical to SEQ ID NO: 8856
  GFR-binding peptide
  MOD_RES (6)..(7)..(38): Xaa is C or S

SEQ ID NO: 30222 - protein, 42 aa, Artificial Sequence
  GFR-binding peptide
  MOD_RES (5)..(6)..(40)..(42): Xaa is C or S
  MOD_RES (20)..(21)..(22)..(23)..(24): Xaa is A or G
  MOD_RES (25)..(26)..(27)..(28): Xaa is A or G or is absent
IPKAXXVPTELSPISMLYIXXXXXXXXXYKQYEEMVVEGXGX

SEQ ID NO: 30223 - protein, 36 aa, Artificial Sequence; identical to SEQ ID NO: 8858
  GFR-binding peptide
  MOD_RES (3)..(4)..(35): Xaa is C or S

SEQ ID NO: 30224 - protein, 38 aa, Artificial Sequence; identical to SEQ ID NO: 8859
  GFR-binding peptide
  MOD_RES (3)..(4)..(38): Xaa is C or S
  MOD_RES (18)..(19)..(20)..(21)..(22): Xaa is A or G
  MOD_RES (23)..(24)..(25)..(26): Xaa is A or G or is absent

SEQ ID NO: 30225 - protein, 37 aa, Artificial Sequence; identical to SEQ ID NO: 8860
  GFR-binding peptide
  MOD_RES (5)..(6)..(37): Xaa is C or S

SEQ ID NO: 30226 - protein, 33 aa, Artificial Sequence
  GFR-binding peptide
  MOD_RES (1)..(1): Xaa is C or S
  MOD_RES (15)..(16)..(17)..(18)..(19): Xaa is A or G
  MOD_RES (20)..(21)..(22)..(23): Xaa is A or G or is absent
XVPQDLEPISILYLXXXXXXXXXKFKYEMVVKS

SEQ ID NO: 30227 - protein, 44 aa, Artificial Sequence; identical to SEQ ID NO: 8862
  GFR-binding peptide
  MOD_RES (6)..(7)..(41)..(43): Xaa is C or S
  MOD_RES (21)..(22)..(23)..(24)..(25): Xaa is A or G
  MOD_RES (26)..(27)..(28)..(29): Xaa is A or G or is absent

SEQ ID NO: 30228 - protein, 36 aa, Artificial Sequence
  GFR-binding peptide
  MOD_RES (2)..(3)..(34)..(36): Xaa is C or S
PXXVPQALSPISILYIVGRKPKVYKQYEMIVRSXKX

SEQ ID NO: 30229 - protein, 42 aa, Artificial Sequence; identical to SEQ ID NO: 8867
  GFR-binding peptide
  MOD_RES (4)..(5)..(39)..(41): Xaa is C or S
  MOD_RES (19)..(20)..(21)..(22)..(23): Xaa is A or G
  MOD_RES (24)..(25)..(26)..(27): Xaa is A or G or is absent

SEQ ID NO: 30230 - protein, 35 aa, Artificial Sequence; identical to SEQ ID NO: 8868
  GFR-binding peptide
  MOD_RES (3)..(4)..(35): Xaa is C or S

SEQ ID NO: 30231 - protein, 39 aa, Artificial Sequence; identical to SEQ ID NO: 8870
  GFR-binding peptide
  MOD_RES (2)..(3)..(37)..(39): Xaa is C or S
  MOD_RES (17)..(18)..(19)..(20)..(21): Xaa is A or G
  MOD_RES (22)..(23)..(24)..(25): Xaa is A or G or is absent

SEQ ID NO: 30232 - protein, 40 aa, Artificial Sequence
  GFR-binding peptide
  MOD_RES (4)..(5)..(37)..(39): Xaa is C or S
PKPXXAPTKLEPISVLYLDDSSNVIKFKYENMVVRSXGXH

SEQ ID NO: 30233 - protein, 36 aa, Artificial Sequence; identical to SEQ ID NO: 8871
  GFR-binding peptide
  MOD_RES (4)..(5): Xaa is C or S

SEQ ID NO: 30234 - protein, 34 aa, Artificial Sequence
  GFR-binding peptide
  MOD_RES (1)..(33): Xaa is C or S
XVPTKLNAISILYFDKGVVTYLKKYRGMAVSEXG

SEQ ID NO: 30235 - protein, 33 aa, Artificial Sequence
  GFR-binding peptide
  MOD_RES (2)..(3): Xaa is C or S
SXXVPARLEPISILYLDAANNVVKFKYEDMVVE

SEQ ID NO: 30236 - protein, 41 aa, Artificial Sequence; identical to SEQ ID NO: 8872
  GFR-binding peptide
  MOD_RES (7)..(39)..(41): Xaa is C or S

SEQ ID NO: 30237 - protein, 38 aa, Artificial Sequence; identical to SEQ ID NO: 8873
  GFR-binding peptide
  MOD_RES (5)..(6)..(38): Xaa is C or S

SEQ ID NO: 30238 - protein, 36 aa, Artificial Sequence; identical to SEQ ID NO: 8874
  GFR-binding peptide
  MOD_RES (3)..(4): Xaa is C or S

SEQ ID NO: 30239 - protein, 37 aa, Artificial Sequence
  GFR-binding peptide
  MOD_RES (3)..(4)..(37): Xaa is C or S
KAXXVPTKLEPISVLYLDDMGVPTKFKYEEGMSVAEX

SEQ ID NO: 30240 - protein, 41 aa, Artificial Sequence
  GFR-binding peptide
  MOD_RES (6)..(7): Xaa is C or S
  MOD_RES (21)..(22)..(23)..(24)..(25): Xaa is A or G
  MOD_RES (26)..(27)..(28)..(29): Xaa is A or G or is absent
KVGKAXXVPTKLEPISVLYLXXXXXXXXXKFKYEEGMSVAE

SEQ ID NO: 30241 - protein, 37 aa, Artificial Sequence
  GFR-binding peptide
  MOD_RES (1)..(2)..(35)..(37): Xaa is C or S
  MOD_RES (16)..(17)..(18)..(19)..(20): Xaa is A or G
  MOD_RES (21)..(22)..(23)..(24): Xaa is A or G or is absent
XXVPQALSPISILYIXXXXXXXXXYKQYEMIVRSXKX

SEQ ID NO: 30242 - protein, 31 aa, Artificial Sequence; identical to SEQ ID NO: 8880
  GFR-binding peptide
  MOD_RES (31)..(31): Xaa is C or S

SEQ ID NO: 30243 - protein, 39 aa, Artificial Sequence
  GFR-binding peptide
  MOD_RES (6)..(7)..(39): Xaa is C or S
KIPKAXXVPTELSPISMLYIDENEKVVYKQYEDMVVEGX

SEQ ID NO: 30244 - protein, 40 aa, Artificial Sequence; identical to SEQ ID NO: 8885
  GFR-binding peptide
  MOD_RES (6)..(7): Xaa is C or S
  MOD_RES (21)..(22)..(23)..(24)..(25): Xaa is A or G
  MOD_RES (26)..(27)..(28)..(29): Xaa is A or G or is absent

SEQ ID NO: 30245 - protein, 41 aa, Artificial Sequence
  GFR-binding peptide
  MOD_RES (5)..(6)..(40): Xaa is C or S
  MOD_RES (20)..(21)..(22)..(23)..(24): Xaa is A or G
  MOD_RES (25)..(26)..(27)..(28): Xaa is A or G or is absent
ASKAXXVPTKLSPISILYIXXXXXXXXXYKQYEGMAVSEXG

SEQ ID NO: 30246 - protein, 35 aa, Artificial Sequence; identical to SEQ ID NO: 8887
  GFR-binding peptide
  MOD_RES (2)..(2): Xaa is C or S
  MOD_RES (16)..(17)..(18)..(19)..(20): Xaa is A or G
  MOD_RES (21)..(22)..(23)..(24): Xaa is A or G or is absent

SEQ ID NO: 30247 - protein, 33 aa, Artificial Sequence
  GFR-binding peptide
  MOD_RES (1)..(1): Xaa is C or S
  MOD_RES (15)..(16)..(17)..(18)..(19): Xaa is A or G
  MOD_RES (20)..(21)..(22)..(23): Xaa is A or G or is absent
XAPTKLEPISVLYLXXXXXXXXXKFKYENMVVR

SEQ ID NO: 30248 - protein, 31 aa, Artificial Sequence
  GFR-binding peptide
  MOD_RES (1)..(1): Xaa is C or S
XVSQDLSPISILYIIGKTPKIYKQYEMIVKS

SEQ ID NO: 30249 - protein, 33 aa, Artificial Sequence
  GFR-binding peptide
  MOD_RES (1)..(1): Xaa is C or S
  MOD_RES (15)..(16)..(17)..(18)..(19): Xaa is A or G
  MOD_RES (20)..(21)..(22)..(23): Xaa is A or G or is absent
XAPTKLEPISVLYLXXXXXXXXXKFKYENMVVK

SEQ ID NO: 30250 - protein, 33 aa, Artificial Sequence
  GFR-binding peptide
  MOD_RES (14)..(15)..(16)..(17)..(18): Xaa is A or G
  MOD_RES (19)..(20)..(21)..(22): Xaa is A or G or is absent
APTKLSPISVLYIXXXXXXXXXYKQYENMVVKA

SEQ ID NO: 30251 - protein, 37 aa, Artificial Sequence; identical to SEQ ID NO: 8889
  GFR-binding peptide
  MOD_RES (1)..(2)..(35)..(37): Xaa is C or S
  MOD_RES (16)..(17)..(18)..(19)..(20): Xaa is A or G
  MOD_RES (21)..(22)..(23)..(24): Xaa is A or G or is absent

SEQ ID NO: 30252 - protein, 36 aa, Artificial Sequence
  GFR-binding peptide
  MOD_RES (3)..(4)..(36): Xaa is C or S
ASXXVPARLSPISILYKDAANNVVLKYHYDMVVEAX

SEQ ID NO: 30253 - protein, 36 aa, Artificial Sequence
  GFR-binding peptide
  MOD_RES (5)..(6): Xaa is C or S
VPKAXXAPTKLSPISVLYIDSSNNVIYKQYENMVVK

SEQ ID NO: 30254 - protein, 35 aa, Artificial Sequence; identical to SEQ ID NO: 8891
  GFR-binding peptide
  MOD_RES (1)..(2)..(34): Xaa is C or S

SEQ ID NO: 30255 - protein, 42 aa, Artificial Sequence
  GFR-binding peptide
  MOD_RES (6)..(40)..(42): Xaa is C or S
  MOD_RES (20)..(21)..(22)..(23)..(24): Xaa is A or G
  MOD_RES (25)..(26)..(27)..(28): Xaa is A or G or is absent
VTKPTXAPTKLEPISVLYLXXXXXXXXXKFKYENMVVRSXGX

SEQ ID NO: 30256 - protein, 37 aa, Artificial Sequence; identical to SEQ ID NO: 8893
  GFR-binding peptide
  MOD_RES (2)..(3)..(36): Xaa is C or S
  MOD_RES (17)..(18)..(19)..(20)..(21): Xaa is A or G
  MOD_RES (22)..(23)..(24)..(25): Xaa is A or G or is absent

SEQ ID NO: 30257 - protein, 36 aa, Artificial Sequence
  GFR-binding peptide
  MOD_RES (5)..(6): Xaa is C or S
ASKAXXVPTKLNAISILYFDKGVVTYLKKYRGMAVS

SEQ ID NO: 30258 - protein, 35 aa, Artificial Sequence
  GFR-binding peptide
  MOD_RES (1)..(34): Xaa is C or S
  MOD_RES (15)..(16)..(17)..(18)..(19): Xaa is A or G
  MOD_RES (20)..(21)..(22)..(23): Xaa is A or G or is absent
XVPQDLSPISILYIXXXXXXXXXYKQYEMVVKSXK

SEQ ID NO: 30259 - protein, 37 aa, Artificial Sequence; identical to SEQ ID NO: 8895
  GFR-binding peptide
  MOD_RES (6)..(7): Xaa is C or S

SEQ ID NO: 30260 - protein, 36 aa, Artificial Sequence
  GFR-binding peptide
  MOD_RES (1)..(2)..(34)..(36): Xaa is C or S
XXAPTKLSPISVLYIDSSNNVIYKQYENMVVKAXGX

SEQ ID NO: 30261 - protein, 42 aa, Artificial Sequence; identical to SEQ ID NO: 8896
  GFR-binding peptide
  MOD_RES (5)..(6)..(41): Xaa is C or S
  MOD_RES (20)..(21)..(22)..(23)..(24): Xaa is A or G
  MOD_RES (25)..(26)..(27)..(28): Xaa is A or G or is absent

SEQ ID NO: 30262 - protein, 36 aa, Artificial Sequence
  GFR-binding peptide
  MOD_RES (2)..(3)..(35): Xaa is C or S
AXXVPTELEPISMLYLDENEKVVKFKYEDMVVEGXG

SEQ ID NO: 30263 - protein, 41 aa, Artificial Sequence; identical to SEQ ID NO: 8899
  GFR-binding peptide
  MOD_RES (5)..(6)..(41): Xaa is C or S
  MOD_RES (20)..(21)..(22)..(23)..(24): Xaa is A or G
  MOD_RES (25)..(26)..(27)..(28): Xaa is A or G or is absent

SEQ ID NO: 30264 - protein, 35 aa, Artificial Sequence
  GFR-binding peptide
  MOD_RES (1)..(2)..(34): Xaa is C or S
XXVPARLNAISILYFDAANNVVLKKYRDMVVEAXG

SEQ ID NO: 30265 - protein, 39 aa, Artificial Sequence
  GFR-binding peptide
  MOD_RES (4)..(5)..(37)..(39): Xaa is C or S
PKAXXVPTELEPISMLYLDEYDKVVKFKYEEMVVEGXGX

SEQ ID NO: 30266 - protein, 33 aa, Artificial Sequence
  GFR-binding peptide
  MOD_RES (1)..(1): Xaa is C or S
  MOD_RES (15)..(16)..(17)..(18)..(19): Xaa is A or G
  MOD_RES (20)..(21)..(22)..(23): Xaa is A or G or is absent
XVPQDLSPISILYIXXXXXXXXXYKQYEMVVKS

SEQ ID NO: 30267 - protein, 37 aa, Artificial Sequence
  GFR-binding peptide
  MOD_RES (1)..(2)..(36): Xaa is C or S
  MOD_RES (16)..(17)..(18)..(19)..(20): Xaa is A or G
  MOD_RES (21)..(22)..(23)..(24): Xaa is A or G or is absent
XXAPTKLEPISVLYLXXXXXXXXXKFKYENMVVRSXG

SEQ ID NO: 30268 - protein, 34 aa, Artificial Sequence; identical to SEQ ID NO: 8903
  GFR-binding peptide
  MOD_RES (34)..(34): Xaa is C or S
  MOD_RES (14)..(15)..(16)..(17)..(18): Xaa is A or G
  MOD_RES (19)..(20)..(21)..(22): Xaa is A or G or is absent

SEQ ID NO: 30269 - protein, 35 aa, Artificial Sequence
  GFR-binding peptide
  MOD_RES (1)..(2)..(34): Xaa is C or S
XXAPTKLEPISVLYLDSSNNVIKFKYENMVVKAXG

SEQ ID NO: 30270 - protein, 35 aa, Artificial Sequence
  GFR-binding peptide
  MOD_RES (1)..(2)..(34): Xaa is C or S
XXVPARLEPISILYLDAANNVVKFKYEDMVVEAXG

SEQ ID NO: 30271 - protein, 41 aa, Artificial Sequence
  GFR-binding peptide
  MOD_RES (3)..(4)..(38)..(40): Xaa is C or S
  MOD_RES (18)..(19)..(20)..(21)..(22): Xaa is A or G
  MOD_RES (23)..(24)..(25)..(26): Xaa is A or G or is absent
KAXXVPTELSPISMLYIXXXXXXXXXYKQYEEMVVEGXGXR

SEQ ID NO: 30272 - protein, 35 aa, Artificial Sequence; identical to SEQ ID NO: 8907
  GFR-binding peptide
  MOD_RES (1)..(32)..(34): Xaa is C or S

SEQ ID NO: 30273 - protein, 35 aa, Artificial Sequence
  GFR-binding peptide
  MOD_RES (1)..(2)..(34): Xaa is C or S
XXAPTKLSPISVLYIDDSSNVIYKQYENMVVRSXG

SEQ ID NO: 30274 - protein, 39 aa, Artificial Sequence
  GFR-binding peptide
  MOD_RES (5)..(6)..(38): Xaa is C or S
VPKPXXAPTQLSPISVLYIDDSSNVIYKQYENMVVRAXG

SEQ ID NO: 30275 - protein, 36 aa, Artificial Sequence
  GFR-binding peptide
  MOD_RES (5)..(6): Xaa is C or S
SAAPXXVPQALEPISILYLVGRKPKVKFKYEMIVRS

SEQ ID NO: 30276 - protein, 31 aa, Artificial Sequence
  GFR-binding peptide
  MOD_RES (1)..(1): Xaa is C or S
XAPTKLEPISVLYLDSSNNVIKFKYENMVVK

SEQ ID NO: 30277 - protein, 35 aa, Artificial Sequence
  GFR-binding peptide
  MOD_RES (1)..(33)..(35): Xaa is C or S
XVPARLSPISILYKDAANNVVLKYHYDMVVEAXGX

SEQ ID NO: 30278 - protein, 32 aa, Artificial Sequence
  GFR-binding peptide
VPTKLSPISVLYIDDMGVPTYKQYEEGMSVAE

SEQ ID NO: 30279 - protein, 42 aa, Artificial Sequence
  GFR-binding peptide
  MOD_RES (5)..(6)..(40)..(42): Xaa is C or S
  MOD_RES (20)..(21)..(22)..(23)..(24): Xaa is A or G
  MOD_RES (25)..(26)..(27)..(28): Xaa is A or G or is absent
IPKAXXVPTELSPISMLYIXXXXXXXXXYKQYEDMVVEGXGX

SEQ ID NO: 30280 - protein, 42 aa, Artificial Sequence
  GFR-binding peptide
  MOD_RES (3)..(4)..(39)..(41): Xaa is C or S
  MOD_RES (18)..(19)..(20)..(21)..(22): Xaa is A or G
  MOD_RES (23)..(24)..(25)..(26): Xaa is A or G or is absent
KAXXVPTKLSPISVLYIXXXXXXXXXYKQYEEGMSVAEXGXR

SEQ ID NO: 30281 - protein, 36 aa, Artificial Sequence
  GFR-binding peptide
  MOD_RES (1)..(33)..(35): Xaa is C or S
XVPTELEPISMLYLDEYDKVVKFKYEEMVVEGXGXR

SEQ ID NO: 30282 - protein, 43 aa, Artificial Sequence
  GFR-binding peptide
  MOD_RES (6)..(7)..(41)..(43): Xaa is C or S
  MOD_RES (21)..(22)..(23)..(24)..(25): Xaa is A or G
  MOD_RES (26)..(27)..(28)..(29): Xaa is A or G or is absent
AAPASXXVPARLNAISILYFXXXXXXXXXLKKYRDMVVEAXGX

SEQ ID NO: 30283 - protein, 34 aa, Artificial Sequence
  GFR-binding peptide
  MOD_RES (1)..(2): Xaa is C or S
  MOD_RES (16)..(17)..(18)..(19)..(20): Xaa is A or G
  MOD_RES (21)..(22)..(23)..(24): Xaa is A or G or is absent
XXVPQDLSPISILYIXXXXXXXXXYKQYEMVVKS

SEQ ID NO: 30284 - protein, 34 aa, Artificial Sequence; identical to SEQ ID NO: 8911
  GFR-binding peptide
  MOD_RES (1)..(32)..(34): Xaa is C or S

SEQ ID NO: 30285 - protein, 36 aa, Artificial Sequence
  GFR-binding peptide
  MOD_RES (3)..(4): Xaa is C or S
  MOD_RES (18)..(19)..(20)..(21)..(22): Xaa is A or G
  MOD_RES (23)..(24)..(25)..(26): Xaa is A or G or is absent
KAXXVPTKLSPISILYKXXXXXXXXXLKYHYGMAVS

SEQ ID NO: 30286 - protein, 41 aa, Artificial Sequence; identical to SEQ ID NO: 8913
  GFR-binding peptide
  MOD_RES (6)..(7)..(40): Xaa is C or S
  MOD_RES (21)..(22)..(23)..(24)..(25): Xaa is A or G
  MOD_RES (26)..(27)..(28)..(29): Xaa is A or G or is absent

SEQ ID NO: 30287 - protein, 38 aa, Artificial Sequence; identical to SEQ ID NO: 8914
  GFR-binding peptide
  MOD_RES (5)..(6): Xaa is C or S
  MOD_RES (20)..(21)..(22)..(23)..(24): Xaa is A or G
  MOD_RES (25)..(26)..(27)..(28): Xaa is A or G or is absent

SEQ ID NO: 30288 - protein, 32 aa, Artificial Sequence
  GFR-binding peptide
  MOD_RES (1)..(2): Xaa is C or S
XXVPTKLSPISILYIDKGVVTYYKQYEGMAVS

SEQ ID NO: 30289 - protein, 34 aa, Artificial Sequence
  GFR-binding peptide
  MOD_RES (2)..(3): Xaa is C or S
AXXVPTKLNAISILYFDKGVVTYLKKYRGMAVSE

SEQ ID NO: 30290 - protein, 39 aa, Artificial Sequence
  GFR-binding peptide
  MOD_RES (5)..(6): Xaa is C or S
  MOD_RES (20)..(21)..(22)..(23)..(24): Xaa is A or G
  MOD_RES (25)..(26)..(27)..(28): Xaa is A or G or is absent
IPKAXXVPTELEPISMLYLXXXXXXXXXKFKYEEMVVEG

SEQ ID NO: 30291 - protein, 36 aa, Artificial Sequence
  GFR-binding peptide
  MOD_RES (2)..(3)..(35): Xaa is C or S
AXXVPTKLSPISILYIDKGVVTYYKQYEGMAVSEXG

SEQ ID NO: 30292 - protein, 41 aa, Artificial Sequence
  GFR-binding peptide
  MOD_RES (5)..(6)..(40): Xaa is C or S
  MOD_RES (20)..(21)..(22)..(23)..(24): Xaa is A or G
  MOD_RES (25)..(26)..(27)..(28): Xaa is A or G or is absent
IPKAXXVPTELSPISMLYIXXXXXXXXXYKQYEEMVVEGXG

SEQ ID NO: 30293 - protein, 39 aa, Artificial Sequence
  GFR-binding peptide
  MOD_RES (1)..(2)..(36)..(38): Xaa is C or S
  MOD_RES (16)..(17)..(18)..(19)..(20): Xaa is A or G
  MOD_RES (21)..(22)..(23)..(24): Xaa is A or G or is absent
XXVPTELSPISMLYIXXXXXXXXXYKQYEDMVVEGXGXR

SEQ ID NO: 30294 - protein, 39 aa, Artificial Sequence; identical to SEQ ID NO: 8919
  GFR-binding peptide
  MOD_RES (2)..(3)..(36)..(38): Xaa is C or S

SEQ ID NO: 30295 - protein, 35 aa, Artificial Sequence
  GFR-binding peptide
  MOD_RES (4)..(5): Xaa is C or S
AAPXXVPQALSPISILYIVGRKPKVYKQYEMIVRS

SEQ ID NO: 30296 - protein, 38 aa, Artificial Sequence; identical to SEQ ID NO: 8920
  GFR-binding peptide
  MOD_RES (3)..(4)..(36)..(38): Xaa is C or S

SEQ ID NO: 30297 - protein, 45 aa, Artificial Sequence; identical to SEQ ID NO: 8922
  GFR-binding peptide
  MOD_RES (6)..(7)..(42)..(44): Xaa is C or S
  MOD_RES (21)..(22)..(23)..(24)..(25): Xaa is A or G
  MOD_RES (26)..(27)..(28)..(29): Xaa is A or G or is absent

SEQ ID NO: 30298 - protein, 37 aa, Artificial Sequence; identical to SEQ ID NO: 8923
  GFR-binding peptide
  MOD_RES (3)..(4)..(37): Xaa is C or S

SEQ ID NO: 30299 - protein, 36 aa, Artificial Sequence; identical to SEQ ID NO: 8924
  GFR-binding peptide
  MOD_RES (1)..(33)..(35): Xaa is C or S

SEQ ID NO: 30300 - protein, 33 aa, Artificial Sequence; identical to SEQ ID NO: 8925
  GFR-binding peptide
  MOD_RES (1)..(1): Xaa is C or S
  MOD_RES (15)..(16)..(17)..(18)..(19): Xaa is A or G
  MOD_RES (20)..(21)..(22)..(23): Xaa is A or G or is absent

SEQ ID NO: 30301 - protein, 40 aa, Artificial Sequence; identical to SEQ ID NO: 8926
  GFR-binding peptide
  MOD_RES (5)..(6)..(38)..(40): Xaa is C or S

SEQ ID NO: 30302 - protein, 34 aa, Artificial Sequence
  GFR-binding peptide
  MOD_RES (1)..(2): Xaa is C or S
  MOD_RES (16)..(17)..(18)..(19)..(20): Xaa is A or G
  MOD_RES (21)..(22)..(23)..(24): Xaa is A or G or is absent
XXAPTKLEPISVLYLXXXXXXXXXKFKYENMVVR

SEQ ID NO: 30303 - protein, 39 aa, Artificial Sequence
  GFR-binding peptide
  MOD_RES (6)..(7): Xaa is C or S
  MOD_RES (21)..(22)..(23)..(24)..(25): Xaa is A or G
  MOD_RES (26)..(27)..(28)..(29): Xaa is A or G or is absent
YVPKPXXAPTKLSPISVLYIXXXXXXXXXYKQYENMVVR

SEQ ID NO: 30304 - protein, 35 aa, Artificial Sequence
  GFR-binding peptide
  MOD_RES (3)..(35): Xaa is C or S
PTXAPTKLSPISVLYIDDSSNVIYKQYENMVVRSX

SEQ ID NO: 30305 - protein, 39 aa, Artificial Sequence
  GFR-binding peptide
  MOD_RES (6)..(7)..(39): Xaa is C or S
YVPKPXXAPTKLEPISVLYLDDSSNVIKFKYENMVVRSX

SEQ ID NO: 30306 - protein, 41 aa, Artificial Sequence
  GFR-binding peptide
  MOD_RES (7)..(39)..(41): Xaa is C or S
HVTKPTXAPTKLEPISVLYLDDSSNVIKFKYENMVVRSXGX

SEQ ID NO: 30307 - protein, 35 aa, Artificial Sequence
  GFR-binding peptide
  MOD_RES (1)..(35): Xaa is C or S
  MOD_RES (15)..(16)..(17)..(18)..(19): Xaa is A or G
  MOD_RES (20)..(21)..(22)..(23): Xaa is A or G or is absent
XVPTELSPISMLYIXXXXXXXXXYKQYEEMVVEGX

SEQ ID NO: 30308 - protein, 32 aa, Artificial Sequence; identical to SEQ ID NO: 8933
  GFR-binding peptide
  MOD_RES (14)..(15)..(16)..(17)..(18): Xaa is A or G
  MOD_RES (19)..(20)..(21)..(22): Xaa is A or G or is absent

SEQ ID NO: 30309 - protein, 41 aa, Artificial Sequence
  GFR-binding peptide
  MOD_RES (4)..(5)..(39)..(41): Xaa is C or S
  MOD_RES (19)..(20)..(21)..(22)..(23): Xaa is A or G
  MOD_RES (24)..(25)..(26)..(27): Xaa is A or G or is absent
PKAXXVPTELSPISMLYIXXXXXXXXXYKQYEDMVVEGXGX

SEQ ID NO: 30310 - protein, 32 aa, Artificial Sequence; identical to SEQ ID NO: 8934
  GFR-binding peptide
  MOD_RES (31)..(31): Xaa is C or S

SEQ ID NO: 30311 - protein, 39 aa, Artificial Sequence; identical to SEQ ID NO: 8935
  GFR-binding peptide
  MOD_RES (3)..(4)..(37)..(39): Xaa is C or S
  MOD_RES (18)..(19)..(20)..(21)..(22): Xaa is A or G
  MOD_RES (23)..(24)..(25)..(26): Xaa is A or G or is absent

SEQ ID NO: 30312 - protein, 40 aa, Artificial Sequence; identical to SEQ ID NO: 8938
  GFR-binding peptide
  MOD_RES (6)..(7): Xaa is C or S
  MOD_RES (21)..(22)..(23)..(24)..(25): Xaa is A or G
  MOD_RES (26)..(27)..(28)..(29): Xaa is A or G or is absent

SEQ ID NO: 30313 - protein, 37 aa, Artificial Sequence; identical to SEQ ID NO: 8939
  GFR-binding peptide
  MOD_RES (2)..(3): Xaa is C or S
  MOD_RES (17)..(18)..(19)..(20)..(21): Xaa is A or G
  MOD_RES (22)..(23)..(24)..(25): Xaa is A or G or is absent

SEQ ID NO: 30314 - protein, 40 aa, Artificial Sequence
  GFR-binding peptide
  MOD_RES (6)..(7): Xaa is C or S
  MOD_RES (21)..(22)..(23)..(24)..(25): Xaa is A or G
  MOD_RES (26)..(27)..(28)..(29): Xaa is A or G or is absent
YVPKPXXAPTKLSPISVLYIXXXXXXXXXYKQYENMVVRS

SEQ ID NO: 30315 - protein, 35 aa, Artificial Sequence
  GFR-binding peptide
  MOD_RES (34)..(34): Xaa is C or S
  MOD_RES (14)..(15)..(16)..(17)..(18): Xaa is A or G
  MOD_RES (19)..(20)..(21)..(22): Xaa is A or G or is absent
VPTKLEPISILYLXXXXXXXXXKFKYEGMAVSEXG

SEQ ID NO: 30316 - protein, 37 aa, Artificial Sequence
  GFR-binding peptide
  MOD_RES (5)..(6)..(37): Xaa is C or S
SASPXXVPQDLEPISILYLVGRTPKVKFKYEMVVKSX

SEQ ID NO: 30317 - protein, 39 aa, Artificial Sequence
  GFR-binding peptide
  MOD_RES (3)..(4)..(39): Xaa is C or S
  MOD_RES (18)..(19)..(20)..(21)..(22): Xaa is A or G
  MOD_RES (23)..(24)..(25)..(26): Xaa is A or G or is absent
KAXXVPTKLSPISVLYIXXXXXXXXXYKQYEEGMSVAEX

SEQ ID NO: 30318 - protein, 34 aa, Artificial Sequence
  GFR-binding peptide
  MOD_RES (2)..(3): Xaa is C or S
AXXVPTELEPISMLYLDENEKVVKFKYEDMVVEG

SEQ ID NO: 30319 - protein, 38 aa, Artificial Sequence
  GFR-binding peptide
  MOD_RES (5)..(6): Xaa is C or S
  MOD_RES (20)..(21)..(22)..(23)..(24): Xaa is A or G
  MOD_RES (25)..(26)..(27)..(28): Xaa is A or G or is absent
IPKAXXVPTELSPISMLYIXXXXXXXXXYKQYEDMVVE

SEQ ID NO: 30320 - protein, 37 aa, Artificial Sequence
  GFR-binding peptide
  MOD_RES (2)..(3)..(35)..(37): Xaa is C or S
PXXAPTKLEPISVLYLDDSSNVIKFKYENMVVRSXGX

SEQ ID NO: 30321 - protein, 43 aa, Artificial Sequence
  GFR-binding peptide
  MOD_RES (5)..(6)..(41)..(43): Xaa is C or S
  MOD_RES (20)..(21)..(22)..(23)..(24): Xaa is A or G
  MOD_RES (25)..(26)..(27)..(28): Xaa is A or G or is absent
VGKAXXVPTKLSPISVLYIXXXXXXXXXYKQYEEGMSVAEXGX

SEQ ID NO: 30322 - protein, 41 aa, Artificial Sequence
  GFR-binding peptide
  MOD_RES (5)..(6)..(41): Xaa is C or S
  MOD_RES (20)..(21)..(22)..(23)..(24): Xaa is A or G
  MOD_RES (25)..(26)..(27)..(28): Xaa is A or G or is absent
VGKAXXVPTKLEPISVLYLXXXXXXXXXKFKYEEGMSVAEX

SEQ ID NO: 30323 - protein, 38 aa, Artificial Sequence; identical to SEQ ID NO: 8948
  GFR-binding peptide
  MOD_RES (3)..(4)..(38): Xaa is C or S
  MOD_RES (18)..(19)..(20)..(21)..(22): Xaa is A or G
  MOD_RES (23)..(24)..(25)..(26): Xaa is A or G or is absent

SEQ ID NO: 30324 - protein, 33 aa, Artificial Sequence
  GFR-binding peptide
  MOD_RES (1)..(33): Xaa is C or S
XAPTQLSPISVLYIDDSSNVIYKQYENMVVRAX

SEQ ID NO: 30325 - protein, 34 aa, Artificial Sequence
  GFR-binding peptide
  MOD_RES (3)..(4): Xaa is C or S
KAXXAPTKLSPISVLYIDSSNNVIYKQYENMVVK

SEQ ID NO: 30326 - protein, 39 aa, Artificial Sequence; identical to SEQ ID NO: 8952
  GFR-binding peptide
  MOD_RES (5)..(6)..(38): Xaa is C or S

SEQ ID NO: 30327 - protein, 38 aa, Artificial Sequence
  GFR-binding peptide
  MOD_RES (2)..(3)..(36)..(38): Xaa is C or S
  MOD_RES (17)..(18)..(19)..(20)..(21): Xaa is A or G
  MOD_RES (22)..(23)..(24)..(25): Xaa is A or G or is absent
PXXVPQDLEPISILYLXXXXXXXXXKFKYEMVVKSXKX

SEQ ID NO: 30328 - protein, 34 aa, Artificial Sequence
  GFR-binding peptide
  MOD_RES (2)..(2): Xaa is C or S
  MOD_RES (16)..(17)..(18)..(19)..(20): Xaa is A or G
  MOD_RES (21)..(22)..(23)..(24): Xaa is A or G or is absent
TXAPTKLSPISVLYIXXXXXXXXXYKQYENMVVR

SEQ ID NO: 30329 - protein, 35 aa, Artificial Sequence; identical to SEQ ID NO: 8957
  GFR-binding peptide
  MOD_RES (1)..(33)..(35): Xaa is C or S

SEQ ID NO: 30330 - protein, 34 aa, Artificial Sequence
  GFR-binding peptide
  MOD_RES (2)..(3): Xaa is C or S
SXXVPARLEPISILYLDAANNVVKFKYEDMVVEA

SEQ ID NO: 30331 - protein, 39 aa, Artificial Sequence
  GFR-binding peptide
  MOD_RES (5)..(6)..(37)..(39): Xaa is C or S
SASPXXVSQDLEPISILYLIGKTPKIKFKYEMIVKSXKX

SEQ ID NO: 30332 - protein, 33 aa, Artificial Sequence; identical to SEQ ID NO: 8958
  GFR-binding peptide
  MOD_RES (2)..(3): Xaa is C or S

SEQ ID NO: 30333 - protein, 40 aa, Artificial Sequence; identical to SEQ ID NO: 8959
  GFR-binding peptide
  MOD_RES (3)..(4)..(37)..(39): Xaa is C or S
  MOD_RES (18)..(19)..(20)..(21)..(22): Xaa is A or G
  MOD_RES (23)..(24)..(25)..(26): Xaa is A or G or is absent

SEQ ID NO: 30334 - protein, 32 aa, Artificial Sequence; identical to SEQ ID NO: 8962
  GFR-binding peptide
  MOD_RES (1)..(2): Xaa is C or S

SEQ ID NO: 30335 - protein, 35 aa, Artificial Sequence; identical to SEQ ID NO: 8963
  GFR-binding peptide
  MOD_RES (1)..(2): Xaa is C or S
  MOD_RES (16)..(17)..(18)..(19)..(20): Xaa is A or G
  MOD_RES (21)..(22)..(23)..(24): Xaa is A or G or is absent

SEQ ID NO: 30336 - protein, 40 aa, Artificial Sequence
  GFR-binding peptide
  MOD_RES (3)..(4)..(38)..(40): Xaa is C or S
  MOD_RES (18)..(19)..(20)..(21)..(22): Xaa is A or G
  MOD_RES (23)..(24)..(25)..(26): Xaa is A or G or is absent
KPXXAPTQLEPISVLYLXXXXXXXXXKFKYENMVVRAXGX

SEQ ID NO: 30337 - protein, 42 aa, Artificial Sequence
  GFR-binding peptide
  MOD_RES (6)..(40)..(42): Xaa is C or S
  MOD_RES (20)..(21)..(22)..(23)..(24): Xaa is A or G
  MOD_RES (25)..(26)..(27)..(28): Xaa is A or G or is absent
VTKPTXAPTKLSPISVLYIXXXXXXXXXYKQYENMVVRSXGX

SEQ ID NO: 30338 - protein, 36 aa, Artificial Sequence
  GFR-binding peptide
  MOD_RES (3)..(4)..(36): Xaa is C or S
ASXXVPARLNAISILYFDAANNVVLKKYRDMVVEAX

SEQ ID NO: 30339 - protein, 37 aa, Artificial Sequence; identical to SEQ ID NO: 8965
  GFR-binding peptide
  MOD_RES (5)..(6): Xaa is C or S

SEQ ID NO: 30340 - protein, 35 aa, Artificial Sequence
  GFR-binding peptide
  MOD_RES (34)..(34): Xaa is C or S
  MOD_RES (14)..(15)..(16)..(17)..(18): Xaa is A or G
  MOD_RES (19)..(20)..(21)..(22): Xaa is A or G or is absent
APTKLEPISVLYLXXXXXXXXXKFKYENMVVRSXG

SEQ ID NO: 30341 - protein, 35 aa, Artificial Sequence
  GFR-binding peptide
  MOD_RES (1)..(32)..(34): Xaa is C or S
XVPQALSPISILYIVGRKPKVYKQYEMIVRSXKXS

SEQ ID NO: 30342 - protein, 40 aa, Artificial Sequence; identical to SEQ ID NO: 8966
  GFR-binding peptide
  MOD_RES (3)..(4)..(38)..(40): Xaa is C or S
  MOD_RES (18)..(19)..(20)..(21)..(22): Xaa is A or G
  MOD_RES (23)..(24)..(25)..(26): Xaa is A or G or is absent

SEQ ID NO: 30343 - protein, 35 aa, Artificial Sequence; identical to SEQ ID NO: 8968
  GFR-binding peptide
  MOD_RES (32)..(34): Xaa is C or S

SEQ ID NO: 30344 - protein, 39 aa, Artificial Sequence; identical to SEQ ID NO: 8969
  GFR-binding peptide
  MOD_RES (2)..(3)..(36)..(38): Xaa is C or S
  MOD_RES (17)..(18)..(19)..(20)..(21): Xaa is A or G
  MOD_RES (22)..(23)..(24)..(25): Xaa is A or G or is absent

SEQ ID NO: 30345 - protein, 36 aa, Artificial Sequence; identical to SEQ ID NO: 8971
  GFR-binding peptide
  MOD_RES (5)..(6): Xaa is C or S

SEQ ID NO: 30346 - protein, 41 aa, Artificial Sequence; identical to SEQ ID NO: 8972
  GFR-binding peptide
  MOD_RES (4)..(5)..(38)..(40): Xaa is C or S
  MOD_RES (19)..(20)..(21)..(22)..(23): Xaa is A or G
  MOD_RES (24)..(25)..(26)..(27): Xaa is A or G or is absent

SEQ ID NO: 30347 - protein, 33 aa, Artificial Sequence; identical to SEQ ID NO: 8974
  GFR-binding peptide
  MOD_RES (1)..(2): Xaa is C or S

SEQ ID NO: 30348 - protein, 31 aa, Artificial Sequence; identical to SEQ ID NO: 8975
  GFR-binding peptide
  MOD_RES (1)..(1): Xaa is C or S

SEQ ID NO: 30349 - protein, 32 aa, Artificial Sequence
  GFR-binding peptide
  MOD_RES (32)..(32): Xaa is C or S
APTQLEPISVLYLDDSSNVIKFKYENMVVRAX

SEQ ID NO: 30350 - protein, 35 aa, Artificial Sequence
  GFR-binding peptide
  MOD_RES (1)..(33)..(35): Xaa is C or S
XVPARLEPISILYLDAANNVVKFKYEDMVVEAXGX

SEQ ID NO: 30351 - protein, 44 aa, Artificial Sequence; identical to SEQ ID NO: 8976
  GFR-binding peptide
  MOD_RES (5)..(6)..(41)..(43): Xaa is C or S
  MOD_RES (20)..(21)..(22)..(23)..(24): Xaa is A or G
  MOD_RES (25)..(26)..(27)..(28): Xaa is A or G or is absent

SEQ ID NO: 30352 - protein, 39 aa, Artificial Sequence; identical to SEQ ID NO: 8977
  GFR-binding peptide
  MOD_RES (3)..(4)..(36)..(38): Xaa is C or S

SEQ ID NO: 30353 - protein, 34 aa, Artificial Sequence
  GFR-binding peptide
  MOD_RES (3)..(4): Xaa is C or S
APXXVPQALEPISILYLVGRKPKVKFKYEMIVRS

SEQ ID NO: 30354 - protein, 44 aa, Artificial Sequence; identical to SEQ ID NO: 8978
  GFR-binding peptide
  MOD_RES (6)..(7)..(41)..(43): Xaa is C or S
  MOD_RES (21)..(22)..(23)..(24)..(25): Xaa is A or G
  MOD_RES (26)..(27)..(28)..(29): Xaa is A or G or is absent

SEQ ID NO: 30355 - protein, 38 aa, Artificial Sequence; identical to SEQ ID NO: 8980
  GFR-binding peptide
  MOD_RES (5)..(6)..(38): Xaa is C or S

SEQ ID NO: 30356 - protein, 32 aa, Artificial Sequence; identical to SEQ ID NO: 8981
  GFR-binding peptide
  MOD_RES (31)..(31): Xaa is C or S

SEQ ID NO: 30357 - protein, 36 aa, Artificial Sequence
  GFR-binding peptide
  MOD_RES (1)..(2)..(33)..(35): Xaa is C or S
XXVPQALEPISILYLVGRKPKVKFKYEMIVRSXKXS

SEQ ID NO: 30358 - protein, 38 aa, Artificial Sequence; identical to SEQ ID NO: 8983
  GFR-binding peptide
  MOD_RES (5)..(6)..(37): Xaa is C or S

SEQ ID NO: 30359 - protein, 36 aa, Artificial Sequence
  GFR-binding peptide
  MOD_RES (34)..(36): Xaa is C or S
  MOD_RES (14)..(15)..(16)..(17)..(18): Xaa is A or G
  MOD_RES (19)..(20)..(21)..(22): Xaa is A or G or is absent
VPARLEPISILYLXXXXXXXXXKFKYEDMVVEAXGX

SEQ ID NO: 30360 - protein, 42 aa, Artificial Sequence; identical to SEQ ID NO: 8984
  GFR-binding peptide
  MOD_RES (4)..(5)..(39)..(41): Xaa is C or S
  MOD_RES (19)..(20)..(21)..(22)..(23): Xaa is A or G
  MOD_RES (24)..(25)..(26)..(27): Xaa is A or G or is absent

SEQ ID NO: 30361 - protein, 34 aa, Artificial Sequence
  GFR-binding peptide
  MOD_RES (1)..(2): Xaa is C or S
XXVPTKLEPISVLYLDDMGVPTKFKYEEGMSVAE

SEQ ID NO: 30362 - protein, 39 aa, Artificial Sequence
  GFR-binding peptide
  MOD_RES (3)..(4)..(38): Xaa is C or S
  MOD_RES (18)..(19)..(20)..(21)..(22): Xaa is A or G
  MOD_RES (23)..(24)..(25)..(26): Xaa is A or G or is absent
ASXXVPARLEPISILYLXXXXXXXXXKFKYEDMVVEAXG

SEQ ID NO: 30363 - protein, 39 aa, Artificial Sequence
  GFR-binding peptide
  MOD_RES (3)..(4)..(36)..(38): Xaa is C or S
KAXXVPTELSPISMLYIDEYDKVVYKQYEEMVVEGXGXR

SEQ ID NO: 30364 - protein, 38 aa, Artificial Sequence
  GFR-binding peptide
  MOD_RES (4)..(36)..(38): Xaa is C or S
KPTXAPTKLSPISVLYIDDSSNVIYKQYENMVVRSXGX

SEQ ID NO: 30365 - protein, 31 aa, Artificial Sequence
  GFR-binding peptide
VPTKLSPISILYIDKGVVTYYKQYEGMAVSE

SEQ ID NO: 30366 - protein, 35 aa, Artificial Sequence
  GFR-binding peptide
  MOD_RES (34)..(34): Xaa is C or S
  MOD_RES (14)..(15)..(16)..(17)..(18): Xaa is A or G
  MOD_RES (19)..(20)..(21)..(22): Xaa is A or G or is absent
VPTKLNAISILYFXXXXXXXXXLKKYRGMAVSEXG

SEQ ID NO: 30367 - protein, 39 aa, Artificial Sequence; identical to SEQ ID NO: 8990
  GFR-binding peptide
  MOD_RES (1)..(36)..(38): Xaa is C or S
  MOD_RES (15)..(16)..(17)..(18)..(19): Xaa is A or G
  MOD_RES (20)..(21)..(22)..(23): Xaa is A or G or is absent

SEQ ID NO: 30368 - protein, 33 aa, Artificial Sequence; identical to SEQ ID NO: 8992
  GFR-binding peptide
  MOD_RES (1)..(33): Xaa is C or S

SEQ ID NO: 30369 - protein, 33 aa, Artificial Sequence
  GFR-binding peptide
  MOD_RES (14)..(15)..(16)..(17)..(18): Xaa is A or G
  MOD_RES (19)..(20)..(21)..(22): Xaa is A or G or is absent
APTKLSPISVLYIXXXXXXXXXYKQYENMVVRS

SEQ ID NO: 30370 - protein, 40 aa, Artificial Sequence
  GFR-binding peptide
  MOD_RES (5)..(6)..(40): Xaa is C or S
  MOD_RES (20)..(21)..(22)..(23)..(24): Xaa is A or G
  MOD_RES (25)..(26)..(27)..(28): Xaa is A or G or is absent
IPKAXXVPTELSPISMLYIXXXXXXXXXYKQYEEMVVEGX

SEQ ID NO: 30371 - protein, 33 aa, Artificial Sequence; identical to SEQ ID NO: 8997
  GFR-binding peptide
  MOD_RES (1)..(33): Xaa is C or S

SEQ ID NO: 30372 - protein, 38 aa, Artificial Sequence
  GFR-binding peptide
  MOD_RES (6)..(7): Xaa is C or S
TVPKPXXAPTQLSPISVLYIDDSSNVIYKQYENMVVRA

SEQ ID NO: 30373 - protein, 41 aa, Artificial Sequence; identical to SEQ ID NO: 8998
  GFR-binding peptide
  MOD_RES (4)..(5)..(39)..(41): Xaa is C or S
  MOD_RES (19)..(20)..(21)..(22)..(23): Xaa is A or G
  MOD_RES (24)..(25)..(26)..(27): Xaa is A or G or is absent

SEQ ID NO: 30374 - protein, 35 aa, Artificial Sequence
  GFR-binding peptide
  MOD_RES (4)..(5): Xaa is C or S
PKAXXVPTELEPISMLYLDENEKVVKFKYEDMVVE

SEQ ID NO: 30375 - protein, 36 aa, Artificial Sequence
  GFR-binding peptide
  MOD_RES (34)..(36): Xaa is C or S
  MOD_RES (14)..(15)..(16)..(17)..(18): Xaa is A or G
  MOD_RES (19)..(20)..(21)..(22): Xaa is A or G or is absent
VPTELEPISMLYLXXXXXXXXXKFKYEEMVVEGXGX

SEQ ID NO: 30376 - protein, 32 aa, Artificial Sequence
  GFR-binding peptide
  MOD_RES (1)..(32): Xaa is C or S
XVPQALEPISILYLVGRKPKVKFKYEMIVRSX

SEQ ID NO: 30377 - protein, 36 aa, Artificial Sequence; identical to SEQ ID NO: 9001
  GFR-binding peptide
  MOD_RES (2)..(3): Xaa is C or S
  MOD_RES (17)..(18)..(19)..(20)..(21): Xaa is A or G
  MOD_RES (22)..(23)..(24)..(25): Xaa is A or G or is absent

SEQ ID NO: 30378 - protein, 39 aa, Artificial Sequence
  GFR-binding peptide
  MOD_RES (2)..(3)..(38): Xaa is C or S
  MOD_RES (17)..(18)..(19)..(20)..(21): Xaa is A or G
  MOD_RES (22)..(23)..(24)..(25): Xaa is A or G or is absent
AXXVPTKLEPISVLYLXXXXXXXXXKFKYEEGMSVAEXG

SEQ ID NO: 30379 - protein, 31 aa, Artificial Sequence
  GFR-binding peptide
APTKLEPISVLYLDDSSNVIKFKYENMVVRS

SEQ ID NO: 30380 - protein, 37 aa, Artificial Sequence
  GFR-binding peptide
  MOD_RES (4)..(5)..(37): Xaa is C or S
PKPXXAPTKLSPISVLYIDDSSNVIYKQYENMVVRSX

SEQ ID NO: 30381 - protein, 36 aa, Artificial Sequence
  GFR-binding peptide
  MOD_RES (2)..(3): Xaa is C or S
  MOD_RES (17)..(18)..(19)..(20)..(21): Xaa is A or G
  MOD_RES (22)..(23)..(24)..(25): Xaa is A or G or is absent
AXXVPTELSPISMLYIXXXXXXXXXYKQYEEMVVEG

SEQ ID NO: 30382 - protein, 34 aa, Artificial Sequence
  GFR-binding peptide
  MOD_RES (1)..(1): Xaa is C or S
  MOD_RES (15)..(16)..(17)..(18)..(19): Xaa is A or G
  MOD_RES (20)..(21)..(22)..(23): Xaa is A or G or is absent
XVPTELSPISMLYIXXXXXXXXXYKQYEDMVVEG

SEQ ID NO: 30383 - protein, 31 aa, Artificial Sequence; identical to SEQ ID NO: 9003
  GFR-binding peptide
  MOD_RES (1)..(1): Xaa is C or S

SEQ ID NO: 30384 - protein, 42 aa, Artificial Sequence
  GFR-binding peptide
  MOD_RES (6)..(7)..(41): Xaa is C or S
  MOD_RES (21)..(22)..(23)..(24)..(25): Xaa is A or G
  MOD_RES (26)..(27)..(28)..(29): Xaa is A or G or is absent
KASKAXXVPTKLSPISILYIXXXXXXXXXYKQYEGMAVSEXG

SEQ ID NO: 30385 - protein, 38 aa, Artificial Sequence; identical to SEQ ID NO: 9005
  GFR-binding peptide
  MOD_RES (3)..(4)..(36)..(38): Xaa is C or S

SEQ ID NO: 30386 - protein, 38 aa, Artificial Sequence
  GFR-binding peptide
  MOD_RES (4)..(5)..(37): Xaa is C or S
PKAXXAPTKLSPISVLYIDSSNNVIYKQYENMVVKAXG

SEQ ID NO: 30387 - protein, 40 aa, Artificial Sequence
  GFR-binding peptide
  MOD_RES (6)..(7)..(39): Xaa is C or S
KASKAXXVPTKLSPISILYKDKGVVTYLKYHYGMAVSEXG

SEQ ID NO: 30388 - protein, 39 aa, Artificial Sequence; identical to SEQ ID NO: 9008
  GFR-binding peptide
  MOD_RES (4)..(36)..(38): Xaa is C or S

SEQ ID NO: 30389 - protein, 32 aa, Artificial Sequence; identical to SEQ ID NO: 9010
  GFR-binding peptide
  MOD_RES (1)..(2): Xaa is C or S

SEQ ID NO: 30390 - protein, 39 aa, Artificial Sequence
  GFR-binding peptide
  MOD_RES (4)..(5)..(39): Xaa is C or S
  MOD_RES (19)..(20)..(21)..(22)..(23): Xaa is A or G
  MOD_RES (24)..(25)..(26)..(27): Xaa is A or G or is absent
PKAXXVPTELEPISMLYLXXXXXXXXXKFKYEDMVVEGX

SEQ ID NO: 30391 - protein, 33 aa, Artificial Sequence
  GFR-binding peptide
  MOD_RES (14)..(15)..(16)..(17)..(18): Xaa is A or G
  MOD_RES (19)..(20)..(21)..(22): Xaa is A or G or is absent
VPTELSPISMLYIXXXXXXXXXYKQYEEMVVEG

SEQ ID NO: 30392 - protein, 37 aa, Artificial Sequence
  GFR-binding peptide
  MOD_RES (3)..(4)..(36): Xaa is C or S
KAXXVPTKLSPISILYKDKGVVTYLKYHYGMAVSEXG

SEQ ID NO: 30393 - protein, 33 aa, Artificial Sequence; identical to SEQ ID NO: 9011
  GFR-binding peptide
  MOD_RES (1)..(2): Xaa is C or S

SEQ ID NO: 30394 - protein, 32 aa, Artificial Sequence; identical to SEQ ID NO: 9012
  GFR-binding peptide
  MOD_RES (1)..(2): Xaa is C or S

SEQ ID NO: 30395 - protein, 39 aa, Artificial Sequence; identical to SEQ ID NO: 9013
  GFR-binding peptide
  MOD_RES (4)..(5)..(37)..(39): Xaa is C or S

SEQ ID NO: 30396 - protein, 32 aa, Artificial Sequence
  GFR-binding peptide
  MOD_RES (1)..(2): Xaa is C or S
XXVPARLSPISILYKDAANNVVLKYHYDMVVE

SEQ ID NO: 30397 - protein, 44 aa, Artificial Sequence; identical to SEQ ID NO: 9014
  GFR-binding peptide
  MOD_RES (6)..(7)..(41)..(43): Xaa is C or S
  MOD_RES (21)..(22)..(23)..(24)..(25): Xaa is A or G
  MOD_RES (26)..(27)..(28)..(29): Xaa is A or G or is absent

SEQ ID NO: 30398 - protein, 33 aa, Artificial Sequence
  GFR-binding peptide
  MOD_RES (1)..(33): Xaa is C or S
XVPTKLSPISILYIDKGVVTYYKQYEGMAVSEX

SEQ ID NO: 30399 - protein, 33 aa, Artificial Sequence; identical to SEQ ID NO: 9016
  GFR-binding peptide
  MOD_RES (2)..(3): Xaa is C or S

SEQ ID NO: 30400 - protein, 40 aa, Artificial Sequence; identical to SEQ ID NO: 9020
  GFR-binding peptide
  MOD_RES (5)..(6)..(40): Xaa is C or S
  MOD_RES (20)..(21)..(22)..(23)..(24): Xaa is A or G
  MOD_RES (25)..(26)..(27)..(28): Xaa is A or G or is absent

SEQ ID NO: 30401 - protein, 42 aa, Artificial Sequence
  GFR-binding peptide
  MOD_RES (6)..(7)..(40)..(42): Xaa is C or S
  MOD_RES (21)..(22)..(23)..(24)..(25): Xaa is A or G
  MOD_RES (26)..(27)..(28)..(29): Xaa is A or G or is absent
ASASPXXVPQDLSPISILYIXXXXXXXXXYKQYEMVVKSXKX

SEQ ID NO: 30402 - protein, 40 aa, Artificial Sequence
  GFR-binding peptide
  MOD_RES (7)..(7): Xaa is C or S
  MOD_RES (21)..(22)..(23)..(24)..(25): Xaa is A or G
  MOD_RES (26)..(27)..(28)..(29): Xaa is A or G or is absent
HVTKPTXAPTKLEPISVLYLXXXXXXXXXKFKYENMVVRS

SEQ ID NO: 30403 - protein, 36 aa, Artificial Sequence; identical to SEQ ID NO: 9023
  GFR-binding peptide
  MOD_RES (3)..(4): Xaa is C or S
  MOD_RES (18)..(19)..(20)..(21)..(22): Xaa is A or G
  MOD_RES (23)..(24)..(25)..(26): Xaa is A or G or is absent

SEQ ID NO: 30404 - protein, 35 aa, Artificial Sequence; identical to SEQ ID NO: 9024
  GFR-binding peptide
  MOD_RES (3)..(4): Xaa is C or S

SEQ ID NO: 30405 - protein, 41 aa, Artificial Sequence
  GFR-binding peptide
  MOD_RES (4)..(5)..(39)..(41): Xaa is C or S
  MOD_RES (19)..(20)..(21)..(22)..(23): Xaa is A or G
  MOD_RES (24)..(25)..(26)..(27): Xaa is A or G or is absent
PKAXXVPTELEPISMLYLXXXXXXXXXKFKYEDMVVEGXGX

SEQ ID NO: 30406 - protein, 35 aa, Artificial Sequence; identical to SEQ ID NO: 9025
  GFR-binding peptide
  MOD_RES (4)..(5): Xaa is C or S

SEQ ID NO: 30407 - protein, 40 aa, Artificial Sequence
  GFR-binding peptide
  MOD_RES (3)..(4)..(38)..(40): Xaa is C or S
  MOD_RES (18)..(19)..(20)..(21)..(22): Xaa is A or G
  MOD_RES (23)..(24)..(25)..(26): Xaa is A or G or is absent
KAXXVPTKLSPISILYKXXXXXXXXXLKYHYGMAVSEXGX

SEQ ID NO: 30408 - protein, 32 aa, Artificial Sequence
  GFR-binding peptide
  MOD_RES (14)..(15)..(16)..(17)..(18): Xaa is A or G
  MOD_RES (19)..(20)..(21)..(22): Xaa is A or G or is absent
VSQDLEPISILYLXXXXXXXXXKFKYEMIVKS

SEQ ID NO: 30409 - protein, 38 aa, Artificial Sequence
  GFR-binding peptide
  MOD_RES (4)..(5)..(36)..(38): Xaa is C or S
AAPXXVPQALEPISILYLVGRKPKVKFKYEMIVRSXKX

SEQ ID NO: 30410 - protein, 37 aa, Artificial Sequence
  GFR-binding peptide
  MOD_RES (6)..(7): Xaa is C or S
AAPASXXVPARLSPISILYKDAANNVVLKYHYDMVVE

SEQ ID NO: 30411 - protein, 37 aa, Artificial Sequence
  GFR-binding peptide
  MOD_RES (2)..(3)..(37): Xaa is C or S
  MOD_RES (17)..(18)..(19)..(20)..(21): Xaa is A or G
  MOD_RES (22)..(23)..(24)..(25): Xaa is A or G or is absent
SXXVPARLSPISILYKXXXXXXXXXLKYHYDMVVEAX

SEQ ID NO: 30412 - protein, 41 aa, Artificial Sequence; identical to SEQ ID NO: 9027
  GFR-binding peptide
  MOD_RES (6)..(7)..(41): Xaa is C or S
  MOD_RES (21)..(22)..(23)..(24)..(25): Xaa is A or G
  MOD_RES (26)..(27)..(28)..(29): Xaa is A or G or is absent

SEQ ID NO: 30413 - protein, 38 aa, Artificial Sequence
  GFR-binding peptide
  MOD_RES (2)..(3)..(36)..(38): Xaa is C or S
  MOD_RES (17)..(18)..(19)..(20)..(21): Xaa is A or G
  MOD_RES (22)..(23)..(24)..(25): Xaa is A or G or is absent
PXXVSQDLSPISILYIXXXXXXXXXYKQYEMIVKSXKX

SEQ ID NO: 30414 - protein, 39 aa, Artificial Sequence
  GFR-binding peptide
  MOD_RES (4)..(5)..(38): Xaa is C or S
  MOD_RES (19)..(20)..(21)..(22)..(23): Xaa is A or G
  MOD_RES (24)..(25)..(26)..(27): Xaa is A or G or is absent
ASPXXVPQDLSPISILYIXXXXXXXXXYKQYEMVVKSXK

SEQ ID NO: 30415 - protein, 37 aa, Artificial Sequence
  GFR-binding peptide
  MOD_RES (1)..(2)..(36): Xaa is C or S
  MOD_RES (16)..(17)..(18)..(19)..(20): Xaa is A or G
  MOD_RES (21)..(22)..(23)..(24): Xaa is A or G or is absent
XXVPTKLNAISILYFXXXXXXXXXLKKYRGMAVSEXG

SEQ ID NO: 30416 - protein, 35 aa, Artificial Sequence; identical to SEQ ID NO: 9031
  GFR-binding peptide
  MOD_RES (2)..(3): Xaa is C or S

SEQ ID NO: 30417 - protein, 33 aa, Artificial Sequence; identical to SEQ ID NO: 9032
  GFR-binding peptide
  MOD_RES (1)..(33): Xaa is C or S

SEQ ID NO: 30418 - protein, 40 aa, Artificial Sequence; identical to SEQ ID NO: 9033
  GFR-binding peptide
  MOD_RES (6)..(7): Xaa is C or S
  MOD_RES (21)..(22)..(23)..(24)..(25): Xaa is A or G
  MOD_RES (26)..(27)..(28)..(29): Xaa is A or G or is absent

SEQ ID NO: 30419 - protein, 39 aa, Artificial Sequence
  GFR-binding peptide
  MOD_RES (5)..(6)..(38): Xaa is C or S
ASKAXXVPTKLSPISILYIDKGVVTYYKQYEGMAVSEXG

SEQ ID NO: 30420 - protein, 33 aa, Artificial Sequence
  GFR-binding peptide
  MOD_RES (1)..(33): Xaa is C or S
XAPTKLEPISVLYLDSSNNVIKFKYENMVVKAX

SEQ ID NO: 30421 - protein, 42 aa, Artificial Sequence
  GFR-binding peptide
  MOD_RES (6)..(7)..(41): Xaa is C or S
  MOD_RES (21)..(22)..(23)..(24)..(25): Xaa is A or G
  MOD_RES (26)..(27)..(28)..(29): Xaa is A or G or is absent
SIPKAXXVPTELEPISMLYLXXXXXXXXXKFKYEEMVVEGXG

SEQ ID NO: 30422 - protein, 40 aa, Artificial Sequence
  GFR-binding peptide
  MOD_RES (6)..(7)..(40): Xaa is C or S
  MOD_RES (21)..(22)..(23)..(24)..(25): Xaa is A or G
  MOD_RES (26)..(27)..(28)..(29): Xaa is A or G or is absent
ASAAPXXVPQALEPISILYLXXXXXXXXXKFKYEMIVRSX

SEQ ID NO: 30423 - protein, 36 aa, Artificial Sequence; identical to SEQ ID NO: 9037
  GFR-binding peptide
  MOD_RES (34)..(36): Xaa is C or S
  MOD_RES (14)..(15)..(16)..(17)..(18): Xaa is A or G
  MOD_RES (19)..(20)..(21)..(22): Xaa is A or G or is absent

SEQ ID NO: 30424 - protein, 36 aa, Artificial Sequence; identical to SEQ ID NO: 9038
  GFR-binding peptide
  MOD_RES (1)..(34)..(36): Xaa is C or S
  MOD_RES (15)..(16)..(17)..(18)..(19): Xaa is A or G
  MOD_RES (20)..(21)..(22)..(23): Xaa is A or G or is absent

SEQ ID NO: 30425 - protein, 36 aa, Artificial Sequence; identical to SEQ ID NO: 9040
  GFR-binding peptide
  MOD_RES (33)..(35): Xaa is C or S
  MOD_RES (14)..(15)..(16)..(17)..(18): Xaa is A or G
  MOD_RES (19)..(20)..(21)..(22): Xaa is A or G or is absent

SEQ ID NO: 30426 - protein, 36 aa, Artificial Sequence
  GFR-binding peptide
  MOD_RES (3)..(4): Xaa is C or S
  MOD_RES (18)..(19)..(20)..(21)..(22): Xaa is A or G
  MOD_RES (23)..(24)..(25)..(26): Xaa is A or G or is absent
SPXXVSQDLSPISILYIXXXXXXXXXYKQYEMIVKS

SEQ ID NO: 30427 - protein, 35 aa, Artificial Sequence
  GFR-binding peptide
  MOD_RES (4)..(5): Xaa is C or S
SKAXXVPTKLNAISILYFDKGVVTYLKKYRGMAVS

SEQ ID NO: 30428 - protein, 39 aa, Artificial Sequence; identical to SEQ ID NO: 9041
  GFR-binding peptide
  MOD_RES (3)..(4)..(37)..(39): Xaa is C or S
  MOD_RES (18)..(19)..(20)..(21)..(22): Xaa is A or G
  MOD_RES (23)..(24)..(25)..(26): Xaa is A or G or is absent

SEQ ID NO: 30429 - protein, 43 aa, Artificial Sequence
  GFR-binding peptide
  MOD_RES (5)..(6)..(40)..(42): Xaa is C or S
  MOD_RES (20)..(21)..(22)..(23)..(24): Xaa is A or G
  MOD_RES (25)..(26)..(27)..(28): Xaa is A or G or is absent
VPKPXXAPTKLEPISVLYLXXXXXXXXXKFKYENMVVRSXGXH

SEQ ID NO: 30430 - protein, 34 aa, Artificial Sequence; identical to SEQ ID NO: 9045
  GFR-binding peptide
  MOD_RES (34)..(34): Xaa is C or S
  MOD_RES (14)..(15)..(16)..(17)..(18): Xaa is A or G
  MOD_RES (19)..(20)..(21)..(22): Xaa is A or G or is absent

SEQ ID NO: 30431 - protein, 34 aa, Artificial Sequence
  GFR-binding peptide
  MOD_RES (34)..(34): Xaa is C or S
  MOD_RES (14)..(15)..(16)..(17)..(18): Xaa is A or G
  MOD_RES (19)..(20)..(21)..(22): Xaa is A or G or is absent
APTQLSPISVLYIXXXXXXXXXYKQYENMVVRAX

SEQ ID NO: 30432 - protein, 34 aa, Artificial Sequence
  GFR-binding peptide
  MOD_RES (34)..(34): Xaa is C or S
  MOD_RES (14)..(15)..(16)..(17)..(18): Xaa is A or G
  MOD_RES (19)..(20)..(21)..(22): Xaa is A or G or is absent
APTKLEPISVLYLXXXXXXXXXKFKYENMVVRSX

SEQ ID NO: 30433 - protein, 35 aa, Artificial Sequence; identical to SEQ ID NO: 9048
  GFR-binding peptide
  MOD_RES (1)..(34): Xaa is C or S
  MOD_RES (15)..(16)..(17)..(18)..(19): Xaa is A or G
  MOD_RES (20)..(21)..(22)..(23): Xaa is A or G or is absent

SEQ ID NO: 30434 - protein, 43 aa, Artificial Sequence; identical to SEQ ID NO: 9053
  GFR-binding peptide
  MOD_RES (5)..(6)..(40)..(42): Xaa is C or S
  MOD_RES (20)..(21)..(22)..(23)..(24): Xaa is A or G
  MOD_RES (25)..(26)..(27)..(28): Xaa is A or G or is absent

SEQ ID NO: 30435 - protein, 42 aa, Artificial Sequence; identical to SEQ ID NO: 9056
  GFR-binding peptide
  MOD_RES (6)..(7)..(41): Xaa is C or S
  MOD_RES (21)..(22)..(23)..(24)..(25): Xaa is A or G
  MOD_RES (26)..(27)..(28)..(29): Xaa is A or G or is absent

SEQ ID NO: 30436 - protein, 39 aa, Artificial Sequence
  GFR-binding peptide
  MOD_RES (3)..(4)..(36)..(38): Xaa is C or S
KAXXAPTKLEPISVLYLDSSNNVIKFKYENMVVKAXGXH

SEQ ID NO: 30437 - protein, 40 aa, Artificial Sequence; identical to SEQ ID NO: 9060
  GFR-binding peptide
  MOD_RES (5)..(6)..(40): Xaa is C or S
  MOD_RES (20)..(21)..(22)..(23)..(24): Xaa is A or G
  MOD_RES (25)..(26)..(27)..(28): Xaa is A or G or is absent

SEQ ID NO: 30438 - protein, 33 aa, Artificial Sequence
  GFR-binding peptide
  MOD_RES (32)..(32): Xaa is C or S
VPTKLNAISILYFDKGVVTYLKKYRGMAVSEXG

SEQ ID NO: 30439 - protein, 39 aa, Artificial Sequence
  GFR-binding peptide
  MOD_RES (5)..(37)..(39): Xaa is C or S
TKPTXAPTKLSPISVLYIDDSSNVIYKQYENMVVRSXGX

SEQ ID NO: 30440 - protein, 40 aa, Artificial Sequence
  GFR-binding peptide
  MOD_RES (3)..(4)..(38)..(40): Xaa is C or S
  MOD_RES (18)..(19)..(20)..(21)..(22): Xaa is A or G
  MOD_RES (23)..(24)..(25)..(26): Xaa is A or G or is absent
KAXXAPTKLEPISVLYLXXXXXXXXXKFKYENMVVKAXGX

SEQ ID NO: 30441 - protein, 37 aa, Artificial Sequence; identical to SEQ ID NO: 9063
  GFR-binding peptide
  MOD_RES (2)..(3)..(34)..(36): Xaa is C or S

SEQ ID NO: 30442 - protein, 37 aa, Artificial Sequence
  GFR-binding peptide
  MOD_RES (1)..(2)..(34)..(36): Xaa is C or S
XXVPTELEPISMLYLDEYDKVVKFKYEEMVVEGXGXR

SEQ ID NO: 30443 - protein, 37 aa, Artificial Sequence
  GFR-binding peptide
  MOD_RES (3)..(4)..(37): Xaa is C or S
  MOD_RES (18)..(19)..(20)..(21)..(22): Xaa is A or G
  MOD_RES (23)..(24)..(25)..(26): Xaa is A or G or is absent
APXXVPQALSPISILYIXXXXXXXXXYKQYEMIVRSX

SEQ ID NO: 30444 - protein, 44 aa, Artificial Sequence
  GFR-binding peptide
  MOD_RES (6)..(7)..(41)..(43): Xaa is C or S
  MOD_RES (21)..(22)..(23)..(24)..(25): Xaa is A or G
  MOD_RES (26)..(27)..(28)..(29): Xaa is A or G or is absent
TVPKPXXAPTQLEPISVLYLXXXXXXXXXKFKYENMVVRAXGXH

SEQ ID NO: 30445 - protein, 36 aa, Artificial Sequence
  GFR-binding peptide
  MOD_RES (1)..(2)..(34)..(36): Xaa is C or S
XXVPTELSPISMLYIDEYDKVVYKQYEEMVVEGXGX

SEQ ID NO: 30446 - protein, 36 aa, Artificial Sequence
  GFR-binding peptide
  MOD_RES (1)..(34)..(36): Xaa is C or S
  MOD_RES (15)..(16)..(17)..(18)..(19): Xaa is A or G
  MOD_RES (20)..(21)..(22)..(23): Xaa is A or G or is absent
XVPQALSPISILYIXXXXXXXXXYKQYEMIVRSXKX

SEQ ID NO: 30447 - protein, 35 aa, Artificial Sequence; identical to SEQ ID NO: 9068
  GFR-binding peptide
  MOD_RES (3)..(4): Xaa is C or S

SEQ ID NO: 30448 - protein, 39 aa, Artificial Sequence; identical to SEQ ID NO: 9070
  GFR-binding peptide
  MOD_RES (3)..(4)..(37)..(39): Xaa is C or S
  MOD_RES (18)..(19)..(20)..(21)..(22): Xaa is A or G
  MOD_RES (23)..(24)..(25)..(26): Xaa is A or G or is absent

SEQ ID NO: 30449 - protein, 38 aa, Artificial Sequence; identical to SEQ ID NO: 9071
  GFR-binding peptide
  MOD_RES (3)..(4)..(37): Xaa is C or S
  MOD_RES (18)..(19)..(20)..(21)..(22): Xaa is A or G
  MOD_RES (23)..(24)..(25)..(26): Xaa is A or G or is absent

SEQ ID NO: 30450 - protein, 35 aa, Artificial Sequence; identical to SEQ ID NO: 9072
  GFR-binding peptide
  MOD_RES (1)..(35): Xaa is C or S
  MOD_RES (15)..(16)..(17)..(18)..(19): Xaa is A or G
  MOD_RES (20)..(21)..(22)..(23): Xaa is A or G or is absent

SEQ ID NO: 30451 - protein, 34 aa, Artificial Sequence
  GFR-binding peptide
  MOD_RES (1)..(2)..(33): Xaa is C or S
XXVPQALEPISILYLVGRKPKVKFKYEMIVRSXK

SEQ ID NO: 30452 - protein, 35 aa, Artificial Sequence
  GFR-binding peptide
  MOD_RES (1)..(33)..(35): Xaa is C or S
XAPTKLSPISVLYIDDSSNVIYKQYENMVVRSXGX

SEQ ID NO: 30453 - protein, 39 aa, Artificial Sequence; identical to SEQ ID NO: 9073
  GFR-binding peptide
  MOD_RES (4)..(5)..(36)..(38): Xaa is C or S

SEQ ID NO: 30454 - protein, 40 aa, Artificial Sequence
  GFR-binding peptide
  MOD_RES (2)..(3)..(37)..(39): Xaa is C or S
  MOD_RES (17)..(18)..(19)..(20)..(21): Xaa is A or G
  MOD_RES (22)..(23)..(24)..(25): Xaa is A or G or is absent
SXXVPARLSPISILYKXXXXXXXXXLKYHYDMVVEAXGXR

SEQ ID NO: 30455 - protein, 38 aa, Artificial Sequence; identical to SEQ ID NO: 9074
  GFR-binding peptide
  MOD_RES (2)..(3)..(37): Xaa is C or S
  MOD_RES (17)..(18)..(19)..(20)..(21): Xaa is A or G
  MOD_RES (22)..(23)..(24)..(25): Xaa is A or G or is absent

SEQ ID NO: 30456 - protein, 42 aa, Artificial Sequence
  GFR-binding peptide
  MOD_RES (6)..(7)..(41): Xaa is C or S
  MOD_RES (21)..(22)..(23)..(24)..(25): Xaa is A or G
  MOD_RES (26)..(27)..(28)..(29): Xaa is A or G or is absent
KASKAXXVPTKLNAISILYFXXXXXXXXXLKKYRGMAVSEXG

SEQ ID NO: 30457 - protein, 35 aa, Artificial Sequence
  GFR-binding peptide
  MOD_RES (2)..(3): Xaa is C or S
  MOD_RES (17)..(18)..(19)..(20)..(21): Xaa is A or G
  MOD_RES (22)..(23)..(24)..(25): Xaa is A or G or is absent
AXXVPTKLSPISILYKXXXXXXXXXLKYHYGMAVS

SEQ ID NO: 30458 - protein, 36 aa, Artificial Sequence; identical to SEQ ID NO: 9076
  GFR-binding peptide
  MOD_RES (1)..(34)..(36): Xaa is C or S
  MOD_RES (15)..(16)..(17)..(18)..(19): Xaa is A or G
  MOD_RES (20)..(21)..(22)..(23): Xaa is A or G or is absent

SEQ ID NO: 30459 - protein, 37 aa, Artificial Sequence
  GFR-binding peptide
  MOD_RES (34)..(36): Xaa is C or S
  MOD_RES (14)..(15)..(16)..(17)..(18): Xaa is A or G
  MOD_RES (19)..(20)..(21)..(22): Xaa is A or G or is absent
VPTKLSPISILYIXXXXXXXXXYKQYEGMAVSEXGXR

SEQ ID NO: 30460 - protein, 35 aa, Artificial Sequence
  GFR-binding peptide
  MOD_RES (1)..(2): Xaa is C or S
  MOD_RES (16)..(17)..(18)..(19)..(20): Xaa is A or G
  MOD_RES (21)..(22)..(23)..(24): Xaa is A or G or is absent
XXVPTELEPISMLYLXXXXXXXXXKFKYEEMVVEG

SEQ ID NO: 30461 - protein, 35 aa, Artificial Sequence
  GFR-binding peptide
  MOD_RES (1)..(32)..(34): Xaa is C or S
XVPQDLEPISILYLVGRTPKVKFKYEMVVKSXKXS

SEQ ID NO: 30462 - protein, 31 aa, Artificial Sequence; identical to SEQ ID NO: 9080
  GFR-binding peptide
  MOD_RES (1)..(1): Xaa is C or S

SEQ ID NO: 30463 - protein, 32 aa, Artificial Sequence
  GFR-binding peptide
  MOD_RES (14)..(15)..(16)..(17)..(18): Xaa is A or G
  MOD_RES (19)..(20)..(21)..(22): Xaa is A or G or is absent
VPTELSPISMLYIXXXXXXXXXYKQYEDMVVE

SEQ ID NO: 30464 - protein, 39 aa, Artificial Sequence; identical to SEQ ID NO: 9088
  GFR-binding peptide
  MOD_RES (4)..(5)..(37)..(39): Xaa is C or S

SEQ ID NO: 30465 - protein, 40 aa, Artificial Sequence
  GFR-binding peptide
  MOD_RES (5)..(6)..(39): Xaa is C or S
VGKAXXVPTKLEPISVLYLDDMGVPTKFKYEEGMSVAEXG

SEQ ID NO: 30466 - protein, 43 aa, Artificial Sequence
  GFR-binding peptide
  MOD_RES (6)..(7)..(41)..(43): Xaa is C or S
  MOD_RES (21)..(22)..(23)..(24)..(25): Xaa is A or G
  MOD_RES (26)..(27)..(28)..(29): Xaa is A or G or is absent
KASKAXXVPTKLNAISILYFXXXXXXXXXLKKYRGMAVSEXGX

SEQ ID NO: 30467 - protein, 33 aa, Artificial Sequence; identical to SEQ ID NO: 9091
  GFR-binding peptide
  MOD_RES (1)..(1): Xaa is C or S
  MOD_RES (15)..(16)..(17)..(18)..(19): Xaa is A or G
  MOD_RES (20)..(21)..(22)..(23): Xaa is A or G or is absent

SEQ ID NO: 30468 - protein, 37 aa, Artificial Sequence
  GFR-binding peptide
  MOD_RES (4)..(5)..(36): Xaa is C or S
ASPXXVSQDLSPISILYIIGKTPKIYKQYEMIVKSXK

SEQ ID NO: 30469 - protein, 33 aa, Artificial Sequence; identical to SEQ ID NO: 9094
  GFR-binding peptide
  MOD_RES (1)..(1): Xaa is C or S
  MOD_RES (15)..(16)..(17)..(18)..(19): Xaa is A or G
  MOD_RES (20)..(21)..(22)..(23): Xaa is A or G or is absent

SEQ ID NO: 30470 - protein, 33 aa, Artificial Sequence
  GFR-binding peptide
  MOD_RES (1)..(1): Xaa is C or S
  MOD_RES (15)..(16)..(17)..(18)..(19): Xaa is A or G
  MOD_RES (20)..(21)..(22)..(23): Xaa is A or G or is absent
XVPTELSPISMLYIXXXXXXXXXYKQYEDMVVE

SEQ ID NO: 30471 - protein, 39 aa, Artificial Sequence
  GFR-binding peptide
  MOD_RES (6)..(7)..(39): Xaa is C or S
KASKAXXVPTKLSPISILYIDKGVVTYYKQYEGMAVSEX

SEQ ID NO: 30472 - protein, 41 aa, Artificial Sequence
  GFR-binding peptide
  MOD_RES (4)..(5)..(39)..(41): Xaa is C or S
  MOD_RES (19)..(20)..(21)..(22)..(23): Xaa is A or G
  MOD_RES (24)..(25)..(26)..(27): Xaa is A or G or is absent
PKAXXVPTELEPISMLYLXXXXXXXXXKFKYEEMVVEGXGX

SEQ ID NO: 30473 - protein, 40 aa, Artificial Sequence; identical to SEQ ID NO: 9102
  GFR-binding peptide
  MOD_RES (6)..(7)..(40): Xaa is C or S
  MOD_RES (21)..(22)..(23)..(24)..(25): Xaa is A or G
  MOD_RES (26)..(27)..(28)..(29): Xaa is A or G or is absent

SEQ ID NO: 30474 - protein, 35 aa, Artificial Sequence; identical to SEQ ID NO: 9104
  GFR-binding peptide
  MOD_RES (33)..(35): Xaa is C or S
  MOD_RES (14)..(15)..(16)..(17)..(18): Xaa is A or G
  MOD_RES (19)..(20)..(21)..(22): Xaa is A or G or is absent

SEQ ID NO: 30475 - protein, 34 aa, Artificial Sequence; identical to SEQ ID NO: 9105
  GFR-binding peptide
  MOD_RES (1)..(33): Xaa is C or S

SEQ ID NO: 30476 - protein, 33 aa, Artificial Sequence
  GFR-binding peptide
  MOD_RES (3)..(3): Xaa is C or S
PTXAPTKLSPISVLYIDDSSNVIYKQYENMVVR

SEQ ID NO: 30477 - protein, 39 aa, Artificial Sequence
  GFR-binding peptide
  MOD_RES (6)..(7): Xaa is C or S
  MOD_RES (21)..(22)..(23)..(24)..(25): Xaa is A or G
  MOD_RES (26)..(27)..(28)..(29): Xaa is A or G or is absent
SIPKAXXVPTELEPISMLYLXXXXXXXXXKFKYEEMVVE

SEQ ID NO: 30478 - protein, 33 aa, Artificial Sequence; identical to SEQ ID NO: 9107
  GFR-binding peptide
  MOD_RES (14)..(15)..(16)..(17)..(18): Xaa is A or G
  MOD_RES (19)..(20)..(21)..(22): Xaa is A or G or is absent

SEQ ID NO: 30479 - protein, 43 aa, Artificial Sequence
  GFR-binding peptide
  MOD_RES (6)..(7)..(41)..(43): Xaa is C or S
  MOD_RES (21)..(22)..(23)..(24)..(25): Xaa is A or G
  MOD_RES (26)..(27)..(28)..(29): Xaa is A or G or is absent
SIPKAXXVPTELSPISMLYIXXXXXXXXXYKQYEEMVVEGXGX

SEQ ID NO: 30480 - protein, 39 aa, Artificial Sequence
  GFR-binding peptide
  MOD_RES (5)..(6)..(38): Xaa is C or S
IPKAXXVPTELEPISMLYLDEYDKVVKFKYEEMVVEGXG

SEQ ID NO: 30481 - protein, 31 aa, Artificial Sequence; identical to SEQ ID NO: 9111
  GFR-binding peptide
  MOD_RES (31)..(31): Xaa is C or S

SEQ ID NO: 30482 - protein, 37 aa, Artificial Sequence
  GFR-binding peptide
  MOD_RES (2)..(34)..(36): Xaa is C or S
TXAPTKLEPISVLYLDDSSNVIKFKYENMVVRSXGXH

SEQ ID NO: 30483 - protein, 36 aa, Artificial Sequence
  GFR-binding peptide
  MOD_RES (1)..(35): Xaa is C or S
  MOD_RES (15)..(16)..(17)..(18)..(19): Xaa is A or G
  MOD_RES (20)..(21)..(22)..(23): Xaa is A or G or is absent
XAPTQLEPISVLYLXXXXXXXXXKFKYENMVVRAXG

SEQ ID NO: 30484 - protein, 39 aa, Artificial Sequence
  GFR-binding peptide
  MOD_RES (3)..(4)..(36)..(38): Xaa is C or S
KAXXVPTELSPISMLYIDENEKVVYKQYEDMVVEGXGXR

SEQ ID NO: 30485 - protein, 38 aa, Artificial Sequence
  GFR-binding peptide
  MOD_RES (2)..(3)..(35)..(37): Xaa is C or S
AXXAPTKLSPISVLYIDSSNNVIYKQYENMVVKAXGXH

SEQ ID NO: 30486 - protein, 35 aa, Artificial Sequence
  GFR-binding peptide
  MOD_RES (3)..(4): Xaa is C or S
KPXXAPTQLEPISVLYLDDSSNVIKFKYENMVVRA

SEQ ID NO: 30487 - protein, 36 aa, Artificial Sequence
  GFR-binding peptide
  MOD_RES (4)..(4): Xaa is C or S
  MOD_RES (18)..(19)..(20)..(21)..(22): Xaa is A or G
  MOD_RES (23)..(24)..(25)..(26): Xaa is A or G or is absent
KPTXAPTKLSPISVLYIXXXXXXXXXYKQYENMVVR

SEQ ID NO: 30488 - protein, 33 aa, Artificial Sequence
  GFR-binding peptide
  MOD_RES (33)..(33): Xaa is C or S
  MOD_RES (14)..(15)..(16)..(17)..(18): Xaa is A or G
  MOD_RES (19)..(20)..(21)..(22): Xaa is A or G or is absent
VSQDLSPISILYIXXXXXXXXXYKQYEMIVKSX

SEQ ID NO: 30489 - protein, 34 aa, Artificial Sequence
  GFR-binding peptide
  MOD_RES (1)..(2)..(34): Xaa is C or S
XXAPTKLEPISVLYLDSSNNVIKFKYENMVVKAX

SEQ ID NO: 30490 - protein, 43 aa, Artificial Sequence; identical to SEQ ID NO: 9120
  GFR-binding peptide
  MOD_RES (6)..(7)..(40)..(42): Xaa is C or S
  MOD_RES (21)..(22)..(23)..(24)..(25): Xaa is A or G
  MOD_RES (26)..(27)..(28)..(29): Xaa is A or G or is absent

SEQ ID NO: 30491 - protein, 41 aa, Artificial Sequence; identical to SEQ ID NO: 9121
  GFR-binding peptide
  MOD_RES (6)..(7)..(40): Xaa is C or S
  MOD_RES (21)..(22)..(23)..(24)..(25): Xaa is A or G
  MOD_RES (26)..(27)..(28)..(29): Xaa is A or G or is absent

SEQ ID NO: 30492 - protein, 31 aa, Artificial Sequence; identical to SEQ ID NO: 9122
  GFR-binding peptide
  MOD_RES (1)..(1): Xaa is C or S

SEQ ID NO: 30493 - protein, 36 aa, Artificial Sequence
  GFR-binding peptide
  MOD_RES (1)..(2)..(36): Xaa is C or S
  MOD_RES (16)..(17)..(18)..(19)..(20): Xaa is A or G
  MOD_RES (21)..(22)..(23)..(24): Xaa is A or G or is absent
XXVPARLEPISILYLXXXXXXXXXKFKYEDMVVEAX

SEQ ID NO: 30494 - protein, 37 aa, Artificial Sequence
  GFR-binding peptide
  MOD_RES (6)..(6): Xaa is C or S
VTKPTXAPTKLEPISVLYLDDSSNVIKFKYENMVVRS

SEQ ID NO: 30495 - protein, 39 aa, Artificial Sequence; identical to SEQ ID NO: 9125
  GFR-binding peptide
  MOD_RES (3)..(4)..(39): Xaa is C or S
  MOD_RES (18)..(19)..(20)..(21)..(22): Xaa is A or G
  MOD_RES (23)..(24)..(25)..(26): Xaa is A or G or is absent

SEQ ID NO: 30496 - protein, 34 aa, Artificial Sequence
  GFR-binding peptide
  MOD_RES (1)..(2): Xaa is C or S
  MOD_RES (16)..(17)..(18)..(19)..(20): Xaa is A or G
  MOD_RES (21)..(22)..(23)..(24): Xaa is A or G or is absent
XXVPTKLNAISILYFXXXXXXXXXLKKYRGMAVS

SEQ ID NO: 30497 - protein, 34 aa, Artificial Sequence
  GFR-binding peptide
  MOD_RES (34)..(34): Xaa is C or S
  MOD_RES (14)..(15)..(16)..(17)..(18): Xaa is A or G
  MOD_RES (19)..(20)..(21)..(22): Xaa is A or G or is absent
APTKLSPISVLYIXXXXXXXXXYKQYENMVVKAX

SEQ ID NO: 30498 - protein, 35 aa, Artificial Sequence
  GFR-binding peptide
  MOD_RES (3)..(4): Xaa is C or S
KAXXAPTKLEPISVLYLDSSNNVIKFKYENMVVKA

SEQ ID NO: 30499 - protein, 44 aa, Artificial Sequence; identical to SEQ ID NO: 9131
  GFR-binding peptide
  MOD_RES (6)..(7)..(41)..(43): Xaa is C or S
  MOD_RES (21)..(22)..(23)..(24)..(25): Xaa is A or G
  MOD_RES (26)..(27)..(28)..(29): Xaa is A or G or is absent

SEQ ID NO: 30500 - protein, 39 aa, Artificial Sequence
  GFR-binding peptide
  MOD_RES (2)..(3)..(37)..(39): Xaa is C or S
  MOD_RES (17)..(18)..(19)..(20)..(21): Xaa is A or G
  MOD_RES (22)..(23)..(24)..(25): Xaa is A or G or is absent
SXXVPARLEPISILYLXXXXXXXXXKFKYEDMVVEAXGX

SEQ ID NO: 30501 - protein, 40 aa, Artificial Sequence
  GFR-binding peptide
  MOD_RES (4)..(5)..(39): Xaa is C or S
  MOD_RES (19)..(20)..(21)..(22)..(23): Xaa is A or G
  MOD_RES (24)..(25)..(26)..(27): Xaa is A or G or is absent
PKAXXVPTELEPISMLYLXXXXXXXXXKFKYEDMVVEGXG

SEQ ID NO: 30502 - protein, 34 aa, Artificial Sequence; identical to SEQ ID NO: 9137
  GFR-binding peptide
  MOD_RES (1)..(33): Xaa is C or S

SEQ ID NO: 30503 - protein, 39 aa, Artificial Sequence; identical to SEQ ID NO: 9138
  GFR-binding peptide
  MOD_RES (4)..(5)..(38): Xaa is C or S
  MOD_RES (19)..(20)..(21)..(22)..(23): Xaa is A or G
  MOD_RES (24)..(25)..(26)..(27): Xaa is A or G or is absent

SEQ ID NO: 30504 - protein, 36 aa, Artificial Sequence
  GFR-binding peptide
  MOD_RES (5)..(6): Xaa is C or S
IPKAXXVPTELEPISMLYLDEYDKVVKFKYEEMVVE

SEQ ID NO: 30505 - protein, 36 aa, Artificial Sequence
  GFR-binding peptide
  MOD_RES (34)..(36): Xaa is C or S
  MOD_RES (14)..(15)..(16)..(17)..(18): Xaa is A or G
  MOD_RES (19)..(20)..(21)..(22): Xaa is A or G or is absent
VPTELSPISMLYIXXXXXXXXXYKQYEEMVVEGXGX

SEQ ID NO: 30506 - protein, 36 aa, Artificial Sequence; identical to SEQ ID NO: 9143
  GFR-binding peptide
  MOD_RES (5)..(6): Xaa is C or S

SEQ ID NO: 30507 - protein, 38 aa, Artificial Sequence
  GFR-binding peptide
  MOD_RES (5)..(6)..(38): Xaa is C or S
ASKAXXVPTKLNAISILYFDKGVVTYLKKYRGMAVSEX

SEQ ID NO: 30508 - protein, 37 aa, Artificial Sequence
  GFR-binding peptide
  MOD_RES (4)..(5)..(37): Xaa is C or S
PKAXXVPTELSPISMLYIDEYDKVVYKQYEEMVVEGX

SEQ ID NO: 30509 - protein, 34 aa, Artificial Sequence; identical to SEQ ID NO: 9147
  GFR-binding peptide
  MOD_RES (32)..(34): Xaa is C or S

SEQ ID NO: 30510 - protein, 34 aa, Artificial Sequence
  GFR-binding peptide
  MOD_RES (32)..(34): Xaa is C or S
VPTKLNAISILYFDKGVVTYLKKYRGMAVSEXGX

SEQ ID NO: 30511 - protein, 41 aa, Artificial Sequence
  GFR-binding peptide
  MOD_RES (4)..(5)..(39)..(41): Xaa is C or S
  MOD_RES (19)..(20)..(21)..(22)..(23): Xaa is A or G
  MOD_RES (24)..(25)..(26)..(27): Xaa is A or G or is absent
PKAXXVPTELSPISMLYIXXXXXXXXXYKQYEEMVVEGXGX

SEQ ID NO: 30512 - protein, 35 aa, Artificial Sequence
  GFR-binding peptide
  MOD_RES (3)..(4)..(35): Xaa is C or S
APXXVPQALSPISILYIVGRKPKVYKQYEMIVRSX

SEQ ID NO: 30513 - protein, 39 aa, Artificial Sequence; identical to SEQ ID NO: 9155
  GFR-binding peptide
  MOD_RES (4)..(5)..(39): Xaa is C or S
  MOD_RES (19)..(20)..(21)..(22)..(23): Xaa is A or G
  MOD_RES (24)..(25)..(26)..(27): Xaa is A or G or is absent

SEQ ID NO: 30514 - protein, 44 aa, Artificial Sequence
  GFR-binding peptide
  MOD_RES (5)..(6)..(41)..(43): Xaa is C or S
  MOD_RES (20)..(21)..(22)..(23)..(24): Xaa is A or G
  MOD_RES (25)..(26)..(27)..(28): Xaa is A or G or is absent
VGKAXXVPTKLSPISVLYIXXXXXXXXXYKQYEEGMSVAEXGXR

SEQ ID NO: 30515 - protein, 34 aa, Artificial Sequence
  GFR-binding peptide
  MOD_RES (1)..(33): Xaa is C or S
XAPTKLEPISVLYLDDSSNVIKFKYENMVVRSXG

SEQ ID NO: 30516 - protein, 40 aa, Artificial Sequence; identical to SEQ ID NO: 9156
  GFR-binding peptide
  MOD_RES (2)..(3)..(38)..(40): Xaa is C or S
  MOD_RES (17)..(18)..(19)..(20)..(21): Xaa is A or G
  MOD_RES (22)..(23)..(24)..(25): Xaa is A or G or is absent

SEQ ID NO: 30517 - protein, 35 aa, Artificial Sequence; identical to SEQ ID NO: 9157
  GFR-binding peptide
  MOD_RES (34)..(34): Xaa is C or S
  MOD_RES (14)..(15)..(16)..(17)..(18): Xaa is A or G
  MOD_RES (19)..(20)..(21)..(22): Xaa is A or G or is absent

SEQ ID NO: 30518 - protein, 37 aa, Artificial Sequence; identical to SEQ ID NO: 9158
  GFR-binding peptide
  MOD_RES (4)..(5)..(37): Xaa is C or S

SEQ ID NO: 30519 - protein, 34 aa, Artificial Sequence
  GFR-binding peptide
  MOD_RES (2)..(3)..(34): Xaa is C or S
PXXVPQDLEPISILYLVGRTPKVKFKYEMVVKSX

SEQ ID NO: 30520 - protein, 38 aa, Artificial Sequence
  GFR-binding peptide
  MOD_RES (1)..(2)..(35)..(37): Xaa is C or S
  MOD_RES (16)..(17)..(18)..(19)..(20): Xaa is A or G
  MOD_RES (21)..(22)..(23)..(24): Xaa is A or G or is absent
XXVPQDLEPISILYLXXXXXXXXXKFKYEMVVKSXKXS

SEQ ID NO: 30521 - protein, 40 aa, Artificial Sequence; identical to SEQ ID NO: 9161
  GFR-binding peptide
  MOD_RES (4)..(5)..(38)..(40): Xaa is C or S
  MOD_RES (19)..(20)..(21)..(22)..(23): Xaa is A or G
  MOD_RES (24)..(25)..(26)..(27): Xaa is A or G or is absent

SEQ ID NO: 30522 - protein, 36 aa, Artificial Sequence
  GFR-binding peptide
  MOD_RES (1)..(35): Xaa is C or S
  MOD_RES (15)..(16)..(17)..(18)..(19): Xaa is A or G
  MOD_RES (20)..(21)..(22)..(23): Xaa is A or G or is absent
XVPARLSPISILYIXXXXXXXXXYKQYEDMVVEAXG

SEQ ID NO: 30523 - protein, 37 aa, Artificial Sequence
  GFR-binding peptide
  MOD_RES (4)..(4): Xaa is C or S
  MOD_RES (18)..(19)..(20)..(21)..(22): Xaa is A or G
  MOD_RES (23)..(24)..(25)..(26): Xaa is A or G or is absent
KPTXAPTKLEPISVLYLXXXXXXXXXKFKYENMVVRS

SEQ ID NO: 30524 - protein, 42 aa, Artificial Sequence
  GFR-binding peptide
  MOD_RES (4)..(5)..(39)..(41): Xaa is C or S
  MOD_RES (19)..(20)..(21)..(22)..(23): Xaa is A or G
  MOD_RES (24)..(25)..(26)..(27): Xaa is A or G or is absent
PKAXXVPTELSPISMLYIXXXXXXXXXYKQYEDMVVEGXGXR

SEQ ID NO: 30525 - protein, 41 aa, Artificial Sequence; identical to SEQ ID NO: 9163
  GFR-binding peptide
  MOD_RES (6)..(7)..(41): Xaa is C or S
  MOD_RES (21)..(22)..(23)..(24)..(25): Xaa is A or G
  MOD_RES (26)..(27)..(28)..(29): Xaa is A or G or is absent

SEQ ID NO: 30526 - protein, 36 aa, Artificial Sequence
  GFR-binding peptide
  MOD_RES (3)..(4)..(36): Xaa is C or S
KAXXVPTKLNAISILYFDKGVVTYLKKYRGMAVSEX

SEQ ID NO: 30527 - protein, 38 aa, Artificial Sequence
  GFR-binding peptide
  MOD_RES (3)..(4): Xaa is C or S
  MOD_RES (18)..(19)..(20)..(21)..(22): Xaa is A or G
  MOD_RES (23)..(24)..(25)..(26): Xaa is A or G or is absent
KAXXVPTKLEPISVLYLXXXXXXXXXKFKYEEGMSVAE

SEQ ID NO: 30528 - protein, 34 aa, Artificial Sequence; identical to SEQ ID NO: 9164
  GFR-binding peptide
  MOD_RES (2)..(3): Xaa is C or S

SEQ ID NO: 30529 - protein, 38 aa, Artificial Sequence
  GFR-binding peptide
  MOD_RES (4)..(38): Xaa is C or S
  MOD_RES (18)..(19)..(20)..(21)..(22): Xaa is A or G
  MOD_RES (23)..(24)..(25)..(26): Xaa is A or G or is absent
KPTXAPTKLEPISVLYLXXXXXXXXXKFKYENMVVRSX

SEQ ID NO: 30530 - protein, 35 aa, Artificial Sequence; identical to SEQ ID NO: 9166
  GFR-binding peptide
  MOD_RES (32)..(34): Xaa is C or S

SEQ ID NO: 30531 - protein, 33 aa, Artificial Sequence
  GFR-binding peptide
  MOD_RES (2)..(3): Xaa is C or S
AXXVPTKLSPISILYKDKGVVTYLKYHYGMAVS

SEQ ID NO: 30532 - protein, 42 aa, Artificial Sequence; identical to SEQ ID NO: 9170
  GFR-binding peptide
  MOD_RES (6)..(7)..(41): Xaa is C or S
  MOD_RES (21)..(22)..(23)..(24)..(25): Xaa is A or G
  MOD_RES (26)..(27)..(28)..(29): Xaa is A or G or is absent

SEQ ID NO: 30533 - protein, 36 aa, Artificial Sequence
  GFR-binding peptide
  MOD_RES (1)..(2)..(34)..(36): Xaa is C or S
XXVPTELSPISMLYIDENEKVVYKQYEDMVVEGXGX

SEQ ID NO: 30534 - protein, 33 aa, Artificial Sequence
  GFR-binding peptide
  MOD_RES (1)..(33): Xaa is C or S
XVPARLEPISILYLDAANNVVKFKYEDMVVEAX

SEQ ID NO: 30535 - protein, 32 aa, Artificial Sequence; identical to SEQ ID NO: 9171
  GFR-binding peptide
  MOD_RES (1)..(2): Xaa is C or S

SEQ ID NO: 30536 - protein, 33 aa, Artificial Sequence
  GFR-binding peptide
  MOD_RES (33)..(33): Xaa is C or S
  MOD_RES (14)..(15)..(16)..(17)..(18): Xaa is A or G
  MOD_RES (19)..(20)..(21)..(22): Xaa is A or G or is absent
VPQDLSPISILYIXXXXXXXXXYKQYEMVVKSX

SEQ ID NO: 30537 - protein, 43 aa, Artificial Sequence
  GFR-binding peptide
  MOD_RES (5)..(6)..(40)..(42): Xaa is C or S
  MOD_RES (20)..(21)..(22)..(23)..(24): Xaa is A or G
  MOD_RES (25)..(26)..(27)..(28): Xaa is A or G or is absent
IPKAXXVPTELEPISMLYLXXXXXXXXXKFKYEEMVVEGXGXR

SEQ ID NO: 30538 - protein, 38 aa, Artificial Sequence
  GFR-binding peptide
  MOD_RES (5)..(6)..(38): Xaa is C or S
VPKPXXAPTQLSPISVLYIDDSSNVIYKQYENMVVRAX

SEQ ID NO: 30539 - protein, 32 aa, Artificial Sequence
  GFR-binding peptide
  MOD_RES (14)..(15)..(16)..(17)..(18): Xaa is A or G
  MOD_RES (19)..(20)..(21)..(22): Xaa is A or G or is absent
APTKLEPISVLYLXXXXXXXXXKFKYENMVVR

SEQ ID NO: 30540 - protein, 39 aa, Artificial Sequence; identical to SEQ ID NO: 9174
  GFR-binding peptide
  MOD_RES (3)..(4)..(37)..(39): Xaa is C or S

SEQ ID NO: 30541 - protein, 38 aa, Artificial Sequence
  GFR-binding peptide
  MOD_RES (3)..(4)..(37): Xaa is C or S
KAXXVPTKLEPISVLYLDDMGVPTKFKYEEGMSVAEXG

SEQ ID NO: 30542 - protein, 32 aa, Artificial Sequence
  GFR-binding peptide
  MOD_RES (14)..(15)..(16)..(17)..(18): Xaa is A or G
  MOD_RES (19)..(20)..(21)..(22): Xaa is A or G or is absent
APTKLEPISVLYLXXXXXXXXXKFKYENMVVK

SEQ ID NO: 30543 - protein, 34 aa, Artificial Sequence
  GFR-binding peptide
  MOD_RES (1)..(2)..(34): Xaa is C or S
XXVPTKLSPISILYIDKGVVTYYKQYEGMAVSEX

SEQ ID NO: 30544 - protein, 31 aa, Artificial Sequence
  GFR-binding peptide
  MOD_RES (1)..(1): Xaa is C or S
XVPQALEPISILYLVGRKPKVKFKYEMIVRS

SEQ ID NO: 30545 - protein, 36 aa, Artificial Sequence
  GFR-binding peptide
  MOD_RES (2)..(3)..(34)..(36): Xaa is C or S
PXXVPQALEPISILYLVGRKPKVKFKYEMIVRSXKX

SEQ ID NO: 30546 - protein, 38 aa, Artificial Sequence
  GFR-binding peptide
  MOD_RES (2)..(3)..(37): Xaa is C or S
  MOD_RES (17)..(18)..(19)..(20)..(21): Xaa is A or G
  MOD_RES (22)..(23)..(24)..(25): Xaa is A or G or is absent
PXXAPTQLSPISVLYIXXXXXXXXXYKQYENMVVRAXG

SEQ ID NO: 30547 - protein, 42 aa, Artificial Sequence
  GFR-binding peptide
  MOD_RES (7)..(41): Xaa is C or S
  MOD_RES (21)..(22)..(23)..(24)..(25): Xaa is A or G
  MOD_RES (26)..(27)..(28)..(29): Xaa is A or G or is absent
HVTKPTXAPTKLEPISVLYLXXXXXXXXXKFKYENMVVRSXG

SEQ ID NO: 30548 - protein, 31 aa, Artificial Sequence
  GFR-binding peptide
  MOD_RES (31)..(31): Xaa is C or S
VPQALEPISILYLVGRKPKVKFKYEMIVRSX

SEQ ID NO: 30549 - protein, 32 aa, Artificial Sequence; identical to SEQ ID NO: 9180
  GFR-binding peptide
  MOD_RES (1)..(2): Xaa is C or S

SEQ ID NO: 30550 - protein, 33 aa, Artificial Sequence
  GFR-binding peptide
  MOD_RES (1)..(2)..(33): Xaa is C or S
XXVPQALEPISILYLVGRKPKVKFKYEMIVRSX

SEQ ID NO: 30551 - protein, 37 aa, Artificial Sequence
  GFR-binding peptide
  MOD_RES (4)..(5): Xaa is C or S
  MOD_RES (19)..(20)..(21)..(22)..(23): Xaa is A or G
  MOD_RES (24)..(25)..(26)..(27): Xaa is A or G or is absent
SKAXXVPTKLSPISILYIXXXXXXXXXYKQYEGMAVS

SEQ ID NO: 30552 - protein, 39 aa, Artificial Sequence
  GFR-binding peptide
  MOD_RES (6)..(7): Xaa is C or S
  MOD_RES (21)..(22)..(23)..(24)..(25): Xaa is A or G
  MOD_RES (26)..(27)..(28)..(29): Xaa is A or G or is absent
KASKAXXVPTKLNAISILYFXXXXXXXXXLKKYRGMAVS

SEQ ID NO: 30553 - protein, 38 aa, Artificial Sequence
  GFR-binding peptide
  MOD_RES (5)..(6): Xaa is C or S
  MOD_RES (20)..(21)..(22)..(23)..(24): Xaa is A or G
  MOD_RES (25)..(26)..(27)..(28): Xaa is A or G or is absent
VPKPXXAPTKLEPISVLYLXXXXXXXXXKFKYENMVVR

SEQ ID NO: 30554 - protein, 41 aa, Artificial Sequence
  GFR-binding peptide
  MOD_RES (4)..(5)..(40): Xaa is C or S
  MOD_RES (19)..(20)..(21)..(22)..(23): Xaa is A or G
  MOD_RES (24)..(25)..(26)..(27): Xaa is A or G or is absent
GKAXXVPTKLSPISVLYIXXXXXXXXXYKQYEEGMSVAEXG

SEQ ID NO: 30555 - protein, 32 aa, Artificial Sequence; identical to SEQ ID NO: 9185
  GFR-binding peptide
  MOD_RES (1)..(32): Xaa is C or S

SEQ ID NO: 30556 - protein, 43 aa, Artificial Sequence
  GFR-binding peptide
  MOD_RES (6)..(7)..(40)..(42): Xaa is C or S
  MOD_RES (21)..(22)..(23)..(24)..(25): Xaa is A or G
  MOD_RES (26)..(27)..(28)..(29): Xaa is A or G or is absent
ASASPXXVSQDLEPISILYLXXXXXXXXXKFKYEMIVKSXKXS

SEQ ID NO: 30557 - protein, 41 aa, Artificial Sequence
  GFR-binding peptide
  MOD_RES (4)..(5)..(38)..(40): Xaa is C or S
  MOD_RES (19)..(20)..(21)..(22)..(23): Xaa is A or G
  MOD_RES (24)..(25)..(26)..(27): Xaa is A or G or is absent
ASPXXVPQDLEPISILYLXXXXXXXXXKFKYEMVVKSXKXS

SEQ ID NO: 30558 - protein, 38 aa, Artificial Sequence
  GFR-binding peptide
  MOD_RES (4)..(5): Xaa is C or S
  MOD_RES (19)..(20)..(21)..(22)..(23): Xaa is A or G
  MOD_RES (24)..(25)..(26)..(27): Xaa is A or G or is absent
PKPXXAPTKLEPISVLYLXXXXXXXXXKFKYENMVVRS

SEQ ID NO: 30559 - protein, 35 aa, Artificial Sequence
  GFR-binding peptide
  MOD_RES (2)..(3): Xaa is C or S
  MOD_RES (17)..(18)..(19)..(20)..(21): Xaa is A or G
  MOD_RES (22)..(23)..(24)..(25): Xaa is A or G or is absent
PXXVSQDLEPISILYLXXXXXXXXXKFKYEMIVKS

SEQ ID NO: 30560 - protein, 35 aa, Artificial Sequence; identical to SEQ ID NO: 9191
  GFR-binding peptide
  MOD_RES (34)..(34): Xaa is C or S
  MOD_RES (14)..(15)..(16)..(17)..(18): Xaa is A or G
  MOD_RES (19)..(20)..(21)..(22): Xaa is A or G or is absent

SEQ ID NO: 30561 - protein, 39 aa, Artificial Sequence
  GFR-binding peptide
  MOD_RES (6)..(7): Xaa is C or S
  MOD_RES (21)..(22)..(23)..(24)..(25): Xaa is A or G
  MOD_RES (26)..(27)..(28)..(29): Xaa is A or G or is absent
KASKAXXVPTKLEPISILYLXXXXXXXXXKFKYEGMAVS

SEQ ID NO: 30562 - protein, 35 aa, Artificial Sequence; identical to SEQ ID NO: 9193
  GFR-binding peptide
  MOD_RES (4)..(5): Xaa is C or S

SEQ ID NO: 30563 - protein, 39 aa, Artificial Sequence
  GFR-binding peptide
  MOD_RES (3)..(4)..(36)..(38): Xaa is C or S
KAXXVPTELEPISMLYLDENEKVVKFKYEDMVVEGXGXR

SEQ ID NO: 30564 - protein, 43 aa, Artificial Sequence
  GFR-binding peptide
  MOD_RES (5)..(6)..(40)..(42): Xaa is C or S
  MOD_RES (20)..(21)..(22)..(23)..(24): Xaa is A or G
  MOD_RES (25)..(26)..(27)..(28): Xaa is A or G or is absent
VPKPXXAPTQLSPISVLYIXXXXXXXXXYKQYENMVVRAXGXH

SEQ ID NO: 30565 - protein, 34 aa, Artificial Sequence
  GFR-binding peptide
  MOD_RES (1)..(32)..(34): Xaa is C or S
XVSQDLSPISILYIIGKTPKIYKQYEMIVKSXKX

SEQ ID NO: 30566 - protein, 34 aa, Artificial Sequence
  GFR-binding peptide
  MOD_RES (32)..(34): Xaa is C or S
APTKLEPISVLYLDSSNNVIKFKYENMVVKAXGX

SEQ ID NO: 30567 - protein, 40 aa, Artificial Sequence; identical to SEQ ID NO: 9195
  GFR-binding peptide
  MOD_RES (3)..(4)..(38)..(40): Xaa is C or S
  MOD_RES (18)..(19)..(20)..(21)..(22): Xaa is A or G
  MOD_RES (23)..(24)..(25)..(26): Xaa is A or G or is absent

SEQ ID NO: 30568 - protein, 35 aa, Artificial Sequence; identical to SEQ ID NO: 9196
  GFR-binding peptide
  MOD_RES (2)..(3): Xaa is C or S
  MOD_RES (17)..(18)..(19)..(20)..(21): Xaa is A or G
  MOD_RES (22)..(23)..(24)..(25): Xaa is A or G or is absent

SEQ ID NO: 30569 - protein, 38 aa, Artificial Sequence
  GFR-binding peptide
  MOD_RES (5)..(6): Xaa is C or S
  MOD_RES (20)..(21)..(22)..(23)..(24): Xaa is A or G
  MOD_RES (25)..(26)..(27)..(28): Xaa is A or G or is absent
IPKAXXVPTELEPISMLYLXXXXXXXXXKFKYEDMVVE

SEQ ID NO: 30570 - protein, 39 aa, Artificial Sequence; identical to SEQ ID NO: 9200
  GFR-binding peptide
  MOD_RES (6)..(7): Xaa is C or S
  MOD_RES (21)..(22)..(23)..(24)..(25): Xaa is A or G
  MOD_RES (26)..(27)..(28)..(29): Xaa is A or G or is absent

SEQ ID NO: 30571 - protein, 41 aa, Artificial Sequence
  GFR-binding peptide
  MOD_RES (5)..(6)..(38)..(40): Xaa is C or S
IPKAXXVPTELSPISMLYIDEYDKVVYKQYEEMVVEGXGXR

SEQ ID NO: 30572 - protein, 40 aa, Artificial Sequence
  GFR-binding peptide
  MOD_RES (5)..(6)..(39): Xaa is C or S
  MOD_RES (20)..(21)..(22)..(23)..(24): Xaa is A or G
  MOD_RES (25)..(26)..(27)..(28): Xaa is A or G or is absent
SASPXXVPQDLEPISILYLXXXXXXXXXKFKYEMVVKSXK

SEQ ID NO: 30573 - protein, 34 aa, Artificial Sequence; identical to SEQ ID NO: 9202
  GFR-binding peptide
  MOD_RES (31)..(33): Xaa is C or S

SEQ ID NO: 30574 - protein, 41 aa, Artificial Sequence; identical to SEQ ID NO: 9203
  GFR-binding peptide
  MOD_RES (4)..(38)..(40): Xaa is C or S
  MOD_RES (18)..(19)..(20)..(21)..(22): Xaa is A or G
  MOD_RES (23)..(24)..(25)..(26): Xaa is A or G or is absent

SEQ ID NO: 30575 - protein, 36 aa, Artificial Sequence
  GFR-binding peptide
  MOD_RES (4)..(5): Xaa is C or S
PASXXVPARLNAISILYFDAANNVVLKKYRDMVVEA

SEQ ID NO: 30576 - protein, 37 aa, Artificial Sequence
  GFR-binding peptide
  MOD_RES (34)..(36): Xaa is C or S
  MOD_RES (14)..(15)..(16)..(17)..(18): Xaa is A or G
  MOD_RES (19)..(20)..(21)..(22): Xaa is A or G or is absent
VPARLNAISILYFXXXXXXXXXLKKYRDMVVEAXGXR

SEQ ID NO: 30577 - protein, 40 aa, Artificial Sequence
  GFR-binding peptide
  MOD_RES (4)..(5)..(37)..(39): Xaa is C or S
PKAXXVPTELSPISMLYIDENEKVVYKQYEDMVVEGXGXR

SEQ ID NO: 30578 - protein, 32 aa, Artificial Sequence
  GFR-binding peptide
  MOD_RES (1)..(1): Xaa is C or S
XVPARLNAISILYFDAANNVVLKKYRDMVVEA

SEQ ID NO: 30579 - protein, 37 aa, Artificial Sequence; identical to SEQ ID NO: 9205
  GFR-binding peptide
  MOD_RES (2)..(3)..(35)..(37): Xaa is C or S

SEQ ID NO: 30580 - protein, 33 aa, Artificial Sequence
  GFR-binding peptide
  MOD_RES (14)..(15)..(16)..(17)..(18): Xaa is A or G
  MOD_RES (19)..(20)..(21)..(22): Xaa is A or G or is absent
APTQLSPISVLYIXXXXXXXXXYKQYENMVVRA

SEQ ID NO: 30581 - protein, 36 aa, Artificial Sequence
  GFR-binding peptide
  MOD_RES (3)..(4)..(35): Xaa is C or S
SPXXVSQDLEPISILYLIGKTPKIKFKYEMIVKSXK

SEQ ID NO: 30582 - protein, 37 aa, Artificial Sequence
  GFR-binding peptide
  MOD_RES (4)..(5)..(37): Xaa is C or S
PASXXVPARLEPISILYLDAANNVVKFKYEDMVVEAX

SEQ ID NO: 30583 - protein, 38 aa, Artificial Sequence
  GFR-binding peptide
  MOD_RES (5)..(6)..(38): Xaa is C or S
ASKAXXVPTKLSPISILYKDKGVVTYLKYHYGMAVSEX

SEQ ID NO: 30584 - protein, 35 aa, Artificial Sequence; identical to SEQ ID NO: 9208
  GFR-binding peptide
  MOD_RES (1)..(35): Xaa is C or S
  MOD_RES (15)..(16)..(17)..(18)..(19): Xaa is A or G
  MOD_RES (20)..(21)..(22)..(23): Xaa is A or G or is absent

SEQ ID NO: 30585 - protein, 37 aa, Artificial Sequence; identical to SEQ ID NO: 9209
  GFR-binding peptide
  MOD_RES (35)..(37): Xaa is C or S
  MOD_RES (14)..(15)..(16)..(17)..(18): Xaa is A or G
  MOD_RES (19)..(20)..(21)..(22): Xaa is A or G or is absent

SEQ ID NO: 30586 - protein, 42 aa, Artificial Sequence; identical to SEQ ID NO: 9210
  GFR-binding peptide
  MOD_RES (3)..(4)..(39)..(41): Xaa is C or S
  MOD_RES (18)..(19)..(20)..(21)..(22): Xaa is A or G
  MOD_RES (23)..(24)..(25)..(26): Xaa is A or G or is absent

SEQ ID NO: 30587 - protein, 40 aa, Artificial Sequence; identical to SEQ ID NO: 9212
  GFR-binding peptide
  MOD_RES (5)..(6)..(38)..(40): Xaa is C or S

SEQ ID NO: 30588 - protein, 36 aa, Artificial Sequence; identical to SEQ ID NO: 9213
  GFR-binding peptide
  MOD_RES (1)..(35): Xaa is C or S
  MOD_RES (15)..(16)..(17)..(18)..(19): Xaa is A or G
  MOD_RES (20)..(21)..(22)..(23): Xaa is A or G or is absent

SEQ ID NO: 30589 - protein, 38 aa, Artificial Sequence; identical to SEQ ID NO: 9216
  GFR-binding peptide
  MOD_RES (2)..(3)..(38): Xaa is C or S
  MOD_RES (17)..(18)..(19)..(20)..(21): Xaa is A or G
  MOD_RES (22)..(23)..(24)..(25): Xaa is A or G or is absent

SEQ ID NO: 30590 - protein, 33 aa, Artificial Sequence
  GFR-binding peptide
  MOD_RES (33)..(33): Xaa is C or S
VPTKLSPISVLYIDDMGVPTYKQYEEGMSVAEX

SEQ ID NO: 30591 - protein, 39 aa, Artificial Sequence; identical to SEQ ID NO: 9219
  GFR-binding peptide
  MOD_RES (2)..(3)..(37)..(39): Xaa is C or S
  MOD_RES (17)..(18)..(19)..(20)..(21): Xaa is A or G
  MOD_RES (22)..(23)..(24)..(25): Xaa is A or G or is absent

SEQ ID NO: 30592 - protein, 36 aa, Artificial Sequence
  GFR-binding peptide
  MOD_RES (1)..(36): Xaa is C or S
  MOD_RES (15)..(16)..(17)..(18)..(19): Xaa is A or G
  MOD_RES (20)..(21)..(22)..(23): Xaa is A or G or is absent
XVPTKLSPISVLYIXXXXXXXXXYKQYEEGMSVAEX

SEQ ID NO: 30593 - protein, 33 aa, Artificial Sequence; identical to SEQ ID NO: 9221
  GFR-binding peptide
  MOD_RES (14)..(15)..(16)..(17)..(18): Xaa is A or G
  MOD_RES (19)..(20)..(21)..(22): Xaa is A or G or is absent

SEQ ID NO: 30594 - protein, 36 aa, Artificial Sequence; identical to SEQ ID NO: 9223
  GFR-binding peptide
  MOD_RES (2)..(3): Xaa is C or S
  MOD_RES (17)..(18)..(19)..(20)..(21): Xaa is A or G
  MOD_RES (22)..(23)..(24)..(25): Xaa is A or G or is absent

SEQ ID NO: 30595 - protein, 36 aa, Artificial Sequence; identical to SEQ ID NO: 9224
  GFR-binding peptide
  MOD_RES (1)..(2): Xaa is C or S
  MOD_RES (16)..(17)..(18)..(19)..(20): Xaa is A or G
  MOD_RES (21)..(22)..(23)..(24): Xaa is A or G or is absent

SEQ ID NO: 30596 - protein, 42 aa, Artificial Sequence; identical to SEQ ID NO: 9225
  GFR-binding peptide
  MOD_RES (5)..(6)..(40)..(42): Xaa is C or S
  MOD_RES (20)..(21)..(22)..(23)..(24): Xaa is A or G
  MOD_RES (25)..(26)..(27)..(28): Xaa is A or G or is absent

SEQ ID NO: 30597 - protein, 33 aa, Artificial Sequence
  GFR-binding peptide
  MOD_RES (14)..(15)..(16)..(17)..(18): Xaa is A or G
  MOD_RES (19)..(20)..(21)..(22): Xaa is A or G or is absent
APTQLEPISVLYLXXXXXXXXXKFKYENMVVRA

SEQ ID NO: 30598 - protein, 34 aa, Artificial Sequence; identical to SEQ ID NO: 9227
  GFR-binding peptide
  MOD_RES (1)..(2): Xaa is C or S
  MOD_RES (16)..(17)..(18)..(19)..(20): Xaa is A or G
  MOD_RES (21)..(22)..(23)..(24): Xaa is A or G or is absent

SEQ ID NO: 30599 - protein, 38 aa, Artificial Sequence; identical to SEQ ID NO: 9228
  GFR-binding peptide
  MOD_RES (1)..(2)..(36)..(38): Xaa is C or S
  MOD_RES (16)..(17)..(18)..(19)..(20): Xaa is A or G
  MOD_RES (21)..(22)..(23)..(24): Xaa is A or G or is absent

SEQ ID NO: 30600 - protein, 34 aa, Artificial Sequence; identical to SEQ ID NO: 9229
  GFR-binding peptide
  MOD_RES (2)..(3)..(34): Xaa is C or S

SEQ ID NO: 30601 - protein, 40 aa, Artificial Sequence; identical to SEQ ID NO: 9230
  GFR-binding peptide
  MOD_RES (5)..(6)..(39): Xaa is C or S
  MOD_RES (20)..(21)..(22)..(23)..(24): Xaa is A or G
  MOD_RES (25)..(26)..(27)..(28): Xaa is A or G or is absent

SEQ ID NO: 30602 - protein, 39 aa, Artificial Sequence; identical to SEQ ID NO: 9231
  GFR-binding peptide
  MOD_RES (1)..(2)..(36)..(38): Xaa is C or S
  MOD_RES (16)..(17)..(18)..(19)..(20): Xaa is A or G
  MOD_RES (21)..(22)..(23)..(24): Xaa is A or G or is absent

SEQ ID NO: 30603 - protein, 35 aa, Artificial Sequence
  GFR-binding peptide
  MOD_RES (3)..(4): Xaa is C or S
KPXXAPTKLSPISVLYIDDSSNVIYKQYENMVVRS

SEQ ID NO: 30604 - protein, 35 aa, Artificial Sequence
  GFR-binding peptide
  MOD_RES (2)..(3): Xaa is C or S
AXXVPTKLSPISVLYIDDMGVPTYKQYEEGMSVAE

SEQ ID NO: 30605 - protein, 37 aa, Artificial Sequence
  GFR-binding peptide
  MOD_RES (2)..(3)..(35)..(37): Xaa is C or S
AXXVPTELEPISMLYLDEYDKVVKFKYEEMVVEGXGX

SEQ ID NO: 30606 - protein, 37 aa, Artificial Sequence; identical to SEQ ID NO: 9235
  GFR-binding peptide
  MOD_RES (2)..(3)..(36): Xaa is C or S
  MOD_RES (17)..(18)..(19)..(20)..(21): Xaa is A or G
  MOD_RES (22)..(23)..(24)..(25): Xaa is A or G or is absent

SEQ ID NO: 30607 - protein, 37 aa, Artificial Sequence; identical to SEQ ID NO: 9238
  GFR-binding peptide
  MOD_RES (1)..(2)..(35)..(37): Xaa is C or S
  MOD_RES (16)..(17)..(18)..(19)..(20): Xaa is A or G
  MOD_RES (21)..(22)..(23)..(24): Xaa is A or G or is absent

SEQ ID NO: 30608 - protein, 33 aa, Artificial Sequence; identical to SEQ ID NO: 9239
  GFR-binding peptide
  MOD_RES (1)..(33): Xaa is C or S

SEQ ID NO: 30609 - protein, 41 aa, Artificial Sequence; identical to SEQ ID NO: 9240
  GFR-binding peptide
  MOD_RES (5)..(6)..(39)..(41): Xaa is C or S
  MOD_RES (20)..(21)..(22)..(23)..(24): Xaa is A or G
  MOD_RES (25)..(26)..(27)..(28): Xaa is A or G or is absent

SEQ ID NO: 30610 - protein, 39 aa, Artificial Sequence; identical to SEQ ID NO: 9242
  GFR-binding peptide
  MOD_RES (2)..(3)..(37)..(39): Xaa is C or S
  MOD_RES (17)..(18)..(19)..(20)..(21): Xaa is A or G
  MOD_RES (22)..(23)..(24)..(25): Xaa is A or G or is absent

SEQ ID NO: 30611 - protein, 41 aa, Artificial Sequence
  GFR-binding peptide
  MOD_RES (5)..(6)..(39)..(41): Xaa is C or S
VGKAXXVPTKLEPISVLYLDDMGVPTKFKYEEGMSVAEXGX

SEQ ID NO: 30612 - protein, 39 aa, Artificial Sequence
  GFR-binding peptide
  MOD_RES (4)..(5)..(39): Xaa is C or S
  MOD_RES (19)..(20)..(21)..(22)..(23): Xaa is A or G
  MOD_RES (24)..(25)..(26)..(27): Xaa is A or G or is absent
PKPXXAPTKLSPISVLYIXXXXXXXXXYKQYENMVVRSX

SEQ ID NO: 30613 - protein, 42 aa, Artificial Sequence
  GFR-binding peptide
  MOD_RES (7)..(39)..(41): Xaa is C or S
HVTKPTXAPTKLEPISVLYLDDSSNVIKFKYENMVVRSXGXH

SEQ ID NO: 30614 - protein, 42 aa, Artificial Sequence
  GFR-binding peptide
  MOD_RES (7)..(39)..(41): Xaa is C or S
HVTKPTXAPTKLSPISVLYIDDSSNVIYKQYENMVVRSXGXH

SEQ ID NO: 30615 - protein, 40 aa, Artificial Sequence
  GFR-binding peptide
  MOD_RES (3)..(4)..(38)..(40): Xaa is C or S
  MOD_RES (18)..(19)..(20)..(21)..(22): Xaa is A or G
  MOD_RES (23)..(24)..(25)..(26): Xaa is A or G or is absent
KPXXAPTQLSPISVLYIXXXXXXXXXYKQYENMVVRAXGX

SEQ ID NO: 30616 - protein, 37 aa, Artificial Sequence; identical to SEQ ID NO: 9244
  GFR-binding peptide
  MOD_RES (3)..(4)..(37): Xaa is C or S
  MOD_RES (18)..(19)..(20)..(21)..(22): Xaa is A or G
  MOD_RES (23)..(24)..(25)..(26): Xaa is A or G or is absent

SEQ ID NO: 30617 - protein, 41 aa, Artificial Sequence; identical to SEQ ID NO: 9245
  GFR-binding peptide
  MOD_RES (3)..(4)..(39)..(41): Xaa is C or S
  MOD_RES (18)..(19)..(20)..(21)..(22): Xaa is A or G
  MOD_RES (23)..(24)..(25)..(26): Xaa is A or G or is absent

SEQ ID NO: 30618 - protein, 33 aa, Artificial Sequence; identical to SEQ ID NO: 9247
  GFR-binding peptide
  MOD_RES (1)..(1): Xaa is C or S
  MOD_RES (15)..(16)..(17)..(18)..(19): Xaa is A or G
  MOD_RES (20)..(21)..(22)..(23): Xaa is A or G or is absent

SEQ ID NO: 30619 - protein, 39 aa, Artificial Sequence; identical to SEQ ID NO: 9248
  GFR-binding peptide
  MOD_RES (3)..(4)..(36)..(38): Xaa is C or S

SEQ ID NO: 30620 - protein, 40 aa, Artificial Sequence
  GFR-binding peptide
  MOD_RES (5)..(6)..(37)..(39): Xaa is C or S
SASPXXVSQDLSPISILYIIGKTPKIYKQYEMIVKSXKXS

SEQ ID NO: 30621 - protein, 43 aa, Artificial Sequence; identical to SEQ ID NO: 9250
  GFR-binding peptide
  MOD_RES (6)..(7)..(41)..(43): Xaa is C or S
  MOD_RES (21)..(22)..(23)..(24)..(25): Xaa is A or G
  MOD_RES (26)..(27)..(28)..(29): Xaa is A or G or is absent

SEQ ID NO: 30622 - protein, 42 aa, Artificial Sequence
  GFR-binding peptide
  MOD_RES (6)..(7)..(41): Xaa is C or S
  MOD_RES (21)..(22)..(23)..(24)..(25): Xaa is A or G
  MOD_RES (26)..(27)..(28)..(29): Xaa is A or G or is absent
YVPKPXXAPTKLEPISVLYLXXXXXXXXXKFKYENMVVRSXG

SEQ ID NO: 30623 - protein, 38 aa, Artificial Sequence
  GFR-binding peptide
  MOD_RES (6)..(38): Xaa is C or S
VTKPTXAPTKLSPISVLYIDDSSNVIYKQYENMVVRSX

SEQ ID NO: 30624 - protein, 30 aa, Artificial Sequence
  GFR-binding peptide
APTKLSPISVLYIDDSSNVIYKQYENMVVR

SEQ ID NO: 30625 - protein, 36 aa, Artificial Sequence; identical to SEQ ID NO: 9253
  GFR-binding peptide
  MOD_RES (1)..(34)..(36): Xaa is C or S
  MOD_RES (15)..(16)..(17)..(18)..(19): Xaa is A or G
  MOD_RES (20)..(21)..(22)..(23): Xaa is A or G or is absent

SEQ ID NO: 30626 - protein, 39 aa, Artificial Sequence
  GFR-binding peptide
  MOD_RES (4)..(5)..(36)..(38): Xaa is C or S
ASPXXVPQDLEPISILYLVGRTPKVKFKYEMVVKSXKXS

SEQ ID NO: 30627 - protein, 38 aa, Artificial Sequence; identical to SEQ ID NO: 9255
  GFR-binding peptide
  MOD_RES (5)..(6)..(37): Xaa is C or S

SEQ ID NO: 30628 - protein, 41 aa, Artificial Sequence
  GFR-binding peptide
  MOD_RES (6)..(7)..(41): Xaa is C or S
  MOD_RES (21)..(22)..(23)..(24)..(25): Xaa is A or G
  MOD_RES (26)..(27)..(28)..(29): Xaa is A or G or is absent
AAPASXXVPARLNAISILYFXXXXXXXXXLKKYRDMVVEAX

SEQ ID NO: 30629 - protein, 38 aa, Artificial Sequence
  GFR-binding peptide
  MOD_RES (5)..(6): Xaa is C or S
VGKAXXVPTKLEPISVLYLDDMGVPTKFKYEEGMSVAE

SEQ ID NO: 30630 - protein, 40 aa, Artificial Sequence
  GFR-binding peptide
  MOD_RES (6)..(7)..(39): Xaa is C or S
YVPKPXXAPTKLEPISVLYLDDSSNVIKFKYENMVVRSXG

SEQ ID NO: 30631 - protein, 36 aa, Artificial Sequence; identical to SEQ ID NO: 9257
  GFR-binding peptide
  MOD_RES (1)..(33)..(35): Xaa is C or S

SEQ ID NO: 30632 - protein, 31 aa, Artificial Sequence
  GFR-binding peptide
VPARLEPISILYLDAANNVVKFKYEDMVVEA

SEQ ID NO: 30633 - protein, 37 aa, Artificial Sequence; identical to SEQ ID NO: 9258
  GFR-binding peptide
  MOD_RES (4)..(5)..(36): Xaa is C or S

SEQ ID NO: 30634 - protein, 41 aa, Artificial Sequence; identical to SEQ ID NO: 9260
  GFR-binding peptide
  MOD_RES (6)..(7)..(41): Xaa is C or S
  MOD_RES (21)..(22)..(23)..(24)..(25): Xaa is A or G
  MOD_RES (26)..(27)..(28)..(29): Xaa is A or G or is absent

SEQ ID NO: 30635 - protein, 34 aa, Artificial Sequence; identical to SEQ ID NO: 9261
  GFR-binding peptide
  MOD_RES (3)..(4): Xaa is C or S

SEQ ID NO: 30636 - protein, 34 aa, Artificial Sequence
  GFR-binding peptide
  MOD_RES (32)..(34): Xaa is C or S
APTKLSPISVLYIDSSNNVIYKQYENMVVKAXGX

SEQ ID NO: 30637 - protein, 35 aa, Artificial Sequence
  GFR-binding peptide
  MOD_RES (1)..(35): Xaa is C or S
  MOD_RES (15)..(16)..(17)..(18)..(19): Xaa is A or G
  MOD_RES (20)..(21)..(22)..(23): Xaa is A or G or is absent
XAPTKLSPISVLYIXXXXXXXXXYKQYENMVVKAX

SEQ ID NO: 30638 - protein, 44 aa, Artificial Sequence
  GFR-binding peptide
  MOD_RES (6)..(7)..(41)..(43): Xaa is C or S
  MOD_RES (21)..(22)..(23)..(24)..(25): Xaa is A or G
  MOD_RES (26)..(27)..(28)..(29): Xaa is A or G or is absent
YVPKPXXAPTKLEPISVLYLXXXXXXXXXKFKYENMVVRSXGXH

SEQ ID NO: 30639 - protein, 37 aa, Artificial Sequence; identical to SEQ ID NO: 9265
  GFR-binding peptide
  MOD_RES (4)..(5): Xaa is C or S
  MOD_RES (19)..(20)..(21)..(22)..(23): Xaa is A or G
  MOD_RES (24)..(25)..(26)..(27): Xaa is A or G or is absent

SEQ ID NO: 30640 - protein, 36 aa, Artificial Sequence
  GFR-binding peptide
  MOD_RES (33)..(35): Xaa is C or S
  MOD_RES (14)..(15)..(16)..(17)..(18): Xaa is A or G
  MOD_RES (19)..(20)..(21)..(22): Xaa is A or G or is absent
VPQDLEPISILYLXXXXXXXXXKFKYEMVVKSXKXS

SEQ ID NO: 30641 - protein, 32 aa, Artificial Sequence
  GFR-binding peptide
  MOD_RES (14)..(15)..(16)..(17)..(18): Xaa is A or G
  MOD_RES (19)..(20)..(21)..(22): Xaa is A or G or is absent
VPQDLSPISILYIXXXXXXXXXYKQYEMVVKS

SEQ ID NO: 30642 - protein, 41 aa, Artificial Sequence; identical to SEQ ID NO: 9268
  GFR-binding peptide
  MOD_RES (6)..(7)..(40): Xaa is C or S
  MOD_RES (21)..(22)..(23)..(24)..(25): Xaa is A or G
  MOD_RES (26)..(27)..(28)..(29): Xaa is A or G or is absent

SEQ ID NO: 30643 - protein, 33 aa, Artificial Sequence
  GFR-binding peptide
  MOD_RES (32)..(32): Xaa is C or S
VPTELSPISMLYIDENEKVVYKQYEDMVVEGXG

SEQ ID NO: 30644 - protein, 32 aa, Artificial Sequence
  GFR-binding peptide
  MOD_RES (14)..(15)..(16)..(17)..(18): Xaa is A or G
  MOD_RES (19)..(20)..(21)..(22): Xaa is A or G or is absent
VPTKLNAISILYFXXXXXXXXXLKKYRGMAVS

SEQ ID NO: 30645 - protein, 34 aa, Artificial Sequence
  GFR-binding peptide
  MOD_RES (1)..(2)..(34): Xaa is C or S
XXVPTELEPISMLYLDENEKVVKFKYEDMVVEGX

SEQ ID NO: 30646 - protein, 36 aa, Artificial Sequence
  GFR-binding peptide
  MOD_RES (4)..(5)..(36): Xaa is C or S
AAPXXVPQALEPISILYLVGRKPKVKFKYEMIVRSX

SEQ ID NO: 30647 - protein, 34 aa, Artificial Sequence
  GFR-binding peptide
  MOD_RES (3)..(4): Xaa is C or S
KPXXAPTQLSPISVLYIDDSSNVIYKQYENMVVR

SEQ ID NO: 30648 - protein, 34 aa, Artificial Sequence
  GFR-binding peptide
  MOD_RES (1)..(2): Xaa is C or S
  MOD_RES (16)..(17)..(18)..(19)..(20): Xaa is A or G
  MOD_RES (21)..(22)..(23)..(24): Xaa is A or G or is absent
XXVPARLEPISILYLXXXXXXXXXKFKYEDMVVE

SEQ ID NO: 30649 - protein, 36 aa, Artificial Sequence
  GFR-binding peptide
  MOD_RES (3)..(4)..(36): Xaa is C or S
KAXXVPTELSPISMLYIDEYDKVVYKQYEEMVVEGX

SEQ ID NO: 30650 - protein, 41 aa, Artificial Sequence; identical to SEQ ID NO: 9269
  GFR-binding peptide
  MOD_RES (5)..(6)..(39)..(41): Xaa is C or S
  MOD_RES (20)..(21)..(22)..(23)..(24): Xaa is A or G
  MOD_RES (25)..(26)..(27)..(28): Xaa is A or G or is absent

SEQ ID NO: 30651 - protein, 39 aa, Artificial Sequence
  GFR-binding peptide
  MOD_RES (2)..(3)..(37)..(39): Xaa is C or S
  MOD_RES (17)..(18)..(19)..(20)..(21): Xaa is A or G
  MOD_RES (22)..(23)..(24)..(25): Xaa is A or G or is absent
AXXVPTKLSPISILYKXXXXXXXXXLKYHYGMAVSEXGX

SEQ ID NO: 30652 - protein, 33 aa, Artificial Sequence
  GFR-binding peptide
  MOD_RES (1)..(1): Xaa is C or S
  MOD_RES (15)..(16)..(17)..(18)..(19): Xaa is A or G
  MOD_RES (20)..(21)..(22)..(23): Xaa is A or G or is absent
XVPTKLNAISILYFXXXXXXXXXLKKYRGMAVS

SEQ ID NO: 30653 - protein, 40 aa, Artificial Sequence; identical to SEQ ID NO: 9274
  GFR-binding peptide
  MOD_RES (2)..(3)..(37)..(39): Xaa is C or S
  MOD_RES (17)..(18)..(19)..(20)..(21): Xaa is A or G
  MOD_RES (22)..(23)..(24)..(25): Xaa is A or G or is absent

SEQ ID NO: 30654 - protein, 38 aa, Artificial Sequence
  GFR-binding peptide
  MOD_RES (3)..(4)..(38): Xaa is C or S
  MOD_RES (18)..(19)..(20)..(21)..(22): Xaa is A or G
  MOD_RES (23)..(24)..(25)..(26): Xaa is A or G or is absent
KAXXVPTKLEPISILYLXXXXXXXXXKFKYEGMAVSEX

SEQ ID NO: 30655 - protein, 34 aa, Artificial Sequence
  GFR-binding peptide
  MOD_RES (1)..(2): Xaa is C or S
  MOD_RES (16)..(17)..(18)..(19)..(20): Xaa is A or G
  MOD_RES (21)..(22)..(23)..(24): Xaa is A or G or is absent
XXAPTKLEPISVLYLXXXXXXXXXKFKYENMVVK

SEQ ID NO: 30656 - protein, 41 aa, Artificial Sequence; identical to SEQ ID NO: 9276
  GFR-binding peptide
  MOD_RES (6)..(7)..(38)..(40): Xaa is C or S

SEQ ID NO: 30657 - protein, 35 aa, Artificial Sequence; identical to SEQ ID NO: 9277
  GFR-binding peptide
  MOD_RES (2)..(3): Xaa is C or S
  MOD_RES (17)..(18)..(19)..(20)..(21): Xaa is A or G
  MOD_RES (22)..(23)..(24)..(25): Xaa is A or G or is absent

SEQ ID NO: 30658 - protein, 38 aa, Artificial Sequence
  GFR-binding peptide
  MOD_RES (6)..(7)..(38): Xaa is C or S
ASAAPXXVPQALEPISILYLVGRKPKVKFKYEMIVRSX

SEQ ID NO: 30659 - protein, 36 aa, Artificial Sequence
  GFR-binding peptide
  MOD_RES (34)..(36): Xaa is C or S
  MOD_RES (14)..(15)..(16)..(17)..(18): Xaa is A or G
  MOD_RES (19)..(20)..(21)..(22): Xaa is A or G or is absent
APTKLSPISVLYIXXXXXXXXXYKQYENMVVRSXGX

SEQ ID NO: 30660 - protein, 39 aa, Artificial Sequence; identical to SEQ ID NO: 9279
  GFR-binding peptide
  MOD_RES (4)..(5)..(36)..(38): Xaa is C or S

SEQ ID NO: 30661 - protein, 36 aa, Artificial Sequence
  GFR-binding peptide
  MOD_RES (1)..(33)..(35): Xaa is C or S
XVPTELEPISMLYLDENEKVVKFKYEDMVVEGXGXR

SEQ ID NO: 30662 - protein, 34 aa, Artificial Sequence
  GFR-binding peptide
  MOD_RES (2)..(3): Xaa is C or S
AXXAPTKLEPISVLYLDSSNNVIKFKYENMVVKA

SEQ ID NO: 30663 - protein, 34 aa, Artificial Sequence; identical to SEQ ID NO: 9283
  GFR-binding peptide
  MOD_RES (34)..(34): Xaa is C or S
  MOD_RES (14)..(15)..(16)..(17)..(18): Xaa is A or G
  MOD_RES (19)..(20)..(21)..(22): Xaa is A or G or is absent

SEQ ID NO: 30664 - protein, 40 aa, Artificial Sequence
  GFR-binding peptide
  MOD_RES (2)..(3)..(37)..(39): Xaa is C or S
  MOD_RES (17)..(18)..(19)..(20)..(21): Xaa is A or G
  MOD_RES (22)..(23)..(24)..(25): Xaa is A or G or is absent
AXXVPTELSPISMLYIXXXXXXXXXYKQYEDMVVEGXGXR

SEQ ID NO: 30665 - protein, 36 aa, Artificial Sequence
  GFR-binding peptide
  MOD_RES (34)..(36): Xaa is C or S
  MOD_RES (14)..(15)..(16)..(17)..(18): Xaa is A or G
  MOD_RES (19)..(20)..(21)..(22): Xaa is A or G or is absent
VPARLSPISILYIXXXXXXXXXYKQYEDMVVEAXGX

SEQ ID NO: 30666 - protein, 37 aa, Artificial Sequence; identical to SEQ ID NO: 9285
  GFR-binding peptide
  MOD_RES (4)..(5): Xaa is C or S
  MOD_RES (19)..(20)..(21)..(22)..(23): Xaa is A or G
  MOD_RES (24)..(25)..(26)..(27): Xaa is A or G or is absent

SEQ ID NO: 30667 - protein, 40 aa, Artificial Sequence
  GFR-binding peptide
  MOD_RES (6)..(7)..(38)..(40): Xaa is C or S
ASASPXXVSQDLEPISILYLIGKTPKIKFKYEMIVKSXKX

SEQ ID NO: 30668 - protein, 36 aa, Artificial Sequence
  GFR-binding peptide
  MOD_RES (3)..(4): Xaa is C or S
  MOD_RES (18)..(19)..(20)..(21)..(22): Xaa is A or G
  MOD_RES (23)..(24)..(25)..(26): Xaa is A or G or is absent
KAXXVPTKLEPISILYLXXXXXXXXXKFKYEGMAVS

SEQ ID NO: 30669 - protein, 42 aa, Artificial Sequence
  GFR-binding peptide
  MOD_RES (5)..(39)..(41): Xaa is C or S
  MOD_RES (19)..(20)..(21)..(22)..(23): Xaa is A or G
  MOD_RES (24)..(25)..(26)..(27): Xaa is A or G or is absent
TKPTXAPTKLEPISVLYLXXXXXXXXXKFKYENMVVRSXGXH

SEQ ID NO: 30670 - protein, 41 aa, Artificial Sequence
  GFR-binding peptide
  MOD_RES (3)..(4)..(39)..(41): Xaa is C or S
  MOD_RES (18)..(19)..(20)..(21)..(22): Xaa is A or G
  MOD_RES (23)..(24)..(25)..(26): Xaa is A or G or is absent
KAXXVPTKLEPISVLYLXXXXXXXXXKFKYEEGMSVAEXGX

SEQ ID NO: 30671 - protein, 37 aa, Artificial Sequence
  GFR-binding peptide
  MOD_RES (1)..(35)..(37): Xaa is C or S
  MOD_RES (15)..(16)..(17)..(18)..(19): Xaa is A or G
  MOD_RES (20)..(21)..(22)..(23): Xaa is A or G or is absent
XVPARLSPISILYKXXXXXXXXXLKYHYDMVVEAXGX

SEQ ID NO: 30672 - protein, 41 aa, Artificial Sequence
  GFR-binding peptide
  MOD_RES (6)..(7)..(39)..(41): Xaa is C or S
AVPKAXXAPTKLSPISVLYIDSSNNVIYKQYENMVVKAXGX

SEQ ID NO: 30673 - protein, 40 aa, Artificial Sequence; identical to SEQ ID NO: 9287
  GFR-binding peptide
  MOD_RES (5)..(6)..(38)..(40): Xaa is C or S

SEQ ID NO: 30674 - protein, 38 aa, Artificial Sequence
  GFR-binding peptide
  MOD_RES (3)..(4)..(38): Xaa is C or S
  MOD_RES (18)..(19)..(20)..(21)..(22): Xaa is A or G
  MOD_RES (23)..(24)..(25)..(26): Xaa is A or G or is absent
KPXXAPTKLEPISVLYLXXXXXXXXXKFKYENMVVRSX

SEQ ID NO: 30675 - protein, 42 aa, Artificial Sequence
  GFR-binding peptide
  MOD_RES (5)..(6)..(40)..(42): Xaa is C or S
  MOD_RES (20)..(21)..(22)..(23)..(24): Xaa is A or G
  MOD_RES (25)..(26)..(27)..(28): Xaa is A or G or is absent
ASKAXXVPTKLSPISILYKXXXXXXXXXLKYHYGMAVSEXGX

SEQ ID NO: 30676 - protein, 35 aa, Artificial Sequence
  GFR-binding peptide
  MOD_RES (2)..(34): Xaa is C or S
TXAPTKLEPISVLYLDDSSNVIKFKYENMVVRSXG

SEQ ID NO: 30677 - protein, 40 aa, Artificial Sequence
  GFR-binding peptide
  MOD_RES (4)..(5)..(39): Xaa is C or S
  MOD_RES (19)..(20)..(21)..(22)..(23): Xaa is A or G
  MOD_RES (24)..(25)..(26)..(27): Xaa is A or G or is absent
PKAXXAPTKLEPISVLYLXXXXXXXXXKFKYENMVVKAXG

SEQ ID NO: 30678 - protein, 34 aa, Artificial Sequence; identical to SEQ ID NO: 9289
  GFR-binding peptide
  MOD_RES (3)..(4): Xaa is C or S

SEQ ID NO: 30679 - protein, 36 aa, Artificial Sequence
  GFR-binding peptide
  MOD_RES (4)..(5)..(36): Xaa is C or S
ASPXXVPQDLSPISILYIVGRTPKVYKQYEMVVKSX

SEQ ID NO: 30680 - protein, 39 aa, Artificial Sequence; identical to SEQ ID NO: 9292
  GFR-binding peptide
  MOD_RES (6)..(7): Xaa is C or S
  MOD_RES (21)..(22)..(23)..(24)..(25): Xaa is A or G
  MOD_RES (26)..(27)..(28)..(29): Xaa is A or G or is absent

SEQ ID NO: 30681 - protein, 34 aa, Artificial Sequence; identical to SEQ ID NO: 9293
  GFR-binding peptide
  MOD_RES (1)..(2): Xaa is C or S
  MOD_RES (16)..(17)..(18)..(19)..(20): Xaa is A or G
  MOD_RES (21)..(22)..(23)..(24): Xaa is A or G or is absent

SEQ ID NO: 30682 - protein, 44 aa, Artificial Sequence; identical to SEQ ID NO: 9294
  GFR-binding peptide
  MOD_RES (6)..(7)..(41)..(43): Xaa is C or S
  MOD_RES (21)..(22)..(23)..(24)..(25): Xaa is A or G
  MOD_RES (26)..(27)..(28)..(29): Xaa is A or G or is absent

SEQ ID NO: 30683 - protein, 42 aa, Artificial Sequence
  GFR-binding peptide
  MOD_RES (5)..(6)..(40)..(42): Xaa is C or S
  MOD_RES (20)..(21)..(22)..(23)..(24): Xaa is A or G
  MOD_RES (25)..(26)..(27)..(28): Xaa is A or G or is absent
IPKAXXVPTELEPISMLYLXXXXXXXXXKFKYEDMVVEGXGX

SEQ ID NO: 30684 - protein, 35 aa, Artificial Sequence
  GFR-binding peptide
  MOD_RES (3)..(4)..(35): Xaa is C or S
SPXXVSQDLEPISILYLIGKTPKIKFKYEMIVKSX

SEQ ID NO: 30685 - protein, 31 aa, Artificial Sequence
  GFR-binding peptide
  MOD_RES (1)..(1): Xaa is C or S
XVPARLNAISILYFDAANNVVLKKYRDMVVE

SEQ ID NO: 30686 - protein, 39 aa, Artificial Sequence; identical to SEQ ID NO: 9298
  GFR-binding peptide
  MOD_RES (1)..(2)..(37)..(39): Xaa is C or S
  MOD_RES (16)..(17)..(18)..(19)..(20): Xaa is A or G
  MOD_RES (21)..(22)..(23)..(24): Xaa is A or G or is absent

SEQ ID NO: 30687 - protein, 40 aa, Artificial Sequence
  GFR-binding peptide
  MOD_RES (5)..(6)..(40): Xaa is C or S
  MOD_RES (20)..(21)..(22)..(23)..(24): Xaa is A or G
  MOD_RES (25)..(26)..(27)..(28): Xaa is A or G or is absent
APASXXVPARLNAISILYFXXXXXXXXXLKKYRDMVVEAX

SEQ ID NO: 30688 - protein, 36 aa, Artificial Sequence; identical to SEQ ID NO: 9300
  GFR-binding peptide
  MOD_RES (5)..(6): Xaa is C or S

SEQ ID NO: 30689 - protein, 42 aa, Artificial Sequence; identical to SEQ ID NO: 9302
  GFR-binding peptide
  MOD_RES (6)..(7)..(40)..(42): Xaa is C or S
  MOD_RES (21)..(22)..(23)..(24)..(25): Xaa is A or G
  MOD_RES (26)..(27)..(28)..(29): Xaa is A or G or is absent

SEQ ID NO: 30690 - protein, 33 aa, Artificial Sequence
  GFR-binding peptide
  MOD_RES (2)..(3): Xaa is C or S
PXXVSQDLEPISILYLIGKTPKIKFKYEMIVKS

SEQ ID NO: 30691 - protein, 40 aa, Artificial Sequence
  GFR-binding peptide
  MOD_RES (5)..(6)..(38)..(40): Xaa is C or S
APASXXVPARLNAISILYFDAANNVVLKKYRDMVVEAXGX

SEQ ID NO: 30692 - protein, 42 aa, Artificial Sequence
  GFR-binding peptide
  MOD_RES (5)..(6)..(41): Xaa is C or S
  MOD_RES (20)..(21)..(22)..(23)..(24): Xaa is A or G
  MOD_RES (25)..(26)..(27)..(28): Xaa is A or G or is absent
VGKAXXVPTKLSPISVLYIXXXXXXXXXYKQYEEGMSVAEXG

SEQ ID NO: 30693 - protein, 37 aa, Artificial Sequence
  GFR-binding peptide
  MOD_RES (2)..(3)..(37): Xaa is C or S
  MOD_RES (17)..(18)..(19)..(20)..(21): Xaa is A or G
  MOD_RES (22)..(23)..(24)..(25): Xaa is A or G or is absent
PXXAPTQLEPISVLYLXXXXXXXXXKFKYENMVVRAX

SEQ ID NO: 30694 - protein, 43 aa, Artificial Sequence; identical to SEQ ID NO: 9303
  GFR-binding peptide
  MOD_RES (6)..(7)..(40)..(42): Xaa is C or S
  MOD_RES (21)..(22)..(23)..(24)..(25): Xaa is A or G
  MOD_RES (26)..(27)..(28)..(29): Xaa is A or G or is absent

SEQ ID NO: 30695 - protein, 33 aa, Artificial Sequence; identical to SEQ ID NO: 9304
  GFR-binding peptide
  MOD_RES (31)..(33): Xaa is C or S

SEQ ID NO: 30696 - protein, 39 aa, Artificial Sequence
  GFR-binding peptide
  MOD_RES (3)..(4)..(36)..(38): Xaa is C or S
KAXXVPTKLNAISILYFDKGVVTYLKKYRGMAVSEXGXR

SEQ ID NO: 30697 - protein, 35 aa, Artificial Sequence
  GFR-binding peptide
  MOD_RES (1)..(33)..(35): Xaa is C or S
XVPTKLSPISILYKDKGVVTYLKYHYGMAVSEXGX

SEQ ID NO: 30698 - protein, 30 aa, Artificial Sequence
  GFR-binding peptide
VPTELEPISMLYLDENEKVVKFKYEDMVVE

SEQ ID NO: 30699 - protein, 36 aa, Artificial Sequence
  GFR-binding peptide
  MOD_RES (3)..(4)..(36): Xaa is C or S
ASXXVPARLEPISILYLDAANNVVKFKYEDMVVEAX

SEQ ID NO: 30700 - protein, 41 aa, Artificial Sequence; identical to SEQ ID NO: 9306
  GFR-binding peptide
  MOD_RES (5)..(6)..(38)..(40): Xaa is C or S

SEQ ID NO: 30701 - protein, 38 aa, Artificial Sequence
  GFR-binding peptide
  MOD_RES (6)..(7): Xaa is C or S
SIPKAXXVPTELSPISMLYIDEYDKVVYKQYEEMVVEG

SEQ ID NO: 30702 - protein, 38 aa, Artificial Sequence
  GFR-binding peptide
  MOD_RES (3)..(4)..(36)..(38): Xaa is C or S
ASXXVPARLNAISILYFDAANNVVLKKYRDMVVEAXGX

SEQ ID NO: 30703 - protein, 37 aa, Artificial Sequence
  GFR-binding peptide
  MOD_RES (2)..(3)..(35)..(37): Xaa is C or S
AXXVPTELEPISMLYLDENEKVVKFKYEDMVVEGXGX

SEQ ID NO: 30704 - protein, 41 aa, Artificial Sequence; identical to SEQ ID NO: 9310
  GFR-binding peptide
  MOD_RES (3)..(4)..(38)..(40): Xaa is C or S
  MOD_RES (18)..(19)..(20)..(21)..(22): Xaa is A or G
  MOD_RES (23)..(24)..(25)..(26): Xaa is A or G or is absent

SEQ ID NO: 30705 - protein, 35 aa, Artificial Sequence; identical to SEQ ID NO: 9311
  GFR-binding peptide
  MOD_RES (1)..(35): Xaa is C or S
  MOD_RES (15)..(16)..(17)..(18)..(19): Xaa is A or G
  MOD_RES (20)..(21)..(22)..(23): Xaa is A or G or is absent

SEQ ID NO: 30706 - protein, 39 aa, Artificial Sequence; identical to SEQ ID NO: 9314
  GFR-binding peptide
  MOD_RES (2)..(3)..(36)..(38): Xaa is C or S
  MOD_RES (17)..(18)..(19)..(20)..(21): Xaa is A or G
  MOD_RES (22)..(23)..(24)..(25): Xaa is A or G or is absent

SEQ ID NO: 30707 - protein, 39 aa, Artificial Sequence
  GFR-binding peptide
  MOD_RES (2)..(3)..(37)..(39): Xaa is C or S
  MOD_RES (17)..(18)..(19)..(20)..(21): Xaa is A or G
  MOD_RES (22)..(23)..(24)..(25): Xaa is A or G or is absent
PXXAPTKLSPISVLYIXXXXXXXXXYKQYENMVVRSXGX

SEQ ID NO: 30708 - protein, 36 aa, Artificial Sequence; identical to SEQ ID NO: 9316
  GFR-binding peptide
  MOD_RES (3)..(4): Xaa is C or S
  MOD_RES (18)..(19)..(20)..(21)..(22): Xaa is A or G
  MOD_RES (23)..(24)..(25)..(26): Xaa is A or G or is absent

SEQ ID NO: 30709 - protein, 39 aa, Artificial Sequence
  GFR-binding peptide
  MOD_RES (4)..(5)..(39): Xaa is C or S
  MOD_RES (19)..(20)..(21)..(22)..(23): Xaa is A or G
  MOD_RES (24)..(25)..(26)..(27): Xaa is A or G or is absent
PASXXVPARLEPISILYLXXXXXXXXXKFKYEDMVVEAX

SEQ ID NO: 30710 - protein, 31 aa, Artificial Sequence
  GFR-binding peptide
APTQLSPISVLYIDDSSNVIYKQYENMVVRA

SEQ ID NO: 30711 - protein, 37 aa, Artificial Sequence; identical to SEQ ID NO: 9317
  GFR-binding peptide
  MOD_RES (3)..(4)..(37): Xaa is C or S
  MOD_RES (18)..(19)..(20)..(21)..(22): Xaa is A or G
  MOD_RES (23)..(24)..(25)..(26): Xaa is A or G or is absent

SEQ ID NO: 30712 - protein, 40 aa, Artificial Sequence
  GFR-binding peptide
  MOD_RES (6)..(7): Xaa is C or S
  MOD_RES (21)..(22)..(23)..(24)..(25): Xaa is A or G
  MOD_RES (26)..(27)..(28)..(29): Xaa is A or G or is absent
KIPKAXXVPTELEPISMLYLXXXXXXXXXKFKYEDMVVEG

SEQ ID NO: 30713 - protein, 35 aa, Artificial Sequence; identical to SEQ ID NO: 9324
  GFR-binding peptide
  MOD_RES (1)..(33)..(35): Xaa is C or S

SEQ ID NO: 30714 - protein, 39 aa, Artificial Sequence; identical to SEQ ID NO: 9325
  GFR-binding peptide
  MOD_RES (5)..(6): Xaa is C or S
  MOD_RES (20)..(21)..(22)..(23)..(24): Xaa is A or G
  MOD_RES (25)..(26)..(27)..(28): Xaa is A or G or is absent

SEQ ID NO: 30715 - protein, 37 aa, Artificial Sequence
  GFR-binding peptide
  MOD_RES (5)..(6): Xaa is C or S
IPKAXXVPTELEPISMLYLDENEKVVKFKYEDMVVEG

SEQ ID NO: 30716 - protein, 40 aa, Artificial Sequence; identical to SEQ ID NO: 9326
  GFR-binding peptide
  MOD_RES (4)..(5)..(39): Xaa is C or S
  MOD_RES (19)..(20)..(21)..(22)..(23): Xaa is A or G
  MOD_RES (24)..(25)..(26)..(27): Xaa is A or G or is absent

SEQ ID NO: 30717 - protein, 37 aa, Artificial Sequence; identical to SEQ ID NO: 9327
  GFR-binding peptide
  MOD_RES (1)..(2)..(35)..(37): Xaa is C or S
  MOD_RES (16)..(17)..(18)..(19)..(20): Xaa is A or G
  MOD_RES (21)..(22)..(23)..(24): Xaa is A or G or is absent

SEQ ID NO: 30718 - protein, 41 aa, Artificial Sequence
  GFR-binding peptide
  MOD_RES (4)..(5)..(39)..(41): Xaa is C or S
  MOD_RES (19)..(20)..(21)..(22)..(23): Xaa is A or G
  MOD_RES (24)..(25)..(26)..(27): Xaa is A or G or is absent
SKAXXVPTKLSPISILYIXXXXXXXXXYKQYEGMAVSEXGX

SEQ ID NO: 30719 - protein, 37 aa, Artificial Sequence; identical to SEQ ID NO: 9328
  GFR-binding peptide
  MOD_RES (3)..(4)..(36): Xaa is C or S

SEQ ID NO: 30720 - protein, 36 aa, Artificial Sequence; identical to SEQ ID NO: 9330
  GFR-binding peptide
  MOD_RES (34)..(36): Xaa is C or S
  MOD_RES (14)..(15)..(16)..(17)..(18): Xaa is A or G
  MOD_RES (19)..(20)..(21)..(22): Xaa is A or G or is absent

SEQ ID NO: 30721 - protein, 35 aa, Artificial Sequence; identical to SEQ ID NO: 9332
  GFR-binding peptide
  MOD_RES (3)..(4)..(35): Xaa is C or S

SEQ ID NO: 30722 - protein, 34 aa, Artificial Sequence
  GFR-binding peptide
  MOD_RES (1)..(2)..(34): Xaa is C or S
XXAPTQLSPISVLYIDDSSNVIYKQYENMVVRAX

SEQ ID NO: 30723 - protein, 37 aa, Artificial Sequence
  GFR-binding peptide
  MOD_RES (34)..(36): Xaa is C or S
  MOD_RES (14)..(15)..(16)..(17)..(18): Xaa is A or G
  MOD_RES (19)..(20)..(21)..(22): Xaa is A or G or is absent
VPTELEPISMLYLXXXXXXXXXKFKYEEMVVEGXGXR

SEQ ID NO: 30724 - protein, 35 aa, Artificial Sequence; identical to SEQ ID NO: 9335
  GFR-binding peptide
  MOD_RES (2)..(3)..(34): Xaa is C or S

SEQ ID NO: 30725 - protein, 34 aa, Artificial Sequence
  GFR-binding peptide
  MOD_RES (1)..(1): Xaa is C or S
  MOD_RES (15)..(16)..(17)..(18)..(19): Xaa is A or G
  MOD_RES (20)..(21)..(22)..(23): Xaa is A or G or is absent
XVPTKLEPISILYLXXXXXXXXXKFKYEGMAVSE

SEQ ID NO: 30726 - protein, 35 aa, Artificial Sequence
  GFR-binding peptide
  MOD_RES (34)..(34): Xaa is C or S
  MOD_RES (14)..(15)..(16)..(17)..(18): Xaa is A or G
  MOD_RES (19)..(20)..(21)..(22): Xaa is A or G or is absent
APTQLSPISVLYIXXXXXXXXXYKQYENMVVRAXG

SEQ ID NO: 30727 - protein, 31 aa, Artificial Sequence
  GFR-binding peptide
APTKLEPISVLYLDSSNNVIKFKYENMVVKA

SEQ ID NO: 30728 - protein, 38 aa, Artificial Sequence
  GFR-binding peptide
  MOD_RES (4)..(5)..(37): Xaa is C or S
PKAXXVPTELEPISMLYLDEYDKVVKFKYEEMVVEGXG

SEQ ID NO: 30729 - protein, 38 aa, Artificial Sequence; identical to SEQ ID NO: 9340
  GFR-binding peptide
  MOD_RES (1)..(2)..(36)..(38): Xaa is C or S
  MOD_RES (16)..(17)..(18)..(19)..(20): Xaa is A or G
  MOD_RES (21)..(22)..(23)..(24): Xaa is A or G or is absent

SEQ ID NO: 30730 - protein, 38 aa, Artificial Sequence
  GFR-binding peptide
  MOD_RES (5)..(6): Xaa is C or S
  MOD_RES (20)..(21)..(22)..(23)..(24): Xaa is A or G
  MOD_RES (25)..(26)..(27)..(28): Xaa is A or G or is absent
VPKPXXAPTQLSPISVLYIXXXXXXXXXYKQYENMVVR

SEQ ID NO: 30731 - protein, 31 aa, Artificial Sequence; identical to SEQ ID NO: 9343
  GFR-binding peptide

SEQ ID NO: 30732 - protein, 39 aa, Artificial Sequence; identical to SEQ ID NO: 9344
  GFR-binding peptide
  MOD_RES (3)..(4)..(38): Xaa is C or S
  MOD_RES (18)..(19)..(20)..(21)..(22): Xaa is A or G
  MOD_RES (23)..(24)..(25)..(26): Xaa is A or G or is absent

SEQ ID NO: 30733 - protein, 41 aa, Artificial Sequence
  GFR-binding peptide
  MOD_RES (6)..(7)..(41): Xaa is C or S
  MOD_RES (21)..(22)..(23)..(24)..(25): Xaa is A or G
  MOD_RES (26)..(27)..(28)..(29): Xaa is A or G or is absent
KASKAXXVPTKLNAISILYFXXXXXXXXXLKKYRGMAVSEX

SEQ ID NO: 30734 - protein, 40 aa, Artificial Sequence
  GFR-binding peptide
  MOD_RES (6)..(7): Xaa is C or S
  MOD_RES (21)..(22)..(23)..(24)..(25): Xaa is A or G
  MOD_RES (26)..(27)..(28)..(29): Xaa is A or G or is absent
YVPKPXXAPTKLEPISVLYLXXXXXXXXXKFKYENMVVRS

SEQ ID NO: 30735 - protein, 35 aa, Artificial Sequence
  GFR-binding peptide
  MOD_RES (32)..(34): Xaa is C or S
VPARLNAISILYFDAANNVVLKKYRDMVVEAXGXR

SEQ ID NO: 30736 - protein, 41 aa, Artificial Sequence; identical to SEQ ID NO: 9348
  GFR-binding peptide
  MOD_RES (4)..(5)..(38)..(40): Xaa is C or S
  MOD_RES (19)..(20)..(21)..(22)..(23): Xaa is A or G
  MOD_RES (24)..(25)..(26)..(27): Xaa is A or G or is absent

SEQ ID NO: 30737 - protein, 38 aa, Artificial Sequence; identical to SEQ ID NO: 9349
  GFR-binding peptide
  MOD_RES (3)..(4)..(35)..(37): Xaa is C or S

SEQ ID NO: 30738 - protein, 38 aa, Artificial Sequence
  GFR-binding peptide
  MOD_RES (1)..(35)..(37): Xaa is C or S
  MOD_RES (15)..(16)..(17)..(18)..(19): Xaa is A or G
  MOD_RES (20)..(21)..(22)..(23): Xaa is A or G or is absent
XVPARLEPISILYLXXXXXXXXXKFKYEDMVVEAXGXR

SEQ ID NO: 30739 - protein, 34 aa, Artificial Sequence
  GFR-binding peptide
  MOD_RES (1)..(33): Xaa is C or S
XAPTQLEPISVLYLDDSSNVIKFKYENMVVRAXG

SEQ ID NO: 30740 - protein, 37 aa, Artificial Sequence
  GFR-binding peptide
  MOD_RES (1)..(2)..(35)..(37): Xaa is C or S
  MOD_RES (16)..(17)..(18)..(19)..(20): Xaa is A or G
  MOD_RES (21)..(22)..(23)..(24): Xaa is A or G or is absent
XXVPQDLSPISILYIXXXXXXXXXYKQYEMVVKSXKX

SEQ ID NO: 30741 - protein, 38 aa, Artificial Sequence
  GFR-binding peptide
  MOD_RES (1)..(2)..(36)..(38): Xaa is C or S
  MOD_RES (16)..(17)..(18)..(19)..(20): Xaa is A or G
  MOD_RES (21)..(22)..(23)..(24): Xaa is A or G or is absent
XXVPTELEPISMLYLXXXXXXXXXKFKYEEMVVEGXGX

SEQ ID NO: 30742 - protein, 37 aa, Artificial Sequence
  GFR-binding peptide
  MOD_RES (6)..(7): Xaa is C or S
AVPKAXXAPTKLEPISVLYLDSSNNVIKFKYENMVVK

SEQ ID NO: 30743 - protein, 39 aa, Artificial Sequence; identical to SEQ ID NO: 9352
  GFR-binding peptide
  MOD_RES (5)..(6)..(38): Xaa is C or S

SEQ ID NO: 30744 - protein, 36 aa, Artificial Sequence; identical to SEQ ID NO: 9353
  GFR-binding peptide
  MOD_RES (33)..(35): Xaa is C or S
  MOD_RES (14)..(15)..(16)..(17)..(18): Xaa is A or G
  MOD_RES (19)..(20)..(21)..(22): Xaa is A or G or is absent

SEQ ID NO: 30745 - protein, 37 aa, Artificial Sequence; identical to SEQ ID NO: 9355
  GFR-binding peptide
  MOD_RES (4)..(5)..(37): Xaa is C or S

SEQ ID NO: 30746 - protein, 37 aa, Artificial Sequence
  GFR-binding peptide
  MOD_RES (1)..(34)..(36): Xaa is C or S
XVPTKLEPISVLYLDDMGVPTKFKYEEGMSVAEXGXR

SEQ ID NO: 30747 - protein, 36 aa, Artificial Sequence; identical to SEQ ID NO: 9356
  GFR-binding peptide
  MOD_RES (1)..(2)..(34)..(36): Xaa is C or S

SEQ ID NO: 30748 - protein, 41 aa, Artificial Sequence; identical to SEQ ID NO: 9357
  GFR-binding peptide
  MOD_RES (2)..(3)..(38)..(40): Xaa is C or S
  MOD_RES (17)..(18)..(19)..(20)..(21): Xaa is A or G
  MOD_RES (22)..(23)..(24)..(25): Xaa is A or G or is absent

SEQ ID NO: 30749 - protein, 38 aa, Artificial Sequence
  GFR-binding peptide
  MOD_RES (6)..(7)..(38): Xaa is C or S
ASASPXXVSQDLEPISILYLIGKTPKIKFKYEMIVKSX

SEQ ID NO: 30750 - protein, 31 aa, Artificial Sequence
  GFR-binding peptide
  MOD_RES (1)..(1): Xaa is C or S
XVPQDLSPISILYIVGRTPKVYKQYEMVVKS

SEQ ID NO: 30751 - protein, 36 aa, Artificial Sequence
  GFR-binding peptide
  MOD_RES (33)..(35): Xaa is C or S
VPTKLSPISVLYIDDMGVPTYKQYEEGMSVAEXGXR

SEQ ID NO: 30752 - protein, 35 aa, Artificial Sequence; identical to SEQ ID NO: 9359
  GFR-binding peptide
  MOD_RES (4)..(5): Xaa is C or S

SEQ ID NO: 30753 - protein, 38 aa, Artificial Sequence; identical to SEQ ID NO: 9361
  GFR-binding peptide
  MOD_RES (3)..(4)..(38): Xaa is C or S
  MOD_RES (18)..(19)..(20)..(21)..(22): Xaa is A or G
  MOD_RES (23)..(24)..(25)..(26): Xaa is A or G or is absent

SEQ ID NO: 30754 - protein, 44 aa, Artificial Sequence
  GFR-binding peptide
  MOD_RES (6)..(7)..(41)..(43): Xaa is C or S
  MOD_RES (21)..(22)..(23)..(24)..(25): Xaa is A or G
  MOD_RES (26)..(27)..(28)..(29): Xaa is A or G or is absent
AAPASXXVPARLEPISILYLXXXXXXXXXKFKYEDMVVEAXGXR

SEQ ID NO: 30755 - protein, 36 aa, Artificial Sequence
  GFR-binding peptide
  MOD_RES (4)..(5): Xaa is C or S
SKAXXVPTKLSPISILYKDKGVVTYLKYHYGMAVSE

SEQ ID NO: 30756 - protein, 37 aa, Artificial Sequence
  GFR-binding peptide
  MOD_RES (2)..(3)..(37): Xaa is C or S
  MOD_RES (17)..(18)..(19)..(20)..(21): Xaa is A or G
  MOD_RES (22)..(23)..(24)..(25): Xaa is A or G or is absent
SXXVPARLNAISILYFXXXXXXXXXLKKYRDMVVEAX

SEQ ID NO: 30757 - protein, 32 aa, Artificial Sequence
  GFR-binding peptide
  MOD_RES (2)..(2): Xaa is C or S
TXAPTKLEPISVLYLDDSSNVIKFKYENMVVR

SEQ ID NO: 30758 - protein, 39 aa, Artificial Sequence
  GFR-binding peptide
  MOD_RES (1)..(2)..(36)..(38): Xaa is C or S
  MOD_RES (16)..(17)..(18)..(19)..(20): Xaa is A or G
  MOD_RES (21)..(22)..(23)..(24): Xaa is A or G or is absent
XXVPTKLEPISILYLXXXXXXXXXKFKYEGMAVSEXGXR

SEQ ID NO: 30759 - protein, 31 aa, Artificial Sequence; identical to SEQ ID NO: 9367
  GFR-binding peptide
  MOD_RES (1)..(1): Xaa is C or S

SEQ ID NO: 30760 - protein, 35 aa, Artificial Sequence; identical to SEQ ID NO: 9368
  GFR-binding peptide
  MOD_RES (1)..(2): Xaa is C or S
  MOD_RES (16)..(17)..(18)..(19)..(20): Xaa is A or G
  MOD_RES (21)..(22)..(23)..(24): Xaa is A or G or is absent

SEQ ID NO: 30761 - protein, 36 aa, Artificial Sequence
  GFR-binding peptide
  MOD_RES (2)..(3)..(36): Xaa is C or S
  MOD_RES (17)..(18)..(19)..(20)..(21): Xaa is A or G
  MOD_RES (22)..(23)..(24)..(25): Xaa is A or G or is absent
PXXVPQDLSPISILYIXXXXXXXXXYKQYEMVVKSX

SEQ ID NO: 30762 - protein, 40 aa, Artificial Sequence
  GFR-binding peptide
  MOD_RES (3)..(4)..(38)..(40): Xaa is C or S
  MOD_RES (18)..(19)..(20)..(21)..(22): Xaa is A or G
  MOD_RES (23)..(24)..(25)..(26): Xaa is A or G or is absent
KAXXVPTKLNAISILYFXXXXXXXXXLKKYRGMAVSEXGX

SEQ ID NO: 30763 - protein, 34 aa, Artificial Sequence
  GFR-binding peptide
  MOD_RES (2)..(34): Xaa is C or S
TXAPTKLSPISVLYIDDSSNVIYKQYENMVVRSX

SEQ ID NO: 30764 - protein, 34 aa, Artificial Sequence; identical to SEQ ID NO: 9369
  GFR-binding peptide
  MOD_RES (1)..(2)..(34): Xaa is C or S

SEQ ID NO: 30765 - protein, 39 aa, Artificial Sequence; identical to SEQ ID NO: 9370
  GFR-binding peptide
  MOD_RES (6)..(7): Xaa is C or S
  MOD_RES (21)..(22)..(23)..(24)..(25): Xaa is A or G
  MOD_RES (26)..(27)..(28)..(29): Xaa is A or G or is absent

SEQ ID NO: 30766 - protein, 31 aa, Artificial Sequence
  GFR-binding peptide
  MOD_RES (1)..(1): Xaa is C or S
XVPARLSPISILYKDAANNVVLKYHYDMVVE

SEQ ID NO: 30767 - protein, 41 aa, Artificial Sequence; identical to SEQ ID NO: 9371
  GFR-binding peptide
  MOD_RES (6)..(7)..(39)..(41): Xaa is C or S

SEQ ID NO: 30768 - protein, 39 aa, Artificial Sequence; identical to SEQ ID NO: 9373
  GFR-binding peptide
  MOD_RES (4)..(5)..(36)..(38): Xaa is C or S

SEQ ID NO: 30769 - protein, 36 aa, Artificial Sequence
  GFR-binding peptide
  MOD_RES (1)..(2)..(35): Xaa is C or S
  MOD_RES (16)..(17)..(18)..(19)..(20): Xaa is A or G
  MOD_RES (21)..(22)..(23)..(24): Xaa is A or G or is absent
XXVPQDLEPISILYLXXXXXXXXXKFKYEMVVKSXK

SEQ ID NO: 30770 - protein, 39 aa, Artificial Sequence
  GFR-binding peptide
  MOD_RES (1)..(36)..(38): Xaa is C or S
  MOD_RES (15)..(16)..(17)..(18)..(19): Xaa is A or G
  MOD_RES (20)..(21)..(22)..(23): Xaa is A or G or is absent
XVPTKLEPISVLYLXXXXXXXXXKFKYEEGMSVAEXGXR

SEQ ID NO: 30771 - protein, 40 aa, Artificial Sequence
  GFR-binding peptide
  MOD_RES (3)..(4)..(38)..(40): Xaa is C or S
  MOD_RES (18)..(19)..(20)..(21)..(22): Xaa is A or G
  MOD_RES (23)..(24)..(25)..(26): Xaa is A or G or is absent
ASXXVPARLSPISILYIXXXXXXXXXYKQYEDMVVEAXGX

SEQ ID NO: 30772 - protein, 42 aa, Artificial Sequence; identical to SEQ ID NO: 9374
  GFR-binding peptide
  MOD_RES (4)..(5)..(39)..(41): Xaa is C or S
  MOD_RES (19)..(20)..(21)..(22)..(23): Xaa is A or G
  MOD_RES (24)..(25)..(26)..(27): Xaa is A or G or is absent

SEQ ID NO: 30773 - protein, 33 aa, Artificial Sequence; identical to SEQ ID NO: 9375
  GFR-binding peptide
  MOD_RES (32)..(32): Xaa is C or S

SEQ ID NO: 30774 - protein, 37 aa, Artificial Sequence
  GFR-binding peptide
  MOD_RES (5)..(6): Xaa is C or S
VPKAXXAPTKLSPISVLYIDSSNNVIYKQYENMVVKA

SEQ ID NO: 30775 - protein, 39 aa, Artificial Sequence
  GFR-binding peptide
  MOD_RES (3)..(4)..(36)..(38): Xaa is C or S
KAXXVPTELEPISMLYLDEYDKVVKFKYEEMVVEGXGXR

SEQ ID NO: 30776 - protein, 36 aa, Artificial Sequence
  GFR-binding peptide
  MOD_RES (3)..(4): Xaa is C or S
  MOD_RES (18)..(19)..(20)..(21)..(22): Xaa is A or G
  MOD_RES (23)..(24)..(25)..(26): Xaa is A or G or is absent
KAXXVPTELSPISMLYIXXXXXXXXXYKQYEEMVVE

SEQ ID NO: 30777 - protein, 35 aa, Artificial Sequence
  GFR-binding peptide
  MOD_RES (33)..(35): Xaa is C or S
  MOD_RES (14)..(15)..(16)..(17)..(18): Xaa is A or G
  MOD_RES (19)..(20)..(21)..(22): Xaa is A or G or is absent
VPQALEPISILYLXXXXXXXXXKFKYEMIVRSXKX

SEQ ID NO: 30778 - protein, 40 aa, Artificial Sequence
  GFR-binding peptide
  MOD_RES (6)..(7): Xaa is C or S
  MOD_RES (21)..(22)..(23)..(24)..(25): Xaa is A or G
  MOD_RES (26)..(27)..(28)..(29): Xaa is A or G or is absent
TVPKPXXAPTQLSPISVLYIXXXXXXXXXYKQYENMVVRA

SEQ ID NO: 30779 - protein, 38 aa, Artificial Sequence
  GFR-binding peptide
  MOD_RES (1)..(35)..(37): Xaa is C or S
  MOD_RES (15)..(16)..(17)..(18)..(19): Xaa is A or G
  MOD_RES (20)..(21)..(22)..(23): Xaa is A or G or is absent
XAPTKLEPISVLYLXXXXXXXXXKFKYENMVVRSXGXH

SEQ ID NO: 30780 - protein, 38 aa, Artificial Sequence
  GFR-binding peptide
  MOD_RES (1)..(35)..(37): Xaa is C or S
  MOD_RES (15)..(16)..(17)..(18)..(19): Xaa is A or G
  MOD_RES (20)..(21)..(22)..(23): Xaa is A or G or is absent
XAPTKLSPISVLYIXXXXXXXXXYKQYENMVVKAXGXH

SEQ ID NO: 30781 - protein, 36 aa, Artificial Sequence
  GFR-binding peptide
  MOD_RES (2)..(3)..(36): Xaa is C or S
AXXVPTKLEPISVLYLDDMGVPTKFKYEEGMSVAEX

SEQ ID NO: 30782 - protein, 32 aa, Artificial Sequence; identical to SEQ ID NO: 9383
  GFR-binding peptide
  MOD_RES (14)..(15)..(16)..(17)..(18): Xaa is A or G
  MOD_RES (19)..(20)..(21)..(22): Xaa is A or G or is absent

SEQ ID NO: 30783 - protein, 37 aa, Artificial Sequence; identical to SEQ ID NO: 9386
  GFR-binding peptide
  MOD_RES (2)..(3)..(35)..(37): Xaa is C or S

SEQ ID NO: 30784 - protein, 42 aa, Artificial Sequence
  GFR-binding peptide
  MOD_RES (5)..(6)..(39)..(41): Xaa is C or S
  MOD_RES (20)..(21)..(22)..(23)..(24): Xaa is A or G
  MOD_RES (25)..(26)..(27)..(28): Xaa is A or G or is absent
SAAPXXVPQALEPISILYLXXXXXXXXXKFKYEMIVRSXKXS

SEQ ID NO: 30785 - protein, 39 aa, Artificial Sequence; identical to SEQ ID NO: 9387
  GFR-binding peptide
  MOD_RES (4)..(5)..(39): Xaa is C or S
  MOD_RES (19)..(20)..(21)..(22)..(23): Xaa is A or G
  MOD_RES (24)..(25)..(26)..(27): Xaa is A or G or is absent

SEQ ID NO: 30786 - protein, 37 aa, Artificial Sequence
  GFR-binding peptide
  MOD_RES (5)..(6): Xaa is C or S
APASXXVPARLEPISILYLDAANNVVKFKYEDMVVEA

SEQ ID NO: 30787 - protein, 38 aa, Artificial Sequence; identical to SEQ ID NO: 9390
  GFR-binding peptide
  MOD_RES (1)..(2)..(35)..(37): Xaa is C or S
  MOD_RES (16)..(17)..(18)..(19)..(20): Xaa is A or G
  MOD_RES (21)..(22)..(23)..(24): Xaa is A or G or is absent

SEQ ID NO: 30788 - protein, 34 aa, Artificial Sequence; identical to SEQ ID NO: 9391
  GFR-binding peptide
  MOD_RES (3)..(4): Xaa is C or S

SEQ ID NO: 30789 - protein, 34 aa, Artificial Sequence; identical to SEQ ID NO: 9392
  GFR-binding peptide
  MOD_RES (1)..(1): Xaa is C or S
  MOD_RES (15)..(16)..(17)..(18)..(19): Xaa is A or G
  MOD_RES (20)..(21)..(22)..(23): Xaa is A or G or is absent

SEQ ID NO: 30790 - protein, 33 aa, Artificial Sequence
  GFR-binding peptide
  MOD_RES (14)..(15)..(16)..(17)..(18): Xaa is A or G
  MOD_RES (19)..(20)..(21)..(22): Xaa is A or G or is absent
VPTELEPISMLYLXXXXXXXXXKFKYEDMVVEG

SEQ ID NO: 30791 - protein, 36 aa, Artificial Sequence
  GFR-binding peptide
  MOD_RES (1)..(2): Xaa is C or S
  MOD_RES (16)..(17)..(18)..(19)..(20): Xaa is A or G
  MOD_RES (21)..(22)..(23)..(24): Xaa is A or G or is absent
XXVPTKLEPISVLYLXXXXXXXXXKFKYEEGMSVAE

SEQ ID NO: 30792 - protein, 39 aa, Artificial Sequence
  GFR-binding peptide
  MOD_RES (5)..(6): Xaa is C or S
  MOD_RES (20)..(21)..(22)..(23)..(24): Xaa is A or G
  MOD_RES (25)..(26)..(27)..(28): Xaa is A or G or is absent
VPKPXXAPTQLSPISVLYIXXXXXXXXXYKQYENMVVRA

SEQ ID NO: 30793 - protein, 37 aa, Artificial Sequence; identical to SEQ ID NO: 9394
  GFR-binding peptide
  MOD_RES (35)..(37): Xaa is C or S
  MOD_RES (14)..(15)..(16)..(17)..(18): Xaa is A or G
  MOD_RES (19)..(20)..(21)..(22): Xaa is A or G or is absent

SEQ ID NO: 30794 - protein, 38 aa, Artificial Sequence; identical to SEQ ID NO: 9395
  GFR-binding peptide
  MOD_RES (3)..(4)..(38): Xaa is C or S
  MOD_RES (18)..(19)..(20)..(21)..(22): Xaa is A or G
  MOD_RES (23)..(24)..(25)..(26): Xaa is A or G or is absent

SEQ ID NO: 30795 - protein, 42 aa, Artificial Sequence; identical to SEQ ID NO: 9396
  GFR-binding peptide
  MOD_RES (5)..(6)..(40)..(42): Xaa is C or S
  MOD_RES (20)..(21)..(22)..(23)..(24): Xaa is A or G
  MOD_RES (25)..(26)..(27)..(28): Xaa is A or G or is absent

SEQ ID NO: 30796 - protein, 36 aa, Artificial Sequence
  GFR-binding peptide
  MOD_RES (1)..(2)..(36): Xaa is C or S
  MOD_RES (16)..(17)..(18)..(19)..(20): Xaa is A or G
  MOD_RES (21)..(22)..(23)..(24): Xaa is A or G or is absent
XXVPTELEPISMLYLXXXXXXXXXKFKYEEMVVEGX

SEQ ID NO: 30797 - protein, 35 aa, Artificial Sequence
  GFR-binding peptide
  MOD_RES (2)..(3): Xaa is C or S
  MOD_RES (17)..(18)..(19)..(20)..(21): Xaa is A or G
  MOD_RES (22)..(23)..(24)..(25): Xaa is A or G or is absent
AXXVPTELSPISMLYIXXXXXXXXXYKQYEEMVVE

SEQ ID NO: 30798 - protein, 43 aa, Artificial Sequence
  GFR-binding peptide
  MOD_RES (6)..(7)..(41)..(43): Xaa is C or S
  MOD_RES (21)..(22)..(23)..(24)..(25): Xaa is A or G
  MOD_RES (26)..(27)..(28)..(29): Xaa is A or G or is absent
TVPKPXXAPTQLEPISVLYLXXXXXXXXXKFKYENMVVRAXGX

SEQ ID NO: 30799 - protein, 33 aa, Artificial Sequence
  GFR-binding peptide
  MOD_RES (32)..(32): Xaa is C or S
APTQLSPISVLYIDDSSNVIYKQYENMVVRAXG

SEQ ID NO: 30800 - protein, 37 aa, Artificial Sequence
  GFR-binding peptide
  MOD_RES (1)..(2)..(34)..(36): Xaa is C or S
XXVPTELSPISMLYIDEYDKVVYKQYEEMVVEGXGXR

SEQ ID NO: 30801 - protein, 40 aa, Artificial Sequence
  GFR-binding peptide
  MOD_RES (6)..(7)..(39): Xaa is C or S
AVPKAXXAPTKLSPISVLYIDSSNNVIYKQYENMVVKAXG

SEQ ID NO: 30802 - protein, 39 aa, Artificial Sequence
  GFR-binding peptide
  MOD_RES (6)..(7): Xaa is C or S
  MOD_RES (21)..(22)..(23)..(24)..(25): Xaa is A or G
  MOD_RES (26)..(27)..(28)..(29): Xaa is A or G or is absent
ASAAPXXVPQALEPISILYLXXXXXXXXXKFKYEMIVRS

SEQ ID NO: 30803 - protein, 34 aa, Artificial Sequence
  GFR-binding peptide
  MOD_RES (1)..(2)..(34): Xaa is C or S
XXAPTQLEPISVLYLDDSSNVIKFKYENMVVRAX

SEQ ID NO: 30804 - protein, 39 aa, Artificial Sequence
  GFR-binding peptide
  MOD_RES (5)..(6)..(38): Xaa is C or S
APASXXVPARLNAISILYFDAANNVVLKKYRDMVVEAXG

SEQ ID NO: 30805 - protein, 35 aa, Artificial Sequence
  GFR-binding peptide
  MOD_RES (2)..(3)..(35): Xaa is C or S
AXXAPTKLEPISVLYLDSSNNVIKFKYENMVVKAX

SEQ ID NO: 30806 - protein, 37 aa, Artificial Sequence
  GFR-binding peptide
  MOD_RES (1)..(2)..(36): Xaa is C or S
  MOD_RES (16)..(17)..(18)..(19)..(20): Xaa is A or G
  MOD_RES (21)..(22)..(23)..(24): Xaa is A or G or is absent
XXVPTKLSPISILYIXXXXXXXXXYKQYEGMAVSEXG

SEQ ID NO: 30807 - protein, 42 aa, Artificial Sequence
  GFR-binding peptide
  MOD_RES (6)..(7)..(39)..(41): Xaa is C or S
KIPKAXXVPTELEPISMLYLDENEKVVKFKYEDMVVEGXGXR

SEQ ID NO: 30808 - protein, 30 aa, Artificial Sequence
  GFR-binding peptide
VPTELEPISMLYLDEYDKVVKFKYEEMVVE

SEQ ID NO: 30809 - protein, 36 aa, Artificial Sequence
  GFR-binding peptide
  MOD_RES (3)..(4)..(35): Xaa is C or S
SPXXVPQDLEPISILYLVGRTPKVKFKYEMVVKSXK

SEQ ID NO: 30810 - protein, 39 aa, Artificial Sequence
  GFR-binding peptide
  MOD_RES (3)..(4)..(37)..(39): Xaa is C or S
  MOD_RES (18)..(19)..(20)..(21)..(22): Xaa is A or G
  MOD_RES (23)..(24)..(25)..(26): Xaa is A or G or is absent
SPXXVSQDLSPISILYIXXXXXXXXXYKQYEMIVKSXKX

SEQ ID NO: 30811 - protein, 36 aa, Artificial Sequence; identical to SEQ ID NO: 9403
  GFR-binding peptide
  MOD_RES (4)..(5)..(36): Xaa is C or S

SEQ ID NO: 30812 - protein, 34 aa, Artificial Sequence; identical to SEQ ID NO: 9404
  GFR-binding peptide
  MOD_RES (1)..(2)..(34): Xaa is C or S

SEQ ID NO: 30813 - protein, 41 aa, Artificial Sequence
  GFR-binding peptide
  MOD_RES (3)..(4)..(38)..(40): Xaa is C or S
  MOD_RES (18)..(19)..(20)..(21)..(22): Xaa is A or G
  MOD_RES (23)..(24)..(25)..(26): Xaa is A or G or is absent
KAXXVPTKLSPISILYIXXXXXXXXXYKQYEGMAVSEXGXR

SEQ ID NO: 30814 - protein, 37 aa, Artificial Sequence; identical to SEQ ID NO: 9406
  GFR-binding peptide
  MOD_RES (4)..(5)..(36): Xaa is C or S

SEQ ID NO: 30815 - protein, 36 aa, Artificial Sequence; identical to SEQ ID NO: 9409
  GFR-binding peptide
  MOD_RES (1)..(2)..(35): Xaa is C or S

SEQ ID NO: 30816 - protein, 36 aa, Artificial Sequence
  GFR-binding peptide
  MOD_RES (34)..(36): Xaa is C or S
  MOD_RES (14)..(15)..(16)..(17)..(18): Xaa is A or G
  MOD_RES (19)..(20)..(21)..(22): Xaa is A or G or is absent
VPTKLSPISILYIXXXXXXXXXYKQYEGMAVSEXGX

SEQ ID NO: 30817 - protein, 35 aa, Artificial Sequence
  GFR-binding peptide
  MOD_RES (34)..(34): Xaa is C or S
  MOD_RES (14)..(15)..(16)..(17)..(18): Xaa is A or G
  MOD_RES (19)..(20)..(21)..(22): Xaa is A or G or is absent
VPTELSPISMLYIXXXXXXXXXYKQYEDMVVEGXG

SEQ ID NO: 30818 - protein, 36 aa, Artificial Sequence
  GFR-binding peptide
  MOD_RES (2)..(3)..(36): Xaa is C or S
  MOD_RES (17)..(18)..(19)..(20)..(21): Xaa is A or G
  MOD_RES (22)..(23)..(24)..(25): Xaa is A or G or is absent
PXXVPQALEPISILYLXXXXXXXXXKFKYEMIVRSX

SEQ ID NO: 30819 - protein, 37 aa, Artificial Sequence
  GFR-binding peptide
  MOD_RES (1)..(2)..(35)..(37): Xaa is C or S
  MOD_RES (16)..(17)..(18)..(19)..(20): Xaa is A or G
  MOD_RES (21)..(22)..(23)..(24): Xaa is A or G or is absent
XXVSQDLSPISILYIXXXXXXXXXYKQYEMIVKSXKX

SEQ ID NO: 30820 - protein, 35 aa, Artificial Sequence; identical to SEQ ID NO: 9414
  GFR-binding peptide
  MOD_RES (2)..(3)..(34): Xaa is C or S

SEQ ID NO: 30821 - protein, 36 aa, Artificial Sequence; identical to SEQ ID NO: 9415
  GFR-binding peptide
  MOD_RES (1)..(35): Xaa is C or S
  MOD_RES (15)..(16)..(17)..(18)..(19): Xaa is A or G
  MOD_RES (20)..(21)..(22)..(23): Xaa is A or G or is absent

SEQ ID NO: 30822 - protein, 32 aa, Artificial Sequence; identical to SEQ ID NO: 9416
  GFR-binding peptide
  MOD_RES (1)..(32): Xaa is C or S

SEQ ID NO: 30823 - protein, 36 aa, Artificial Sequence
  GFR-binding peptide
  MOD_RES (1)..(2)..(34)..(36): Xaa is C or S
XXVPTELEPISMLYLDEYDKVVKFKYEEMVVEGXGX

SEQ ID NO: 30824 - protein, 38 aa, Artificial Sequence
  GFR-binding peptide
  MOD_RES (3)..(4)..(36)..(38): Xaa is C or S
KAXXVPTELSPISMLYIDEYDKVVYKQYEEMVVEGXGX

SEQ ID NO: 30825 - protein, 37 aa, Artificial Sequence
  GFR-binding peptide
  MOD_RES (7)..(7): Xaa is C or S
HVTKPTXAPTKLSPISVLYIDDSSNVIYKQYENMVVR

SEQ ID NO: 30826 - protein, 36 aa, Artificial Sequence; identical to SEQ ID NO: 9420
  GFR-binding peptide
  MOD_RES (2)..(3): Xaa is C or S
  MOD_RES (17)..(18)..(19)..(20)..(21): Xaa is A or G
  MOD_RES (22)..(23)..(24)..(25): Xaa is A or G or is absent

SEQ ID NO: 30827 - protein, 34 aa, Artificial Sequence
  GFR-binding peptide
  MOD_RES (33)..(33): Xaa is C or S
VPTKLEPISVLYLDDMGVPTKFKYEEGMSVAEXG

SEQ ID NO: 30828 - protein, 35 aa, Artificial Sequence
  GFR-binding peptide
  MOD_RES (2)..(3)..(35): Xaa is C or S
AXXAPTKLSPISVLYIDSSNNVIYKQYENMVVKAX

SEQ ID NO: 30829 - protein, 33 aa, Artificial Sequence
  GFR-binding peptide
  MOD_RES (33)..(33): Xaa is C or S
  MOD_RES (14)..(15)..(16)..(17)..(18): Xaa is A or G
  MOD_RES (19)..(20)..(21)..(22): Xaa is A or G or is absent
VSQDLEPISILYLXXXXXXXXXKFKYEMIVKSX

SEQ ID NO: 30830 - protein, 38 aa, Artificial Sequence
  GFR-binding peptide
  MOD_RES (3)..(4)..(35)..(37): Xaa is C or S
APXXVPQALEPISILYLVGRKPKVKFKYEMIVRSXKXS

SEQ ID NO: 30831 - protein, 35 aa, Artificial Sequence
  GFR-binding peptide
  MOD_RES (2)..(3)..(35): Xaa is C or S
AXXVPTKLSPISILYIDKGVVTYYKQYEGMAVSEX

SEQ ID NO: 30832 - protein, 35 aa, Artificial Sequence
  GFR-binding peptide
  MOD_RES (4)..(5): Xaa is C or S
ASPXXVPQDLEPISILYLVGRTPKVKFKYEMVVKS

SEQ ID NO: 30833 - protein, 34 aa, Artificial Sequence; identical to SEQ ID NO: 9427
  GFR-binding peptide
  MOD_RES (1)..(2): Xaa is C or S
  MOD_RES (16)..(17)..(18)..(19)..(20): Xaa is A or G
  MOD_RES (21)..(22)..(23)..(24): Xaa is A or G or is absent

SEQ ID NO: 30834 - protein, 37 aa, Artificial Sequence
  GFR-binding peptide
  MOD_RES (3)..(4): Xaa is C or S
  MOD_RES (18)..(19)..(20)..(21)..(22): Xaa is A or G
  MOD_RES (23)..(24)..(25)..(26): Xaa is A or G or is absent
KAXXAPTKLEPISVLYLXXXXXXXXXKFKYENMVVKA

SEQ ID NO: 30835 - protein, 42 aa, Artificial Sequence
  GFR-binding peptide
  MOD_RES (4)..(5)..(39)..(41): Xaa is C or S
  MOD_RES (19)..(20)..(21)..(22)..(23): Xaa is A or G
  MOD_RES (24)..(25)..(26)..(27): Xaa is A or G or is absent
PASXXVPARLSPISILYKXXXXXXXXXLKYHYDMVVEAXGXR

SEQ ID NO: 30836 - protein, 41 aa, Artificial Sequence
  GFR-binding peptide
  MOD_RES (4)..(5)..(39)..(41): Xaa is C or S
  MOD_RES (19)..(20)..(21)..(22)..(23): Xaa is A or G
  MOD_RES (24)..(25)..(26)..(27): Xaa is A or G or is absent
PKPXXAPTQLSPISVLYIXXXXXXXXXYKQYENMVVRAXGX

SEQ ID NO: 30837 - protein, 32 aa, Artificial Sequence
  GFR-binding peptide
  MOD_RES (32)..(32): Xaa is C or S
APTKLSPISVLYIDSSNNVIYKQYENMVVKAX

SEQ ID NO: 30838 - protein, 34 aa, Artificial Sequence
  GFR-binding peptide
  MOD_RES (3)..(4): Xaa is C or S
KAXXVPTELEPISMLYLDENEKVVKFKYEDMVVE

SEQ ID NO: 30839 - protein, 32 aa, Artificial Sequence
  GFR-binding peptide
  MOD_RES (1)..(1): Xaa is C or S
XAPTKLSPISVLYIDSSNNVIYKQYENMVVKA

SEQ ID NO: 30840 - protein, 43 aa, Artificial Sequence
  GFR-binding peptide
  MOD_RES (6)..(7)..(41)..(43): Xaa is C or S
  MOD_RES (21)..(22)..(23)..(24)..(25): Xaa is A or G
  MOD_RES (26)..(27)..(28)..(29): Xaa is A or G or is absent
AAPASXXVPARLSPISILYKXXXXXXXXXLKYHYDMVVEAXGX

SEQ ID NO: 30841 - protein, 37 aa, Artificial Sequence
  GFR-binding peptide
  MOD_RES (1)..(35)..(37): Xaa is C or S
  MOD_RES (15)..(16)..(17)..(18)..(19): Xaa is A or G
  MOD_RES (20)..(21)..(22)..(23): Xaa is A or G or is absent
XVPTELSPISMLYIXXXXXXXXXYKQYEDMVVEGXGX

SEQ ID NO: 30842 - protein, 38 aa, Artificial Sequence; identical to SEQ ID NO: 9438
  GFR-binding peptide
  MOD_RES (2)..(3)..(36)..(38): Xaa is C or S
  MOD_RES (17)..(18)..(19)..(20)..(21): Xaa is A or G
  MOD_RES (22)..(23)..(24)..(25): Xaa is A or G or is absent

SEQ ID NO: 30843 - protein, 37 aa, Artificial Sequence; identical to SEQ ID NO: 9439
  GFR-binding peptide
  MOD_RES (4)..(4): Xaa is C or S
  MOD_RES (18)..(19)..(20)..(21)..(22): Xaa is A or G
  MOD_RES (23)..(24)..(25)..(26): Xaa is A or G or is absent

SEQ ID NO: 30844 - protein, 40 aa, Artificial Sequence
  GFR-binding peptide
  MOD_RES (3)..(4)..(38)..(40): Xaa is C or S
  MOD_RES (18)..(19)..(20)..(21)..(22): Xaa is A or G
  MOD_RES (23)..(24)..(25)..(26): Xaa is A or G or is absent
ASXXVPARLEPISILYLXXXXXXXXXKFKYEDMVVEAXGX

SEQ ID NO: 30845 - protein, 30 aa, Artificial Sequence; identical to SEQ ID NO: 9444
  GFR-binding peptide

SEQ ID NO: 30846 - protein, 37 aa, Artificial Sequence
  GFR-binding peptide
  MOD_RES (3)..(4)..(35)..(37): Xaa is C or S
SPXXVPQDLSPISILYIVGRTPKVYKQYEMVVKSXKX

SEQ ID NO: 30847 - protein, 38 aa, Artificial Sequence
  GFR-binding peptide
  MOD_RES (5)..(6): Xaa is C or S
  MOD_RES (20)..(21)..(22)..(23)..(24): Xaa is A or G
  MOD_RES (25)..(26)..(27)..(28): Xaa is A or G or is absent
VPKAXXAPTKLSPISVLYIXXXXXXXXXYKQYENMVVK

SEQ ID NO: 30848 - protein, 38 aa, Artificial Sequence; identical to SEQ ID NO: 9447
  GFR-binding peptide
  MOD_RES (6)..(7): Xaa is C or S

SEQ ID NO: 30849 - protein, 31 aa, Artificial Sequence; identical to SEQ ID NO: 9449
  GFR-binding peptide

SEQ ID NO: 30850 - protein, 34 aa, Artificial Sequence
  GFR-binding peptide
  MOD_RES (34)..(34): Xaa is C or S
  MOD_RES (14)..(15)..(16)..(17)..(18): Xaa is A or G
  MOD_RES (19)..(20)..(21)..(22): Xaa is A or G or is absent
VPTELSPISMLYIXXXXXXXXXYKQYEEMVVEGX

SEQ ID NO: 30851 - protein, 36 aa, Artificial Sequence
  GFR-binding peptide
  MOD_RES (4)..(5): Xaa is C or S
PKAXXVPTELSPISMLYIDENEKVVYKQYEDMVVEG

SEQ ID NO: 30852 - protein, 40 aa, Artificial Sequence; identical to SEQ ID NO: 9455
  GFR-binding peptide
  MOD_RES (4)..(5)..(37)..(39): Xaa is C or S

SEQ ID NO: 30853 - protein, 38 aa, Artificial Sequence; identical to SEQ ID NO: 9456
  GFR-binding peptide
  MOD_RES (5)..(6): Xaa is C or S
  MOD_RES (20)..(21)..(22)..(23)..(24): Xaa is A or G
  MOD_RES (25)..(26)..(27)..(28): Xaa is A or G or is absent

SEQ ID NO: 30854 - protein, 40 aa, Artificial Sequence; identical to SEQ ID NO: 9457
  GFR-binding peptide
  MOD_RES (6)..(40): Xaa is C or S
  MOD_RES (20)..(21)..(22)..(23)..(24): Xaa is A or G
  MOD_RES (25)..(26)..(27)..(28): Xaa is A or G or is absent

SEQ ID NO: 30855 - protein, 35 aa, Artificial Sequence
  GFR-binding peptide
  MOD_RES (1)..(35): Xaa is C or S
  MOD_RES (15)..(16)..(17)..(18)..(19): Xaa is A or G
  MOD_RES (20)..(21)..(22)..(23): Xaa is A or G or is absent
XAPTKLEPISVLYLXXXXXXXXXKFKYENMVVRSX

SEQ ID NO: 30856 - protein, 38 aa, Artificial Sequence; identical to SEQ ID NO: 9459
  GFR-binding peptide
  MOD_RES (2)..(3)..(35)..(37): Xaa is C or S

SEQ ID NO: 30857 - protein, 36 aa, Artificial Sequence; identical to SEQ ID NO: 9460
  GFR-binding peptide
  MOD_RES (35)..(35): Xaa is C or S
  MOD_RES (14)..(15)..(16)..(17)..(18): Xaa is A or G
  MOD_RES (19)..(20)..(21)..(22): Xaa is A or G or is absent

SEQ ID NO: 30858 - protein, 36 aa, Artificial Sequence; identical to SEQ ID NO: 9462
  GFR-binding peptide
  MOD_RES (3)..(4): Xaa is C or S
  MOD_RES (18)..(19)..(20)..(21)..(22): Xaa is A or G
  MOD_RES (23)..(24)..(25)..(26): Xaa is A or G or is absent

SEQ ID NO: 30859 - protein, 38 aa, Artificial Sequence
  GFR-binding peptide
  MOD_RES (2)..(3)..(37): Xaa is C or S
  MOD_RES (17)..(18)..(19)..(20)..(21): Xaa is A or G
  MOD_RES (22)..(23)..(24)..(25): Xaa is A or G or is absent
AXXVPTKLSPISILYIXXXXXXXXXYKQYEGMAVSEXG

SEQ ID NO: 30860 - protein, 35 aa, Artificial Sequence
  GFR-binding peptide
  MOD_RES (3)..(4): Xaa is C or S
ASXXVPARLSPISILYKDAANNVVLKYHYDMVVEA

SEQ ID NO: 30861 - protein, 39 aa, Artificial Sequence
  GFR-binding peptide
  MOD_RES (4)..(5)..(37)..(39): Xaa is C or S
PKAXXVPTELSPISMLYIDEYDKVVYKQYEEMVVEGXGX

SEQ ID NO: 30862 - protein, 41 aa, Artificial Sequence
  GFR-binding peptide
  MOD_RES (6)..(7)..(39)..(41): Xaa is C or S
AAPASXXVPARLNAISILYFDAANNVVLKKYRDMVVEAXGX

SEQ ID NO: 30863 - protein, 39 aa, Artificial Sequence; identical to SEQ ID NO: 9464
  GFR-binding peptide
  MOD_RES (7)..(39): Xaa is C or S

SEQ ID NO: 30864 - protein, 39 aa, Artificial Sequence; identical to SEQ ID NO: 9465
  GFR-binding peptide
  MOD_RES (3)..(4)..(36)..(38): Xaa is C or S

SEQ ID NO: 30865 - protein, 43 aa, Artificial Sequence
  GFR-binding peptide
  MOD_RES (7)..(41)..(43): Xaa is C or S
  MOD_RES (21)..(22)..(23)..(24)..(25): Xaa is A or G
  MOD_RES (26)..(27)..(28)..(29): Xaa is A or G or is absent
HVTKPTXAPTKLEPISVLYLXXXXXXXXXKFKYENMVVRSXGX

SEQ ID NO: 30866 - protein, 38 aa, Artificial Sequence
  GFR-binding peptide
  MOD_RES (1)..(2)..(36)..(38): Xaa is C or S
  MOD_RES (16)..(17)..(18)..(19)..(20): Xaa is A or G
  MOD_RES (21)..(22)..(23)..(24): Xaa is A or G or is absent
XXAPTKLEPISVLYLXXXXXXXXXKFKYENMVVRSXGX

SEQ ID NO: 30867 - protein, 36 aa, Artificial Sequence; identical to SEQ ID NO: 9468
  GFR-binding peptide
  MOD_RES (3)..(4)..(35): Xaa is C or S

SEQ ID NO: 30868 - protein, 37 aa, Artificial Sequence
  GFR-binding peptide
  MOD_RES (4)..(4): Xaa is C or S
  MOD_RES (18)..(19)..(20)..(21)..(22): Xaa is A or G
  MOD_RES (23)..(24)..(25)..(26): Xaa is A or G or is absent
KPTXAPTKLSPISVLYIXXXXXXXXXYKQYENMVVRS

SEQ ID NO: 30869 - protein, 36 aa, Artificial Sequence
  GFR-binding peptide
  MOD_RES (1)..(2)..(34)..(36): Xaa is C or S
XXAPTQLEPISVLYLDDSSNVIKFKYENMVVRAXGX

SEQ ID NO: 30870 - protein, 36 aa, Artificial Sequence; identical to SEQ ID NO: 9470
  GFR-binding peptide
  MOD_RES (1)..(2)..(34)..(36): Xaa is C or S

SEQ ID NO: 30871 - protein, 40 aa, Artificial Sequence; identical to SEQ ID NO: 9471
  GFR-binding peptide
  MOD_RES (4)..(5)..(40): Xaa is C or S
  MOD_RES (19)..(20)..(21)..(22)..(23): Xaa is A or G
  MOD_RES (24)..(25)..(26)..(27): Xaa is A or G or is absent

SEQ ID NO: 30872 - protein, 40 aa, Artificial Sequence
  GFR-binding peptide
  MOD_RES (6)..(7): Xaa is C or S
  MOD_RES (21)..(22)..(23)..(24)..(25): Xaa is A or G
  MOD_RES (26)..(27)..(28)..(29): Xaa is A or G or is absent
SIPKAXXVPTELEPISMLYLXXXXXXXXXKFKYEEMVVEG

SEQ ID NO: 30873 - protein, 35 aa, Artificial Sequence; identical to SEQ ID NO: 9474
  GFR-binding peptide
  MOD_RES (2)..(3)..(34): Xaa is C or S

SEQ ID NO: 30874 - protein, 39 aa, Artificial Sequence; identical to SEQ ID NO: 9475
  GFR-binding peptide
  MOD_RES (5)..(6)..(38): Xaa is C or S

SEQ ID NO: 30875 - protein, 34 aa, Artificial Sequence; identical to SEQ ID NO: 9477
  GFR-binding peptide
  MOD_RES (1)..(1): Xaa is C or S
  MOD_RES (15)..(16)..(17)..(18)..(19): Xaa is A or G
  MOD_RES (20)..(21)..(22)..(23): Xaa is A or G or is absent

SEQ ID NO: 30876 - protein, 42 aa, Artificial Sequence
  GFR-binding peptide
  MOD_RES (4)..(5)..(39)..(41): Xaa is C or S
  MOD_RES (19)..(20)..(21)..(22)..(23): Xaa is A or G
  MOD_RES (24)..(25)..(26)..(27): Xaa is A or G or is absent
SKAXXVPTKLSPISILYKXXXXXXXXXLKYHYGMAVSEXGXR

SEQ ID NO: 30877 - protein, 42 aa, Artificial Sequence
  GFR-binding peptide
  MOD_RES (5)..(6)..(40)..(42): Xaa is C or S
  MOD_RES (20)..(21)..(22)..(23)..(24): Xaa is A or G
  MOD_RES (25)..(26)..(27)..(28): Xaa is A or G or is absent
VPKAXXAPTKLEPISVLYLXXXXXXXXXKFKYENMVVKAXGX

SEQ ID NO: 30878 - protein, 38 aa, Artificial Sequence; identical to SEQ ID NO: 9478
  GFR-binding peptide
  MOD_RES (5)..(6): Xaa is C or S
  MOD_RES (20)..(21)..(22)..(23)..(24): Xaa is A or G
  MOD_RES (25)..(26)..(27)..(28): Xaa is A or G or is absent

SEQ ID NO: 30879 - protein, 35 aa, Artificial Sequence
  GFR-binding peptide
  MOD_RES (1)..(35): Xaa is C or S
  MOD_RES (15)..(16)..(17)..(18)..(19): Xaa is A or G
  MOD_RES (20)..(21)..(22)..(23): Xaa is A or G or is absent
XAPTQLSPISVLYIXXXXXXXXXYKQYENMVVRAX

SEQ ID NO: 30880 - protein, 37 aa, Artificial Sequence; identical to SEQ ID NO: 9479
  GFR-binding peptide
  MOD_RES (5)..(6): Xaa is C or S

SEQ ID NO: 30881 - protein, 38 aa, Artificial Sequence; identical to SEQ ID NO: 9480
  GFR-binding peptide
  MOD_RES (5)..(6): Xaa is C or S
  MOD_RES (20)..(21)..(22)..(23)..(24): Xaa is A or G
  MOD_RES (25)..(26)..(27)..(28): Xaa is A or G or is absent

SEQ ID NO: 30882 - protein, 39 aa, Artificial Sequence; identical to SEQ ID NO: 9482
  GFR-binding peptide
  MOD_RES (6)..(7)..(38): Xaa is C or S

SEQ ID NO: 30883 - protein, 39 aa, Artificial Sequence
  GFR-binding peptide
  MOD_RES (3)..(4)..(37)..(39): Xaa is C or S
  MOD_RES (18)..(19)..(20)..(21)..(22): Xaa is A or G
  MOD_RES (23)..(24)..(25)..(26): Xaa is A or G or is absent
APXXVPQALSPISILYIXXXXXXXXXYKQYEMIVRSXKX

SEQ ID NO: 30884 - protein, 38 aa, Artificial Sequence
  GFR-binding peptide
  MOD_RES (1)..(2)..(36)..(38): Xaa is C or S
  MOD_RES (16)..(17)..(18)..(19)..(20): Xaa is A or G
  MOD_RES (21)..(22)..(23)..(24): Xaa is A or G or is absent
XXVPARLSPISILYIXXXXXXXXXYKQYEDMVVEAXGX

SEQ ID NO: 30885 - protein, 37 aa, Artificial Sequence
  GFR-binding peptide
  MOD_RES (5)..(6): Xaa is C or S
ASKAXXVPTKLNAISILYFDKGVVTYLKKYRGMAVSE

SEQ ID NO: 30886 - protein, 35 aa, Artificial Sequence; identical to SEQ ID NO: 9484
  GFR-binding peptide
  MOD_RES (1)..(2)..(34): Xaa is C or S

SEQ ID NO: 30887 - protein, 35 aa, Artificial Sequence
  GFR-binding peptide
  MOD_RES (1)..(2)..(33)..(35): Xaa is C or S
XXVPQDLEPISILYLVGRTPKVKFKYEMVVKSXKX

SEQ ID NO: 30888 - protein, 41 aa, Artificial Sequence; identical to SEQ ID NO: 9485
  GFR-binding peptide
  MOD_RES (3)..(4)..(38)..(40): Xaa is C or S
  MOD_RES (18)..(19)..(20)..(21)..(22): Xaa is A or G
  MOD_RES (23)..(24)..(25)..(26): Xaa is A or G or is absent

SEQ ID NO: 30889 - protein, 37 aa, Artificial Sequence; identical to SEQ ID NO: 9486
  GFR-binding peptide
  MOD_RES (6)..(7): Xaa is C or S

SEQ ID NO: 30890 - protein, 36 aa, Artificial Sequence; identical to SEQ ID NO: 9491
  GFR-binding peptide
  MOD_RES (1)..(2)..(35): Xaa is C or S
  MOD_RES (16)..(17)..(18)..(19)..(20): Xaa is A or G
  MOD_RES (21)..(22)..(23)..(24): Xaa is A or G or is absent

SEQ ID NO: 30891 - protein, 37 aa, Artificial Sequence
  GFR-binding peptide
  MOD_RES (4)..(5): Xaa is C or S
  MOD_RES (19)..(20)..(21)..(22)..(23): Xaa is A or G
  MOD_RES (24)..(25)..(26)..(27): Xaa is A or G or is absent
PASXXVPARLNAISILYFXXXXXXXXXLKKYRDMVVE

SEQ ID NO: 30892 - protein, 40 aa, Artificial Sequence; identical to SEQ ID NO: 9492
  GFR-binding peptide
  MOD_RES (2)..(3)..(37)..(39): Xaa is C or S
  MOD_RES (17)..(18)..(19)..(20)..(21): Xaa is A or G
  MOD_RES (22)..(23)..(24)..(25): Xaa is A or G or is absent

SEQ ID NO: 30893 - protein, 40 aa, Artificial Sequence
  GFR-binding peptide
  MOD_RES (5)..(6)..(40): Xaa is C or S
  MOD_RES (20)..(21)..(22)..(23)..(24): Xaa is A or G
  MOD_RES (25)..(26)..(27)..(28): Xaa is A or G or is absent
VPKPXXAPTKLEPISVLYLXXXXXXXXXKFKYENMVVRSX

SEQ ID NO: 30894 - protein, 37 aa, Artificial Sequence
  GFR-binding peptide
  MOD_RES (1)..(36): Xaa is C or S
  MOD_RES (15)..(16)..(17)..(18)..(19): Xaa is A or G
  MOD_RES (20)..(21)..(22)..(23): Xaa is A or G or is absent
XVPTKLEPISVLYLXXXXXXXXXKFKYEEGMSVAEXG

SEQ ID NO: 30895 - protein, 33 aa, Artificial Sequence
  GFR-binding peptide
  MOD_RES (2)..(3): Xaa is C or S
SXXVPARLSPISILYKDAANNVVLKYHYDMVVE

SEQ ID NO: 30896 - protein, 40 aa, Artificial Sequence; identical to SEQ ID NO: 9494
  GFR-binding peptide
  MOD_RES (6)..(7)..(39): Xaa is C or S

SEQ ID NO: 30897 - protein, 32 aa, Artificial Sequence; identical to SEQ ID NO: 9495
  GFR-binding peptide
  MOD_RES (1)..(2): Xaa is C or S

SEQ ID NO: 30898 - protein, 30 aa, Artificial Sequence
  GFR-binding peptide
APTKLSPISVLYIDSSNNVIYKQYENMVVK

SEQ ID NO: 30899 - protein, 35 aa, Artificial Sequence
  GFR-binding peptide
  MOD_RES (1)..(35): Xaa is C or S
  MOD_RES (15)..(16)..(17)..(18)..(19): Xaa is A or G
  MOD_RES (20)..(21)..(22)..(23): Xaa is A or G or is absent
XVPTKLEPISILYLXXXXXXXXXKFKYEGMAVSEX

SEQ ID NO: 30900 - protein, 35 aa, Artificial Sequence
  GFR-binding peptide
  MOD_RES (2)..(3): Xaa is C or S
  MOD_RES (17)..(18)..(19)..(20)..(21): Xaa is A or G
  MOD_RES (22)..(23)..(24)..(25): Xaa is A or G or is absent
AXXVPTKLSPISILYIXXXXXXXXXYKQYEGMAVS

SEQ ID NO: 30901 - protein, 39 aa, Artificial Sequence; identical to SEQ ID NO: 9498
  GFR-binding peptide
  MOD_RES (1)..(2)..(37)..(39): Xaa is C or S
  MOD_RES (16)..(17)..(18)..(19)..(20): Xaa is A or G
  MOD_RES (21)..(22)..(23)..(24): Xaa is A or G or is absent

SEQ ID NO: 30902 - protein, 32 aa, Artificial Sequence
  GFR-binding peptide
  MOD_RES (1)..(1): Xaa is C or S
XVPTKLSPISILYKDKGVVTYLKYHYGMAVSE

SEQ ID NO: 30903 - protein, 34 aa, Artificial Sequence; identical to SEQ ID NO: 9499
  GFR-binding peptide
  MOD_RES (34)..(34): Xaa is C or S
  MOD_RES (14)..(15)..(16)..(17)..(18): Xaa is A or G
  MOD_RES (19)..(20)..(21)..(22): Xaa is A or G or is absent

SEQ ID NO: 30904 - protein, 37 aa, Artificial Sequence
  GFR-binding peptide
  MOD_RES (6)..(7): Xaa is C or S
TVPKPXXAPTQLSPISVLYIDDSSNVIYKQYENMVVR

SEQ ID NO: 30905 - protein, 43 aa, Artificial Sequence; identical to SEQ ID NO: 9503
  GFR-binding peptide
  MOD_RES (6)..(7)..(40)..(42): Xaa is C or S
  MOD_RES (21)..(22)..(23)..(24)..(25): Xaa is A or G
  MOD_RES (26)..(27)..(28)..(29): Xaa is A or G or is absent

SEQ ID NO: 30906 - protein, 41 aa, Artificial Sequence; identical to SEQ ID NO: 9504
  GFR-binding peptide
  MOD_RES (6)..(7)..(38)..(40): Xaa is C or S

SEQ ID NO: 30907 - protein, 35 aa, Artificial Sequence; identical to SEQ ID NO: 9506
  GFR-binding peptide
  MOD_RES (1)..(2)..(34): Xaa is C or S

SEQ ID NO: 30908 - protein, 36 aa, Artificial Sequence; identical to SEQ ID NO: 9507
  GFR-binding peptide
  MOD_RES (1)..(33)..(35): Xaa is C or S

SEQ ID NO: 30909 - protein, 42 aa, Artificial Sequence; identical to SEQ ID NO: 9508
  GFR-binding peptide
  MOD_RES (7)..(41): Xaa is C or S
  MOD_RES (21)..(22)..(23)..(24)..(25): Xaa is A or G
  MOD_RES (26)..(27)..(28)..(29): Xaa is A or G or is absent

SEQ ID NO: 30910 - protein, 41 aa, Artificial Sequence
  GFR-binding peptide
  MOD_RES (6)..(7)..(40): Xaa is C or S
  MOD_RES (21)..(22)..(23)..(24)..(25): Xaa is A or G
  MOD_RES (26)..(27)..(28)..(29): Xaa is A or G or is absent
ASASPXXVPQDLEPISILYLXXXXXXXXXKFKYEMVVKSXK

SEQ ID NO: 30911 - protein, 39 aa, Artificial Sequence
  GFR-binding peptide
  MOD_RES (6)..(7): Xaa is C or S
  MOD_RES (21)..(22)..(23)..(24)..(25): Xaa is A or G
  MOD_RES (26)..(27)..(28)..(29): Xaa is A or G or is absent
TVPKPXXAPTQLSPISVLYIXXXXXXXXXYKQYENMVVR

SEQ ID NO: 30912 - protein, 36 aa, Artificial Sequence
  GFR-binding peptide
  MOD_RES (1)..(2)..(36): Xaa is C or S
  MOD_RES (16)..(17)..(18)..(19)..(20): Xaa is A or G
  MOD_RES (21)..(22)..(23)..(24): Xaa is A or G or is absent
XXAPTKLEPISVLYLXXXXXXXXXKFKYENMVVKAX

SEQ ID NO: 30913 - protein, 44 aa, Artificial Sequence; identical to SEQ ID NO: 9516
  GFR-binding peptide
  MOD_RES (6)..(7)..(41)..(43): Xaa is C or S
  MOD_RES (21)..(22)..(23)..(24)..(25): Xaa is A or G
  MOD_RES (26)..(27)..(28)..(29): Xaa is A or G or is absent

SEQ ID NO: 30914 - protein, 38 aa, Artificial Sequence
  GFR-binding peptide
  MOD_RES (6)..(38): Xaa is C or S
VTKPTXAPTKLEPISVLYLDDSSNVIKFKYENMVVRSX

SEQ ID NO: 30915 - protein, 34 aa, Artificial Sequence; identical to SEQ ID NO: 9518
  GFR-binding peptide
  MOD_RES (33)..(33): Xaa is C or S
  MOD_RES (14)..(15)..(16)..(17)..(18): Xaa is A or G
  MOD_RES (19)..(20)..(21)..(22): Xaa is A or G or is absent

SEQ ID NO: 30916 - protein, 31 aa, Artificial Sequence; identical to SEQ ID NO: 9519
  GFR-binding peptide

SEQ ID NO: 30917 - protein, 32 aa, Artificial Sequence
  GFR-binding peptide
  MOD_RES (1)..(2): Xaa is C or S
XXVPTELEPISMLYLDENEKVVKFKYEDMVVE

SEQ ID NO: 30918 - protein, 40 aa, Artificial Sequence; identical to SEQ ID NO: 9521
  GFR-binding peptide
  MOD_RES (3)..(4)..(39): Xaa is C or S
  MOD_RES (18)..(19)..(20)..(21)..(22): Xaa is A or G
  MOD_RES (23)..(24)..(25)..(26): Xaa is A or G or is absent

SEQ ID NO: 30919 - protein, 42 aa, Artificial Sequence; identical to SEQ ID NO: 9522
  GFR-binding peptide
  MOD_RES (4)..(5)..(39)..(41): Xaa is C or S
  MOD_RES (19)..(20)..(21)..(22)..(23): Xaa is A or G
  MOD_RES (24)..(25)..(26)..(27): Xaa is A or G or is absent

SEQ ID NO: 30920 - protein, 34 aa, Artificial Sequence
  GFR-binding peptide
  MOD_RES (1)..(2)..(34): Xaa is C or S
XXVPARLEPISILYLDAANNVVKFKYEDMVVEAX

SEQ ID NO: 30921 - protein, 39 aa, Artificial Sequence; identical to SEQ ID NO: 9525
  GFR-binding peptide
  MOD_RES (2)..(3)..(36)..(38): Xaa is C or S
  MOD_RES (17)..(18)..(19)..(20)..(21): Xaa is A or G
  MOD_RES (22)..(23)..(24)..(25): Xaa is A or G or is absent

SEQ ID NO: 30922 - protein, 37 aa, Artificial Sequence
  GFR-binding peptide
  MOD_RES (1)..(2)..(34)..(36): Xaa is C or S
XXVPTKLNAISILYFDKGVVTYLKKYRGMAVSEXGXR

SEQ ID NO: 30923 - protein, 36 aa, Artificial Sequence; identical to SEQ ID NO: 9528
  GFR-binding peptide
  MOD_RES (3)..(4)..(35): Xaa is C or S

SEQ ID NO: 30924 - protein, 36 aa, Artificial Sequence
  GFR-binding peptide
  MOD_RES (6)..(6): Xaa is C or S
VTKPTXAPTKLEPISVLYLDDSSNVIKFKYENMVVR

SEQ ID NO: 30925 - protein, 40 aa, Artificial Sequence; identical to SEQ ID NO: 9532
  GFR-binding peptide
  MOD_RES (2)..(3)..(37)..(39): Xaa is C or S
  MOD_RES (17)..(18)..(19)..(20)..(21): Xaa is A or G
  MOD_RES (22)..(23)..(24)..(25): Xaa is A or G or is absent

SEQ ID NO: 30926 - protein, 36 aa, Artificial Sequence; identical to SEQ ID NO: 9533
  GFR-binding peptide
  MOD_RES (2)..(3): Xaa is C or S
  MOD_RES (17)..(18)..(19)..(20)..(21): Xaa is A or G
  MOD_RES (22)..(23)..(24)..(25): Xaa is A or G or is absent

SEQ ID NO: 30927 - protein, 30 aa, Artificial Sequence; identical to SEQ ID NO: 9534
  GFR-binding peptide

SEQ ID NO: 30928 - protein, 33 aa, Artificial Sequence
  GFR-binding peptide
  MOD_RES (1)..(33): Xaa is C or S
XVPTELSPISMLYIDENEKVVYKQYEDMVVEGX

SEQ ID NO: 30929 - protein, 33 aa, Artificial Sequence
  GFR-binding peptide
  MOD_RES (2)..(3): Xaa is C or S
PXXVPQALSPISILYIVGRKPKVYKQYEMIVRS

SEQ ID NO: 30930 - protein, 39 aa, Artificial Sequence
  GFR-binding peptide
  MOD_RES (5)..(6)..(38): Xaa is C or S
IPKAXXVPTELEPISMLYLDENEKVVKFKYEDMVVEGXG

SEQ ID NO: 30931 - protein, 38 aa, Artificial Sequence
  GFR-binding peptide
  MOD_RES (4)..(5)..(38): Xaa is C or S
GKAXXVPTKLSPISVLYIDDMGVPTYKQYEEGMSVAEX

SEQ ID NO: 30932 - protein, 38 aa, Artificial Sequence; identical to SEQ ID NO: 9536
  GFR-binding peptide
  MOD_RES (6)..(7): Xaa is C or S

SEQ ID NO: 30933 - protein, 42 aa, Artificial Sequence
  GFR-binding peptide
  MOD_RES (6)..(7)..(41): Xaa is C or S
  MOD_RES (21)..(22)..(23)..(24)..(25): Xaa is A or G
  MOD_RES (26)..(27)..(28)..(29): Xaa is A or G or is absent
KIPKAXXVPTELSPISMLYIXXXXXXXXXYKQYEDMVVEGXG

SEQ ID NO: 30934 - protein, 40 aa, Artificial Sequence; identical to SEQ ID NO: 9538
  GFR-binding peptide
  MOD_RES (5)..(6)..(37)..(39): Xaa is C or S

SEQ ID NO: 30935 - protein, 38 aa, Artificial Sequence
  GFR-binding peptide
  MOD_RES (1)..(36)..(38): Xaa is C or S
  MOD_RES (15)..(16)..(17)..(18)..(19): Xaa is A or G
  MOD_RES (20)..(21)..(22)..(23): Xaa is A or G or is absent
XVPTKLEPISVLYLXXXXXXXXXKFKYEEGMSVAEXGX

SEQ ID NO: 30936 - protein, 41 aa, Artificial Sequence
  GFR-binding peptide
  MOD_RES (6)..(7)..(39)..(41): Xaa is C or S
KIPKAXXVPTELEPISMLYLDENEKVVKFKYEDMVVEGXGX

SEQ ID NO: 30937 - protein, 35 aa, Artificial Sequence
  GFR-binding peptide
  MOD_RES (1)..(2)..(34): Xaa is C or S
XXVPTKLNAISILYFDKGVVTYLKKYRGMAVSEXG

SEQ ID NO: 30938 - protein, 34 aa, Artificial Sequence; identical to SEQ ID NO: 9545
  GFR-binding peptide
  MOD_RES (1)..(33): Xaa is C or S

SEQ ID NO: 30939 - protein, 39 aa, Artificial Sequence; identical to SEQ ID NO: 9546
  GFR-binding peptide
  MOD_RES (6)..(7)..(38): Xaa is C or S

SEQ ID NO: 30940 - protein, 37 aa, Artificial Sequence; identical to SEQ ID NO: 9548
  GFR-binding peptide
  MOD_RES (1)..(2)..(35)..(37): Xaa is C or S

SEQ ID NO: 30941 - protein, 37 aa, Artificial Sequence
  GFR-binding peptide
  MOD_RES (1)..(35)..(37): Xaa is C or S
  MOD_RES (15)..(16)..(17)..(18)..(19): Xaa is A or G
  MOD_RES (20)..(21)..(22)..(23): Xaa is A or G or is absent
XAPTKLEPISVLYLXXXXXXXXXKFKYENMVVKAXGX

SEQ ID NO: 30942 - protein, 37 aa, Artificial Sequence
  GFR-binding peptide
  MOD_RES (1)..(2)..(34)..(36): Xaa is C or S
XXAPTKLEPISVLYLDSSNNVIKFKYENMVVKAXGXH

SEQ ID NO: 30943 - protein, 36 aa, Artificial Sequence
  GFR-binding peptide
  MOD_RES (2)..(3): Xaa is C or S
  MOD_RES (17)..(18)..(19)..(20)..(21): Xaa is A or G
  MOD_RES (22)..(23)..(24)..(25): Xaa is A or G or is absent
AXXVPTELSPISMLYIXXXXXXXXXYKQYEDMVVEG

SEQ ID NO: 30944 - protein, 33 aa, Artificial Sequence
  GFR-binding peptide
  MOD_RES (32)..(32): Xaa is C or S
APTKLSPISVLYIDDSSNVIYKQYENMVVRSXG

SEQ ID NO: 30945 - protein, 32 aa, Artificial Sequence
  GFR-binding peptide
  MOD_RES (1)..(32): Xaa is C or S
XVSQDLSPISILYIIGKTPKIYKQYEMIVKSX

SEQ ID NO: 30946 - protein, 43 aa, Artificial Sequence
  GFR-binding peptide
  MOD_RES (6)..(7)..(41)..(43): Xaa is C or S
  MOD_RES (21)..(22)..(23)..(24)..(25): Xaa is A or G
  MOD_RES (26)..(27)..(28)..(29): Xaa is A or G or is absent
KIPKAXXVPTELSPISMLYIXXXXXXXXXYKQYEDMVVEGXGX

SEQ ID NO: 30947 - protein, 37 aa, Artificial Sequence; identical to SEQ ID NO: 9551
  GFR-binding peptide
  MOD_RES (1)..(36): Xaa is C or S
  MOD_RES (15)..(16)..(17)..(18)..(19): Xaa is A or G
  MOD_RES (20)..(21)..(22)..(23): Xaa is A or G or is absent

SEQ ID NO: 30948 - protein, 34 aa, Artificial Sequence
  GFR-binding peptide
  MOD_RES (33)..(33): Xaa is C or S
  MOD_RES (14)..(15)..(16)..(17)..(18): Xaa is A or G
  MOD_RES (19)..(20)..(21)..(22): Xaa is A or G or is absent
VSQDLEPISILYLXXXXXXXXXKFKYEMIVKSXK

SEQ ID NO: 30949 - protein, 40 aa, Artificial Sequence; identical to SEQ ID NO: 9553
  GFR-binding peptide
  MOD_RES (6)..(7)..(40): Xaa is C or S

SEQ ID NO: 30950 - protein, 37 aa, Artificial Sequence; identical to SEQ ID NO: 9555
  GFR-binding peptide
  MOD_RES (1)..(2)..(37): Xaa is C or S
  MOD_RES (16)..(17)..(18)..(19)..(20): Xaa is A or G
  MOD_RES (21)..(22)..(23)..(24): Xaa is A or G or is absent

SEQ ID NO: 30951 - protein, 32 aa, Artificial Sequence; identical to SEQ ID NO: 9556
  GFR-binding peptide
  MOD_RES (1)..(1): Xaa is C or S

SEQ ID NO: 30952 - protein, 39 aa, Artificial Sequence; identical to SEQ ID NO: 9557
  GFR-binding peptide
  MOD_RES (6)..(7): Xaa is C or S
  MOD_RES (21)..(22)..(23)..(24)..(25): Xaa is A or G
  MOD_RES (26)..(27)..(28)..(29): Xaa is A or G or is absent

SEQ ID NO: 30953 - protein, 34 aa, Artificial Sequence
  GFR-binding peptide
  MOD_RES (1)..(33): Xaa is C or S
XVPTELSPISMLYIDENEKVVYKQYEDMVVEGXG

SEQ ID NO: 30954 - protein, 34 aa, Artificial Sequence; identical to SEQ ID NO: 9559
  GFR-binding peptide
  MOD_RES (1)..(32)..(34): Xaa is C or S

SEQ ID NO: 30955 - protein, 36 aa, Artificial Sequence
  GFR-binding peptide
  MOD_RES (4)..(5): Xaa is C or S
PKPXXAPTQLEPISVLYLDDSSNVIKFKYENMVVRA

SEQ ID NO: 30956 - protein, 36 aa, Artificial Sequence
  GFR-binding peptide
  MOD_RES (2)..(3): Xaa is C or S
  MOD_RES (17)..(18)..(19)..(20)..(21): Xaa is A or G
  MOD_RES (22)..(23)..(24)..(25): Xaa is A or G or is absent
PXXAPTQLSPISVLYIXXXXXXXXXYKQYENMVVRA

SEQ ID NO: 30957 - protein, 40 aa, Artificial Sequence; identical to SEQ ID NO: 9562
  GFR-binding peptide
  MOD_RES (5)..(6)..(39): Xaa is C or S
  MOD_RES (20)..(21)..(22)..(23)..(24): Xaa is A or G
  MOD_RES (25)..(26)..(27)..(28): Xaa is A or G or is absent

SEQ ID NO: 30958 - protein, 36 aa, Artificial Sequence; identical to SEQ ID NO: 9564
  GFR-binding peptide
  MOD_RES (1)..(33)..(35): Xaa is C or S

SEQ ID NO: 30959 - protein, 39 aa, Artificial Sequence
  GFR-binding peptide
  MOD_RES (4)..(5)..(36)..(38): Xaa is C or S
ASPXXVSQDLSPISILYIIGKTPKIYKQYEMIVKSXKXS

SEQ ID NO: 30960 - protein, 37 aa, Artificial Sequence
  GFR-binding peptide
  MOD_RES (1)..(35)..(37): Xaa is C or S
  MOD_RES (15)..(16)..(17)..(18)..(19): Xaa is A or G
  MOD_RES (20)..(21)..(22)..(23): Xaa is A or G or is absent
XVPTELEPISMLYLXXXXXXXXXKFKYEDMVVEGXGX

SEQ ID NO: 30961 - protein, 37 aa, Artificial Sequence; identical to SEQ ID NO: 9568
  GFR-binding peptide
  MOD_RES (2)..(3)..(37): Xaa is C or S
  MOD_RES (17)..(18)..(19)..(20)..(21): Xaa is A or G
  MOD_RES (22)..(23)..(24)..(25): Xaa is A or G or is absent

SEQ ID NO: 30962 - protein, 36 aa, Artificial Sequence; identical to SEQ ID NO: 9569
  GFR-binding peptide
  MOD_RES (1)..(35): Xaa is C or S
  MOD_RES (15)..(16)..(17)..(18)..(19): Xaa is A or G
  MOD_RES (20)..(21)..(22)..(23): Xaa is A or G or is absent

SEQ ID NO: 30963 - protein, 33 aa, Artificial Sequence; identical to SEQ ID NO: 9570
  GFR-binding peptide
  MOD_RES (14)..(15)..(16)..(17)..(18): Xaa is A or G
  MOD_RES (19)..(20)..(21)..(22): Xaa is A or G or is absent

SEQ ID NO: 30964 - protein, 39 aa, Artificial Sequence
  GFR-binding peptide
  MOD_RES (4)..(5)..(37)..(39): Xaa is C or S
PKPXXAPTKLEPISVLYLDDSSNVIKFKYENMVVRSXGX

SEQ ID NO: 30965 - protein, 38 aa, Artificial Sequence
  GFR-binding peptide
  MOD_RES (5)..(6)..(38): Xaa is C or S
VPKAXXAPTKLEPISVLYLDSSNNVIKFKYENMVVKAX

SEQ ID NO: 30966 - protein, 41 aa, Artificial Sequence
  GFR-binding peptide
  MOD_RES (4)..(5)..(39)..(41): Xaa is C or S
  MOD_RES (19)..(20)..(21)..(22)..(23): Xaa is A or G
  MOD_RES (24)..(25)..(26)..(27): Xaa is A or G or is absent
PKPXXAPTQLEPISVLYLXXXXXXXXXKFKYENMVVRAXGX

SEQ ID NO: 30967 - protein, 36 aa, Artificial Sequence
  GFR-binding peptide
  MOD_RES (1)..(2)..(36): Xaa is C or S
  MOD_RES (16)..(17)..(18)..(19)..(20): Xaa is A or G
  MOD_RES (21)..(22)..(23)..(24): Xaa is A or G or is absent
XXVPTELSPISMLYIXXXXXXXXXYKQYEDMVVEGX

SEQ ID NO: 30968 - protein, 37 aa, Artificial Sequence
  GFR-binding peptide
  MOD_RES (4)..(5): Xaa is C or S
  MOD_RES (19)..(20)..(21)..(22)..(23): Xaa is A or G
  MOD_RES (24)..(25)..(26)..(27): Xaa is A or G or is absent
PKPXXAPTKLSPISVLYIXXXXXXXXXYKQYENMVVR

SEQ ID NO: 30969 - protein, 33 aa, Artificial Sequence; identical to SEQ ID NO: 9572
  GFR-binding peptide
  MOD_RES (1)..(1): Xaa is C or S
  MOD_RES (15)..(16)..(17)..(18)..(19): Xaa is A or G
  MOD_RES (20)..(21)..(22)..(23): Xaa is A or G or is absent

SEQ ID NO: 30970 - protein, 41 aa, Artificial Sequence
  GFR-binding peptide
  MOD_RES (6)..(7)..(41): Xaa is C or S
  MOD_RES (21)..(22)..(23)..(24)..(25): Xaa is A or G
  MOD_RES (26)..(27)..(28)..(29): Xaa is A or G or is absent
AAPASXXVPARLSPISILYKXXXXXXXXXLKYHYDMVVEAX

SEQ ID NO: 30971 - protein, 38 aa, Artificial Sequence
  GFR-binding peptide
  MOD_RES (3)..(4)..(38): Xaa is C or S
  MOD_RES (18)..(19)..(20)..(21)..(22): Xaa is A or G
  MOD_RES (23)..(24)..(25)..(26): Xaa is A or G or is absent
ASXXVPARLNAISILYFXXXXXXXXXLKKYRDMVVEAX

SEQ ID NO: 30972 - protein, 38 aa, Artificial Sequence; identical to SEQ ID NO: 9577
  GFR-binding peptide
  MOD_RES (4)..(5)..(37): Xaa is C or S

SEQ ID NO: 30973 - protein, 42 aa, Artificial Sequence
  GFR-binding peptide
  MOD_RES (6)..(7)..(40)..(42): Xaa is C or S
  MOD_RES (21)..(22)..(23)..(24)..(25): Xaa is A or G
  MOD_RES (26)..(27)..(28)..(29): Xaa is A or G or is absent
ASAAPXXVPQALSPISILYIXXXXXXXXXYKQYEMIVRSXKX

SEQ ID NO: 30974 - protein, 38 aa, Artificial Sequence; identical to SEQ ID NO: 9578
  GFR-binding peptide
  MOD_RES (4)..(5)..(38): Xaa is C or S
  MOD_RES (19)..(20)..(21)..(22)..(23): Xaa is A or G
  MOD_RES (24)..(25)..(26)..(27): Xaa is A or G or is absent

SEQ ID NO: 30975 - protein, 34 aa, Artificial Sequence; identical to SEQ ID NO: 9579
  GFR-binding peptide
  MOD_RES (3)..(4): Xaa is C or S

SEQ ID NO: 30976 - protein, 41 aa, Artificial Sequence; identical to SEQ ID NO: 9580
  GFR-binding peptide
  MOD_RES (6)..(7)..(41): Xaa is C or S
  MOD_RES (21)..(22)..(23)..(24)..(25): Xaa is A or G
  MOD_RES (26)..(27)..(28)..(29): Xaa is A or G or is absent

SEQ ID NO: 30977 - protein, 37 aa, Artificial Sequence; identical to SEQ ID NO: 9581
  GFR-binding peptide
  MOD_RES (4)..(5): Xaa is C or S
  MOD_RES (19)..(20)..(21)..(22)..(23): Xaa is A or G
  MOD_RES (24)..(25)..(26)..(27): Xaa is A or G or is absent

SEQ ID NO: 30978 - protein, 39 aa, Artificial Sequence
  GFR-binding peptide
  MOD_RES (4)..(36)..(38): Xaa is C or S
KPTXAPTKLEPISVLYLDDSSNVIKFKYENMVVRSXGXH

SEQ ID NO: 30979 - protein, 38 aa, Artificial Sequence; identical to SEQ ID NO: 9583
  GFR-binding peptide
  MOD_RES (6)..(7): Xaa is C or S

SEQ ID NO: 30980 - protein, 32 aa, Artificial Sequence; identical to SEQ ID NO: 9584
  GFR-binding peptide
  MOD_RES (31)..(31): Xaa is C or S

SEQ ID NO: 30981 - protein, 39 aa, Artificial Sequence; identical to SEQ ID NO: 9585
  GFR-binding peptide
  MOD_RES (5)..(6)..(39): Xaa is C or S

SEQ ID NO: 30982 - protein, 39 aa, Artificial Sequence
  GFR-binding peptide
  MOD_RES (5)..(39): Xaa is C or S
  MOD_RES (19)..(20)..(21)..(22)..(23): Xaa is A or G
  MOD_RES (24)..(25)..(26)..(27): Xaa is A or G or is absent
TKPTXAPTKLEPISVLYLXXXXXXXXXKFKYENMVVRSX

SEQ ID NO: 30983 - protein, 40 aa, Artificial Sequence
  GFR-binding peptide
  MOD_RES (2)..(3)..(37)..(39): Xaa is C or S
  MOD_RES (17)..(18)..(19)..(20)..(21): Xaa is A or G
  MOD_RES (22)..(23)..(24)..(25): Xaa is A or G or is absent
AXXAPTKLEPISVLYLXXXXXXXXXKFKYENMVVKAXGXH

SEQ ID NO: 30984 - protein, 30 aa, Artificial Sequence; identical to SEQ ID NO: 9588
  GFR-binding peptide

SEQ ID NO: 30985 - protein, 37 aa, Artificial Sequence; identical to SEQ ID NO: 9590
  GFR-binding peptide
  MOD_RES (2)..(3)..(35)..(37): Xaa is C or S

SEQ ID NO: 30986 - protein, 36 aa, Artificial Sequence; identical to SEQ ID NO: 9592
  GFR-binding peptide
  MOD_RES (1)..(35): Xaa is C or S
  MOD_RES (15)..(16)..(17)..(18)..(19): Xaa is A or G
  MOD_RES (20)..(21)..(22)..(23): Xaa is A or G or is absent

SEQ ID NO: 30987 - protein, 40 aa, Artificial Sequence; identical to SEQ ID NO: 9593
  GFR-binding peptide
  MOD_RES (5)..(6)..(40): Xaa is C or S
  MOD_RES (20)..(21)..(22)..(23)..(24): Xaa is A or G
  MOD_RES (25)..(26)..(27)..(28): Xaa is A or G or is absent

SEQ ID NO: 30988 - protein, 34 aa, Artificial Sequence
  GFR-binding peptide
  MOD_RES (1)..(1): Xaa is C or S
  MOD_RES (15)..(16)..(17)..(18)..(19): Xaa is A or G
  MOD_RES (20)..(21)..(22)..(23): Xaa is A or G or is absent
XVPTELSPISMLYIXXXXXXXXXYKQYEEMVVEG

SEQ ID NO: 30989 - protein, 32 aa, Artificial Sequence; identical to SEQ ID NO: 9595
  GFR-binding peptide
  MOD_RES (14)..(15)..(16)..(17)..(18): Xaa is A or G
  MOD_RES (19)..(20)..(21)..(22): Xaa is A or G or is absent

SEQ ID NO: 30990 - protein, 35 aa, Artificial Sequence
  GFR-binding peptide
  MOD_RES (3)..(3): Xaa is C or S
  MOD_RES (17)..(18)..(19)..(20)..(21): Xaa is A or G
  MOD_RES (22)..(23)..(24)..(25): Xaa is A or G or is absent
PTXAPTKLEPISVLYLXXXXXXXXXKFKYENMVVR

SEQ ID NO: 30991 - protein, 42 aa, Artificial Sequence; identical to SEQ ID NO: 9598
  GFR-binding peptide
  MOD_RES (6)..(7)..(40)..(42): Xaa is C or S
  MOD_RES (21)..(22)..(23)..(24)..(25): Xaa is A or G
  MOD_RES (26)..(27)..(28)..(29): Xaa is A or G or is absent

SEQ ID NO: 30992 - protein, 37 aa, Artificial Sequence
  GFR-binding peptide
  MOD_RES (2)..(3)..(35)..(37): Xaa is C or S
SXXVPARLNAISILYFDAANNVVLKKYRDMVVEAXGX

SEQ ID NO: 30993 - protein, 40 aa, Artificial Sequence
  GFR-binding peptide
  MOD_RES (3)..(4)..(38)..(40): Xaa is C or S
  MOD_RES (18)..(19)..(20)..(21)..(22): Xaa is A or G
  MOD_RES (23)..(24)..(25)..(26): Xaa is A or G or is absent
KAXXVPTELSPISMLYIXXXXXXXXXYKQYEDMVVEGXGX

SEQ ID NO: 30994 - protein, 34 aa, Artificial Sequence
  GFR-binding peptide
  MOD_RES (1)..(34): Xaa is C or S
XVPTKLSPISVLYIDDMGVPTYKQYEEGMSVAEX

SEQ ID NO: 30995 - protein, 37 aa, Artificial Sequence; identical to SEQ ID NO: 9602
  GFR-binding peptide
  MOD_RES (4)..(5)..(37): Xaa is C or S

SEQ ID NO: 30996 - protein, 33 aa, Artificial Sequence; identical to SEQ ID NO: 9603
  GFR-binding peptide
  MOD_RES (1)..(2): Xaa is C or S

SEQ ID NO: 30997 - protein, 39 aa, Artificial Sequence; identical to SEQ ID NO: 9604
  GFR-binding peptide
  MOD_RES (4)..(5)..(37)..(39): Xaa is C or S

SEQ ID NO: 30998 - protein, 33 aa, Artificial Sequence
  GFR-binding peptide
  MOD_RES (32)..(32): Xaa is C or S
VPARLNAISILYFDAANNVVLKKYRDMVVEAXG

SEQ ID NO: 30999 - protein, 33 aa, Artificial Sequence
  GFR-binding peptide
  MOD_RES (2)..(3): Xaa is C or S
AXXVPTELSPISMLYIDENEKVVYKQYEDMVVE

SEQ ID NO: 31000 - protein, 35 aa, Artificial Sequence; identical to SEQ ID NO: 9606
  GFR-binding peptide
  MOD_RES (2)..(3): Xaa is C or S
  MOD_RES (17)..(18)..(19)..(20)..(21): Xaa is A or G
  MOD_RES (22)..(23)..(24)..(25): Xaa is A or G or is absent

SEQ ID NO: 31001 - protein, 36 aa, Artificial Sequence; identical to SEQ ID NO: 9607
  GFR-binding peptide
  MOD_RES (3)..(4)..(36): Xaa is C or S

SEQ ID NO: 31002 - protein, 35 aa, Artificial Sequence
  GFR-binding peptide
  MOD_RES (33)..(35): Xaa is C or S
VPTKLEPISVLYLDDMGVPTKFKYEEGMSVAEXGX

SEQ ID NO: 31003 - protein, 32 aa, Artificial Sequence
  GFR-binding peptide
  MOD_RES (32)..(32): Xaa is C or S
VPTKLSPISILYIDKGVVTYYKQYEGMAVSEX

SEQ ID NO: 31004 - protein, 38 aa, Artificial Sequence
  GFR-binding peptide
  MOD_RES (5)..(6)..(38): Xaa is C or S
VPKAXXAPTKLSPISVLYIDSSNNVIYKQYENMVVKAX

SEQ ID NO: 31005 - protein, 35 aa, Artificial Sequence
  GFR-binding peptide
  MOD_RES (1)..(34): Xaa is C or S
  MOD_RES (15)..(16)..(17)..(18)..(19): Xaa is A or G
  MOD_RES (20)..(21)..(22)..(23): Xaa is A or G or is absent
XVPQALSPISILYIXXXXXXXXXYKQYEMIVRSXK

SEQ ID NO: 31006 - protein, 36 aa, Artificial Sequence
  GFR-binding peptide
  MOD_RES (2)..(3)..(36): Xaa is C or S
  MOD_RES (17)..(18)..(19)..(20)..(21): Xaa is A or G
  MOD_RES (22)..(23)..(24)..(25): Xaa is A or G or is absent
PXXVPQALSPISILYIXXXXXXXXXYKQYEMIVRSX

SEQ ID NO: 31007 - protein, 34 aa, Artificial Sequence
  GFR-binding peptide
  MOD_RES (1)..(2): Xaa is C or S
  MOD_RES (16)..(17)..(18)..(19)..(20): Xaa is A or G
  MOD_RES (21)..(22)..(23)..(24): Xaa is A or G or is absent
XXVSQDLEPISILYLXXXXXXXXXKFKYEMIVKS

SEQ ID NO: 31008 - protein, 41 aa, Artificial Sequence; identical to SEQ ID NO: 9610
  GFR-binding peptide
  MOD_RES (5)..(6)..(40): Xaa is C or S
  MOD_RES (20)..(21)..(22)..(23)..(24): Xaa is A or G
  MOD_RES (25)..(26)..(27)..(28): Xaa is A or G or is absent

SEQ ID NO: 31009 - protein, 38 aa, Artificial Sequence
  GFR-binding peptide
  MOD_RES (2)..(3)..(37): Xaa is C or S
  MOD_RES (17)..(18)..(19)..(20)..(21): Xaa is A or G
  MOD_RES (22)..(23)..(24)..(25): Xaa is A or G or is absent
PXXAPTKLEPISVLYLXXXXXXXXXKFKYENMVVRSXG

SEQ ID NO: 31010 - protein, 39 aa, Artificial Sequence; identical to SEQ ID NO: 9613
  GFR-binding peptide
  MOD_RES (5)..(6)..(39): Xaa is C or S
  MOD_RES (20)..(21)..(22)..(23)..(24): Xaa is A or G
  MOD_RES (25)..(26)..(27)..(28): Xaa is A or G or is absent

SEQ ID NO: 31011 - protein, 40 aa, Artificial Sequence
  GFR-binding peptide
  MOD_RES (3)..(4)..(38)..(40): Xaa is C or S
  MOD_RES (18)..(19)..(20)..(21)..(22): Xaa is A or G
  MOD_RES (23)..(24)..(25)..(26): Xaa is A or G or is absent
KAXXAPTKLSPISVLYIXXXXXXXXXYKQYENMVVKAXGX

SEQ ID NO: 31012 - protein, 39 aa, Artificial Sequence
  GFR-binding peptide
  MOD_RES (5)..(6)..(37)..(39): Xaa is C or S
SAAPXXVPQALEPISILYLVGRKPKVKFKYEMIVRSXKX

SEQ ID NO: 31013 - protein, 33 aa, Artificial Sequence
  GFR-binding peptide
  MOD_RES (2)..(2): Xaa is C or S
TXAPTKLSPISVLYIDDSSNVIYKQYENMVVRS

SEQ ID NO: 31014 - protein, 42 aa, Artificial Sequence; identical to SEQ ID NO: 9614
  GFR-binding peptide
  MOD_RES (6)..(7)..(41): Xaa is C or S
  MOD_RES (21)..(22)..(23)..(24)..(25): Xaa is A or G
  MOD_RES (26)..(27)..(28)..(29): Xaa is A or G or is absent

SEQ ID NO: 31015 - protein, 33 aa, Artificial Sequence
  GFR-binding peptide
  MOD_RES (1)..(1): Xaa is C or S
  MOD_RES (15)..(16)..(17)..(18)..(19): Xaa is A or G
  MOD_RES (20)..(21)..(22)..(23): Xaa is A or G or is absent
XAPTQLSPISVLYIXXXXXXXXXYKQYENMVVR

SEQ ID NO: 31016 - protein, 32 aa, Artificial Sequence
  GFR-binding peptide
  MOD_RES (32)..(32): Xaa is C or S
APTKLEPISVLYLDSSNNVIKFKYENMVVKAX

SEQ ID NO: 31017 - protein, 38 aa, Artificial Sequence
  GFR-binding peptide
  MOD_RES (1)..(35)..(37): Xaa is C or S
  MOD_RES (15)..(16)..(17)..(18)..(19): Xaa is A or G
  MOD_RES (20)..(21)..(22)..(23): Xaa is A or G or is absent
XVPTKLSPISILYIXXXXXXXXXYKQYEGMAVSEXGXR

SEQ ID NO: 31018 - protein, 39 aa, Artificial Sequence
  GFR-binding peptide
  MOD_RES (4)..(5)..(37)..(39): Xaa is C or S
PKPXXAPTQLEPISVLYLDDSSNVIKFKYENMVVRAXGX

SEQ ID NO: 31019 - protein, 35 aa, Artificial Sequence
  GFR-binding peptide
  MOD_RES (4)..(5): Xaa is C or S
SKAXXVPTKLSPISILYKDKGVVTYLKYHYGMAVS

SEQ ID NO: 31020 - protein, 37 aa, Artificial Sequence
  GFR-binding peptide
  MOD_RES (3)..(4)..(36): Xaa is C or S
KAXXAPTKLEPISVLYLDSSNNVIKFKYENMVVKAXG

SEQ ID NO: 31021 - protein, 38 aa, Artificial Sequence
  GFR-binding peptide
  MOD_RES (3)..(4)..(36)..(38): Xaa is C or S
KPXXAPTQLEPISVLYLDDSSNVIKFKYENMVVRAXGX

SEQ ID NO: 31022 - protein, 35 aa, Artificial Sequence; identical to SEQ ID NO: 9621
  GFR-binding peptide
  MOD_RES (1)..(2): Xaa is C or S
  MOD_RES (16)..(17)..(18)..(19)..(20): Xaa is A or G
  MOD_RES (21)..(22)..(23)..(24): Xaa is A or G or is absent

SEQ ID NO: 31023 - protein, 40 aa, Artificial Sequence; identical to SEQ ID NO: 9622
  GFR-binding peptide
  MOD_RES (4)..(5)..(38)..(40): Xaa is C or S
  MOD_RES (19)..(20)..(21)..(22)..(23): Xaa is A or G
  MOD_RES (24)..(25)..(26)..(27): Xaa is A or G or is absent

SEQ ID NO: 31024 - protein, 40 aa, Artificial Sequence
  GFR-binding peptide
  MOD_RES (6)..(7)..(39): Xaa is C or S
SIPKAXXVPTELEPISMLYLDEYDKVVKFKYEEMVVEGXG

SEQ ID NO: 31025 - protein, 36 aa, Artificial Sequence
  GFR-binding peptide
  MOD_RES (2)..(3)..(34)..(36): Xaa is C or S
PXXVSQDLEPISILYLIGKTPKIKFKYEMIVKSXKX

SEQ ID NO: 31026 - protein, 36 aa, Artificial Sequence; identical to SEQ ID NO: 9625
  GFR-binding peptide
  MOD_RES (1)..(2)..(33)..(35): Xaa is C or S

SEQ ID NO: 31027 - protein, 34 aa, Artificial Sequence
  GFR-binding peptide
  MOD_RES (1)..(1): Xaa is C or S
  MOD_RES (15)..(16)..(17)..(18)..(19): Xaa is A or G
  MOD_RES (20)..(21)..(22)..(23): Xaa is A or G or is absent
XAPTQLEPISVLYLXXXXXXXXXKFKYENMVVRA

SEQ ID NO: 31028 - protein, 36 aa, Artificial Sequence
  GFR-binding peptide
  MOD_RES (2)..(3)..(35): Xaa is C or S
PXXAPTQLEPISVLYLDDSSNVIKFKYENMVVRAXG

SEQ ID NO: 31029 - protein, 39 aa, Artificial Sequence; identical to SEQ ID NO: 9626
  GFR-binding peptide
  MOD_RES (4)..(5)..(39): Xaa is C or S
  MOD_RES (19)..(20)..(21)..(22)..(23): Xaa is A or G
  MOD_RES (24)..(25)..(26)..(27): Xaa is A or G or is absent

SEQ ID NO: 31030 - protein, 33 aa, Artificial Sequence
  GFR-binding peptide
  MOD_RES (1)..(2): Xaa is C or S
XXAPTKLSPISVLYIDSSNNVIYKQYENMVVKA

SEQ ID NO: 31031 - protein, 39 aa, Artificial Sequence
  GFR-binding peptide
  MOD_RES (1)..(2)..(36)..(38): Xaa is C or S
  MOD_RES (16)..(17)..(18)..(19)..(20): Xaa is A or G
  MOD_RES (21)..(22)..(23)..(24): Xaa is A or G or is absent
XXAPTKLEPISVLYLXXXXXXXXXKFKYENMVVKAXGXH

SEQ ID NO: 31032 - protein, 36 aa, Artificial Sequence
  GFR-binding peptide
  MOD_RES (3)..(4)..(35): Xaa is C or S
SPXXVSQDLSPISILYIIGKTPKIYKQYEMIVKSXK

SEQ ID NO: 31033 - protein, 37 aa, Artificial Sequence
  GFR-binding peptide
  MOD_RES (34)..(36): Xaa is C or S
  MOD_RES (14)..(15)..(16)..(17)..(18): Xaa is A or G
  MOD_RES (19)..(20)..(21)..(22): Xaa is A or G or is absent
APTQLEPISVLYLXXXXXXXXXKFKYENMVVRAXGXH

SEQ ID NO: 31034 - protein, 37 aa, Artificial Sequence
  GFR-binding peptide
  MOD_RES (1)..(2)..(36): Xaa is C or S
  MOD_RES (16)..(17)..(18)..(19)..(20): Xaa is A or G
  MOD_RES (21)..(22)..(23)..(24): Xaa is A or G or is absent
XXVPARLSPISILYKXXXXXXXXXLKYHYDMVVEAXG

SEQ ID NO: 31035 - protein, 35 aa, Artificial Sequence
  GFR-binding peptide
  MOD_RES (1)..(34): Xaa is C or S
XVPTKLEPISVLYLDDMGVPTKFKYEEGMSVAEXG

SEQ ID NO: 31036 - protein, 35 aa, Artificial Sequence
  GFR-binding peptide
  MOD_RES (1)..(32)..(34): Xaa is C or S
XVSQDLSPISILYIIGKTPKIYKQYEMIVKSXKXS

SEQ ID NO: 31037 - protein, 36 aa, Artificial Sequence; identical to SEQ ID NO: 9632
  GFR-binding peptide
  MOD_RES (4)..(5): Xaa is C or S

SEQ ID NO: 31038 - protein, 43 aa, Artificial Sequence
  GFR-binding peptide
  MOD_RES (7)..(41)..(43): Xaa is C or S
  MOD_RES (21)..(22)..(23)..(24)..(25): Xaa is A or G
  MOD_RES (26)..(27)..(28)..(29): Xaa is A or G or is absent
HVTKPTXAPTKLSPISVLYIXXXXXXXXXYKQYENMVVRSXGX

SEQ ID NO: 31039 - protein, 39 aa, Artificial Sequence; identical to SEQ ID NO: 9633
  GFR-binding peptide
  MOD_RES (3)..(37)..(39): Xaa is C or S
  MOD_RES (17)..(18)..(19)..(20)..(21): Xaa is A or G
  MOD_RES (22)..(23)..(24)..(25): Xaa is A or G or is absent

SEQ ID NO: 31040 - protein, 36 aa, Artificial Sequence
  GFR-binding peptide
  MOD_RES (4)..(5): Xaa is C or S
PKAXXVPTELEPISMLYLDEYDKVVKFKYEEMVVEG

SEQ ID NO: 31041 - protein, 33 aa, Artificial Sequence; identical to SEQ ID NO: 9634
  GFR-binding peptide
  MOD_RES (32)..(32): Xaa is C or S

SEQ ID NO: 31042 - protein, 37 aa, Artificial Sequence
  GFR-binding peptide
  MOD_RES (4)..(36): Xaa is C or S
KPTXAPTKLSPISVLYIDDSSNVIYKQYENMVVRSXG

SEQ ID NO: 31043 - protein, 32 aa, Artificial Sequence
  GFR-binding peptide
  MOD_RES (1)..(2): Xaa is C or S
XXVSQDLSPISILYIIGKTPKIYKQYEMIVKS

SEQ ID NO: 31044 - protein, 36 aa, Artificial Sequence
  GFR-binding peptide
  MOD_RES (3)..(4): Xaa is C or S
  MOD_RES (18)..(19)..(20)..(21)..(22): Xaa is A or G
  MOD_RES (23)..(24)..(25)..(26): Xaa is A or G or is absent
KPXXAPTKLEPISVLYLXXXXXXXXXKFKYENMVVR

SEQ ID NO: 31045 - protein, 36 aa, Artificial Sequence
  GFR-binding peptide
  MOD_RES (2)..(3)..(35): Xaa is C or S
PXXAPTKLEPISVLYLDDSSNVIKFKYENMVVRSXG

SEQ ID NO: 31046 - protein, 36 aa, Artificial Sequence
  GFR-binding peptide
  MOD_RES (2)..(3)..(35): Xaa is C or S
AXXVPTELSPISMLYIDEYDKVVYKQYEEMVVEGXG

SEQ ID NO: 31047 - protein, 42 aa, Artificial Sequence; identical to SEQ ID NO: 9642
  GFR-binding peptide
  MOD_RES (4)..(5)..(40)..(42): Xaa is C or S
  MOD_RES (19)..(20)..(21)..(22)..(23): Xaa is A or G
  MOD_RES (24)..(25)..(26)..(27): Xaa is A or G or is absent

SEQ ID NO: 31048 - protein, 34 aa, Artificial Sequence; identical to SEQ ID NO: 9643
  GFR-binding peptide
  MOD_RES (1)..(1): Xaa is C or S
  MOD_RES (15)..(16)..(17)..(18)..(19): Xaa is A or G
  MOD_RES (20)..(21)..(22)..(23): Xaa is A or G or is absent

SEQ ID NO: 31049 - protein, 37 aa, Artificial Sequence; identical to SEQ ID NO: 9645
  GFR-binding peptide
  MOD_RES (34)..(36): Xaa is C or S
  MOD_RES (14)..(15)..(16)..(17)..(18): Xaa is A or G
  MOD_RES (19)..(20)..(21)..(22): Xaa is A or G or is absent

SEQ ID NO: 31050 - protein, 39 aa, Artificial Sequence; identical to SEQ ID NO: 9646
  GFR-binding peptide
  MOD_RES (2)..(3)..(37)..(39): Xaa is C or S
  MOD_RES (17)..(18)..(19)..(20)..(21): Xaa is A or G
  MOD_RES (22)..(23)..(24)..(25): Xaa is A or G or is absent

SEQ ID NO: 31051 - protein, 41 aa, Artificial Sequence; identical to SEQ ID NO: 9647
  GFR-binding peptide
  MOD_RES (5)..(6)..(38)..(40): Xaa is C or S

SEQ ID NO: 31052 - protein, 41 aa, Artificial Sequence
  GFR-binding peptide
  MOD_RES (6)..(7): Xaa is C or S
  MOD_RES (21)..(22)..(23)..(24)..(25): Xaa is A or G
  MOD_RES (26)..(27)..(28)..(29): Xaa is A or G or is absent
KVGKAXXVPTKLSPISVLYIXXXXXXXXXYKQYEEGMSVAE

SEQ ID NO: 31053 - protein, 35 aa, Artificial Sequence
  GFR-binding peptide
  MOD_RES (1)..(35): Xaa is C or S
  MOD_RES (15)..(16)..(17)..(18)..(19): Xaa is A or G
  MOD_RES (20)..(21)..(22)..(23): Xaa is A or G or is absent
XVPARLSPISILYIXXXXXXXXXYKQYEDMVVEAX

SEQ ID NO: 31054 - protein, 32 aa, Artificial Sequence; identical to SEQ ID NO: 9650
  GFR-binding peptide
  MOD_RES (31)..(31): Xaa is C or S

SEQ ID NO: 31055 - protein, 42 aa, Artificial Sequence; identical to SEQ ID NO: 9652
  GFR-binding peptide
  MOD_RES (6)..(7)..(40)..(42): Xaa is C or S
  MOD_RES (21)..(22)..(23)..(24)..(25): Xaa is A or G
  MOD_RES (26)..(27)..(28)..(29): Xaa is A or G or is absent

SEQ ID NO: 31056 - protein, 36 aa, Artificial Sequence
  GFR-binding peptide
  MOD_RES (35)..(35): Xaa is C or S
  MOD_RES (14)..(15)..(16)..(17)..(18): Xaa is A or G
  MOD_RES (19)..(20)..(21)..(22): Xaa is A or G or is absent
VPTKLSPISVLYIXXXXXXXXXYKQYEEGMSVAEXG

SEQ ID NO: 31057 - protein, 36 aa, Artificial Sequence
  GFR-binding peptide
  MOD_RES (4)..(36): Xaa is C or S
KPTXAPTKLSPISVLYIDDSSNVIYKQYENMVVRSX

SEQ ID NO: 31058 - protein, 39 aa, Artificial Sequence
  GFR-binding peptide
  MOD_RES (4)..(5)..(37)..(39): Xaa is C or S
PKAXXVPTELSPISMLYIDENEKVVYKQYEDMVVEGXGX

SEQ ID NO: 31059 - protein, 41 aa, Artificial Sequence; identical to SEQ ID NO: 9655
  GFR-binding peptide
  MOD_RES (6)..(7)..(41): Xaa is C or S
  MOD_RES (21)..(22)..(23)..(24)..(25): Xaa is A or G
  MOD_RES (26)..(27)..(28)..(29): Xaa is A or G or is absent

SEQ ID NO: 31060 - protein, 39 aa, Artificial Sequence
  GFR-binding peptide
  MOD_RES (6)..(7)..(39): Xaa is C or S
AVPKAXXAPTKLSPISVLYIDSSNNVIYKQYENMVVKAX

SEQ ID NO: 31061 - protein, 33 aa, Artificial Sequence
  GFR-binding peptide
  MOD_RES (1)..(2): Xaa is C or S
XXVPARLNAISILYFDAANNVVLKKYRDMVVEA

SEQ ID NO: 31062 - protein, 35 aa, Artificial Sequence
  GFR-binding peptide
  MOD_RES (1)..(2): Xaa is C or S
  MOD_RES (16)..(17)..(18)..(19)..(20): Xaa is A or G
  MOD_RES (21)..(22)..(23)..(24): Xaa is A or G or is absent
XXAPTQLEPISVLYLXXXXXXXXXKFKYENMVVRA

SEQ ID NO: 31063 - protein, 35 aa, Artificial Sequence; identical to SEQ ID NO: 9660
  GFR-binding peptide
  MOD_RES (4)..(5): Xaa is C or S

SEQ ID NO: 31064 - protein, 39 aa, Artificial Sequence
  GFR-binding peptide
  MOD_RES (5)..(6)..(38): Xaa is C or S
ASKAXXVPTKLSPISILYKDKGVVTYLKYHYGMAVSEXG

SEQ ID NO: 31065 - protein, 36 aa, Artificial Sequence; identical to SEQ ID NO: 9661
  GFR-binding peptide
  MOD_RES (3)..(4)..(36): Xaa is C or S

SEQ ID NO: 31066 - protein, 42 aa, Artificial Sequence
  GFR-binding peptide
  MOD_RES (6)..(7)..(40)..(42): Xaa is C or S
  MOD_RES (21)..(22)..(23)..(24)..(25): Xaa is A or G
  MOD_RES (26)..(27)..(28)..(29): Xaa is A or G or is absent
ASASPXXVSQDLSPISILYIXXXXXXXXXYKQYEMIVKSXKX

SEQ ID NO: 31067 - protein, 43 aa, Artificial Sequence; identical to SEQ ID NO: 9662
  GFR-binding peptide
  MOD_RES (5)..(6)..(40)..(42): Xaa is C or S
  MOD_RES (20)..(21)..(22)..(23)..(24): Xaa is A or G
  MOD_RES (25)..(26)..(27)..(28): Xaa is A or G or is absent

SEQ ID NO: 31068 - protein, 38 aa, Artificial Sequence
  GFR-binding peptide
  MOD_RES (6)..(6): Xaa is C or S
  MOD_RES (20)..(21)..(22)..(23)..(24): Xaa is A or G
  MOD_RES (25)..(26)..(27)..(28): Xaa is A or G or is absent
VTKPTXAPTKLEPISVLYLXXXXXXXXXKFKYENMVVR

SEQ ID NO: 31069 - protein, 37 aa, Artificial Sequence
  GFR-binding peptide
  MOD_RES (1)..(2)..(34)..(36): Xaa is C or S
XXVPTKLSPISILYKDKGVVTYLKYHYGMAVSEXGXR

SEQ ID NO: 31070 - protein, 37 aa, Artificial Sequence; identical to SEQ ID NO: 9664
  GFR-binding peptide
  MOD_RES (2)..(3)..(37): Xaa is C or S
  MOD_RES (17)..(18)..(19)..(20)..(21): Xaa is A or G
  MOD_RES (22)..(23)..(24)..(25): Xaa is A or G or is absent

SEQ ID NO: 31071 - protein, 40 aa, Artificial Sequence
  GFR-binding peptide
  MOD_RES (7)..(39): Xaa is C or S
HVTKPTXAPTKLEPISVLYLDDSSNVIKFKYENMVVRSXG

SEQ ID NO: 31072 - protein, 35 aa, Artificial Sequence
  GFR-binding peptide
  MOD_RES (2)..(2): Xaa is C or S
  MOD_RES (16)..(17)..(18)..(19)..(20): Xaa is A or G
  MOD_RES (21)..(22)..(23)..(24): Xaa is A or G or is absent
TXAPTKLSPISVLYIXXXXXXXXXYKQYENMVVRS

SEQ ID NO: 31073 - protein, 35 aa, Artificial Sequence
  GFR-binding peptide
  MOD_RES (33)..(35): Xaa is C or S
VPTKLSPISVLYIDDMGVPTYKQYEEGMSVAEXGX

SEQ ID NO: 31074 - protein, 38 aa, Artificial Sequence
  GFR-binding peptide
  MOD_RES (5)..(6): Xaa is C or S
  MOD_RES (20)..(21)..(22)..(23)..(24): Xaa is A or G
  MOD_RES (25)..(26)..(27)..(28): Xaa is A or G or is absent
SAAPXXVPQALEPISILYLXXXXXXXXXKFKYEMIVRS

SEQ ID NO: 31075 - protein, 35 aa, Artificial Sequence; identical to SEQ ID NO: 9666
  GFR-binding peptide
  MOD_RES (2)..(3)..(34): Xaa is C or S

SEQ ID NO: 31076 - protein, 34 aa, Artificial Sequence
  GFR-binding peptide
  MOD_RES (34)..(34): Xaa is C or S
  MOD_RES (14)..(15)..(16)..(17)..(18): Xaa is A or G
  MOD_RES (19)..(20)..(21)..(22): Xaa is A or G or is absent
VPARLSPISILYIXXXXXXXXXYKQYEDMVVEAX

SEQ ID NO: 31077 - protein, 39 aa, Artificial Sequence
  GFR-binding peptide
  MOD_RES (6)..(7)..(39): Xaa is C or S
YVPKPXXAPTKLSPISVLYIDDSSNVIYKQYENMVVRSX

SEQ ID NO: 31078 - protein, 39 aa, Artificial Sequence
  GFR-binding peptide
  MOD_RES (2)..(3)..(37)..(39): Xaa is C or S
  MOD_RES (17)..(18)..(19)..(20)..(21): Xaa is A or G
  MOD_RES (22)..(23)..(24)..(25): Xaa is A or G or is absent
SXXVPARLSPISILYIXXXXXXXXXYKQYEDMVVEAXGX

SEQ ID NO: 31079 - protein, 36 aa, Artificial Sequence
  GFR-binding peptide
  MOD_RES (2)..(3)..(35): Xaa is C or S
AXXAPTKLSPISVLYIDSSNNVIYKQYENMVVKAXG

SEQ ID NO: 31080 - protein, 38 aa, Artificial Sequence; identical to SEQ ID NO: 9671
  GFR-binding peptide
  MOD_RES (3)..(4)..(36)..(38): Xaa is C or S

SEQ ID NO: 31081 - protein, 31 aa, Artificial Sequence
  GFR-binding peptide
  MOD_RES (1)..(1): Xaa is C or S
XVPARLEPISILYLDAANNVVKFKYEDMVVE

SEQ ID NO: 31082 - protein, 36 aa, Artificial Sequence
  GFR-binding peptide
  MOD_RES (2)..(3): Xaa is C or S
  MOD_RES (17)..(18)..(19)..(20)..(21): Xaa is A or G
  MOD_RES (22)..(23)..(24)..(25): Xaa is A or G or is absent
SXXVPARLEPISILYLXXXXXXXXXKFKYEDMVVEA

SEQ ID NO: 31083 - protein, 33 aa, Artificial Sequence; identical to SEQ ID NO: 9674
  GFR-binding peptide
  MOD_RES (1)..(2)..(33): Xaa is C or S

SEQ ID NO: 31084 - protein, 36 aa, Artificial Sequence; identical to SEQ ID NO: 9678
  GFR-binding peptide
  MOD_RES (1)..(35): Xaa is C or S
  MOD_RES (15)..(16)..(17)..(18)..(19): Xaa is A or G
  MOD_RES (20)..(21)..(22)..(23): Xaa is A or G or is absent

SEQ ID NO: 31085 - protein, 40 aa, Artificial Sequence
  GFR-binding peptide
  MOD_RES (6)..(7)..(40): Xaa is C or S
  MOD_RES (21)..(22)..(23)..(24)..(25): Xaa is A or G
  MOD_RES (26)..(27)..(28)..(29): Xaa is A or G or is absent
ASASPXXVSQDLSPISILYIXXXXXXXXXYKQYEMIVKSX

SEQ ID NO: 31086 - protein, 34 aa, Artificial Sequence
  GFR-binding peptide
  MOD_RES (1)..(34): Xaa is C or S
  MOD_RES (15)..(16)..(17)..(18)..(19): Xaa is A or G
  MOD_RES (20)..(21)..(22)..(23): Xaa is A or G or is absent
XVPQDLSPISILYIXXXXXXXXXYKQYEMVVKSX

SEQ ID NO: 31087 - protein, 36 aa, Artificial Sequence; identical to SEQ ID NO: 9682
  GFR-binding peptide
  MOD_RES (1)..(2)..(34)..(36): Xaa is C or S

SEQ ID NO: 31088 - protein, 41 aa, Artificial Sequence
  GFR-binding peptide
  MOD_RES (6)..(7)..(41): Xaa is C or S
  MOD_RES (21)..(22)..(23)..(24)..(25): Xaa is A or G
  MOD_RES (26)..(27)..(28)..(29): Xaa is A or G or is absent
KASKAXXVPTKLSPISILYKXXXXXXXXXLKYHYGMAVSEX

SEQ ID NO: 31089 - protein, 36 aa, Artificial Sequence; identical to SEQ ID NO: 9683
  GFR-binding peptide
  MOD_RES (5)..(6): Xaa is C or S

SEQ ID NO: 31090 - protein, 38 aa, Artificial Sequence; identical to SEQ ID NO: 9685
  GFR-binding peptide
  MOD_RES (3)..(4)..(38): Xaa is C or S
  MOD_RES (18)..(19)..(20)..(21)..(22): Xaa is A or G
  MOD_RES (23)..(24)..(25)..(26): Xaa is A or G or is absent

SEQ ID NO: 31091 - protein, 40 aa, Artificial Sequence
  GFR-binding peptide
  MOD_RES (5)..(6)..(38)..(40): Xaa is C or S
VPKPXXAPTQLEPISVLYLDDSSNVIKFKYENMVVRAXGX

SEQ ID NO: 31092 - protein, 34 aa, Artificial Sequence
  GFR-binding peptide
  MOD_RES (1)..(2): Xaa is C or S
  MOD_RES (16)..(17)..(18)..(19)..(20): Xaa is A or G
  MOD_RES (21)..(22)..(23)..(24): Xaa is A or G or is absent
XXVPTELEPISMLYLXXXXXXXXXKFKYEEMVVE

SEQ ID NO: 31093 - protein, 35 aa, Artificial Sequence
  GFR-binding peptide
  MOD_RES (1)..(33)..(35): Xaa is C or S
XAPTQLSPISVLYIDDSSNVIYKQYENMVVRAXGX

SEQ ID NO: 31094 - protein, 41 aa, Artificial Sequence; identical to SEQ ID NO: 9689
  GFR-binding peptide
  MOD_RES (6)..(7)..(40): Xaa is C or S
  MOD_RES (21)..(22)..(23)..(24)..(25): Xaa is A or G
  MOD_RES (26)..(27)..(28)..(29): Xaa is A or G or is absent

SEQ ID NO: 31095 - protein, 34 aa, Artificial Sequence
  GFR-binding peptide
  MOD_RES (1)..(1): Xaa is C or S
  MOD_RES (15)..(16)..(17)..(18)..(19): Xaa is A or G
  MOD_RES (20)..(21)..(22)..(23): Xaa is A or G or is absent
XVPTELEPISMLYLXXXXXXXXXKFKYEDMVVEG

SEQ ID NO: 31096 - protein, 37 aa, Artificial Sequence; identical to SEQ ID NO: 9690
  GFR-binding peptide
  MOD_RES (4)..(5): Xaa is C or S
  MOD_RES (19)..(20)..(21)..(22)..(23): Xaa is A or G
  MOD_RES (24)..(25)..(26)..(27): Xaa is A or G or is absent

SEQ ID NO: 31097 - protein, 40 aa, Artificial Sequence
  GFR-binding peptide
  MOD_RES (2)..(3)..(37)..(39): Xaa is C or S
  MOD_RES (17)..(18)..(19)..(20)..(21): Xaa is A or G
  MOD_RES (22)..(23)..(24)..(25): Xaa is A or G or is absent
AXXVPTKLEPISILYLXXXXXXXXXKFKYEGMAVSEXGXR

SEQ ID NO: 31098 - protein, 42 aa, Artificial Sequence; identical to SEQ ID NO: 9692
  GFR-binding peptide
  MOD_RES (6)..(7)..(40)..(42): Xaa is C or S

SEQ ID NO: 31099 - protein, 41 aa, Artificial Sequence
  GFR-binding peptide
  MOD_RES (3)..(4)..(38)..(40): Xaa is C or S
  MOD_RES (18)..(19)..(20)..(21)..(22): Xaa is A or G
  MOD_RES (23)..(24)..(25)..(26): Xaa is A or G or is absent
KAXXAPTKLSPISVLYIXXXXXXXXXYKQYENMVVKAXGXH

SEQ ID NO: 31100 - protein, 40 aa, Artificial Sequence
  GFR-binding peptide
  MOD_RES (4)..(5)..(40): Xaa is C or S
  MOD_RES (19)..(20)..(21)..(22)..(23): Xaa is A or G
  MOD_RES (24)..(25)..(26)..(27): Xaa is A or G or is absent
GKAXXVPTKLEPISVLYLXXXXXXXXXKFKYEEGMSVAEX

SEQ ID NO: 31101 - protein, 30 aa, Artificial Sequence; identical to SEQ ID NO: 9695
  GFR-binding peptide

SEQ ID NO: 31102 - protein, 40 aa, Artificial Sequence; identical to SEQ ID NO: 9696
  GFR-binding peptide
  MOD_RES (6)..(7): Xaa is C or S
  MOD_RES (21)..(22)..(23)..(24)..(25): Xaa is A or G
  MOD_RES (26)..(27)..(28)..(29): Xaa is A or G or is absent

SEQ ID NO: 31103 - protein, 34 aa, Artificial Sequence; identical to SEQ ID NO: 9698
  GFR-binding peptide
  MOD_RES (14)..(15)..(16)..(17)..(18): Xaa is A or G
  MOD_RES (19)..(20)..(21)..(22): Xaa is A or G or is absent

SEQ ID NO: 31104 - protein, 32 aa, Artificial Sequence
  GFR-binding peptide
  MOD_RES (1)..(2): Xaa is C or S
XXVPARLEPISILYLDAANNVVKFKYEDMVVE

SEQ ID NO: 31105 - protein, 35 aa, Artificial Sequence
  GFR-binding peptide
  MOD_RES (32)..(34): Xaa is C or S
VPTKLSPISILYIDKGVVTYYKQYEGMAVSEXGXR

SEQ ID NO: 31106 - protein, 44 aa, Artificial Sequence; identical to SEQ ID NO: 9699
  GFR-binding peptide
  MOD_RES (6)..(7)..(41)..(43): Xaa is C or S
  MOD_RES (21)..(22)..(23)..(24)..(25): Xaa is A or G
  MOD_RES (26)..(27)..(28)..(29): Xaa is A or G or is absent

SEQ ID NO: 31107 - protein, 35 aa, Artificial Sequence; identical to SEQ ID NO: 9700
  GFR-binding peptide
  MOD_RES (2)..(3): Xaa is C or S
  MOD_RES (17)..(18)..(19)..(20)..(21): Xaa is A or G
  MOD_RES (22)..(23)..(24)..(25): Xaa is A or G or is absent

SEQ ID NO: 31108 - protein, 39 aa, Artificial Sequence; identical to SEQ ID NO: 9701
  GFR-binding peptide
  MOD_RES (5)..(6): Xaa is C or S
  MOD_RES (20)..(21)..(22)..(23)..(24): Xaa is A or G
  MOD_RES (25)..(26)..(27)..(28): Xaa is A or G or is absent

SEQ ID NO: 31109 - protein, 39 aa, Artificial Sequence
  GFR-binding peptide
  MOD_RES (2)..(3)..(37)..(39): Xaa is C or S
  MOD_RES (17)..(18)..(19)..(20)..(21): Xaa is A or G
  MOD_RES (22)..(23)..(24)..(25): Xaa is A or G or is absent
PXXAPTKLEPISVLYLXXXXXXXXXKFKYENMVVRSXGX

SEQ ID NO: 31110 - protein, 37 aa, Artificial Sequence; identical to SEQ ID NO: 9702
  GFR-binding peptide
  MOD_RES (4)..(5): Xaa is C or S
  MOD_RES (19)..(20)..(21)..(22)..(23): Xaa is A or G
  MOD_RES (24)..(25)..(26)..(27): Xaa is A or G or is absent

SEQ ID NO: 31111 - protein, 38 aa, Artificial Sequence
  GFR-binding peptide
  MOD_RES (2)..(3)..(36)..(38): Xaa is C or S
  MOD_RES (17)..(18)..(19)..(20)..(21): Xaa is A or G
  MOD_RES (22)..(23)..(24)..(25): Xaa is A or G or is absent
PXXVPQALEPISILYLXXXXXXXXXKFKYEMIVRSXKX

SEQ ID NO: 31112 - protein, 33 aa, Artificial Sequence
  GFR-binding peptide
  MOD_RES (14)..(15)..(16)..(17)..(18): Xaa is A or G
  MOD_RES (19)..(20)..(21)..(22): Xaa is A or G or is absent
VPTKLEPISILYLXXXXXXXXXKFKYEGMAVSE

SEQ ID NO: 31113 - protein, 36 aa, Artificial Sequence
  GFR-binding peptide
  MOD_RES (3)..(4): Xaa is C or S
  MOD_RES (18)..(19)..(20)..(21)..(22): Xaa is A or G
  MOD_RES (23)..(24)..(25)..(26): Xaa is A or G or is absent
KAXXVPTELEPISMLYLXXXXXXXXXKFKYEDMVVE

SEQ ID NO: 31114 - protein, 38 aa, Artificial Sequence
  GFR-binding peptide
  MOD_RES (2)..(3)..(35)..(37): Xaa is C or S
AXXVPTKLNAISILYFDKGVVTYLKKYRGMAVSEXGXR

SEQ ID NO: 31115 - protein, 37 aa, Artificial Sequence
  GFR-binding peptide
  MOD_RES (2)..(3)..(34)..(36): Xaa is C or S
PXXVPQALEPISILYLVGRKPKVKFKYEMIVRSXKXS

SEQ ID NO: 31116 - protein, 39 aa, Artificial Sequence
  GFR-binding peptide
  MOD_RES (3)..(4)..(36)..(38): Xaa is C or S
ASXXVPARLEPISILYLDAANNVVKFKYEDMVVEAXGXR

SEQ ID NO: 31117 - protein, 38 aa, Artificial Sequence; identical to SEQ ID NO: 9704
  GFR-binding peptide
  MOD_RES (2)..(3)..(38): Xaa is C or S
  MOD_RES (17)..(18)..(19)..(20)..(21): Xaa is A or G
  MOD_RES (22)..(23)..(24)..(25): Xaa is A or G or is absent

SEQ ID NO: 31118 - protein, 34 aa, Artificial Sequence
  GFR-binding peptide
  MOD_RES (1)..(2): Xaa is C or S
  MOD_RES (16)..(17)..(18)..(19)..(20): Xaa is A or G
  MOD_RES (21)..(22)..(23)..(24): Xaa is A or G or is absent
XXVPQALEPISILYLXXXXXXXXXKFKYEMIVRS

SEQ ID NO: 31119 - protein, 35 aa, Artificial Sequence
  GFR-binding peptide
  MOD_RES (34)..(34): Xaa is C or S
  MOD_RES (14)..(15)..(16)..(17)..(18): Xaa is A or G
  MOD_RES (19)..(20)..(21)..(22): Xaa is A or G or is absent
VPTKLSPISILYKXXXXXXXXXLKYHYGMAVSEXG

SEQ ID NO: 31120 - protein, 37 aa, Artificial Sequence; identical to SEQ ID NO: 9705
  GFR-binding peptide
  MOD_RES (4)..(36): Xaa is C or S

SEQ ID NO: 31121 - protein, 33 aa, Artificial Sequence; identical to SEQ ID NO: 9706
  GFR-binding peptide
  MOD_RES (31)..(33): Xaa is C or S

SEQ ID NO: 31122 - protein, 39 aa, Artificial Sequence
  GFR-binding peptide
  MOD_RES (6)..(7)..(39): Xaa is C or S
AAPASXXVPARLEPISILYLDAANNVVKFKYEDMVVEAX

SEQ ID NO: 31123 - protein, 39 aa, Artificial Sequence; identical to SEQ ID NO: 9708
  GFR-binding peptide
  MOD_RES (6)..(7): Xaa is C or S
  MOD_RES (21)..(22)..(23)..(24)..(25): Xaa is A or G
  MOD_RES (26)..(27)..(28)..(29): Xaa is A or G or is absent

SEQ ID NO: 31124 - protein, 40 aa, Artificial Sequence; identical to SEQ ID NO: 9709
  GFR-binding peptide
  MOD_RES (5)..(6)..(39): Xaa is C or S
  MOD_RES (20)..(21)..(22)..(23)..(24): Xaa is A or G
  MOD_RES (25)..(26)..(27)..(28): Xaa is A or G or is absent

SEQ ID NO: 31125 - protein, 31 aa, Artificial Sequence
  GFR-binding peptide
  MOD_RES (31)..(31): Xaa is C or S
VPQDLSPISILYIVGRTPKVYKQYEMVVKSX

SEQ ID NO: 31126 - protein, 45 aa, Artificial Sequence
  GFR-binding peptide
  MOD_RES (6)..(7)..(42)..(44): Xaa is C or S
  MOD_RES (21)..(22)..(23)..(24)..(25): Xaa is A or G
  MOD_RES (26)..(27)..(28)..(29): Xaa is A or G or is absent
KVGKAXXVPTKLEPISVLYLXXXXXXXXXKFKYEEGMSVAEXGXR

SEQ ID NO: 31127 - protein, 32 aa, Artificial Sequence
  GFR-binding peptide
  MOD_RES (1)..(2): Xaa is C or S
XXVPQDLSPISILYIVGRTPKVYKQYEMVVKS

SEQ ID NO: 31128 - protein, 42 aa, Artificial Sequence; identical to SEQ ID NO: 9715
  GFR-binding peptide
  MOD_RES (6)..(7)..(41): Xaa is C or S
  MOD_RES (21)..(22)..(23)..(24)..(25): Xaa is A or G
  MOD_RES (26)..(27)..(28)..(29): Xaa is A or G or is absent

SEQ ID NO: 31129 - protein, 35 aa, Artificial Sequence
  GFR-binding peptide
  MOD_RES (1)..(2): Xaa is C or S
  MOD_RES (16)..(17)..(18)..(19)..(20): Xaa is A or G
  MOD_RES (21)..(22)..(23)..(24): Xaa is A or G or is absent
XXVPTELSPISMLYIXXXXXXXXXYKQYEEMVVEG

SEQ ID NO: 31130 - protein, 43 aa, Artificial Sequence
  GFR-binding peptide
  MOD_RES (6)..(7)..(40)..(42): Xaa is C or S
  MOD_RES (21)..(22)..(23)..(24)..(25): Xaa is A or G
  MOD_RES (26)..(27)..(28)..(29): Xaa is A or G or is absent
ASASPXXVSQDLSPISILYIXXXXXXXXXYKQYEMIVKSXKXS

SEQ ID NO: 31131 - protein, 34 aa, Artificial Sequence; identical to SEQ ID NO: 9718
  GFR-binding peptide
  MOD_RES (2)..(3): Xaa is C or S

SEQ ID NO: 31132 - protein, 34 aa, Artificial Sequence; identical to SEQ ID NO: 9719
  GFR-binding peptide
  MOD_RES (1)..(2): Xaa is C or S
  MOD_RES (16)..(17)..(18)..(19)..(20): Xaa is A or G
  MOD_RES (21)..(22)..(23)..(24): Xaa is A or G or is absent

SEQ ID NO: 31133 - protein, 39 aa, Artificial Sequence
  GFR-binding peptide
  MOD_RES (4)..(36)..(38): Xaa is C or S
KPTXAPTKLSPISVLYIDDSSNVIYKQYENMVVRSXGXH

SEQ ID NO: 31134 - protein, 33 aa, Artificial Sequence
  GFR-binding peptide
  MOD_RES (2)..(3): Xaa is C or S
SXXVPARLNAISILYFDAANNVVLKKYRDMVVE

SEQ ID NO: 31135 - protein, 37 aa, Artificial Sequence; identical to SEQ ID NO: 9721
  GFR-binding peptide
  MOD_RES (4)..(5)..(37): Xaa is C or S

SEQ ID NO: 31136 - protein, 37 aa, Artificial Sequence; identical to SEQ ID NO: 9722
  GFR-binding peptide
  MOD_RES (1)..(2)..(36): Xaa is C or S
  MOD_RES (16)..(17)..(18)..(19)..(20): Xaa is A or G
  MOD_RES (21)..(22)..(23)..(24): Xaa is A or G or is absent

SEQ ID NO: 31137 - protein, 38 aa, Artificial Sequence
  GFR-binding peptide
  MOD_RES (3)..(4): Xaa is C or S
  MOD_RES (18)..(19)..(20)..(21)..(22): Xaa is A or G
  MOD_RES (23)..(24)..(25)..(26): Xaa is A or G or is absent
KAXXVPTKLSPISVLYIXXXXXXXXXYKQYEEGMSVAE

SEQ ID NO: 31138 - protein, 38 aa, Artificial Sequence; identical to SEQ ID NO: 9723
  GFR-binding peptide
  MOD_RES (3)..(4)..(36)..(38): Xaa is C or S

SEQ ID NO: 31139 - protein, 34 aa, Artificial Sequence
  GFR-binding peptide
  MOD_RES (33)..(33): Xaa is C or S
  MOD_RES (14)..(15)..(16)..(17)..(18): Xaa is A or G
  MOD_RES (19)..(20)..(21)..(22): Xaa is A or G or is absent
VPQALSPISILYIXXXXXXXXXYKQYEMIVRSXK

SEQ ID NO: 31140 - protein, 34 aa, Artificial Sequence; identical to SEQ ID NO: 9724
  GFR-binding peptide
  MOD_RES (1)..(2): Xaa is C or S
  MOD_RES (16)..(17)..(18)..(19)..(20): Xaa is A or G
  MOD_RES (21)..(22)..(23)..(24): Xaa is A or G or is absent

SEQ ID NO: 31141 - protein, 38 aa, Artificial Sequence; identical to SEQ ID NO: 9725
  GFR-binding peptide
  MOD_RES (5)..(37): Xaa is C or S

SEQ ID NO: 31142 - protein, 39 aa, Artificial Sequence
  GFR-binding peptide
  MOD_RES (6)..(6): Xaa is C or S
  MOD_RES (20)..(21)..(22)..(23)..(24): Xaa is A or G
  MOD_RES (25)..(26)..(27)..(28): Xaa is A or G or is absent
VTKPTXAPTKLEPISVLYLXXXXXXXXXKFKYENMVVRS

SEQ ID NO: 31143 - protein, 44 aa, Artificial Sequence; identical to SEQ ID NO: 9727
  GFR-binding peptide
  MOD_RES (7)..(41)..(43): Xaa is C or S
  MOD_RES (21)..(22)..(23)..(24)..(25): Xaa is A or G
  MOD_RES (26)..(27)..(28)..(29): Xaa is A or G or is absent

SEQ ID NO: 31144 - protein, 31 aa, Artificial Sequence
  GFR-binding peptide
  MOD_RES (31)..(31): Xaa is C or S
VSQDLSPISILYIIGKTPKIYKQYEMIVKSX

SEQ ID NO: 31145 - protein, 40 aa, Artificial Sequence; identical to SEQ ID NO: 9731
  GFR-binding peptide
  MOD_RES (6)..(7)..(39): Xaa is C or S

SEQ ID NO: 31146 - protein, 33 aa, Artificial Sequence; identical to SEQ ID NO: 9732
  GFR-binding peptide
  MOD_RES (14)..(15)..(16)..(17)..(18): Xaa is A or G
  MOD_RES (19)..(20)..(21)..(22): Xaa is A or G or is absent

SEQ ID NO: 31147 - protein, 36 aa, Artificial Sequence
  GFR-binding peptide
  MOD_RES (2)..(3): Xaa is C or S
  MOD_RES (17)..(18)..(19)..(20)..(21): Xaa is A or G
  MOD_RES (22)..(23)..(24)..(25): Xaa is A or G or is absent
AXXVPTKLSPISILYKXXXXXXXXXLKYHYGMAVSE

SEQ ID NO: 31148 - protein, 36 aa, Artificial Sequence
  GFR-binding peptide
  MOD_RES (1)..(2)..(34)..(36): Xaa is C or S
XXAPTKLEPISVLYLDDSSNVIKFKYENMVVRSXGX

SEQ ID NO: 31149 - protein, 41 aa, Artificial Sequence
  GFR-binding peptide
  MOD_RES (6)..(7)..(40): Xaa is C or S
KVGKAXXVPTKLEPISVLYLDDMGVPTKFKYEEGMSVAEXG

SEQ ID NO: 31150 - protein, 38 aa, Artificial Sequence
  GFR-binding peptide
  MOD_RES (3)..(4)..(38): Xaa is C or S
  MOD_RES (18)..(19)..(20)..(21)..(22): Xaa is A or G
  MOD_RES (23)..(24)..(25)..(26): Xaa is A or G or is absent
KPXXAPTQLSPISVLYIXXXXXXXXXYKQYENMVVRAX

SEQ ID NO: 31151 - protein, 40 aa, Artificial Sequence
  GFR-binding peptide
  MOD_RES (3)..(4)..(37)..(39): Xaa is C or S
KAXXVPTKLEPISVLYLDDMGVPTKFKYEEGMSVAEXGXR

SEQ ID NO: 31152 - protein, 39 aa, Artificial Sequence
  GFR-binding peptide
  MOD_RES (4)..(5)..(38): Xaa is C or S
GKAXXVPTKLSPISVLYIDDMGVPTYKQYEEGMSVAEXG

SEQ ID NO: 31153 - protein, 35 aa, Artificial Sequence
  GFR-binding peptide
  MOD_RES (1)..(34): Xaa is C or S
  MOD_RES (15)..(16)..(17)..(18)..(19): Xaa is A or G
  MOD_RES (20)..(21)..(22)..(23): Xaa is A or G or is absent
XVSQDLEPISILYLXXXXXXXXXKFKYEMIVKSXK

SEQ ID NO: 31154 - protein, 35 aa, Artificial Sequence
  GFR-binding peptide
  MOD_RES (1)..(2)..(35): Xaa is C or S
  MOD_RES (16)..(17)..(18)..(19)..(20): Xaa is A or G
  MOD_RES (21)..(22)..(23)..(24): Xaa is A or G or is absent
XXVSQDLSPISILYIXXXXXXXXXYKQYEMIVKSX

SEQ ID NO: 31155 - protein, 40 aa, Artificial Sequence; identical to SEQ ID NO: 9741
  GFR-binding peptide
  MOD_RES (4)..(5)..(38)..(40): Xaa is C or S
  MOD_RES (19)..(20)..(21)..(22)..(23): Xaa is A or G
  MOD_RES (24)..(25)..(26)..(27): Xaa is A or G or is absent

SEQ ID NO: 31156 - protein, 37 aa, Artificial Sequence
  GFR-binding peptide
  MOD_RES (6)..(7): Xaa is C or S
AAPASXXVPARLEPISILYLDAANNVVKFKYEDMVVE

SEQ ID NO: 31157 - protein, 37 aa, Artificial Sequence; identical to SEQ ID NO: 9743
  GFR-binding peptide
  MOD_RES (4)..(5)..(36): Xaa is C or S

SEQ ID NO: 31158 - protein, 42 aa, Artificial Sequence
  GFR-binding peptide
  MOD_RES (4)..(5)..(39)..(41): Xaa is C or S
  MOD_RES (19)..(20)..(21)..(22)..(23): Xaa is A or G
  MOD_RES (24)..(25)..(26)..(27): Xaa is A or G or is absent
PKAXXAPTKLEPISVLYLXXXXXXXXXKFKYENMVVKAXGXH

SEQ ID NO: 31159 - protein, 34 aa, Artificial Sequence; identical to SEQ ID NO: 9747
  GFR-binding peptide
  MOD_RES (1)..(2): Xaa is C or S
  MOD_RES (16)..(17)..(18)..(19)..(20): Xaa is A or G
  MOD_RES (21)..(22)..(23)..(24): Xaa is A or G or is absent

SEQ ID NO: 31160 - protein, 41 aa, Artificial Sequence
  GFR-binding peptide
  MOD_RES (6)..(7)..(39)..(41): Xaa is C or S
YVPKPXXAPTKLEPISVLYLDDSSNVIKFKYENMVVRSXGX

SEQ ID NO: 31161 - protein, 36 aa, Artificial Sequence
  GFR-binding peptide
  MOD_RES (34)..(36): Xaa is C or S
  MOD_RES (14)..(15)..(16)..(17)..(18): Xaa is A or G
  MOD_RES (19)..(20)..(21)..(22): Xaa is A or G or is absent
APTKLEPISVLYLXXXXXXXXXKFKYENMVVRSXGX

SEQ ID NO: 31162 - protein, 38 aa, Artificial Sequence
  GFR-binding peptide
  MOD_RES (2)..(3)..(35)..(37): Xaa is C or S
AXXVPTELSPISMLYIDEYDKVVYKQYEEMVVEGXGXR

SEQ ID NO: 31163 - protein, 37 aa, Artificial Sequence; identical to SEQ ID NO: 9749
  GFR-binding peptide
  MOD_RES (3)..(4)..(37): Xaa is C or S
  MOD_RES (18)..(19)..(20)..(21)..(22): Xaa is A or G
  MOD_RES (23)..(24)..(25)..(26): Xaa is A or G or is absent

SEQ ID NO: 31164 - protein, 37 aa, Artificial Sequence
  GFR-binding peptide
  MOD_RES (4)..(5): Xaa is C or S
  MOD_RES (19)..(20)..(21)..(22)..(23): Xaa is A or G
  MOD_RES (24)..(25)..(26)..(27): Xaa is A or G or is absent
ASPXXVPQDLSPISILYIXXXXXXXXXYKQYEMVVKS

SEQ ID NO: 31165 - protein, 40 aa, Artificial Sequence
  GFR-binding peptide
  MOD_RES (5)..(6)..(40): Xaa is C or S
  MOD_RES (20)..(21)..(22)..(23)..(24): Xaa is A or G
  MOD_RES (25)..(26)..(27)..(28): Xaa is A or G or is absent
APASXXVPARLSPISILYKXXXXXXXXXLKYHYDMVVEAX

SEQ ID NO: 31166 - protein, 38 aa, Artificial Sequence
  GFR-binding peptide
  MOD_RES (3)..(4)..(36)..(38): Xaa is C or S
KAXXVPTELSPISMLYIDENEKVVYKQYEDMVVEGXGX

SEQ ID NO: 31167 - protein, 39 aa, Artificial Sequence
  GFR-binding peptide
  MOD_RES (7)..(7): Xaa is C or S
  MOD_RES (21)..(22)..(23)..(24)..(25): Xaa is A or G
  MOD_RES (26)..(27)..(28)..(29): Xaa is A or G or is absent
HVTKPTXAPTKLEPISVLYLXXXXXXXXXKFKYENMVVR

SEQ ID NO: 31168 - protein, 42 aa, Artificial Sequence
  GFR-binding peptide
  MOD_RES (5)..(6)..(40)..(42): Xaa is C or S
  MOD_RES (20)..(21)..(22)..(23)..(24): Xaa is A or G
  MOD_RES (25)..(26)..(27)..(28): Xaa is A or G or is absent
VPKPXXAPTQLSPISVLYIXXXXXXXXXYKQYENMVVRAXGX

SEQ ID NO: 31169 - protein, 36 aa, Artificial Sequence; identical to SEQ ID NO: 9751
  GFR-binding peptide
  MOD_RES (34)..(36): Xaa is C or S
  MOD_RES (14)..(15)..(16)..(17)..(18): Xaa is A or G
  MOD_RES (19)..(20)..(21)..(22): Xaa is A or G or is absent

SEQ ID NO: 31170 - protein, 40 aa, Artificial Sequence
  GFR-binding peptide
  MOD_RES (4)..(5)..(37)..(39): Xaa is C or S
PASXXVPARLNAISILYFDAANNVVLKKYRDMVVEAXGXR

SEQ ID NO: 31171 - protein, 33 aa, Artificial Sequence
  GFR-binding peptide
  MOD_RES (1)..(2): Xaa is C or S
XXVPTKLSPISILYKDKGVVTYLKYHYGMAVSE

SEQ ID NO: 31172 - protein, 38 aa, Artificial Sequence
  GFR-binding peptide
  MOD_RES (2)..(3)..(35)..(37): Xaa is C or S
AXXVPTELEPISMLYLDEYDKVVKFKYEEMVVEGXGXR

SEQ ID NO: 31173 - protein, 38 aa, Artificial Sequence; identical to SEQ ID NO: 9756
  GFR-binding peptide
  MOD_RES (1)..(35)..(37): Xaa is C or S
  MOD_RES (15)..(16)..(17)..(18)..(19): Xaa is A or G
  MOD_RES (20)..(21)..(22)..(23): Xaa is A or G or is absent

SEQ ID NO: 31174 - protein, 37 aa, Artificial Sequence
  GFR-binding peptide
  MOD_RES (1)..(2)..(34)..(36): Xaa is C or S
XXAPTKLSPISVLYIDSSNNVIYKQYENMVVKAXGXH

SEQ ID NO: 31175 - protein, 38 aa, Artificial Sequence
  GFR-binding peptide
  MOD_RES (1)..(2)..(35)..(37): Xaa is C or S
XXVPTKLSPISVLYIDDMGVPTYKQYEEGMSVAEXGXR

SEQ ID NO: 31176 - protein, 37 aa, Artificial Sequence; identical to SEQ ID NO: 9757
  GFR-binding peptide
  MOD_RES (1)..(34)..(36): Xaa is C or S
  MOD_RES (15)..(16)..(17)..(18)..(19): Xaa is A or G
  MOD_RES (20)..(21)..(22)..(23): Xaa is A or G or is absent

SEQ ID NO: 31177 - protein, 36 aa, Artificial Sequence
  GFR-binding peptide
  MOD_RES (4)..(5): Xaa is C or S
PKPXXAPTKLSPISVLYIDDSSNVIYKQYENMVVRS

SEQ ID NO: 31178 - protein, 39 aa, Artificial Sequence
  GFR-binding peptide
  MOD_RES (1)..(2)..(36)..(38): Xaa is C or S
  MOD_RES (16)..(17)..(18)..(19)..(20): Xaa is A or G
  MOD_RES (21)..(22)..(23)..(24): Xaa is A or G or is absent
XXVPARLNAISILYFXXXXXXXXXLKKYRDMVVEAXGXR

SEQ ID NO: 31179 - protein, 34 aa, Artificial Sequence
  GFR-binding peptide
  MOD_RES (32)..(34): Xaa is C or S
VPARLNAISILYFDAANNVVLKKYRDMVVEAXGX

SEQ ID NO: 31180 - protein, 34 aa, Artificial Sequence
  GFR-binding peptide
  MOD_RES (3)..(4): Xaa is C or S
KPXXAPTKLSPISVLYIDDSSNVIYKQYENMVVR

SEQ ID NO: 31181 - protein, 30 aa, Artificial Sequence
  GFR-binding peptide
APTQLSPISVLYIDDSSNVIYKQYENMVVR

SEQ ID NO: 31182 - protein, 40 aa, Artificial Sequence
  GFR-binding peptide
  MOD_RES (6)..(7)..(39): Xaa is C or S
TVPKPXXAPTQLEPISVLYLDDSSNVIKFKYENMVVRAXG

SEQ ID NO: 31183 - protein, 36 aa, Artificial Sequence; identical to SEQ ID NO: 9760
  GFR-binding peptide
  MOD_RES (6)..(6): Xaa is C or S

SEQ ID NO: 31184 - protein, 42 aa, Artificial Sequence
  GFR-binding peptide
  MOD_RES (5)..(6)..(39)..(41): Xaa is C or S
  MOD_RES (20)..(21)..(22)..(23)..(24): Xaa is A or G
  MOD_RES (25)..(26)..(27)..(28): Xaa is A or G or is absent
SAAPXXVPQALSPISILYIXXXXXXXXXYKQYEMIVRSXKXS

SEQ ID NO: 31185 - protein, 34 aa, Artificial Sequence
  GFR-binding peptide
  MOD_RES (3)..(3): Xaa is C or S
PTXAPTKLEPISVLYLDDSSNVIKFKYENMVVRS

SEQ ID NO: 31186 - protein, 38 aa, Artificial Sequence
  GFR-binding peptide
  MOD_RES (5)..(37): Xaa is C or S
TKPTXAPTKLSPISVLYIDDSSNVIYKQYENMVVRSXG

SEQ ID NO: 31187 - protein, 36 aa, Artificial Sequence; identical to SEQ ID NO: 9768
  GFR-binding peptide
  MOD_RES (2)..(3)..(35): Xaa is C or S

SEQ ID NO: 31188 - protein, 35 aa, Artificial Sequence; identical to SEQ ID NO: 9770
  GFR-binding peptide
  MOD_RES (1)..(32)..(34): Xaa is C or S

SEQ ID NO: 31189 - protein, 36 aa, Artificial Sequence; identical to SEQ ID NO: 9771
  GFR-binding peptide
  MOD_RES (2)..(3)..(36): Xaa is C or S
  MOD_RES (17)..(18)..(19)..(20)..(21): Xaa is A or G
  MOD_RES (22)..(23)..(24)..(25): Xaa is A or G or is absent

SEQ ID NO: 31190 - protein, 36 aa, Artificial Sequence; identical to SEQ ID NO: 9772
  GFR-binding peptide
  MOD_RES (1)..(2)..(36): Xaa is C or S
  MOD_RES (16)..(17)..(18)..(19)..(20): Xaa is A or G
  MOD_RES (21)..(22)..(23)..(24): Xaa is A or G or is absent

SEQ ID NO: 31191 - protein, 39 aa, Artificial Sequence; identical to SEQ ID NO: 9773
  GFR-binding peptide
  MOD_RES (3)..(4)..(36)..(38): Xaa is C or S

SEQ ID NO: 31192 - protein, 38 aa, Artificial Sequence
  GFR-binding peptide
  MOD_RES (3)..(4)..(37): Xaa is C or S
  MOD_RES (18)..(19)..(20)..(21)..(22): Xaa is A or G
  MOD_RES (23)..(24)..(25)..(26): Xaa is A or G or is absent
SPXXVPQDLSPISILYIXXXXXXXXXYKQYEMVVKSXK

SEQ ID NO: 31193 - protein, 36 aa, Artificial Sequence
  GFR-binding peptide
  MOD_RES (1)..(35): Xaa is C or S
  MOD_RES (15)..(16)..(17)..(18)..(19): Xaa is A or G
  MOD_RES (20)..(21)..(22)..(23): Xaa is A or G or is absent
XVPTELEPISMLYLXXXXXXXXXKFKYEEMVVEGXG

SEQ ID NO: 31194 - protein, 40 aa, Artificial Sequence
  GFR-binding peptide
  MOD_RES (5)..(6)..(37)..(39): Xaa is C or S
SASPXXVPQDLEPISILYLVGRTPKVKFKYEMVVKSXKXS

SEQ ID NO: 31195 - protein, 37 aa, Artificial Sequence
  GFR-binding peptide
  MOD_RES (6)..(7): Xaa is C or S
ASASPXXVSQDLSPISILYIIGKTPKIYKQYEMIVKS

SEQ ID NO: 31196 - protein, 37 aa, Artificial Sequence
  GFR-binding peptide
  MOD_RES (3)..(4)..(36): Xaa is C or S
KAXXVPTELEPISMLYLDEYDKVVKFKYEEMVVEGXG

SEQ ID NO: 31197 - protein, 33 aa, Artificial Sequence; identical to SEQ ID NO: 9775
  GFR-binding peptide
  MOD_RES (2)..(3): Xaa is C or S

SEQ ID NO: 31198 - protein, 34 aa, Artificial Sequence
  GFR-binding peptide
  MOD_RES (1)..(34): Xaa is C or S
  MOD_RES (15)..(16)..(17)..(18)..(19): Xaa is A or G
  MOD_RES (20)..(21)..(22)..(23): Xaa is A or G or is absent
XVPQALSPISILYIXXXXXXXXXYKQYEMIVRSX

SEQ ID NO: 31199 - protein, 39 aa, Artificial Sequence
  GFR-binding peptide
  MOD_RES (1)..(33)..(34): Xaa is C or S
XSEVVMDPIKGYVVNNASDFYLINIPSLRTPVXXTPPTS

SEQ ID NO: 31200 - protein, 35 aa, Artificial Sequence
  GFR-binding peptide
  MOD_RES (31)..(32): Xaa is C or S
DVVMGPIKGYIIQQKDNFYLMNIPSMKTPTXXPGA

SEQ ID NO: 31201 - protein, 43 aa, Artificial Sequence
  GFR-binding peptide
  MOD_RES (1)..(3)..(37)..(38): Xaa is C or S
  MOD_RES (15)..(16)..(17)..(18)..(19): Xaa is A or G
  MOD_RES (20)..(21)..(22)..(23): Xaa is A or G or is absent
XGXRDVVMGPIKGYXXXXXXXXXFYLMNIPSMKTPTXXPGASG

SEQ ID NO: 31202 - protein, 40 aa, Artificial Sequence
  GFR-binding peptide
  MOD_RES (34)..(35): Xaa is C or S
  MOD_RES (12)..(13)..(14)..(15)..(16): Xaa is A or G
  MOD_RES (17)..(18)..(19)..(20): Xaa is A or G or is absent
ARVVMNPIKGYXXXXXXXXXFYLVNIPSLQTPAXXPKPVT

SEQ ID NO: 31203 - protein, 37 aa, Artificial Sequence
  GFR-binding peptide
  MOD_RES (32)..(33): Xaa is C or S
GEVVMDPIKGYVVKENEDFYLMNIPSLETPVXXAKPI

SEQ ID NO: 31204 - protein, 40 aa, Artificial Sequence
  GFR-binding peptide
  MOD_RES (1)..(3)..(37)..(38): Xaa is C or S
  MOD_RES (15)..(16)..(17)..(18)..(19): Xaa is A or G
  MOD_RES (20)..(21)..(22)..(23): Xaa is A or G or is absent
XGXAEVVMDPIKGYXXXXXXXXXFYLINIPSLRAPVXXSA

SEQ ID NO: 31205 - protein, 32 aa, Artificial Sequence
  GFR-binding peptide
  MOD_RES (2)..(2): Xaa is C or S
GXEEVIMPIKGYLLVRGNDFYLMNIPSTKVPA

SEQ ID NO: 31206 - protein, 35 aa, Artificial Sequence
  GFR-binding peptide
  MOD_RES (32)..(33): Xaa is C or S
SEVVMDPIKGYVVNNASDFYLINIPSLRTPVXXTP

SEQ ID NO: 31207 - protein, 42 aa, Artificial Sequence
  GFR-binding peptide
  MOD_RES (1)..(3)..(37)..(38): Xaa is C or S
  MOD_RES (15)..(16)..(17)..(18)..(19): Xaa is A or G
  MOD_RES (20)..(21)..(22)..(23): Xaa is A or G or is absent
XGXSEVVMDPIKGYXXXXXXXXXFYLINIPSLRTPVXXTPPT

SEQ ID NO: 31208 - protein, 39 aa, Artificial Sequence
  GFR-binding peptide
  MOD_RES (2)..(4)..(36)..(37): Xaa is C or S
RXGXESVAMGPIKGYYTVVGKDFYLINIPSLKTPVXXAK

SEQ ID NO: 31209 - protein, 40 aa, Artificial Sequence
  GFR-binding peptide
  MOD_RES (1)..(3)..(35)..(36): Xaa is C or S
XGXRDVVMGPIKGYIIQQKDNFYLMNIPSMKTPTXXPGAS

SEQ ID NO: 31210 - protein, 41 aa, Artificial Sequence
  GFR-binding peptide
  MOD_RES (1)..(3)..(37)..(38): Xaa is C or S
  MOD_RES (15)..(16)..(17)..(18)..(19): Xaa is A or G
  MOD_RES (20)..(21)..(22)..(23): Xaa is A or G or is absent
XGXSRVVMNPIKGYXXXXXXXXXFYLVNIPSLKTPAXXPKP

SEQ ID NO: 31211 - protein, 35 aa, Artificial Sequence
  GFR-binding peptide
  MOD_RES (1)..(33)..(34): Xaa is C or S
XGEVVMDPIKGYVVKENEDFYLMNIPSLETPVXXA

SEQ ID NO: 31212 - protein, 33 aa, Artificial Sequence
  GFR-binding peptide
  MOD_RES (1)..(33): Xaa is C or S
XRDVVMGPIKGYIIQQKDNFYLMNIPSMKTPTX

SEQ ID NO: 31213 - protein, 35 aa, Artificial Sequence
  GFR-binding peptide
  MOD_RES (34)..(35): Xaa is C or S
  MOD_RES (12)..(13)..(14)..(15)..(16): Xaa is A or G
  MOD_RES (17)..(18)..(19)..(20): Xaa is A or G or is absent
ESVAMGPIKGYXXXXXXXXXFYLINIPSLKTPVXX

SEQ ID NO: 31214 - protein, 40 aa, Artificial Sequence
  GFR-binding peptide
  MOD_RES (1)..(3)..(35)..(36): Xaa is C or S
XGXESVAMGPIKGYYTVVGKDFYLINIPSLKTPVXXAKSA

SEQ ID NO: 31215 - protein, 37 aa, Artificial Sequence
  GFR-binding peptide
  MOD_RES (2)..(34): Xaa is C or S
GXSRVVMNPIKGYIVNSSDDFYLVNIPSLKTPAXTPK

SEQ ID NO: 31216 - protein, 40 aa, Artificial Sequence
  GFR-binding peptide
  MOD_RES (34)..(34): Xaa is C or S
  MOD_RES (12)..(13)..(14)..(15)..(16): Xaa is A or G
  MOD_RES (17)..(18)..(19)..(20): Xaa is A or G or is absent
SRVVMNPIKGYXXXXXXXXXFYLVNIPSLKTPAXTPKTVH

SEQ ID NO: 31217 - protein, 37 aa, Artificial Sequence
  GFR-binding peptide
  MOD_RES (34)..(35): Xaa is C or S
  MOD_RES (12)..(13)..(14)..(15)..(16): Xaa is A or G
  MOD_RES (17)..(18)..(19)..(20): Xaa is A or G or is absent
RDVVMGPIKGYXXXXXXXXXFYLMNIPSMKTPTXXPG

SEQ ID NO: 31218 - protein, 34 aa, Artificial Sequence
  GFR-binding peptide
  MOD_RES (2)..(34): Xaa is C or S
GXSRVVMNPIKGYIVNSSDDFYLVNIPSLKTPAX

SEQ ID NO: 31219 - protein, 41 aa, Artificial Sequence
  GFR-binding peptide
  MOD_RES (1)..(3)..(37)..(38): Xaa is C or S
  MOD_RES (15)..(16)..(17)..(18)..(19): Xaa is A or G
  MOD_RES (20)..(21)..(22)..(23): Xaa is A or G or is absent
XGXESVAMGPIKGYXXXXXXXXXFYLINIPSLKTPVXXAKS

SEQ ID NO: 31220 - protein, 40 aa, Artificial Sequence
  GFR-binding peptide
  MOD_RES (1)..(35)..(36): Xaa is C or S
  MOD_RES (13)..(14)..(15)..(16)..(17): Xaa is A or G
  MOD_RES (18)..(19)..(20)..(21): Xaa is A or G or is absent
XESVAMGPIKGYXXXXXXXXXFYLINIPSLKTPVXXAKSA

SEQ ID NO: 31221 - protein, 35 aa, Artificial Sequence
  GFR-binding peptide
  MOD_RES (32)..(33): Xaa is C or S
GEVVMDPIKGYVVKENEDFYLMNIPSLETPVXXAK

SEQ ID NO: 31222 - protein, 38 aa, Artificial Sequence
  GFR-binding peptide
  MOD_RES (2)..(34)..(35): Xaa is C or S
GXRDVVMGPIKGYIIQQKDNFYLMNIPSMKTPTXXPGA

SEQ ID NO: 31223 - protein, 36 aa, Artificial Sequence
  GFR-binding peptide
  MOD_RES (31)..(32): Xaa is C or S
EVVMDPIKGYVVNNASDFYLINIPSLRTPVXXTPPT

SEQ ID NO: 31224 - protein, 39 aa, Artificial Sequence
  GFR-binding peptide
  MOD_RES (2)..(4)..(38)..(39): Xaa is C or S
  MOD_RES (16)..(17)..(18)..(19)..(20): Xaa is A or G
  MOD_RES (21)..(22)..(23)..(24): Xaa is A or G or is absent
RXGXAEVVMDPIKGYXXXXXXXXXFYLINIPSLRAPVXX

SEQ ID NO: 31225 - protein, 35 aa, Artificial Sequence
  GFR-binding peptide
  MOD_RES (33)..(34): Xaa is C or S
  MOD_RES (11)..(12)..(13)..(14)..(15): Xaa is A or G
  MOD_RES (16)..(17)..(18)..(19): Xaa is A or G or is absent
EVVMDPIKGYXXXXXXXXXFYLMNIPSLETPVXXA

SEQ ID NO: 31226 - protein, 39 aa, Artificial Sequence
  GFR-binding peptide
  MOD_RES (2)..(4)..(37)..(38): Xaa is C or S
RXGXEAVSMGEPIKGYTPVGMDDFYLVNIPSLKTPVXXA

SEQ ID NO: 31227 - protein, 39 aa, Artificial Sequence
  GFR-binding peptide
  MOD_RES (1)..(3)..(37): Xaa is C or S
  MOD_RES (15)..(16)..(17)..(18)..(19): Xaa is A or G
  MOD_RES (20)..(21)..(22)..(23): Xaa is A or G or is absent
XGXSRVVMNPIKGYXXXXXXXXXFYLVNIPSLKTPAXTP

SEQ ID NO: 31228 - protein, 36 aa, Artificial Sequence
  GFR-binding peptide
  MOD_RES (32)..(33): Xaa is C or S
SEVVMDPIKGYVVNNASDFYLINIPSLRTPVXXTPP

SEQ ID NO: 31229 - protein, 37 aa, Artificial Sequence
  GFR-binding peptide
  MOD_RES (33)..(34): Xaa is C or S
  MOD_RES (11)..(12)..(13)..(14)..(15): Xaa is A or G
  MOD_RES (16)..(17)..(18)..(19): Xaa is A or G or is absent
RVVMNPIKGYXXXXXXXXXFYLVNIPSLQTPAXXPKP

SEQ ID NO: 31230 - protein, 36 aa, Artificial Sequence
  GFR-binding peptide
  MOD_RES (2)..(34)..(35): Xaa is C or S
GXAEVVMDPIKGYVVNNAADFYLINIPSLRAPVXXS

SEQ ID NO: 31231 - protein, 42 aa, Artificial Sequence
  GFR-binding peptide
  MOD_RES (2)..(4)..(37)..(38): Xaa is C or S
RXGXEAVSMGEPIKGYTPVGMDDFYLVNIPSLKTPVXXAKGV

SEQ ID NO: 31232 - protein, 33 aa, Artificial Sequence
  GFR-binding peptide
  MOD_RES (32)..(33): Xaa is C or S
ESVAMGPIKGYYTVVGKDFYLINIPSLKTPVXX

SEQ ID NO: 31233 - protein, 35 aa, Artificial Sequence
  GFR-binding peptide
  MOD_RES (1)..(3)..(35): Xaa is C or S
XGXGEVVMEPIKGYVVKDYEDFYLMNIPSLETPVX

SEQ ID NO: 31234 - protein, 39 aa, Artificial Sequence
  GFR-binding peptide
  MOD_RES (2)..(4)..(36)..(37): Xaa is C or S
RXGXAEVVMDPIKGYVVNNAADFYLINIPSLRAPVXXSA

SEQ ID NO: 31235 - protein, 35 aa, Artificial Sequence
  GFR-binding peptide
  MOD_RES (1)..(34)..(35): Xaa is C or S
XEAVSMGEPIKGYTPVGMDDFYLVNIPSLKTPVXX

SEQ ID NO: 31236 - protein, 38 aa, Artificial Sequence
  GFR-binding peptide
  MOD_RES (2)..(33)..(34): Xaa is C or S
GXEEVIMPIKGYLLVRGNDFYLMNIPSTKVPAXXTSPV

SEQ ID NO: 31237 - protein, 43 aa, Artificial Sequence
  GFR-binding peptide
  MOD_RES (2)..(4)..(38)..(39): Xaa is C or S
  MOD_RES (16)..(17)..(18)..(19)..(20): Xaa is A or G
  MOD_RES (21)..(22)..(23)..(24): Xaa is A or G or is absent
RXGXESVAMGPIKGYXXXXXXXXXFYLINIPSLKTPVXXAKSA

SEQ ID NO: 31238 - protein, 43 aa, Artificial Sequence
  GFR-binding peptide
  MOD_RES (1)..(3)..(37)..(38): Xaa is C or S
  MOD_RES (15)..(16)..(17)..(18)..(19): Xaa is A or G
  MOD_RES (20)..(21)..(22)..(23): Xaa is A or G or is absent
XGXAKVVMNPIKGYXXXXXXXXXFYLVNIPSLKTPAXXAKPVA

SEQ ID NO: 31239 - protein, 36 aa, Artificial Sequence
  GFR-binding peptide
  MOD_RES (1)..(3): Xaa is C or S
  MOD_RES (15)..(16)..(17)..(18)..(19): Xaa is A or G
  MOD_RES (20)..(21)..(22)..(23): Xaa is A or G or is absent
XGXESVAMGPIKGYXXXXXXXXXFYLINIPSLKTPV

SEQ ID NO: 31240 - protein, 40 aa, Artificial Sequence
  GFR-binding peptide
  MOD_RES (1)..(3)..(37): Xaa is C or S
  MOD_RES (15)..(16)..(17)..(18)..(19): Xaa is A or G
  MOD_RES (20)..(21)..(22)..(23): Xaa is A or G or is absent
XGXSRVVMNPIKGYXXXXXXXXXFYLVNIPSLKTPAXTPK

SEQ ID NO: 31241 - protein, 44 aa, Artificial Sequence
  GFR-binding peptide
  MOD_RES (2)..(4)..(38)..(39): Xaa is C or S
  MOD_RES (16)..(17)..(18)..(19)..(20): Xaa is A or G
  MOD_RES (21)..(22)..(23)..(24): Xaa is A or G or is absent
HXGXAKVVMNPIKGYXXXXXXXXXFYLVNIPSLKTPAXXAKPVA

SEQ ID NO: 31242 - protein, 44 aa, Artificial Sequence
  GFR-binding peptide
  MOD_RES (2)..(4)..(38)..(39): Xaa is C or S
  MOD_RES (16)..(17)..(18)..(19)..(20): Xaa is A or G
  MOD_RES (21)..(22)..(23)..(24): Xaa is A or G or is absent
SXGXRDVVMGPIKGYXXXXXXXXXFYLMNIPSMKTPTXXPGASG

SEQ ID NO: 31243 - protein, 39 aa, Artificial Sequence
  GFR-binding peptide
  MOD_RES (1)..(33)..(34): Xaa is C or S
XGEVVMDPIKGYVVKENEDFYLMNIPSLETPVXXAKPIK

SEQ ID NO: 31244 - protein, 43 aa, Artificial Sequence
  GFR-binding peptide
  MOD_RES (1)..(3)..(37)..(38): Xaa is C or S
  MOD_RES (15)..(16)..(17)..(18)..(19): Xaa is A or G
  MOD_RES (20)..(21)..(22)..(23): Xaa is A or G or is absent
XGXESVAMGPIKGYXXXXXXXXXFYLINIPSLKTPVXXAKSAK

SEQ ID NO: 31245 - protein, 34 aa, Artificial Sequence
  GFR-binding peptide
  MOD_RES (32)..(33): Xaa is C or S
ARVVMNPIKGYIVNSSDDFYLVNIPSLQTPAXXP

SEQ ID NO: 31246 - protein, 37 aa, Artificial Sequence
  GFR-binding peptide
  MOD_RES (2)..(4)..(36): Xaa is C or S
HXGXSRVVMNPIKGYIVNSSDDFYLVNIPSLKTPAXT

SEQ ID NO: 31247 - protein, 35 aa, Artificial Sequence
  GFR-binding peptide
  MOD_RES (1)..(1): Xaa is C or S
  MOD_RES (14)..(15)..(16)..(17)..(18): Xaa is A or G
  MOD_RES (19)..(20)..(21)..(22): Xaa is A or G or is absent
XEAVSMGEPIKGYXXXXXXXXXFYLVNIPSLKTPV

SEQ ID NO: 31248 - protein, 39 aa, Artificial Sequence
  GFR-binding peptide
  MOD_RES (2)..(4)..(36)..(37): Xaa is C or S
HXGXAKVVMNPIKGYIVNNSSDFYLVNIPSLKTPAXXAK

SEQ ID NO: 31249 - protein, 37 aa, Artificial Sequence
  GFR-binding peptide
  MOD_RES (2)..(35)..(36): Xaa is C or S
GXEAVSMGEPIKGYTPVGMDDFYLVNIPSLKTPVXXA

SEQ ID NO: 31250 - protein, 42 aa, Artificial Sequence
  GFR-binding peptide
  MOD_RES (2)..(4)..(38)..(39): Xaa is C or S
  MOD_RES (16)..(17)..(18)..(19)..(20): Xaa is A or G
  MOD_RES (21)..(22)..(23)..(24): Xaa is A or G or is absent
HXGXAKVVMNPIKGYXXXXXXXXXFYLVNIPSLKTPAXXAKP

SEQ ID NO: 31251 - protein, 34 aa, Artificial Sequence
  GFR-binding peptide
  MOD_RES (1)..(3)..(34): Xaa is C or S
XGXEEVIMPIKGYLLVRGNDFYLMNIPSTKVPAX

SEQ ID NO: 31252 - protein, 42 aa, Artificial Sequence
  GFR-binding peptide
  MOD_RES (2)..(4)..(38)..(39): Xaa is C or S
  MOD_RES (16)..(17)..(18)..(19)..(20): Xaa is A or G
  MOD_RES (21)..(22)..(23)..(24): Xaa is A or G or is absent
RXGXSEVVMDPIKGYXXXXXXXXXFYLINIPSLRTPVXXTPP

SEQ ID NO: 31253 - protein, 36 aa, Artificial Sequence
  GFR-binding peptide
  MOD_RES (2)..(4)..(36): Xaa is C or S
RXGXGEVVMDPIKGYVVKENEDFYLMNIPSLETPVX

SEQ ID NO: 31254 - protein, 37 aa, Artificial Sequence
  GFR-binding peptide
  MOD_RES (31)..(32): Xaa is C or S
SVAMGPIKGYYTVVGKDFYLINIPSLKTPVXXAKSAK

SEQ ID NO: 31255 - protein, 40 aa, Artificial Sequence
  GFR-binding peptide
  MOD_RES (1)..(3)..(37)..(38): Xaa is C or S
  MOD_RES (15)..(16)..(17)..(18)..(19): Xaa is A or G
  MOD_RES (20)..(21)..(22)..(23): Xaa is A or G or is absent
XGXRDVVMGPIKGYXXXXXXXXXFYLMNIPSMKTPTXXPG

SEQ ID NO: 31256 - protein, 40 aa, Artificial Sequence
  GFR-binding peptide
  MOD_RES (2)..(34)..(35): Xaa is C or S
GXARVVMNPIKGYIVNSSDDFYLVNIPSLQTPAXXPKPVT

SEQ ID NO: 31257 - protein, 40 aa, Artificial Sequence
  GFR-binding peptide
  MOD_RES (2)..(36)..(37): Xaa is C or S
  MOD_RES (14)..(15)..(16)..(17)..(18): Xaa is A or G
  MOD_RES (19)..(20)..(21)..(22): Xaa is A or G or is absent
GXSEVVMDPIKGYXXXXXXXXXFYLINIPSLRTPVXXTPP

SEQ ID NO: 31258 - protein, 35 aa, Artificial Sequence
  GFR-binding peptide
  MOD_RES (34)..(35): Xaa is C or S
  MOD_RES (12)..(13)..(14)..(15)..(16): Xaa is A or G
  MOD_RES (17)..(18)..(19)..(20): Xaa is A or G or is absent
SRVVMNPIKGYXXXXXXXXXFYLVNIPSLKTPAXX

SEQ ID NO: 31259 - protein, 39 aa, Artificial Sequence
  GFR-binding peptide
  MOD_RES (34)..(35): Xaa is C or S
  MOD_RES (12)..(13)..(14)..(15)..(16): Xaa is A or G
  MOD_RES (17)..(18)..(19)..(20): Xaa is A or G or is absent
GEVVMDPIKGYXXXXXXXXXFYLMNIPSLETPVXXAKPI

SEQ ID NO: 31260 - protein, 35 aa, Artificial Sequence
  GFR-binding peptide
  MOD_RES (1)..(3)..(35): Xaa is C or S
XGXESVAMGPIKGYYTVVGKDFYLINIPSLKTPVX

SEQ ID NO: 31261 - protein, 35 aa, Artificial Sequence
  GFR-binding peptide
  MOD_RES (2)..(2): Xaa is C or S
  MOD_RES (14)..(15)..(16)..(17)..(18): Xaa is A or G
  MOD_RES (19)..(20)..(21)..(22): Xaa is A or G or is absent
GXARVVMNPIKGYXXXXXXXXXFYLVNIPSLQTPA

SEQ ID NO: 31262 - protein, 36 aa, Artificial Sequence
  GFR-binding peptide
  MOD_RES (31)..(32): Xaa is C or S
EVVMEPIKGYVVKDYEDFYLMNIPSLETPVXXAKPI

SEQ ID NO: 31263 - protein, 38 aa, Artificial Sequence
  GFR-binding peptide
  MOD_RES (1)..(3)..(35)..(36): Xaa is C or S
XGXGEVVMEPIKGYVVKDYEDFYLMNIPSLETPVXXAK

SEQ ID NO: 31264 - protein, 36 aa, Artificial Sequence
  GFR-binding peptide
  MOD_RES (1)..(33)..(34): Xaa is C or S
XRDVVMGPIKGYIIQQKDNFYLMNIPSMKTPTXXPG

SEQ ID NO: 31265 - protein, 42 aa, Artificial Sequence
  GFR-binding peptide
  MOD_RES (2)..(4)..(38)..(39): Xaa is C or S
  MOD_RES (16)..(17)..(18)..(19)..(20): Xaa is A or G
  MOD_RES (21)..(22)..(23)..(24): Xaa is A or G or is absent
RXGXGEVVMDPIKGYXXXXXXXXXFYLMNIPSLETPVXXAKP

SEQ ID NO: 31266 - protein, 41 aa, Artificial Sequence
  GFR-binding peptide
  MOD_RES (1)..(3)..(38)..(39): Xaa is C or S
  MOD_RES (16)..(17)..(18)..(19)..(20): Xaa is A or G
  MOD_RES (21)..(22)..(23)..(24): Xaa is A or G or is absent
XGXEAVSMGEPIKGYXXXXXXXXXFYLVNIPSLKTPVXXAK

SEQ ID NO: 31267 - protein, 36 aa, Artificial Sequence
  GFR-binding peptide
  MOD_RES (32)..(33): Xaa is C or S
RDVVMGPIKGYIIQQKDNFYLMNIPSMKTPTXXPGA

SEQ ID NO: 31268 - protein, 39 aa, Artificial Sequence
  GFR-binding peptide
  MOD_RES (2)..(35)..(36): Xaa is C or S
  MOD_RES (13)..(14)..(15)..(16)..(17): Xaa is A or G
  MOD_RES (18)..(19)..(20)..(21): Xaa is A or G or is absent
GXEEVIMPIKGYXXXXXXXXXFYLMNIPSTKVPAXXTSP

SEQ ID NO: 31269 - protein, 39 aa, Artificial Sequence
  GFR-binding peptide
  MOD_RES (2)..(34): Xaa is C or S
GXSRVVMNPIKGYIVNSSDDFYLVNIPSLKTPAXTPKTV

SEQ ID NO: 31270 - protein, 42 aa, Artificial Sequence
  GFR-binding peptide
  MOD_RES (2)..(37)..(38): Xaa is C or S
  MOD_RES (15)..(16)..(17)..(18)..(19): Xaa is A or G
  MOD_RES (20)..(21)..(22)..(23): Xaa is A or G or is absent
GXEAVSMGEPIKGYXXXXXXXXXFYLVNIPSLKTPVXXAKGV

SEQ ID NO: 31271 - protein, 40 aa, Artificial Sequence
  GFR-binding peptide
  MOD_RES (2)..(34)..(35): Xaa is C or S
GXSEVVMDPIKGYVVNNASDFYLINIPSLRTPVXXTPPTS

SEQ ID NO: 31272 - protein, 38 aa, Artificial Sequence
  GFR-binding peptide
  MOD_RES (1)..(35)..(36): Xaa is C or S
  MOD_RES (13)..(14)..(15)..(16)..(17): Xaa is A or G
  MOD_RES (18)..(19)..(20)..(21): Xaa is A or G or is absent
XSRVVMNPIKGYXXXXXXXXXFYLVNIPSLKTPAXXPK

SEQ ID NO: 31273 - protein, 34 aa, Artificial Sequence
  GFR-binding peptide
  MOD_RES (13)..(14)..(15)..(16)..(17): Xaa is A or G
  MOD_RES (18)..(19)..(20)..(21): Xaa is A or G or is absent
EAVSMGEPIKGYXXXXXXXXXFYLVNIPSLKTPV

SEQ ID NO: 31274 - protein, 32 aa, Artificial Sequence
  GFR-binding peptide
  MOD_RES (32)..(32): Xaa is C or S
GEVVMDPIKGYVVKENEDFYLMNIPSLETPVX

SEQ ID NO: 31275 - protein, 37 aa, Artificial Sequence
  GFR-binding peptide
  MOD_RES (2)..(34)..(35): Xaa is C or S
GXGEVVMEPIKGYVVKDYEDFYLMNIPSLETPVXXAK

SEQ ID NO: 31276 - protein, 36 aa, Artificial Sequence
  GFR-binding peptide
  MOD_RES (33)..(34): Xaa is C or S
  MOD_RES (11)..(12)..(13)..(14)..(15): Xaa is A or G
  MOD_RES (16)..(17)..(18)..(19): Xaa is A or G or is absent
DVVMGPIKGYXXXXXXXXXFYLMNIPSMKTPTXXPG

SEQ ID NO: 31277 - protein, 41 aa, Artificial Sequence
  GFR-binding peptide
  MOD_RES (1)..(3)..(37)..(38): Xaa is C or S
  MOD_RES (15)..(16)..(17)..(18)..(19): Xaa is A or G
  MOD_RES (20)..(21)..(22)..(23): Xaa is A or G or is absent
XGXAKVVMNPIKGYXXXXXXXXXFYLVNIPSLKTPAXXAKP

SEQ ID NO: 31278 - protein, 40 aa, Artificial Sequence
  GFR-binding peptide
  MOD_RES (1)..(3)..(35)..(36): Xaa is C or S
XGXSRVVMNPIKGYIVNSSDDFYLVNIPSLKTPAXXPKPV

SEQ ID NO: 31279 - protein, 36 aa, Artificial Sequence
  GFR-binding peptide
  MOD_RES (1)..(3): Xaa is C or S
  MOD_RES (15)..(16)..(17)..(18)..(19): Xaa is A or G
  MOD_RES (20)..(21)..(22)..(23): Xaa is A or G or is absent
XGXAKVVMNPIKGYXXXXXXXXXFYLVNIPSLKTPA

SEQ ID NO: 31280 - protein, 34 aa, Artificial Sequence
  GFR-binding peptide
  MOD_RES (2)..(34): Xaa is C or S
GXSEVVMDPIKGYVVNNASDFYLINIPSLRTPVX

SEQ ID NO: 31281 - protein, 37 aa, Artificial Sequence
  GFR-binding peptide
  MOD_RES (32)..(33): Xaa is C or S
AEVVMDPIKGYVVNNAADFYLINIPSLRAPVXXSAPA

SEQ ID NO: 31282 - protein, 35 aa, Artificial Sequence
  GFR-binding peptide
  MOD_RES (2)..(4): Xaa is C or S
RXGXGEVVMDPIKGYVVKENEDFYLMNIPSLETPV

SEQ ID NO: 31283 - protein, 41 aa, Artificial Sequence
  GFR-binding peptide
  MOD_RES (2)..(4)..(36)..(37): Xaa is C or S
RXGXGEVVMEPIKGYVVKDYEDFYLMNIPSLETPVXXAKPI

SEQ ID NO: 31284 - protein, 34 aa, Artificial Sequence
  GFR-binding peptide
  MOD_RES (31)..(32): Xaa is C or S
EVVMDPIKGYVVKENEDFYLMNIPSLETPVXXAK

SEQ ID NO: 31285 - protein, 41 aa, Artificial Sequence
  GFR-binding peptide
  MOD_RES (1)..(3)..(35): Xaa is C or S
XGXSRVVMNPIKGYIVNSSDDFYLVNIPSLKTPAXTPKTVH

SEQ ID NO: 31286 - protein, 40 aa, Artificial Sequence
  GFR-binding peptide
  MOD_RES (2)..(4)..(36)..(37): Xaa is C or S
SXGXRDVVMGPIKGYIIQQKDNFYLMNIPSMKTPTXXPGA

SEQ ID NO: 31287 - protein, 35 aa, Artificial Sequence
  GFR-binding peptide
  MOD_RES (31)..(32): Xaa is C or S
RVVMNPIKGYIVNSSDDFYLVNIPSLKTPAXXPKP

SEQ ID NO: 31288 - protein, 41 aa, Artificial Sequence
  GFR-binding peptide
  MOD_RES (1)..(3)..(35)..(36): Xaa is C or S
XGXSRVVMNPIKGYIVNSSDDFYLVNIPSLKTPAXXPKPVH

SEQ ID NO: 31289 - protein, 38 aa, Artificial Sequence
  GFR-binding peptide
  MOD_RES (2)..(36)..(37): Xaa is C or S
  MOD_RES (14)..(15)..(16)..(17)..(18): Xaa is A or G
  MOD_RES (19)..(20)..(21)..(22): Xaa is A or G or is absent
GXGEVVMEPIKGYXXXXXXXXXFYLMNIPSLETPVXXA

SEQ ID NO: 31290 - protein, 38 aa, Artificial Sequence
  GFR-binding peptide
  MOD_RES (1)..(3)..(37)..(38): Xaa is C or S
  MOD_RES (15)..(16)..(17)..(18)..(19): Xaa is A or G
  MOD_RES (20)..(21)..(22)..(23): Xaa is A or G or is absent
XGXARVVMNPIKGYXXXXXXXXXFYLVNIPSLQTPAXX

SEQ ID NO: 31291 - protein, 38 aa, Artificial Sequence
  GFR-binding peptide
  MOD_RES (1)..(33)..(34): Xaa is C or S
XGEVVMEPIKGYVVKDYEDFYLMNIPSLETPVXXAKPI

SEQ ID NO: 31292 - protein, 37 aa, Artificial Sequence
  GFR-binding peptide
  MOD_RES (1)..(34)..(35): Xaa is C or S
  MOD_RES (12)..(13)..(14)..(15)..(16): Xaa is A or G
  MOD_RES (17)..(18)..(19)..(20): Xaa is A or G or is absent
XEEVIMPIKGYXXXXXXXXXFYLMNIPSTKVPAXXTS

SEQ ID NO: 31293 - protein, 35 aa, Artificial Sequence
  GFR-binding peptide
  MOD_RES (31)..(32): Xaa is C or S
EVVMEPIKGYVVKDYEDFYLMNIPSLETPVXXAKP

SEQ ID NO: 31294 - protein, 41 aa, Artificial Sequence
  GFR-binding peptide
  MOD_RES (2)..(4)..(38): Xaa is C or S
  MOD_RES (16)..(17)..(18)..(19)..(20): Xaa is A or G
  MOD_RES (21)..(22)..(23)..(24): Xaa is A or G or is absent
HXGXSRVVMNPIKGYXXXXXXXXXFYLVNIPSLKTPAXTPK

SEQ ID NO: 31295 - protein, 39 aa, Artificial Sequence
  GFR-binding peptide
  MOD_RES (33)..(34): Xaa is C or S
EAVSMGEPIKGYTPVGMDDFYLVNIPSLKTPVXXAKGVK

SEQ ID NO: 31296 - protein, 31 aa, Artificial Sequence
  GFR-binding peptide
AEVVMDPIKGYVVNNAADFYLINIPSLRAPV

SEQ ID NO: 31297 - protein, 32 aa, Artificial Sequence
  GFR-binding peptide
  MOD_RES (11)..(12)..(13)..(14)..(15): Xaa is A or G
  MOD_RES (16)..(17)..(18)..(19): Xaa is A or G or is absent
KVVMNPIKGYXXXXXXXXXFYLVNIPSLKTPA

SEQ ID NO: 31298 - protein, 43 aa, Artificial Sequence
  GFR-binding peptide
  MOD_RES (2)..(4)..(38)..(39): Xaa is C or S
  MOD_RES (16)..(17)..(18)..(19)..(20): Xaa is A or G
  MOD_RES (21)..(22)..(23)..(24): Xaa is A or G or is absent
RXGXGEVVMDPIKGYXXXXXXXXXFYLMNIPSLETPVXXAKPI

SEQ ID NO: 31299 - protein, 42 aa, Artificial Sequence
  GFR-binding peptide
  MOD_RES (2)..(36)..(37): Xaa is C or S
  MOD_RES (14)..(15)..(16)..(17)..(18): Xaa is A or G
  MOD_RES (19)..(20)..(21)..(22): Xaa is A or G or is absent
GXGEVVMDPIKGYXXXXXXXXXFYLMNIPSLETPVXXAKPIK

SEQ ID NO: 31300 - protein, 38 aa, Artificial Sequence
  GFR-binding peptide
  MOD_RES (1)..(3)..(35)..(36): Xaa is C or S
XGXRDVVMGPIKGYIIQQKDNFYLMNIPSMKTPTXXPG

SEQ ID NO: 31301 - protein, 32 aa, Artificial Sequence
  GFR-binding peptide
  MOD_RES (11)..(12)..(13)..(14)..(15): Xaa is A or G
  MOD_RES (16)..(17)..(18)..(19): Xaa is A or G or is absent
EEVIMPIKGYXXXXXXXXXFYLMNIPSTKVPA

SEQ ID NO: 31302 - protein, 38 aa, Artificial Sequence
  GFR-binding peptide
  MOD_RES (1)..(3)..(35)..(36): Xaa is C or S
XGXGEVVMDPIKGYVVKENEDFYLMNIPSLETPVXXAK

SEQ ID NO: 31303 - protein, 33 aa, Artificial Sequence
  GFR-binding peptide
  MOD_RES (33)..(33): Xaa is C or S
  MOD_RES (11)..(12)..(13)..(14)..(15): Xaa is A or G
  MOD_RES (16)..(17)..(18)..(19): Xaa is A or G or is absent
EVVMDPIKGYXXXXXXXXXFYLINIPSLRAPVX

SEQ ID NO: 31304 - protein, 39 aa, Artificial Sequence
  GFR-binding peptide
  MOD_RES (2)..(4)..(38)..(39): Xaa is C or S
  MOD_RES (16)..(17)..(18)..(19)..(20): Xaa is A or G
  MOD_RES (21)..(22)..(23)..(24): Xaa is A or G or is absent
SXGXRDVVMGPIKGYXXXXXXXXXFYLMNIPSMKTPTXX

SEQ ID NO: 31305 - protein, 34 aa, Artificial Sequence
  GFR-binding peptide
  MOD_RES (2)..(34): Xaa is C or S
GXGEVVMDPIKGYVVKENEDFYLMNIPSLETPVX

SEQ ID NO: 31306 - protein, 35 aa, Artificial Sequence
  GFR-binding peptide
  MOD_RES (2)..(34)..(35): Xaa is C or S
GXARVVMNPIKGYIVNSSDDFYLVNIPSLQTPAXX

SEQ ID NO: 31307 - protein, 31 aa, Artificial Sequence
  GFR-binding peptide
GEVVMEPIKGYVVKDYEDFYLMNIPSLETPV

SEQ ID NO: 31308 - protein, 38 aa, Artificial Sequence
  GFR-binding peptide
  MOD_RES (2)..(4)..(36)..(37): Xaa is C or S
RXGXESVAMGPIKGYYTVVGKDFYLINIPSLKTPVXXA

SEQ ID NO: 31309 - protein, 40 aa, Artificial Sequence
  GFR-binding peptide
  MOD_RES (2)..(4)..(36)..(37): Xaa is C or S
RXGXGEVVMDPIKGYVVKENEDFYLMNIPSLETPVXXAKP

SEQ ID NO: 31310 - protein, 37 aa, Artificial Sequence
  GFR-binding peptide
  MOD_RES (2)..(4): Xaa is C or S
  MOD_RES (16)..(17)..(18)..(19)..(20): Xaa is A or G
  MOD_RES (21)..(22)..(23)..(24): Xaa is A or G or is absent
RXGXESVAMGPIKGYXXXXXXXXXFYLINIPSLKTPV

SEQ ID NO: 31311 - protein, 40 aa, Artificial Sequence
  GFR-binding peptide
  MOD_RES (2)..(34)..(35): Xaa is C or S
GXAKVVMNPIKGYIVNNSSDFYLVNIPSLKTPAXXAKPVA

SEQ ID NO: 31312 - protein, 36 aa, Artificial Sequence
  GFR-binding peptide
  MOD_RES (2)..(34)..(35): Xaa is C or S
GXAKVVMNPIKGYIVNNSSDFYLVNIPSLKTPAXXA

SEQ ID NO: 31313 - protein, 34 aa, Artificial Sequence
  GFR-binding peptide
  MOD_RES (1)..(3): Xaa is C or S
XGXSEVVMDPIKGYVVNNASDFYLINIPSLRTPV

SEQ ID NO: 31314 - protein, 37 aa, Artificial Sequence
  GFR-binding peptide
  MOD_RES (31)..(32): Xaa is C or S
RVVMNPIKGYIVNSSDDFYLVNIPSLKTPAXXPKPVY

SEQ ID NO: 31315 - protein, 39 aa, Artificial Sequence
  GFR-binding peptide
  MOD_RES (2)..(34)..(35): Xaa is C or S
GXGEVVMEPIKGYVVKDYEDFYLMNIPSLETPVXXAKPI

SEQ ID NO: 31316 - protein, 32 aa, Artificial Sequence
  GFR-binding peptide
  MOD_RES (32)..(32): Xaa is C or S
SRVVMNPIKGYIVNSSDDFYLVNIPSLKTPAX

SEQ ID NO: 31317 - protein, 35 aa, Artificial Sequence
  GFR-binding peptide
  MOD_RES (1)..(3)..(35): Xaa is C or S
XGXAKVVMNPIKGYIVNNSSDFYLVNIPSLKTPAX

SEQ ID NO: 31318 - protein, 36 aa, Artificial Sequence
  GFR-binding peptide
  MOD_RES (32)..(33): Xaa is C or S
GEVVMDPIKGYVVKENEDFYLMNIPSLETPVXXAKP

SEQ ID NO: 31319 - protein, 40 aa, Artificial Sequence
  GFR-binding peptide
  MOD_RES (2)..(36)..(37): Xaa is C or S
  MOD_RES (14)..(15)..(16)..(17)..(18): Xaa is A or G
  MOD_RES (19)..(20)..(21)..(22): Xaa is A or G or is absent
GXAEVVMDPIKGYXXXXXXXXXFYLINIPSLRAPVXXSAP

SEQ ID NO: 31320 - protein, 35 aa, Artificial Sequence
  GFR-binding peptide
  MOD_RES (1)..(32)..(33): Xaa is C or S
XEEVIMPIKGYLLVRGNDFYLMNIPSTKVPAXXTS

SEQ ID NO: 31321 - protein, 36 aa, Artificial Sequence
  GFR-binding peptide
  MOD_RES (31)..(31): Xaa is C or S
RVVMNPIKGYIVNSSDDFYLVNIPSLKTPAXTPKTV

SEQ ID NO: 31322 - protein, 39 aa, Artificial Sequence
  GFR-binding peptide
  MOD_RES (1)..(33)..(34): Xaa is C or S
XSRVVMNPIKGYIVNSSDDFYLVNIPSLKTPAXXPKPVH

SEQ ID NO: 31323 - protein, 40 aa, Artificial Sequence
  GFR-binding peptide
  MOD_RES (1)..(3)..(34)..(35): Xaa is C or S
XGXEEVIMPIKGYLLVRGNDFYLMNIPSTKVPAXXTSPVR

SEQ ID NO: 31324 - protein, 38 aa, Artificial Sequence
  GFR-binding peptide
  MOD_RES (2)..(34)..(35): Xaa is C or S
GXSRVVMNPIKGYIVNSSDDFYLVNIPSLKTPAXXPKP

SEQ ID NO: 31325 - protein, 36 aa, Artificial Sequence
  GFR-binding peptide
  MOD_RES (1)..(33)..(34): Xaa is C or S
XARVVMNPIKGYIVNSSDDFYLVNIPSLQTPAXXPK

SEQ ID NO: 31326 - protein, 36 aa, Artificial Sequence
  GFR-binding peptide
  MOD_RES (34)..(35): Xaa is C or S
  MOD_RES (12)..(13)..(14)..(15)..(16): Xaa is A or G
  MOD_RES (17)..(18)..(19)..(20): Xaa is A or G or is absent
SRVVMNPIKGYXXXXXXXXXFYLVNIPSLKTPAXXP

SEQ ID NO: 31327 - protein, 36 aa, Artificial Sequence
  GFR-binding peptide
  MOD_RES (2)..(33)..(34): Xaa is C or S
GXEEVIMPIKGYLLVRGNDFYLMNIPSTKVPAXXTS

SEQ ID NO: 31328 - protein, 40 aa, Artificial Sequence
  GFR-binding peptide
  MOD_RES (34)..(35): Xaa is C or S
  MOD_RES (12)..(13)..(14)..(15)..(16): Xaa is A or G
  MOD_RES (17)..(18)..(19)..(20): Xaa is A or G or is absent
AKVVMNPIKGYXXXXXXXXXFYLVNIPSLKTPAXXAKPVA

SEQ ID NO: 31329 - protein, 32 aa, Artificial Sequence
  GFR-binding peptide
  MOD_RES (31)..(32): Xaa is C or S
EVVMDPIKGYVVKENEDFYLMNIPSLETPVXX

SEQ ID NO: 31330 - protein, 35 aa, Artificial Sequence
  GFR-binding peptide
  MOD_RES (1)..(35): Xaa is C or S
  MOD_RES (13)..(14)..(15)..(16)..(17): Xaa is A or G
  MOD_RES (18)..(19)..(20)..(21): Xaa is A or G or is absent
XARVVMNPIKGYXXXXXXXXXFYLVNIPSLQTPAX

SEQ ID NO: 31331 - protein, 44 aa, Artificial Sequence
  GFR-binding peptide
  MOD_RES (2)..(4)..(38)..(39): Xaa is C or S
  MOD_RES (16)..(17)..(18)..(19)..(20): Xaa is A or G
  MOD_RES (21)..(22)..(23)..(24): Xaa is A or G or is absent
HXGXSRVVMNPIKGYXXXXXXXXXFYLVNIPSLKTPAXXPKPVY

SEQ ID NO: 31332 - protein, 39 aa, Artificial Sequence
  GFR-binding peptide
  MOD_RES (33)..(34): Xaa is C or S
  MOD_RES (11)..(12)..(13)..(14)..(15): Xaa is A or G
  MOD_RES (16)..(17)..(18)..(19): Xaa is A or G or is absent
EEVIMPIKGYXXXXXXXXXFYLMNIPSTKVPAXXTSPVR

SEQ ID NO: 31333 - protein, 34 aa, Artificial Sequence
  GFR-binding peptide
  MOD_RES (1)..(1): Xaa is C or S
  MOD_RES (13)..(14)..(15)..(16)..(17): Xaa is A or G
  MOD_RES (18)..(19)..(20)..(21): Xaa is A or G or is absent
XGEVVMEPIKGYXXXXXXXXXFYLMNIPSLETPV

SEQ ID NO: 31334 - protein, 38 aa, Artificial Sequence
  GFR-binding peptide
  MOD_RES (33)..(34): Xaa is C or S
  MOD_RES (11)..(12)..(13)..(14)..(15): Xaa is A or G
  MOD_RES (16)..(17)..(18)..(19): Xaa is A or G or is absent
DVVMGPIKGYXXXXXXXXXFYLMNIPSMKTPTXXPGAS

SEQ ID NO: 31335 - protein, 38 aa, Artificial Sequence
  GFR-binding peptide
  MOD_RES (34)..(35): Xaa is C or S
  MOD_RES (12)..(13)..(14)..(15)..(16): Xaa is A or G
  MOD_RES (17)..(18)..(19)..(20): Xaa is A or G or is absent
SEVVMDPIKGYXXXXXXXXXFYLINIPSLRTPVXXTPP

SEQ ID NO: 31336 - protein, 36 aa, Artificial Sequence
  GFR-binding peptide
  MOD_RES (2)..(4): Xaa is C or S
  MOD_RES (15)..(16)..(17)..(18)..(19): Xaa is A or G
  MOD_RES (20)..(21)..(22)..(23): Xaa is A or G or is absent
LXGXEEVIMPIKGYXXXXXXXXXFYLMNIPSTKVPA

SEQ ID NO: 31337 - protein, 33 aa, Artificial Sequence
  GFR-binding peptide
  MOD_RES (32)..(33): Xaa is C or S
SRVVMNPIKGYIVNSSDDFYLVNIPSLKTPAXX

SEQ ID NO: 31338 - protein, 35 aa, Artificial Sequence
  GFR-binding peptide
  MOD_RES (1)..(3)..(35): Xaa is C or S
XGXAEVVMDPIKGYVVNNAADFYLINIPSLRAPVX

SEQ ID NO: 31339 - protein, 37 aa, Artificial Sequence
  GFR-binding peptide
  MOD_RES (2)..(34)..(35): Xaa is C or S
GXARVVMNPIKGYIVNSSDDFYLVNIPSLQTPAXXPK

SEQ ID NO: 31340 - protein, 37 aa, Artificial Sequence
  GFR-binding peptide
  MOD_RES (32)..(33): Xaa is C or S
RDVVMGPIKGYIIQQKDNFYLMNIPSMKTPTXXPGAS

SEQ ID NO: 31341 - protein, 37 aa, Artificial Sequence
  GFR-binding peptide
  MOD_RES (1)..(36)..(37): Xaa is C or S
  MOD_RES (14)..(15)..(16)..(17)..(18): Xaa is A or G
  MOD_RES (19)..(20)..(21)..(22): Xaa is A or G or is absent
XEAVSMGEPIKGYXXXXXXXXXFYLVNIPSLKTPVXX

SEQ ID NO: 31342 - protein, 33 aa, Artificial Sequence
  GFR-binding peptide
  MOD_RES (33)..(33): Xaa is C or S
  MOD_RES (11)..(12)..(13)..(14)..(15): Xaa is A or G
  MOD_RES (16)..(17)..(18)..(19): Xaa is A or G or is absent
EVVMDPIKGYXXXXXXXXXFYLINIPSLRTPVX

SEQ ID NO: 31343 - protein, 39 aa, Artificial Sequence
  GFR-binding peptide
  MOD_RES (1)..(3)..(34)..(35): Xaa is C or S
XGXEEVIMPIKGYLLVRGNDFYLMNIPSTKVPAXXTSPV

SEQ ID NO: 31344 - protein, 34 aa, Artificial Sequence
  GFR-binding peptide
  MOD_RES (31)..(32): Xaa is C or S
KVVMNPIKGYIVNNSSDFYLVNIPSLKTPAXXAK

SEQ ID NO: 31345 - protein, 37 aa, Artificial Sequence
  GFR-binding peptide
  MOD_RES (1)..(3)..(37): Xaa is C or S
  MOD_RES (15)..(16)..(17)..(18)..(19): Xaa is A or G
  MOD_RES (20)..(21)..(22)..(23): Xaa is A or G or is absent
XGXAEVVMDPIKGYXXXXXXXXXFYLINIPSLRAPVX

SEQ ID NO: 31346 - protein, 42 aa, Artificial Sequence
  GFR-binding peptide
  MOD_RES (2)..(4)..(36)..(37): Xaa is C or S
HXGXSRVVMNPIKGYIVNSSDDFYLVNIPSLKTPAXXPKPVY

SEQ ID NO: 31347 - protein, 35 aa, Artificial Sequence
  GFR-binding peptide
  MOD_RES (35)..(35): Xaa is C or S
  MOD_RES (13)..(14)..(15)..(16)..(17): Xaa is A or G
  MOD_RES (18)..(19)..(20)..(21): Xaa is A or G or is absent
EAVSMGEPIKGYXXXXXXXXXFYLVNIPSLKTPVX

SEQ ID NO: 31348 - protein, 36 aa, Artificial Sequence
  GFR-binding peptide
  MOD_RES (2)..(34)..(35): Xaa is C or S
GXSEVVMDPIKGYVVNNASDFYLINIPSLRTPVXXT

SEQ ID NO: 31349 - protein, 38 aa, Artificial Sequence
  GFR-binding peptide
  MOD_RES (32)..(33): Xaa is C or S
GEVVMEPIKGYVVKDYEDFYLMNIPSLETPVXXAKPIS

SEQ ID NO: 31350 - protein, 38 aa, Artificial Sequence
  GFR-binding peptide
  MOD_RES (1)..(3)..(37)..(38): Xaa is C or S
  MOD_RES (15)..(16)..(17)..(18)..(19): Xaa is A or G
  MOD_RES (20)..(21)..(22)..(23): Xaa is A or G or is absent
XGXGEVVMEPIKGYXXXXXXXXXFYLMNIPSLETPVXX

SEQ ID NO: 31351 - protein, 36 aa, Artificial Sequence
  GFR-binding peptide
  MOD_RES (1)..(35)..(36): Xaa is C or S
  MOD_RES (13)..(14)..(15)..(16)..(17): Xaa is A or G
  MOD_RES (18)..(19)..(20)..(21): Xaa is A or G or is absent
XARVVMNPIKGYXXXXXXXXXFYLVNIPSLQTPAXX

SEQ ID NO: 31352 - protein, 36 aa, Artificial Sequence
  GFR-binding peptide
  MOD_RES (31)..(32): Xaa is C or S
KVVMNPIKGYIVNNSSDFYLVNIPSLKTPAXXAKPV

SEQ ID NO: 31353 - protein, 43 aa, Artificial Sequence
  GFR-binding peptide
  MOD_RES (1)..(3)..(37)..(38): Xaa is C or S
  MOD_RES (15)..(16)..(17)..(18)..(19): Xaa is A or G
  MOD_RES (20)..(21)..(22)..(23): Xaa is A or G or is absent
XGXARVVMNPIKGYXXXXXXXXXFYLVNIPSLQTPAXXPKPVT

SEQ ID NO: 31354 - protein, 37 aa, Artificial Sequence
  GFR-binding peptide
  MOD_RES (33)..(34): Xaa is C or S
  MOD_RES (11)..(12)..(13)..(14)..(15): Xaa is A or G
  MOD_RES (16)..(17)..(18)..(19): Xaa is A or G or is absent
KVVMNPIKGYXXXXXXXXXFYLVNIPSLKTPAXXAKP

SEQ ID NO: 31355 - protein, 35 aa, Artificial Sequence
  GFR-binding peptide
  MOD_RES (34)..(35): Xaa is C or S
  MOD_RES (12)..(13)..(14)..(15)..(16): Xaa is A or G
  MOD_RES (17)..(18)..(19)..(20): Xaa is A or G or is absent
AKVVMNPIKGYXXXXXXXXXFYLVNIPSLKTPAXX

SEQ ID NO: 31356 - protein, 31 aa, Artificial Sequence
  GFR-binding peptide
AKVVMNPIKGYIVNNSSDFYLVNIPSLKTPA

SEQ ID NO: 31357 - protein, 41 aa, Artificial Sequence
  GFR-binding peptide
  MOD_RES (2)..(4)..(38)..(39): Xaa is C or S
  MOD_RES (16)..(17)..(18)..(19)..(20): Xaa is A or G
  MOD_RES (21)..(22)..(23)..(24): Xaa is A or G or is absent
RXGXGEVVMEPIKGYXXXXXXXXXFYLMNIPSLETPVXXAK

SEQ ID NO: 31358 - protein, 40 aa, Artificial Sequence
  GFR-binding peptide
  MOD_RES (1)..(3)..(35)..(36): Xaa is C or S
XGXARVVMNPIKGYIVNSSDDFYLVNIPSLQTPAXXPKPV

SEQ ID NO: 31359 - protein, 37 aa, Artificial Sequence
  GFR-binding peptide
  MOD_RES (1)..(33)..(34): Xaa is C or S
XSRVVMNPIKGYIVNSSDDFYLVNIPSLKTPAXXPKP

SEQ ID NO: 31360 - protein, 37 aa, Artificial Sequence
  GFR-binding peptide
  MOD_RES (31)..(32): Xaa is C or S
EVVMDPIKGYVVNNAADFYLINIPSLRAPVXXSAPAA

SEQ ID NO: 31361 - protein, 34 aa, Artificial Sequence
  GFR-binding peptide
  MOD_RES (1)..(32)..(33): Xaa is C or S
XEEVIMPIKGYLLVRGNDFYLMNIPSTKVPAXXT

SEQ ID NO: 31362 - protein, 36 aa, Artificial Sequence
  GFR-binding peptide
  MOD_RES (34)..(35): Xaa is C or S
  MOD_RES (12)..(13)..(14)..(15)..(16): Xaa is A or G
  MOD_RES (17)..(18)..(19)..(20): Xaa is A or G or is absent
SEVVMDPIKGYXXXXXXXXXFYLINIPSLRTPVXXT

SEQ ID NO: 31363 - protein, 31 aa, Artificial Sequence
  GFR-binding peptide
  MOD_RES (31)..(31): Xaa is C or S
RVVMNPIKGYIVNSSDDFYLVNIPSLKTPAX

SEQ ID NO: 31364 - protein, 41 aa, Artificial Sequence
  GFR-binding peptide
  MOD_RES (2)..(35)..(36): Xaa is C or S
GXEAVSMGEPIKGYTPVGMDDFYLVNIPSLKTPVXXAKGVK

SEQ ID NO: 31365 - protein, 37 aa, Artificial Sequence
  GFR-binding peptide
  MOD_RES (35)..(36): Xaa is C or S
  MOD_RES (13)..(14)..(15)..(16)..(17): Xaa is A or G
  MOD_RES (18)..(19)..(20)..(21): Xaa is A or G or is absent
EAVSMGEPIKGYXXXXXXXXXFYLVNIPSLKTPVXXA

SEQ ID NO: 31366 - protein, 37 aa, Artificial Sequence
  GFR-binding peptide
  MOD_RES (2)..(36)..(37): Xaa is C or S
  MOD_RES (14)..(15)..(16)..(17)..(18): Xaa is A or G
  MOD_RES (19)..(20)..(21)..(22): Xaa is A or G or is absent
GXSRVVMNPIKGYXXXXXXXXXFYLVNIPSLKTPAXX

SEQ ID NO: 31367 - protein, 32 aa, Artificial Sequence
  GFR-binding peptide
  MOD_RES (31)..(32): Xaa is C or S
EVVMDPIKGYVVNNASDFYLINIPSLRTPVXX

SEQ ID NO: 31368 - protein, 34 aa, Artificial Sequence
  GFR-binding peptide
  MOD_RES (33)..(34): Xaa is C or S
  MOD_RES (11)..(12)..(13)..(14)..(15): Xaa is A or G
  MOD_RES (16)..(17)..(18)..(19): Xaa is A or G or is absent
EVVMDPIKGYXXXXXXXXXFYLINIPSLRAPVXX

SEQ ID NO: 31369 - protein, 38 aa, Artificial Sequence
  GFR-binding peptide
  MOD_RES (1)..(3)..(36)..(37): Xaa is C or S
XGXEAVSMGEPIKGYTPVGMDDFYLVNIPSLKTPVXXA

SEQ ID NO: 31370 - protein, 36 aa, Artificial Sequence
  GFR-binding peptide
  MOD_RES (2)..(34)..(35): Xaa is C or S
GXSRVVMNPIKGYIVNSSDDFYLVNIPSLKTPAXXP

SEQ ID NO: 31371 - protein, 34 aa, Artificial Sequence
  GFR-binding peptide
  MOD_RES (31)..(32): Xaa is C or S
SVAMGPIKGYYTVVGKDFYLINIPSLKTPVXXAK

SEQ ID NO: 31372 - protein, 43 aa, Artificial Sequence
  GFR-binding peptide
  MOD_RES (2)..(4)..(38)..(39): Xaa is C or S
  MOD_RES (16)..(17)..(18)..(19)..(20): Xaa is A or G
  MOD_RES (21)..(22)..(23)..(24): Xaa is A or G or is absent
RXGXSEVVMDPIKGYXXXXXXXXXFYLINIPSLRTPVXXTPPT

SEQ ID NO: 31373 - protein, 32 aa, Artificial Sequence
  GFR-binding peptide
  MOD_RES (31)..(32): Xaa is C or S
EVVMDPIKGYVVNNAADFYLINIPSLRAPVXX

SEQ ID NO: 31374 - protein, 41 aa, Artificial Sequence
  GFR-binding peptide
  MOD_RES (1)..(3)..(35)..(36): Xaa is C or S
XGXRDVVMGPIKGYIIQQKDNFYLMNIPSMKTPTXXPGASG

SEQ ID NO: 31375 - protein, 36 aa, Artificial Sequence
  GFR-binding peptide
  MOD_RES (1)..(3)..(35)..(36): Xaa is C or S
XGXSEVVMDPIKGYVVNNASDFYLINIPSLRTPVXX

SEQ ID NO: 31376 - protein, 37 aa, Artificial Sequence
  GFR-binding peptide
  MOD_RES (34)..(34): Xaa is C or S
  MOD_RES (12)..(13)..(14)..(15)..(16): Xaa is A or G
  MOD_RES (17)..(18)..(19)..(20): Xaa is A or G or is absent
SRVVMNPIKGYXXXXXXXXXFYLVNIPSLKTPAXTPK

SEQ ID NO: 31377 - protein, 38 aa, Artificial Sequence
  GFR-binding peptide
  MOD_RES (1)..(33)..(34): Xaa is C or S
XESVAMGPIKGYYTVVGKDFYLINIPSLKTPVXXAKSA

SEQ ID NO: 31378 - protein, 38 aa, Artificial Sequence
  GFR-binding peptide
  MOD_RES (1)..(35)..(36): Xaa is C or S
  MOD_RES (13)..(14)..(15)..(16)..(17): Xaa is A or G
  MOD_RES (18)..(19)..(20)..(21): Xaa is A or G or is absent
XGEVVMDPIKGYXXXXXXXXXFYLMNIPSLETPVXXAK

SEQ ID NO: 31379 - protein, 37 aa, Artificial Sequence
  GFR-binding peptide
  MOD_RES (1)..(3)..(35)..(36): Xaa is C or S
XGXARVVMNPIKGYIVNSSDDFYLVNIPSLQTPAXXP

SEQ ID NO: 31380 - protein, 38 aa, Artificial Sequence
  GFR-binding peptide
  MOD_RES (33)..(34): Xaa is C or S
  MOD_RES (11)..(12)..(13)..(14)..(15): Xaa is A or G
  MOD_RES (16)..(17)..(18)..(19): Xaa is A or G or is absent
RVVMNPIKGYXXXXXXXXXFYLVNIPSLQTPAXXPKPV

SEQ ID NO: 31381 - protein, 35 aa, Artificial Sequence
  GFR-binding peptide
  MOD_RES (34)..(35): Xaa is C or S
  MOD_RES (12)..(13)..(14)..(15)..(16): Xaa is A or G
  MOD_RES (17)..(18)..(19)..(20): Xaa is A or G or is absent
GEVVMDPIKGYXXXXXXXXXFYLMNIPSLETPVXX

SEQ ID NO: 31382 - protein, 33 aa, Artificial Sequence
  GFR-binding peptide
  MOD_RES (12)..(13)..(14)..(15)..(16): Xaa is A or G
  MOD_RES (17)..(18)..(19)..(20): Xaa is A or G or is absent
AEVVMDPIKGYXXXXXXXXXFYLINIPSLRAPV

SEQ ID NO: 31383 - protein, 34 aa, Artificial Sequence
  GFR-binding peptide
  MOD_RES (31)..(32): Xaa is C or S
EVVMDPIKGYVVNNASDFYLINIPSLRTPVXXTP

SEQ ID NO: 31384 - protein, 36 aa, Artificial Sequence
  GFR-binding peptide
  MOD_RES (33)..(34): Xaa is C or S
  MOD_RES (11)..(12)..(13)..(14)..(15): Xaa is A or G
  MOD_RES (16)..(17)..(18)..(19): Xaa is A or G or is absent
EVVMDPIKGYXXXXXXXXXFYLINIPSLRAPVXXSA

SEQ ID NO: 31385 - protein, 40 aa, Artificial Sequence
  GFR-binding peptide
  MOD_RES (2)..(4)..(36): Xaa is C or S
HXGXSRVVMNPIKGYIVNSSDDFYLVNIPSLKTPAXTPKT

SEQ ID NO: 31386 - protein, 37 aa, Artificial Sequence
  GFR-binding peptide
  MOD_RES (2)..(4)..(36)..(37): Xaa is C or S
SXGXRDVVMGPIKGYIIQQKDNFYLMNIPSMKTPTXX

SEQ ID NO: 31387 - protein, 39 aa, Artificial Sequence
  GFR-binding peptide
  MOD_RES (1)..(3)..(35)..(36): Xaa is C or S
XGXAKVVMNPIKGYIVNNSSDFYLVNIPSLKTPAXXAKP

SEQ ID NO: 31388 - protein, 42 aa, Artificial Sequence
  GFR-binding peptide
  MOD_RES (1)..(3)..(38)..(39): Xaa is C or S
  MOD_RES (16)..(17)..(18)..(19)..(20): Xaa is A or G
  MOD_RES (21)..(22)..(23)..(24): Xaa is A or G or is absent
XGXEAVSMGEPIKGYXXXXXXXXXFYLVNIPSLKTPVXXAKG

SEQ ID NO: 31389 - protein, 39 aa, Artificial Sequence
  GFR-binding peptide
  MOD_RES (34)..(35): Xaa is C or S
  MOD_RES (12)..(13)..(14)..(15)..(16): Xaa is A or G
  MOD_RES (17)..(18)..(19)..(20): Xaa is A or G or is absent
GEVVMEPIKGYXXXXXXXXXFYLMNIPSLETPVXXAKPI

SEQ ID NO: 31390 - protein, 34 aa, Artificial Sequence
  GFR-binding peptide
  MOD_RES (33)..(34): Xaa is C or S
  MOD_RES (11)..(12)..(13)..(14)..(15): Xaa is A or G
  MOD_RES (16)..(17)..(18)..(19): Xaa is A or G or is absent
EVVMDPIKGYXXXXXXXXXFYLINIPSLRTPVXX

SEQ ID NO: 31391 - protein, 37 aa, Artificial Sequence
  GFR-binding peptide
  MOD_RES (34)..(35): Xaa is C or S
  MOD_RES (12)..(13)..(14)..(15)..(16): Xaa is A or G
  MOD_RES (17)..(18)..(19)..(20): Xaa is A or G or is absent
GEVVMEPIKGYXXXXXXXXXFYLMNIPSLETPVXXAK

SEQ ID NO: 31392 - protein, 34 aa, Artificial Sequence
  GFR-binding peptide
  MOD_RES (32)..(33): Xaa is C or S
GEVVMEPIKGYVVKDYEDFYLMNIPSLETPVXXA

SEQ ID NO: 31393 - protein, 38 aa, Artificial Sequence
  GFR-binding peptide
  MOD_RES (2)..(4)..(36)..(37): Xaa is C or S
RXGXSEVVMDPIKGYVVNNASDFYLINIPSLRTPVXXT

SEQ ID NO: 31394 - protein, 33 aa, Artificial Sequence
  GFR-binding peptide
  MOD_RES (31)..(32): Xaa is C or S
RVVMNPIKGYIVNSSDDFYLVNIPSLKTPAXXP

SEQ ID NO: 31395 - protein, 38 aa, Artificial Sequence
  GFR-binding peptide
  MOD_RES (2)..(4)..(38): Xaa is C or S
  MOD_RES (16)..(17)..(18)..(19)..(20): Xaa is A or G
  MOD_RES (21)..(22)..(23)..(24): Xaa is A or G or is absent
RXGXESVAMGPIKGYXXXXXXXXXFYLINIPSLKTPVX

SEQ ID NO: 31396 - protein, 33 aa, Artificial Sequence
  GFR-binding peptide
  MOD_RES (2)..(2): Xaa is C or S
GXAKVVMNPIKGYIVNNSSDFYLVNIPSLKTPA

SEQ ID NO: 31397 - protein, 37 aa, Artificial Sequence
  GFR-binding peptide
  MOD_RES (1)..(35)..(36): Xaa is C or S
  MOD_RES (13)..(14)..(15)..(16)..(17): Xaa is A or G
  MOD_RES (18)..(19)..(20)..(21): Xaa is A or G or is absent
XSRVVMNPIKGYXXXXXXXXXFYLVNIPSLKTPAXXP

SEQ ID NO: 31398 - protein, 39 aa, Artificial Sequence
  GFR-binding peptide
  MOD_RES (2)..(4)..(38)..(39): Xaa is C or S
  MOD_RES (16)..(17)..(18)..(19)..(20): Xaa is A or G
  MOD_RES (21)..(22)..(23)..(24): Xaa is A or G or is absent
RXGXGEVVMEPIKGYXXXXXXXXXFYLMNIPSLETPVXX

SEQ ID NO: 31399 - protein, 41 aa, Artificial Sequence
  GFR-binding peptide
  MOD_RES (2)..(4)..(38)..(39): Xaa is C or S
  MOD_RES (16)..(17)..(18)..(19)..(20): Xaa is A or G
  MOD_RES (21)..(22)..(23)..(24): Xaa is A or G or is absent
RXGXAEVVMDPIKGYXXXXXXXXXFYLINIPSLRAPVXXSA

SEQ ID NO: 31400 - protein, 40 aa, Artificial Sequence
  GFR-binding peptide
  MOD_RES (1)..(3)..(38)..(39): Xaa is C or S
  MOD_RES (16)..(17)..(18)..(19)..(20): Xaa is A or G
  MOD_RES (21)..(22)..(23)..(24): Xaa is A or G or is absent
XGXEAVSMGEPIKGYXXXXXXXXXFYLVNIPSLKTPVXXA

SEQ ID NO: 31401 - protein, 39 aa, Artificial Sequence
  GFR-binding peptide
  MOD_RES (1)..(3)..(35)..(36): Xaa is C or S
XGXGEVVMDPIKGYVVKENEDFYLMNIPSLETPVXXAKP

SEQ ID NO: 31402 - protein, 33 aa, Artificial Sequence
  GFR-binding peptide
  MOD_RES (2)..(2): Xaa is C or S
GXAEVVMDPIKGYVVNNAADFYLINIPSLRAPV

SEQ ID NO: 31403 - protein, 35 aa, Artificial Sequence
  GFR-binding peptide
  MOD_RES (2)..(2): Xaa is C or S
  MOD_RES (14)..(15)..(16)..(17)..(18): Xaa is A or G
  MOD_RES (19)..(20)..(21)..(22): Xaa is A or G or is absent
GXESVAMGPIKGYXXXXXXXXXFYLINIPSLKTPV

SEQ ID NO: 31404 - protein, 33 aa, Artificial Sequence
  GFR-binding peptide
  MOD_RES (2)..(2): Xaa is C or S
GXSRVVMNPIKGYIVNSSDDFYLVNIPSLKTPA

SEQ ID NO: 31405 - protein, 39 aa, Artificial Sequence
  GFR-binding peptide
  MOD_RES (1)..(3)..(37)..(38): Xaa is C or S
  MOD_RES (15)..(16)..(17)..(18)..(19): Xaa is A or G
  MOD_RES (20)..(21)..(22)..(23): Xaa is A or G or is absent
XGXSEVVMDPIKGYXXXXXXXXXFYLINIPSLRTPVXXT

SEQ ID NO: 31406 - protein, 37 aa, Artificial Sequence
  GFR-binding peptide
  MOD_RES (1)..(35)..(36): Xaa is C or S
  MOD_RES (13)..(14)..(15)..(16)..(17): Xaa is A or G
  MOD_RES (18)..(19)..(20)..(21): Xaa is A or G or is absent
XGEVVMDPIKGYXXXXXXXXXFYLMNIPSLETPVXXA

SEQ ID NO: 31407 - protein, 33 aa, Artificial Sequence
  GFR-binding peptide
  MOD_RES (1)..(33): Xaa is C or S
XESVAMGPIKGYYTVVGKDFYLINIPSLKTPVX

SEQ ID NO: 31408 - protein, 36 aa, Artificial Sequence
  GFR-binding peptide
  MOD_RES (1)..(35)..(36): Xaa is C or S
  MOD_RES (13)..(14)..(15)..(16)..(17): Xaa is A or G
  MOD_RES (18)..(19)..(20)..(21): Xaa is A or G or is absent
XGEVVMDPIKGYXXXXXXXXXFYLMNIPSLETPVXX

SEQ ID NO: 31409 - protein, 35 aa, Artificial Sequence
  GFR-binding peptide
  MOD_RES (33)..(34): Xaa is C or S
EAVSMGEPIKGYTPVGMDDFYLVNIPSLKTPVXXA

SEQ ID NO: 31410 - protein, 42 aa, Artificial Sequence
  GFR-binding peptide
  MOD_RES (1)..(36)..(37): Xaa is C or S
  MOD_RES (14)..(15)..(16)..(17)..(18): Xaa is A or G
  MOD_RES (19)..(20)..(21)..(22): Xaa is A or G or is absent
XEAVSMGEPIKGYXXXXXXXXXFYLVNIPSLKTPVXXAKGVK

SEQ ID NO: 31411 - protein, 39 aa, Artificial Sequence
  GFR-binding peptide
  MOD_RES (1)..(3)..(35)..(36): Xaa is C or S
XGXSEVVMDPIKGYVVNNASDFYLINIPSLRTPVXXTPP

SEQ ID NO: 31412 - protein, 33 aa, Artificial Sequence
  GFR-binding peptide
  MOD_RES (12)..(13)..(14)..(15)..(16): Xaa is A or G
  MOD_RES (17)..(18)..(19)..(20): Xaa is A or G or is absent
RDVVMGPIKGYXXXXXXXXXFYLMNIPSMKTPT

SEQ ID NO: 31413 - protein, 38 aa, Artificial Sequence
  GFR-binding peptide
  MOD_RES (33)..(34): Xaa is C or S
  MOD_RES (11)..(12)..(13)..(14)..(15): Xaa is A or G
  MOD_RES (16)..(17)..(18)..(19): Xaa is A or G or is absent
EVVMDPIKGYXXXXXXXXXFYLINIPSLRAPVXXSAPA

SEQ ID NO: 31414 - protein, 37 aa, Artificial Sequence
  GFR-binding peptide
  MOD_RES (2)..(36)..(37): Xaa is C or S
  MOD_RES (14)..(15)..(16)..(17)..(18): Xaa is A or G
  MOD_RES (19)..(20)..(21)..(22): Xaa is A or G or is absent
GXGEVVMDPIKGYXXXXXXXXXFYLMNIPSLETPVXX

SEQ ID NO: 31415 - protein, 38 aa, Artificial Sequence
  GFR-binding peptide
  MOD_RES (34)..(35): Xaa is C or S
  MOD_RES (12)..(13)..(14)..(15)..(16): Xaa is A or G
  MOD_RES (17)..(18)..(19)..(20): Xaa is A or G or is absent
SRVVMNPIKGYXXXXXXXXXFYLVNIPSLKTPAXXPKP

SEQ ID NO: 31416 - protein, 33 aa, Artificial Sequence
  GFR-binding peptide
  MOD_RES (2)..(2): Xaa is C or S
GXSEVVMDPIKGYVVNNASDFYLINIPSLRTPV

SEQ ID NO: 31417 - protein, 35 aa, Artificial Sequence
  GFR-binding peptide
  MOD_RES (32)..(33): Xaa is C or S
AEVVMDPIKGYVVNNAADFYLINIPSLRAPVXXSA

SEQ ID NO: 31418 - protein, 35 aa, Artificial Sequence
  GFR-binding peptide
  MOD_RES (1)..(3)..(34)..(35): Xaa is C or S
XGXEEVIMPIKGYLLVRGNDFYLMNIPSTKVPAXX

SEQ ID NO: 31419 - protein, 42 aa, Artificial Sequence
  GFR-binding peptide
  MOD_RES (2)..(4)..(36)..(37): Xaa is C or S
RXGXESVAMGPIKGYYTVVGKDFYLINIPSLKTPVXXAKSAK

SEQ ID NO: 31420 - protein, 35 aa, Artificial Sequence
  GFR-binding peptide
  MOD_RES (33)..(34): Xaa is C or S
  MOD_RES (11)..(12)..(13)..(14)..(15): Xaa is A or G
  MOD_RES (16)..(17)..(18)..(19): Xaa is A or G or is absent
EEVIMPIKGYXXXXXXXXXFYLMNIPSTKVPAXXT

SEQ ID NO: 31421 - protein, 39 aa, Artificial Sequence
  GFR-binding peptide
  MOD_RES (1)..(3)..(37)..(38): Xaa is C or S
  MOD_RES (15)..(16)..(17)..(18)..(19): Xaa is A or G
  MOD_RES (20)..(21)..(22)..(23): Xaa is A or G or is absent
XGXAKVVMNPIKGYXXXXXXXXXFYLVNIPSLKTPAXXA

SEQ ID NO: 31422 - protein, 33 aa, Artificial Sequence
  GFR-binding peptide
  MOD_RES (32)..(33): Xaa is C or S
GEVVMDPIKGYVVKENEDFYLMNIPSLETPVXX

SEQ ID NO: 31423 - protein, 38 aa, Artificial Sequence
  GFR-binding peptide
  MOD_RES (34)..(35): Xaa is C or S
  MOD_RES (12)..(13)..(14)..(15)..(16): Xaa is A or G
  MOD_RES (17)..(18)..(19)..(20): Xaa is A or G or is absent
GEVVMDPIKGYXXXXXXXXXFYLMNIPSLETPVXXAKP

SEQ ID NO: 31424 - protein, 35 aa, Artificial Sequence
  GFR-binding peptide
  MOD_RES (1)..(3)..(35): Xaa is C or S
XGXGEVVMDPIKGYVVKENEDFYLMNIPSLETPVX

SEQ ID NO: 31425 - protein, 40 aa, Artificial Sequence
  GFR-binding peptide
  MOD_RES (2)..(4)..(36)..(37): Xaa is C or S
HXGXARVVMNPIKGYIVNSSDDFYLVNIPSLQTPAXXPKP

SEQ ID NO: 31426 - protein, 41 aa, Artificial Sequence
  GFR-binding peptide
  MOD_RES (1)..(3)..(35)..(36): Xaa is C or S
XGXESVAMGPIKGYYTVVGKDFYLINIPSLKTPVXXAKSAK

SEQ ID NO: 31427 - protein, 32 aa, Artificial Sequence
  GFR-binding peptide
  MOD_RES (31)..(32): Xaa is C or S
RVVMNPIKGYIVNSSDDFYLVNIPSLKTPAXX

SEQ ID NO: 31428 - protein, 43 aa, Artificial Sequence
  GFR-binding peptide
  MOD_RES (1)..(3)..(37)..(38): Xaa is C or S
  MOD_RES (15)..(16)..(17)..(18)..(19): Xaa is A or G
  MOD_RES (20)..(21)..(22)..(23): Xaa is A or G or is absent
XGXSEVVMDPIKGYXXXXXXXXXFYLINIPSLRTPVXXTPPTS

SEQ ID NO: 31429 - protein, 38 aa, Artificial Sequence
  GFR-binding peptide
  MOD_RES (1)..(3)..(35)..(36): Xaa is C or S
XGXESVAMGPIKGYYTVVGKDFYLINIPSLKTPVXXAK

SEQ ID NO: 31430 - protein, 38 aa, Artificial Sequence
  GFR-binding peptide
  MOD_RES (32)..(33): Xaa is C or S
AEVVMDPIKGYVVNNAADFYLINIPSLRAPVXXSAPAA

SEQ ID NO: 31431 - protein, 44 aa, Artificial Sequence
  GFR-binding peptide
  MOD_RES (2)..(4)..(38)..(39): Xaa is C or S
  MOD_RES (16)..(17)..(18)..(19)..(20): Xaa is A or G
  MOD_RES (21)..(22)..(23)..(24): Xaa is A or G or is absent
RXGXSEVVMDPIKGYXXXXXXXXXFYLINIPSLRTPVXXTPPTS

SEQ ID NO: 31432 - protein, 41 aa, Artificial Sequence
  GFR-binding peptide
  MOD_RES (2)..(4)..(36)..(37): Xaa is C or S
RXGXSEVVMDPIKGYVVNNASDFYLINIPSLRTPVXXTPPT

SEQ ID NO: 31433 - protein, 36 aa, Artificial Sequence
  GFR-binding peptide
  MOD_RES (2)..(4): Xaa is C or S
RXGXEAVSMGEPIKGYTPVGMDDFYLVNIPSLKTPV

SEQ ID NO: 31434 - protein, 41 aa, Artificial Sequence
  GFR-binding peptide
  MOD_RES (1)..(3)..(35)..(36): Xaa is C or S
XGXARVVMNPIKGYIVNSSDDFYLVNIPSLQTPAXXPKPVT

SEQ ID NO: 31435 - protein, 33 aa, Artificial Sequence
  GFR-binding peptide
  MOD_RES (33)..(33): Xaa is C or S
  MOD_RES (11)..(12)..(13)..(14)..(15): Xaa is A or G
  MOD_RES (16)..(17)..(18)..(19): Xaa is A or G or is absent
RVVMNPIKGYXXXXXXXXXFYLVNIPSLQTPAX

SEQ ID NO: 31436 - protein, 35 aa, Artificial Sequence
  GFR-binding peptide
  MOD_RES (2)..(33)..(34): Xaa is C or S
GXEEVIMPIKGYLLVRGNDFYLMNIPSTKVPAXXT

SEQ ID NO: 31437 - protein, 34 aa, Artificial Sequence
  GFR-binding peptide
  MOD_RES (1)..(33)..(34): Xaa is C or S
XSEVVMDPIKGYVVNNASDFYLINIPSLRTPVXX

SEQ ID NO: 31438 - protein, 35 aa, Artificial Sequence
  GFR-binding peptide
  MOD_RES (32)..(33): Xaa is C or S
ESVAMGPIKGYYTVVGKDFYLINIPSLKTPVXXAK

SEQ ID NO: 31439 - protein, 43 aa, Artificial Sequence
  GFR-binding peptide
  MOD_RES (2)..(37)..(38): Xaa is C or S
  MOD_RES (15)..(16)..(17)..(18)..(19): Xaa is A or G
  MOD_RES (20)..(21)..(22)..(23): Xaa is A or G or is absent
GXEAVSMGEPIKGYXXXXXXXXXFYLVNIPSLKTPVXXAKGVK

SEQ ID NO: 31440 - protein, 43 aa, Artificial Sequence
  GFR-binding peptide
  MOD_RES (2)..(4)..(38)..(39): Xaa is C or S
  MOD_RES (16)..(17)..(18)..(19)..(20): Xaa is A or G
  MOD_RES (21)..(22)..(23)..(24): Xaa is A or G or is absent
HXGXARVVMNPIKGYXXXXXXXXXFYLVNIPSLQTPAXXPKPV

SEQ ID NO: 31441 - protein, 40 aa, Artificial Sequence
  GFR-binding peptide
  MOD_RES (1)..(3)..(35)..(36): Xaa is C or S
XGXSEVVMDPIKGYVVNNASDFYLINIPSLRTPVXXTPPT

SEQ ID NO: 31442 - protein, 36 aa, Artificial Sequence
  GFR-binding peptide
  MOD_RES (1)..(3): Xaa is C or S
  MOD_RES (15)..(16)..(17)..(18)..(19): Xaa is A or G
  MOD_RES (20)..(21)..(22)..(23): Xaa is A or G or is absent
XGXRDVVMGPIKGYXXXXXXXXXFYLMNIPSMKTPT

SEQ ID NO: 31443 - protein, 33 aa, Artificial Sequence
  GFR-binding peptide
  MOD_RES (33)..(33): Xaa is C or S
EAVSMGEPIKGYTPVGMDDFYLVNIPSLKTPVX

SEQ ID NO: 31444 - protein, 38 aa, Artificial Sequence
  GFR-binding peptide
  MOD_RES (33)..(33): Xaa is C or S
  MOD_RES (11)..(12)..(13)..(14)..(15): Xaa is A or G
  MOD_RES (16)..(17)..(18)..(19): Xaa is A or G or is absent
RVVMNPIKGYXXXXXXXXXFYLVNIPSLKTPAXTPKTV

SEQ ID NO: 31445 - protein, 44 aa, Artificial Sequence
  GFR-binding peptide
  MOD_RES (1)..(3)..(38)..(39): Xaa is C or S
  MOD_RES (16)..(17)..(18)..(19)..(20): Xaa is A or G
  MOD_RES (21)..(22)..(23)..(24): Xaa is A or G or is absent
XGXEAVSMGEPIKGYXXXXXXXXXFYLVNIPSLKTPVXXAKGVK

SEQ ID NO: 31446 - protein, 38 aa, Artificial Sequence
  GFR-binding peptide
  MOD_RES (2)..(34)..(35): Xaa is C or S
GXESVAMGPIKGYYTVVGKDFYLINIPSLKTPVXXAKS

SEQ ID NO: 31447 - protein, 39 aa, Artificial Sequence
  GFR-binding peptide
  MOD_RES (35)..(36): Xaa is C or S
  MOD_RES (13)..(14)..(15)..(16)..(17): Xaa is A or G
  MOD_RES (18)..(19)..(20)..(21): Xaa is A or G or is absent
EAVSMGEPIKGYXXXXXXXXXFYLVNIPSLKTPVXXAKG

SEQ ID NO: 31448 - protein, 41 aa, Artificial Sequence
  GFR-binding peptide
  MOD_RES (1)..(35)..(36): Xaa is C or S
  MOD_RES (13)..(14)..(15)..(16)..(17): Xaa is A or G
  MOD_RES (18)..(19)..(20)..(21): Xaa is A or G or is absent
XSRVVMNPIKGYXXXXXXXXXFYLVNIPSLKTPAXXPKPVY

SEQ ID NO: 31449 - protein, 41 aa, Artificial Sequence
  GFR-binding peptide
  MOD_RES (1)..(35)..(36): Xaa is C or S
  MOD_RES (13)..(14)..(15)..(16)..(17): Xaa is A or G
  MOD_RES (18)..(19)..(20)..(21): Xaa is A or G or is absent
XAEVVMDPIKGYXXXXXXXXXFYLINIPSLRAPVXXSAPAA

SEQ ID NO: 31450 - protein, 33 aa, Artificial Sequence
  GFR-binding peptide
  MOD_RES (1)..(33): Xaa is C or S
XARVVMNPIKGYIVNSSDDFYLVNIPSLQTPAX

SEQ ID NO: 31451 - protein, 34 aa, Artificial Sequence
  GFR-binding peptide
  MOD_RES (1)..(1): Xaa is C or S
  MOD_RES (13)..(14)..(15)..(16)..(17): Xaa is A or G
  MOD_RES (18)..(19)..(20)..(21): Xaa is A or G or is absent
XAKVVMNPIKGYXXXXXXXXXFYLVNIPSLKTPA

SEQ ID NO: 31452 - protein, 33 aa, Artificial Sequence
  GFR-binding peptide
  MOD_RES (1)..(1): Xaa is C or S
  MOD_RES (12)..(13)..(14)..(15)..(16): Xaa is A or G
  MOD_RES (17)..(18)..(19)..(20): Xaa is A or G or is absent
XEEVIMPIKGYXXXXXXXXXFYLMNIPSTKVPA

SEQ ID NO: 31453 - protein, 35 aa, Artificial Sequence
  GFR-binding peptide
  MOD_RES (2)..(4): Xaa is C or S
RXGXSEVVMDPIKGYVVNNASDFYLINIPSLRTPV

SEQ ID NO: 31454 - protein, 39 aa, Artificial Sequence
  GFR-binding peptide
  MOD_RES (1)..(3)..(36)..(37): Xaa is C or S
XGXEAVSMGEPIKGYTPVGMDDFYLVNIPSLKTPVXXAK

SEQ ID NO: 31455 - protein, 34 aa, Artificial Sequence
  GFR-binding peptide
  MOD_RES (32)..(33): Xaa is C or S
AKVVMNPIKGYIVNNSSDFYLVNIPSLKTPAXXA

SEQ ID NO: 31456 - protein, 32 aa, Artificial Sequence
  GFR-binding peptide
  MOD_RES (32)..(32): Xaa is C or S
ARVVMNPIKGYIVNSSDDFYLVNIPSLQTPAX

SEQ ID NO: 31457 - protein, 39 aa, Artificial Sequence
  GFR-binding peptide
  MOD_RES (1)..(3)..(35)..(36): Xaa is C or S
XGXGEVVMEPIKGYVVKDYEDFYLMNIPSLETPVXXAKP

SEQ ID NO: 31458 - protein, 38 aa, Artificial Sequence
  GFR-binding peptide
  MOD_RES (33)..(34): Xaa is C or S
  MOD_RES (11)..(12)..(13)..(14)..(15): Xaa is A or G
  MOD_RES (16)..(17)..(18)..(19): Xaa is A or G or is absent
SVAMGPIKGYXXXXXXXXXFYLINIPSLKTPVXXAKSA

SEQ ID NO: 31459 - protein, 42 aa, Artificial Sequence
  GFR-binding peptide
  MOD_RES (1)..(3)..(37)..(38): Xaa is C or S
  MOD_RES (15)..(16)..(17)..(18)..(19): Xaa is A or G
  MOD_RES (20)..(21)..(22)..(23): Xaa is A or G or is absent
XGXGEVVMEPIKGYXXXXXXXXXFYLMNIPSLETPVXXAKPI

SEQ ID NO: 31460 - protein, 36 aa, Artificial Sequence
  GFR-binding peptide
  MOD_RES (1)..(33)..(34): Xaa is C or S
XSEVVMDPIKGYVVNNASDFYLINIPSLRTPVXXTP

SEQ ID NO: 31461 - protein, 41 aa, Artificial Sequence
  GFR-binding peptide
  MOD_RES (2)..(36)..(37): Xaa is C or S
  MOD_RES (14)..(15)..(16)..(17)..(18): Xaa is A or G
  MOD_RES (19)..(20)..(21)..(22): Xaa is A or G or is absent
GXRDVVMGPIKGYXXXXXXXXXFYLMNIPSMKTPTXXPGAS

SEQ ID NO: 31462 - protein, 41 aa, Artificial Sequence
  GFR-binding peptide
  MOD_RES (1)..(36)..(37): Xaa is C or S
  MOD_RES (14)..(15)..(16)..(17)..(18): Xaa is A or G
  MOD_RES (19)..(20)..(21)..(22): Xaa is A or G or is absent
XEAVSMGEPIKGYXXXXXXXXXFYLVNIPSLKTPVXXAKGV

SEQ ID NO: 31463 - protein, 34 aa, Artificial Sequence
  GFR-binding peptide
  MOD_RES (33)..(34): Xaa is C or S
  MOD_RES (11)..(12)..(13)..(14)..(15): Xaa is A or G
  MOD_RES (16)..(17)..(18)..(19): Xaa is A or G or is absent
SVAMGPIKGYXXXXXXXXXFYLINIPSLKTPVXX

SEQ ID NO: 31464 - protein, 36 aa, Artificial Sequence
  GFR-binding peptide
  MOD_RES (2)..(36): Xaa is C or S
  MOD_RES (14)..(15)..(16)..(17)..(18): Xaa is A or G
  MOD_RES (19)..(20)..(21)..(22): Xaa is A or G or is absent
GXRDVVMGPIKGYXXXXXXXXXFYLMNIPSMKTPTX

SEQ ID NO: 31465 - protein, 37 aa, Artificial Sequence
  GFR-binding peptide
  MOD_RES (33)..(34): Xaa is C or S
  MOD_RES (11)..(12)..(13)..(14)..(15): Xaa is A or G
  MOD_RES (16)..(17)..(18)..(19): Xaa is A or G or is absent
DVVMGPIKGYXXXXXXXXXFYLMNIPSMKTPTXXPGA

SEQ ID NO: 31466 - protein, 32 aa, Artificial Sequence
  GFR-binding peptide
  MOD_RES (31)..(32): Xaa is C or S
SVAMGPIKGYYTVVGKDFYLINIPSLKTPVXX

SEQ ID NO: 31467 - protein, 38 aa, Artificial Sequence
  GFR-binding peptide
  MOD_RES (2)..(4)..(36)..(37): Xaa is C or S
HXGXAKVVMNPIKGYIVNNSSDFYLVNIPSLKTPAXXA

SEQ ID NO: 31468 - protein, 37 aa, Artificial Sequence
  GFR-binding peptide
  MOD_RES (2)..(36)..(37): Xaa is C or S
  MOD_RES (14)..(15)..(16)..(17)..(18): Xaa is A or G
  MOD_RES (19)..(20)..(21)..(22): Xaa is A or G or is absent
GXAKVVMNPIKGYXXXXXXXXXFYLVNIPSLKTPAXX

SEQ ID NO: 31469 - protein, 36 aa, Artificial Sequence
  GFR-binding peptide
  MOD_RES (32)..(33): Xaa is C or S
AEVVMDPIKGYVVNNAADFYLINIPSLRAPVXXSAP

SEQ ID NO: 31470 - protein, 31 aa, Artificial Sequence
  GFR-binding peptide
  MOD_RES (1)..(1): Xaa is C or S
XEEVIMPIKGYLLVRGNDFYLMNIPSTKVPA

SEQ ID NO: 31471 - protein, 34 aa, Artificial Sequence
  GFR-binding peptide
  MOD_RES (2)..(4): Xaa is C or S
LXGXEEVIMPIKGYLLVRGNDFYLMNIPSTKVPA

SEQ ID NO: 31472 - protein, 40 aa, Artificial Sequence
  GFR-binding peptide
  MOD_RES (1)..(3)..(37)..(38): Xaa is C or S
  MOD_RES (15)..(16)..(17)..(18)..(19): Xaa is A or G
  MOD_RES (20)..(21)..(22)..(23): Xaa is A or G or is absent
XGXGEVVMDPIKGYXXXXXXXXXFYLMNIPSLETPVXXAK

SEQ ID NO: 31473 - protein, 39 aa, Artificial Sequence
  GFR-binding peptide
  MOD_RES (1)..(33)..(34): Xaa is C or S
XAKVVMNPIKGYIVNNSSDFYLVNIPSLKTPAXXAKPVA

SEQ ID NO: 31474 - protein, 39 aa, Artificial Sequence
  GFR-binding peptide
  MOD_RES (1)..(3)..(35)..(36): Xaa is C or S
XGXRDVVMGPIKGYIIQQKDNFYLMNIPSMKTPTXXPGA

SEQ ID NO: 31475 - protein, 35 aa, Artificial Sequence
  GFR-binding peptide
  MOD_RES (33)..(34): Xaa is C or S
  MOD_RES (11)..(12)..(13)..(14)..(15): Xaa is A or G
  MOD_RES (16)..(17)..(18)..(19): Xaa is A or G or is absent
EVVMEPIKGYXXXXXXXXXFYLMNIPSLETPVXXA

SEQ ID NO: 31476 - protein, 42 aa, Artificial Sequence
  GFR-binding peptide
  MOD_RES (2)..(4)..(36)..(37): Xaa is C or S
RXGXSEVVMDPIKGYVVNNASDFYLINIPSLRTPVXXTPPTS

SEQ ID NO: 31477 - protein, 41 aa, Artificial Sequence
  GFR-binding peptide
  MOD_RES (2)..(4)..(36)..(37): Xaa is C or S
RXGXESVAMGPIKGYYTVVGKDFYLINIPSLKTPVXXAKSA

SEQ ID NO: 31478 - protein, 30 aa, Artificial Sequence
  GFR-binding peptide
DVVMGPIKGYIIQQKDNFYLMNIPSMKTPT

SEQ ID NO: 31479 - protein, 39 aa, Artificial Sequence
  GFR-binding peptide
  MOD_RES (2)..(4)..(38)..(39): Xaa is C or S
  MOD_RES (16)..(17)..(18)..(19)..(20): Xaa is A or G
  MOD_RES (21)..(22)..(23)..(24): Xaa is A or G or is absent
RXGXSEVVMDPIKGYXXXXXXXXXFYLINIPSLRTPVXX

SEQ ID NO: 31480 - protein, 42 aa, Artificial Sequence
  GFR-binding peptide
  MOD_RES (2)..(36)..(37): Xaa is C or S
  MOD_RES (14)..(15)..(16)..(17)..(18): Xaa is A or G
  MOD_RES (19)..(20)..(21)..(22): Xaa is A or G or is absent
GXRDVVMGPIKGYXXXXXXXXXFYLMNIPSMKTPTXXPGASG

SEQ ID NO: 31481 - protein, 37 aa, Artificial Sequence
  GFR-binding peptide
  MOD_RES (2)..(36)..(37): Xaa is C or S
  MOD_RES (14)..(15)..(16)..(17)..(18): Xaa is A or G
  MOD_RES (19)..(20)..(21)..(22): Xaa is A or G or is absent
GXARVVMNPIKGYXXXXXXXXXFYLVNIPSLQTPAXX

SEQ ID NO: 31482 - protein, 39 aa, Artificial Sequence
  GFR-binding peptide
  MOD_RES (2)..(36)..(37): Xaa is C or S
  MOD_RES (14)..(15)..(16)..(17)..(18): Xaa is A or G
  MOD_RES (19)..(20)..(21)..(22): Xaa is A or G or is absent
GXAEVVMDPIKGYXXXXXXXXXFYLINIPSLRAPVXXSA

SEQ ID NO: 31483 - protein, 37 aa, Artificial Sequence
  GFR-binding peptide
  MOD_RES (1)..(33)..(34): Xaa is C or S
XGEVVMDPIKGYVVKENEDFYLMNIPSLETPVXXAKP

SEQ ID NO: 31484 - protein, 41 aa, Artificial Sequence
  GFR-binding peptide
  MOD_RES (2)..(4)..(36)..(37): Xaa is C or S
HXGXSRVVMNPIKGYIVNSSDDFYLVNIPSLKTPAXXPKPV

SEQ ID NO: 31485 - protein, 39 aa, Artificial Sequence
  GFR-binding peptide
  MOD_RES (34)..(35): Xaa is C or S
  MOD_RES (12)..(13)..(14)..(15)..(16): Xaa is A or G
  MOD_RES (17)..(18)..(19)..(20): Xaa is A or G or is absent
SEVVMDPIKGYXXXXXXXXXFYLINIPSLRTPVXXTPPT

SEQ ID NO: 31486 - protein, 36 aa, Artificial Sequence
  GFR-binding peptide
  MOD_RES (1)..(3): Xaa is C or S
  MOD_RES (15)..(16)..(17)..(18)..(19): Xaa is A or G
  MOD_RES (20)..(21)..(22)..(23): Xaa is A or G or is absent
XGXSRVVMNPIKGYXXXXXXXXXFYLVNIPSLKTPA

SEQ ID NO: 31487 - protein, 37 aa, Artificial Sequence
  GFR-binding peptide
  MOD_RES (1)..(3)..(35)..(36): Xaa is C or S
XGXGEVVMDPIKGYVVKENEDFYLMNIPSLETPVXXA

SEQ ID NO: 31488 - protein, 33 aa, Artificial Sequence
  GFR-binding peptide
  MOD_RES (2)..(33): Xaa is C or S
GXEEVIMPIKGYLLVRGNDFYLMNIPSTKVPAX

SEQ ID NO: 31489 - protein, 36 aa, Artificial Sequence
  GFR-binding peptide
  MOD_RES (2)..(35)..(36): Xaa is C or S
  MOD_RES (13)..(14)..(15)..(16)..(17): Xaa is A or G
  MOD_RES (18)..(19)..(20)..(21): Xaa is A or G or is absent
GXEEVIMPIKGYXXXXXXXXXFYLMNIPSTKVPAXX

SEQ ID NO: 31490 - protein, 34 aa, Artificial Sequence
  GFR-binding peptide
  MOD_RES (1)..(1): Xaa is C or S
  MOD_RES (13)..(14)..(15)..(16)..(17): Xaa is A or G
  MOD_RES (18)..(19)..(20)..(21): Xaa is A or G or is absent
XSEVVMDPIKGYXXXXXXXXXFYLINIPSLRTPV

SEQ ID NO: 31491 - protein, 35 aa, Artificial Sequence
  GFR-binding peptide
  MOD_RES (2)..(34)..(35): Xaa is C or S
GXAKVVMNPIKGYIVNNSSDFYLVNIPSLKTPAXX

SEQ ID NO: 31492 - protein, 41 aa, Artificial Sequence
  GFR-binding peptide
  MOD_RES (2)..(4)..(38)..(39): Xaa is C or S
  MOD_RES (16)..(17)..(18)..(19)..(20): Xaa is A or G
  MOD_RES (21)..(22)..(23)..(24): Xaa is A or G or is absent
HXGXARVVMNPIKGYXXXXXXXXXFYLVNIPSLQTPAXXPK

SEQ ID NO: 31493 - protein, 43 aa, Artificial Sequence
  GFR-binding peptide
  MOD_RES (1)..(3)..(37)..(38): Xaa is C or S
  MOD_RES (15)..(16)..(17)..(18)..(19): Xaa is A or G
  MOD_RES (20)..(21)..(22)..(23): Xaa is A or G or is absent
XGXAEVVMDPIKGYXXXXXXXXXFYLINIPSLRAPVXXSAPAA

SEQ ID NO: 31494 - protein, 36 aa, Artificial Sequence
  GFR-binding peptide
  MOD_RES (1)..(33): Xaa is C or S
XSRVVMNPIKGYIVNSSDDFYLVNIPSLKTPAXTPK

SEQ ID NO: 31495 - protein, 35 aa, Artificial Sequence
  GFR-binding peptide
  MOD_RES (33)..(34): Xaa is C or S
  MOD_RES (11)..(12)..(13)..(14)..(15): Xaa is A or G
  MOD_RES (16)..(17)..(18)..(19): Xaa is A or G or is absent
RVVMNPIKGYXXXXXXXXXFYLVNIPSLKTPAXXP

SEQ ID NO: 31496 - protein, 36 aa, Artificial Sequence
  GFR-binding peptide
  MOD_RES (2)..(36): Xaa is C or S
  MOD_RES (14)..(15)..(16)..(17)..(18): Xaa is A or G
  MOD_RES (19)..(20)..(21)..(22): Xaa is A or G or is absent
GXSEVVMDPIKGYXXXXXXXXXFYLINIPSLRTPVX

SEQ ID NO: 31497 - protein, 35 aa, Artificial Sequence
  GFR-binding peptide
  MOD_RES (1)..(34)..(35): Xaa is C or S
  MOD_RES (12)..(13)..(14)..(15)..(16): Xaa is A or G
  MOD_RES (17)..(18)..(19)..(20): Xaa is A or G or is absent
XEEVIMPIKGYXXXXXXXXXFYLMNIPSTKVPAXX

SEQ ID NO: 31498 - protein, 32 aa, Artificial Sequence
  GFR-binding peptide
  MOD_RES (11)..(12)..(13)..(14)..(15): Xaa is A or G
  MOD_RES (16)..(17)..(18)..(19): Xaa is A or G or is absent
EVVMDPIKGYXXXXXXXXXFYLINIPSLRTPV

SEQ ID NO: 31499 - protein, 32 aa, Artificial Sequence
  GFR-binding peptide
  MOD_RES (31)..(32): Xaa is C or S
EEVIMPIKGYLLVRGNDFYLMNIPSTKVPAXX

SEQ ID NO: 31500 - protein, 40 aa, Artificial Sequence
  GFR-binding peptide
  MOD_RES (1)..(36)..(37): Xaa is C or S
  MOD_RES (14)..(15)..(16)..(17)..(18): Xaa is A or G
  MOD_RES (19)..(20)..(21)..(22): Xaa is A or G or is absent
XEAVSMGEPIKGYXXXXXXXXXFYLVNIPSLKTPVXXAKG

SEQ ID NO: 31501 - protein, 32 aa, Artificial Sequence
  GFR-binding peptide
  MOD_RES (11)..(12)..(13)..(14)..(15): Xaa is A or G
  MOD_RES (16)..(17)..(18)..(19): Xaa is A or G or is absent
EVVMDPIKGYXXXXXXXXXFYLINIPSLRAPV

SEQ ID NO: 31502 - protein, 36 aa, Artificial Sequence
  GFR-binding peptide
  MOD_RES (2)..(4)..(36): Xaa is C or S
RXGXGEVVMEPIKGYVVKDYEDFYLMNIPSLETPVX

SEQ ID NO: 31503 - protein, 35 aa, Artificial Sequence
  GFR-binding peptide
  MOD_RES (32)..(33): Xaa is C or S
RDVVMGPIKGYIIQQKDNFYLMNIPSMKTPTXXPG

SEQ ID NO: 31504 - protein, 38 aa, Artificial Sequence
  GFR-binding peptide
  MOD_RES (34)..(35): Xaa is C or S
  MOD_RES (12)..(13)..(14)..(15)..(16): Xaa is A or G
  MOD_RES (17)..(18)..(19)..(20): Xaa is A or G or is absent
RDVVMGPIKGYXXXXXXXXXFYLMNIPSMKTPTXXPGA

SEQ ID NO: 31505 - protein, 42 aa, Artificial Sequence
  GFR-binding peptide
  MOD_RES (1)..(3)..(37)..(38): Xaa is C or S
  MOD_RES (15)..(16)..(17)..(18)..(19): Xaa is A or G
  MOD_RES (20)..(21)..(22)..(23): Xaa is A or G or is absent
XGXESVAMGPIKGYXXXXXXXXXFYLINIPSLKTPVXXAKSA

SEQ ID NO: 31506 - protein, 39 aa, Artificial Sequence
  GFR-binding peptide
  MOD_RES (1)..(34)..(35): Xaa is C or S
  MOD_RES (12)..(13)..(14)..(15)..(16): Xaa is A or G
  MOD_RES (17)..(18)..(19)..(20): Xaa is A or G or is absent
XEEVIMPIKGYXXXXXXXXXFYLMNIPSTKVPAXXTSPV

SEQ ID NO: 31507 - protein, 43 aa, Artificial Sequence
  GFR-binding peptide
  MOD_RES (1)..(3)..(37)..(38): Xaa is C or S
  MOD_RES (15)..(16)..(17)..(18)..(19): Xaa is A or G
  MOD_RES (20)..(21)..(22)..(23): Xaa is A or G or is absent
XGXGEVVMEPIKGYXXXXXXXXXFYLMNIPSLETPVXXAKPIS

SEQ ID NO: 31508 - protein, 43 aa, Artificial Sequence
  GFR-binding peptide
  MOD_RES (2)..(4)..(38)..(39): Xaa is C or S
  MOD_RES (16)..(17)..(18)..(19)..(20): Xaa is A or G
  MOD_RES (21)..(22)..(23)..(24): Xaa is A or G or is absent
RXGXAEVVMDPIKGYXXXXXXXXXFYLINIPSLRAPVXXSAPA

SEQ ID NO: 31509 - protein, 42 aa, Artificial Sequence
  GFR-binding peptide
  MOD_RES (2)..(4)..(36)..(37): Xaa is C or S
RXGXAEVVMDPIKGYVVNNAADFYLINIPSLRAPVXXSAPAA

SEQ ID NO: 31510 - protein, 35 aa, Artificial Sequence
  GFR-binding peptide
  MOD_RES (34)..(35): Xaa is C or S
  MOD_RES (12)..(13)..(14)..(15)..(16): Xaa is A or G
  MOD_RES (17)..(18)..(19)..(20): Xaa is A or G or is absent
SEVVMDPIKGYXXXXXXXXXFYLINIPSLRTPVXX

SEQ ID NO: 31511 - protein, 37 aa, Artificial Sequence
  GFR-binding peptide
  MOD_RES (1)..(3)..(37): Xaa is C or S
  MOD_RES (15)..(16)..(17)..(18)..(19): Xaa is A or G
  MOD_RES (20)..(21)..(22)..(23): Xaa is A or G or is absent
XGXSRVVMNPIKGYXXXXXXXXXFYLVNIPSLKTPAX

SEQ ID NO: 31512 - protein, 33 aa, Artificial Sequence
  GFR-binding peptide
  MOD_RES (33)..(33): Xaa is C or S
  MOD_RES (11)..(12)..(13)..(14)..(15): Xaa is A or G
  MOD_RES (16)..(17)..(18)..(19): Xaa is A or G or is absent
EEVIMPIKGYXXXXXXXXXFYLMNIPSTKVPAX

SEQ ID NO: 31513 - protein, 37 aa, Artificial Sequence
  GFR-binding peptide
  MOD_RES (31)..(32): Xaa is C or S
RVVMNPIKGYIVNSSDDFYLVNIPSLKTPAXXPKPVH

SEQ ID NO: 31514 - protein, 41 aa, Artificial Sequence
  GFR-binding peptide
  MOD_RES (2)..(36): Xaa is C or S
  MOD_RES (14)..(15)..(16)..(17)..(18): Xaa is A or G
  MOD_RES (19)..(20)..(21)..(22): Xaa is A or G or is absent
GXSRVVMNPIKGYXXXXXXXXXFYLVNIPSLKTPAXTPKTV

SEQ ID NO: 31515 - protein, 37 aa, Artificial Sequence
  GFR-binding peptide
  MOD_RES (2)..(4)..(37): Xaa is C or S
RXGXEAVSMGEPIKGYTPVGMDDFYLVNIPSLKTPVX

SEQ ID NO: 31516 - protein, 40 aa, Artificial Sequence
  GFR-binding peptide
  MOD_RES (1)..(3)..(37)..(38): Xaa is C or S
  MOD_RES (15)..(16)..(17)..(18)..(19): Xaa is A or G
  MOD_RES (20)..(21)..(22)..(23): Xaa is A or G or is absent
XGXSRVVMNPIKGYXXXXXXXXXFYLVNIPSLKTPAXXPK

SEQ ID NO: 31517 - protein, 38 aa, Artificial Sequence
  GFR-binding peptide
  MOD_RES (2)..(34)..(35): Xaa is C or S
GXARVVMNPIKGYIVNSSDDFYLVNIPSLQTPAXXPKP

SEQ ID NO: 31518 - protein, 33 aa, Artificial Sequence
  GFR-binding peptide
  MOD_RES (31)..(32): Xaa is C or S
EVVMDPIKGYVVKENEDFYLMNIPSLETPVXXA

SEQ ID NO: 31519 - protein, 36 aa, Artificial Sequence
  GFR-binding peptide
  MOD_RES (33)..(34): Xaa is C or S
  MOD_RES (11)..(12)..(13)..(14)..(15): Xaa is A or G
  MOD_RES (16)..(17)..(18)..(19): Xaa is A or G or is absent
EVVMDPIKGYXXXXXXXXXFYLINIPSLRTPVXXTP

SEQ ID NO: 31520 - protein, 39 aa, Artificial Sequence
  GFR-binding peptide
  MOD_RES (2)..(36)..(37): Xaa is C or S
  MOD_RES (14)..(15)..(16)..(17)..(18): Xaa is A or G
  MOD_RES (19)..(20)..(21)..(22): Xaa is A or G or is absent
GXGEVVMEPIKGYXXXXXXXXXFYLMNIPSLETPVXXAK

SEQ ID NO: 31521 - protein, 38 aa, Artificial Sequence
  GFR-binding peptide
  MOD_RES (1)..(35): Xaa is C or S
  MOD_RES (13)..(14)..(15)..(16)..(17): Xaa is A or G
  MOD_RES (18)..(19)..(20)..(21): Xaa is A or G or is absent
XSRVVMNPIKGYXXXXXXXXXFYLVNIPSLKTPAXTPK

SEQ ID NO: 31522 - protein, 38 aa, Artificial Sequence
  GFR-binding peptide
  MOD_RES (2)..(4)..(36): Xaa is C or S
HXGXSRVVMNPIKGYIVNSSDDFYLVNIPSLKTPAXTP

SEQ ID NO: 31523 - protein, 42 aa, Artificial Sequence
  GFR-binding peptide
  MOD_RES (2)..(36)..(37): Xaa is C or S
  MOD_RES (14)..(15)..(16)..(17)..(18): Xaa is A or G
  MOD_RES (19)..(20)..(21)..(22): Xaa is A or G or is absent
GXSRVVMNPIKGYXXXXXXXXXFYLVNIPSLKTPAXXPKPVH

SEQ ID NO: 31524 - protein, 41 aa, Artificial Sequence
  GFR-binding peptide
  MOD_RES (1)..(3)..(37): Xaa is C or S
  MOD_RES (15)..(16)..(17)..(18)..(19): Xaa is A or G
  MOD_RES (20)..(21)..(22)..(23): Xaa is A or G or is absent
XGXSRVVMNPIKGYXXXXXXXXXFYLVNIPSLKTPAXTPKT

SEQ ID NO: 31525 - protein, 40 aa, Artificial Sequence
  GFR-binding peptide
  MOD_RES (2)..(34)..(35): Xaa is C or S
GXGEVVMDPIKGYVVKENEDFYLMNIPSLETPVXXAKPIK

SEQ ID NO: 31526 - protein, 37 aa, Artificial Sequence
  GFR-binding peptide
  MOD_RES (2)..(4)..(35)..(36): Xaa is C or S
LXGXEEVIMPIKGYLLVRGNDFYLMNIPSTKVPAXXT

SEQ ID NO: 31527 - protein, 39 aa, Artificial Sequence
  GFR-binding peptide
  MOD_RES (2)..(4)..(36)..(37): Xaa is C or S
RXGXGEVVMEPIKGYVVKDYEDFYLMNIPSLETPVXXAK

SEQ ID NO: 31528 - protein, 40 aa, Artificial Sequence
  GFR-binding peptide
  MOD_RES (2)..(4)..(39)..(40): Xaa is C or S
  MOD_RES (17)..(18)..(19)..(20)..(21): Xaa is A or G
  MOD_RES (22)..(23)..(24)..(25): Xaa is A or G or is absent
RXGXEAVSMGEPIKGYXXXXXXXXXFYLVNIPSLKTPVXX

SEQ ID NO: 31529 - protein, 43 aa, Artificial Sequence
  GFR-binding peptide
  MOD_RES (2)..(4)..(38): Xaa is C or S
  MOD_RES (16)..(17)..(18)..(19)..(20): Xaa is A or G
  MOD_RES (21)..(22)..(23)..(24): Xaa is A or G or is absent
HXGXSRVVMNPIKGYXXXXXXXXXFYLVNIPSLKTPAXTPKTV

SEQ ID NO: 31530 - protein, 33 aa, Artificial Sequence
  GFR-binding peptide
  MOD_RES (1)..(33): Xaa is C or S
XAKVVMNPIKGYIVNNSSDFYLVNIPSLKTPAX

SEQ ID NO: 31531 - protein, 39 aa, Artificial Sequence
  GFR-binding peptide
  MOD_RES (1)..(33)..(34): Xaa is C or S
XRDVVMGPIKGYIIQQKDNFYLMNIPSMKTPTXXPGASG

SEQ ID NO: 31532 - protein, 33 aa, Artificial Sequence
  GFR-binding peptide
  MOD_RES (33)..(33): Xaa is C or S
  MOD_RES (11)..(12)..(13)..(14)..(15): Xaa is A or G
  MOD_RES (16)..(17)..(18)..(19): Xaa is A or G or is absent
KVVMNPIKGYXXXXXXXXXFYLVNIPSLKTPAX

SEQ ID NO: 31533 - protein, 41 aa, Artificial Sequence
  GFR-binding peptide
  MOD_RES (2)..(4)..(36)..(37): Xaa is C or S
SXGXRDVVMGPIKGYIIQQKDNFYLMNIPSMKTPTXXPGAS

SEQ ID NO: 31534 - protein, 36 aa, Artificial Sequence
  GFR-binding peptide
  MOD_RES (2)..(34)..(35): Xaa is C or S
GXGEVVMDPIKGYVVKENEDFYLMNIPSLETPVXXA

SEQ ID NO: 31535 - protein, 38 aa, Artificial Sequence
  GFR-binding peptide
  MOD_RES (2)..(36): Xaa is C or S
  MOD_RES (14)..(15)..(16)..(17)..(18): Xaa is A or G
  MOD_RES (19)..(20)..(21)..(22): Xaa is A or G or is absent
GXSRVVMNPIKGYXXXXXXXXXFYLVNIPSLKTPAXTP

SEQ ID NO: 31536 - protein, 37 aa, Artificial Sequence
  GFR-binding peptide
  MOD_RES (33)..(34): Xaa is C or S
EAVSMGEPIKGYTPVGMDDFYLVNIPSLKTPVXXAKG

SEQ ID NO: 31537 - protein, 33 aa, Artificial Sequence
  GFR-binding peptide
  MOD_RES (33)..(33): Xaa is C or S
  MOD_RES (11)..(12)..(13)..(14)..(15): Xaa is A or G
  MOD_RES (16)..(17)..(18)..(19): Xaa is A or G or is absent
RVVMNPIKGYXXXXXXXXXFYLVNIPSLKTPAX

SEQ ID NO: 31538 - protein, 34 aa, Artificial Sequence
  GFR-binding peptide
  MOD_RES (34)..(34): Xaa is C or S
  MOD_RES (12)..(13)..(14)..(15)..(16): Xaa is A or G
  MOD_RES (17)..(18)..(19)..(20): Xaa is A or G or is absent
AKVVMNPIKGYXXXXXXXXXFYLVNIPSLKTPAX

SEQ ID NO: 31539 - protein, 38 aa, Artificial Sequence
  GFR-binding peptide
  MOD_RES (2)..(36)..(37): Xaa is C or S
  MOD_RES (14)..(15)..(16)..(17)..(18): Xaa is A or G
  MOD_RES (19)..(20)..(21)..(22): Xaa is A or G or is absent
GXGEVVMDPIKGYXXXXXXXXXFYLMNIPSLETPVXXA

SEQ ID NO: 31540 - protein, 41 aa, Artificial Sequence
  GFR-binding peptide
  MOD_RES (2)..(36)..(37): Xaa is C or S
  MOD_RES (14)..(15)..(16)..(17)..(18): Xaa is A or G
  MOD_RES (19)..(20)..(21)..(22): Xaa is A or G or is absent
GXGEVVMDPIKGYXXXXXXXXXFYLMNIPSLETPVXXAKPI

SEQ ID NO: 31541 - protein, 37 aa, Artificial Sequence
  GFR-binding peptide
  MOD_RES (34)..(35): Xaa is C or S
  MOD_RES (12)..(13)..(14)..(15)..(16): Xaa is A or G
  MOD_RES (17)..(18)..(19)..(20): Xaa is A or G or is absent
GEVVMDPIKGYXXXXXXXXXFYLMNIPSLETPVXXAK

SEQ ID NO: 31542 - protein, 37 aa, Artificial Sequence
  GFR-binding peptide
  MOD_RES (1)..(35)..(36): Xaa is C or S
  MOD_RES (13)..(14)..(15)..(16)..(17): Xaa is A or G
  MOD_RES (18)..(19)..(20)..(21): Xaa is A or G or is absent
XGEVVMEPIKGYXXXXXXXXXFYLMNIPSLETPVXXA

SEQ ID NO: 31543 - protein, 38 aa, Artificial Sequence
  GFR-binding peptide
  MOD_RES (1)..(33)..(34): Xaa is C or S
XAEVVMDPIKGYVVNNAADFYLINIPSLRAPVXXSAPA

SEQ ID NO: 31544 - protein, 38 aa, Artificial Sequence
  GFR-binding peptide
  MOD_RES (2)..(4)..(38): Xaa is C or S
  MOD_RES (16)..(17)..(18)..(19)..(20): Xaa is A or G
  MOD_RES (21)..(22)..(23)..(24): Xaa is A or G or is absent
HXGXAKVVMNPIKGYXXXXXXXXXFYLVNIPSLKTPAX

SEQ ID NO: 31545 - protein, 42 aa, Artificial Sequence
  GFR-binding peptide
  MOD_RES (1)..(3)..(37)..(38): Xaa is C or S
  MOD_RES (15)..(16)..(17)..(18)..(19): Xaa is A or G
  MOD_RES (20)..(21)..(22)..(23): Xaa is A or G or is absent
XGXARVVMNPIKGYXXXXXXXXXFYLVNIPSLQTPAXXPKPV

SEQ ID NO: 31546 - protein, 36 aa, Artificial Sequence
  GFR-binding peptide
  MOD_RES (2)..(36): Xaa is C or S
  MOD_RES (14)..(15)..(16)..(17)..(18): Xaa is A or G
  MOD_RES (19)..(20)..(21)..(22): Xaa is A or G or is absent
GXAKVVMNPIKGYXXXXXXXXXFYLVNIPSLKTPAX

SEQ ID NO: 31547 - protein, 30 aa, Artificial Sequence
  GFR-binding peptide
RVVMNPIKGYIVNSSDDFYLVNIPSLQTPA

SEQ ID NO: 31548 - protein, 36 aa, Artificial Sequence
  GFR-binding peptide
  MOD_RES (2)..(4)..(35)..(36): Xaa is C or S
LXGXEEVIMPIKGYLLVRGNDFYLMNIPSTKVPAXX

SEQ ID NO: 31549 - protein, 37 aa, Artificial Sequence
  GFR-binding peptide
  MOD_RES (1)..(34)..(35): Xaa is C or S
XEAVSMGEPIKGYTPVGMDDFYLVNIPSLKTPVXXAK

SEQ ID NO: 31550 - protein, 38 aa, Artificial Sequence
  GFR-binding peptide
  MOD_RES (2)..(4)..(36)..(37): Xaa is C or S
HXGXSRVVMNPIKGYIVNSSDDFYLVNIPSLKTPAXXP

SEQ ID NO: 31551 - protein, 33 aa, Artificial Sequence
  GFR-binding peptide
  MOD_RES (1)..(33): Xaa is C or S
XGEVVMEPIKGYVVKDYEDFYLMNIPSLETPVX

SEQ ID NO: 31552 - protein, 37 aa, Artificial Sequence
  GFR-binding peptide
  MOD_RES (33)..(33): Xaa is C or S
  MOD_RES (11)..(12)..(13)..(14)..(15): Xaa is A or G
  MOD_RES (16)..(17)..(18)..(19): Xaa is A or G or is absent
RVVMNPIKGYXXXXXXXXXFYLVNIPSLKTPAXTPKT

SEQ ID NO: 31553 - protein, 35 aa, Artificial Sequence
  GFR-binding peptide
  MOD_RES (1)..(33)..(34): Xaa is C or S
XSRVVMNPIKGYIVNSSDDFYLVNIPSLKTPAXXP

SEQ ID NO: 31554 - protein, 43 aa, Artificial Sequence
  GFR-binding peptide
  MOD_RES (1)..(3)..(38)..(39): Xaa is C or S
  MOD_RES (16)..(17)..(18)..(19)..(20): Xaa is A or G
  MOD_RES (21)..(22)..(23)..(24): Xaa is A or G or is absent
XGXEAVSMGEPIKGYXXXXXXXXXFYLVNIPSLKTPVXXAKGV

SEQ ID NO: 31555 - protein, 34 aa, Artificial Sequence
  GFR-binding peptide
  MOD_RES (34)..(34): Xaa is C or S
  MOD_RES (12)..(13)..(14)..(15)..(16): Xaa is A or G
  MOD_RES (17)..(18)..(19)..(20): Xaa is A or G or is absent
GEVVMDPIKGYXXXXXXXXXFYLMNIPSLETPVX

SEQ ID NO: 31556 - protein, 37 aa, Artificial Sequence
  GFR-binding peptide
  MOD_RES (32)..(33): Xaa is C or S
AKVVMNPIKGYIVNNSSDFYLVNIPSLKTPAXXAKPV

SEQ ID NO: 31557 - protein, 39 aa, Artificial Sequence
  GFR-binding peptide
  MOD_RES (1)..(3)..(38)..(39): Xaa is C or S
  MOD_RES (16)..(17)..(18)..(19)..(20): Xaa is A or G
  MOD_RES (21)..(22)..(23)..(24): Xaa is A or G or is absent
XGXEAVSMGEPIKGYXXXXXXXXXFYLVNIPSLKTPVXX

SEQ ID NO: 31558 - protein, 35 aa, Artificial Sequence
  GFR-binding peptide
  MOD_RES (2)..(35): Xaa is C or S
GXEAVSMGEPIKGYTPVGMDDFYLVNIPSLKTPVX

SEQ ID NO: 31559 - protein, 38 aa, Artificial Sequence
  GFR-binding peptide
  MOD_RES (2)..(36)..(37): Xaa is C or S
  MOD_RES (14)..(15)..(16)..(17)..(18): Xaa is A or G
  MOD_RES (19)..(20)..(21)..(22): Xaa is A or G or is absent
GXSEVVMDPIKGYXXXXXXXXXFYLINIPSLRTPVXXT

SEQ ID NO: 31560 - protein, 43 aa, Artificial Sequence
  GFR-binding peptide
  MOD_RES (2)..(4)..(37)..(38): Xaa is C or S
RXGXEAVSMGEPIKGYTPVGMDDFYLVNIPSLKTPVXXAKGVK

SEQ ID NO: 31561 - protein, 36 aa, Artificial Sequence
  GFR-binding peptide
  MOD_RES (1)..(34)..(35): Xaa is C or S
XEAVSMGEPIKGYTPVGMDDFYLVNIPSLKTPVXXA

SEQ ID NO: 31562 - protein, 35 aa, Artificial Sequence
  GFR-binding peptide
  MOD_RES (2)..(4): Xaa is C or S
SXGXRDVVMGPIKGYIIQQKDNFYLMNIPSMKTPT

SEQ ID NO: 31563 - protein, 41 aa, Artificial Sequence
  GFR-binding peptide
  MOD_RES (35)..(36): Xaa is C or S
  MOD_RES (13)..(14)..(15)..(16)..(17): Xaa is A or G
  MOD_RES (18)..(19)..(20)..(21): Xaa is A or G or is absent
EAVSMGEPIKGYXXXXXXXXXFYLVNIPSLKTPVXXAKGVK

SEQ ID NO: 31564 - protein, 39 aa, Artificial Sequence
  GFR-binding peptide
  MOD_RES (2)..(4)..(38)..(39): Xaa is C or S
  MOD_RES (16)..(17)..(18)..(19)..(20): Xaa is A or G
  MOD_RES (21)..(22)..(23)..(24): Xaa is A or G or is absent
HXGXARVVMNPIKGYXXXXXXXXXFYLVNIPSLQTPAXX

SEQ ID NO: 31565 - protein, 39 aa, Artificial Sequence
  GFR-binding peptide
  MOD_RES (1)..(3)..(37)..(38): Xaa is C or S
  MOD_RES (15)..(16)..(17)..(18)..(19): Xaa is A or G
  MOD_RES (20)..(21)..(22)..(23): Xaa is A or G or is absent
XGXRDVVMGPIKGYXXXXXXXXXFYLMNIPSMKTPTXXP

SEQ ID NO: 31566 - protein, 33 aa, Artificial Sequence
  GFR-binding peptide
  MOD_RES (31)..(32): Xaa is C or S
EVVMEPIKGYVVKDYEDFYLMNIPSLETPVXXA

SEQ ID NO: 31567 - protein, 34 aa, Artificial Sequence
  GFR-binding peptide
  MOD_RES (2)..(34): Xaa is C or S
GXARVVMNPIKGYIVNSSDDFYLVNIPSLQTPAX

SEQ ID NO: 31568 - protein, 36 aa, Artificial Sequence
  GFR-binding peptide
  MOD_RES (1)..(33)..(34): Xaa is C or S
XGEVVMEPIKGYVVKDYEDFYLMNIPSLETPVXXAK

SEQ ID NO: 31569 - protein, 38 aa, Artificial Sequence
  GFR-binding peptide
  MOD_RES (34)..(35): Xaa is C or S
  MOD_RES (12)..(13)..(14)..(15)..(16): Xaa is A or G
  MOD_RES (17)..(18)..(19)..(20): Xaa is A or G or is absent
GEVVMEPIKGYXXXXXXXXXFYLMNIPSLETPVXXAKP

SEQ ID NO: 31570 - protein, 41 aa, Artificial Sequence
  GFR-binding peptide
  MOD_RES (1)..(3)..(36)..(37): Xaa is C or S
XGXEAVSMGEPIKGYTPVGMDDFYLVNIPSLKTPVXXAKGV

SEQ ID NO: 31571 - protein, 40 aa, Artificial Sequence
  GFR-binding peptide
  MOD_RES (2)..(4)..(36)..(37): Xaa is C or S
RXGXGEVVMEPIKGYVVKDYEDFYLMNIPSLETPVXXAKP

SEQ ID NO: 31572 - protein, 35 aa, Artificial Sequence
  GFR-binding peptide
  MOD_RES (2)..(34)..(35): Xaa is C or S
GXAEVVMDPIKGYVVNNAADFYLINIPSLRAPVXX

SEQ ID NO: 31573 - protein, 41 aa, Artificial Sequence
  GFR-binding peptide
  MOD_RES (2)..(36)..(37): Xaa is C or S
  MOD_RES (14)..(15)..(16)..(17)..(18): Xaa is A or G
  MOD_RES (19)..(20)..(21)..(22): Xaa is A or G or is absent
GXARVVMNPIKGYXXXXXXXXXFYLVNIPSLQTPAXXPKPV

SEQ ID NO: 31574 - protein, 38 aa, Artificial Sequence
  GFR-binding peptide
  MOD_RES (1)..(3)..(35)..(36): Xaa is C or S
XGXAEVVMDPIKGYVVNNAADFYLINIPSLRAPVXXSA

SEQ ID NO: 31575 - protein, 34 aa, Artificial Sequence
  GFR-binding peptide
  MOD_RES (33)..(34): Xaa is C or S
  MOD_RES (11)..(12)..(13)..(14)..(15): Xaa is A or G
  MOD_RES (16)..(17)..(18)..(19): Xaa is A or G or is absent
DVVMGPIKGYXXXXXXXXXFYLMNIPSMKTPTXX

SEQ ID NO: 31576 - protein, 40 aa, Artificial Sequence
  GFR-binding peptide
  MOD_RES (34)..(35): Xaa is C or S
  MOD_RES (12)..(13)..(14)..(15)..(16): Xaa is A or G
  MOD_RES (17)..(18)..(19)..(20): Xaa is A or G or is absent
AEVVMDPIKGYXXXXXXXXXFYLINIPSLRAPVXXSAPAA

SEQ ID NO: 31577 - protein, 40 aa, Artificial Sequence
  GFR-binding peptide
  MOD_RES (1)..(3)..(37)..(38): Xaa is C or S
  MOD_RES (15)..(16)..(17)..(18)..(19): Xaa is A or G
  MOD_RES (20)..(21)..(22)..(23): Xaa is A or G or is absent
XGXAKVVMNPIKGYXXXXXXXXXFYLVNIPSLKTPAXXAK

SEQ ID NO: 31578 - protein, 40 aa, Artificial Sequence
  GFR-binding peptide
  MOD_RES (2)..(35)..(36): Xaa is C or S
GXEAVSMGEPIKGYTPVGMDDFYLVNIPSLKTPVXXAKGV

SEQ ID NO: 31579 - protein, 36 aa, Artificial Sequence
  GFR-binding peptide
  MOD_RES (33)..(34): Xaa is C or S
EAVSMGEPIKGYTPVGMDDFYLVNIPSLKTPVXXAK

SEQ ID NO: 31580 - protein, 39 aa, Artificial Sequence
  GFR-binding peptide
  MOD_RES (2)..(4)..(38)..(39): Xaa is C or S
  MOD_RES (16)..(17)..(18)..(19)..(20): Xaa is A or G
  MOD_RES (21)..(22)..(23)..(24): Xaa is A or G or is absent
RXGXGEVVMDPIKGYXXXXXXXXXFYLMNIPSLETPVXX

SEQ ID NO: 31581 - protein, 39 aa, Artificial Sequence
  GFR-binding peptide
  MOD_RES (1)..(3)..(35): Xaa is C or S
XGXSRVVMNPIKGYIVNSSDDFYLVNIPSLKTPAXTPKT

SEQ ID NO: 31582 - protein, 38 aa, Artificial Sequence
  GFR-binding peptide
  MOD_RES (34)..(35): Xaa is C or S
  MOD_RES (12)..(13)..(14)..(15)..(16): Xaa is A or G
  MOD_RES (17)..(18)..(19)..(20): Xaa is A or G or is absent
ARVVMNPIKGYXXXXXXXXXFYLVNIPSLQTPAXXPKP

SEQ ID NO: 31583 - protein, 36 aa, Artificial Sequence
  GFR-binding peptide
  MOD_RES (34)..(35): Xaa is C or S
  MOD_RES (12)..(13)..(14)..(15)..(16): Xaa is A or G
  MOD_RES (17)..(18)..(19)..(20): Xaa is A or G or is absent
ESVAMGPIKGYXXXXXXXXXFYLINIPSLKTPVXXA

SEQ ID NO: 31584 - protein, 34 aa, Artificial Sequence
  GFR-binding peptide
  MOD_RES (33)..(34): Xaa is C or S
  MOD_RES (11)..(12)..(13)..(14)..(15): Xaa is A or G
  MOD_RES (16)..(17)..(18)..(19): Xaa is A or G or is absent
EEVIMPIKGYXXXXXXXXXFYLMNIPSTKVPAXX

SEQ ID NO: 31585 - protein, 33 aa, Artificial Sequence
  GFR-binding peptide
  MOD_RES (31)..(32): Xaa is C or S
EVVMDPIKGYVVNNAADFYLINIPSLRAPVXXS

SEQ ID NO: 31586 - protein, 38 aa, Artificial Sequence
  GFR-binding peptide
  MOD_RES (1)..(3)..(38): Xaa is C or S
  MOD_RES (16)..(17)..(18)..(19)..(20): Xaa is A or G
  MOD_RES (21)..(22)..(23)..(24): Xaa is A or G or is absent
XGXEAVSMGEPIKGYXXXXXXXXXFYLVNIPSLKTPVX

SEQ ID NO: 31587 - protein, 35 aa, Artificial Sequence
  GFR-binding peptide
  MOD_RES (2)..(2): Xaa is C or S
  MOD_RES (14)..(15)..(16)..(17)..(18): Xaa is A or G
  MOD_RES (19)..(20)..(21)..(22): Xaa is A or G or is absent
GXGEVVMEPIKGYXXXXXXXXXFYLMNIPSLETPV

SEQ ID NO: 31588 - protein, 32 aa, Artificial Sequence
  GFR-binding peptide
  MOD_RES (32)..(32): Xaa is C or S
GEVVMEPIKGYVVKDYEDFYLMNIPSLETPVX

SEQ ID NO: 31589 - protein, 34 aa, Artificial Sequence
  GFR-binding peptide
  MOD_RES (2)..(34): Xaa is C or S
GXESVAMGPIKGYYTVVGKDFYLINIPSLKTPVX

SEQ ID NO: 31590 - protein, 40 aa, Artificial Sequence
  GFR-binding peptide
  MOD_RES (2)..(4)..(37)..(38): Xaa is C or S
  MOD_RES (15)..(16)..(17)..(18)..(19): Xaa is A or G
  MOD_RES (20)..(21)..(22)..(23): Xaa is A or G or is absent
LXGXEEVIMPIKGYXXXXXXXXXFYLMNIPSTKVPAXXTS

SEQ ID NO: 31591 - protein, 37 aa, Artificial Sequence
  GFR-binding peptide
  MOD_RES (2)..(36)..(37): Xaa is C or S
  MOD_RES (14)..(15)..(16)..(17)..(18): Xaa is A or G
  MOD_RES (19)..(20)..(21)..(22): Xaa is A or G or is absent
GXAEVVMDPIKGYXXXXXXXXXFYLINIPSLRAPVXX

SEQ ID NO: 31592 - protein, 35 aa, Artificial Sequence
  GFR-binding peptide
  MOD_RES (34)..(35): Xaa is C or S
  MOD_RES (12)..(13)..(14)..(15)..(16): Xaa is A or G
  MOD_RES (17)..(18)..(19)..(20): Xaa is A or G or is absent
ARVVMNPIKGYXXXXXXXXXFYLVNIPSLQTPAXX

SEQ ID NO: 31593 - protein, 34 aa, Artificial Sequence
  GFR-binding peptide
  MOD_RES (1)..(33)..(34): Xaa is C or S
XGEVVMDPIKGYVVKENEDFYLMNIPSLETPVXX

SEQ ID NO: 31594 - protein, 38 aa, Artificial Sequence
  GFR-binding peptide
  MOD_RES (32)..(33): Xaa is C or S
ARVVMNPIKGYIVNSSDDFYLVNIPSLQTPAXXPKPVT

SEQ ID NO: 31595 - protein, 38 aa, Artificial Sequence
  GFR-binding peptide
  MOD_RES (1)..(3)..(37)..(38): Xaa is C or S
  MOD_RES (15)..(16)..(17)..(18)..(19): Xaa is A or G
  MOD_RES (20)..(21)..(22)..(23): Xaa is A or G or is absent
XGXRDVVMGPIKGYXXXXXXXXXFYLMNIPSMKTPTXX

SEQ ID NO: 31596 - protein, 34 aa, Artificial Sequence
  GFR-binding peptide
  MOD_RES (33)..(34): Xaa is C or S
  MOD_RES (11)..(12)..(13)..(14)..(15): Xaa is A or G
  MOD_RES (16)..(17)..(18)..(19): Xaa is A or G or is absent
RVVMNPIKGYXXXXXXXXXFYLVNIPSLKTPAXX

SEQ ID NO: 31597 - protein, 34 aa, Artificial Sequence
  GFR-binding peptide
  MOD_RES (33)..(34): Xaa is C or S
  MOD_RES (11)..(12)..(13)..(14)..(15): Xaa is A or G
  MOD_RES (16)..(17)..(18)..(19): Xaa is A or G or is absent
KVVMNPIKGYXXXXXXXXXFYLVNIPSLKTPAXX

SEQ ID NO: 31598 - protein, 36 aa, Artificial Sequence
  GFR-binding peptide
  MOD_RES (2)..(2): Xaa is C or S
  MOD_RES (15)..(16)..(17)..(18)..(19): Xaa is A or G
  MOD_RES (20)..(21)..(22)..(23): Xaa is A or G or is absent
GXEAVSMGEPIKGYXXXXXXXXXFYLVNIPSLKTPV

SEQ ID NO: 31599 - protein, 38 aa, Artificial Sequence
  GFR-binding peptide
  MOD_RES (2)..(34)..(35): Xaa is C or S
GXGEVVMEPIKGYVVKDYEDFYLMNIPSLETPVXXAKP

SEQ ID NO: 31600 - protein, 36 aa, Artificial Sequence
  GFR-binding peptide
  MOD_RES (2)..(36): Xaa is C or S
  MOD_RES (14)..(15)..(16)..(17)..(18): Xaa is A or G
  MOD_RES (19)..(20)..(21)..(22): Xaa is A or G or is absent
GXGEVVMEPIKGYXXXXXXXXXFYLMNIPSLETPVX

SEQ ID NO: 31601 - protein, 43 aa, Artificial Sequence
  GFR-binding peptide
  MOD_RES (1)..(3)..(37): Xaa is C or S
  MOD_RES (15)..(16)..(17)..(18)..(19): Xaa is A or G
  MOD_RES (20)..(21)..(22)..(23): Xaa is A or G or is absent
XGXSRVVMNPIKGYXXXXXXXXXFYLVNIPSLKTPAXTPKTVH

SEQ ID NO: 31602 - protein, 36 aa, Artificial Sequence
  GFR-binding peptide
  MOD_RES (35)..(36): Xaa is C or S
  MOD_RES (13)..(14)..(15)..(16)..(17): Xaa is A or G
  MOD_RES (18)..(19)..(20)..(21): Xaa is A or G or is absent
EAVSMGEPIKGYXXXXXXXXXFYLVNIPSLKTPVXX

SEQ ID NO: 31603 - protein, 32 aa, Artificial Sequence
  GFR-binding peptide
  MOD_RES (1)..(1): Xaa is C or S
XGEVVMDPIKGYVVKENEDFYLMNIPSLETPV

SEQ ID NO: 31604 - protein, 40 aa, Artificial Sequence
  GFR-binding peptide
  MOD_RES (2)..(4)..(38)..(39): Xaa is C or S
  MOD_RES (16)..(17)..(18)..(19)..(20): Xaa is A or G
  MOD_RES (21)..(22)..(23)..(24): Xaa is A or G or is absent
RXGXSEVVMDPIKGYXXXXXXXXXFYLINIPSLRTPVXXT

SEQ ID NO: 31605 - protein, 39 aa, Artificial Sequence
  GFR-binding peptide
  MOD_RES (33)..(34): Xaa is C or S
  MOD_RES (11)..(12)..(13)..(14)..(15): Xaa is A or G
  MOD_RES (16)..(17)..(18)..(19): Xaa is A or G or is absent
DVVMGPIKGYXXXXXXXXXFYLMNIPSMKTPTXXPGASG

SEQ ID NO: 31606 - protein, 39 aa, Artificial Sequence
  GFR-binding peptide
  MOD_RES (1)..(35)..(36): Xaa is C or S
  MOD_RES (13)..(14)..(15)..(16)..(17): Xaa is A or G
  MOD_RES (18)..(19)..(20)..(21): Xaa is A or G or is absent
XSRVVMNPIKGYXXXXXXXXXFYLVNIPSLKTPAXXPKP

SEQ ID NO: 31607 - protein, 38 aa, Artificial Sequence
  GFR-binding peptide
  MOD_RES (34)..(35): Xaa is C or S
  MOD_RES (12)..(13)..(14)..(15)..(16): Xaa is A or G
  MOD_RES (17)..(18)..(19)..(20): Xaa is A or G or is absent
AEVVMDPIKGYXXXXXXXXXFYLINIPSLRAPVXXSAP

SEQ ID NO: 31608 - protein, 38 aa, Artificial Sequence
  GFR-binding peptide
  MOD_RES (2)..(4)..(35)..(36): Xaa is C or S
LXGXEEVIMPIKGYLLVRGNDFYLMNIPSTKVPAXXTS

SEQ ID NO: 31609 - protein, 36 aa, Artificial Sequence
  GFR-binding peptide
  MOD_RES (33)..(34): Xaa is C or S
  MOD_RES (11)..(12)..(13)..(14)..(15): Xaa is A or G
  MOD_RES (16)..(17)..(18)..(19): Xaa is A or G or is absent
SVAMGPIKGYXXXXXXXXXFYLINIPSLKTPVXXAK

SEQ ID NO: 31610 - protein, 34 aa, Artificial Sequence
  GFR-binding peptide
  MOD_RES (1)..(3): Xaa is C or S
XGXAKVVMNPIKGYIVNNSSDFYLVNIPSLKTPA

SEQ ID NO: 31611 - protein, 39 aa, Artificial Sequence
  GFR-binding peptide
  MOD_RES (1)..(35)..(36): Xaa is C or S
  MOD_RES (13)..(14)..(15)..(16)..(17): Xaa is A or G
  MOD_RES (18)..(19)..(20)..(21): Xaa is A or G or is absent
XGEVVMDPIKGYXXXXXXXXXFYLMNIPSLETPVXXAKP

SEQ ID NO: 31612 - protein, 40 aa, Artificial Sequence
  GFR-binding peptide
  MOD_RES (1)..(3)..(35)..(36): Xaa is C or S
XGXGEVVMDPIKGYVVKENEDFYLMNIPSLETPVXXAKPI

SEQ ID NO: 31613 - protein, 34 aa, Artificial Sequence
  GFR-binding peptide
  MOD_RES (1)..(33)..(34): Xaa is C or S
XGEVVMEPIKGYVVKDYEDFYLMNIPSLETPVXX

SEQ ID NO: 31614 - protein, 33 aa, Artificial Sequence
  GFR-binding peptide
  MOD_RES (12)..(13)..(14)..(15)..(16): Xaa is A or G
  MOD_RES (17)..(18)..(19)..(20): Xaa is A or G or is absent
ARVVMNPIKGYXXXXXXXXXFYLVNIPSLQTPA

SEQ ID NO: 31615 - protein, 40 aa, Artificial Sequence
  GFR-binding peptide
  MOD_RES (2)..(4)..(38)..(39): Xaa is C or S
  MOD_RES (16)..(17)..(18)..(19)..(20): Xaa is A or G
  MOD_RES (21)..(22)..(23)..(24): Xaa is A or G or is absent
HXGXARVVMNPIKGYXXXXXXXXXFYLVNIPSLQTPAXXP

SEQ ID NO: 31616 - protein, 36 aa, Artificial Sequence
  GFR-binding peptide
  MOD_RES (1)..(3): Xaa is C or S
  MOD_RES (15)..(16)..(17)..(18)..(19): Xaa is A or G
  MOD_RES (20)..(21)..(22)..(23): Xaa is A or G or is absent
XGXSEVVMDPIKGYXXXXXXXXXFYLINIPSLRTPV

SEQ ID NO: 31617 - protein, 33 aa, Artificial Sequence
  GFR-binding peptide
  MOD_RES (2)..(2): Xaa is C or S
GXRDVVMGPIKGYIIQQKDNFYLMNIPSMKTPT

SEQ ID NO: 31618 - protein, 39 aa, Artificial Sequence
  GFR-binding peptide
  MOD_RES (1)..(35)..(36): Xaa is C or S
  MOD_RES (13)..(14)..(15)..(16)..(17): Xaa is A or G
  MOD_RES (18)..(19)..(20)..(21): Xaa is A or G or is absent
XSEVVMDPIKGYXXXXXXXXXFYLINIPSLRTPVXXTPP

SEQ ID NO: 31619 - protein, 37 aa, Artificial Sequence
  GFR-binding peptide
  MOD_RES (2)..(4)..(36)..(37): Xaa is C or S
RXGXGEVVMEPIKGYVVKDYEDFYLMNIPSLETPVXX

SEQ ID NO: 31620 - protein, 39 aa, Artificial Sequence
  GFR-binding peptide
  MOD_RES (34)..(35): Xaa is C or S
  MOD_RES (12)..(13)..(14)..(15)..(16): Xaa is A or G
  MOD_RES (17)..(18)..(19)..(20): Xaa is A or G or is absent
AEVVMDPIKGYXXXXXXXXXFYLINIPSLRAPVXXSAPA

SEQ ID NO: 31621 - protein, 37 aa, Artificial Sequence
  GFR-binding peptide
  MOD_RES (2)..(4)..(36)..(37): Xaa is C or S
RXGXSEVVMDPIKGYVVNNASDFYLINIPSLRTPVXX

SEQ ID NO: 31622 - protein, 37 aa, Artificial Sequence
  GFR-binding peptide
  MOD_RES (2)..(34)..(35): Xaa is C or S
GXESVAMGPIKGYYTVVGKDFYLINIPSLKTPVXXAK

SEQ ID NO: 31623 - protein, 36 aa, Artificial Sequence
  GFR-binding peptide
  MOD_RES (34)..(35): Xaa is C or S
  MOD_RES (12)..(13)..(14)..(15)..(16): Xaa is A or G
  MOD_RES (17)..(18)..(19)..(20): Xaa is A or G or is absent
AKVVMNPIKGYXXXXXXXXXFYLVNIPSLKTPAXXA

SEQ ID NO: 31624 - protein, 38 aa, Artificial Sequence
  GFR-binding peptide
  MOD_RES (1)..(3)..(35)..(36): Xaa is C or S
XGXAKVVMNPIKGYIVNNSSDFYLVNIPSLKTPAXXAK

SEQ ID NO: 31625 - protein, 36 aa, Artificial Sequence
  GFR-binding peptide
  MOD_RES (32)..(33): Xaa is C or S
SRVVMNPIKGYIVNSSDDFYLVNIPSLKTPAXXPKP

SEQ ID NO: 31626 - protein, 38 aa, Artificial Sequence
  GFR-binding peptide
  MOD_RES (1)..(36)..(37): Xaa is C or S
  MOD_RES (14)..(15)..(16)..(17)..(18): Xaa is A or G
  MOD_RES (19)..(20)..(21)..(22): Xaa is A or G or is absent
XEAVSMGEPIKGYXXXXXXXXXFYLVNIPSLKTPVXXA

SEQ ID NO: 31627 - protein, 35 aa, Artificial Sequence
  GFR-binding peptide
  MOD_RES (2)..(34)..(35): Xaa is C or S
GXSRVVMNPIKGYIVNSSDDFYLVNIPSLKTPAXX

SEQ ID NO: 31628 - protein, 41 aa, Artificial Sequence
  GFR-binding peptide
  MOD_RES (2)..(4)..(38)..(39): Xaa is C or S
  MOD_RES (16)..(17)..(18)..(19)..(20): Xaa is A or G
  MOD_RES (21)..(22)..(23)..(24): Xaa is A or G or is absent
HXGXSRVVMNPIKGYXXXXXXXXXFYLVNIPSLKTPAXXPK

SEQ ID NO: 31629 - protein, 42 aa, Artificial Sequence
  GFR-binding peptide
  MOD_RES (2)..(4)..(38): Xaa is C or S
  MOD_RES (16)..(17)..(18)..(19)..(20): Xaa is A or G
  MOD_RES (21)..(22)..(23)..(24): Xaa is A or G or is absent
HXGXSRVVMNPIKGYXXXXXXXXXFYLVNIPSLKTPAXTPKT

SEQ ID NO: 31630 - protein, 38 aa, Artificial Sequence
  GFR-binding peptide
  MOD_RES (1)..(3)..(35)..(36): Xaa is C or S
XGXSEVVMDPIKGYVVNNASDFYLINIPSLRTPVXXTP

SEQ ID NO: 31631 - protein, 38 aa, Artificial Sequence
  GFR-binding peptide
  MOD_RES (32)..(32): Xaa is C or S
SRVVMNPIKGYIVNSSDDFYLVNIPSLKTPAXTPKTVH

SEQ ID NO: 31632 - protein, 37 aa, Artificial Sequence
  GFR-binding peptide
  MOD_RES (1)..(3)..(37): Xaa is C or S
  MOD_RES (15)..(16)..(17)..(18)..(19): Xaa is A or G
  MOD_RES (20)..(21)..(22)..(23): Xaa is A or G or is absent
XGXARVVMNPIKGYXXXXXXXXXFYLVNIPSLQTPAX

SEQ ID NO: 31633 - protein, 34 aa, Artificial Sequence
  GFR-binding peptide
  MOD_RES (1)..(3): Xaa is C or S
XGXSRVVMNPIKGYIVNSSDDFYLVNIPSLKTPA

SEQ ID NO: 31634 - protein, 40 aa, Artificial Sequence
  GFR-binding peptide
  MOD_RES (1)..(3)..(35)..(36): Xaa is C or S
XGXGEVVMEPIKGYVVKDYEDFYLMNIPSLETPVXXAKPI

SEQ ID NO: 31635 - protein, 42 aa, Artificial Sequence
  GFR-binding peptide
  MOD_RES (2)..(36)..(37): Xaa is C or S
  MOD_RES (14)..(15)..(16)..(17)..(18): Xaa is A or G
  MOD_RES (19)..(20)..(21)..(22): Xaa is A or G or is absent
GXARVVMNPIKGYXXXXXXXXXFYLVNIPSLQTPAXXPKPVT

SEQ ID NO: 31636 - protein, 40 aa, Artificial Sequence
  GFR-binding peptide
  MOD_RES (34)..(35): Xaa is C or S
  MOD_RES (12)..(13)..(14)..(15)..(16): Xaa is A or G
  MOD_RES (17)..(18)..(19)..(20): Xaa is A or G or is absent
SRVVMNPIKGYXXXXXXXXXFYLVNIPSLKTPAXXPKPVY

SEQ ID NO: 31637 - protein, 33 aa, Artificial Sequence
  GFR-binding peptide
  MOD_RES (1)..(3): Xaa is C or S
XGXEEVIMPIKGYLLVRGNDFYLMNIPSTKVPA

SEQ ID NO: 31638 - protein, 35 aa, Artificial Sequence
  GFR-binding peptide
  MOD_RES (1)..(35): Xaa is C or S
  MOD_RES (13)..(14)..(15)..(16)..(17): Xaa is A or G
  MOD_RES (18)..(19)..(20)..(21): Xaa is A or G or is absent
XGEVVMDPIKGYXXXXXXXXXFYLMNIPSLETPVX

SEQ ID NO: 31639 - protein, 37 aa, Artificial Sequence
  GFR-binding peptide
  MOD_RES (31)..(32): Xaa is C or S
EVVMEPIKGYVVKDYEDFYLMNIPSLETPVXXAKPIS

SEQ ID NO: 31640 - protein, 37 aa, Artificial Sequence
  GFR-binding peptide
  MOD_RES (32)..(33): Xaa is C or S
SRVVMNPIKGYIVNSSDDFYLVNIPSLKTPAXXPKPV

SEQ ID NO: 31641 - protein, 43 aa, Artificial Sequence
  GFR-binding peptide
  MOD_RES (2)..(4)..(38)..(39): Xaa is C or S
  MOD_RES (16)..(17)..(18)..(19)..(20): Xaa is A or G
  MOD_RES (21)..(22)..(23)..(24): Xaa is A or G or is absent
HXGXSRVVMNPIKGYXXXXXXXXXFYLVNIPSLKTPAXXPKPV

SEQ ID NO: 31642 - protein, 37 aa, Artificial Sequence
  GFR-binding peptide
  MOD_RES (1)..(3)..(37): Xaa is C or S
  MOD_RES (15)..(16)..(17)..(18)..(19): Xaa is A or G
  MOD_RES (20)..(21)..(22)..(23): Xaa is A or G or is absent
XGXGEVVMDPIKGYXXXXXXXXXFYLMNIPSLETPVX

SEQ ID NO: 31643 - protein, 36 aa, Artificial Sequence
  GFR-binding peptide
  MOD_RES (1)..(3)..(35)..(36): Xaa is C or S
XGXARVVMNPIKGYIVNSSDDFYLVNIPSLQTPAXX

SEQ ID NO: 31644 - protein, 39 aa, Artificial Sequence
  GFR-binding peptide
  MOD_RES (2)..(4)..(39): Xaa is C or S
  MOD_RES (17)..(18)..(19)..(20)..(21): Xaa is A or G
  MOD_RES (22)..(23)..(24)..(25): Xaa is A or G or is absent
RXGXEAVSMGEPIKGYXXXXXXXXXFYLVNIPSLKTPVX

SEQ ID NO: 31645 - protein, 33 aa, Artificial Sequence
  GFR-binding peptide
  MOD_RES (33)..(33): Xaa is C or S
  MOD_RES (11)..(12)..(13)..(14)..(15): Xaa is A or G
  MOD_RES (16)..(17)..(18)..(19): Xaa is A or G or is absent
SVAMGPIKGYXXXXXXXXXFYLINIPSLKTPVX

SEQ ID NO: 31646 - protein, 40 aa, Artificial Sequence
  GFR-binding peptide
  MOD_RES (1)..(3)..(36)..(37): Xaa is C or S
XGXEAVSMGEPIKGYTPVGMDDFYLVNIPSLKTPVXXAKG

SEQ ID NO: 31647 - protein, 34 aa, Artificial Sequence
  GFR-binding peptide
  MOD_RES (1)..(3): Xaa is C or S
XGXRDVVMGPIKGYIIQQKDNFYLMNIPSMKTPT

SEQ ID NO: 31648 - protein, 37 aa, Artificial Sequence
  GFR-binding peptide
  MOD_RES (31)..(32): Xaa is C or S
EVVMDPIKGYVVNNASDFYLINIPSLRTPVXXTPPTS

SEQ ID NO: 31649 - protein, 35 aa, Artificial Sequence
  GFR-binding peptide
  MOD_RES (2)..(2): Xaa is C or S
  MOD_RES (14)..(15)..(16)..(17)..(18): Xaa is A or G
  MOD_RES (19)..(20)..(21)..(22): Xaa is A or G or is absent
GXRDVVMGPIKGYXXXXXXXXXFYLMNIPSMKTPT

SEQ ID NO: 31650 - protein, 36 aa, Artificial Sequence
  GFR-binding peptide
  MOD_RES (1)..(33)..(34): Xaa is C or S
XAEVVMDPIKGYVVNNAADFYLINIPSLRAPVXXSA

SEQ ID NO: 31651 - protein, 37 aa, Artificial Sequence
  GFR-binding peptide
  MOD_RES (1)..(3)..(37): Xaa is C or S
  MOD_RES (15)..(16)..(17)..(18)..(19): Xaa is A or G
  MOD_RES (20)..(21)..(22)..(23): Xaa is A or G or is absent
XGXESVAMGPIKGYXXXXXXXXXFYLINIPSLKTPVX

SEQ ID NO: 31652 - protein, 39 aa, Artificial Sequence
  GFR-binding peptide
  MOD_RES (2)..(36)..(37): Xaa is C or S
  MOD_RES (14)..(15)..(16)..(17)..(18): Xaa is A or G
  MOD_RES (19)..(20)..(21)..(22): Xaa is A or G or is absent
GXRDVVMGPIKGYXXXXXXXXXFYLMNIPSMKTPTXXPG

SEQ ID NO: 31653 - protein, 38 aa, Artificial Sequence
  GFR-binding peptide
  MOD_RES (2)..(4)..(38): Xaa is C or S
  MOD_RES (16)..(17)..(18)..(19)..(20): Xaa is A or G
  MOD_RES (21)..(22)..(23)..(24): Xaa is A or G or is absent
RXGXGEVVMEPIKGYXXXXXXXXXFYLMNIPSLETPVX

SEQ ID NO: 31654 - protein, 40 aa, Artificial Sequence
  GFR-binding peptide
  MOD_RES (2)..(36)..(37): Xaa is C or S
  MOD_RES (14)..(15)..(16)..(17)..(18): Xaa is A or G
  MOD_RES (19)..(20)..(21)..(22): Xaa is A or G or is absent
GXARVVMNPIKGYXXXXXXXXXFYLVNIPSLQTPAXXPKP

SEQ ID NO: 31655 - protein, 36 aa, Artificial Sequence
  GFR-binding peptide
  MOD_RES (1)..(3)..(35): Xaa is C or S
XGXSRVVMNPIKGYIVNSSDDFYLVNIPSLKTPAXT

SEQ ID NO: 31656 - protein, 34 aa, Artificial Sequence
  GFR-binding peptide
  MOD_RES (34)..(34): Xaa is C or S
  MOD_RES (12)..(13)..(14)..(15)..(16): Xaa is A or G
  MOD_RES (17)..(18)..(19)..(20): Xaa is A or G or is absent
SRVVMNPIKGYXXXXXXXXXFYLVNIPSLKTPAX

SEQ ID NO: 31657 - protein, 36 aa, Artificial Sequence
  GFR-binding peptide
  MOD_RES (2)..(4)..(36): Xaa is C or S
RXGXSEVVMDPIKGYVVNNASDFYLINIPSLRTPVX

SEQ ID NO: 31658 - protein, 41 aa, Artificial Sequence
  GFR-binding peptide
  MOD_RES (1)..(3)..(37)..(38): Xaa is C or S
  MOD_RES (15)..(16)..(17)..(18)..(19): Xaa is A or G
  MOD_RES (20)..(21)..(22)..(23): Xaa is A or G or is absent
XGXSEVVMDPIKGYXXXXXXXXXFYLINIPSLRTPVXXTPP

SEQ ID NO: 31659 - protein, 37 aa, Artificial Sequence
  GFR-binding peptide
  MOD_RES (1)..(35)..(36): Xaa is C or S
  MOD_RES (13)..(14)..(15)..(16)..(17): Xaa is A or G
  MOD_RES (18)..(19)..(20)..(21): Xaa is A or G or is absent
XAKVVMNPIKGYXXXXXXXXXFYLVNIPSLKTPAXXA

SEQ ID NO: 31660 - protein, 37 aa, Artificial Sequence
  GFR-binding peptide
  MOD_RES (1)..(3)..(35): Xaa is C or S
XGXSRVVMNPIKGYIVNSSDDFYLVNIPSLKTPAXTP

SEQ ID NO: 31661 - protein, 39 aa, Artificial Sequence
  GFR-binding peptide
  MOD_RES (34)..(35): Xaa is C or S
  MOD_RES (12)..(13)..(14)..(15)..(16): Xaa is A or G
  MOD_RES (17)..(18)..(19)..(20): Xaa is A or G or is absent
ARVVMNPIKGYXXXXXXXXXFYLVNIPSLQTPAXXPKPV

SEQ ID NO: 31662 - protein, 37 aa, Artificial Sequence
  GFR-binding peptide
  MOD_RES (1)..(33)..(34): Xaa is C or S
XAEVVMDPIKGYVVNNAADFYLINIPSLRAPVXXSAP

SEQ ID NO: 31663 - protein, 37 aa, Artificial Sequence
  GFR-binding peptide
  MOD_RES (1)..(3)..(37): Xaa is C or S
  MOD_RES (15)..(16)..(17)..(18)..(19): Xaa is A or G
  MOD_RES (20)..(21)..(22)..(23): Xaa is A or G or is absent
XGXGEVVMEPIKGYXXXXXXXXXFYLMNIPSLETPVX

SEQ ID NO: 31664 - protein, 39 aa, Artificial Sequence
  GFR-binding peptide
  MOD_RES (1)..(34)..(35): Xaa is C or S
XEAVSMGEPIKGYTPVGMDDFYLVNIPSLKTPVXXAKGV

SEQ ID NO: 31665 - protein, 37 aa, Artificial Sequence
  GFR-binding peptide
  MOD_RES (33)..(34): Xaa is C or S
  MOD_RES (11)..(12)..(13)..(14)..(15): Xaa is A or G
  MOD_RES (16)..(17)..(18)..(19): Xaa is A or G or is absent
EVVMEPIKGYXXXXXXXXXFYLMNIPSLETPVXXAKP

SEQ ID NO: 31666 - protein, 32 aa, Artificial Sequence
  GFR-binding peptide
  MOD_RES (1)..(1): Xaa is C or S
XRDVVMGPIKGYIIQQKDNFYLMNIPSMKTPT

SEQ ID NO: 31667 - protein, 35 aa, Artificial Sequence
  GFR-binding peptide
  MOD_RES (1)..(35): Xaa is C or S
  MOD_RES (13)..(14)..(15)..(16)..(17): Xaa is A or G
  MOD_RES (18)..(19)..(20)..(21): Xaa is A or G or is absent
XSRVVMNPIKGYXXXXXXXXXFYLVNIPSLKTPAX

SEQ ID NO: 31668 - protein, 34 aa, Artificial Sequence
  GFR-binding peptide
  MOD_RES (1)..(1): Xaa is C or S
  MOD_RES (13)..(14)..(15)..(16)..(17): Xaa is A or G
  MOD_RES (18)..(19)..(20)..(21): Xaa is A or G or is absent
XESVAMGPIKGYXXXXXXXXXFYLINIPSLKTPV

SEQ ID NO: 31669 - protein, 38 aa, Artificial Sequence
  GFR-binding peptide
  MOD_RES (2)..(4)..(36)..(37): Xaa is C or S
RXGXAEVVMDPIKGYVVNNAADFYLINIPSLRAPVXXS

SEQ ID NO: 31670 - protein, 42 aa, Artificial Sequence
  GFR-binding peptide
  MOD_RES (2)..(4)..(36)..(37): Xaa is C or S
SXGXRDVVMGPIKGYIIQQKDNFYLMNIPSMKTPTXXPGASG

SEQ ID NO: 31671 - protein, 38 aa, Artificial Sequence
  GFR-binding peptide
  MOD_RES (33)..(34): Xaa is C or S
  MOD_RES (11)..(12)..(13)..(14)..(15): Xaa is A or G
  MOD_RES (16)..(17)..(18)..(19): Xaa is A or G or is absent
EVVMEPIKGYXXXXXXXXXFYLMNIPSLETPVXXAKPI

SEQ ID NO: 31672 - protein, 32 aa, Artificial Sequence
  GFR-binding peptide
  MOD_RES (11)..(12)..(13)..(14)..(15): Xaa is A or G
  MOD_RES (16)..(17)..(18)..(19): Xaa is A or G or is absent
RVVMNPIKGYXXXXXXXXXFYLVNIPSLKTPA

SEQ ID NO: 31673 - protein, 36 aa, Artificial Sequence
  GFR-binding peptide
  MOD_RES (33)..(34): Xaa is C or S
  MOD_RES (11)..(12)..(13)..(14)..(15): Xaa is A or G
  MOD_RES (16)..(17)..(18)..(19): Xaa is A or G or is absent
KVVMNPIKGYXXXXXXXXXFYLVNIPSLKTPAXXAK

SEQ ID NO: 31674 - protein, 44 aa, Artificial Sequence
  GFR-binding peptide
  MOD_RES (2)..(4)..(38)..(39): Xaa is C or S
  MOD_RES (16)..(17)..(18)..(19)..(20): Xaa is A or G
  MOD_RES (21)..(22)..(23)..(24): Xaa is A or G or is absent
HXGXSRVVMNPIKGYXXXXXXXXXFYLVNIPSLKTPAXXPKPVH

SEQ ID NO: 31675 - protein, 37 aa, Artificial Sequence
  GFR-binding peptide
  MOD_RES (1)..(3)..(35)..(36): Xaa is C or S
XGXRDVVMGPIKGYIIQQKDNFYLMNIPSMKTPTXXP

SEQ ID NO: 31676 - protein, 32 aa, Artificial Sequence
  GFR-binding peptide
  MOD_RES (32)..(32): Xaa is C or S
ESVAMGPIKGYYTVVGKDFYLINIPSLKTPVX

SEQ ID NO: 31677 - protein, 40 aa, Artificial Sequence
  GFR-binding peptide
  MOD_RES (2)..(4)..(38)..(39): Xaa is C or S
  MOD_RES (16)..(17)..(18)..(19)..(20): Xaa is A or G
  MOD_RES (21)..(22)..(23)..(24): Xaa is A or G or is absent
RXGXGEVVMDPIKGYXXXXXXXXXFYLMNIPSLETPVXXA

SEQ ID NO: 31678 - protein, 38 aa, Artificial Sequence
  GFR-binding peptide
  MOD_RES (33)..(34): Xaa is C or S
EAVSMGEPIKGYTPVGMDDFYLVNIPSLKTPVXXAKGV

SEQ ID NO: 31679 - protein, 43 aa, Artificial Sequence
  GFR-binding peptide
  MOD_RES (1)..(3)..(37)..(38): Xaa is C or S
  MOD_RES (15)..(16)..(17)..(18)..(19): Xaa is A or G
  MOD_RES (20)..(21)..(22)..(23): Xaa is A or G or is absent
XGXSRVVMNPIKGYXXXXXXXXXFYLVNIPSLKTPAXXPKPVH

SEQ ID NO: 31680 - protein, 32 aa, Artificial Sequence
  GFR-binding peptide
  MOD_RES (31)..(31): Xaa is C or S
RVVMNPIKGYIVNSSDDFYLVNIPSLKTPAXT

SEQ ID NO: 31681 - protein, 37 aa, Artificial Sequence
  GFR-binding peptide
  MOD_RES (33)..(34): Xaa is C or S
  MOD_RES (11)..(12)..(13)..(14)..(15): Xaa is A or G
  MOD_RES (16)..(17)..(18)..(19): Xaa is A or G or is absent
RVVMNPIKGYXXXXXXXXXFYLVNIPSLKTPAXXPKP

SEQ ID NO: 31682 - protein, 37 aa, Artificial Sequence
  GFR-binding peptide
  MOD_RES (2)..(4)..(36)..(37): Xaa is C or S
RXGXGEVVMDPIKGYVVKENEDFYLMNIPSLETPVXX

SEQ ID NO: 31683 - protein, 37 aa, Artificial Sequence
  GFR-binding peptide
  MOD_RES (1)..(3)..(35)..(36): Xaa is C or S
XGXSRVVMNPIKGYIVNSSDDFYLVNIPSLKTPAXXP

SEQ ID NO: 31684 - protein, 37 aa, Artificial Sequence
  GFR-binding peptide
  MOD_RES (1)..(3)..(35)..(36): Xaa is C or S
XGXSEVVMDPIKGYVVNNASDFYLINIPSLRTPVXXT

SEQ ID NO: 31685 - protein, 41 aa, Artificial Sequence
  GFR-binding peptide
  MOD_RES (2)..(4)..(36)..(37): Xaa is C or S
HXGXAKVVMNPIKGYIVNNSSDFYLVNIPSLKTPAXXAKPV

SEQ ID NO: 31686 - protein, 39 aa, Artificial Sequence
  GFR-binding peptide
  MOD_RES (2)..(4)..(38)..(39): Xaa is C or S
  MOD_RES (16)..(17)..(18)..(19)..(20): Xaa is A or G
  MOD_RES (21)..(22)..(23)..(24): Xaa is A or G or is absent
HXGXSRVVMNPIKGYXXXXXXXXXFYLVNIPSLKTPAXX

SEQ ID NO: 31687 - protein, 35 aa, Artificial Sequence
  GFR-binding peptide
  MOD_RES (2)..(34): Xaa is C or S
GXSRVVMNPIKGYIVNSSDDFYLVNIPSLKTPAXT

SEQ ID NO: 31688 - protein, 34 aa, Artificial Sequence
  GFR-binding peptide
  MOD_RES (2)..(34): Xaa is C or S
GXAEVVMDPIKGYVVNNAADFYLINIPSLRAPVX

SEQ ID NO: 31689 - protein, 35 aa, Artificial Sequence
  GFR-binding peptide
  MOD_RES (31)..(32): Xaa is C or S
EVVMDPIKGYVVNNASDFYLINIPSLRTPVXXTPP

SEQ ID NO: 31690 - protein, 34 aa, Artificial Sequence
  GFR-binding peptide
  MOD_RES (1)..(33)..(34): Xaa is C or S
XAKVVMNPIKGYIVNNSSDFYLVNIPSLKTPAXX

SEQ ID NO: 31691 - protein, 40 aa, Artificial Sequence
  GFR-binding peptide
  MOD_RES (2)..(34)..(35): Xaa is C or S
GXSRVVMNPIKGYIVNSSDDFYLVNIPSLKTPAXXPKPVY

SEQ ID NO: 31692 - protein, 36 aa, Artificial Sequence
  GFR-binding peptide
  MOD_RES (34)..(34): Xaa is C or S
  MOD_RES (12)..(13)..(14)..(15)..(16): Xaa is A or G
  MOD_RES (17)..(18)..(19)..(20): Xaa is A or G or is absent
SRVVMNPIKGYXXXXXXXXXFYLVNIPSLKTPAXTP

SEQ ID NO: 31693 - protein, 39 aa, Artificial Sequence
  GFR-binding peptide
  MOD_RES (2)..(34)..(35): Xaa is C or S
GXESVAMGPIKGYYTVVGKDFYLINIPSLKTPVXXAKSA

SEQ ID NO: 31694 - protein, 37 aa, Artificial Sequence
  GFR-binding peptide
  MOD_RES (2)..(4): Xaa is C or S
  MOD_RES (16)..(17)..(18)..(19)..(20): Xaa is A or G
  MOD_RES (21)..(22)..(23)..(24): Xaa is A or G or is absent
HXGXAKVVMNPIKGYXXXXXXXXXFYLVNIPSLKTPA

SEQ ID NO: 31695 - protein, 38 aa, Artificial Sequence
  GFR-binding peptide
  MOD_RES (2)..(34)..(35): Xaa is C or S
GXAKVVMNPIKGYIVNNSSDFYLVNIPSLKTPAXXAKP

SEQ ID NO: 31696 - protein, 32 aa, Artificial Sequence
  GFR-binding peptide
  MOD_RES (1)..(1): Xaa is C or S
XAEVVMDPIKGYVVNNAADFYLINIPSLRAPV

SEQ ID NO: 31697 - protein, 39 aa, Artificial Sequence
  GFR-binding peptide
  MOD_RES (2)..(37)..(38): Xaa is C or S
  MOD_RES (15)..(16)..(17)..(18)..(19): Xaa is A or G
  MOD_RES (20)..(21)..(22)..(23): Xaa is A or G or is absent
GXEAVSMGEPIKGYXXXXXXXXXFYLVNIPSLKTPVXXA

SEQ ID NO: 31698 - protein, 37 aa, Artificial Sequence
  GFR-binding peptide
  MOD_RES (2)..(34)..(35): Xaa is C or S
GXRDVVMGPIKGYIIQQKDNFYLMNIPSMKTPTXXPG

SEQ ID NO: 31699 - protein, 35 aa, Artificial Sequence
  GFR-binding peptide
  MOD_RES (31)..(32): Xaa is C or S
KVVMNPIKGYIVNNSSDFYLVNIPSLKTPAXXAKP

SEQ ID NO: 31700 - protein, 34 aa, Artificial Sequence
  GFR-binding peptide
  MOD_RES (2)..(2): Xaa is C or S
  MOD_RES (13)..(14)..(15)..(16)..(17): Xaa is A or G
  MOD_RES (18)..(19)..(20)..(21): Xaa is A or G or is absent
GXEEVIMPIKGYXXXXXXXXXFYLMNIPSTKVPA

SEQ ID NO: 31701 - protein, 34 aa, Artificial Sequence
  GFR-binding peptide
  MOD_RES (31)..(32): Xaa is C or S
RVVMNPIKGYIVNSSDDFYLVNIPSLKTPAXXPK

SEQ ID NO: 31702 - protein, 39 aa, Artificial Sequence
  GFR-binding peptide
  MOD_RES (1)..(35)..(36): Xaa is C or S
  MOD_RES (13)..(14)..(15)..(16)..(17): Xaa is A or G
  MOD_RES (18)..(19)..(20)..(21): Xaa is A or G or is absent
XRDVVMGPIKGYXXXXXXXXXFYLMNIPSMKTPTXXPGA

SEQ ID NO: 31703 - protein, 41 aa, Artificial Sequence
  GFR-binding peptide
  MOD_RES (1)..(3)..(35)..(36): Xaa is C or S
XGXGEVVMDPIKGYVVKENEDFYLMNIPSLETPVXXAKPIK

SEQ ID NO: 31704 - protein, 37 aa, Artificial Sequence
  GFR-binding peptide
  MOD_RES (2)..(36): Xaa is C or S
  MOD_RES (14)..(15)..(16)..(17)..(18): Xaa is A or G
  MOD_RES (19)..(20)..(21)..(22): Xaa is A or G or is absent
GXSRVVMNPIKGYXXXXXXXXXFYLVNIPSLKTPAXT

SEQ ID NO: 31705 - protein, 35 aa, Artificial Sequence
  GFR-binding peptide
  MOD_RES (31)..(32): Xaa is C or S
SVAMGPIKGYYTVVGKDFYLINIPSLKTPVXXAKS

SEQ ID NO: 31706 - protein, 36 aa, Artificial Sequence
  GFR-binding peptide
  MOD_RES (33)..(34): Xaa is C or S
  MOD_RES (11)..(12)..(13)..(14)..(15): Xaa is A or G
  MOD_RES (16)..(17)..(18)..(19): Xaa is A or G or is absent
EEVIMPIKGYXXXXXXXXXFYLMNIPSTKVPAXXTS

SEQ ID NO: 31707 - protein, 39 aa, Artificial Sequence
  GFR-binding peptide
  MOD_RES (1)..(3)..(37)..(38): Xaa is C or S
  MOD_RES (15)..(16)..(17)..(18)..(19): Xaa is A or G
  MOD_RES (20)..(21)..(22)..(23): Xaa is A or G or is absent
XGXGEVVMEPIKGYXXXXXXXXXFYLMNIPSLETPVXXA

SEQ ID NO: 31708 - protein, 38 aa, Artificial Sequence
  GFR-binding peptide
  MOD_RES (2)..(34)..(35): Xaa is C or S
GXAEVVMDPIKGYVVNNAADFYLINIPSLRAPVXXSAP

SEQ ID NO: 31709 - protein, 39 aa, Artificial Sequence
  GFR-binding peptide
  MOD_RES (1)..(3)..(35)..(36): Xaa is C or S
XGXAEVVMDPIKGYVVNNAADFYLINIPSLRAPVXXSAP

SEQ ID NO: 31710 - protein, 35 aa, Artificial Sequence
  GFR-binding peptide
  MOD_RES (2)..(2): Xaa is C or S
  MOD_RES (14)..(15)..(16)..(17)..(18): Xaa is A or G
  MOD_RES (19)..(20)..(21)..(22): Xaa is A or G or is absent
GXSEVVMDPIKGYXXXXXXXXXFYLINIPSLRTPV

SEQ ID NO: 31711 - protein, 40 aa, Artificial Sequence
  GFR-binding peptide
  MOD_RES (1)..(35)..(36): Xaa is C or S
  MOD_RES (13)..(14)..(15)..(16)..(17): Xaa is A or G
  MOD_RES (18)..(19)..(20)..(21): Xaa is A or G or is absent
XSRVVMNPIKGYXXXXXXXXXFYLVNIPSLKTPAXXPKPV

SEQ ID NO: 31712 - protein, 37 aa, Artificial Sequence
  GFR-binding peptide
  MOD_RES (1)..(35): Xaa is C or S
  MOD_RES (13)..(14)..(15)..(16)..(17): Xaa is A or G
  MOD_RES (18)..(19)..(20)..(21): Xaa is A or G or is absent
XSRVVMNPIKGYXXXXXXXXXFYLVNIPSLKTPAXTP

SEQ ID NO: 31713 - protein, 35 aa, Artificial Sequence
  GFR-binding peptide
  MOD_RES (2)..(2): Xaa is C or S
  MOD_RES (14)..(15)..(16)..(17)..(18): Xaa is A or G
  MOD_RES (19)..(20)..(21)..(22): Xaa is A or G or is absent
GXSRVVMNPIKGYXXXXXXXXXFYLVNIPSLKTPA

SEQ ID NO: 31714 - protein, 38 aa, Artificial Sequence
  GFR-binding peptide
  MOD_RES (33)..(34): Xaa is C or S
  MOD_RES (11)..(12)..(13)..(14)..(15): Xaa is A or G
  MOD_RES (16)..(17)..(18)..(19): Xaa is A or G or is absent
EVVMDPIKGYXXXXXXXXXFYLMNIPSLETPVXXAKPI

SEQ ID NO: 31715 - protein, 32 aa, Artificial Sequence
  GFR-binding peptide
  MOD_RES (32)..(32): Xaa is C or S
AKVVMNPIKGYIVNNSSDFYLVNIPSLKTPAX

SEQ ID NO: 31716 - protein, 38 aa, Artificial Sequence
  GFR-binding peptide
  MOD_RES (32)..(33): Xaa is C or S
AKVVMNPIKGYIVNNSSDFYLVNIPSLKTPAXXAKPVA

SEQ ID NO: 31717 - protein, 34 aa, Artificial Sequence
  GFR-binding peptide
  MOD_RES (2)..(2): Xaa is C or S
GXEAVSMGEPIKGYTPVGMDDFYLVNIPSLKTPV

SEQ ID NO: 31718 - protein, 40 aa, Artificial Sequence
  GFR-binding peptide
  MOD_RES (1)..(3)..(35): Xaa is C or S
XGXSRVVMNPIKGYIVNSSDDFYLVNIPSLKTPAXTPKTV

SEQ ID NO: 31719 - protein, 37 aa, Artificial Sequence
  GFR-binding peptide
  MOD_RES (32)..(33): Xaa is C or S
ARVVMNPIKGYIVNSSDDFYLVNIPSLQTPAXXPKPV

SEQ ID NO: 31720 - protein, 37 aa, Artificial Sequence
  GFR-binding peptide
  MOD_RES (31)..(32): Xaa is C or S
KVVMNPIKGYIVNNSSDFYLVNIPSLKTPAXXAKPVA

SEQ ID NO: 31721 - protein, 35 aa, Artificial Sequence
  GFR-binding peptide
  MOD_RES (32)..(33): Xaa is C or S
GEVVMEPIKGYVVKDYEDFYLMNIPSLETPVXXAK

SEQ ID NO: 31722 - protein, 40 aa, Artificial Sequence
  GFR-binding peptide
  MOD_RES (2)..(4)..(38)..(39): Xaa is C or S
  MOD_RES (16)..(17)..(18)..(19)..(20): Xaa is A or G
  MOD_RES (21)..(22)..(23)..(24): Xaa is A or G or is absent
RXGXAEVVMDPIKGYXXXXXXXXXFYLINIPSLRAPVXXS

SEQ ID NO: 31723 - protein, 36 aa, Artificial Sequence
  GFR-binding peptide
  MOD_RES (31)..(32): Xaa is C or S
RVVMNPIKGYIVNSSDDFYLVNIPSLQTPAXXPKPV

SEQ ID NO: 31724 - protein, 39 aa, Artificial Sequence
  GFR-binding peptide
  MOD_RES (2)..(4)..(36)..(37): Xaa is C or S
SXGXRDVVMGPIKGYIIQQKDNFYLMNIPSMKTPTXXPG

SEQ ID NO: 31725 - protein, 37 aa, Artificial Sequence
  GFR-binding peptide
  MOD_RES (1)..(33)..(34): Xaa is C or S
XRDVVMGPIKGYIIQQKDNFYLMNIPSMKTPTXXPGA

SEQ ID NO: 31726 - protein, 39 aa, Artificial Sequence
  GFR-binding peptide
  MOD_RES (2)..(36)..(37): Xaa is C or S
  MOD_RES (14)..(15)..(16)..(17)..(18): Xaa is A or G
  MOD_RES (19)..(20)..(21)..(22): Xaa is A or G or is absent
GXSEVVMDPIKGYXXXXXXXXXFYLINIPSLRTPVXXTP

SEQ ID NO: 31727 - protein, 32 aa, Artificial Sequence
  GFR-binding peptide
  MOD_RES (11)..(12)..(13)..(14)..(15): Xaa is A or G
  MOD_RES (16)..(17)..(18)..(19): Xaa is A or G or is absent
SVAMGPIKGYXXXXXXXXXFYLINIPSLKTPV

SEQ ID NO: 31728 - protein, 40 aa, Artificial Sequence
  GFR-binding peptide
  MOD_RES (2)..(4)..(38)..(39): Xaa is C or S
  MOD_RES (16)..(17)..(18)..(19)..(20): Xaa is A or G
  MOD_RES (21)..(22)..(23)..(24): Xaa is A or G or is absent
HXGXSRVVMNPIKGYXXXXXXXXXFYLVNIPSLKTPAXXP

SEQ ID NO: 31729 - protein, 40 aa, Artificial Sequence
  GFR-binding peptide
  MOD_RES (2)..(36)..(37): Xaa is C or S
  MOD_RES (14)..(15)..(16)..(17)..(18): Xaa is A or G
  MOD_RES (19)..(20)..(21)..(22): Xaa is A or G or is absent
GXGEVVMEPIKGYXXXXXXXXXFYLMNIPSLETPVXXAKP

SEQ ID NO: 31730 - protein, 42 aa, Artificial Sequence
  GFR-binding peptide
  MOD_RES (2)..(4)..(38)..(39): Xaa is C or S
  MOD_RES (16)..(17)..(18)..(19)..(20): Xaa is A or G
  MOD_RES (21)..(22)..(23)..(24): Xaa is A or G or is absent
RXGXESVAMGPIKGYXXXXXXXXXFYLINIPSLKTPVXXAKS

SEQ ID NO: 31731 - protein, 42 aa, Artificial Sequence
  GFR-binding peptide
  MOD_RES (2)..(4)..(36): Xaa is C or S
HXGXSRVVMNPIKGYIVNSSDDFYLVNIPSLKTPAXTPKTVH

SEQ ID NO: 31732 - protein, 38 aa, Artificial Sequence
  GFR-binding peptide
  MOD_RES (2)..(4)..(38): Xaa is C or S
  MOD_RES (16)..(17)..(18)..(19)..(20): Xaa is A or G
  MOD_RES (21)..(22)..(23)..(24): Xaa is A or G or is absent
RXGXSEVVMDPIKGYXXXXXXXXXFYLINIPSLRTPVX

SEQ ID NO: 31733 - protein, 33 aa, Artificial Sequence
  GFR-binding peptide
  MOD_RES (1)..(32)..(33): Xaa is C or S
XEEVIMPIKGYLLVRGNDFYLMNIPSTKVPAXX

SEQ ID NO: 31734 - protein, 36 aa, Artificial Sequence
  GFR-binding peptide
  MOD_RES (1)..(35)..(36): Xaa is C or S
  MOD_RES (13)..(14)..(15)..(16)..(17): Xaa is A or G
  MOD_RES (18)..(19)..(20)..(21): Xaa is A or G or is absent
XAKVVMNPIKGYXXXXXXXXXFYLVNIPSLKTPAXX

SEQ ID NO: 31735 - protein, 42 aa, Artificial Sequence
  GFR-binding peptide
  MOD_RES (2)..(4)..(38)..(39): Xaa is C or S
  MOD_RES (16)..(17)..(18)..(19)..(20): Xaa is A or G
  MOD_RES (21)..(22)..(23)..(24): Xaa is A or G or is absent
HXGXSRVVMNPIKGYXXXXXXXXXFYLVNIPSLKTPAXXPKP

SEQ ID NO: 31736 - protein, 39 aa, Artificial Sequence
  GFR-binding peptide
  MOD_RES (1)..(35): Xaa is C or S
  MOD_RES (13)..(14)..(15)..(16)..(17): Xaa is A or G
  MOD_RES (18)..(19)..(20)..(21): Xaa is A or G or is absent
XSRVVMNPIKGYXXXXXXXXXFYLVNIPSLKTPAXTPKT

SEQ ID NO: 31737 - protein, 35 aa, Artificial Sequence
  GFR-binding peptide
  MOD_RES (2)..(4): Xaa is C or S
RXGXAEVVMDPIKGYVVNNAADFYLINIPSLRAPV

SEQ ID NO: 31738 - protein, 41 aa, Artificial Sequence
  GFR-binding peptide
  MOD_RES (2)..(4)..(37)..(38): Xaa is C or S
RXGXEAVSMGEPIKGYTPVGMDDFYLVNIPSLKTPVXXAKG

SEQ ID NO: 31739 - protein, 32 aa, Artificial Sequence
  GFR-binding peptide
  MOD_RES (1)..(1): Xaa is C or S
XARVVMNPIKGYIVNSSDDFYLVNIPSLQTPA

SEQ ID NO: 31740 - protein, 41 aa, Artificial Sequence
  GFR-binding peptide
  MOD_RES (2)..(4)..(36)..(37): Xaa is C or S
RXGXGEVVMDPIKGYVVKENEDFYLMNIPSLETPVXXAKPI

SEQ ID NO: 31741 - protein, 39 aa, Artificial Sequence
  GFR-binding peptide
  MOD_RES (2)..(4)..(35)..(36): Xaa is C or S
LXGXEEVIMPIKGYLLVRGNDFYLMNIPSTKVPAXXTSP

SEQ ID NO: 31742 - protein, 34 aa, Artificial Sequence
  GFR-binding peptide
  MOD_RES (1)..(1): Xaa is C or S
  MOD_RES (13)..(14)..(15)..(16)..(17): Xaa is A or G
  MOD_RES (18)..(19)..(20)..(21): Xaa is A or G or is absent
XGEVVMDPIKGYXXXXXXXXXFYLMNIPSLETPV

SEQ ID NO: 31743 - protein, 38 aa, Artificial Sequence
  GFR-binding peptide
  MOD_RES (1)..(33)..(34): Xaa is C or S
XARVVMNPIKGYIVNSSDDFYLVNIPSLQTPAXXPKPV

SEQ ID NO: 31744 - protein, 38 aa, Artificial Sequence
  GFR-binding peptide
  MOD_RES (2)..(36)..(37): Xaa is C or S
  MOD_RES (14)..(15)..(16)..(17)..(18): Xaa is A or G
  MOD_RES (19)..(20)..(21)..(22): Xaa is A or G or is absent
GXRDVVMGPIKGYXXXXXXXXXFYLMNIPSMKTPTXXP

SEQ ID NO: 31745 - protein, 39 aa, Artificial Sequence
  GFR-binding peptide
  MOD_RES (1)..(3)..(37)..(38): Xaa is C or S
  MOD_RES (15)..(16)..(17)..(18)..(19): Xaa is A or G
  MOD_RES (20)..(21)..(22)..(23): Xaa is A or G or is absent
XGXESVAMGPIKGYXXXXXXXXXFYLINIPSLKTPVXXA

SEQ ID NO: 31746 - protein, 35 aa, Artificial Sequence
  GFR-binding peptide
  MOD_RES (31)..(32): Xaa is C or S
EEVIMPIKGYLLVRGNDFYLMNIPSTKVPAXXTSP

SEQ ID NO: 31747 - protein, 42 aa, Artificial Sequence
  GFR-binding peptide
  MOD_RES (2)..(4)..(38)..(39): Xaa is C or S
  MOD_RES (16)..(17)..(18)..(19)..(20): Xaa is A or G
  MOD_RES (21)..(22)..(23)..(24): Xaa is A or G or is absent
SXGXRDVVMGPIKGYXXXXXXXXXFYLMNIPSMKTPTXXPGA

SEQ ID NO: 31748 - protein, 42 aa, Artificial Sequence
  GFR-binding peptide
  MOD_RES (2)..(4)..(39)..(40): Xaa is C or S
  MOD_RES (17)..(18)..(19)..(20)..(21): Xaa is A or G
  MOD_RES (22)..(23)..(24)..(25): Xaa is A or G or is absent
RXGXEAVSMGEPIKGYXXXXXXXXXFYLVNIPSLKTPVXXAK

SEQ ID NO: 31749 - protein, 36 aa, Artificial Sequence
  GFR-binding peptide
  MOD_RES (34)..(35): Xaa is C or S
  MOD_RES (12)..(13)..(14)..(15)..(16): Xaa is A or G
  MOD_RES (17)..(18)..(19)..(20): Xaa is A or G or is absent
RDVVMGPIKGYXXXXXXXXXFYLMNIPSMKTPTXXP

SEQ ID NO: 31750 - protein, 37 aa, Artificial Sequence
  GFR-binding peptide
  MOD_RES (34)..(35): Xaa is C or S
  MOD_RES (12)..(13)..(14)..(15)..(16): Xaa is A or G
  MOD_RES (17)..(18)..(19)..(20): Xaa is A or G or is absent
ARVVMNPIKGYXXXXXXXXXFYLVNIPSLQTPAXXPK

SEQ ID NO: 31751 - protein, 35 aa, Artificial Sequence
  GFR-binding peptide
  MOD_RES (1)..(33)..(34): Xaa is C or S
XAEVVMDPIKGYVVNNAADFYLINIPSLRAPVXXS

SEQ ID NO: 31752 - protein, 38 aa, Artificial Sequence
  GFR-binding peptide
  MOD_RES (2)..(36)..(37): Xaa is C or S
  MOD_RES (14)..(15)..(16)..(17)..(18): Xaa is A or G
  MOD_RES (19)..(20)..(21)..(22): Xaa is A or G or is absent
GXSRVVMNPIKGYXXXXXXXXXFYLVNIPSLKTPAXXP

SEQ ID NO: 31753 - protein, 38 aa, Artificial Sequence
  GFR-binding peptide
  MOD_RES (32)..(33): Xaa is C or S
RDVVMGPIKGYIIQQKDNFYLMNIPSMKTPTXXPGASG

SEQ ID NO: 31754 - protein, 34 aa, Artificial Sequence
  GFR-binding peptide
  MOD_RES (1)..(1): Xaa is C or S
  MOD_RES (13)..(14)..(15)..(16)..(17): Xaa is A or G
  MOD_RES (18)..(19)..(20)..(21): Xaa is A or G or is absent
XSRVVMNPIKGYXXXXXXXXXFYLVNIPSLKTPA

SEQ ID NO: 31755 - protein, 35 aa, Artificial Sequence
  GFR-binding peptide
  MOD_RES (1)..(33)..(34): Xaa is C or S
XESVAMGPIKGYYTVVGKDFYLINIPSLKTPVXXA

SEQ ID NO: 31756 - protein, 43 aa, Artificial Sequence
  GFR-binding peptide
  MOD_RES (1)..(3)..(37)..(38): Xaa is C or S
  MOD_RES (15)..(16)..(17)..(18)..(19): Xaa is A or G
  MOD_RES (20)..(21)..(22)..(23): Xaa is A or G or is absent
XGXSRVVMNPIKGYXXXXXXXXXFYLVNIPSLKTPAXXPKPVY

SEQ ID NO: 31757 - protein, 41 aa, Artificial Sequence
  GFR-binding peptide
  MOD_RES (1)..(3)..(37)..(38): Xaa is C or S
  MOD_RES (15)..(16)..(17)..(18)..(19): Xaa is A or G
  MOD_RES (20)..(21)..(22)..(23): Xaa is A or G or is absent
XGXARVVMNPIKGYXXXXXXXXXFYLVNIPSLQTPAXXPKP

SEQ ID NO: 31758 - protein, 35 aa, Artificial Sequence
  GFR-binding peptide
  MOD_RES (2)..(35): Xaa is C or S
  MOD_RES (13)..(14)..(15)..(16)..(17): Xaa is A or G
  MOD_RES (18)..(19)..(20)..(21): Xaa is A or G or is absent
GXEEVIMPIKGYXXXXXXXXXFYLMNIPSTKVPAX

SEQ ID NO: 31759 - protein, 37 aa, Artificial Sequence
  GFR-binding peptide
  MOD_RES (1)..(33)..(34): Xaa is C or S
XARVVMNPIKGYIVNSSDDFYLVNIPSLQTPAXXPKP

SEQ ID NO: 31760 - protein, 39 aa, Artificial Sequence
  GFR-binding peptide
  MOD_RES (1)..(3)..(37)..(38): Xaa is C or S
  MOD_RES (15)..(16)..(17)..(18)..(19): Xaa is A or G
  MOD_RES (20)..(21)..(22)..(23): Xaa is A or G or is absent
XGXGEVVMDPIKGYXXXXXXXXXFYLMNIPSLETPVXXA

SEQ ID NO: 31761 - protein, 41 aa, Artificial Sequence
  GFR-binding peptide
  MOD_RES (1)..(3)..(37)..(38): Xaa is C or S
  MOD_RES (15)..(16)..(17)..(18)..(19): Xaa is A or G
  MOD_RES (20)..(21)..(22)..(23): Xaa is A or G or is absent
XGXRDVVMGPIKGYXXXXXXXXXFYLMNIPSMKTPTXXPGA

SEQ ID NO: 31762 - protein, 34 aa, Artificial Sequence
  GFR-binding peptide
  MOD_RES (33)..(34): Xaa is C or S
EAVSMGEPIKGYTPVGMDDFYLVNIPSLKTPVXX

SEQ ID NO: 31763 - protein, 35 aa, Artificial Sequence
  GFR-binding peptide
  MOD_RES (1)..(35): Xaa is C or S
  MOD_RES (13)..(14)..(15)..(16)..(17): Xaa is A or G
  MOD_RES (18)..(19)..(20)..(21): Xaa is A or G or is absent
XESVAMGPIKGYXXXXXXXXXFYLINIPSLKTPVX

SEQ ID NO: 31764 - protein, 35 aa, Artificial Sequence
  GFR-binding peptide
  MOD_RES (1)..(33)..(34): Xaa is C or S
XARVVMNPIKGYIVNSSDDFYLVNIPSLQTPAXXP

SEQ ID NO: 31765 - protein, 39 aa, Artificial Sequence
  GFR-binding peptide
  MOD_RES (2)..(4)..(38): Xaa is C or S
  MOD_RES (16)..(17)..(18)..(19)..(20): Xaa is A or G
  MOD_RES (21)..(22)..(23)..(24): Xaa is A or G or is absent
HXGXSRVVMNPIKGYXXXXXXXXXFYLVNIPSLKTPAXT

SEQ ID NO: 31766 - protein, 40 aa, Artificial Sequence
  GFR-binding peptide
  MOD_RES (2)..(4)..(36)..(37): Xaa is C or S
RXGXAEVVMDPIKGYVVNNAADFYLINIPSLRAPVXXSAP

SEQ ID NO: 31767 - protein, 36 aa, Artificial Sequence
  GFR-binding peptide
  MOD_RES (1)..(3)..(35)..(36): Xaa is C or S
XGXAEVVMDPIKGYVVNNAADFYLINIPSLRAPVXX

SEQ ID NO: 31768 - protein, 40 aa, Artificial Sequence
  GFR-binding peptide
  MOD_RES (2)..(4)..(36)..(37): Xaa is C or S
HXGXAKVVMNPIKGYIVNNSSDFYLVNIPSLKTPAXXAKP

SEQ ID NO: 31769 - protein, 37 aa, Artificial Sequence
  GFR-binding peptide
  MOD_RES (1)..(33): Xaa is C or S
XSRVVMNPIKGYIVNSSDDFYLVNIPSLKTPAXTPKT

SEQ ID NO: 31770 - protein, 41 aa, Artificial Sequence
  GFR-binding peptide
  MOD_RES (2)..(4)..(36)..(37): Xaa is C or S
RXGXAEVVMDPIKGYVVNNAADFYLINIPSLRAPVXXSAPA

SEQ ID NO: 31771 - protein, 42 aa, Artificial Sequence
  GFR-binding peptide
  MOD_RES (1)..(3)..(37)..(38): Xaa is C or S
  MOD_RES (15)..(16)..(17)..(18)..(19): Xaa is A or G
  MOD_RES (20)..(21)..(22)..(23): Xaa is A or G or is absent
XGXAEVVMDPIKGYXXXXXXXXXFYLINIPSLRAPVXXSAPA

SEQ ID NO: 31772 - protein, 35 aa, Artificial Sequence
  GFR-binding peptide
  MOD_RES (1)..(35): Xaa is C or S
  MOD_RES (13)..(14)..(15)..(16)..(17): Xaa is A or G
  MOD_RES (18)..(19)..(20)..(21): Xaa is A or G or is absent
XGEVVMEPIKGYXXXXXXXXXFYLMNIPSLETPVX

SEQ ID NO: 31773 - protein, 36 aa, Artificial Sequence
  GFR-binding peptide
  MOD_RES (2)..(34)..(35): Xaa is C or S
GXGEVVMEPIKGYVVKDYEDFYLMNIPSLETPVXXA

SEQ ID NO: 31774 - protein, 37 aa, Artificial Sequence
  GFR-binding peptide
  MOD_RES (2)..(4): Xaa is C or S
  MOD_RES (16)..(17)..(18)..(19)..(20): Xaa is A or G
  MOD_RES (21)..(22)..(23)..(24): Xaa is A or G or is absent
RXGXSEVVMDPIKGYXXXXXXXXXFYLINIPSLRTPV

SEQ ID NO: 31775 - protein, 32 aa, Artificial Sequence
  GFR-binding peptide
EAVSMGEPIKGYTPVGMDDFYLVNIPSLKTPV

SEQ ID NO: 31776 - protein, 38 aa, Artificial Sequence
  GFR-binding peptide
  MOD_RES (1)..(3)..(36)..(37): Xaa is C or S
  MOD_RES (14)..(15)..(16)..(17)..(18): Xaa is A or G
  MOD_RES (19)..(20)..(21)..(22): Xaa is A or G or is absent
XGXEEVIMPIKGYXXXXXXXXXFYLMNIPSTKVPAXXT

SEQ ID NO: 31777 - protein, 38 aa, Artificial Sequence
  GFR-binding peptide
  MOD_RES (1)..(35)..(36): Xaa is C or S
  MOD_RES (13)..(14)..(15)..(16)..(17): Xaa is A or G
  MOD_RES (18)..(19)..(20)..(21): Xaa is A or G or is absent
XSEVVMDPIKGYXXXXXXXXXFYLINIPSLRTPVXXTP

SEQ ID NO: 31778 - protein, 40 aa, Artificial Sequence
  GFR-binding peptide
  MOD_RES (1)..(3)..(36)..(37): Xaa is C or S
  MOD_RES (14)..(15)..(16)..(17)..(18): Xaa is A or G
  MOD_RES (19)..(20)..(21)..(22): Xaa is A or G or is absent
XGXEEVIMPIKGYXXXXXXXXXFYLMNIPSTKVPAXXTSP

SEQ ID NO: 31779 - protein, 35 aa, Artificial Sequence
  GFR-binding peptide
  MOD_RES (2)..(34)..(35): Xaa is C or S
GXESVAMGPIKGYYTVVGKDFYLINIPSLKTPVXX

SEQ ID NO: 31780 - protein, 36 aa, Artificial Sequence
  GFR-binding peptide
  MOD_RES (31)..(32): Xaa is C or S
EVVMDPIKGYVVKENEDFYLMNIPSLETPVXXAKPI

SEQ ID NO: 31781 - protein, 40 aa, Artificial Sequence
  GFR-binding peptide
  MOD_RES (2)..(34): Xaa is C or S
GXSRVVMNPIKGYIVNSSDDFYLVNIPSLKTPAXTPKTVH

SEQ ID NO: 31782 - protein, 39 aa, Artificial Sequence
  GFR-binding peptide
  MOD_RES (2)..(4)..(36)..(37): Xaa is C or S
RXGXGEVVMDPIKGYVVKENEDFYLMNIPSLETPVXXAK

SEQ ID NO: 31783 - protein, 35 aa, Artificial Sequence
  GFR-binding peptide
  MOD_RES (1)..(3): Xaa is C or S
XGXEAVSMGEPIKGYTPVGMDDFYLVNIPSLKTPV

SEQ ID NO: 31784 - protein, 36 aa, Artificial Sequence
  GFR-binding peptide
  MOD_RES (31)..(32): Xaa is C or S
RVVMNPIKGYIVNSSDDFYLVNIPSLKTPAXXPKPV

SEQ ID NO: 31785 - protein, 37 aa, Artificial Sequence
  GFR-binding peptide
  MOD_RES (1)..(3)..(34)..(35): Xaa is C or S
XGXEEVIMPIKGYLLVRGNDFYLMNIPSTKVPAXXTS

SEQ ID NO: 31786 - protein, 41 aa, Artificial Sequence
  GFR-binding peptide
  MOD_RES (1)..(3)..(35)..(36): Xaa is C or S
XGXSEVVMDPIKGYVVNNASDFYLINIPSLRTPVXXTPPTS

SEQ ID NO: 31787 - protein, 36 aa, Artificial Sequence
  GFR-binding peptide
  MOD_RES (34)..(35): Xaa is C or S
  MOD_RES (12)..(13)..(14)..(15)..(16): Xaa is A or G
  MOD_RES (17)..(18)..(19)..(20): Xaa is A or G or is absent
AEVVMDPIKGYXXXXXXXXXFYLINIPSLRAPVXXS

SEQ ID NO: 31788 - protein, 36 aa, Artificial Sequence
  GFR-binding peptide
  MOD_RES (33)..(34): Xaa is C or S
  MOD_RES (11)..(12)..(13)..(14)..(15): Xaa is A or G
  MOD_RES (16)..(17)..(18)..(19): Xaa is A or G or is absent
RVVMNPIKGYXXXXXXXXXFYLVNIPSLQTPAXXPK

SEQ ID NO: 31789 - protein, 36 aa, Artificial Sequence
  GFR-binding peptide
  MOD_RES (2)..(36): Xaa is C or S
  MOD_RES (14)..(15)..(16)..(17)..(18): Xaa is A or G
  MOD_RES (19)..(20)..(21)..(22): Xaa is A or G or is absent
GXESVAMGPIKGYXXXXXXXXXFYLINIPSLKTPVX

SEQ ID NO: 31790 - protein, 32 aa, Artificial Sequence
  GFR-binding peptide
  MOD_RES (11)..(12)..(13)..(14)..(15): Xaa is A or G
  MOD_RES (16)..(17)..(18)..(19): Xaa is A or G or is absent
RVVMNPIKGYXXXXXXXXXFYLVNIPSLQTPA

SEQ ID NO: 31791 - protein, 40 aa, Artificial Sequence
  GFR-binding peptide
  MOD_RES (1)..(35)..(36): Xaa is C or S
  MOD_RES (13)..(14)..(15)..(16)..(17): Xaa is A or G
  MOD_RES (18)..(19)..(20)..(21): Xaa is A or G or is absent
XSEVVMDPIKGYXXXXXXXXXFYLINIPSLRTPVXXTPPT

SEQ ID NO: 31792 - protein, 39 aa, Artificial Sequence
  GFR-binding peptide
  MOD_RES (2)..(34)..(35): Xaa is C or S
GXSEVVMDPIKGYVVNNASDFYLINIPSLRTPVXXTPPT

SEQ ID NO: 31793 - protein, 35 aa, Artificial Sequence
  GFR-binding peptide
  MOD_RES (1)..(3): Xaa is C or S
  MOD_RES (14)..(15)..(16)..(17)..(18): Xaa is A or G
  MOD_RES (19)..(20)..(21)..(22): Xaa is A or G or is absent
XGXEEVIMPIKGYXXXXXXXXXFYLMNIPSTKVPA

SEQ ID NO: 31794 - protein, 36 aa, Artificial Sequence
  GFR-binding peptide
  MOD_RES (31)..(32): Xaa is C or S
EEVIMPIKGYLLVRGNDFYLMNIPSTKVPAXXTSPV

SEQ ID NO: 31795 - protein, 37 aa, Artificial Sequence
  GFR-binding peptide
  MOD_RES (1)..(3)..(35)..(36): Xaa is C or S
XGXAKVVMNPIKGYIVNNSSDFYLVNIPSLKTPAXXA

SEQ ID NO: 31796 - protein, 40 aa, Artificial Sequence
  GFR-binding peptide
  MOD_RES (1)..(3)..(37)..(38): Xaa is C or S
  MOD_RES (15)..(16)..(17)..(18)..(19): Xaa is A or G
  MOD_RES (20)..(21)..(22)..(23): Xaa is A or G or is absent
XGXGEVVMEPIKGYXXXXXXXXXFYLMNIPSLETPVXXAK

SEQ ID NO: 31797 - protein, 37 aa, Artificial Sequence
  GFR-binding peptide
  MOD_RES (2)..(4)..(37): Xaa is C or S
  MOD_RES (15)..(16)..(17)..(18)..(19): Xaa is A or G
  MOD_RES (20)..(21)..(22)..(23): Xaa is A or G or is absent
LXGXEEVIMPIKGYXXXXXXXXXFYLMNIPSTKVPAX

SEQ ID NO: 31798 - protein, 41 aa, Artificial Sequence
  GFR-binding peptide
  MOD_RES (2)..(4)..(36): Xaa is C or S
HXGXSRVVMNPIKGYIVNSSDDFYLVNIPSLKTPAXTPKTV

SEQ ID NO: 31799 - protein, 37 aa, Artificial Sequence
  GFR-binding peptide
  MOD_RES (2)..(4): Xaa is C or S
  MOD_RES (16)..(17)..(18)..(19)..(20): Xaa is A or G
  MOD_RES (21)..(22)..(23)..(24): Xaa is A or G or is absent
HXGXSRVVMNPIKGYXXXXXXXXXFYLVNIPSLKTPA

SEQ ID NO: 31800 - protein, 35 aa, Artificial Sequence
  GFR-binding peptide
  MOD_RES (34)..(35): Xaa is C or S
  MOD_RES (12)..(13)..(14)..(15)..(16): Xaa is A or G
  MOD_RES (17)..(18)..(19)..(20): Xaa is A or G or is absent
RDVVMGPIKGYXXXXXXXXXFYLMNIPSMKTPTXX

SEQ ID NO: 31801 - protein, 45 aa, Artificial Sequence
  GFR-binding peptide
  MOD_RES (2)..(4)..(39)..(40): Xaa is C or S
  MOD_RES (17)..(18)..(19)..(20)..(21): Xaa is A or G
  MOD_RES (22)..(23)..(24)..(25): Xaa is A or G or is absent
RXGXEAVSMGEPIKGYXXXXXXXXXFYLVNIPSLKTPVXXAKGVK

SEQ ID NO: 31802 - protein, 33 aa, Artificial Sequence
  GFR-binding peptide
  MOD_RES (32)..(33): Xaa is C or S
AKVVMNPIKGYIVNNSSDFYLVNIPSLKTPAXX

SEQ ID NO: 31803 - protein, 36 aa, Artificial Sequence
  GFR-binding peptide
  MOD_RES (2)..(4)..(36): Xaa is C or S
HXGXSRVVMNPIKGYIVNSSDDFYLVNIPSLKTPAX

SEQ ID NO: 31804 - protein, 39 aa, Artificial Sequence
  GFR-binding peptide
  MOD_RES (33)..(34): Xaa is C or S
  MOD_RES (11)..(12)..(13)..(14)..(15): Xaa is A or G
  MOD_RES (16)..(17)..(18)..(19): Xaa is A or G or is absent
EVVMEPIKGYXXXXXXXXXFYLMNIPSLETPVXXAKPIS

SEQ ID NO: 31805 - protein, 32 aa, Artificial Sequence
  GFR-binding peptide
  MOD_RES (1)..(1): Xaa is C or S
XSEVVMDPIKGYVVNNASDFYLINIPSLRTPV

SEQ ID NO: 31806 - protein, 35 aa, Artificial Sequence
  GFR-binding peptide
  MOD_RES (33)..(34): Xaa is C or S
  MOD_RES (11)..(12)..(13)..(14)..(15): Xaa is A or G
  MOD_RES (16)..(17)..(18)..(19): Xaa is A or G or is absent
KVVMNPIKGYXXXXXXXXXFYLVNIPSLKTPAXXA

SEQ ID NO: 31807 - protein, 39 aa, Artificial Sequence
  GFR-binding peptide
  MOD_RES (1)..(35)..(36): Xaa is C or S
  MOD_RES (13)..(14)..(15)..(16)..(17): Xaa is A or G
  MOD_RES (18)..(19)..(20)..(21): Xaa is A or G or is absent
XARVVMNPIKGYXXXXXXXXXFYLVNIPSLQTPAXXPKP

SEQ ID NO: 31808 - protein, 38 aa, Artificial Sequence
  GFR-binding peptide
  MOD_RES (33)..(34): Xaa is C or S
  MOD_RES (11)..(12)..(13)..(14)..(15): Xaa is A or G
  MOD_RES (16)..(17)..(18)..(19): Xaa is A or G or is absent
RVVMNPIKGYXXXXXXXXXFYLVNIPSLKTPAXXPKPV

SEQ ID NO: 31809 - protein, 32 aa, Artificial Sequence
  GFR-binding peptide
  MOD_RES (11)..(12)..(13)..(14)..(15): Xaa is A or G
  MOD_RES (16)..(17)..(18)..(19): Xaa is A or G or is absent
EVVMEPIKGYXXXXXXXXXFYLMNIPSLETPV

SEQ ID NO: 31810 - protein, 36 aa, Artificial Sequence
  GFR-binding peptide
  MOD_RES (2)..(4)..(36): Xaa is C or S
HXGXAKVVMNPIKGYIVNNSSDFYLVNIPSLKTPAX

SEQ ID NO: 31811 - protein, 31 aa, Artificial Sequence
  GFR-binding peptide
  MOD_RES (31)..(31): Xaa is C or S
EEVIMPIKGYLLVRGNDFYLMNIPSTKVPAX

SEQ ID NO: 31812 - protein, 41 aa, Artificial Sequence
  GFR-binding peptide
  MOD_RES (2)..(36)..(37): Xaa is C or S
  MOD_RES (14)..(15)..(16)..(17)..(18): Xaa is A or G
  MOD_RES (19)..(20)..(21)..(22): Xaa is A or G or is absent
GXESVAMGPIKGYXXXXXXXXXFYLINIPSLKTPVXXAKSA

SEQ ID NO: 31813 - protein, 34 aa, Artificial Sequence
  GFR-binding peptide
  MOD_RES (32)..(33): Xaa is C or S
ESVAMGPIKGYYTVVGKDFYLINIPSLKTPVXXA

SEQ ID NO: 31814 - protein, 34 aa, Artificial Sequence
  GFR-binding peptide
  MOD_RES (1)..(3): Xaa is C or S
XGXGEVVMDPIKGYVVKENEDFYLMNIPSLETPV

SEQ ID NO: 31815 - protein, 34 aa, Artificial Sequence
  GFR-binding peptide
  MOD_RES (32)..(33): Xaa is C or S
SEVVMDPIKGYVVNNASDFYLINIPSLRTPVXXT

SEQ ID NO: 31816 - protein, 32 aa, Artificial Sequence
  GFR-binding peptide
  MOD_RES (32)..(32): Xaa is C or S
RDVVMGPIKGYIIQQKDNFYLMNIPSMKTPTX

SEQ ID NO: 31817 - protein, 41 aa, Artificial Sequence
  GFR-binding peptide
  MOD_RES (2)..(4)..(38)..(39): Xaa is C or S
  MOD_RES (16)..(17)..(18)..(19)..(20): Xaa is A or G
  MOD_RES (21)..(22)..(23)..(24): Xaa is A or G or is absent
HXGXAKVVMNPIKGYXXXXXXXXXFYLVNIPSLKTPAXXAK

SEQ ID NO: 31818 - protein, 40 aa, Artificial Sequence
  GFR-binding peptide
  MOD_RES (2)..(34)..(35): Xaa is C or S
GXGEVVMEPIKGYVVKDYEDFYLMNIPSLETPVXXAKPIS

SEQ ID NO: 31819 - protein, 40 aa, Artificial Sequence
  GFR-binding peptide
  MOD_RES (2)..(4)..(38): Xaa is C or S
  MOD_RES (16)..(17)..(18)..(19)..(20): Xaa is A or G
  MOD_RES (21)..(22)..(23)..(24): Xaa is A or G or is absent
HXGXSRVVMNPIKGYXXXXXXXXXFYLVNIPSLKTPAXTP

SEQ ID NO: 31820 - protein, 33 aa, Artificial Sequence
  GFR-binding peptide
  MOD_RES (12)..(13)..(14)..(15)..(16): Xaa is A or G
  MOD_RES (17)..(18)..(19)..(20): Xaa is A or G or is absent
GEVVMDPIKGYXXXXXXXXXFYLMNIPSLETPV

SEQ ID NO: 31821 - protein, 40 aa, Artificial Sequence
  GFR-binding peptide
  MOD_RES (2)..(34)..(35): Xaa is C or S
GXESVAMGPIKGYYTVVGKDFYLINIPSLKTPVXXAKSAK

SEQ ID NO: 31822 - protein, 33 aa, Artificial Sequence
  GFR-binding peptide
  MOD_RES (12)..(13)..(14)..(15)..(16): Xaa is A or G
  MOD_RES (17)..(18)..(19)..(20): Xaa is A or G or is absent
AKVVMNPIKGYXXXXXXXXXFYLVNIPSLKTPA

SEQ ID NO: 31823 - protein, 38 aa, Artificial Sequence
  GFR-binding peptide
  MOD_RES (32)..(33): Xaa is C or S
ESVAMGPIKGYYTVVGKDFYLINIPSLKTPVXXAKSAK

SEQ ID NO: 31824 - protein, 36 aa, Artificial Sequence
  GFR-binding peptide
  MOD_RES (34)..(35): Xaa is C or S
  MOD_RES (12)..(13)..(14)..(15)..(16): Xaa is A or G
  MOD_RES (17)..(18)..(19)..(20): Xaa is A or G or is absent
GEVVMEPIKGYXXXXXXXXXFYLMNIPSLETPVXXA

SEQ ID NO: 31825 - protein, 36 aa, Artificial Sequence
  GFR-binding peptide
  MOD_RES (1)..(3): Xaa is C or S
  MOD_RES (15)..(16)..(17)..(18)..(19): Xaa is A or G
  MOD_RES (20)..(21)..(22)..(23): Xaa is A or G or is absent
XGXGEVVMDPIKGYXXXXXXXXXFYLMNIPSLETPV

SEQ ID NO: 31826 - protein, 37 aa, Artificial Sequence
  GFR-binding peptide
  MOD_RES (2)..(4): Xaa is C or S
  MOD_RES (16)..(17)..(18)..(19)..(20): Xaa is A or G
  MOD_RES (21)..(22)..(23)..(24): Xaa is A or G or is absent
RXGXGEVVMEPIKGYXXXXXXXXXFYLMNIPSLETPV

SEQ ID NO: 31827 - protein, 42 aa, Artificial Sequence
  GFR-binding peptide
  MOD_RES (2)..(36)..(37): Xaa is C or S
  MOD_RES (14)..(15)..(16)..(17)..(18): Xaa is A or G
  MOD_RES (19)..(20)..(21)..(22): Xaa is A or G or is absent
GXSRVVMNPIKGYXXXXXXXXXFYLVNIPSLKTPAXXPKPVY

SEQ ID NO: 31828 - protein, 38 aa, Artificial Sequence
  GFR-binding peptide
  MOD_RES (1)..(35)..(36): Xaa is C or S
  MOD_RES (13)..(14)..(15)..(16)..(17): Xaa is A or G
  MOD_RES (18)..(19)..(20)..(21): Xaa is A or G or is absent
XGEVVMEPIKGYXXXXXXXXXFYLMNIPSLETPVXXAK

SEQ ID NO: 31829 - protein, 38 aa, Artificial Sequence
  GFR-binding peptide
  MOD_RES (2)..(36)..(37): Xaa is C or S
  MOD_RES (14)..(15)..(16)..(17)..(18): Xaa is A or G
  MOD_RES (19)..(20)..(21)..(22): Xaa is A or G or is absent
GXAEVVMDPIKGYXXXXXXXXXFYLINIPSLRAPVXXS

SEQ ID NO: 31830 - protein, 34 aa, Artificial Sequence
  GFR-binding peptide
  MOD_RES (1)..(33): Xaa is C or S
XSRVVMNPIKGYIVNSSDDFYLVNIPSLKTPAXT

SEQ ID NO: 31831 - protein, 38 aa, Artificial Sequence
  GFR-binding peptide
  MOD_RES (1)..(35)..(36): Xaa is C or S
  MOD_RES (13)..(14)..(15)..(16)..(17): Xaa is A or G
  MOD_RES (18)..(19)..(20)..(21): Xaa is A or G or is absent
XESVAMGPIKGYXXXXXXXXXFYLINIPSLKTPVXXAK

SEQ ID NO: 31832 - protein, 33 aa, Artificial Sequence
  GFR-binding peptide
  MOD_RES (12)..(13)..(14)..(15)..(16): Xaa is A or G
  MOD_RES (17)..(18)..(19)..(20): Xaa is A or G or is absent
SRVVMNPIKGYXXXXXXXXXFYLVNIPSLKTPA

SEQ ID NO: 31833 - protein, 43 aa, Artificial Sequence
  GFR-binding peptide
  MOD_RES (2)..(4)..(39)..(40): Xaa is C or S
  MOD_RES (17)..(18)..(19)..(20)..(21): Xaa is A or G
  MOD_RES (22)..(23)..(24)..(25): Xaa is A or G or is absent
RXGXEAVSMGEPIKGYXXXXXXXXXFYLVNIPSLKTPVXXAKG

SEQ ID NO: 31834 - protein, 40 aa, Artificial Sequence
  GFR-binding peptide
  MOD_RES (1)..(3)..(35)..(36): Xaa is C or S
XGXAEVVMDPIKGYVVNNAADFYLINIPSLRAPVXXSAPA

SEQ ID NO: 31835 - protein, 36 aa, Artificial Sequence
  GFR-binding peptide
  MOD_RES (1)..(3)..(35)..(36): Xaa is C or S
XGXESVAMGPIKGYYTVVGKDFYLINIPSLKTPVXX

SEQ ID NO: 31836 - protein, 36 aa, Artificial Sequence
  GFR-binding peptide
  MOD_RES (1)..(3): Xaa is C or S
  MOD_RES (15)..(16)..(17)..(18)..(19): Xaa is A or G
  MOD_RES (20)..(21)..(22)..(23): Xaa is A or G or is absent
XGXAEVVMDPIKGYXXXXXXXXXFYLINIPSLRAPV

SEQ ID NO: 31837 - protein, 30 aa, Artificial Sequence
  GFR-binding peptide
EVVMDPIKGYVVNNASDFYLINIPSLRTPV

SEQ ID NO: 31838 - protein, 35 aa, Artificial Sequence
  GFR-binding peptide
  MOD_RES (2)..(34)..(35): Xaa is C or S
GXGEVVMDPIKGYVVKENEDFYLMNIPSLETPVXX

SEQ ID NO: 31839 - protein, 38 aa, Artificial Sequence
  GFR-binding peptide
  MOD_RES (35)..(36): Xaa is C or S
  MOD_RES (13)..(14)..(15)..(16)..(17): Xaa is A or G
  MOD_RES (18)..(19)..(20)..(21): Xaa is A or G or is absent
EAVSMGEPIKGYXXXXXXXXXFYLVNIPSLKTPVXXAK

SEQ ID NO: 31840 - protein, 34 aa, Artificial Sequence
  GFR-binding peptide
  MOD_RES (1)..(3): Xaa is C or S
XGXAEVVMDPIKGYVVNNAADFYLINIPSLRAPV

SEQ ID NO: 31841 - protein, 33 aa, Artificial Sequence
  GFR-binding peptide
  MOD_RES (2)..(2): Xaa is C or S
GXGEVVMEPIKGYVVKDYEDFYLMNIPSLETPV

SEQ ID NO: 31842 - protein, 34 aa, Artificial Sequence
  GFR-binding peptide
  MOD_RES (31)..(32): Xaa is C or S
EEVIMPIKGYLLVRGNDFYLMNIPSTKVPAXXTS

SEQ ID NO: 31843 - protein, 40 aa, Artificial Sequence
  GFR-binding peptide
  MOD_RES (1)..(35)..(36): Xaa is C or S
  MOD_RES (13)..(14)..(15)..(16)..(17): Xaa is A or G
  MOD_RES (18)..(19)..(20)..(21): Xaa is A or G or is absent
XGEVVMEPIKGYXXXXXXXXXFYLMNIPSLETPVXXAKPI

SEQ ID NO: 31844 - protein, 33 aa, Artificial Sequence
  GFR-binding peptide
  MOD_RES (12)..(13)..(14)..(15)..(16): Xaa is A or G
  MOD_RES (17)..(18)..(19)..(20): Xaa is A or G or is absent
ESVAMGPIKGYXXXXXXXXXFYLINIPSLKTPV

SEQ ID NO: 31845 - protein, 37 aa, Artificial Sequence
  GFR-binding peptide
  MOD_RES (2)..(4)..(36)..(37): Xaa is C or S
HXGXSRVVMNPIKGYIVNSSDDFYLVNIPSLKTPAXX

SEQ ID NO: 31846 - protein, 41 aa, Artificial Sequence
  GFR-binding peptide
  MOD_RES (1)..(3)..(35)..(36): Xaa is C or S
XGXAEVVMDPIKGYVVNNAADFYLINIPSLRAPVXXSAPAA

SEQ ID NO: 31847 - protein, 41 aa, Artificial Sequence
  GFR-binding peptide
  MOD_RES (1)..(3)..(35)..(36): Xaa is C or S
XGXAKVVMNPIKGYIVNNSSDFYLVNIPSLKTPAXXAKPVA

SEQ ID NO: 31848 - protein, 35 aa, Artificial Sequence
  GFR-binding peptide
  MOD_RES (33)..(33): Xaa is C or S
  MOD_RES (11)..(12)..(13)..(14)..(15): Xaa is A or G
  MOD_RES (16)..(17)..(18)..(19): Xaa is A or G or is absent
RVVMNPIKGYXXXXXXXXXFYLVNIPSLKTPAXTP

SEQ ID NO: 31849 - protein, 38 aa, Artificial Sequence
  GFR-binding peptide
  MOD_RES (2)..(34)..(35): Xaa is C or S
GXGEVVMDPIKGYVVKENEDFYLMNIPSLETPVXXAKP

SEQ ID NO: 31850 - protein, 37 aa, Artificial Sequence
  GFR-binding peptide
  MOD_RES (1)..(35)..(36): Xaa is C or S
  MOD_RES (13)..(14)..(15)..(16)..(17): Xaa is A or G
  MOD_RES (18)..(19)..(20)..(21): Xaa is A or G or is absent
XAEVVMDPIKGYXXXXXXXXXFYLINIPSLRAPVXXS

SEQ ID NO: 31851 - protein, 40 aa, Artificial Sequence
  GFR-binding peptide
  MOD_RES (2)..(4)..(38)..(39): Xaa is C or S
  MOD_RES (16)..(17)..(18)..(19)..(20): Xaa is A or G
  MOD_RES (21)..(22)..(23)..(24): Xaa is A or G or is absent
SXGXRDVVMGPIKGYXXXXXXXXXFYLMNIPSMKTPTXXP

SEQ ID NO: 31852 - protein, 40 aa, Artificial Sequence
  GFR-binding peptide
  MOD_RES (2)..(4)..(35)..(36): Xaa is C or S
LXGXEEVIMPIKGYLLVRGNDFYLMNIPSTKVPAXXTSPV

SEQ ID NO: 31853 - protein, 41 aa, Artificial Sequence
  GFR-binding peptide
  MOD_RES (1)..(3)..(37)..(38): Xaa is C or S
  MOD_RES (15)..(16)..(17)..(18)..(19): Xaa is A or G
  MOD_RES (20)..(21)..(22)..(23): Xaa is A or G or is absent
XGXGEVVMDPIKGYXXXXXXXXXFYLMNIPSLETPVXXAKP

SEQ ID NO: 31854 - protein, 39 aa, Artificial Sequence
  GFR-binding peptide
  MOD_RES (2)..(34)..(35): Xaa is C or S
GXRDVVMGPIKGYIIQQKDNFYLMNIPSMKTPTXXPGAS

SEQ ID NO: 31855 - protein, 35 aa, Artificial Sequence
  GFR-binding peptide
  MOD_RES (2)..(34)..(35): Xaa is C or S
GXSEVVMDPIKGYVVNNASDFYLINIPSLRTPVXX

SEQ ID NO: 31856 - protein, 31 aa, Artificial Sequence
  GFR-binding peptide
SEVVMDPIKGYVVNNASDFYLINIPSLRTPV

SEQ ID NO: 31857 - protein, 35 aa, Artificial Sequence
  GFR-binding peptide
  MOD_RES (31)..(32): Xaa is C or S
EVVMDPIKGYVVKENEDFYLMNIPSLETPVXXAKP

SEQ ID NO: 31858 - protein, 37 aa, Artificial Sequence
  GFR-binding peptide
  MOD_RES (2)..(4)..(36)..(37): Xaa is C or S
RXGXAEVVMDPIKGYVVNNAADFYLINIPSLRAPVXX

SEQ ID NO: 31859 - protein, 41 aa, Artificial Sequence
  GFR-binding peptide
  MOD_RES (2)..(36)..(37): Xaa is C or S
  MOD_RES (14)..(15)..(16)..(17)..(18): Xaa is A or G
  MOD_RES (19)..(20)..(21)..(22): Xaa is A or G or is absent
GXAKVVMNPIKGYXXXXXXXXXFYLVNIPSLKTPAXXAKPV

SEQ ID NO: 31860 - protein, 36 aa, Artificial Sequence
  GFR-binding peptide
  MOD_RES (1)..(3)..(35)..(36): Xaa is C or S
XGXGEVVMEPIKGYVVKDYEDFYLMNIPSLETPVXX

SEQ ID NO: 31861 - protein, 33 aa, Artificial Sequence
  GFR-binding peptide
  MOD_RES (31)..(32): Xaa is C or S
KVVMNPIKGYIVNNSSDFYLVNIPSLKTPAXXA

SEQ ID NO: 31862 - protein, 43 aa, Artificial Sequence
  GFR-binding peptide
  MOD_RES (2)..(4)..(37)..(38): Xaa is C or S
  MOD_RES (15)..(16)..(17)..(18)..(19): Xaa is A or G
  MOD_RES (20)..(21)..(22)..(23): Xaa is A or G or is absent
LXGXEEVIMPIKGYXXXXXXXXXFYLMNIPSTKVPAXXTSPVR

SEQ ID NO: 31863 - protein, 34 aa, Artificial Sequence
  GFR-binding peptide
  MOD_RES (1)..(33)..(34): Xaa is C or S
XRDVVMGPIKGYIIQQKDNFYLMNIPSMKTPTXX

SEQ ID NO: 31864 - protein, 36 aa, Artificial Sequence
  GFR-binding peptide
  MOD_RES (1)..(3)..(36): Xaa is C or S
XGXEAVSMGEPIKGYTPVGMDDFYLVNIPSLKTPVX

SEQ ID NO: 31865 - protein, 31 aa, Artificial Sequence
  GFR-binding peptide
  MOD_RES (31)..(31): Xaa is C or S
EVVMDPIKGYVVNNASDFYLINIPSLRTPVX

SEQ ID NO: 31866 - protein, 37 aa, Artificial Sequence
  GFR-binding peptide
  MOD_RES (33)..(34): Xaa is C or S
  MOD_RES (11)..(12)..(13)..(14)..(15): Xaa is A or G
  MOD_RES (16)..(17)..(18)..(19): Xaa is A or G or is absent
EVVMDPIKGYXXXXXXXXXFYLMNIPSLETPVXXAKP

SEQ ID NO: 31867 - protein, 41 aa, Artificial Sequence
  GFR-binding peptide
  MOD_RES (2)..(4)..(38)..(39): Xaa is C or S
  MOD_RES (16)..(17)..(18)..(19)..(20): Xaa is A or G
  MOD_RES (21)..(22)..(23)..(24): Xaa is A or G or is absent
SXGXRDVVMGPIKGYXXXXXXXXXFYLMNIPSMKTPTXXPG

SEQ ID NO: 31868 - protein, 33 aa, Artificial Sequence
  GFR-binding peptide
  MOD_RES (31)..(32): Xaa is C or S
SVAMGPIKGYYTVVGKDFYLINIPSLKTPVXXA

SEQ ID NO: 31869 - protein, 36 aa, Artificial Sequence
  GFR-binding peptide
  MOD_RES (2)..(4)..(36): Xaa is C or S
RXGXESVAMGPIKGYYTVVGKDFYLINIPSLKTPVX

SEQ ID NO: 31870 - protein, 36 aa, Artificial Sequence
  GFR-binding peptide
  MOD_RES (1)..(3)..(36): Xaa is C or S
  MOD_RES (14)..(15)..(16)..(17)..(18): Xaa is A or G
  MOD_RES (19)..(20)..(21)..(22): Xaa is A or G or is absent
XGXEEVIMPIKGYXXXXXXXXXFYLMNIPSTKVPAX

SEQ ID NO: 31871 - protein, 32 aa, Artificial Sequence
  GFR-binding peptide
  MOD_RES (11)..(12)..(13)..(14)..(15): Xaa is A or G
  MOD_RES (16)..(17)..(18)..(19): Xaa is A or G or is absent
EVVMDPIKGYXXXXXXXXXFYLMNIPSLETPV

SEQ ID NO: 31872 - protein, 38 aa, Artificial Sequence
  GFR-binding peptide
  MOD_RES (2)..(4)..(38): Xaa is C or S
  MOD_RES (16)..(17)..(18)..(19)..(20): Xaa is A or G
  MOD_RES (21)..(22)..(23)..(24): Xaa is A or G or is absent
SXGXRDVVMGPIKGYXXXXXXXXXFYLMNIPSMKTPTX

SEQ ID NO: 31873 - protein, 44 aa, Artificial Sequence
  GFR-binding peptide
  MOD_RES (2)..(4)..(38)..(39): Xaa is C or S
  MOD_RES (16)..(17)..(18)..(19)..(20): Xaa is A or G
  MOD_RES (21)..(22)..(23)..(24): Xaa is A or G or is absent
RXGXAEVVMDPIKGYXXXXXXXXXFYLINIPSLRAPVXXSAPAA

SEQ ID NO: 31874 - protein, 41 aa, Artificial Sequence
  GFR-binding peptide
  MOD_RES (1)..(35)..(36): Xaa is C or S
  MOD_RES (13)..(14)..(15)..(16)..(17): Xaa is A or G
  MOD_RES (18)..(19)..(20)..(21): Xaa is A or G or is absent
XESVAMGPIKGYXXXXXXXXXFYLINIPSLKTPVXXAKSAK

SEQ ID NO: 31875 - protein, 34 aa, Artificial Sequence
  GFR-binding peptide
  MOD_RES (34)..(34): Xaa is C or S
  MOD_RES (12)..(13)..(14)..(15)..(16): Xaa is A or G
  MOD_RES (17)..(18)..(19)..(20): Xaa is A or G or is absent
ARVVMNPIKGYXXXXXXXXXFYLVNIPSLQTPAX

SEQ ID NO: 31876 - protein, 36 aa, Artificial Sequence
  GFR-binding peptide
  MOD_RES (1)..(33)..(34): Xaa is C or S
XGEVVMDPIKGYVVKENEDFYLMNIPSLETPVXXAK

SEQ ID NO: 31877 - protein, 37 aa, Artificial Sequence
  GFR-binding peptide
  MOD_RES (2)..(35)..(36): Xaa is C or S
  MOD_RES (13)..(14)..(15)..(16)..(17): Xaa is A or G
  MOD_RES (18)..(19)..(20)..(21): Xaa is A or G or is absent
GXEEVIMPIKGYXXXXXXXXXFYLMNIPSTKVPAXXT

SEQ ID NO: 31878 - protein, 35 aa, Artificial Sequence
  GFR-binding peptide
  MOD_RES (31)..(31): Xaa is C or S
RVVMNPIKGYIVNSSDDFYLVNIPSLKTPAXTPKT

SEQ ID NO: 31879 - protein, 35 aa, Artificial Sequence
  GFR-binding peptide
  MOD_RES (33)..(34): Xaa is C or S
  MOD_RES (11)..(12)..(13)..(14)..(15): Xaa is A or G
  MOD_RES (16)..(17)..(18)..(19): Xaa is A or G or is absent
RVVMNPIKGYXXXXXXXXXFYLVNIPSLQTPAXXP

SEQ ID NO: 31880 - protein, 39 aa, Artificial Sequence
  GFR-binding peptide
  MOD_RES (34)..(35): Xaa is C or S
  MOD_RES (12)..(13)..(14)..(15)..(16): Xaa is A or G
  MOD_RES (17)..(18)..(19)..(20): Xaa is A or G or is absent
RDVVMGPIKGYXXXXXXXXXFYLMNIPSMKTPTXXPGAS

SEQ ID NO: 31881 - protein, 35 aa, Artificial Sequence
  GFR-binding peptide
  MOD_RES (2)..(4): Xaa is C or S
HXGXARVVMNPIKGYIVNSSDDFYLVNIPSLQTPA

SEQ ID NO: 31882 - protein, 38 aa, Artificial Sequence
  GFR-binding peptide
  MOD_RES (2)..(4)..(38): Xaa is C or S
  MOD_RES (16)..(17)..(18)..(19)..(20): Xaa is A or G
  MOD_RES (21)..(22)..(23)..(24): Xaa is A or G or is absent
RXGXAEVVMDPIKGYXXXXXXXXXFYLINIPSLRAPVX

SEQ ID NO: 31883 - protein, 34 aa, Artificial Sequence
  GFR-binding peptide
  MOD_RES (32)..(33): Xaa is C or S
RDVVMGPIKGYIIQQKDNFYLMNIPSMKTPTXXP

SEQ ID NO: 31884 - protein, 36 aa, Artificial Sequence
  GFR-binding peptide
  MOD_RES (1)..(35)..(36): Xaa is C or S
  MOD_RES (13)..(14)..(15)..(16)..(17): Xaa is A or G
  MOD_RES (18)..(19)..(20)..(21): Xaa is A or G or is absent
XGEVVMEPIKGYXXXXXXXXXFYLMNIPSLETPVXX

SEQ ID NO: 31885 - protein, 35 aa, Artificial Sequence
  GFR-binding peptide
  MOD_RES (1)..(33)..(34): Xaa is C or S
XSEVVMDPIKGYVVNNASDFYLINIPSLRTPVXXT

SEQ ID NO: 31886 - protein, 35 aa, Artificial Sequence
  GFR-binding peptide
  MOD_RES (2)..(4): Xaa is C or S
RXGXESVAMGPIKGYYTVVGKDFYLINIPSLKTPV

SEQ ID NO: 31887 - protein, 39 aa, Artificial Sequence
  GFR-binding peptide
  MOD_RES (1)..(3)..(37)..(38): Xaa is C or S
  MOD_RES (15)..(16)..(17)..(18)..(19): Xaa is A or G
  MOD_RES (20)..(21)..(22)..(23): Xaa is A or G or is absent
XGXAEVVMDPIKGYXXXXXXXXXFYLINIPSLRAPVXXS

SEQ ID NO: 31888 - protein, 39 aa, Artificial Sequence
  GFR-binding peptide
  MOD_RES (2)..(36): Xaa is C or S
  MOD_RES (14)..(15)..(16)..(17)..(18): Xaa is A or G
  MOD_RES (19)..(20)..(21)..(22): Xaa is A or G or is absent
GXSRVVMNPIKGYXXXXXXXXXFYLVNIPSLKTPAXTPK

SEQ ID NO: 31889 - protein, 40 aa, Artificial Sequence
  GFR-binding peptide
  MOD_RES (1)..(3)..(35)..(36): Xaa is C or S
XGXAKVVMNPIKGYIVNNSSDFYLVNIPSLKTPAXXAKPV

SEQ ID NO: 31890 - protein, 33 aa, Artificial Sequence
  GFR-binding peptide
  MOD_RES (1)..(33): Xaa is C or S
XGEVVMDPIKGYVVKENEDFYLMNIPSLETPVX

SEQ ID NO: 31891 - protein, 40 aa, Artificial Sequence
  GFR-binding peptide
  MOD_RES (1)..(35)..(36): Xaa is C or S
  MOD_RES (13)..(14)..(15)..(16)..(17): Xaa is A or G
  MOD_RES (18)..(19)..(20)..(21): Xaa is A or G or is absent
XRDVVMGPIKGYXXXXXXXXXFYLMNIPSMKTPTXXPGAS

SEQ ID NO: 31892 - protein, 38 aa, Artificial Sequence
  GFR-binding peptide
  MOD_RES (2)..(4): Xaa is C or S
  MOD_RES (17)..(18)..(19)..(20)..(21): Xaa is A or G
  MOD_RES (22)..(23)..(24)..(25): Xaa is A or G or is absent
RXGXEAVSMGEPIKGYXXXXXXXXXFYLVNIPSLKTPV

SEQ ID NO: 31893 - protein, 37 aa, Artificial Sequence
  GFR-binding peptide
  MOD_RES (1)..(3)..(35)..(36): Xaa is C or S
XGXESVAMGPIKGYYTVVGKDFYLINIPSLKTPVXXA

SEQ ID NO: 31894 - protein, 38 aa, Artificial Sequence
  GFR-binding peptide
  MOD_RES (32)..(33): Xaa is C or S
GEVVMDPIKGYVVKENEDFYLMNIPSLETPVXXAKPIK

SEQ ID NO: 31895 - protein, 36 aa, Artificial Sequence
  GFR-binding peptide
  MOD_RES (2)..(4)..(36): Xaa is C or S
HXGXARVVMNPIKGYIVNSSDDFYLVNIPSLQTPAX

SEQ ID NO: 31896 - protein, 39 aa, Artificial Sequence
  GFR-binding peptide
  MOD_RES (2)..(36)..(37): Xaa is C or S
  MOD_RES (14)..(15)..(16)..(17)..(18): Xaa is A or G
  MOD_RES (19)..(20)..(21)..(22): Xaa is A or G or is absent
GXARVVMNPIKGYXXXXXXXXXFYLVNIPSLQTPAXXPK

SEQ ID NO: 31897 - protein, 38 aa, Artificial Sequence
  GFR-binding peptide
  MOD_RES (2)..(4)..(36)..(37): Xaa is C or S
RXGXGEVVMDPIKGYVVKENEDFYLMNIPSLETPVXXA

SEQ ID NO: 31898 - protein, 42 aa, Artificial Sequence
  GFR-binding peptide
  MOD_RES (2)..(4)..(38)..(39): Xaa is C or S
  MOD_RES (16)..(17)..(18)..(19)..(20): Xaa is A or G
  MOD_RES (21)..(22)..(23)..(24): Xaa is A or G or is absent
HXGXARVVMNPIKGYXXXXXXXXXFYLVNIPSLQTPAXXPKP

SEQ ID NO: 31899 - protein, 38 aa, Artificial Sequence
  GFR-binding peptide
  MOD_RES (1)..(33)..(34): Xaa is C or S
XRDVVMGPIKGYIIQQKDNFYLMNIPSMKTPTXXPGAS

SEQ ID NO: 31900 - protein, 40 aa, Artificial Sequence
  GFR-binding peptide
  MOD_RES (1)..(3)..(37)..(38): Xaa is C or S
  MOD_RES (15)..(16)..(17)..(18)..(19): Xaa is A or G
  MOD_RES (20)..(21)..(22)..(23): Xaa is A or G or is absent
XGXSEVVMDPIKGYXXXXXXXXXFYLINIPSLRTPVXXTP

SEQ ID NO: 31901 - protein, 36 aa, Artificial Sequence
  GFR-binding peptide
  MOD_RES (1)..(36): Xaa is C or S
  MOD_RES (14)..(15)..(16)..(17)..(18): Xaa is A or G
  MOD_RES (19)..(20)..(21)..(22): Xaa is A or G or is absent
XEAVSMGEPIKGYXXXXXXXXXFYLVNIPSLKTPVX

SEQ ID NO: 31902 - protein, 33 aa, Artificial Sequence
  GFR-binding peptide
  MOD_RES (32)..(33): Xaa is C or S
GEVVMEPIKGYVVKDYEDFYLMNIPSLETPVXX

SEQ ID NO: 31903 - protein, 42 aa, Artificial Sequence
  GFR-binding peptide
  MOD_RES (2)..(4)..(37)..(38): Xaa is C or S
  MOD_RES (15)..(16)..(17)..(18)..(19): Xaa is A or G
  MOD_RES (20)..(21)..(22)..(23): Xaa is A or G or is absent
LXGXEEVIMPIKGYXXXXXXXXXFYLMNIPSTKVPAXXTSPV

SEQ ID NO: 31904 - protein, 38 aa, Artificial Sequence
  GFR-binding peptide
  MOD_RES (2)..(4)..(38): Xaa is C or S
  MOD_RES (16)..(17)..(18)..(19)..(20): Xaa is A or G
  MOD_RES (21)..(22)..(23)..(24): Xaa is A or G or is absent
HXGXSRVVMNPIKGYXXXXXXXXXFYLVNIPSLKTPAX

SEQ ID NO: 31905 - protein, 37 aa, Artificial Sequence
  GFR-binding peptide
  MOD_RES (2)..(4): Xaa is C or S
  MOD_RES (16)..(17)..(18)..(19)..(20): Xaa is A or G
  MOD_RES (21)..(22)..(23)..(24): Xaa is A or G or is absent
SXGXRDVVMGPIKGYXXXXXXXXXFYLMNIPSMKTPT

SEQ ID NO: 31906 - protein, 37 aa, Artificial Sequence
  GFR-binding peptide
  MOD_RES (1)..(3)..(35)..(36): Xaa is C or S
XGXGEVVMEPIKGYVVKDYEDFYLMNIPSLETPVXXA

SEQ ID NO: 31907 - protein, 36 aa, Artificial Sequence
  GFR-binding peptide
  MOD_RES (2)..(34)..(35): Xaa is C or S
GXRDVVMGPIKGYIIQQKDNFYLMNIPSMKTPTXXP

SEQ ID NO: 31908 - protein, 35 aa, Artificial Sequence
  GFR-binding peptide
  MOD_RES (32)..(33): Xaa is C or S
AKVVMNPIKGYIVNNSSDFYLVNIPSLKTPAXXAK

SEQ ID NO: 31909 - protein, 34 aa, Artificial Sequence
  GFR-binding peptide
  MOD_RES (1)..(3): Xaa is C or S
XGXESVAMGPIKGYYTVVGKDFYLINIPSLKTPV

SEQ ID NO: 31910 - protein, 37 aa, Artificial Sequence
  GFR-binding peptide
  MOD_RES (1)..(3)..(37): Xaa is C or S
  MOD_RES (15)..(16)..(17)..(18)..(19): Xaa is A or G
  MOD_RES (20)..(21)..(22)..(23): Xaa is A or G or is absent
XGXSEVVMDPIKGYXXXXXXXXXFYLINIPSLRTPVX

SEQ ID NO: 31911 - protein, 37 aa, Artificial Sequence
  GFR-binding peptide
  MOD_RES (1)..(3)..(37): Xaa is C or S
  MOD_RES (15)..(16)..(17)..(18)..(19): Xaa is A or G
  MOD_RES (20)..(21)..(22)..(23): Xaa is A or G or is absent
XGXAKVVMNPIKGYXXXXXXXXXFYLVNIPSLKTPAX

SEQ ID NO: 31912 - protein, 35 aa, Artificial Sequence
  GFR-binding peptide
  MOD_RES (31)..(32): Xaa is C or S
RVVMNPIKGYIVNSSDDFYLVNIPSLQTPAXXPKP

SEQ ID NO: 31913 - protein, 34 aa, Artificial Sequence
  GFR-binding peptide
  MOD_RES (1)..(3): Xaa is C or S
XGXGEVVMEPIKGYVVKDYEDFYLMNIPSLETPV

SEQ ID NO: 31914 - protein, 32 aa, Artificial Sequence
  GFR-binding peptide
  MOD_RES (32)..(32): Xaa is C or S
SEVVMDPIKGYVVNNASDFYLINIPSLRTPVX

SEQ ID NO: 31915 - protein, 31 aa, Artificial Sequence
  GFR-binding peptide
  MOD_RES (31)..(31): Xaa is C or S
SVAMGPIKGYYTVVGKDFYLINIPSLKTPVX

SEQ ID NO: 31916 - protein, 35 aa, Artificial Sequence
  GFR-binding peptide
  MOD_RES (2)..(2): Xaa is C or S
  MOD_RES (14)..(15)..(16)..(17)..(18): Xaa is A or G
  MOD_RES (19)..(20)..(21)..(22): Xaa is A or G or is absent
GXAEVVMDPIKGYXXXXXXXXXFYLINIPSLRAPV

SEQ ID NO: 31917 - protein, 37 aa, Artificial Sequence
  GFR-binding peptide
  MOD_RES (1)..(35)..(36): Xaa is C or S
  MOD_RES (13)..(14)..(15)..(16)..(17): Xaa is A or G
  MOD_RES (18)..(19)..(20)..(21): Xaa is A or G or is absent
XESVAMGPIKGYXXXXXXXXXFYLINIPSLKTPVXXA

SEQ ID NO: 31918 - protein, 40 aa, Artificial Sequence
  GFR-binding peptide
  MOD_RES (2)..(36): Xaa is C or S
  MOD_RES (14)..(15)..(16)..(17)..(18): Xaa is A or G
  MOD_RES (19)..(20)..(21)..(22): Xaa is A or G or is absent
GXSRVVMNPIKGYXXXXXXXXXFYLVNIPSLKTPAXTPKT

SEQ ID NO: 31919 - protein, 37 aa, Artificial Sequence
  GFR-binding peptide
  MOD_RES (33)..(34): Xaa is C or S
  MOD_RES (11)..(12)..(13)..(14)..(15): Xaa is A or G
  MOD_RES (16)..(17)..(18)..(19): Xaa is A or G or is absent
EVVMDPIKGYXXXXXXXXXFYLINIPSLRAPVXXSAP

SEQ ID NO: 31920 - protein, 36 aa, Artificial Sequence
  GFR-binding peptide
  MOD_RES (32)..(33): Xaa is C or S
AKVVMNPIKGYIVNNSSDFYLVNIPSLKTPAXXAKP

SEQ ID NO: 31921 - protein, 37 aa, Artificial Sequence
  GFR-binding peptide
  MOD_RES (32)..(33): Xaa is C or S
SEVVMDPIKGYVVNNASDFYLINIPSLRTPVXXTPPT

SEQ ID NO: 31922 - protein, 36 aa, Artificial Sequence
  GFR-binding peptide
  MOD_RES (31)..(32): Xaa is C or S
SVAMGPIKGYYTVVGKDFYLINIPSLKTPVXXAKSA

SEQ ID NO: 31923 - protein, 34 aa, Artificial Sequence
  GFR-binding peptide
  MOD_RES (32)..(33): Xaa is C or S
AEVVMDPIKGYVVNNAADFYLINIPSLRAPVXXS

SEQ ID NO: 31924 - protein, 32 aa, Artificial Sequence
  GFR-binding peptide
  MOD_RES (1)..(1): Xaa is C or S
XGEVVMEPIKGYVVKDYEDFYLMNIPSLETPV

SEQ ID NO: 31925 - protein, 36 aa, Artificial Sequence
  GFR-binding peptide
  MOD_RES (1)..(35)..(36): Xaa is C or S
  MOD_RES (13)..(14)..(15)..(16)..(17): Xaa is A or G
  MOD_RES (18)..(19)..(20)..(21): Xaa is A or G or is absent
XSRVVMNPIKGYXXXXXXXXXFYLVNIPSLKTPAXX

SEQ ID NO: 31926 - protein, 40 aa, Artificial Sequence
  GFR-binding peptide
  MOD_RES (1)..(34)..(35): Xaa is C or S
  MOD_RES (12)..(13)..(14)..(15)..(16): Xaa is A or G
  MOD_RES (17)..(18)..(19)..(20): Xaa is A or G or is absent
XEEVIMPIKGYXXXXXXXXXFYLMNIPSTKVPAXXTSPVR

SEQ ID NO: 31927 - protein, 40 aa, Artificial Sequence
  GFR-binding peptide
  MOD_RES (2)..(4)..(36)..(37): Xaa is C or S
RXGXSEVVMDPIKGYVVNNASDFYLINIPSLRTPVXXTPP

SEQ ID NO: 31928 - protein, 39 aa, Artificial Sequence
  GFR-binding peptide
  MOD_RES (2)..(36)..(37): Xaa is C or S
  MOD_RES (14)..(15)..(16)..(17)..(18): Xaa is A or G
  MOD_RES (19)..(20)..(21)..(22): Xaa is A or G or is absent
GXSRVVMNPIKGYXXXXXXXXXFYLVNIPSLKTPAXXPK

SEQ ID NO: 31929 - protein, 38 aa, Artificial Sequence
  GFR-binding peptide
  MOD_RES (1)..(33)..(34): Xaa is C or S
XSEVVMDPIKGYVVNNASDFYLINIPSLRTPVXXTPPT

SEQ ID NO: 31930 - protein, 38 aa, Artificial Sequence
  GFR-binding peptide
  MOD_RES (34)..(35): Xaa is C or S
  MOD_RES (12)..(13)..(14)..(15)..(16): Xaa is A or G
  MOD_RES (17)..(18)..(19)..(20): Xaa is A or G or is absent
ESVAMGPIKGYXXXXXXXXXFYLINIPSLKTPVXXAKS

SEQ ID NO: 31931 - protein, 41 aa, Artificial Sequence
  GFR-binding peptide
  MOD_RES (2)..(36)..(37): Xaa is C or S
  MOD_RES (14)..(15)..(16)..(17)..(18): Xaa is A or G
  MOD_RES (19)..(20)..(21)..(22): Xaa is A or G or is absent
GXSEVVMDPIKGYXXXXXXXXXFYLINIPSLRTPVXXTPPT

SEQ ID NO: 31932 - protein, 36 aa, Artificial Sequence
  GFR-binding peptide
  MOD_RES (1)..(3)..(34)..(35): Xaa is C or S
XGXEEVIMPIKGYLLVRGNDFYLMNIPSTKVPAXXT

SEQ ID NO: 31933 - protein, 36 aa, Artificial Sequence
  GFR-binding peptide
  MOD_RES (1)..(3)..(35)..(36): Xaa is C or S
XGXAKVVMNPIKGYIVNNSSDFYLVNIPSLKTPAXX

SEQ ID NO: 31934 - protein, 33 aa, Artificial Sequence
  GFR-binding peptide
  MOD_RES (31)..(32): Xaa is C or S
EVVMDPIKGYVVNNASDFYLINIPSLRTPVXXT

SEQ ID NO: 31935 - protein, 39 aa, Artificial Sequence
  GFR-binding peptide
  MOD_RES (34)..(34): Xaa is C or S
  MOD_RES (12)..(13)..(14)..(15)..(16): Xaa is A or G
  MOD_RES (17)..(18)..(19)..(20): Xaa is A or G or is absent
SRVVMNPIKGYXXXXXXXXXFYLVNIPSLKTPAXTPKTV

SEQ ID NO: 31936 - protein, 34 aa, Artificial Sequence
  GFR-binding peptide
  MOD_RES (32)..(33): Xaa is C or S
GEVVMDPIKGYVVKENEDFYLMNIPSLETPVXXA

SEQ ID NO: 31937 - protein, 38 aa, Artificial Sequence
  GFR-binding peptide
  MOD_RES (2)..(34): Xaa is C or S
GXSRVVMNPIKGYIVNSSDDFYLVNIPSLKTPAXTPKT

SEQ ID NO: 31938 - protein, 35 aa, Artificial Sequence
  GFR-binding peptide
  MOD_RES (2)..(4): Xaa is C or S
HXGXSRVVMNPIKGYIVNSSDDFYLVNIPSLKTPA

SEQ ID NO: 31939 - protein, 41 aa, Artificial Sequence
  GFR-binding peptide
  MOD_RES (2)..(4)..(38)..(39): Xaa is C or S
  MOD_RES (16)..(17)..(18)..(19)..(20): Xaa is A or G
  MOD_RES (21)..(22)..(23)..(24): Xaa is A or G or is absent
RXGXSEVVMDPIKGYXXXXXXXXXFYLINIPSLRTPVXXTP

SEQ ID NO: 31940 - protein, 30 aa, Artificial Sequence
  GFR-binding peptide
KVVMNPIKGYIVNNSSDFYLVNIPSLKTPA

SEQ ID NO: 31941 - protein, 38 aa, Artificial Sequence
  GFR-binding peptide
  MOD_RES (1)..(33): Xaa is C or S
XSRVVMNPIKGYIVNSSDDFYLVNIPSLKTPAXTPKTV

SEQ ID NO: 31942 - protein, 41 aa, Artificial Sequence
  GFR-binding peptide
  MOD_RES (1)..(3)..(35)..(36): Xaa is C or S
XGXGEVVMEPIKGYVVKDYEDFYLMNIPSLETPVXXAKPIS

SEQ ID NO: 31943 - protein, 42 aa, Artificial Sequence
  GFR-binding peptide
  MOD_RES (1)..(3)..(37): Xaa is C or S
  MOD_RES (15)..(16)..(17)..(18)..(19): Xaa is A or G
  MOD_RES (20)..(21)..(22)..(23): Xaa is A or G or is absent
XGXSRVVMNPIKGYXXXXXXXXXFYLVNIPSLKTPAXTPKTV

SEQ ID NO: 31944 - protein, 36 aa, Artificial Sequence
  GFR-binding peptide
  MOD_RES (32)..(32): Xaa is C or S
SRVVMNPIKGYIVNSSDDFYLVNIPSLKTPAXTPKT

SEQ ID NO: 31945 - protein, 36 aa, Artificial Sequence
  GFR-binding peptide
  MOD_RES (2)..(36): Xaa is C or S
  MOD_RES (14)..(15)..(16)..(17)..(18): Xaa is A or G
  MOD_RES (19)..(20)..(21)..(22): Xaa is A or G or is absent
GXARVVMNPIKGYXXXXXXXXXFYLVNIPSLQTPAX

SEQ ID NO: 31946 - protein, 35 aa, Artificial Sequence
  GFR-binding peptide
  MOD_RES (1)..(35): Xaa is C or S
  MOD_RES (13)..(14)..(15)..(16)..(17): Xaa is A or G
  MOD_RES (18)..(19)..(20)..(21): Xaa is A or G or is absent
XSEVVMDPIKGYXXXXXXXXXFYLINIPSLRTPVX

SEQ ID NO: 31947 - protein, 37 aa, Artificial Sequence
  GFR-binding peptide
  MOD_RES (34)..(35): Xaa is C or S
  MOD_RES (12)..(13)..(14)..(15)..(16): Xaa is A or G
  MOD_RES (17)..(18)..(19)..(20): Xaa is A or G or is absent
ESVAMGPIKGYXXXXXXXXXFYLINIPSLKTPVXXAK

SEQ ID NO: 31948 - protein, 34 aa, Artificial Sequence
  GFR-binding peptide
  MOD_RES (1)..(33)..(34): Xaa is C or S
XAEVVMDPIKGYVVNNAADFYLINIPSLRAPVXX

SEQ ID NO: 31949 - protein, 40 aa, Artificial Sequence
  GFR-binding peptide
  MOD_RES (1)..(34)..(35): Xaa is C or S
XEAVSMGEPIKGYTPVGMDDFYLVNIPSLKTPVXXAKGVK

SEQ ID NO: 31950 - protein, 39 aa, Artificial Sequence
  GFR-binding peptide
  MOD_RES (1)..(3)..(35)..(36): Xaa is C or S
XGXESVAMGPIKGYYTVVGKDFYLINIPSLKTPVXXAKS

SEQ ID NO: 31951 - protein, 34 aa, Artificial Sequence
  GFR-binding peptide
  MOD_RES (2)..(33)..(34): Xaa is C or S
GXEEVIMPIKGYLLVRGNDFYLMNIPSTKVPAXX

SEQ ID NO: 31952 - protein, 39 aa, Artificial Sequence
  GFR-binding peptide
  MOD_RES (2)..(35)..(36): Xaa is C or S
GXEAVSMGEPIKGYTPVGMDDFYLVNIPSLKTPVXXAKG

SEQ ID NO: 31953 - protein, 38 aa, Artificial Sequence
  GFR-binding peptide
  MOD_RES (1)..(35)..(36): Xaa is C or S
  MOD_RES (13)..(14)..(15)..(16)..(17): Xaa is A or G
  MOD_RES (18)..(19)..(20)..(21): Xaa is A or G or is absent
XRDVVMGPIKGYXXXXXXXXXFYLMNIPSMKTPTXXPG

SEQ ID NO: 31954 - protein, 41 aa, Artificial Sequence
  GFR-binding peptide
  MOD_RES (2)..(4)..(38)..(39): Xaa is C or S
  MOD_RES (16)..(17)..(18)..(19)..(20): Xaa is A or G
  MOD_RES (21)..(22)..(23)..(24): Xaa is A or G or is absent
RXGXGEVVMDPIKGYXXXXXXXXXFYLMNIPSLETPVXXAK

SEQ ID NO: 31955 - protein, 35 aa, Artificial Sequence
  GFR-binding peptide
  MOD_RES (32)..(33): Xaa is C or S
ARVVMNPIKGYIVNSSDDFYLVNIPSLQTPAXXPK

SEQ ID NO: 31956 - protein, 39 aa, Artificial Sequence
  GFR-binding peptide
  MOD_RES (34)..(35): Xaa is C or S
  MOD_RES (12)..(13)..(14)..(15)..(16): Xaa is A or G
  MOD_RES (17)..(18)..(19)..(20): Xaa is A or G or is absent
SRVVMNPIKGYXXXXXXXXXFYLVNIPSLKTPAXXPKPV

SEQ ID NO: 31957 - protein, 39 aa, Artificial Sequence
  GFR-binding peptide
  MOD_RES (2)..(36)..(37): Xaa is C or S
  MOD_RES (14)..(15)..(16)..(17)..(18): Xaa is A or G
  MOD_RES (19)..(20)..(21)..(22): Xaa is A or G or is absent
GXESVAMGPIKGYXXXXXXXXXFYLINIPSLKTPVXXAK

SEQ ID NO: 31958 - protein, 32 aa, Artificial Sequence
  GFR-binding peptide
  MOD_RES (1)..(1): Xaa is C or S
XAKVVMNPIKGYIVNNSSDFYLVNIPSLKTPA

SEQ ID NO: 31959 - protein, 39 aa, Artificial Sequence
  GFR-binding peptide
  MOD_RES (1)..(33)..(34): Xaa is C or S
XGEVVMEPIKGYVVKDYEDFYLMNIPSLETPVXXAKPIS

SEQ ID NO: 31960 - protein, 39 aa, Artificial Sequence
  GFR-binding peptide
  MOD_RES (34)..(35): Xaa is C or S
  MOD_RES (12)..(13)..(14)..(15)..(16): Xaa is A or G
  MOD_RES (17)..(18)..(19)..(20): Xaa is A or G or is absent
ESVAMGPIKGYXXXXXXXXXFYLINIPSLKTPVXXAKSA

SEQ ID NO: 31961 - protein, 42 aa, Artificial Sequence
  GFR-binding peptide
  MOD_RES (2)..(4)..(38)..(39): Xaa is C or S
  MOD_RES (16)..(17)..(18)..(19)..(20): Xaa is A or G
  MOD_RES (21)..(22)..(23)..(24): Xaa is A or G or is absent
RXGXGEVVMEPIKGYXXXXXXXXXFYLMNIPSLETPVXXAKP

SEQ ID NO: 31962 - protein, 37 aa, Artificial Sequence
  GFR-binding peptide
  MOD_RES (33)..(34): Xaa is C or S
  MOD_RES (11)..(12)..(13)..(14)..(15): Xaa is A or G
  MOD_RES (16)..(17)..(18)..(19): Xaa is A or G or is absent
SVAMGPIKGYXXXXXXXXXFYLINIPSLKTPVXXAKS

SEQ ID NO: 31963 - protein, 40 aa, Artificial Sequence
  GFR-binding peptide
  MOD_RES (1)..(3)..(37)..(38): Xaa is C or S
  MOD_RES (15)..(16)..(17)..(18)..(19): Xaa is A or G
  MOD_RES (20)..(21)..(22)..(23): Xaa is A or G or is absent
XGXARVVMNPIKGYXXXXXXXXXFYLVNIPSLQTPAXXPK

SEQ ID NO: 31964 - protein, 33 aa, Artificial Sequence
  GFR-binding peptide
  MOD_RES (1)..(33): Xaa is C or S
XSEVVMDPIKGYVVNNASDFYLINIPSLRTPVX

SEQ ID NO: 31965 - protein, 39 aa, Artificial Sequence
  GFR-binding peptide
  MOD_RES (33)..(34): Xaa is C or S
  MOD_RES (11)..(12)..(13)..(14)..(15): Xaa is A or G
  MOD_RES (16)..(17)..(18)..(19): Xaa is A or G or is absent
EVVMDPIKGYXXXXXXXXXFYLINIPSLRAPVXXSAPAA

SEQ ID NO: 31966 - protein, 37 aa, Artificial Sequence
  GFR-binding peptide
  MOD_RES (2)..(34)..(35): Xaa is C or S
GXGEVVMDPIKGYVVKENEDFYLMNIPSLETPVXXAK

SEQ ID NO: 31967 - protein, 31 aa, Artificial Sequence
  GFR-binding peptide
ESVAMGPIKGYYTVVGKDFYLINIPSLKTPV

SEQ ID NO: 31968 - protein, 34 aa, Artificial Sequence
  GFR-binding peptide
  MOD_RES (33)..(33): Xaa is C or S
  MOD_RES (11)..(12)..(13)..(14)..(15): Xaa is A or G
  MOD_RES (16)..(17)..(18)..(19): Xaa is A or G or is absent
RVVMNPIKGYXXXXXXXXXFYLVNIPSLKTPAXT

SEQ ID NO: 31969 - protein, 34 aa, Artificial Sequence
  GFR-binding peptide
  MOD_RES (1)..(3): Xaa is C or S
XGXARVVMNPIKGYIVNSSDDFYLVNIPSLQTPA

SEQ ID NO: 31970 - protein, 38 aa, Artificial Sequence
  GFR-binding peptide
  MOD_RES (1)..(33)..(34): Xaa is C or S
XSRVVMNPIKGYIVNSSDDFYLVNIPSLKTPAXXPKPV

SEQ ID NO: 31971 - protein, 37 aa, Artificial Sequence
  GFR-binding peptide
  MOD_RES (2)..(4)..(36)..(37): Xaa is C or S
RXGXESVAMGPIKGYYTVVGKDFYLINIPSLKTPVXX

SEQ ID NO: 31972 - protein, 37 aa, Artificial Sequence
  GFR-binding peptide
  MOD_RES (2)..(4): Xaa is C or S
  MOD_RES (16)..(17)..(18)..(19)..(20): Xaa is A or G
  MOD_RES (21)..(22)..(23)..(24): Xaa is A or G or is absent
RXGXAEVVMDPIKGYXXXXXXXXXFYLINIPSLRAPV

SEQ ID NO: 31973 - protein, 36 aa, Artificial Sequence
  GFR-binding peptide
  MOD_RES (2)..(36): Xaa is C or S
  MOD_RES (14)..(15)..(16)..(17)..(18): Xaa is A or G
  MOD_RES (19)..(20)..(21)..(22): Xaa is A or G or is absent
GXGEVVMDPIKGYXXXXXXXXXFYLMNIPSLETPVX

SEQ ID NO: 31974 - protein, 38 aa, Artificial Sequence
  GFR-binding peptide
  MOD_RES (1)..(3)..(37)..(38): Xaa is C or S
  MOD_RES (15)..(16)..(17)..(18)..(19): Xaa is A or G
  MOD_RES (20)..(21)..(22)..(23): Xaa is A or G or is absent
XGXAKVVMNPIKGYXXXXXXXXXFYLVNIPSLKTPAXX

SEQ ID NO: 31975 - protein, 33 aa, Artificial Sequence
  GFR-binding peptide
  MOD_RES (12)..(13)..(14)..(15)..(16): Xaa is A or G
  MOD_RES (17)..(18)..(19)..(20): Xaa is A or G or is absent
GEVVMEPIKGYXXXXXXXXXFYLMNIPSLETPV

SEQ ID NO: 31976 - protein, 41 aa, Artificial Sequence
  GFR-binding peptide
  MOD_RES (1)..(3)..(35)..(36): Xaa is C or S
XGXSRVVMNPIKGYIVNSSDDFYLVNIPSLKTPAXXPKPVY

SEQ ID NO: 31977 - protein, 39 aa, Artificial Sequence
  GFR-binding peptide
  MOD_RES (33)..(34): Xaa is C or S
  MOD_RES (11)..(12)..(13)..(14)..(15): Xaa is A or G
  MOD_RES (16)..(17)..(18)..(19): Xaa is A or G or is absent
RVVMNPIKGYXXXXXXXXXFYLVNIPSLKTPAXXPKPVY

SEQ ID NO: 31978 - protein, 41 aa, Artificial Sequence
  GFR-binding peptide
  MOD_RES (2)..(36)..(37): Xaa is C or S
  MOD_RES (14)..(15)..(16)..(17)..(18): Xaa is A or G
  MOD_RES (19)..(20)..(21)..(22): Xaa is A or G or is absent
GXGEVVMEPIKGYXXXXXXXXXFYLMNIPSLETPVXXAKPI

SEQ ID NO: 31979 - protein, 37 aa, Artificial Sequence
  GFR-binding peptide
  MOD_RES (2)..(33)..(34): Xaa is C or S
GXEEVIMPIKGYLLVRGNDFYLMNIPSTKVPAXXTSP

SEQ ID NO: 31980 - protein, 36 aa, Artificial Sequence
  GFR-binding peptide
  MOD_RES (1)..(3)..(35)..(36): Xaa is C or S
XGXSRVVMNPIKGYIVNSSDDFYLVNIPSLKTPAXX

SEQ ID NO: 31981 - protein, 37 aa, Artificial Sequence
  GFR-binding peptide
  MOD_RES (1)..(32)..(33): Xaa is C or S
XEEVIMPIKGYLLVRGNDFYLMNIPSTKVPAXXTSPV

SEQ ID NO: 31982 - protein, 37 aa, Artificial Sequence
  GFR-binding peptide
  MOD_RES (34)..(35): Xaa is C or S
  MOD_RES (12)..(13)..(14)..(15)..(16): Xaa is A or G
  MOD_RES (17)..(18)..(19)..(20): Xaa is A or G or is absent
SRVVMNPIKGYXXXXXXXXXFYLVNIPSLKTPAXXPK

SEQ ID NO: 31983 - protein, 37 aa, Artificial Sequence
  GFR-binding peptide
  MOD_RES (1)..(3)..(35)..(36): Xaa is C or S
XGXAEVVMDPIKGYVVNNAADFYLINIPSLRAPVXXS

SEQ ID NO: 31984 - protein, 37 aa, Artificial Sequence
  GFR-binding peptide
  MOD_RES (2)..(36)..(37): Xaa is C or S
  MOD_RES (14)..(15)..(16)..(17)..(18): Xaa is A or G
  MOD_RES (19)..(20)..(21)..(22): Xaa is A or G or is absent
GXRDVVMGPIKGYXXXXXXXXXFYLMNIPSMKTPTXX

SEQ ID NO: 31985 - protein, 38 aa, Artificial Sequence
  GFR-binding peptide
  MOD_RES (2)..(35)..(36): Xaa is C or S
  MOD_RES (13)..(14)..(15)..(16)..(17): Xaa is A or G
  MOD_RES (18)..(19)..(20)..(21): Xaa is A or G or is absent
GXEEVIMPIKGYXXXXXXXXXFYLMNIPSTKVPAXXTS

SEQ ID NO: 31986 - protein, 32 aa, Artificial Sequence
  GFR-binding peptide
  MOD_RES (1)..(1): Xaa is C or S
XSRVVMNPIKGYIVNSSDDFYLVNIPSLKTPA

SEQ ID NO: 31987 - protein, 40 aa, Artificial Sequence
  GFR-binding peptide
  MOD_RES (34)..(35): Xaa is C or S
  MOD_RES (12)..(13)..(14)..(15)..(16): Xaa is A or G
  MOD_RES (17)..(18)..(19)..(20): Xaa is A or G or is absent
GEVVMDPIKGYXXXXXXXXXFYLMNIPSLETPVXXAKPIK

SEQ ID NO: 31988 - protein, 38 aa, Artificial Sequence
  GFR-binding peptide
  MOD_RES (32)..(33): Xaa is C or S
SRVVMNPIKGYIVNSSDDFYLVNIPSLKTPAXXPKPVH

SEQ ID NO: 31989 - protein, 34 aa, Artificial Sequence
  GFR-binding peptide
  MOD_RES (1)..(33)..(34): Xaa is C or S
XESVAMGPIKGYYTVVGKDFYLINIPSLKTPVXX

SEQ ID NO: 31990 - protein, 35 aa, Artificial Sequence
  GFR-binding peptide
  MOD_RES (1)..(33)..(34): Xaa is C or S
XRDVVMGPIKGYIIQQKDNFYLMNIPSMKTPTXXP

SEQ ID NO: 31991 - protein, 42 aa, Artificial Sequence
  GFR-binding peptide
  MOD_RES (2)..(4)..(36)..(37): Xaa is C or S
HXGXARVVMNPIKGYIVNSSDDFYLVNIPSLQTPAXXPKPVT

SEQ ID NO: 31992 - protein, 35 aa, Artificial Sequence
  GFR-binding peptide
  MOD_RES (2)..(4): Xaa is C or S
RXGXGEVVMEPIKGYVVKDYEDFYLMNIPSLETPV

SEQ ID NO: 31993 - protein, 36 aa, Artificial Sequence
  GFR-binding peptide
  MOD_RES (1)..(3)..(35)..(36): Xaa is C or S
XGXRDVVMGPIKGYIIQQKDNFYLMNIPSMKTPTXX

SEQ ID NO: 31994 - protein, 32 aa, Artificial Sequence
  GFR-binding peptide
  MOD_RES (1)..(32): Xaa is C or S
XEEVIMPIKGYLLVRGNDFYLMNIPSTKVPAX

SEQ ID NO: 31995 - protein, 34 aa, Artificial Sequence
  GFR-binding peptide
  MOD_RES (32)..(32): Xaa is C or S
SRVVMNPIKGYIVNSSDDFYLVNIPSLKTPAXTP

SEQ ID NO: 31996 - protein, 37 aa, Artificial Sequence
  GFR-binding peptide
  MOD_RES (2)..(34)..(35): Xaa is C or S
GXAKVVMNPIKGYIVNNSSDFYLVNIPSLKTPAXXAK

SEQ ID NO: 31997 - protein, 37 aa, Artificial Sequence
  GFR-binding peptide
  MOD_RES (31)..(32): Xaa is C or S
RVVMNPIKGYIVNSSDDFYLVNIPSLQTPAXXPKPVT

SEQ ID NO: 31998 - protein, 40 aa, Artificial Sequence
  GFR-binding peptide
  MOD_RES (1)..(3)..(37)..(38): Xaa is C or S
  MOD_RES (15)..(16)..(17)..(18)..(19): Xaa is A or G
  MOD_RES (20)..(21)..(22)..(23): Xaa is A or G or is absent
XGXESVAMGPIKGYXXXXXXXXXFYLINIPSLKTPVXXAK

SEQ ID NO: 31999 - protein, 34 aa, Artificial Sequence
  GFR-binding peptide
  MOD_RES (34)..(34): Xaa is C or S
  MOD_RES (12)..(13)..(14)..(15)..(16): Xaa is A or G
  MOD_RES (17)..(18)..(19)..(20): Xaa is A or G or is absent
SEVVMDPIKGYXXXXXXXXXFYLINIPSLRTPVX

SEQ ID NO: 32000 - protein, 32 aa, Artificial Sequence
  GFR-binding peptide
  MOD_RES (31)..(32): Xaa is C or S
RVVMNPIKGYIVNSSDDFYLVNIPSLQTPAXX

SEQ ID NO: 32001 - protein, 36 aa, Artificial Sequence
  GFR-binding peptide
  MOD_RES (32)..(33): Xaa is C or S
ARVVMNPIKGYIVNSSDDFYLVNIPSLQTPAXXPKP

SEQ ID NO: 32002 - protein, 37 aa, Artificial Sequence
  GFR-binding peptide
  MOD_RES (1)..(35)..(36): Xaa is C or S
  MOD_RES (13)..(14)..(15)..(16)..(17): Xaa is A or G
  MOD_RES (18)..(19)..(20)..(21): Xaa is A or G or is absent
XARVVMNPIKGYXXXXXXXXXFYLVNIPSLQTPAXXP

SEQ ID NO: 32003 - protein, 44 aa, Artificial Sequence
  GFR-binding peptide
  MOD_RES (2)..(4)..(38): Xaa is C or S
  MOD_RES (16)..(17)..(18)..(19)..(20): Xaa is A or G
  MOD_RES (21)..(22)..(23)..(24): Xaa is A or G or is absent
HXGXSRVVMNPIKGYXXXXXXXXXFYLVNIPSLKTPAXTPKTVH

SEQ ID NO: 32004 - protein, 33 aa, Artificial Sequence
  GFR-binding peptide
  MOD_RES (32)..(32): Xaa is C or S
SRVVMNPIKGYIVNSSDDFYLVNIPSLKTPAXT

SEQ ID NO: 32005 - protein, 36 aa, Artificial Sequence
  GFR-binding peptide
  MOD_RES (1)..(35)..(36): Xaa is C or S
  MOD_RES (13)..(14)..(15)..(16)..(17): Xaa is A or G
  MOD_RES (18)..(19)..(20)..(21): Xaa is A or G or is absent
XRDVVMGPIKGYXXXXXXXXXFYLMNIPSMKTPTXX

SEQ ID NO: 32006 - protein, 44 aa, Artificial Sequence
  GFR-binding peptide
  MOD_RES (2)..(4)..(38)..(39): Xaa is C or S
  MOD_RES (16)..(17)..(18)..(19)..(20): Xaa is A or G
  MOD_RES (21)..(22)..(23)..(24): Xaa is A or G or is absent
RXGXGEVVMEPIKGYXXXXXXXXXFYLMNIPSLETPVXXAKPIS

SEQ ID NO: 32007 - protein, 38 aa, Artificial Sequence
  GFR-binding peptide
  MOD_RES (1)..(3)..(37)..(38): Xaa is C or S
  MOD_RES (15)..(16)..(17)..(18)..(19): Xaa is A or G
  MOD_RES (20)..(21)..(22)..(23): Xaa is A or G or is absent
XGXSEVVMDPIKGYXXXXXXXXXFYLINIPSLRTPVXX

SEQ ID NO: 32008 - protein, 38 aa, Artificial Sequence
  GFR-binding peptide
  MOD_RES (32)..(33): Xaa is C or S
SRVVMNPIKGYIVNSSDDFYLVNIPSLKTPAXXPKPVY

SEQ ID NO: 32009 - protein, 36 aa, Artificial Sequence
  GFR-binding peptide
  MOD_RES (2)..(34)..(35): Xaa is C or S
GXARVVMNPIKGYIVNSSDDFYLVNIPSLQTPAXXP

SEQ ID NO: 32010 - protein, 38 aa, Artificial Sequence
  GFR-binding peptide
  MOD_RES (2)..(36)..(37): Xaa is C or S
  MOD_RES (14)..(15)..(16)..(17)..(18): Xaa is A or G
  MOD_RES (19)..(20)..(21)..(22): Xaa is A or G or is absent
GXAKVVMNPIKGYXXXXXXXXXFYLVNIPSLKTPAXXA

SEQ ID NO: 32011 - protein, 41 aa, Artificial Sequence
  GFR-binding peptide
  MOD_RES (1)..(35)..(36): Xaa is C or S
  MOD_RES (13)..(14)..(15)..(16)..(17): Xaa is A or G
  MOD_RES (18)..(19)..(20)..(21): Xaa is A or G or is absent
XRDVVMGPIKGYXXXXXXXXXFYLMNIPSMKTPTXXPGASG

SEQ ID NO: 32012 - protein, 35 aa, Artificial Sequence
  GFR-binding peptide
  MOD_RES (1)..(35): Xaa is C or S
  MOD_RES (13)..(14)..(15)..(16)..(17): Xaa is A or G
  MOD_RES (18)..(19)..(20)..(21): Xaa is A or G or is absent
XAKVVMNPIKGYXXXXXXXXXFYLVNIPSLKTPAX

SEQ ID NO: 32013 - protein, 31 aa, Artificial Sequence
  GFR-binding peptide
  MOD_RES (31)..(31): Xaa is C or S
RVVMNPIKGYIVNSSDDFYLVNIPSLQTPAX

SEQ ID NO: 32014 - protein, 35 aa, Artificial Sequence
  GFR-binding peptide
  MOD_RES (31)..(32): Xaa is C or S
EVVMDPIKGYVVNNAADFYLINIPSLRAPVXXSAP

SEQ ID NO: 32015 - protein, 43 aa, Artificial Sequence
  GFR-binding peptide
  MOD_RES (1)..(3)..(37)..(38): Xaa is C or S
  MOD_RES (15)..(16)..(17)..(18)..(19): Xaa is A or G
  MOD_RES (20)..(21)..(22)..(23): Xaa is A or G or is absent
XGXGEVVMDPIKGYXXXXXXXXXFYLMNIPSLETPVXXAKPIK

SEQ ID NO: 32016 - protein, 37 aa, Artificial Sequence
  GFR-binding peptide
  MOD_RES (34)..(35): Xaa is C or S
  MOD_RES (12)..(13)..(14)..(15)..(16): Xaa is A or G
  MOD_RES (17)..(18)..(19)..(20): Xaa is A or G or is absent
AEVVMDPIKGYXXXXXXXXXFYLINIPSLRAPVXXSA

SEQ ID NO: 32017 - protein, 33 aa, Artificial Sequence
  GFR-binding peptide
  MOD_RES (31)..(32): Xaa is C or S
RVVMNPIKGYIVNSSDDFYLVNIPSLQTPAXXP

SEQ ID NO: 32018 - protein, 42 aa, Artificial Sequence
  GFR-binding peptide
  MOD_RES (1)..(3)..(37)..(38): Xaa is C or S
  MOD_RES (15)..(16)..(17)..(18)..(19): Xaa is A or G
  MOD_RES (20)..(21)..(22)..(23): Xaa is A or G or is absent
XGXGEVVMDPIKGYXXXXXXXXXFYLMNIPSLETPVXXAKPI

SEQ ID NO: 32019 - protein, 38 aa, Artificial Sequence
  GFR-binding peptide
  MOD_RES (2)..(37)..(38): Xaa is C or S
  MOD_RES (15)..(16)..(17)..(18)..(19): Xaa is A or G
  MOD_RES (20)..(21)..(22)..(23): Xaa is A or G or is absent
GXEAVSMGEPIKGYXXXXXXXXXFYLVNIPSLKTPVXX

SEQ ID NO: 32020 - protein, 35 aa, Artificial Sequence
  GFR-binding peptide
  MOD_RES (1)..(33)..(34): Xaa is C or S
XAKVVMNPIKGYIVNNSSDFYLVNIPSLKTPAXXA

SEQ ID NO: 32021 - protein, 39 aa, Artificial Sequence
  GFR-binding peptide
  MOD_RES (1)..(35)..(36): Xaa is C or S
  MOD_RES (13)..(14)..(15)..(16)..(17): Xaa is A or G
  MOD_RES (18)..(19)..(20)..(21): Xaa is A or G or is absent
XAEVVMDPIKGYXXXXXXXXXFYLINIPSLRAPVXXSAP

SEQ ID NO: 32022 - protein, 33 aa, Artificial Sequence
  GFR-binding peptide
  MOD_RES (32)..(33): Xaa is C or S
AEVVMDPIKGYVVNNAADFYLINIPSLRAPVXX

SEQ ID NO: 32023 - protein, 34 aa, Artificial Sequence
  GFR-binding peptide
  MOD_RES (1)..(33)..(34): Xaa is C or S
XARVVMNPIKGYIVNSSDDFYLVNIPSLQTPAXX

SEQ ID NO: 32024 - protein, 39 aa, Artificial Sequence
  GFR-binding peptide
  MOD_RES (2)..(4)..(36)..(37): Xaa is C or S
HXGXARVVMNPIKGYIVNSSDDFYLVNIPSLQTPAXXPK

SEQ ID NO: 32025 - protein, 36 aa, Artificial Sequence
  GFR-binding peptide
  MOD_RES (2)..(34)..(35): Xaa is C or S
GXESVAMGPIKGYYTVVGKDFYLINIPSLKTPVXXA

SEQ ID NO: 32026 - protein, 41 aa, Artificial Sequence
  GFR-binding peptide
  MOD_RES (2)..(36)..(37): Xaa is C or S
  MOD_RES (14)..(15)..(16)..(17)..(18): Xaa is A or G
  MOD_RES (19)..(20)..(21)..(22): Xaa is A or G or is absent
GXAEVVMDPIKGYXXXXXXXXXFYLINIPSLRAPVXXSAPA

SEQ ID NO: 32027 - protein, 39 aa, Artificial Sequence
  GFR-binding peptide
  MOD_RES (33)..(34): Xaa is C or S
  MOD_RES (11)..(12)..(13)..(14)..(15): Xaa is A or G
  MOD_RES (16)..(17)..(18)..(19): Xaa is A or G or is absent
SVAMGPIKGYXXXXXXXXXFYLINIPSLKTPVXXAKSAK

SEQ ID NO: 32028 - protein, 39 aa, Artificial Sequence
  GFR-binding peptide
  MOD_RES (2)..(34)..(35): Xaa is C or S
GXAEVVMDPIKGYVVNNAADFYLINIPSLRAPVXXSAPA

SEQ ID NO: 32029 - protein, 36 aa, Artificial Sequence
  GFR-binding peptide
  MOD_RES (1)..(35)..(36): Xaa is C or S
  MOD_RES (13)..(14)..(15)..(16)..(17): Xaa is A or G
  MOD_RES (18)..(19)..(20)..(21): Xaa is A or G or is absent
XESVAMGPIKGYXXXXXXXXXFYLINIPSLKTPVXX

SEQ ID NO: 32030 - protein, 37 aa, Artificial Sequence
  GFR-binding peptide
  MOD_RES (2)..(34)..(35): Xaa is C or S
GXSEVVMDPIKGYVVNNASDFYLINIPSLRTPVXXTP

SEQ ID NO: 32031 - protein, 36 aa, Artificial Sequence
  GFR-binding peptide
  MOD_RES (2)..(36): Xaa is C or S
  MOD_RES (14)..(15)..(16)..(17)..(18): Xaa is A or G
  MOD_RES (19)..(20)..(21)..(22): Xaa is A or G or is absent
GXSRVVMNPIKGYXXXXXXXXXFYLVNIPSLKTPAX

SEQ ID NO: 32032 - protein, 36 aa, Artificial Sequence
  GFR-binding peptide
  MOD_RES (1)..(3)..(35)..(36): Xaa is C or S
XGXGEVVMDPIKGYVVKENEDFYLMNIPSLETPVXX

SEQ ID NO: 32033 - protein, 37 aa, Artificial Sequence
  GFR-binding peptide
  MOD_RES (34)..(35): Xaa is C or S
  MOD_RES (12)..(13)..(14)..(15)..(16): Xaa is A or G
  MOD_RES (17)..(18)..(19)..(20): Xaa is A or G or is absent
SEVVMDPIKGYXXXXXXXXXFYLINIPSLRTPVXXTP

SEQ ID NO: 32034 - protein, 36 aa, Artificial Sequence
  GFR-binding peptide
  MOD_RES (2)..(4)..(36): Xaa is C or S
RXGXAEVVMDPIKGYVVNNAADFYLINIPSLRAPVX

SEQ ID NO: 32035 - protein, 37 aa, Artificial Sequence
  GFR-binding peptide
  MOD_RES (32)..(33): Xaa is C or S
GEVVMEPIKGYVVKDYEDFYLMNIPSLETPVXXAKPI

SEQ ID NO: 32036 - protein, 37 aa, Artificial Sequence
  GFR-binding peptide
  MOD_RES (2)..(34)..(35): Xaa is C or S
GXAEVVMDPIKGYVVNNAADFYLINIPSLRAPVXXSA

SEQ ID NO: 32037 - protein, 41 aa, Artificial Sequence
  GFR-binding peptide
  MOD_RES (1)..(35): Xaa is C or S
  MOD_RES (13)..(14)..(15)..(16)..(17): Xaa is A or G
  MOD_RES (18)..(19)..(20)..(21): Xaa is A or G or is absent
XSRVVMNPIKGYXXXXXXXXXFYLVNIPSLKTPAXTPKTVH

SEQ ID NO: 32038 - protein, 39 aa, Artificial Sequence
  GFR-binding peptide
  MOD_RES (2)..(4)..(36)..(37): Xaa is C or S
HXGXSRVVMNPIKGYIVNSSDDFYLVNIPSLKTPAXXPK

SEQ ID NO: 32039 - protein, 39 aa, Artificial Sequence
  GFR-binding peptide
  MOD_RES (1)..(33)..(34): Xaa is C or S
XAEVVMDPIKGYVVNNAADFYLINIPSLRAPVXXSAPAA

SEQ ID NO: 32040 - protein, 42 aa, Artificial Sequence
  GFR-binding peptide
  MOD_RES (1)..(3)..(36)..(37): Xaa is C or S
XGXEAVSMGEPIKGYTPVGMDDFYLVNIPSLKTPVXXAKGVK

SEQ ID NO: 32041 - protein, 39 aa, Artificial Sequence
  GFR-binding peptide
  MOD_RES (1)..(3)..(35)..(36): Xaa is C or S
XGXSRVVMNPIKGYIVNSSDDFYLVNIPSLKTPAXXPKP

SEQ ID NO: 32042 - protein, 35 aa, Artificial Sequence
  GFR-binding peptide
  MOD_RES (34)..(35): Xaa is C or S
  MOD_RES (12)..(13)..(14)..(15)..(16): Xaa is A or G
  MOD_RES (17)..(18)..(19)..(20): Xaa is A or G or is absent
GEVVMEPIKGYXXXXXXXXXFYLMNIPSLETPVXX

SEQ ID NO: 32043 - protein, 40 aa, Artificial Sequence
  GFR-binding peptide
  MOD_RES (2)..(34)..(35): Xaa is C or S
GXAEVVMDPIKGYVVNNAADFYLINIPSLRAPVXXSAPAA

SEQ ID NO: 32044 - protein, 35 aa, Artificial Sequence
  GFR-binding peptide
  MOD_RES (1)..(3)..(35): Xaa is C or S
XGXRDVVMGPIKGYIIQQKDNFYLMNIPSMKTPTX

SEQ ID NO: 32045 - protein, 38 aa, Artificial Sequence
  GFR-binding peptide
  MOD_RES (1)..(35)..(36): Xaa is C or S
  MOD_RES (13)..(14)..(15)..(16)..(17): Xaa is A or G
  MOD_RES (18)..(19)..(20)..(21): Xaa is A or G or is absent
XAEVVMDPIKGYXXXXXXXXXFYLINIPSLRAPVXXSA

SEQ ID NO: 32046 - protein, 43 aa, Artificial Sequence
  GFR-binding peptide
  MOD_RES (2)..(4)..(38)..(39): Xaa is C or S
  MOD_RES (16)..(17)..(18)..(19)..(20): Xaa is A or G
  MOD_RES (21)..(22)..(23)..(24): Xaa is A or G or is absent
RXGXGEVVMEPIKGYXXXXXXXXXFYLMNIPSLETPVXXAKPI

SEQ ID NO: 32047 - protein, 41 aa, Artificial Sequence
  GFR-binding peptide
  MOD_RES (1)..(35)..(36): Xaa is C or S
  MOD_RES (13)..(14)..(15)..(16)..(17): Xaa is A or G
  MOD_RES (18)..(19)..(20)..(21): Xaa is A or G or is absent
XGEVVMDPIKGYXXXXXXXXXFYLMNIPSLETPVXXAKPIK

SEQ ID NO: 32048 - protein, 39 aa, Artificial Sequence
  GFR-binding peptide
  MOD_RES (2)..(34)..(35): Xaa is C or S
GXAKVVMNPIKGYIVNNSSDFYLVNIPSLKTPAXXAKPV

SEQ ID NO: 32049 - protein, 37 aa, Artificial Sequence
  GFR-binding peptide
  MOD_RES (2)..(36)..(37): Xaa is C or S
  MOD_RES (14)..(15)..(16)..(17)..(18): Xaa is A or G
  MOD_RES (19)..(20)..(21)..(22): Xaa is A or G or is absent
GXSEVVMDPIKGYXXXXXXXXXFYLINIPSLRTPVXX

SEQ ID NO: 32050 - protein, 34 aa, Artificial Sequence
  GFR-binding peptide
  MOD_RES (1)..(34): Xaa is C or S
  MOD_RES (12)..(13)..(14)..(15)..(16): Xaa is A or G
  MOD_RES (17)..(18)..(19)..(20): Xaa is A or G or is absent
XEEVIMPIKGYXXXXXXXXXFYLMNIPSTKVPAX

SEQ ID NO: 32051 - protein, 37 aa, Artificial Sequence
  GFR-binding peptide
  MOD_RES (1)..(33)..(34): Xaa is C or S
XAKVVMNPIKGYIVNNSSDFYLVNIPSLKTPAXXAKP

SEQ ID NO: 32052 - protein, 34 aa, Artificial Sequence
  GFR-binding peptide
  MOD_RES (1)..(33)..(34): Xaa is C or S
XSRVVMNPIKGYIVNSSDDFYLVNIPSLKTPAXX

SEQ ID NO: 32053 - protein, 38 aa, Artificial Sequence
  GFR-binding peptide
  MOD_RES (2)..(35)..(36): Xaa is C or S
GXEAVSMGEPIKGYTPVGMDDFYLVNIPSLKTPVXXAK

SEQ ID NO: 32054 - protein, 40 aa, Artificial Sequence
  GFR-binding peptide
  MOD_RES (1)..(35)..(36): Xaa is C or S
  MOD_RES (13)..(14)..(15)..(16)..(17): Xaa is A or G
  MOD_RES (18)..(19)..(20)..(21): Xaa is A or G or is absent
XAKVVMNPIKGYXXXXXXXXXFYLVNIPSLKTPAXXAKPV

SEQ ID NO: 32055 - protein, 39 aa, Artificial Sequence
  GFR-binding peptide
  MOD_RES (33)..(33): Xaa is C or S
  MOD_RES (11)..(12)..(13)..(14)..(15): Xaa is A or G
  MOD_RES (16)..(17)..(18)..(19): Xaa is A or G or is absent
RVVMNPIKGYXXXXXXXXXFYLVNIPSLKTPAXTPKTVH

SEQ ID NO: 32056 - protein, 39 aa, Artificial Sequence
  GFR-binding peptide
  MOD_RES (1)..(35)..(36): Xaa is C or S
  MOD_RES (13)..(14)..(15)..(16)..(17): Xaa is A or G
  MOD_RES (18)..(19)..(20)..(21): Xaa is A or G or is absent
XGEVVMEPIKGYXXXXXXXXXFYLMNIPSLETPVXXAKP

SEQ ID NO: 32057 - protein, 36 aa, Artificial Sequence
  GFR-binding peptide
  MOD_RES (1)..(35)..(36): Xaa is C or S
  MOD_RES (13)..(14)..(15)..(16)..(17): Xaa is A or G
  MOD_RES (18)..(19)..(20)..(21): Xaa is A or G or is absent
XAEVVMDPIKGYXXXXXXXXXFYLINIPSLRAPVXX

SEQ ID NO: 32058 - protein, 38 aa, Artificial Sequence
  GFR-binding peptide
  MOD_RES (1)..(3)..(35)..(36): Xaa is C or S
XGXSRVVMNPIKGYIVNSSDDFYLVNIPSLKTPAXXPK

SEQ ID NO: 32059 - protein, 37 aa, Artificial Sequence
  GFR-binding peptide
  MOD_RES (2)..(36)..(37): Xaa is C or S
  MOD_RES (14)..(15)..(16)..(17)..(18): Xaa is A or G
  MOD_RES (19)..(20)..(21)..(22): Xaa is A or G or is absent
GXGEVVMEPIKGYXXXXXXXXXFYLMNIPSLETPVXX

SEQ ID NO: 32060 - protein, 38 aa, Artificial Sequence
  GFR-binding peptide
  MOD_RES (34)..(34): Xaa is C or S
  MOD_RES (12)..(13)..(14)..(15)..(16): Xaa is A or G
  MOD_RES (17)..(18)..(19)..(20): Xaa is A or G or is absent
SRVVMNPIKGYXXXXXXXXXFYLVNIPSLKTPAXTPKT

SEQ ID NO: 32061 - protein, 43 aa, Artificial Sequence
  GFR-binding peptide
  MOD_RES (2)..(4)..(38)..(39): Xaa is C or S
  MOD_RES (16)..(17)..(18)..(19)..(20): Xaa is A or G
  MOD_RES (21)..(22)..(23)..(24): Xaa is A or G or is absent
SXGXRDVVMGPIKGYXXXXXXXXXFYLMNIPSMKTPTXXPGAS

SEQ ID NO: 32062 - protein, 34 aa, Artificial Sequence
  GFR-binding peptide
  MOD_RES (31)..(32): Xaa is C or S
DVVMGPIKGYIIQQKDNFYLMNIPSMKTPTXXPG

SEQ ID NO: 32063 - protein, 31 aa, Artificial Sequence
  GFR-binding peptide
GEVVMDPIKGYVVKENEDFYLMNIPSLETPV

SEQ ID NO: 32064 - protein, 38 aa, Artificial Sequence
  GFR-binding peptide
  MOD_RES (1)..(35)..(36): Xaa is C or S
  MOD_RES (13)..(14)..(15)..(16)..(17): Xaa is A or G
  MOD_RES (18)..(19)..(20)..(21): Xaa is A or G or is absent
XARVVMNPIKGYXXXXXXXXXFYLVNIPSLQTPAXXPK

SEQ ID NO: 32065 - protein, 33 aa, Artificial Sequence
  GFR-binding peptide
  MOD_RES (33)..(33): Xaa is C or S
  MOD_RES (11)..(12)..(13)..(14)..(15): Xaa is A or G
  MOD_RES (16)..(17)..(18)..(19): Xaa is A or G or is absent
EVVMEPIKGYXXXXXXXXXFYLMNIPSLETPVX

SEQ ID NO: 32066 - protein, 37 aa, Artificial Sequence
  GFR-binding peptide
  MOD_RES (34)..(35): Xaa is C or S
  MOD_RES (12)..(13)..(14)..(15)..(16): Xaa is A or G
  MOD_RES (17)..(18)..(19)..(20): Xaa is A or G or is absent
AKVVMNPIKGYXXXXXXXXXFYLVNIPSLKTPAXXAK

SEQ ID NO: 32067 - protein, 37 aa, Artificial Sequence
  GFR-binding peptide
  MOD_RES (1)..(35)..(36): Xaa is C or S
  MOD_RES (13)..(14)..(15)..(16)..(17): Xaa is A or G
  MOD_RES (18)..(19)..(20)..(21): Xaa is A or G or is absent
XSEVVMDPIKGYXXXXXXXXXFYLINIPSLRTPVXXT

SEQ ID NO: 32068 - protein, 34 aa, Artificial Sequence
  GFR-binding peptide
  MOD_RES (2)..(34): Xaa is C or S
GXRDVVMGPIKGYIIQQKDNFYLMNIPSMKTPTX

SEQ ID NO: 32069 - protein, 33 aa, Artificial Sequence
  GFR-binding peptide
  MOD_RES (1)..(33): Xaa is C or S
XAEVVMDPIKGYVVNNAADFYLINIPSLRAPVX

SEQ ID NO: 32070 - protein, 35 aa, Artificial Sequence
  GFR-binding peptide
  MOD_RES (32)..(32): Xaa is C or S
SRVVMNPIKGYIVNSSDDFYLVNIPSLKTPAXTPK

SEQ ID NO: 32071 - protein, 40 aa, Artificial Sequence
  GFR-binding peptide
  MOD_RES (2)..(4)..(36)..(37): Xaa is C or S
HXGXSRVVMNPIKGYIVNSSDDFYLVNIPSLKTPAXXPKP

SEQ ID NO: 32072 - protein, 42 aa, Artificial Sequence
  GFR-binding peptide
  MOD_RES (1)..(3)..(36)..(37): Xaa is C or S
  MOD_RES (14)..(15)..(16)..(17)..(18): Xaa is A or G
  MOD_RES (19)..(20)..(21)..(22): Xaa is A or G or is absent
XGXEEVIMPIKGYXXXXXXXXXFYLMNIPSTKVPAXXTSPVR

SEQ ID NO: 32073 - protein, 41 aa, Artificial Sequence
  GFR-binding peptide
  MOD_RES (1)..(3)..(37)..(38): Xaa is C or S
  MOD_RES (15)..(16)..(17)..(18)..(19): Xaa is A or G
  MOD_RES (20)..(21)..(22)..(23): Xaa is A or G or is absent
XGXAEVVMDPIKGYXXXXXXXXXFYLINIPSLRAPVXXSAP

SEQ ID NO: 32074 - protein, 40 aa, Artificial Sequence
  GFR-binding peptide
  MOD_RES (35)..(36): Xaa is C or S
  MOD_RES (13)..(14)..(15)..(16)..(17): Xaa is A or G
  MOD_RES (18)..(19)..(20)..(21): Xaa is A or G or is absent
EAVSMGEPIKGYXXXXXXXXXFYLVNIPSLKTPVXXAKGV

SEQ ID NO: 32075 - protein, 37 aa, Artificial Sequence
  GFR-binding peptide
  MOD_RES (33)..(34): Xaa is C or S
  MOD_RES (11)..(12)..(13)..(14)..(15): Xaa is A or G
  MOD_RES (16)..(17)..(18)..(19): Xaa is A or G or is absent
EVVMDPIKGYXXXXXXXXXFYLINIPSLRTPVXXTPP

SEQ ID NO: 32076 - protein, 35 aa, Artificial Sequence
  GFR-binding peptide
  MOD_RES (1)..(35): Xaa is C or S
  MOD_RES (13)..(14)..(15)..(16)..(17): Xaa is A or G
  MOD_RES (18)..(19)..(20)..(21): Xaa is A or G or is absent
XAEVVMDPIKGYXXXXXXXXXFYLINIPSLRAPVX

SEQ ID NO: 32077 - protein, 36 aa, Artificial Sequence
  GFR-binding peptide
  MOD_RES (32)..(33): Xaa is C or S
ESVAMGPIKGYYTVVGKDFYLINIPSLKTPVXXAKS

SEQ ID NO: 32078 - protein, 41 aa, Artificial Sequence
  GFR-binding peptide
  MOD_RES (2)..(4)..(39)..(40): Xaa is C or S
  MOD_RES (17)..(18)..(19)..(20)..(21): Xaa is A or G
  MOD_RES (22)..(23)..(24)..(25): Xaa is A or G or is absent
RXGXEAVSMGEPIKGYXXXXXXXXXFYLVNIPSLKTPVXXA

SEQ ID NO: 32079 - protein, 44 aa, Artificial Sequence
  GFR-binding peptide
  MOD_RES (2)..(4)..(38)..(39): Xaa is C or S
  MOD_RES (16)..(17)..(18)..(19)..(20): Xaa is A or G
  MOD_RES (21)..(22)..(23)..(24): Xaa is A or G or is absent
RXGXESVAMGPIKGYXXXXXXXXXFYLINIPSLKTPVXXAKSAK

SEQ ID NO: 32080 - protein, 41 aa, Artificial Sequence
  GFR-binding peptide
  MOD_RES (1)..(3)..(37)..(38): Xaa is C or S
  MOD_RES (15)..(16)..(17)..(18)..(19): Xaa is A or G
  MOD_RES (20)..(21)..(22)..(23): Xaa is A or G or is absent
XGXGEVVMEPIKGYXXXXXXXXXFYLMNIPSLETPVXXAKP

SEQ ID NO: 32081 - protein, 39 aa, Artificial Sequence
  GFR-binding peptide
  MOD_RES (1)..(3)..(37)..(38): Xaa is C or S
  MOD_RES (15)..(16)..(17)..(18)..(19): Xaa is A or G
  MOD_RES (20)..(21)..(22)..(23): Xaa is A or G or is absent
XGXSRVVMNPIKGYXXXXXXXXXFYLVNIPSLKTPAXXP

SEQ ID NO: 32082 - protein, 36 aa, Artificial Sequence
  GFR-binding peptide
  MOD_RES (2)..(4)..(36): Xaa is C or S
SXGXRDVVMGPIKGYIIQQKDNFYLMNIPSMKTPTX

SEQ ID NO: 32083 - protein, 42 aa, Artificial Sequence
  GFR-binding peptide
  MOD_RES (2)..(4)..(36)..(37): Xaa is C or S
HXGXSRVVMNPIKGYIVNSSDDFYLVNIPSLKTPAXXPKPVH

SEQ ID NO: 32084 - protein, 42 aa, Artificial Sequence
  GFR-binding peptide
  MOD_RES (2)..(36): Xaa is C or S
  MOD_RES (14)..(15)..(16)..(17)..(18): Xaa is A or G
  MOD_RES (19)..(20)..(21)..(22): Xaa is A or G or is absent
GXSRVVMNPIKGYXXXXXXXXXFYLVNIPSLKTPAXTPKTVH

SEQ ID NO: 32085 - protein, 35 aa, Artificial Sequence
  GFR-binding peptide
  MOD_RES (1)..(3)..(35): Xaa is C or S
XGXSRVVMNPIKGYIVNSSDDFYLVNIPSLKTPAX

SEQ ID NO: 32086 - protein, 36 aa, Artificial Sequence
  GFR-binding peptide
  MOD_RES (2)..(35)..(36): Xaa is C or S
GXEAVSMGEPIKGYTPVGMDDFYLVNIPSLKTPVXX

SEQ ID NO: 32087 - protein, 36 aa, Artificial Sequence
  GFR-binding peptide
  MOD_RES (1)..(34)..(35): Xaa is C or S
  MOD_RES (12)..(13)..(14)..(15)..(16): Xaa is A or G
  MOD_RES (17)..(18)..(19)..(20): Xaa is A or G or is absent
XEEVIMPIKGYXXXXXXXXXFYLMNIPSTKVPAXXT

SEQ ID NO: 32088 - protein, 36 aa, Artificial Sequence
  GFR-binding peptide
  MOD_RES (2)..(36): Xaa is C or S
  MOD_RES (14)..(15)..(16)..(17)..(18): Xaa is A or G
  MOD_RES (19)..(20)..(21)..(22): Xaa is A or G or is absent
GXAEVVMDPIKGYXXXXXXXXXFYLINIPSLRAPVX

SEQ ID NO: 32089 - protein, 40 aa, Artificial Sequence
  GFR-binding peptide
  MOD_RES (2)..(4)..(38)..(39): Xaa is C or S
  MOD_RES (16)..(17)..(18)..(19)..(20): Xaa is A or G
  MOD_RES (21)..(22)..(23)..(24): Xaa is A or G or is absent
RXGXGEVVMEPIKGYXXXXXXXXXFYLMNIPSLETPVXXA

SEQ ID NO: 32090 - protein, 35 aa, Artificial Sequence
  GFR-binding peptide
  MOD_RES (33)..(34): Xaa is C or S
  MOD_RES (11)..(12)..(13)..(14)..(15): Xaa is A or G
  MOD_RES (16)..(17)..(18)..(19): Xaa is A or G or is absent
DVVMGPIKGYXXXXXXXXXFYLMNIPSMKTPTXXP

SEQ ID NO: 32091 - protein, 40 aa, Artificial Sequence
  GFR-binding peptide
  MOD_RES (2)..(36)..(37): Xaa is C or S
  MOD_RES (14)..(15)..(16)..(17)..(18): Xaa is A or G
  MOD_RES (19)..(20)..(21)..(22): Xaa is A or G or is absent
GXAKVVMNPIKGYXXXXXXXXXFYLVNIPSLKTPAXXAKP

SEQ ID NO: 32092 - protein, 39 aa, Artificial Sequence
  GFR-binding peptide
  MOD_RES (2)..(36)..(37): Xaa is C or S
  MOD_RES (14)..(15)..(16)..(17)..(18): Xaa is A or G
  MOD_RES (19)..(20)..(21)..(22): Xaa is A or G or is absent
GXAKVVMNPIKGYXXXXXXXXXFYLVNIPSLKTPAXXAK

SEQ ID NO: 32093 - protein, 37 aa, Artificial Sequence
  GFR-binding peptide
  MOD_RES (1)..(33)..(34): Xaa is C or S
XGEVVMEPIKGYVVKDYEDFYLMNIPSLETPVXXAKP

SEQ ID NO: 32094 - protein, 37 aa, Artificial Sequence
  GFR-binding peptide
  MOD_RES (1)..(33)..(34): Xaa is C or S
XESVAMGPIKGYYTVVGKDFYLINIPSLKTPVXXAKS

SEQ ID NO: 32095 - protein, 34 aa, Artificial Sequence
  GFR-binding peptide
  MOD_RES (1)..(1): Xaa is C or S
  MOD_RES (13)..(14)..(15)..(16)..(17): Xaa is A or G
  MOD_RES (18)..(19)..(20)..(21): Xaa is A or G or is absent
XRDVVMGPIKGYXXXXXXXXXFYLMNIPSMKTPT

SEQ ID NO: 32096 - protein, 40 aa, Artificial Sequence
  GFR-binding peptide
  MOD_RES (34)..(35): Xaa is C or S
  MOD_RES (12)..(13)..(14)..(15)..(16): Xaa is A or G
  MOD_RES (17)..(18)..(19)..(20): Xaa is A or G or is absent
GEVVMEPIKGYXXXXXXXXXFYLMNIPSLETPVXXAKPIS

SEQ ID NO: 32097 - protein, 32 aa, Artificial Sequence
  GFR-binding peptide
  MOD_RES (1)..(1): Xaa is C or S
XESVAMGPIKGYYTVVGKDFYLINIPSLKTPV

SEQ ID NO: 32098 - protein, 33 aa, Artificial Sequence
  GFR-binding peptide
  MOD_RES (2)..(2): Xaa is C or S
GXARVVMNPIKGYIVNSSDDFYLVNIPSLQTPA

SEQ ID NO: 32099 - protein, 40 aa, Artificial Sequence
  GFR-binding peptide
  MOD_RES (1)..(35): Xaa is C or S
  MOD_RES (13)..(14)..(15)..(16)..(17): Xaa is A or G
  MOD_RES (18)..(19)..(20)..(21): Xaa is A or G or is absent
XSRVVMNPIKGYXXXXXXXXXFYLVNIPSLKTPAXTPKTV

SEQ ID NO: 32100 - protein, 37 aa, Artificial Sequence
  GFR-binding peptide
  MOD_RES (2)..(4): Xaa is C or S
  MOD_RES (16)..(17)..(18)..(19)..(20): Xaa is A or G
  MOD_RES (21)..(22)..(23)..(24): Xaa is A or G or is absent
HXGXARVVMNPIKGYXXXXXXXXXFYLVNIPSLQTPA

SEQ ID NO: 32101 - protein, 42 aa, Artificial Sequence
  GFR-binding peptide
  MOD_RES (2)..(36)..(37): Xaa is C or S
  MOD_RES (14)..(15)..(16)..(17)..(18): Xaa is A or G
  MOD_RES (19)..(20)..(21)..(22): Xaa is A or G or is absent
GXGEVVMEPIKGYXXXXXXXXXFYLMNIPSLETPVXXAKPIS

SEQ ID NO: 32102 - protein, 31 aa, Artificial Sequence
  GFR-binding peptide
  MOD_RES (31)..(31): Xaa is C or S
EVVMEPIKGYVVKDYEDFYLMNIPSLETPVX

SEQ ID NO: 32103 - protein, 39 aa, Artificial Sequence
  GFR-binding peptide
  MOD_RES (2)..(4)..(38)..(39): Xaa is C or S
  MOD_RES (16)..(17)..(18)..(19)..(20): Xaa is A or G
  MOD_RES (21)..(22)..(23)..(24): Xaa is A or G or is absent
HXGXAKVVMNPIKGYXXXXXXXXXFYLVNIPSLKTPAXX

SEQ ID NO: 32104 - protein, 44 aa, Artificial Sequence
  GFR-binding peptide
  MOD_RES (2)..(4)..(38)..(39): Xaa is C or S
  MOD_RES (16)..(17)..(18)..(19)..(20): Xaa is A or G
  MOD_RES (21)..(22)..(23)..(24): Xaa is A or G or is absent
HXGXARVVMNPIKGYXXXXXXXXXFYLVNIPSLQTPAXXPKPVT

SEQ ID NO: 32105 - protein, 36 aa, Artificial Sequence
  GFR-binding peptide
  MOD_RES (1)..(35): Xaa is C or S
  MOD_RES (13)..(14)..(15)..(16)..(17): Xaa is A or G
  MOD_RES (18)..(19)..(20)..(21): Xaa is A or G or is absent
XSRVVMNPIKGYXXXXXXXXXFYLVNIPSLKTPAXT

SEQ ID NO: 32106 - protein, 37 aa, Artificial Sequence
  GFR-binding peptide
  MOD_RES (2)..(4): Xaa is C or S
  MOD_RES (16)..(17)..(18)..(19)..(20): Xaa is A or G
  MOD_RES (21)..(22)..(23)..(24): Xaa is A or G or is absent
RXGXGEVVMDPIKGYXXXXXXXXXFYLMNIPSLETPV

SEQ ID NO: 32107 - protein, 39 aa, Artificial Sequence
  GFR-binding peptide
  MOD_RES (2)..(34)..(35): Xaa is C or S
GXGEVVMDPIKGYVVKENEDFYLMNIPSLETPVXXAKPI

SEQ ID NO: 32108 - protein, 37 aa, Artificial Sequence
  GFR-binding peptide
  MOD_RES (1)..(3)..(37): Xaa is C or S
  MOD_RES (15)..(16)..(17)..(18)..(19): Xaa is A or G
  MOD_RES (20)..(21)..(22)..(23): Xaa is A or G or is absent
XGXRDVVMGPIKGYXXXXXXXXXFYLMNIPSMKTPTX

SEQ ID NO: 32109 - protein, 44 aa, Artificial Sequence
  GFR-binding peptide
  MOD_RES (2)..(4)..(38)..(39): Xaa is C or S
  MOD_RES (16)..(17)..(18)..(19)..(20): Xaa is A or G
  MOD_RES (21)..(22)..(23)..(24): Xaa is A or G or is absent
RXGXGEVVMDPIKGYXXXXXXXXXFYLMNIPSLETPVXXAKPIK

SEQ ID NO: 32110 - protein, 33 aa, Artificial Sequence
  GFR-binding peptide
  MOD_RES (2)..(2): Xaa is C or S
GXESVAMGPIKGYYTVVGKDFYLINIPSLKTPV

SEQ ID NO: 32111 - protein, 37 aa, Artificial Sequence
  GFR-binding peptide
  MOD_RES (1)..(3): Xaa is C or S
  MOD_RES (16)..(17)..(18)..(19)..(20): Xaa is A or G
  MOD_RES (21)..(22)..(23)..(24): Xaa is A or G or is absent
XGXEAVSMGEPIKGYXXXXXXXXXFYLVNIPSLKTPV

SEQ ID NO: 32112 - protein, 37 aa, Artificial Sequence
  GFR-binding peptide
  MOD_RES (33)..(34): Xaa is C or S
  MOD_RES (11)..(12)..(13)..(14)..(15): Xaa is A or G
  MOD_RES (16)..(17)..(18)..(19): Xaa is A or G or is absent
EEVIMPIKGYXXXXXXXXXFYLMNIPSTKVPAXXTSP

SEQ ID NO: 32113 - protein, 40 aa, Artificial Sequence
  GFR-binding peptide
  MOD_RES (34)..(35): Xaa is C or S
  MOD_RES (12)..(13)..(14)..(15)..(16): Xaa is A or G
  MOD_RES (17)..(18)..(19)..(20): Xaa is A or G or is absent
RDVVMGPIKGYXXXXXXXXXFYLMNIPSMKTPTXXPGASG

SEQ ID NO: 32114 - protein, 38 aa, Artificial Sequence
  GFR-binding peptide
  MOD_RES (1)..(3)..(37): Xaa is C or S
  MOD_RES (15)..(16)..(17)..(18)..(19): Xaa is A or G
  MOD_RES (20)..(21)..(22)..(23): Xaa is A or G or is absent
XGXSRVVMNPIKGYXXXXXXXXXFYLVNIPSLKTPAXT

SEQ ID NO: 32115 - protein, 35 aa, Artificial Sequence
  GFR-binding peptide
  MOD_RES (32)..(33): Xaa is C or S
SRVVMNPIKGYIVNSSDDFYLVNIPSLKTPAXXPK

SEQ ID NO: 32116 - protein, 38 aa, Artificial Sequence
  GFR-binding peptide
  MOD_RES (1)..(3)..(35): Xaa is C or S
XGXSRVVMNPIKGYIVNSSDDFYLVNIPSLKTPAXTPK

SEQ ID NO: 32117 - protein, 33 aa, Artificial Sequence
  GFR-binding peptide
  MOD_RES (32)..(33): Xaa is C or S
SEVVMDPIKGYVVNNASDFYLINIPSLRTPVXX

SEQ ID NO: 32118 - protein, 38 aa, Artificial Sequence
  GFR-binding peptide
  MOD_RES (32)..(33): Xaa is C or S
SEVVMDPIKGYVVNNASDFYLINIPSLRTPVXXTPPTS

SEQ ID NO: 32119 - protein, 40 aa, Artificial Sequence
  GFR-binding peptide
  MOD_RES (1)..(35)..(36): Xaa is C or S
  MOD_RES (13)..(14)..(15)..(16)..(17): Xaa is A or G
  MOD_RES (18)..(19)..(20)..(21): Xaa is A or G or is absent
XAEVVMDPIKGYXXXXXXXXXFYLINIPSLRAPVXXSAPA

SEQ ID NO: 32120 - protein, 39 aa, Artificial Sequence
  GFR-binding peptide
  MOD_RES (1)..(3)..(35)..(36): Xaa is C or S
XGXARVVMNPIKGYIVNSSDDFYLVNIPSLQTPAXXPKP

SEQ ID NO: 32121 - protein, 31 aa, Artificial Sequence
  GFR-binding peptide
  MOD_RES (31)..(31): Xaa is C or S
EVVMDPIKGYVVNNAADFYLINIPSLRAPVX

SEQ ID NO: 32122 - protein, 39 aa, Artificial Sequence
  GFR-binding peptide
  MOD_RES (2)..(4)..(37)..(38): Xaa is C or S
  MOD_RES (15)..(16)..(17)..(18)..(19): Xaa is A or G
  MOD_RES (20)..(21)..(22)..(23): Xaa is A or G or is absent
LXGXEEVIMPIKGYXXXXXXXXXFYLMNIPSTKVPAXXT

SEQ ID NO: 32123 - protein, 38 aa, Artificial Sequence
  GFR-binding peptide
  MOD_RES (34)..(35): Xaa is C or S
  MOD_RES (12)..(13)..(14)..(15)..(16): Xaa is A or G
  MOD_RES (17)..(18)..(19)..(20): Xaa is A or G or is absent
AKVVMNPIKGYXXXXXXXXXFYLVNIPSLKTPAXXAKP

SEQ ID NO: 32124 - protein, 38 aa, Artificial Sequence
  GFR-binding peptide
  MOD_RES (1)..(33)..(34): Xaa is C or S
XAKVVMNPIKGYIVNNSSDFYLVNIPSLKTPAXXAKPV

SEQ ID NO: 32125 - protein, 37 aa, Artificial Sequence
  GFR-binding peptide
  MOD_RES (31)..(32): Xaa is C or S
DVVMGPIKGYIIQQKDNFYLMNIPSMKTPTXXPGASG

SEQ ID NO: 32126 - protein, 34 aa, Artificial Sequence
  GFR-binding peptide
  MOD_RES (1)..(1): Xaa is C or S
  MOD_RES (13)..(14)..(15)..(16)..(17): Xaa is A or G
  MOD_RES (18)..(19)..(20)..(21): Xaa is A or G or is absent
XAEVVMDPIKGYXXXXXXXXXFYLINIPSLRAPV

SEQ ID NO: 32127 - protein, 38 aa, Artificial Sequence
  GFR-binding peptide
  MOD_RES (33)..(34): Xaa is C or S
  MOD_RES (11)..(12)..(13)..(14)..(15): Xaa is A or G
  MOD_RES (16)..(17)..(18)..(19): Xaa is A or G or is absent
EVVMDPIKGYXXXXXXXXXFYLINIPSLRTPVXXTPPT

SEQ ID NO: 32128 - protein, 38 aa, Artificial Sequence
  GFR-binding peptide
  MOD_RES (2)..(4)..(37)..(38): Xaa is C or S
RXGXEAVSMGEPIKGYTPVGMDDFYLVNIPSLKTPVXX

SEQ ID NO: 32129 - protein, 37 aa, Artificial Sequence
  GFR-binding peptide
  MOD_RES (2)..(34)..(35): Xaa is C or S
GXSRVVMNPIKGYIVNSSDDFYLVNIPSLKTPAXXPK

SEQ ID NO: 32130 - protein, 40 aa, Artificial Sequence
  GFR-binding peptide
  MOD_RES (2)..(36)..(37): Xaa is C or S
  MOD_RES (14)..(15)..(16)..(17)..(18): Xaa is A or G
  MOD_RES (19)..(20)..(21)..(22): Xaa is A or G or is absent
GXRDVVMGPIKGYXXXXXXXXXFYLMNIPSMKTPTXXPGA

SEQ ID NO: 32131 - protein, 30 aa, Artificial Sequence
  GFR-binding peptide
EVVMDPIKGYVVNNAADFYLINIPSLRAPV

SEQ ID NO: 32132 - protein, 41 aa, Artificial Sequence
  GFR-binding peptide
  MOD_RES (1)..(3)..(36)..(37): Xaa is C or S
  MOD_RES (14)..(15)..(16)..(17)..(18): Xaa is A or G
  MOD_RES (19)..(20)..(21)..(22): Xaa is A or G or is absent
XGXEEVIMPIKGYXXXXXXXXXFYLMNIPSTKVPAXXTSPV

SEQ ID NO: 32133 - protein, 31 aa, Artificial Sequence
  GFR-binding peptide
  MOD_RES (31)..(31): Xaa is C or S
EVVMDPIKGYVVKENEDFYLMNIPSLETPVX

SEQ ID NO: 32134 - protein, 35 aa, Artificial Sequence
  GFR-binding peptide
  MOD_RES (33)..(34): Xaa is C or S
  MOD_RES (11)..(12)..(13)..(14)..(15): Xaa is A or G
  MOD_RES (16)..(17)..(18)..(19): Xaa is A or G or is absent
EVVMDPIKGYXXXXXXXXXFYLINIPSLRAPVXXS

SEQ ID NO: 32135 - protein, 38 aa, Artificial Sequence
  GFR-binding peptide
  MOD_RES (1)..(3)..(37)..(38): Xaa is C or S
  MOD_RES (15)..(16)..(17)..(18)..(19): Xaa is A or G
  MOD_RES (20)..(21)..(22)..(23): Xaa is A or G or is absent
XGXSRVVMNPIKGYXXXXXXXXXFYLVNIPSLKTPAXX

SEQ ID NO: 32136 - protein, 39 aa, Artificial Sequence
  GFR-binding peptide
  MOD_RES (2)..(33)..(34): Xaa is C or S
GXEEVIMPIKGYLLVRGNDFYLMNIPSTKVPAXXTSPVR

SEQ ID NO: 32137 - protein, 35 aa, Artificial Sequence
  GFR-binding peptide
  MOD_RES (1)..(3)..(35): Xaa is C or S
XGXSEVVMDPIKGYVVNNASDFYLINIPSLRTPVX

SEQ ID NO: 32138 - protein, 37 aa, Artificial Sequence
  GFR-binding peptide
  MOD_RES (1)..(35)..(36): Xaa is C or S
  MOD_RES (13)..(14)..(15)..(16)..(17): Xaa is A or G
  MOD_RES (18)..(19)..(20)..(21): Xaa is A or G or is absent
XRDVVMGPIKGYXXXXXXXXXFYLMNIPSMKTPTXXP

SEQ ID NO: 32139 - protein, 33 aa, Artificial Sequence
  GFR-binding peptide
  MOD_RES (33)..(33): Xaa is C or S
  MOD_RES (11)..(12)..(13)..(14)..(15): Xaa is A or G
  MOD_RES (16)..(17)..(18)..(19): Xaa is A or G or is absent
EVVMDPIKGYXXXXXXXXXFYLMNIPSLETPVX

SEQ ID NO: 32140 - protein, 34 aa, Artificial Sequence
  GFR-binding peptide
  MOD_RES (31)..(32): Xaa is C or S
EVVMDPIKGYVVNNAADFYLINIPSLRAPVXXSA

SEQ ID NO: 32141 - protein, 34 aa, Artificial Sequence
  GFR-binding peptide
  MOD_RES (31)..(31): Xaa is C or S
RVVMNPIKGYIVNSSDDFYLVNIPSLKTPAXTPK

SEQ ID NO: 32142 - protein, 40 aa, Artificial Sequence
  GFR-binding peptide
  MOD_RES (34)..(35): Xaa is C or S
  MOD_RES (12)..(13)..(14)..(15)..(16): Xaa is A or G
  MOD_RES (17)..(18)..(19)..(20): Xaa is A or G or is absent
SEVVMDPIKGYXXXXXXXXXFYLINIPSLRTPVXXTPPTS

SEQ ID NO: 32143 - protein, 38 aa, Artificial Sequence
  GFR-binding peptide
  MOD_RES (2)..(4)..(38): Xaa is C or S
  MOD_RES (16)..(17)..(18)..(19)..(20): Xaa is A or G
  MOD_RES (21)..(22)..(23)..(24): Xaa is A or G or is absent
HXGXARVVMNPIKGYXXXXXXXXXFYLVNIPSLQTPAX

SEQ ID NO: 32144 - protein, 35 aa, Artificial Sequence
  GFR-binding peptide
  MOD_RES (34)..(34): Xaa is C or S
  MOD_RES (12)..(13)..(14)..(15)..(16): Xaa is A or G
  MOD_RES (17)..(18)..(19)..(20): Xaa is A or G or is absent
SRVVMNPIKGYXXXXXXXXXFYLVNIPSLKTPAXT

SEQ ID NO: 32145 - protein, 36 aa, Artificial Sequence
  GFR-binding peptide
  MOD_RES (1)..(33)..(34): Xaa is C or S
XAKVVMNPIKGYIVNNSSDFYLVNIPSLKTPAXXAK

SEQ ID NO: 32146 - protein, 35 aa, Artificial Sequence
  GFR-binding peptide
  MOD_RES (33)..(34): Xaa is C or S
  MOD_RES (11)..(12)..(13)..(14)..(15): Xaa is A or G
  MOD_RES (16)..(17)..(18)..(19): Xaa is A or G or is absent
SVAMGPIKGYXXXXXXXXXFYLINIPSLKTPVXXA

SEQ ID NO: 32147 - protein, 32 aa, Artificial Sequence
  GFR-binding peptide
  MOD_RES (11)..(12)..(13)..(14)..(15): Xaa is A or G
  MOD_RES (16)..(17)..(18)..(19): Xaa is A or G or is absent
DVVMGPIKGYXXXXXXXXXFYLMNIPSMKTPT

SEQ ID NO: 32148 - protein, 36 aa, Artificial Sequence
  GFR-binding peptide
  MOD_RES (32)..(33): Xaa is C or S
GEVVMEPIKGYVVKDYEDFYLMNIPSLETPVXXAKP

SEQ ID NO: 32149 - protein, 36 aa, Artificial Sequence
  GFR-binding peptide
  MOD_RES (1)..(33)..(34): Xaa is C or S
XSRVVMNPIKGYIVNSSDDFYLVNIPSLKTPAXXPK

SEQ ID NO: 32150 - protein, 36 aa, Artificial Sequence
  GFR-binding peptide
  MOD_RES (34)..(35): Xaa is C or S
  MOD_RES (12)..(13)..(14)..(15)..(16): Xaa is A or G
  MOD_RES (17)..(18)..(19)..(20): Xaa is A or G or is absent
ARVVMNPIKGYXXXXXXXXXFYLVNIPSLQTPAXXP

SEQ ID NO: 32151 - protein, 40 aa, Artificial Sequence
  GFR-binding peptide
  MOD_RES (34)..(35): Xaa is C or S
  MOD_RES (12)..(13)..(14)..(15)..(16): Xaa is A or G
  MOD_RES (17)..(18)..(19)..(20): Xaa is A or G or is absent
SRVVMNPIKGYXXXXXXXXXFYLVNIPSLKTPAXXPKPVH

SEQ ID NO: 32152 - protein, 37 aa, Artificial Sequence
  GFR-binding peptide
  MOD_RES (31)..(31): Xaa is C or S
RVVMNPIKGYIVNSSDDFYLVNIPSLKTPAXTPKTVH

SEQ ID NO: 32153 - protein, 38 aa, Artificial Sequence
  GFR-binding peptide
  MOD_RES (1)..(33)..(34): Xaa is C or S
XGEVVMDPIKGYVVKENEDFYLMNIPSLETPVXXAKPI

SEQ ID NO: 32154 - protein, 41 aa, Artificial Sequence
  GFR-binding peptide
  MOD_RES (1)..(35)..(36): Xaa is C or S
  MOD_RES (13)..(14)..(15)..(16)..(17): Xaa is A or G
  MOD_RES (18)..(19)..(20)..(21): Xaa is A or G or is absent
XSRVVMNPIKGYXXXXXXXXXFYLVNIPSLKTPAXXPKPVH

SEQ ID NO: 32155 - protein, 42 aa, Artificial Sequence
  GFR-binding peptide
  MOD_RES (1)..(3)..(37)..(38): Xaa is C or S
  MOD_RES (15)..(16)..(17)..(18)..(19): Xaa is A or G
  MOD_RES (20)..(21)..(22)..(23): Xaa is A or G or is absent
XGXAKVVMNPIKGYXXXXXXXXXFYLVNIPSLKTPAXXAKPV

SEQ ID NO: 32156 - protein, 34 aa, Artificial Sequence
  GFR-binding peptide
  MOD_RES (33)..(34): Xaa is C or S
  MOD_RES (11)..(12)..(13)..(14)..(15): Xaa is A or G
  MOD_RES (16)..(17)..(18)..(19): Xaa is A or G or is absent
EVVMDPIKGYXXXXXXXXXFYLMNIPSLETPVXX

SEQ ID NO: 32157 - protein, 39 aa, Artificial Sequence
  GFR-binding peptide
  MOD_RES (33)..(34): Xaa is C or S
  MOD_RES (11)..(12)..(13)..(14)..(15): Xaa is A or G
  MOD_RES (16)..(17)..(18)..(19): Xaa is A or G or is absent
RVVMNPIKGYXXXXXXXXXFYLVNIPSLQTPAXXPKPVT

SEQ ID NO: 32158 - protein, 38 aa, Artificial Sequence
  GFR-binding peptide
  MOD_RES (2)..(4)..(36)..(37): Xaa is C or S
HXGXARVVMNPIKGYIVNSSDDFYLVNIPSLQTPAXXP

SEQ ID NO: 32159 - protein, 41 aa, Artificial Sequence
  GFR-binding peptide
  MOD_RES (2)..(37)..(38): Xaa is C or S
  MOD_RES (15)..(16)..(17)..(18)..(19): Xaa is A or G
  MOD_RES (20)..(21)..(22)..(23): Xaa is A or G or is absent
GXEAVSMGEPIKGYXXXXXXXXXFYLVNIPSLKTPVXXAKG

SEQ ID NO: 32160 - protein, 41 aa, Artificial Sequence
  GFR-binding peptide
  MOD_RES (2)..(4)..(36)..(37): Xaa is C or S
HXGXARVVMNPIKGYIVNSSDDFYLVNIPSLQTPAXXPKPV

SEQ ID NO: 32161 - protein, 39 aa, Artificial Sequence
  GFR-binding peptide
  MOD_RES (1)..(35)..(36): Xaa is C or S
  MOD_RES (13)..(14)..(15)..(16)..(17): Xaa is A or G
  MOD_RES (18)..(19)..(20)..(21): Xaa is A or G or is absent
XAKVVMNPIKGYXXXXXXXXXFYLVNIPSLKTPAXXAKP

SEQ ID NO: 32162 - protein, 41 aa, Artificial Sequence
  GFR-binding peptide
  MOD_RES (1)..(35)..(36): Xaa is C or S
  MOD_RES (13)..(14)..(15)..(16)..(17): Xaa is A or G
  MOD_RES (18)..(19)..(20)..(21): Xaa is A or G or is absent
XARVVMNPIKGYXXXXXXXXXFYLVNIPSLQTPAXXPKPVT

SEQ ID NO: 32163 - protein, 35 aa, Artificial Sequence
  GFR-binding peptide
  MOD_RES (2)..(34)..(35): Xaa is C or S
GXGEVVMEPIKGYVVKDYEDFYLMNIPSLETPVXX

SEQ ID NO: 32164 - protein, 33 aa, Artificial Sequence
  GFR-binding peptide
  MOD_RES (1)..(1): Xaa is C or S
XEAVSMGEPIKGYTPVGMDDFYLVNIPSLKTPV

SEQ ID NO: 32165 - protein, 40 aa, Artificial Sequence
  GFR-binding peptide
  MOD_RES (2)..(4)..(38)..(39): Xaa is C or S
  MOD_RES (16)..(17)..(18)..(19)..(20): Xaa is A or G
  MOD_RES (21)..(22)..(23)..(24): Xaa is A or G or is absent
RXGXESVAMGPIKGYXXXXXXXXXFYLINIPSLKTPVXXA

SEQ ID NO: 32166 - protein, 36 aa, Artificial Sequence
  GFR-binding peptide
  MOD_RES (31)..(32): Xaa is C or S
DVVMGPIKGYIIQQKDNFYLMNIPSMKTPTXXPGAS

SEQ ID NO: 32167 - protein, 34 aa, Artificial Sequence
  GFR-binding peptide
  MOD_RES (1)..(34): Xaa is C or S
XEAVSMGEPIKGYTPVGMDDFYLVNIPSLKTPVX

SEQ ID NO: 32168 - protein, 39 aa, Artificial Sequence
  GFR-binding peptide
  MOD_RES (1)..(33)..(34): Xaa is C or S
XESVAMGPIKGYYTVVGKDFYLINIPSLKTPVXXAKSAK

SEQ ID NO: 32169 - protein, 33 aa, Artificial Sequence
  GFR-binding peptide
  MOD_RES (2)..(2): Xaa is C or S
GXGEVVMDPIKGYVVKENEDFYLMNIPSLETPV

SEQ ID NO: 32170 - protein, 34 aa, Artificial Sequence
  GFR-binding peptide
  MOD_RES (2)..(34): Xaa is C or S
GXGEVVMEPIKGYVVKDYEDFYLMNIPSLETPVX

SEQ ID NO: 32171 - protein, 38 aa, Artificial Sequence
  GFR-binding peptide
  MOD_RES (1)..(34)..(35): Xaa is C or S
  MOD_RES (12)..(13)..(14)..(15)..(16): Xaa is A or G
  MOD_RES (17)..(18)..(19)..(20): Xaa is A or G or is absent
XEEVIMPIKGYXXXXXXXXXFYLMNIPSTKVPAXXTSP

SEQ ID NO: 32172 - protein, 41 aa, Artificial Sequence
  GFR-binding peptide
  MOD_RES (1)..(35)..(36): Xaa is C or S
  MOD_RES (13)..(14)..(15)..(16)..(17): Xaa is A or G
  MOD_RES (18)..(19)..(20)..(21): Xaa is A or G or is absent
XGEVVMEPIKGYXXXXXXXXXFYLMNIPSLETPVXXAKPIS

SEQ ID NO: 32173 - protein, 35 aa, Artificial Sequence
  GFR-binding peptide
  MOD_RES (2)..(34)..(35): Xaa is C or S
GXRDVVMGPIKGYIIQQKDNFYLMNIPSMKTPTXX

SEQ ID NO: 32174 - protein, 41 aa, Artificial Sequence
  GFR-binding peptide
  MOD_RES (2)..(4)..(38)..(39): Xaa is C or S
  MOD_RES (16)..(17)..(18)..(19)..(20): Xaa is A or G
  MOD_RES (21)..(22)..(23)..(24): Xaa is A or G or is absent
RXGXESVAMGPIKGYXXXXXXXXXFYLINIPSLKTPVXXAK

SEQ ID NO: 32175 - protein, 39 aa, Artificial Sequence
  GFR-binding peptide
  MOD_RES (33)..(34): Xaa is C or S
  MOD_RES (11)..(12)..(13)..(14)..(15): Xaa is A or G
  MOD_RES (16)..(17)..(18)..(19): Xaa is A or G or is absent
RVVMNPIKGYXXXXXXXXXFYLVNIPSLKTPAXXPKPVH

SEQ ID NO: 32176 - protein, 37 aa, Artificial Sequence
  GFR-binding peptide
  MOD_RES (1)..(33)..(34): Xaa is C or S
XSEVVMDPIKGYVVNNASDFYLINIPSLRTPVXXTPP

SEQ ID NO: 32177 - protein, 40 aa, Artificial Sequence
  GFR-binding peptide
  MOD_RES (2)..(34)..(35): Xaa is C or S
GXSRVVMNPIKGYIVNSSDDFYLVNIPSLKTPAXXPKPVH

SEQ ID NO: 32178 - protein, 34 aa, Artificial Sequence
  GFR-binding peptide
  MOD_RES (32)..(33): Xaa is C or S
SRVVMNPIKGYIVNSSDDFYLVNIPSLKTPAXXP

SEQ ID NO: 32179 - protein, 40 aa, Artificial Sequence
  GFR-binding peptide
  MOD_RES (2)..(36)..(37): Xaa is C or S
  MOD_RES (14)..(15)..(16)..(17)..(18): Xaa is A or G
  MOD_RES (19)..(20)..(21)..(22): Xaa is A or G or is absent
GXGEVVMDPIKGYXXXXXXXXXFYLMNIPSLETPVXXAKP

SEQ ID NO: 32180 - protein, 37 aa, Artificial Sequence
  GFR-binding peptide
  MOD_RES (32)..(32): Xaa is C or S
SRVVMNPIKGYIVNSSDDFYLVNIPSLKTPAXTPKTV

SEQ ID NO: 32181 - protein, 36 aa, Artificial Sequence
  GFR-binding peptide
  MOD_RES (33)..(33): Xaa is C or S
  MOD_RES (11)..(12)..(13)..(14)..(15): Xaa is A or G
  MOD_RES (16)..(17)..(18)..(19): Xaa is A or G or is absent
RVVMNPIKGYXXXXXXXXXFYLVNIPSLKTPAXTPK

SEQ ID NO: 32182 - protein, 40 aa, Artificial Sequence
  GFR-binding peptide
  MOD_RES (2)..(36)..(37): Xaa is C or S
  MOD_RES (14)..(15)..(16)..(17)..(18): Xaa is A or G
  MOD_RES (19)..(20)..(21)..(22): Xaa is A or G or is absent
GXESVAMGPIKGYXXXXXXXXXFYLINIPSLKTPVXXAKS

SEQ ID NO: 32183 - protein, 40 aa, Artificial Sequence
  GFR-binding peptide
  MOD_RES (1)..(35)..(36): Xaa is C or S
  MOD_RES (13)..(14)..(15)..(16)..(17): Xaa is A or G
  MOD_RES (18)..(19)..(20)..(21): Xaa is A or G or is absent
XARVVMNPIKGYXXXXXXXXXFYLVNIPSLQTPAXXPKPV

SEQ ID NO: 32184 - protein, 38 aa, Artificial Sequence
  GFR-binding peptide
  MOD_RES (2)..(34)..(35): Xaa is C or S
GXSEVVMDPIKGYVVNNASDFYLINIPSLRTPVXXTPP

SEQ ID NO: 32185 - protein, 31 aa, Artificial Sequence
  GFR-binding peptide
ARVVMNPIKGYIVNSSDDFYLVNIPSLQTPA

SEQ ID NO: 32186 - protein, 39 aa, Artificial Sequence
  GFR-binding peptide
  MOD_RES (1)..(33)..(34): Xaa is C or S
XSRVVMNPIKGYIVNSSDDFYLVNIPSLKTPAXXPKPVY

SEQ ID NO: 32187 - protein, 38 aa, Artificial Sequence
  GFR-binding peptide
  MOD_RES (2)..(4)..(38): Xaa is C or S
  MOD_RES (16)..(17)..(18)..(19)..(20): Xaa is A or G
  MOD_RES (21)..(22)..(23)..(24): Xaa is A or G or is absent
RXGXGEVVMDPIKGYXXXXXXXXXFYLMNIPSLETPVX

SEQ ID NO: 32188 - protein, 39 aa, Artificial Sequence
  GFR-binding peptide
  MOD_RES (2)..(4)..(36)..(37): Xaa is C or S
RXGXSEVVMDPIKGYVVNNASDFYLINIPSLRTPVXXTP

SEQ ID NO: 32189 - protein, 37 aa, Artificial Sequence
  GFR-binding peptide
  MOD_RES (2)..(37): Xaa is C or S
  MOD_RES (15)..(16)..(17)..(18)..(19): Xaa is A or G
  MOD_RES (20)..(21)..(22)..(23): Xaa is A or G or is absent
GXEAVSMGEPIKGYXXXXXXXXXFYLVNIPSLKTPVX

SEQ ID NO: 32190 - protein, 41 aa, Artificial Sequence
  GFR-binding peptide
  MOD_RES (2)..(36)..(37): Xaa is C or S
  MOD_RES (14)..(15)..(16)..(17)..(18): Xaa is A or G
  MOD_RES (19)..(20)..(21)..(22): Xaa is A or G or is absent
GXSRVVMNPIKGYXXXXXXXXXFYLVNIPSLKTPAXXPKPV

SEQ ID NO: 32191 - protein, 42 aa, Artificial Sequence
  GFR-binding peptide
  MOD_RES (1)..(3)..(37)..(38): Xaa is C or S
  MOD_RES (15)..(16)..(17)..(18)..(19): Xaa is A or G
  MOD_RES (20)..(21)..(22)..(23): Xaa is A or G or is absent
XGXRDVVMGPIKGYXXXXXXXXXFYLMNIPSMKTPTXXPGAS

SEQ ID NO: 32192 - protein, 31 aa, Artificial Sequence
  GFR-binding peptide
  MOD_RES (31)..(31): Xaa is C or S
DVVMGPIKGYIIQQKDNFYLMNIPSMKTPTX

SEQ ID NO: 32193 - protein, 36 aa, Artificial Sequence
  GFR-binding peptide
  MOD_RES (33)..(34): Xaa is C or S
  MOD_RES (11)..(12)..(13)..(14)..(15): Xaa is A or G
  MOD_RES (16)..(17)..(18)..(19): Xaa is A or G or is absent
RVVMNPIKGYXXXXXXXXXFYLVNIPSLKTPAXXPK

SEQ ID NO: 32194 - protein, 41 aa, Artificial Sequence
  GFR-binding peptide
  MOD_RES (1)..(35)..(36): Xaa is C or S
  MOD_RES (13)..(14)..(15)..(16)..(17): Xaa is A or G
  MOD_RES (18)..(19)..(20)..(21): Xaa is A or G or is absent
XSEVVMDPIKGYXXXXXXXXXFYLINIPSLRTPVXXTPPTS

SEQ ID NO: 32195 - protein, 39 aa, Artificial Sequence
  GFR-binding peptide
  MOD_RES (2)..(4)..(38)..(39): Xaa is C or S
  MOD_RES (16)..(17)..(18)..(19)..(20): Xaa is A or G
  MOD_RES (21)..(22)..(23)..(24): Xaa is A or G or is absent
RXGXESVAMGPIKGYXXXXXXXXXFYLINIPSLKTPVXX

SEQ ID NO: 32196 - protein, 41 aa, Artificial Sequence
  GFR-binding peptide
  MOD_RES (1)..(35)..(36): Xaa is C or S
  MOD_RES (13)..(14)..(15)..(16)..(17): Xaa is A or G
  MOD_RES (18)..(19)..(20)..(21): Xaa is A or G or is absent
XAKVVMNPIKGYXXXXXXXXXFYLVNIPSLKTPAXXAKPVA

SEQ ID NO: 32197 - protein, 33 aa, Artificial Sequence
  GFR-binding peptide
  MOD_RES (31)..(32): Xaa is C or S
DVVMGPIKGYIIQQKDNFYLMNIPSMKTPTXXP

SEQ ID NO: 32198 - protein, 30 aa, Artificial Sequence
  GFR-binding peptide
RVVMNPIKGYIVNSSDDFYLVNIPSLKTPA

SEQ ID NO: 32199 - protein, 33 aa, Artificial Sequence
  GFR-binding peptide
  MOD_RES (33)..(33): Xaa is C or S
  MOD_RES (11)..(12)..(13)..(14)..(15): Xaa is A or G
  MOD_RES (16)..(17)..(18)..(19): Xaa is A or G or is absent
DVVMGPIKGYXXXXXXXXXFYLMNIPSMKTPTX

SEQ ID NO: 32200 - protein, 34 aa, Artificial Sequence
  GFR-binding peptide
  MOD_RES (1)..(1): Xaa is C or S
  MOD_RES (13)..(14)..(15)..(16)..(17): Xaa is A or G
  MOD_RES (18)..(19)..(20)..(21): Xaa is A or G or is absent
XARVVMNPIKGYXXXXXXXXXFYLVNIPSLQTPA

SEQ ID NO: 32201 - protein, 42 aa, Artificial Sequence
  GFR-binding peptide
  MOD_RES (2)..(36)..(37): Xaa is C or S
  MOD_RES (14)..(15)..(16)..(17)..(18): Xaa is A or G
  MOD_RES (19)..(20)..(21)..(22): Xaa is A or G or is absent
GXSEVVMDPIKGYXXXXXXXXXFYLINIPSLRTPVXXTPPTS

SEQ ID NO: 32202 - protein, 40 aa, Artificial Sequence
  GFR-binding peptide
  MOD_RES (2)..(37)..(38): Xaa is C or S
  MOD_RES (15)..(16)..(17)..(18)..(19): Xaa is A or G
  MOD_RES (20)..(21)..(22)..(23): Xaa is A or G or is absent
GXEAVSMGEPIKGYXXXXXXXXXFYLVNIPSLKTPVXXAK

SEQ ID NO: 32203 - protein, 36 aa, Artificial Sequence
  GFR-binding peptide
  MOD_RES (31)..(32): Xaa is C or S
EVVMDPIKGYVVNNAADFYLINIPSLRAPVXXSAPA

SEQ ID NO: 32204 - protein, 32 aa, Artificial Sequence
  GFR-binding peptide
  MOD_RES (31)..(32): Xaa is C or S
EVVMEPIKGYVVKDYEDFYLMNIPSLETPVXX

SEQ ID NO: 32205 - protein, 36 aa, Artificial Sequence
  GFR-binding peptide
  MOD_RES (1)..(32)..(33): Xaa is C or S
XEEVIMPIKGYLLVRGNDFYLMNIPSTKVPAXXTSP

SEQ ID NO: 32206 - protein, 35 aa, Artificial Sequence
  GFR-binding peptide
  MOD_RES (1)..(33)..(34): Xaa is C or S
XGEVVMEPIKGYVVKDYEDFYLMNIPSLETPVXXA

SEQ ID NO: 32207 - protein, 36 aa, Artificial Sequence
  GFR-binding peptide
  MOD_RES (33)..(34): Xaa is C or S
  MOD_RES (11)..(12)..(13)..(14)..(15): Xaa is A or G
  MOD_RES (16)..(17)..(18)..(19): Xaa is A or G or is absent
EVVMEPIKGYXXXXXXXXXFYLMNIPSLETPVXXAK

SEQ ID NO: 32208 - protein, 31 aa, Artificial Sequence
  GFR-binding peptide
  MOD_RES (31)..(31): Xaa is C or S
KVVMNPIKGYIVNNSSDFYLVNIPSLKTPAX

SEQ ID NO: 32209 - protein, 38 aa, Artificial Sequence
  GFR-binding peptide
  MOD_RES (1)..(3)..(37)..(38): Xaa is C or S
  MOD_RES (15)..(16)..(17)..(18)..(19): Xaa is A or G
  MOD_RES (20)..(21)..(22)..(23): Xaa is A or G or is absent
XGXESVAMGPIKGYXXXXXXXXXFYLINIPSLKTPVXX

SEQ ID NO: 32210 - protein, 33 aa, Artificial Sequence
  GFR-binding peptide
  MOD_RES (32)..(33): Xaa is C or S
RDVVMGPIKGYIIQQKDNFYLMNIPSMKTPTXX

SEQ ID NO: 32211 - protein, 33 aa, Artificial Sequence
  GFR-binding peptide
  MOD_RES (1)..(33): Xaa is C or S
XSRVVMNPIKGYIVNSSDDFYLVNIPSLKTPAX

SEQ ID NO: 32212 - protein, 34 aa, Artificial Sequence
  GFR-binding peptide
  MOD_RES (34)..(34): Xaa is C or S
  MOD_RES (12)..(13)..(14)..(15)..(16): Xaa is A or G
  MOD_RES (17)..(18)..(19)..(20): Xaa is A or G or is absent
ESVAMGPIKGYXXXXXXXXXFYLINIPSLKTPVX

SEQ ID NO: 32213 - protein, 40 aa, Artificial Sequence
  GFR-binding peptide
  MOD_RES (2)..(4)..(38)..(39): Xaa is C or S
  MOD_RES (16)..(17)..(18)..(19)..(20): Xaa is A or G
  MOD_RES (21)..(22)..(23)..(24): Xaa is A or G or is absent
HXGXAKVVMNPIKGYXXXXXXXXXFYLVNIPSLKTPAXXA

SEQ ID NO: 32214 - protein, 40 aa, Artificial Sequence
  GFR-binding peptide
  MOD_RES (2)..(4)..(36)..(37): Xaa is C or S
RXGXESVAMGPIKGYYTVVGKDFYLINIPSLKTPVXXAKS

SEQ ID NO: 32215 - protein, 34 aa, Artificial Sequence
  GFR-binding peptide
  MOD_RES (31)..(32): Xaa is C or S
RVVMNPIKGYIVNSSDDFYLVNIPSLQTPAXXPK

SEQ ID NO: 32216 - protein, 42 aa, Artificial Sequence
  GFR-binding peptide
  MOD_RES (2)..(36)..(37): Xaa is C or S
  MOD_RES (14)..(15)..(16)..(17)..(18): Xaa is A or G
  MOD_RES (19)..(20)..(21)..(22): Xaa is A or G or is absent
GXESVAMGPIKGYXXXXXXXXXFYLINIPSLKTPVXXAKSAK

SEQ ID NO: 32217 - protein, 38 aa, Artificial Sequence
  GFR-binding peptide
  MOD_RES (1)..(3)..(37)..(38): Xaa is C or S
  MOD_RES (15)..(16)..(17)..(18)..(19): Xaa is A or G
  MOD_RES (20)..(21)..(22)..(23): Xaa is A or G or is absent
XGXGEVVMDPIKGYXXXXXXXXXFYLMNIPSLETPVXX

SEQ ID NO: 32218 - protein, 36 aa, Artificial Sequence
  GFR-binding peptide
  MOD_RES (1)..(33)..(34): Xaa is C or S
XESVAMGPIKGYYTVVGKDFYLINIPSLKTPVXXAK

SEQ ID NO: 32219 - protein, 39 aa, Artificial Sequence
  GFR-binding peptide
  MOD_RES (1)..(3)..(37)..(38): Xaa is C or S
  MOD_RES (15)..(16)..(17)..(18)..(19): Xaa is A or G
  MOD_RES (20)..(21)..(22)..(23): Xaa is A or G or is absent
XGXARVVMNPIKGYXXXXXXXXXFYLVNIPSLQTPAXXP

SEQ ID NO: 32220 - protein, 35 aa, Artificial Sequence
  GFR-binding peptide
  MOD_RES (2)..(4): Xaa is C or S
HXGXAKVVMNPIKGYIVNNSSDFYLVNIPSLKTPA

SEQ ID NO: 32221 - protein, 38 aa, Artificial Sequence
  GFR-binding peptide
  MOD_RES (1)..(3)..(35)..(36): Xaa is C or S
XGXARVVMNPIKGYIVNSSDDFYLVNIPSLQTPAXXPK

SEQ ID NO: 32222 - protein, 37 aa, Artificial Sequence
  GFR-binding peptide
  MOD_RES (31)..(32): Xaa is C or S
EVVMDPIKGYVVKENEDFYLMNIPSLETPVXXAKPIK

SEQ ID NO: 32223 - protein, 38 aa, Artificial Sequence
  GFR-binding peptide
  MOD_RES (2)..(4)..(36)..(37): Xaa is C or S
RXGXGEVVMEPIKGYVVKDYEDFYLMNIPSLETPVXXA

SEQ ID NO: 32224 - protein, 39 aa, Artificial Sequence
  GFR-binding peptide
  MOD_RES (33)..(34): Xaa is C or S
  MOD_RES (11)..(12)..(13)..(14)..(15): Xaa is A or G
  MOD_RES (16)..(17)..(18)..(19): Xaa is A or G or is absent
EVVMDPIKGYXXXXXXXXXFYLINIPSLRTPVXXTPPTS

SEQ ID NO: 32225 - protein, 38 aa, Artificial Sequence
  GFR-binding peptide
  MOD_RES (2)..(4)..(36)..(37): Xaa is C or S
SXGXRDVVMGPIKGYIIQQKDNFYLMNIPSMKTPTXXP

SEQ ID NO: 32226 - protein, 39 aa, Artificial Sequence
  GFR-binding peptide
  MOD_RES (2)..(4)..(36): Xaa is C or S
HXGXSRVVMNPIKGYIVNSSDDFYLVNIPSLKTPAXTPK

SEQ ID NO: 32227 - protein, 40 aa, Artificial Sequence
  GFR-binding peptide
  MOD_RES (2)..(36)..(37): Xaa is C or S
  MOD_RES (14)..(15)..(16)..(17)..(18): Xaa is A or G
  MOD_RES (19)..(20)..(21)..(22): Xaa is A or G or is absent
GXSRVVMNPIKGYXXXXXXXXXFYLVNIPSLKTPAXXPKP

SEQ ID NO: 32228 - protein, 38 aa, Artificial Sequence
  GFR-binding peptide
  MOD_RES (33)..(34): Xaa is C or S
  MOD_RES (11)..(12)..(13)..(14)..(15): Xaa is A or G
  MOD_RES (16)..(17)..(18)..(19): Xaa is A or G or is absent
EEVIMPIKGYXXXXXXXXXFYLMNIPSTKVPAXXTSPV

SEQ ID NO: 32229 - protein, 35 aa, Artificial Sequence
  GFR-binding peptide
  MOD_RES (2)..(2): Xaa is C or S
  MOD_RES (14)..(15)..(16)..(17)..(18): Xaa is A or G
  MOD_RES (19)..(20)..(21)..(22): Xaa is A or G or is absent
GXAKVVMNPIKGYXXXXXXXXXFYLVNIPSLKTPA

SEQ ID NO: 32230 - protein, 41 aa, Artificial Sequence
  GFR-binding peptide
  MOD_RES (2)..(35)..(36): Xaa is C or S
  MOD_RES (13)..(14)..(15)..(16)..(17): Xaa is A or G
  MOD_RES (18)..(19)..(20)..(21): Xaa is A or G or is absent
GXEEVIMPIKGYXXXXXXXXXFYLMNIPSTKVPAXXTSPVR

SEQ ID NO: 32231 - protein, 43 aa, Artificial Sequence
  GFR-binding peptide
  MOD_RES (2)..(4)..(38)..(39): Xaa is C or S
  MOD_RES (16)..(17)..(18)..(19)..(20): Xaa is A or G
  MOD_RES (21)..(22)..(23)..(24): Xaa is A or G or is absent
HXGXAKVVMNPIKGYXXXXXXXXXFYLVNIPSLKTPAXXAKPV

SEQ ID NO: 32232 - protein, 34 aa, Artificial Sequence
  GFR-binding peptide
  MOD_RES (33)..(34): Xaa is C or S
  MOD_RES (11)..(12)..(13)..(14)..(15): Xaa is A or G
  MOD_RES (16)..(17)..(18)..(19): Xaa is A or G or is absent
EVVMEPIKGYXXXXXXXXXFYLMNIPSLETPVXX

SEQ ID NO: 32233 - protein, 42 aa, Artificial Sequence
  GFR-binding peptide
  MOD_RES (2)..(36)..(37): Xaa is C or S
  MOD_RES (14)..(15)..(16)..(17)..(18): Xaa is A or G
  MOD_RES (19)..(20)..(21)..(22): Xaa is A or G or is absent
GXAEVVMDPIKGYXXXXXXXXXFYLINIPSLRAPVXXSAPAA

SEQ ID NO: 32234 - protein, 39 aa, Artificial Sequence
  GFR-binding peptide
  MOD_RES (2)..(34)..(35): Xaa is C or S
GXSRVVMNPIKGYIVNSSDDFYLVNIPSLKTPAXXPKPV

SEQ ID NO: 32235 - protein, 39 aa, Artificial Sequence
  GFR-binding peptide
  MOD_RES (34)..(35): Xaa is C or S
  MOD_RES (12)..(13)..(14)..(15)..(16): Xaa is A or G
  MOD_RES (17)..(18)..(19)..(20): Xaa is A or G or is absent
AKVVMNPIKGYXXXXXXXXXFYLVNIPSLKTPAXXAKPV

SEQ ID NO: 32236 - protein, 39 aa, Artificial Sequence
  GFR-binding peptide
  MOD_RES (1)..(33)..(34): Xaa is C or S
XARVVMNPIKGYIVNSSDDFYLVNIPSLQTPAXXPKPVT

SEQ ID NO: 32237 - protein, 38 aa, Artificial Sequence
  GFR-binding peptide
  MOD_RES (1)..(35)..(36): Xaa is C or S
  MOD_RES (13)..(14)..(15)..(16)..(17): Xaa is A or G
  MOD_RES (18)..(19)..(20)..(21): Xaa is A or G or is absent
XAKVVMNPIKGYXXXXXXXXXFYLVNIPSLKTPAXXAK

SEQ ID NO: 32238 - protein, 40 aa, Artificial Sequence
  GFR-binding peptide
  MOD_RES (1)..(35)..(36): Xaa is C or S
  MOD_RES (13)..(14)..(15)..(16)..(17): Xaa is A or G
  MOD_RES (18)..(19)..(20)..(21): Xaa is A or G or is absent
XGEVVMDPIKGYXXXXXXXXXFYLMNIPSLETPVXXAKPI

SEQ ID NO: 32239 - protein, 40 aa, Artificial Sequence
  GFR-binding peptide
  MOD_RES (2)..(4)..(37)..(38): Xaa is C or S
RXGXEAVSMGEPIKGYTPVGMDDFYLVNIPSLKTPVXXAK

SEQ ID NO: 32240 - protein, 36 aa, Artificial Sequence
  GFR-binding peptide
  MOD_RES (1)..(35)..(36): Xaa is C or S
  MOD_RES (13)..(14)..(15)..(16)..(17): Xaa is A or G
  MOD_RES (18)..(19)..(20)..(21): Xaa is A or G or is absent
XSEVVMDPIKGYXXXXXXXXXFYLINIPSLRTPVXX

SEQ ID NO: 32241 - protein, 38 aa, Artificial Sequence
  GFR-binding peptide
  MOD_RES (1)..(3)..(37)..(38): Xaa is C or S
  MOD_RES (15)..(16)..(17)..(18)..(19): Xaa is A or G
  MOD_RES (20)..(21)..(22)..(23): Xaa is A or G or is absent
XGXAEVVMDPIKGYXXXXXXXXXFYLINIPSLRAPVXX

SEQ ID NO: 32242 - protein, 37 aa, Artificial Sequence
  GFR-binding peptide
  MOD_RES (32)..(33): Xaa is C or S
ESVAMGPIKGYYTVVGKDFYLINIPSLKTPVXXAKSA

SEQ ID NO: 32243 - protein, 40 aa, Artificial Sequence
  GFR-binding peptide
  MOD_RES (2)..(35)..(36): Xaa is C or S
  MOD_RES (13)..(14)..(15)..(16)..(17): Xaa is A or G
  MOD_RES (18)..(19)..(20)..(21): Xaa is A or G or is absent
GXEEVIMPIKGYXXXXXXXXXFYLMNIPSTKVPAXXTSPV

SEQ ID NO: 32244 - protein, 37 aa, Artificial Sequence
  GFR-binding peptide
  MOD_RES (31)..(32): Xaa is C or S
EEVIMPIKGYLLVRGNDFYLMNIPSTKVPAXXTSPVR

SEQ ID NO: 32245 - protein, 35 aa, Artificial Sequence
  GFR-binding peptide
  MOD_RES (1)..(35): Xaa is C or S
  MOD_RES (13)..(14)..(15)..(16)..(17): Xaa is A or G
  MOD_RES (18)..(19)..(20)..(21): Xaa is A or G or is absent
XRDVVMGPIKGYXXXXXXXXXFYLMNIPSMKTPTX

SEQ ID NO: 32246 - protein, 42 aa, Artificial Sequence
  GFR-binding peptide
  MOD_RES (2)..(4)..(38)..(39): Xaa is C or S
  MOD_RES (16)..(17)..(18)..(19)..(20): Xaa is A or G
  MOD_RES (21)..(22)..(23)..(24): Xaa is A or G or is absent
RXGXAEVVMDPIKGYXXXXXXXXXFYLINIPSLRAPVXXSAP

SEQ ID NO: 32247 - protein, 36 aa, Artificial Sequence
  GFR-binding peptide
  MOD_RES (34)..(35): Xaa is C or S
  MOD_RES (12)..(13)..(14)..(15)..(16): Xaa is A or G
  MOD_RES (17)..(18)..(19)..(20): Xaa is A or G or is absent
GEVVMDPIKGYXXXXXXXXXFYLMNIPSLETPVXXA

SEQ ID NO: 32248 - protein, 34 aa, Artificial Sequence
  GFR-binding peptide
  MOD_RES (31)..(32): Xaa is C or S
EVVMEPIKGYVVKDYEDFYLMNIPSLETPVXXAK

SEQ ID NO: 32249 - protein, 31 aa, Artificial Sequence
  GFR-binding peptide
RDVVMGPIKGYIIQQKDNFYLMNIPSMKTPT

SEQ ID NO: 32250 - protein, 33 aa, Artificial Sequence
  GFR-binding peptide
  MOD_RES (32)..(33): Xaa is C or S
ARVVMNPIKGYIVNSSDDFYLVNIPSLQTPAXX

SEQ ID NO: 32251 - protein, 37 aa, Artificial Sequence
  GFR-binding peptide
  MOD_RES (2)..(4)..(36)..(37): Xaa is C or S
HXGXAKVVMNPIKGYIVNNSSDFYLVNIPSLKTPAXX

SEQ ID NO: 32252 - protein, 32 aa, Artificial Sequence
  GFR-binding peptide
  MOD_RES (31)..(32): Xaa is C or S
KVVMNPIKGYIVNNSSDFYLVNIPSLKTPAXX

SEQ ID NO: 32253 - protein, 35 aa, Artificial Sequence
  GFR-binding peptide
  MOD_RES (2)..(4)..(35): Xaa is C or S
LXGXEEVIMPIKGYLLVRGNDFYLMNIPSTKVPAX

SEQ ID NO: 32254 - protein, 34 aa, Artificial Sequence
  GFR-binding peptide
  MOD_RES (34)..(34): Xaa is C or S
  MOD_RES (12)..(13)..(14)..(15)..(16): Xaa is A or G
  MOD_RES (17)..(18)..(19)..(20): Xaa is A or G or is absent
AEVVMDPIKGYXXXXXXXXXFYLINIPSLRAPVX

SEQ ID NO: 32255 - protein, 38 aa, Artificial Sequence
  GFR-binding peptide
  MOD_RES (1)..(34)..(35): Xaa is C or S
XEAVSMGEPIKGYTPVGMDDFYLVNIPSLKTPVXXAKG

SEQ ID NO: 32256 - protein, 33 aa, Artificial Sequence
  GFR-binding peptide
  MOD_RES (31)..(31): Xaa is C or S
RVVMNPIKGYIVNSSDDFYLVNIPSLKTPAXTP

SEQ ID NO: 32257 - protein, 38 aa, Artificial Sequence
  GFR-binding peptide
  MOD_RES (2)..(36)..(37): Xaa is C or S
  MOD_RES (14)..(15)..(16)..(17)..(18): Xaa is A or G
  MOD_RES (19)..(20)..(21)..(22): Xaa is A or G or is absent
GXARVVMNPIKGYXXXXXXXXXFYLVNIPSLQTPAXXP

SEQ ID NO: 32258 - protein, 44 aa, Artificial Sequence
  GFR-binding peptide
  MOD_RES (2)..(4)..(39)..(40): Xaa is C or S
  MOD_RES (17)..(18)..(19)..(20)..(21): Xaa is A or G
  MOD_RES (22)..(23)..(24)..(25): Xaa is A or G or is absent
RXGXEAVSMGEPIKGYXXXXXXXXXFYLVNIPSLKTPVXXAKGV

SEQ ID NO: 32259 - protein, 35 aa, Artificial Sequence
  GFR-binding peptide
  MOD_RES (1)..(3)..(35): Xaa is C or S
XGXARVVMNPIKGYIVNSSDDFYLVNIPSLQTPAX

SEQ ID NO: 32260 - protein, 39 aa, Artificial Sequence
  GFR-binding peptide
  MOD_RES (2)..(34)..(35): Xaa is C or S
GXARVVMNPIKGYIVNSSDDFYLVNIPSLQTPAXXPKPV

SEQ ID NO: 32261 - protein, 42 aa, Artificial Sequence
  GFR-binding peptide
  MOD_RES (2)..(4)..(36)..(37): Xaa is C or S
HXGXAKVVMNPIKGYIVNNSSDFYLVNIPSLKTPAXXAKPVA

SEQ ID NO: 32262 - protein, 42 aa, Artificial Sequence
  GFR-binding peptide
  MOD_RES (2)..(36)..(37): Xaa is C or S
  MOD_RES (14)..(15)..(16)..(17)..(18): Xaa is A or G
  MOD_RES (19)..(20)..(21)..(22): Xaa is A or G or is absent
GXAKVVMNPIKGYXXXXXXXXXFYLVNIPSLKTPAXXAKPVA

SEQ ID NO: 32263 - protein, 32 aa, Artificial Sequence
  GFR-binding peptide
  MOD_RES (31)..(32): Xaa is C or S
DVVMGPIKGYIIQQKDNFYLMNIPSMKTPTXX

SEQ ID NO: 32264 - protein, 39 aa, Artificial Sequence
  GFR-binding peptide
  MOD_RES (1)..(36)..(37): Xaa is C or S
  MOD_RES (14)..(15)..(16)..(17)..(18): Xaa is A or G
  MOD_RES (19)..(20)..(21)..(22): Xaa is A or G or is absent
XEAVSMGEPIKGYXXXXXXXXXFYLVNIPSLKTPVXXAK

SEQ ID NO: 32265 - protein, 36 aa, Artificial Sequence
  GFR-binding peptide
  MOD_RES (1)..(3): Xaa is C or S
  MOD_RES (15)..(16)..(17)..(18)..(19): Xaa is A or G
  MOD_RES (20)..(21)..(22)..(23): Xaa is A or G or is absent
XGXARVVMNPIKGYXXXXXXXXXFYLVNIPSLQTPA

SEQ ID NO: 32266 - protein, 35 aa, Artificial Sequence
  GFR-binding peptide
  MOD_RES (1)..(33): Xaa is C or S
XSRVVMNPIKGYIVNSSDDFYLVNIPSLKTPAXTP

SEQ ID NO: 32267 - protein, 34 aa, Artificial Sequence
  GFR-binding peptide
  MOD_RES (34)..(34): Xaa is C or S
  MOD_RES (12)..(13)..(14)..(15)..(16): Xaa is A or G
  MOD_RES (17)..(18)..(19)..(20): Xaa is A or G or is absent
RDVVMGPIKGYXXXXXXXXXFYLMNIPSMKTPTX

SEQ ID NO: 32268 - protein, 38 aa, Artificial Sequence
  GFR-binding peptide
  MOD_RES (2)..(36)..(37): Xaa is C or S
  MOD_RES (14)..(15)..(16)..(17)..(18): Xaa is A or G
  MOD_RES (19)..(20)..(21)..(22): Xaa is A or G or is absent
GXESVAMGPIKGYXXXXXXXXXFYLINIPSLKTPVXXA

SEQ ID NO: 32269 - protein, 34 aa, Artificial Sequence
  GFR-binding peptide
  MOD_RES (34)..(34): Xaa is C or S
  MOD_RES (12)..(13)..(14)..(15)..(16): Xaa is A or G
  MOD_RES (17)..(18)..(19)..(20): Xaa is A or G or is absent
GEVVMEPIKGYXXXXXXXXXFYLMNIPSLETPVX

SEQ ID NO: 32270 - protein, 40 aa, Artificial Sequence
  GFR-binding peptide
  MOD_RES (2)..(34)..(35): Xaa is C or S
GXRDVVMGPIKGYIIQQKDNFYLMNIPSMKTPTXXPGASG

SEQ ID NO: 32271 - protein, 40 aa, Artificial Sequence
  GFR-binding peptide
  MOD_RES (34)..(35): Xaa is C or S
  MOD_RES (12)..(13)..(14)..(15)..(16): Xaa is A or G
  MOD_RES (17)..(18)..(19)..(20): Xaa is A or G or is absent
ESVAMGPIKGYXXXXXXXXXFYLINIPSLKTPVXXAKSAK

SEQ ID NO: 32272 - protein, 39 aa, Artificial Sequence
  GFR-binding peptide
  MOD_RES (1)..(35)..(36): Xaa is C or S
  MOD_RES (13)..(14)..(15)..(16)..(17): Xaa is A or G
  MOD_RES (18)..(19)..(20)..(21): Xaa is A or G or is absent
XESVAMGPIKGYXXXXXXXXXFYLINIPSLKTPVXXAKS

SEQ ID NO: 32273 - protein, 41 aa, Artificial Sequence
  GFR-binding peptide
  MOD_RES (2)..(4)..(37)..(38): Xaa is C or S
  MOD_RES (15)..(16)..(17)..(18)..(19): Xaa is A or G
  MOD_RES (20)..(21)..(22)..(23): Xaa is A or G or is absent
LXGXEEVIMPIKGYXXXXXXXXXFYLMNIPSTKVPAXXTSP

SEQ ID NO: 32274 - protein, 35 aa, Artificial Sequence
  GFR-binding peptide
  MOD_RES (33)..(34): Xaa is C or S
  MOD_RES (11)..(12)..(13)..(14)..(15): Xaa is A or G
  MOD_RES (16)..(17)..(18)..(19): Xaa is A or G or is absent
EVVMDPIKGYXXXXXXXXXFYLINIPSLRTPVXXT

SEQ ID NO: 32275 - protein, 31 aa, Artificial Sequence
  GFR-binding peptide
SRVVMNPIKGYIVNSSDDFYLVNIPSLKTPA

SEQ ID NO: 32276 - protein, 39 aa, Artificial Sequence
  GFR-binding peptide
  MOD_RES (33)..(34): Xaa is C or S
  MOD_RES (11)..(12)..(13)..(14)..(15): Xaa is A or G
  MOD_RES (16)..(17)..(18)..(19): Xaa is A or G or is absent
EVVMDPIKGYXXXXXXXXXFYLMNIPSLETPVXXAKPIK

SEQ ID NO: 32277 - protein, 42 aa, Artificial Sequence
  GFR-binding peptide
  MOD_RES (1)..(3)..(37)..(38): Xaa is C or S
  MOD_RES (15)..(16)..(17)..(18)..(19): Xaa is A or G
  MOD_RES (20)..(21)..(22)..(23): Xaa is A or G or is absent
XGXSRVVMNPIKGYXXXXXXXXXFYLVNIPSLKTPAXXPKPV

SEQ ID NO: 32278 - protein, 34 aa, Artificial Sequence
  GFR-binding peptide
  MOD_RES (33)..(34): Xaa is C or S
  MOD_RES (11)..(12)..(13)..(14)..(15): Xaa is A or G
  MOD_RES (16)..(17)..(18)..(19): Xaa is A or G or is absent
RVVMNPIKGYXXXXXXXXXFYLVNIPSLQTPAXX

SEQ ID NO: 32279 - protein, 36 aa, Artificial Sequence
  GFR-binding peptide
  MOD_RES (1)..(3): Xaa is C or S
  MOD_RES (15)..(16)..(17)..(18)..(19): Xaa is A or G
  MOD_RES (20)..(21)..(22)..(23): Xaa is A or G or is absent
XGXGEVVMEPIKGYXXXXXXXXXFYLMNIPSLETPV

SEQ ID NO: 32280 - protein, 39 aa, Artificial Sequence
  GFR-binding peptide
  MOD_RES (1)..(3)..(36)..(37): Xaa is C or S
  MOD_RES (14)..(15)..(16)..(17)..(18): Xaa is A or G
  MOD_RES (19)..(20)..(21)..(22): Xaa is A or G or is absent
XGXEEVIMPIKGYXXXXXXXXXFYLMNIPSTKVPAXXTS

SEQ ID NO: 32281 - protein, 38 aa, Artificial Sequence
  GFR-binding peptide
  MOD_RES (1)..(3)..(34)..(35): Xaa is C or S
XGXEEVIMPIKGYLLVRGNDFYLMNIPSTKVPAXXTSP

SEQ ID NO: 32282 - protein, 37 aa, Artificial Sequence
  GFR-binding peptide
  MOD_RES (2)..(36)..(37): Xaa is C or S
  MOD_RES (14)..(15)..(16)..(17)..(18): Xaa is A or G
  MOD_RES (19)..(20)..(21)..(22): Xaa is A or G or is absent
GXESVAMGPIKGYXXXXXXXXXFYLINIPSLKTPVXX

SEQ ID NO: 32283 - protein, 36 aa, Artificial Sequence
  GFR-binding peptide
  MOD_RES (33)..(34): Xaa is C or S
  MOD_RES (11)..(12)..(13)..(14)..(15): Xaa is A or G
  MOD_RES (16)..(17)..(18)..(19): Xaa is A or G or is absent
EVVMDPIKGYXXXXXXXXXFYLMNIPSLETPVXXAK

SEQ ID NO: 32284 - protein, 37 aa, Artificial Sequence
  GFR-binding peptide
  MOD_RES (2)..(4)..(36)..(37): Xaa is C or S
HXGXARVVMNPIKGYIVNSSDDFYLVNIPSLQTPAXX

SEQ ID NO: 32285 - protein, 38 aa, Artificial Sequence
  GFR-binding peptide
  MOD_RES (1)..(32)..(33): Xaa is C or S
XEEVIMPIKGYLLVRGNDFYLMNIPSTKVPAXXTSPVR

SEQ ID NO: 32286 - protein, 34 aa, Artificial Sequence
  GFR-binding peptide
  MOD_RES (2)..(34): Xaa is C or S
GXAKVVMNPIKGYIVNNSSDFYLVNIPSLKTPAX

SEQ ID NO: 32287 - protein, 39 aa, Artificial Sequence
  GFR-binding peptide
  MOD_RES (33)..(34): Xaa is C or S
  MOD_RES (11)..(12)..(13)..(14)..(15): Xaa is A or G
  MOD_RES (16)..(17)..(18)..(19): Xaa is A or G or is absent
KVVMNPIKGYXXXXXXXXXFYLVNIPSLKTPAXXAKPVA

SEQ ID NO: 32288 - protein, 39 aa, Artificial Sequence
  GFR-binding peptide
  MOD_RES (2)..(36)..(37): Xaa is C or S
  MOD_RES (14)..(15)..(16)..(17)..(18): Xaa is A or G
  MOD_RES (19)..(20)..(21)..(22): Xaa is A or G or is absent
GXGEVVMDPIKGYXXXXXXXXXFYLMNIPSLETPVXXAK

SEQ ID NO: 32289 - protein, 30 aa, Artificial Sequence
  GFR-binding peptide
SVAMGPIKGYYTVVGKDFYLINIPSLKTPV

SEQ ID NO: 32290 - protein, 35 aa, Artificial Sequence
  GFR-binding peptide
  MOD_RES (2)..(2): Xaa is C or S
  MOD_RES (14)..(15)..(16)..(17)..(18): Xaa is A or G
  MOD_RES (19)..(20)..(21)..(22): Xaa is A or G or is absent
GXGEVVMDPIKGYXXXXXXXXXFYLMNIPSLETPV

SEQ ID NO: 32291 - protein, 39 aa, Artificial Sequence
  GFR-binding peptide
  MOD_RES (1)..(33): Xaa is C or S
XSRVVMNPIKGYIVNSSDDFYLVNIPSLKTPAXTPKTVH

SEQ ID NO: 32292 - protein, 32 aa, Artificial Sequence
  GFR-binding peptide
  MOD_RES (32)..(32): Xaa is C or S
AEVVMDPIKGYVVNNAADFYLINIPSLRAPVX

SEQ ID NO: 32293 - protein, 36 aa, Artificial Sequence
  GFR-binding peptide
  MOD_RES (2)..(34): Xaa is C or S
GXSRVVMNPIKGYIVNSSDDFYLVNIPSLKTPAXTP

SEQ ID NO: 32294 - protein, 33 aa, Artificial Sequence
  GFR-binding peptide
  MOD_RES (12)..(13)..(14)..(15)..(16): Xaa is A or G
  MOD_RES (17)..(18)..(19)..(20): Xaa is A or G or is absent
SEVVMDPIKGYXXXXXXXXXFYLINIPSLRTPV

SEQ ID NO: 32295 - protein, 33 aa, Artificial Sequence
  GFR-binding peptide
  MOD_RES (31)..(32): Xaa is C or S
EEVIMPIKGYLLVRGNDFYLMNIPSTKVPAXXT

SEQ ID NO: 32296 - protein, 37 aa, Artificial Sequence
  GFR-binding peptide
  MOD_RES (1)..(3)..(36)..(37): Xaa is C or S
XGXEAVSMGEPIKGYTPVGMDDFYLVNIPSLKTPVXX

SEQ ID NO: 32297 - protein, 38 aa, Artificial Sequence
  GFR-binding peptide
  MOD_RES (2)..(4)..(37)..(38): Xaa is C or S
  MOD_RES (15)..(16)..(17)..(18)..(19): Xaa is A or G
  MOD_RES (20)..(21)..(22)..(23): Xaa is A or G or is absent
LXGXEEVIMPIKGYXXXXXXXXXFYLMNIPSTKVPAXX

SEQ ID NO: 32298 - protein, 35 aa, Artificial Sequence
  GFR-binding peptide
  MOD_RES (34)..(35): Xaa is C or S
  MOD_RES (12)..(13)..(14)..(15)..(16): Xaa is A or G
  MOD_RES (17)..(18)..(19)..(20): Xaa is A or G or is absent
AEVVMDPIKGYXXXXXXXXXFYLINIPSLRAPVXX

SEQ ID NO: 32299 - protein, 38 aa, Artificial Sequence
  GFR-binding peptide
  MOD_RES (33)..(34): Xaa is C or S
  MOD_RES (11)..(12)..(13)..(14)..(15): Xaa is A or G
  MOD_RES (16)..(17)..(18)..(19): Xaa is A or G or is absent
KVVMNPIKGYXXXXXXXXXFYLVNIPSLKTPAXXAKPV

SEQ ID NO: 32300 - protein, 37 aa, Artificial Sequence
  GFR-binding peptide
  MOD_RES (1)..(3)..(36)..(37): Xaa is C or S
  MOD_RES (14)..(15)..(16)..(17)..(18): Xaa is A or G
  MOD_RES (19)..(20)..(21)..(22): Xaa is A or G or is absent
XGXEEVIMPIKGYXXXXXXXXXFYLMNIPSTKVPAXX

SEQ ID NO: 32301 - protein, 39 aa, Artificial Sequence
  GFR-binding peptide
  MOD_RES (6)..(7)..(39): Xaa is C or S
STPPTXXVPTRLSPINILYFDSANNVVYGKIPDMVVESX

SEQ ID NO: 32302 - protein, 43 aa, Artificial Sequence
  GFR-binding peptide
  MOD_RES (6)..(7)..(41)..(43): Xaa is C or S
  MOD_RES (21)..(22)..(23)..(24)..(25): Xaa is A or G
  MOD_RES (26)..(27)..(28)..(29): Xaa is A or G or is absent
GSAGPXXTPTKMSPINMLYFXXXXXXXXXYGKIPGMVVDRXGX

SEQ ID NO: 32303 - protein, 40 aa, Artificial Sequence
  GFR-binding peptide
  MOD_RES (6)..(7): Xaa is C or S
  MOD_RES (21)..(22)..(23)..(24)..(25): Xaa is A or G
  MOD_RES (26)..(27)..(28)..(29): Xaa is A or G or is absent
TVPKPXXAPTQLSPINVLYFXXXXXXXXXYGKIPNMVVRA

SEQ ID NO: 32304 - protein, 37 aa, Artificial Sequence
  GFR-binding peptide
  MOD_RES (5)..(6): Xaa is C or S
IPKAXXVPTELSPINMLYFDENEKVVYGKIPDMVVEG

SEQ ID NO: 32305 - protein, 40 aa, Artificial Sequence
  GFR-binding peptide
  MOD_RES (3)..(4)..(38)..(40): Xaa is C or S
  MOD_RES (18)..(19)..(20)..(21)..(22): Xaa is A or G
  MOD_RES (23)..(24)..(25)..(26): Xaa is A or G or is absent
ASXXVPARLSPINILYFXXXXXXXXXYGKIPDMVVEAXGX

SEQ ID NO: 32306 - protein, 32 aa, Artificial Sequence
  GFR-binding peptide
  MOD_RES (31)..(31): Xaa is C or S
APVKTSPINMLYFDNGRVLLYGKIPMIVEEXG

SEQ ID NO: 32307 - protein, 35 aa, Artificial Sequence
  GFR-binding peptide
  MOD_RES (3)..(4): Xaa is C or S
PTXXVPTRLSPINILYFDSANNVVYGKIPDMVVES

SEQ ID NO: 32308 - protein, 42 aa, Artificial Sequence
  GFR-binding peptide
  MOD_RES (5)..(6)..(40)..(42): Xaa is C or S
  MOD_RES (20)..(21)..(22)..(23)..(24): Xaa is A or G
  MOD_RES (25)..(26)..(27)..(28): Xaa is A or G or is absent
TPPTXXVPTRLSPINILYFXXXXXXXXXYGKIPDMVVESXGX

SEQ ID NO: 32309 - protein, 39 aa, Artificial Sequence
  GFR-binding peptide
  MOD_RES (3)..(4)..(36)..(38): Xaa is C or S
KAXXVPTKLSPINILYFDKGVVTYYGKIPGMAVSEXGXR

SEQ ID NO: 32310 - protein, 41 aa, Artificial Sequence
  GFR-binding peptide
  MOD_RES (4)..(5)..(39)..(41): Xaa is C or S
  MOD_RES (19)..(20)..(21)..(22)..(23): Xaa is A or G
  MOD_RES (24)..(25)..(26)..(27): Xaa is A or G or is absent
PKPXXAPTKLSPINVLYFXXXXXXXXXYGKIPNMVVRSXGX

SEQ ID NO: 32311 - protein, 35 aa, Artificial Sequence
  GFR-binding peptide
  MOD_RES (2)..(3)..(35): Xaa is C or S
AXXVPTELSPINMLYFDENEKVVYGKIPDMVVEGX

SEQ ID NO: 32312 - protein, 35 aa, Artificial Sequence
  GFR-binding peptide
  MOD_RES (1)..(2): Xaa is C or S
  MOD_RES (16)..(17)..(18)..(19)..(20): Xaa is A or G
  MOD_RES (21)..(22)..(23)..(24): Xaa is A or G or is absent
XXVPTKLSPINILYFXXXXXXXXXYGKIPGMAVSE

SEQ ID NO: 32313 - protein, 40 aa, Artificial Sequence
  GFR-binding peptide
  MOD_RES (5)..(6)..(38)..(40): Xaa is C or S
ASKAXXVPTKLSPINILYFDKGVVTYYGKIPGMAVSEXGX

SEQ ID NO: 32314 - protein, 37 aa, Artificial Sequence
  GFR-binding peptide
  MOD_RES (4)..(36): Xaa is C or S
KPTXAPTKLSPINVLYFDDSSNVIYGKIPNMVVRSXG

SEQ ID NO: 32315 - protein, 40 aa, Artificial Sequence
  GFR-binding peptide
  MOD_RES (7)..(7): Xaa is C or S
  MOD_RES (21)..(22)..(23)..(24)..(25): Xaa is A or G
  MOD_RES (26)..(27)..(28)..(29): Xaa is A or G or is absent
HVTKPTXAPTKLSPINVLYFXXXXXXXXXYGKIPNMVVRS

SEQ ID NO: 32316 - protein, 37 aa, Artificial Sequence
  GFR-binding peptide
  MOD_RES (3)..(4): Xaa is C or S
  MOD_RES (18)..(19)..(20)..(21)..(22): Xaa is A or G
  MOD_RES (23)..(24)..(25)..(26): Xaa is A or G or is absent
GPXXTPTKMSPINMLYFXXXXXXXXXYGKIPGMVVDR

SEQ ID NO: 32317 - protein, 34 aa, Artificial Sequence
  GFR-binding peptide
  MOD_RES (1)..(33): Xaa is C or S
XAPTKLSPINVLYFDDSSNVIYGKIPNMVVRSXG

SEQ ID NO: 32318 - protein, 41 aa, Artificial Sequence
  GFR-binding peptide
  MOD_RES (4)..(5)..(39)..(41): Xaa is C or S
  MOD_RES (19)..(20)..(21)..(22)..(23): Xaa is A or G
  MOD_RES (24)..(25)..(26)..(27): Xaa is A or G or is absent
SKAXXVPTKLSPINILYFXXXXXXXXXYGKIPGMAVSEXGX

SEQ ID NO: 32319 - protein, 40 aa, Artificial Sequence
  GFR-binding peptide
  MOD_RES (5)..(6)..(40): Xaa is C or S
  MOD_RES (20)..(21)..(22)..(23)..(24): Xaa is A or G
  MOD_RES (25)..(26)..(27)..(28): Xaa is A or G or is absent
ASKAXXVPTKLSPINILYFXXXXXXXXXYGKIPGMAVSEX

SEQ ID NO: 32320 - protein, 35 aa, Artificial Sequence
  GFR-binding peptide
  MOD_RES (3)..(4): Xaa is C or S
KAXXVPTELSPINMLYFDENEKVVYGKIPDMVVEG

SEQ ID NO: 32321 - protein, 36 aa, Artificial Sequence
  GFR-binding peptide
  MOD_RES (5)..(6): Xaa is C or S
TPPTXXVPTRLSPINILYFDSANNVVYGKIPDMVVE

SEQ ID NO: 32322 - protein, 39 aa, Artificial Sequence
  GFR-binding peptide
  MOD_RES (1)..(2)..(36)..(38): Xaa is C or S
  MOD_RES (16)..(17)..(18)..(19)..(20): Xaa is A or G
  MOD_RES (21)..(22)..(23)..(24): Xaa is A or G or is absent
XXVPARLSPINILYFXXXXXXXXXYGKIPDMVVEAXGXR

SEQ ID NO: 32323 - protein, 35 aa, Artificial Sequence
  GFR-binding peptide
  MOD_RES (2)..(3): Xaa is C or S
  MOD_RES (17)..(18)..(19)..(20)..(21): Xaa is A or G
  MOD_RES (22)..(23)..(24)..(25): Xaa is A or G or is absent
AXXVPTELSPINMLYFXXXXXXXXXYGKIPDMVVE

SEQ ID NO: 32324 - protein, 39 aa, Artificial Sequence
  GFR-binding peptide
  MOD_RES (2)..(3)..(36)..(38): Xaa is C or S
AXXVPTKLSPINVLYFDDMGVPTYGKIPEGMSVAEXGXR

SEQ ID NO: 32325 - protein, 39 aa, Artificial Sequence
  GFR-binding peptide
  MOD_RES (3)..(37)..(39): Xaa is C or S
  MOD_RES (17)..(18)..(19)..(20)..(21): Xaa is A or G
  MOD_RES (22)..(23)..(24)..(25): Xaa is A or G or is absent
PTXAPTKLSPINVLYFXXXXXXXXXYGKIPNMVVRSXGX

SEQ ID NO: 32326 - protein, 36 aa, Artificial Sequence
  GFR-binding peptide
  MOD_RES (4)..(5): Xaa is C or S
PPTXXVPTRLSPINILYFDSANNVVYGKIPDMVVES

SEQ ID NO: 32327 - protein, 37 aa, Artificial Sequence
  GFR-binding peptide
  MOD_RES (4)..(5): Xaa is C or S
  MOD_RES (19)..(20)..(21)..(22)..(23): Xaa is A or G
  MOD_RES (24)..(25)..(26)..(27): Xaa is A or G or is absent
PKPXXAPTQLSPINVLYFXXXXXXXXXYGKIPNMVVR

SEQ ID NO: 32328 - protein, 36 aa, Artificial Sequence
  GFR-binding peptide
  MOD_RES (2)..(3)..(35): Xaa is C or S
SXXVPARLSPINILYFDAANNVVYGKIPDMVVEAXG

SEQ ID NO: 32329 - protein, 42 aa, Artificial Sequence
  GFR-binding peptide
  MOD_RES (5)..(6)..(39)..(41): Xaa is C or S
VGKAXXVPTKLSPINVLYFDDMGVPTYGKIPEGMSVAEXGXR

SEQ ID NO: 32330 - protein, 33 aa, Artificial Sequence
  GFR-binding peptide
  MOD_RES (1)..(2): Xaa is C or S
XXVPTKLSPINILYFDKGVVTYYGKIPGMAVSE

SEQ ID NO: 32331 - protein, 35 aa, Artificial Sequence
  GFR-binding peptide
  MOD_RES (1)..(33)..(35): Xaa is C or S
XVPTELSPINMLYFDEYDKVVYGKIPEMVVEGXGX

SEQ ID NO: 32332 - protein, 39 aa, Artificial Sequence
  GFR-binding peptide
  MOD_RES (3)..(4)..(36)..(38): Xaa is C or S
ASXXVPARLSPINILYFDAANNVVYGKIPDMVVEAXGXR

SEQ ID NO: 32333 - protein, 35 aa, Artificial Sequence
  GFR-binding peptide
  MOD_RES (1)..(2)..(35): Xaa is C or S
XXVPTKLSPINVLYFDDMGVPTYGKIPEGMSVAEX

SEQ ID NO: 32334 - protein, 38 aa, Artificial Sequence
  GFR-binding peptide
  MOD_RES (5)..(6)..(37): Xaa is C or S
VPSTXXAPVKTSPINMLYFDNGRVLLYGKIPMIVEEXG

SEQ ID NO: 32335 - protein, 43 aa, Artificial Sequence
  GFR-binding peptide
  MOD_RES (5)..(6)..(40)..(42): Xaa is C or S
  MOD_RES (20)..(21)..(22)..(23)..(24): Xaa is A or G
  MOD_RES (25)..(26)..(27)..(28): Xaa is A or G or is absent
ASKAXXVPTKLSPINILYFXXXXXXXXXYGKIPGMAVSEXGXR

SEQ ID NO: 32336 - protein, 43 aa, Artificial Sequence
  GFR-binding peptide
  MOD_RES (6)..(7)..(41)..(43): Xaa is C or S
  MOD_RES (21)..(22)..(23)..(24)..(25): Xaa is A or G
  MOD_RES (26)..(27)..(28)..(29): Xaa is A or G or is absent
AVPKAXXAPTKLSPINVLYFXXXXXXXXXYGKIPNMVVKAXGX

SEQ ID NO: 32337 - protein, 36 aa, Artificial Sequence
  GFR-binding peptide
  MOD_RES (34)..(36): Xaa is C or S
  MOD_RES (14)..(15)..(16)..(17)..(18): Xaa is A or G
  MOD_RES (19)..(20)..(21)..(22): Xaa is A or G or is absent
VPTKLSPINILYFXXXXXXXXXYGKIPGMAVSEXGX

SEQ ID NO: 32338 - protein, 40 aa, Artificial Sequence
  GFR-binding peptide
  MOD_RES (4)..(38)..(40): Xaa is C or S
  MOD_RES (18)..(19)..(20)..(21)..(22): Xaa is A or G
  MOD_RES (23)..(24)..(25)..(26): Xaa is A or G or is absent
KPTXAPTKLSPINVLYFXXXXXXXXXYGKIPNMVVRSXGX

SEQ ID NO: 32339 - protein, 44 aa, Artificial Sequence
  GFR-binding peptide
  MOD_RES (6)..(7)..(41)..(43): Xaa is C or S
  MOD_RES (21)..(22)..(23)..(24)..(25): Xaa is A or G
  MOD_RES (26)..(27)..(28)..(29): Xaa is A or G or is absent
AVPKAXXAPTKLSPINVLYFXXXXXXXXXYGKIPNMVVKAXGXH

SEQ ID NO: 32340 - protein, 44 aa, Artificial Sequence
  GFR-binding peptide
  MOD_RES (6)..(7)..(41)..(43): Xaa is C or S
  MOD_RES (21)..(22)..(23)..(24)..(25): Xaa is A or G
  MOD_RES (26)..(27)..(28)..(29): Xaa is A or G or is absent
GSAGPXXTPTKMSPINMLYFXXXXXXXXXYGKIPGMVVDRXGXS

SEQ ID NO: 32341 - protein, 39 aa, Artificial Sequence
  GFR-binding peptide
  MOD_RES (6)..(7)..(39): Xaa is C or S
KIPKAXXVPTELSPINMLYFDENEKVVYGKIPDMVVEGX

SEQ ID NO: 32342 - protein, 43 aa, Artificial Sequence
  GFR-binding peptide
  MOD_RES (6)..(7)..(41)..(43): Xaa is C or S
  MOD_RES (21)..(22)..(23)..(24)..(25): Xaa is A or G
  MOD_RES (26)..(27)..(28)..(29): Xaa is A or G or is absent
KASKAXXVPTKLSPINILYFXXXXXXXXXYGKIPGMAVSEXGX

SEQ ID NO: 32343 - protein, 34 aa, Artificial Sequence
  GFR-binding peptide
  MOD_RES (2)..(3): Xaa is C or S
PXXAPTQLSPINVLYFDDSSNVIYGKIPNMVVRA

SEQ ID NO: 32344 - protein, 37 aa, Artificial Sequence
  GFR-binding peptide
  MOD_RES (2)..(34)..(36): Xaa is C or S
TXAPTKLSPINVLYFDDSSNVIYGKIPNMVVRSXGXH

SEQ ID NO: 32345 - protein, 35 aa, Artificial Sequence
  GFR-binding peptide
  MOD_RES (35)..(35): Xaa is C or S
  MOD_RES (14)..(15)..(16)..(17)..(18): Xaa is A or G
  MOD_RES (19)..(20)..(21)..(22): Xaa is A or G or is absent
VPTKLSPINVLYFXXXXXXXXXYGKIPEGMSVAEX

SEQ ID NO: 32346 - protein, 39 aa, Artificial Sequence
  GFR-binding peptide
  MOD_RES (3)..(4)..(36)..(38): Xaa is C or S
KAXXAPTKLSPINVLYFDSSNNVIYGKIPNMVVKAXGXH

SEQ ID NO: 32347 - protein, 37 aa, Artificial Sequence
  GFR-binding peptide
  MOD_RES (2)..(3)..(36): Xaa is C or S
AXXVPTKLSPINVLYFDDMGVPTYGKIPEGMSVAEXG

SEQ ID NO: 32348 - protein, 42 aa, Artificial Sequence
  GFR-binding peptide
  MOD_RES (4)..(5)..(39)..(41): Xaa is C or S
  MOD_RES (19)..(20)..(21)..(22)..(23): Xaa is A or G
  MOD_RES (24)..(25)..(26)..(27): Xaa is A or G or is absent
PKAXXAPTKLSPINVLYFXXXXXXXXXYGKIPNMVVKAXGXH

SEQ ID NO: 32349 - protein, 34 aa, Artificial Sequence
  GFR-binding peptide
  MOD_RES (1)..(32)..(34): Xaa is C or S
XAPVKTSPINMLYFDNGRVLLYGKIPMIVEEXGX

SEQ ID NO: 32350 - protein, 42 aa, Artificial Sequence
  GFR-binding peptide
  MOD_RES (4)..(5)..(39)..(41): Xaa is C or S
  MOD_RES (19)..(20)..(21)..(22)..(23): Xaa is A or G
  MOD_RES (24)..(25)..(26)..(27): Xaa is A or G or is absent
PPTXXVPTRLSPINILYFXXXXXXXXXYGKIPDMVVESXGXR

SEQ ID NO: 32351 - protein, 36 aa, Artificial Sequence
  GFR-binding peptide
  MOD_RES (1)..(33)..(35): Xaa is C or S
XVPTELSPINMLYFDENEKVVYGKIPDMVVEGXGXR

SEQ ID NO: 32352 - protein, 37 aa, Artificial Sequence
  GFR-binding peptide
  MOD_RES (6)..(7): Xaa is C or S
KASKAXXVPTKLSPINILYFDKGVVTYYGKIPGMAVS

SEQ ID NO: 32353 - protein, 40 aa, Artificial Sequence
  GFR-binding peptide
  MOD_RES (3)..(4)..(38)..(40): Xaa is C or S
  MOD_RES (18)..(19)..(20)..(21)..(22): Xaa is A or G
  MOD_RES (23)..(24)..(25)..(26): Xaa is A or G or is absent
GPXXTPTKMSPINMLYFXXXXXXXXXYGKIPGMVVDRXGX

SEQ ID NO: 32354 - protein, 40 aa, Artificial Sequence
  GFR-binding peptide
  MOD_RES (6)..(7)..(39): Xaa is C or S
TVPKPXXAPTQLSPINVLYFDDSSNVIYGKIPNMVVRAXG

SEQ ID NO: 32355 - protein, 40 aa, Artificial Sequence
  GFR-binding peptide
  MOD_RES (4)..(5)..(39): Xaa is C or S
  MOD_RES (19)..(20)..(21)..(22)..(23): Xaa is A or G
  MOD_RES (24)..(25)..(26)..(27): Xaa is A or G or is absent
PPTXXVPTRLSPINILYFXXXXXXXXXYGKIPDMVVESXG

SEQ ID NO: 32356 - protein, 35 aa, Artificial Sequence
  GFR-binding peptide
  MOD_RES (1)..(2): Xaa is C or S
  MOD_RES (16)..(17)..(18)..(19)..(20): Xaa is A or G
  MOD_RES (21)..(22)..(23)..(24): Xaa is A or G or is absent
XXAPTKLSPINVLYFXXXXXXXXXYGKIPNMVVRS

SEQ ID NO: 32357 - protein, 39 aa, Artificial Sequence
  GFR-binding peptide
  MOD_RES (5)..(6): Xaa is C or S
  MOD_RES (20)..(21)..(22)..(23)..(24): Xaa is A or G
  MOD_RES (25)..(26)..(27)..(28): Xaa is A or G or is absent
IPKAXXVPTELSPINMLYFXXXXXXXXXYGKIPDMVVEG

SEQ ID NO: 32358 - protein, 35 aa, Artificial Sequence
  GFR-binding peptide
  MOD_RES (1)..(33)..(35): Xaa is C or S
XVPTKLSPINILYFDKGVVTYYGKIPGMAVSEXGX

SEQ ID NO: 32359 - protein, 35 aa, Artificial Sequence
  GFR-binding peptide
  MOD_RES (34)..(34): Xaa is C or S
  MOD_RES (14)..(15)..(16)..(17)..(18): Xaa is A or G
  MOD_RES (19)..(20)..(21)..(22): Xaa is A or G or is absent
APTQLSPINVLYFXXXXXXXXXYGKIPNMVVRAXG

SEQ ID NO: 32360 - protein, 36 aa, Artificial Sequence
  GFR-binding peptide
  MOD_RES (5)..(6): Xaa is C or S
IPKAXXVPTELSPINMLYFDEYDKVVYGKIPEMVVE

SEQ ID NO: 32361 - protein, 38 aa, Artificial Sequence
  GFR-binding peptide
  MOD_RES (3)..(4)..(36)..(38): Xaa is C or S
KAXXVPTELSPINMLYFDEYDKVVYGKIPEMVVEGXGX

SEQ ID NO: 32362 - protein, 42 aa, Artificial Sequence
  GFR-binding peptide
  MOD_RES (4)..(5)..(39)..(41): Xaa is C or S
  MOD_RES (19)..(20)..(21)..(22)..(23): Xaa is A or G
  MOD_RES (24)..(25)..(26)..(27): Xaa is A or G or is absent
PKAXXVPTELSPINMLYFXXXXXXXXXYGKIPDMVVEGXGXR

SEQ ID NO: 32363 - protein, 41 aa, Artificial Sequence
  GFR-binding peptide
  MOD_RES (3)..(4)..(39)..(41): Xaa is C or S
  MOD_RES (18)..(19)..(20)..(21)..(22): Xaa is A or G
  MOD_RES (23)..(24)..(25)..(26): Xaa is A or G or is absent
KAXXVPTKLSPINVLYFXXXXXXXXXYGKIPEGMSVAEXGX

SEQ ID NO: 32364 - protein, 39 aa, Artificial Sequence
  GFR-binding peptide
  MOD_RES (4)..(5)..(38): Xaa is C or S
  MOD_RES (19)..(20)..(21)..(22)..(23): Xaa is A or G
  MOD_RES (24)..(25)..(26)..(27): Xaa is A or G or is absent
PSTXXAPVKTSPINMLYFXXXXXXXXXYGKIPMIVEEXG

SEQ ID NO: 32365 - protein, 39 aa, Artificial Sequence
  GFR-binding peptide
  MOD_RES (6)..(38): Xaa is C or S
VTKPTXAPTKLSPINVLYFDDSSNVIYGKIPNMVVRSXG

SEQ ID NO: 32366 - protein, 42 aa, Artificial Sequence
  GFR-binding peptide
  MOD_RES (5)..(6)..(41): Xaa is C or S
  MOD_RES (20)..(21)..(22)..(23)..(24): Xaa is A or G
  MOD_RES (25)..(26)..(27)..(28): Xaa is A or G or is absent
VGKAXXVPTKLSPINVLYFXXXXXXXXXYGKIPEGMSVAEXG

SEQ ID NO: 32367 - protein, 40 aa, Artificial Sequence
  GFR-binding peptide
  MOD_RES (6)..(7)..(39): Xaa is C or S
STPPTXXVPTRLSPINILYFDSANNVVYGKIPDMVVESXG

SEQ ID NO: 32368 - protein, 38 aa, Artificial Sequence
  GFR-binding peptide
  MOD_RES (3)..(4)..(38): Xaa is C or S
  MOD_RES (18)..(19)..(20)..(21)..(22): Xaa is A or G
  MOD_RES (23)..(24)..(25)..(26): Xaa is A or G or is absent
KPXXAPTKLSPINVLYFXXXXXXXXXYGKIPNMVVRSX

SEQ ID NO: 32369 - protein, 34 aa, Artificial Sequence
  GFR-binding peptide
  MOD_RES (14)..(15)..(16)..(17)..(18): Xaa is A or G
  MOD_RES (19)..(20)..(21)..(22): Xaa is A or G or is absent
VPTKLSPINVLYFXXXXXXXXXYGKIPEGMSVAE

SEQ ID NO: 32370 - protein, 32 aa, Artificial Sequence
  GFR-binding peptide
  MOD_RES (1)..(1): Xaa is C or S
XVPTELSPINMLYFDENEKVVYGKIPDMVVEG

SEQ ID NO: 32371 - protein, 37 aa, Artificial Sequence
  GFR-binding peptide
  MOD_RES (3)..(4)..(36): Xaa is C or S
KAXXVPTELSPINMLYFDEYDKVVYGKIPEMVVEGXG

SEQ ID NO: 32372 - protein, 36 aa, Artificial Sequence
  GFR-binding peptide
  MOD_RES (3)..(4): Xaa is C or S
  MOD_RES (18)..(19)..(20)..(21)..(22): Xaa is A or G
  MOD_RES (23)..(24)..(25)..(26): Xaa is A or G or is absent
GPXXTPTKMSPINMLYFXXXXXXXXXYGKIPGMVVD

SEQ ID NO: 32373 - protein, 41 aa, Artificial Sequence
  GFR-binding peptide
  MOD_RES (4)..(5)..(39)..(41): Xaa is C or S
  MOD_RES (19)..(20)..(21)..(22)..(23): Xaa is A or G
  MOD_RES (24)..(25)..(26)..(27): Xaa is A or G or is absent
PKAXXAPTKLSPINVLYFXXXXXXXXXYGKIPNMVVKAXGX

SEQ ID NO: 32374 - protein, 40 aa, Artificial Sequence
  GFR-binding peptide
  MOD_RES (5)..(6)..(38)..(40): Xaa is C or S
VPKPXXAPTKLSPINVLYFDDSSNVIYGKIPNMVVRSXGX

SEQ ID NO: 32375 - protein, 36 aa, Artificial Sequence
  GFR-binding peptide
  MOD_RES (34)..(36): Xaa is C or S
  MOD_RES (14)..(15)..(16)..(17)..(18): Xaa is A or G
  MOD_RES (19)..(20)..(21)..(22): Xaa is A or G or is absent
APTKLSPINVLYFXXXXXXXXXYGKIPNMVVKAXGX

SEQ ID NO: 32376 - protein, 34 aa, Artificial Sequence
  GFR-binding peptide
  MOD_RES (1)..(33): Xaa is C or S
XVPTRLSPINILYFDSANNVVYGKIPDMVVESXG

SEQ ID NO: 32377 - protein, 37 aa, Artificial Sequence
  GFR-binding peptide
  MOD_RES (5)..(6): Xaa is C or S
APASXXVPARLSPINILYFDAANNVVYGKIPDMVVEA

SEQ ID NO: 32378 - protein, 35 aa, Artificial Sequence
  GFR-binding peptide
  MOD_RES (32)..(34): Xaa is C or S
VPTELSPINMLYFDENEKVVYGKIPDMVVEGXGXR

SEQ ID NO: 32379 - protein, 41 aa, Artificial Sequence
  GFR-binding peptide
  MOD_RES (5)..(6)..(38)..(40): Xaa is C or S
IPKAXXVPTELSPINMLYFDEYDKVVYGKIPEMVVEGXGXR

SEQ ID NO: 32380 - protein, 34 aa, Artificial Sequence
  GFR-binding peptide
  MOD_RES (3)..(4): Xaa is C or S
KAXXVPTELSPINMLYFDENEKVVYGKIPDMVVE

SEQ ID NO: 32381 - protein, 41 aa, Artificial Sequence
  GFR-binding peptide
  MOD_RES (7)..(39)..(41): Xaa is C or S
HVTKPTXAPTKLSPINVLYFDDSSNVIYGKIPNMVVRSXGX

SEQ ID NO: 32382 - protein, 35 aa, Artificial Sequence
  GFR-binding peptide
  MOD_RES (4)..(5): Xaa is C or S
PKPXXAPTKLSPINVLYFDDSSNVIYGKIPNMVVR

SEQ ID NO: 32383 - protein, 41 aa, Artificial Sequence
  GFR-binding peptide
  MOD_RES (6)..(7)..(39)..(41): Xaa is C or S
HVPKPXXAPTKLSPINVLYFDDSSNVIYGKIPNMVVRSXGX

SEQ ID NO: 32384 - protein, 38 aa, Artificial Sequence
  GFR-binding peptide
  MOD_RES (2)..(3)..(37): Xaa is C or S
  MOD_RES (17)..(18)..(19)..(20)..(21): Xaa is A or G
  MOD_RES (22)..(23)..(24)..(25): Xaa is A or G or is absent
AXXVPTELSPINMLYFXXXXXXXXXYGKIPEMVVEGXG

SEQ ID NO: 32385 - protein, 38 aa, Artificial Sequence
  GFR-binding peptide
  MOD_RES (1)..(2)..(36)..(38): Xaa is C or S
  MOD_RES (16)..(17)..(18)..(19)..(20): Xaa is A or G
  MOD_RES (21)..(22)..(23)..(24): Xaa is A or G or is absent
XXAPTQLSPINVLYFXXXXXXXXXYGKIPNMVVRAXGX

SEQ ID NO: 32386 - protein, 38 aa, Artificial Sequence
  GFR-binding peptide
  MOD_RES (5)..(6)..(38): Xaa is C or S
IPKAXXVPTELSPINMLYFDEYDKVVYGKIPEMVVEGX

SEQ ID NO: 32387 - protein, 37 aa, Artificial Sequence
  GFR-binding peptide
  MOD_RES (3)..(4)..(37): Xaa is C or S
  MOD_RES (18)..(19)..(20)..(21)..(22): Xaa is A or G
  MOD_RES (23)..(24)..(25)..(26): Xaa is A or G or is absent
STXXAPVKTSPINMLYFXXXXXXXXXYGKIPMIVEEX

SEQ ID NO: 32388 - protein, 35 aa, Artificial Sequence
  GFR-binding peptide
  MOD_RES (4)..(5): Xaa is C or S
PKAXXVPTELSPINMLYFDEYDKVVYGKIPEMVVE

SEQ ID NO: 32389 - protein, 41 aa, Artificial Sequence
  GFR-binding peptide
  MOD_RES (4)..(38)..(40): Xaa is C or S
  MOD_RES (18)..(19)..(20)..(21)..(22): Xaa is A or G
  MOD_RES (23)..(24)..(25)..(26): Xaa is A or G or is absent
KPTXAPTKLSPINVLYFXXXXXXXXXYGKIPNMVVRSXGXH

SEQ ID NO: 32390 - protein, 39 aa, Artificial Sequence
  GFR-binding peptide
  MOD_RES (6)..(7): Xaa is C or S
KVGKAXXVPTKLSPINVLYFDDMGVPTYGKIPEGMSVAE

SEQ ID NO: 32391 - protein, 31 aa, Artificial Sequence
  GFR-binding peptide
VPARLSPINILYFDAANNVVYGKIPDMVVEA

SEQ ID NO: 32392 - protein, 32 aa, Artificial Sequence
  GFR-binding peptide
  MOD_RES (14)..(15)..(16)..(17)..(18): Xaa is A or G
  MOD_RES (19)..(20)..(21)..(22): Xaa is A or G or is absent
APTKLSPINVLYFXXXXXXXXXYGKIPNMVVK

SEQ ID NO: 32393 - protein, 43 aa, Artificial Sequence
  GFR-binding peptide
  MOD_RES (5)..(6)..(40)..(42): Xaa is C or S
  MOD_RES (20)..(21)..(22)..(23)..(24): Xaa is A or G
  MOD_RES (25)..(26)..(27)..(28): Xaa is A or G or is absent
IPKAXXVPTELSPINMLYFXXXXXXXXXYGKIPDMVVEGXGXR

SEQ ID NO: 32394 - protein, 42 aa, Artificial Sequence
  GFR-binding peptide
  MOD_RES (6)..(7)..(41): Xaa is C or S
  MOD_RES (21)..(22)..(23)..(24)..(25): Xaa is A or G
  MOD_RES (26)..(27)..(28)..(29): Xaa is A or G or is absent
KIPKAXXVPTELSPINMLYFXXXXXXXXXYGKIPDMVVEGXG

SEQ ID NO: 32395 - protein, 32 aa, Artificial Sequence
  GFR-binding peptide
  MOD_RES (14)..(15)..(16)..(17)..(18): Xaa is A or G
  MOD_RES (19)..(20)..(21)..(22): Xaa is A or G or is absent
APVKTSPINMLYFXXXXXXXXXYGKIPMIVEE

SEQ ID NO: 32396 - protein, 38 aa, Artificial Sequence
  GFR-binding peptide
  MOD_RES (3)..(4)..(36)..(38): Xaa is C or S
KAXXVPTELSPINMLYFDENEKVVYGKIPDMVVEGXGX

SEQ ID NO: 32397 - protein, 33 aa, Artificial Sequence
  GFR-binding peptide
  MOD_RES (1)..(1): Xaa is C or S
  MOD_RES (15)..(16)..(17)..(18)..(19): Xaa is A or G
  MOD_RES (20)..(21)..(22)..(23): Xaa is A or G or is absent
XVPARLSPINILYFXXXXXXXXXYGKIPDMVVE

SEQ ID NO: 32398 - protein, 39 aa, Artificial Sequence
  GFR-binding peptide
  MOD_RES (1)..(2)..(36)..(38): Xaa is C or S
  MOD_RES (16)..(17)..(18)..(19)..(20): Xaa is A or G
  MOD_RES (21)..(22)..(23)..(24): Xaa is A or G or is absent
XXTPTKMSPINMLYFXXXXXXXXXYGKIPGMVVDRXGXS

SEQ ID NO: 32399 - protein, 34 aa, Artificial Sequence
  GFR-binding peptide
  MOD_RES (1)..(33): Xaa is C or S
XVPTELSPINMLYFDENEKVVYGKIPDMVVEGXG

SEQ ID NO: 32400 - protein, 35 aa, Artificial Sequence
  GFR-binding peptide
  MOD_RES (1)..(2)..(34): Xaa is C or S
XXAPTQLSPINVLYFDDSSNVIYGKIPNMVVRAXG

SEQ ID NO: 32401 - protein, 31 aa, Artificial Sequence
  GFR-binding peptide
VPTELSPINMLYFDEYDKVVYGKIPEMVVEG

SEQ ID NO: 32402 - protein, 38 aa, Artificial Sequence
  GFR-binding peptide
  MOD_RES (2)..(3)..(35)..(37): Xaa is C or S
AXXVPTKLSPINILYFDKGVVTYYGKIPGMAVSEXGXR

SEQ ID NO: 32403 - protein, 40 aa, Artificial Sequence
  GFR-binding peptide
  MOD_RES (4)..(5)..(37)..(39): Xaa is C or S
PKAXXVPTELSPINMLYFDENEKVVYGKIPDMVVEGXGXR

SEQ ID NO: 32404 - protein, 37 aa, Artificial Sequence
  GFR-binding peptide
  MOD_RES (34)..(36): Xaa is C or S
  MOD_RES (14)..(15)..(16)..(17)..(18): Xaa is A or G
  MOD_RES (19)..(20)..(21)..(22): Xaa is A or G or is absent
VPTKLSPINILYFXXXXXXXXXYGKIPGMAVSEXGXR

SEQ ID NO: 32405 - protein, 40 aa, Artificial Sequence
  GFR-binding peptide
  MOD_RES (6)..(7)..(39): Xaa is C or S
AVPKAXXAPTKLSPINVLYFDSSNNVIYGKIPNMVVKAXG

SEQ ID NO: 32406 - protein, 36 aa, Artificial Sequence
  GFR-binding peptide
  MOD_RES (2)..(3)..(35): Xaa is C or S
AXXAPTKLSPINVLYFDSSNNVIYGKIPNMVVKAXG

SEQ ID NO: 32407 - protein, 34 aa, Artificial Sequence
  GFR-binding peptide
  MOD_RES (32)..(34): Xaa is C or S
VPTRLSPINILYFDSANNVVYGKIPDMVVESXGX

SEQ ID NO: 32408 - protein, 37 aa, Artificial Sequence
  GFR-binding peptide
  MOD_RES (6)..(7): Xaa is C or S
YVPKPXXAPTKLSPINVLYFDDSSNVIYGKIPNMVVR

SEQ ID NO: 32409 - protein, 39 aa, Artificial Sequence
  GFR-binding peptide
  MOD_RES (5)..(6)..(38): Xaa is C or S
IPKAXXVPTELSPINMLYFDEYDKVVYGKIPEMVVEGXG

SEQ ID NO: 32410 - protein, 32 aa, Artificial Sequence
  GFR-binding peptide
  MOD_RES (1)..(1): Xaa is C or S
XAPTKLSPINVLYFDDSSNVIYGKIPNMVVRS

SEQ ID NO: 32411 - protein, 35 aa, Artificial Sequence
  GFR-binding peptide
  MOD_RES (1)..(33)..(35): Xaa is C or S
XAPTKLSPINVLYFDSSNNVIYGKIPNMVVKAXGX

SEQ ID NO: 32412 - protein, 36 aa, Artificial Sequence
  GFR-binding peptide
  MOD_RES (4)..(5): Xaa is C or S
PKAXXVPTELSPINMLYFDENEKVVYGKIPDMVVEG

SEQ ID NO: 32413 - protein, 40 aa, Artificial Sequence
  GFR-binding peptide
  MOD_RES (4)..(5)..(39): Xaa is C or S
  MOD_RES (19)..(20)..(21)..(22)..(23): Xaa is A or G
  MOD_RES (24)..(25)..(26)..(27): Xaa is A or G or is absent
PASXXVPARLSPINILYFXXXXXXXXXYGKIPDMVVEAXG

SEQ ID NO: 32414 - protein, 35 aa, Artificial Sequence
  GFR-binding peptide
  MOD_RES (3)..(4)..(35): Xaa is C or S
STXXAPVKTSPINMLYFDNGRVLLYGKIPMIVEEX

SEQ ID NO: 32415 - protein, 36 aa, Artificial Sequence
  GFR-binding peptide
  MOD_RES (6)..(6): Xaa is C or S
VTKPTXAPTKLSPINVLYFDDSSNVIYGKIPNMVVR

SEQ ID NO: 32416 - protein, 39 aa, Artificial Sequence
  GFR-binding peptide
  MOD_RES (6)..(7)..(39): Xaa is C or S
HVPKPXXAPTKLSPINVLYFDDSSNVIYGKIPNMVVRSX

SEQ ID NO: 32417 - protein, 40 aa, Artificial Sequence
  GFR-binding peptide
  MOD_RES (6)..(7)..(38)..(40): Xaa is C or S
RVPSTXXAPVKTSPINMLYFDNGRVLLYGKIPMIVEEXGX

SEQ ID NO: 32418 - protein, 38 aa, Artificial Sequence
  GFR-binding peptide
  MOD_RES (4)..(5)..(37): Xaa is C or S
PKPXXAPTKLSPINVLYFDDSSNVIYGKIPNMVVRSXG

SEQ ID NO: 32419 - protein, 36 aa, Artificial Sequence
  GFR-binding peptide
  MOD_RES (3)..(4)..(36): Xaa is C or S
KPXXAPTQLSPINVLYFDDSSNVIYGKIPNMVVRAX

SEQ ID NO: 32420 - protein, 36 aa, Artificial Sequence
  GFR-binding peptide
  MOD_RES (2)..(3): Xaa is C or S
  MOD_RES (17)..(18)..(19)..(20)..(21): Xaa is A or G
  MOD_RES (22)..(23)..(24)..(25): Xaa is A or G or is absent
PXXAPTKLSPINVLYFXXXXXXXXXYGKIPNMVVRS

SEQ ID NO: 32421 - protein, 36 aa, Artificial Sequence
  GFR-binding peptide
  MOD_RES (3)..(4)..(35): Xaa is C or S
STXXAPVKTSPINMLYFDNGRVLLYGKIPMIVEEXG

SEQ ID NO: 32422 - protein, 40 aa, Artificial Sequence
  GFR-binding peptide
  MOD_RES (6)..(7): Xaa is C or S
  MOD_RES (21)..(22)..(23)..(24)..(25): Xaa is A or G
  MOD_RES (26)..(27)..(28)..(29): Xaa is A or G or is absent
AVPKAXXAPTKLSPINVLYFXXXXXXXXXYGKIPNMVVKA

SEQ ID NO: 32423 - protein, 32 aa, Artificial Sequence
  GFR-binding peptide
  MOD_RES (1)..(2): Xaa is C or S
XXVPTELSPINMLYFDENEKVVYGKIPDMVVE

SEQ ID NO: 32424 - protein, 35 aa, Artificial Sequence
  GFR-binding peptide
  MOD_RES (1)..(35): Xaa is C or S
  MOD_RES (15)..(16)..(17)..(18)..(19): Xaa is A or G
  MOD_RES (20)..(21)..(22)..(23): Xaa is A or G or is absent
XAPTQLSPINVLYFXXXXXXXXXYGKIPNMVVRAX

SEQ ID NO: 32425 - protein, 44 aa, Artificial Sequence
  GFR-binding peptide
  MOD_RES (6)..(7)..(41)..(43): Xaa is C or S
  MOD_RES (21)..(22)..(23)..(24)..(25): Xaa is A or G
  MOD_RES (26)..(27)..(28)..(29): Xaa is A or G or is absent
YVPKPXXAPTKLSPINVLYFXXXXXXXXXYGKIPNMVVRSXGXH

SEQ ID NO: 32426 - protein, 39 aa, Artificial Sequence
  GFR-binding peptide
  MOD_RES (6)..(7): Xaa is C or S
  MOD_RES (21)..(22)..(23)..(24)..(25): Xaa is A or G
  MOD_RES (26)..(27)..(28)..(29): Xaa is A or G or is absent
RVPSTXXAPVKTSPINMLYFXXXXXXXXXYGKIPMIVEE

SEQ ID NO: 32427 - protein, 34 aa, Artificial Sequence
  GFR-binding peptide
  MOD_RES (34)..(34): Xaa is C or S
  MOD_RES (14)..(15)..(16)..(17)..(18): Xaa is A or G
  MOD_RES (19)..(20)..(21)..(22): Xaa is A or G or is absent
VPTELSPINMLYFXXXXXXXXXYGKIPEMVVEGX

SEQ ID NO: 32428 - protein, 38 aa, Artificial Sequence
  GFR-binding peptide
  MOD_RES (5)..(6): Xaa is C or S
  MOD_RES (20)..(21)..(22)..(23)..(24): Xaa is A or G
  MOD_RES (25)..(26)..(27)..(28): Xaa is A or G or is absent
SAGPXXTPTKMSPINMLYFXXXXXXXXXYGKIPGMVVD

SEQ ID NO: 32429 - protein, 38 aa, Artificial Sequence
  GFR-binding peptide
  MOD_RES (4)..(5): Xaa is C or S
  MOD_RES (19)..(20)..(21)..(22)..(23): Xaa is A or G
  MOD_RES (24)..(25)..(26)..(27): Xaa is A or G or is absent
PPTXXVPTRLSPINILYFXXXXXXXXXYGKIPDMVVES

SEQ ID NO: 32430 - protein, 36 aa, Artificial Sequence
  GFR-binding peptide
  MOD_RES (33)..(35): Xaa is C or S
  MOD_RES (14)..(15)..(16)..(17)..(18): Xaa is A or G
  MOD_RES (19)..(20)..(21)..(22): Xaa is A or G or is absent
APVKTSPINMLYFXXXXXXXXXYGKIPMIVEEXGXL

SEQ ID NO: 32431 - protein, 33 aa, Artificial Sequence
  GFR-binding peptide
  MOD_RES (1)..(2): Xaa is C or S
XXAPTKLSPINVLYFDDSSNVIYGKIPNMVVRS

SEQ ID NO: 32432 - protein, 35 aa, Artificial Sequence
  GFR-binding peptide
  MOD_RES (1)..(33)..(35): Xaa is C or S
XVPARLSPINILYFDAANNVVYGKIPDMVVEAXGX

SEQ ID NO: 32433 - protein, 37 aa, Artificial Sequence
  GFR-binding peptide
  MOD_RES (3)..(4)..(36): Xaa is C or S
KPXXAPTQLSPINVLYFDDSSNVIYGKIPNMVVRAXG

SEQ ID NO: 32434 - protein, 37 aa, Artificial Sequence
  GFR-binding peptide
  MOD_RES (1)..(2)..(37): Xaa is C or S
  MOD_RES (16)..(17)..(18)..(19)..(20): Xaa is A or G
  MOD_RES (21)..(22)..(23)..(24): Xaa is A or G or is absent
XXVPTKLSPINVLYFXXXXXXXXXYGKIPEGMSVAEX

SEQ ID NO: 32435 - protein, 33 aa, Artificial Sequence
  GFR-binding peptide
  MOD_RES (1)..(1): Xaa is C or S
  MOD_RES (15)..(16)..(17)..(18)..(19): Xaa is A or G
  MOD_RES (20)..(21)..(22)..(23): Xaa is A or G or is absent
XVPTRLSPINILYFXXXXXXXXXYGKIPDMVVE

SEQ ID NO: 32436 - protein, 39 aa, Artificial Sequence
  GFR-binding peptide
  MOD_RES (5)..(6)..(37)..(39): Xaa is C or S
VPSTXXAPVKTSPINMLYFDNGRVLLYGKIPMIVEEXGX

SEQ ID NO: 32437 - protein, 34 aa, Artificial Sequence
  GFR-binding peptide
  MOD_RES (3)..(4): Xaa is C or S
KAXXAPTKLSPINVLYFDSSNNVIYGKIPNMVVK

SEQ ID NO: 32438 - protein, 37 aa, Artificial Sequence
  GFR-binding peptide
  MOD_RES (1)..(35)..(37): Xaa is C or S
  MOD_RES (15)..(16)..(17)..(18)..(19): Xaa is A or G
  MOD_RES (20)..(21)..(22)..(23): Xaa is A or G or is absent
XVPARLSPINILYFXXXXXXXXXYGKIPDMVVEAXGX

SEQ ID NO: 32439 - protein, 42 aa, Artificial Sequence
  GFR-binding peptide
  MOD_RES (6)..(7)..(39)..(41): Xaa is C or S
YVPKPXXAPTKLSPINVLYFDDSSNVIYGKIPNMVVRSXGXH

SEQ ID NO: 32440 - protein, 35 aa, Artificial Sequence
  GFR-binding peptide
  MOD_RES (1)..(1): Xaa is C or S
  MOD_RES (15)..(16)..(17)..(18)..(19): Xaa is A or G
  MOD_RES (20)..(21)..(22)..(23): Xaa is A or G or is absent
XVPTKLSPINVLYFXXXXXXXXXYGKIPEGMSVAE

SEQ ID NO: 32441 - protein, 36 aa, Artificial Sequence
  GFR-binding peptide
  MOD_RES (2)..(3)..(35): Xaa is C or S
TXXVPTRLSPINILYFDSANNVVYGKIPDMVVESXG

SEQ ID NO: 32442 - protein, 38 aa, Artificial Sequence
  GFR-binding peptide
  MOD_RES (6)..(7): Xaa is C or S
SIPKAXXVPTELSPINMLYFDEYDKVVYGKIPEMVVEG

SEQ ID NO: 32443 - protein, 38 aa, Artificial Sequence
  GFR-binding peptide
  MOD_RES (1)..(2)..(36)..(38): Xaa is C or S
  MOD_RES (16)..(17)..(18)..(19)..(20): Xaa is A or G
  MOD_RES (21)..(22)..(23)..(24): Xaa is A or G or is absent
XXVPTELSPINMLYFXXXXXXXXXYGKIPEMVVEGXGX

SEQ ID NO: 32444 - protein, 36 aa, Artificial Sequence
  GFR-binding peptide
  MOD_RES (1)..(2)..(36): Xaa is C or S
  MOD_RES (16)..(17)..(18)..(19)..(20): Xaa is A or G
  MOD_RES (21)..(22)..(23)..(24): Xaa is A or G or is absent
XXAPTQLSPINVLYFXXXXXXXXXYGKIPNMVVRAX

SEQ ID NO: 32445 - protein, 36 aa, Artificial Sequence
  GFR-binding peptide
  MOD_RES (5)..(6): Xaa is C or S
VPKAXXAPTKLSPINVLYFDSSNNVIYGKIPNMVVK

SEQ ID NO: 32446 - protein, 43 aa, Artificial Sequence
  GFR-binding peptide
  MOD_RES (6)..(7)..(41)..(43): Xaa is C or S
  MOD_RES (21)..(22)..(23)..(24)..(25): Xaa is A or G
  MOD_RES (26)..(27)..(28)..(29): Xaa is A or G or is absent
TVPKPXXAPTQLSPINVLYFXXXXXXXXXYGKIPNMVVRAXGX

SEQ ID NO: 32447 - protein, 37 aa, Artificial Sequence
  GFR-binding peptide
  MOD_RES (4)..(5): Xaa is C or S
  MOD_RES (19)..(20)..(21)..(22)..(23): Xaa is A or G
  MOD_RES (24)..(25)..(26)..(27): Xaa is A or G or is absent
PKAXXAPTKLSPINVLYFXXXXXXXXXYGKIPNMVVK

SEQ ID NO: 32448 - protein, 35 aa, Artificial Sequence
  GFR-binding peptide
  MOD_RES (1)..(2): Xaa is C or S
  MOD_RES (16)..(17)..(18)..(19)..(20): Xaa is A or G
  MOD_RES (21)..(22)..(23)..(24): Xaa is A or G or is absent
XXAPTKLSPINVLYFXXXXXXXXXYGKIPNMVVKA

SEQ ID NO: 32449 - protein, 31 aa, Artificial Sequence
  GFR-binding peptide
APTKLSPINVLYFDSSNNVIYGKIPNMVVKA

SEQ ID NO: 32450 - protein, 41 aa, Artificial Sequence
  GFR-binding peptide
  MOD_RES (3)..(4)..(38)..(40): Xaa is C or S
  MOD_RES (18)..(19)..(20)..(21)..(22): Xaa is A or G
  MOD_RES (23)..(24)..(25)..(26): Xaa is A or G or is absent
KAXXVPTELSPINMLYFXXXXXXXXXYGKIPEMVVEGXGXR

SEQ ID NO: 32451 - protein, 40 aa, Artificial Sequence
  GFR-binding peptide
  MOD_RES (5)..(6)..(38)..(40): Xaa is C or S
VPKPXXAPTQLSPINVLYFDDSSNVIYGKIPNMVVRAXGX

SEQ ID NO: 32452 - protein, 37 aa, Artificial Sequence
  GFR-binding peptide
  MOD_RES (4)..(5)..(37): Xaa is C or S
PKPXXAPTKLSPINVLYFDDSSNVIYGKIPNMVVRSX

SEQ ID NO: 32453 - protein, 37 aa, Artificial Sequence
  GFR-binding peptide
  MOD_RES (6)..(7): Xaa is C or S
AAPASXXVPARLSPINILYFDAANNVVYGKIPDMVVE

SEQ ID NO: 32454 - protein, 34 aa, Artificial Sequence
  GFR-binding peptide
  MOD_RES (2)..(3)..(34): Xaa is C or S
TXXAPVKTSPINMLYFDNGRVLLYGKIPMIVEEX

SEQ ID NO: 32455 - protein, 36 aa, Artificial Sequence
  GFR-binding peptide
  MOD_RES (2)..(3): Xaa is C or S
  MOD_RES (17)..(18)..(19)..(20)..(21): Xaa is A or G
  MOD_RES (22)..(23)..(24)..(25): Xaa is A or G or is absent
TXXVPTRLSPINILYFXXXXXXXXXYGKIPDMVVES

SEQ ID NO: 32456 - protein, 31 aa, Artificial Sequence
  GFR-binding peptide
  MOD_RES (1)..(1): Xaa is C or S
XAPTKLSPINVLYFDDSSNVIYGKIPNMVVR

SEQ ID NO: 32457 - protein, 41 aa, Artificial Sequence
  GFR-binding peptide
  MOD_RES (6)..(7)..(40): Xaa is C or S
KVGKAXXVPTKLSPINVLYFDDMGVPTYGKIPEGMSVAEXG

SEQ ID NO: 32458 - protein, 37 aa, Artificial Sequence
  GFR-binding peptide
  MOD_RES (2)..(3): Xaa is C or S
  MOD_RES (17)..(18)..(19)..(20)..(21): Xaa is A or G
  MOD_RES (22)..(23)..(24)..(25): Xaa is A or G or is absent
AXXVPTKLSPINVLYFXXXXXXXXXYGKIPEGMSVAE

SEQ ID NO: 32459 - protein, 37 aa, Artificial Sequence
  GFR-binding peptide
  MOD_RES (1)..(2)..(36): Xaa is C or S
  MOD_RES (16)..(17)..(18)..(19)..(20): Xaa is A or G
  MOD_RES (21)..(22)..(23)..(24): Xaa is A or G or is absent
XXAPTKLSPINVLYFXXXXXXXXXYGKIPNMVVRSXG

SEQ ID NO: 32460 - protein, 32 aa, Artificial Sequence
  GFR-binding peptide
  MOD_RES (1)..(2): Xaa is C or S
XXVPTRLSPINILYFDSANNVVYGKIPDMVVE

SEQ ID NO: 32461 - protein, 34 aa, Artificial Sequence
  GFR-binding peptide
  MOD_RES (1)..(2): Xaa is C or S
  MOD_RES (16)..(17)..(18)..(19)..(20): Xaa is A or G
  MOD_RES (21)..(22)..(23)..(24): Xaa is A or G or is absent
XXVPARLSPINILYFXXXXXXXXXYGKIPDMVVE

SEQ ID NO: 32462 - protein, 38 aa, Artificial Sequence
  GFR-binding peptide
  MOD_RES (2)..(3)..(36)..(38): Xaa is C or S
AXXVPTKLSPINVLYFDDMGVPTYGKIPEGMSVAEXGX

SEQ ID NO: 32463 - protein, 36 aa, Artificial Sequence
  GFR-binding peptide
  MOD_RES (2)..(3)..(35): Xaa is C or S
PXXAPTKLSPINVLYFDDSSNVIYGKIPNMVVRSXG

SEQ ID NO: 32464 - protein, 34 aa, Artificial Sequence
  GFR-binding peptide
  MOD_RES (3)..(4): Xaa is C or S
KAXXVPTKLSPINILYFDKGVVTYYGKIPGMAVS

SEQ ID NO: 32465 - protein, 43 aa, Artificial Sequence
  GFR-binding peptide
  MOD_RES (5)..(6)..(40)..(42): Xaa is C or S
  MOD_RES (20)..(21)..(22)..(23)..(24): Xaa is A or G
  MOD_RES (25)..(26)..(27)..(28): Xaa is A or G or is absent
TPPTXXVPTRLSPINILYFXXXXXXXXXYGKIPDMVVESXGXR

SEQ ID NO: 32466 - protein, 32 aa, Artificial Sequence
  GFR-binding peptide
  MOD_RES (1)..(2): Xaa is C or S
XXVPARLSPINILYFDAANNVVYGKIPDMVVE

SEQ ID NO: 32467 - protein, 36 aa, Artificial Sequence
  GFR-binding peptide
  MOD_RES (1)..(2)..(34)..(36): Xaa is C or S
XXVPTRLSPINILYFDSANNVVYGKIPDMVVESXGX

SEQ ID NO: 32468 - protein, 37 aa, Artificial Sequence
  GFR-binding peptide
  MOD_RES (4)..(4): Xaa is C or S
  MOD_RES (18)..(19)..(20)..(21)..(22): Xaa is A or G
  MOD_RES (23)..(24)..(25)..(26): Xaa is A or G or is absent
KPTXAPTKLSPINVLYFXXXXXXXXXYGKIPNMVVRS

SEQ ID NO: 32469 - protein, 38 aa, Artificial Sequence
  GFR-binding peptide
  MOD_RES (5)..(6)..(38): Xaa is C or S
ASKAXXVPTKLSPINILYFDKGVVTYYGKIPGMAVSEX

SEQ ID NO: 32470 - protein, 38 aa, Artificial Sequence
  GFR-binding peptide
  MOD_RES (3)..(4)..(38): Xaa is C or S
  MOD_RES (18)..(19)..(20)..(21)..(22): Xaa is A or G
  MOD_RES (23)..(24)..(25)..(26): Xaa is A or G or is absent
KAXXVPTELSPINMLYFXXXXXXXXXYGKIPDMVVEGX

SEQ ID NO: 32471 - protein, 37 aa, Artificial Sequence
  GFR-binding peptide
  MOD_RES (2)..(3)..(35)..(37): Xaa is C or S
PXXAPTQLSPINVLYFDDSSNVIYGKIPNMVVRAXGX

SEQ ID NO: 32472 - protein, 38 aa, Artificial Sequence
  GFR-binding peptide
  MOD_RES (5)..(6): Xaa is C or S
  MOD_RES (20)..(21)..(22)..(23)..(24): Xaa is A or G
  MOD_RES (25)..(26)..(27)..(28): Xaa is A or G or is absent
VPKPXXAPTQLSPINVLYFXXXXXXXXXYGKIPNMVVR

SEQ ID NO: 32473 - protein, 35 aa, Artificial Sequence
  GFR-binding peptide
  MOD_RES (1)..(2): Xaa is C or S
  MOD_RES (16)..(17)..(18)..(19)..(20): Xaa is A or G
  MOD_RES (21)..(22)..(23)..(24): Xaa is A or G or is absent
XXVPTELSPINMLYFXXXXXXXXXYGKIPDMVVEG

SEQ ID NO: 32474 - protein, 33 aa, Artificial Sequence
  GFR-binding peptide
  MOD_RES (14)..(15)..(16)..(17)..(18): Xaa is A or G
  MOD_RES (19)..(20)..(21)..(22): Xaa is A or G or is absent
VPARLSPINILYFXXXXXXXXXYGKIPDMVVEA

SEQ ID NO: 32475 - protein, 34 aa, Artificial Sequence
  GFR-binding peptide
  MOD_RES (3)..(4): Xaa is C or S
PTXXVPTRLSPINILYFDSANNVVYGKIPDMVVE

SEQ ID NO: 32476 - protein, 36 aa, Artificial Sequence
  GFR-binding peptide
  MOD_RES (3)..(4): Xaa is C or S
  MOD_RES (18)..(19)..(20)..(21)..(22): Xaa is A or G
  MOD_RES (23)..(24)..(25)..(26): Xaa is A or G or is absent
ASXXVPARLSPINILYFXXXXXXXXXYGKIPDMVVE

SEQ ID NO: 32477 - protein, 40 aa, Artificial Sequence
  GFR-binding peptide
  MOD_RES (5)..(37)..(39): Xaa is C or S
TKPTXAPTKLSPINVLYFDDSSNVIYGKIPNMVVRSXGXH

SEQ ID NO: 32478 - protein, 39 aa, Artificial Sequence
  GFR-binding peptide
  MOD_RES (4)..(5)..(37)..(39): Xaa is C or S
PKAXXAPTKLSPINVLYFDSSNNVIYGKIPNMVVKAXGX

SEQ ID NO: 32479 - protein, 42 aa, Artificial Sequence
  GFR-binding peptide
  MOD_RES (4)..(5)..(40)..(42): Xaa is C or S
  MOD_RES (19)..(20)..(21)..(22)..(23): Xaa is A or G
  MOD_RES (24)..(25)..(26)..(27): Xaa is A or G or is absent
GKAXXVPTKLSPINVLYFXXXXXXXXXYGKIPEGMSVAEXGX

SEQ ID NO: 32480 - protein, 39 aa, Artificial Sequence
  GFR-binding peptide
  MOD_RES (5)..(6): Xaa is C or S
  MOD_RES (20)..(21)..(22)..(23)..(24): Xaa is A or G
  MOD_RES (25)..(26)..(27)..(28): Xaa is A or G or is absent
IPKAXXVPTELSPINMLYFXXXXXXXXXYGKIPEMVVEG

SEQ ID NO: 32481 - protein, 34 aa, Artificial Sequence
  GFR-binding peptide
  MOD_RES (1)..(2): Xaa is C or S
  MOD_RES (16)..(17)..(18)..(19)..(20): Xaa is A or G
  MOD_RES (21)..(22)..(23)..(24): Xaa is A or G or is absent
XXVPTRLSPINILYFXXXXXXXXXYGKIPDMVVE

SEQ ID NO: 32482 - protein, 37 aa, Artificial Sequence
  GFR-binding peptide
  MOD_RES (3)..(4): Xaa is C or S
  MOD_RES (18)..(19)..(20)..(21)..(22): Xaa is A or G
  MOD_RES (23)..(24)..(25)..(26): Xaa is A or G or is absent
KAXXVPTELSPINMLYFXXXXXXXXXYGKIPEMVVEG

SEQ ID NO: 32483 - protein, 34 aa, Artificial Sequence
  GFR-binding peptide
  MOD_RES (2)..(3): Xaa is C or S
AXXVPTELSPINMLYFDEYDKVVYGKIPEMVVEG

SEQ ID NO: 32484 - protein, 38 aa, Artificial Sequence
  GFR-binding peptide
  MOD_RES (2)..(3)..(35)..(37): Xaa is C or S
TXXVPTRLSPINILYFDSANNVVYGKIPDMVVESXGXR

SEQ ID NO: 32485 - protein, 33 aa, Artificial Sequence
  GFR-binding peptide
  MOD_RES (2)..(3): Xaa is C or S
PXXAPTKLSPINVLYFDDSSNVIYGKIPNMVVR

SEQ ID NO: 32486 - protein, 38 aa, Artificial Sequence
  GFR-binding peptide
  MOD_RES (1)..(35)..(37): Xaa is C or S
  MOD_RES (15)..(16)..(17)..(18)..(19): Xaa is A or G
  MOD_RES (20)..(21)..(22)..(23): Xaa is A or G or is absent
XVPTKLSPINILYFXXXXXXXXXYGKIPGMAVSEXGXR

SEQ ID NO: 32487 - protein, 33 aa, Artificial Sequence
  GFR-binding peptide
  MOD_RES (32)..(32): Xaa is C or S
APTKLSPINVLYFDSSNNVIYGKIPNMVVKAXG

SEQ ID NO: 32488 - protein, 37 aa, Artificial Sequence
  GFR-binding peptide
  MOD_RES (2)..(3)..(37): Xaa is C or S
  MOD_RES (17)..(18)..(19)..(20)..(21): Xaa is A or G
  MOD_RES (22)..(23)..(24)..(25): Xaa is A or G or is absent
PXXAPTKLSPINVLYFXXXXXXXXXYGKIPNMVVRSX

SEQ ID NO: 32489 - protein, 39 aa, Artificial Sequence
  GFR-binding peptide
  MOD_RES (1)..(2)..(36)..(38): Xaa is C or S
  MOD_RES (16)..(17)..(18)..(19)..(20): Xaa is A or G
  MOD_RES (21)..(22)..(23)..(24): Xaa is A or G or is absent
XXVPTELSPINMLYFXXXXXXXXXYGKIPEMVVEGXGXR

SEQ ID NO: 32490 - protein, 41 aa, Artificial Sequence
  GFR-binding peptide
  MOD_RES (3)..(4)..(38)..(40): Xaa is C or S
  MOD_RES (18)..(19)..(20)..(21)..(22): Xaa is A or G
  MOD_RES (23)..(24)..(25)..(26): Xaa is A or G or is absent
ASXXVPARLSPINILYFXXXXXXXXXYGKIPDMVVEAXGXR

SEQ ID NO: 32491 - protein, 40 aa, Artificial Sequence
  GFR-binding peptide
  MOD_RES (2)..(3)..(38)..(40): Xaa is C or S
  MOD_RES (17)..(18)..(19)..(20)..(21): Xaa is A or G
  MOD_RES (22)..(23)..(24)..(25): Xaa is A or G or is absent
AXXVPTKLSPINVLYFXXXXXXXXXYGKIPEGMSVAEXGX

SEQ ID NO: 32492 - protein, 39 aa, Artificial Sequence
  GFR-binding peptide
  MOD_RES (4)..(5)..(37)..(39): Xaa is C or S
PKAXXVPTELSPINMLYFDENEKVVYGKIPDMVVEGXGX

SEQ ID NO: 32493 - protein, 33 aa, Artificial Sequence
  GFR-binding peptide
  MOD_RES (32)..(32): Xaa is C or S
VPARLSPINILYFDAANNVVYGKIPDMVVEAXG

SEQ ID NO: 32494 - protein, 35 aa, Artificial Sequence
  GFR-binding peptide
  MOD_RES (34)..(34): Xaa is C or S
  MOD_RES (14)..(15)..(16)..(17)..(18): Xaa is A or G
  MOD_RES (19)..(20)..(21)..(22): Xaa is A or G or is absent
VPTKLSPINILYFXXXXXXXXXYGKIPGMAVSEXG

SEQ ID NO: 32495 - protein, 33 aa, Artificial Sequence
  GFR-binding peptide
  MOD_RES (32)..(32): Xaa is C or S
APTKLSPINVLYFDDSSNVIYGKIPNMVVRSXG

SEQ ID NO: 32496 - protein, 39 aa, Artificial Sequence
  GFR-binding peptide
  MOD_RES (2)..(3)..(37)..(39): Xaa is C or S
  MOD_RES (17)..(18)..(19)..(20)..(21): Xaa is A or G
  MOD_RES (22)..(23)..(24)..(25): Xaa is A or G or is absent
TXXVPTRLSPINILYFXXXXXXXXXYGKIPDMVVESXGX

SEQ ID NO: 32497 - protein, 37 aa, Artificial Sequence
  GFR-binding peptide
  MOD_RES (2)..(3)..(37): Xaa is C or S
  MOD_RES (17)..(18)..(19)..(20)..(21): Xaa is A or G
  MOD_RES (22)..(23)..(24)..(25): Xaa is A or G or is absent
AXXVPTELSPINMLYFXXXXXXXXXYGKIPDMVVEGX

SEQ ID NO: 32498 - protein, 33 aa, Artificial Sequence
  GFR-binding peptide
  MOD_RES (1)..(33): Xaa is C or S
XVPTKLSPINILYFDKGVVTYYGKIPGMAVSEX

SEQ ID NO: 32499 - protein, 36 aa, Artificial Sequence
  GFR-binding peptide
  MOD_RES (1)..(2)..(36): Xaa is C or S
  MOD_RES (16)..(17)..(18)..(19)..(20): Xaa is A or G
  MOD_RES (21)..(22)..(23)..(24): Xaa is A or G or is absent
XXVPTELSPINMLYFXXXXXXXXXYGKIPDMVVEGX

SEQ ID NO: 32500 - protein, 35 aa, Artificial Sequence
  GFR-binding peptide
  MOD_RES (2)..(3): Xaa is C or S
AXXVPTKLSPINVLYFDDMGVPTYGKIPEGMSVAE

SEQ ID NO: 32501 - protein, 42 aa, Artificial Sequence
  GFR-binding peptide
  MOD_RES (6)..(7)..(42): Xaa is C or S
  MOD_RES (21)..(22)..(23)..(24)..(25): Xaa is A or G
  MOD_RES (26)..(27)..(28)..(29): Xaa is A or G or is absent
KVGKAXXVPTKLSPINVLYFXXXXXXXXXYGKIPEGMSVAEX

SEQ ID NO: 32502 - protein, 39 aa, Artificial Sequence
  GFR-binding peptide
  MOD_RES (4)..(5)..(37)..(39): Xaa is C or S
PPTXXVPTRLSPINILYFDSANNVVYGKIPDMVVESXGX

SEQ ID NO: 32503 - protein, 33 aa, Artificial Sequence
  GFR-binding peptide
  MOD_RES (14)..(15)..(16)..(17)..(18): Xaa is A or G
  MOD_RES (19)..(20)..(21)..(22): Xaa is A or G or is absent
TPTKMSPINMLYFXXXXXXXXXYGKIPGMVVDR

SEQ ID NO: 32504 - protein, 38 aa, Artificial Sequence
  GFR-binding peptide
  MOD_RES (5)..(6): Xaa is C or S
  MOD_RES (20)..(21)..(22)..(23)..(24): Xaa is A or G
  MOD_RES (25)..(26)..(27)..(28): Xaa is A or G or is absent
APASXXVPARLSPINILYFXXXXXXXXXYGKIPDMVVE

SEQ ID NO: 32505 - protein, 37 aa, Artificial Sequence
  GFR-binding peptide
  MOD_RES (1)..(2)..(36): Xaa is C or S
  MOD_RES (16)..(17)..(18)..(19)..(20): Xaa is A or G
  MOD_RES (21)..(22)..(23)..(24): Xaa is A or G or is absent
XXVPTELSPINMLYFXXXXXXXXXYGKIPDMVVEGXG

SEQ ID NO: 32506 - protein, 38 aa, Artificial Sequence
  GFR-binding peptide
  MOD_RES (4)..(5): Xaa is C or S
  MOD_RES (19)..(20)..(21)..(22)..(23): Xaa is A or G
  MOD_RES (24)..(25)..(26)..(27): Xaa is A or G or is absent
PKPXXAPTKLSPINVLYFXXXXXXXXXYGKIPNMVVRS

SEQ ID NO: 32507 - protein, 33 aa, Artificial Sequence
  GFR-binding peptide
  MOD_RES (32)..(32): Xaa is C or S
VPTRLSPINILYFDSANNVVYGKIPDMVVESXG

SEQ ID NO: 32508 - protein, 35 aa, Artificial Sequence
  GFR-binding peptide
  MOD_RES (3)..(4): Xaa is C or S
ASXXVPARLSPINILYFDAANNVVYGKIPDMVVEA

SEQ ID NO: 32509 - protein, 35 aa, Artificial Sequence
  GFR-binding peptide
  MOD_RES (1)..(2)..(33)..(35): Xaa is C or S
XXAPVKTSPINMLYFDNGRVLLYGKIPMIVEEXGX

SEQ ID NO: 32510 - protein, 42 aa, Artificial Sequence
  GFR-binding peptide
  MOD_RES (6)..(7)..(39)..(41): Xaa is C or S
KASKAXXVPTKLSPINILYFDKGVVTYYGKIPGMAVSEXGXR

SEQ ID NO: 32511 - protein, 35 aa, Artificial Sequence
  GFR-binding peptide
  MOD_RES (2)..(3): Xaa is C or S
  MOD_RES (17)..(18)..(19)..(20)..(21): Xaa is A or G
  MOD_RES (22)..(23)..(24)..(25): Xaa is A or G or is absent
TXXAPVKTSPINMLYFXXXXXXXXXYGKIPMIVEE

SEQ ID NO: 32512 - protein, 39 aa, Artificial Sequence
  GFR-binding peptide
  MOD_RES (2)..(3)..(37)..(39): Xaa is C or S
  MOD_RES (17)..(18)..(19)..(20)..(21): Xaa is A or G
  MOD_RES (22)..(23)..(24)..(25): Xaa is A or G or is absent
AXXAPTKLSPINVLYFXXXXXXXXXYGKIPNMVVKAXGX

SEQ ID NO: 32513 - protein, 33 aa, Artificial Sequence
  GFR-binding peptide
  MOD_RES (1)..(2): Xaa is C or S
XXVPTELSPINMLYFDENEKVVYGKIPDMVVEG

SEQ ID NO: 32514 - protein, 38 aa, Artificial Sequence
  GFR-binding peptide
  MOD_RES (4)..(5): Xaa is C or S
  MOD_RES (19)..(20)..(21)..(22)..(23): Xaa is A or G
  MOD_RES (24)..(25)..(26)..(27): Xaa is A or G or is absent
PKAXXVPTELSPINMLYFXXXXXXXXXYGKIPDMVVEG

SEQ ID NO: 32515 - protein, 35 aa, Artificial Sequence
  GFR-binding peptide
  MOD_RES (1)..(33)..(35): Xaa is C or S
XVPTELSPINMLYFDENEKVVYGKIPDMVVEGXGX

SEQ ID NO: 32516 - protein, 40 aa, Artificial Sequence
  GFR-binding peptide
  MOD_RES (4)..(5)..(37)..(39): Xaa is C or S
PKPXXAPTQLSPINVLYFDDSSNVIYGKIPNMVVRAXGXH

SEQ ID NO: 32517 - protein, 41 aa, Artificial Sequence
  GFR-binding peptide
  MOD_RES (6)..(7)..(39)..(41): Xaa is C or S
KASKAXXVPTKLSPINILYFDKGVVTYYGKIPGMAVSEXGX

SEQ ID NO: 32518 - protein, 32 aa, Artificial Sequence
  GFR-binding peptide
  MOD_RES (1)..(2): Xaa is C or S
XXAPTKLSPINVLYFDDSSNVIYGKIPNMVVR

SEQ ID NO: 32519 - protein, 43 aa, Artificial Sequence
  GFR-binding peptide
  MOD_RES (6)..(7)..(41)..(43): Xaa is C or S
  MOD_RES (21)..(22)..(23)..(24)..(25): Xaa is A or G
  MOD_RES (26)..(27)..(28)..(29): Xaa is A or G or is absent
STPPTXXVPTRLSPINILYFXXXXXXXXXYGKIPDMVVESXGX

SEQ ID NO: 32520 - protein, 38 aa, Artificial Sequence
  GFR-binding peptide
  MOD_RES (3)..(4)..(36)..(38): Xaa is C or S
KAXXVPTKLSPINILYFDKGVVTYYGKIPGMAVSEXGX

SEQ ID NO: 32521 - protein, 38 aa, Artificial Sequence
  GFR-binding peptide
  MOD_RES (6)..(7): Xaa is C or S
AAPASXXVPARLSPINILYFDAANNVVYGKIPDMVVEA

SEQ ID NO: 32522 - protein, 44 aa, Artificial Sequence
  GFR-binding peptide
  MOD_RES (6)..(7)..(41)..(43): Xaa is C or S
  MOD_RES (21)..(22)..(23)..(24)..(25): Xaa is A or G
  MOD_RES (26)..(27)..(28)..(29): Xaa is A or G or is absent
STPPTXXVPTRLSPINILYFXXXXXXXXXYGKIPDMVVESXGXR

SEQ ID NO: 32523 - protein, 41 aa, Artificial Sequence
  GFR-binding peptide
  MOD_RES (5)..(6)..(38)..(40): Xaa is C or S
TPPTXXVPTRLSPINILYFDSANNVVYGKIPDMVVESXGXR

SEQ ID NO: 32524 - protein, 36 aa, Artificial Sequence
  GFR-binding peptide
  MOD_RES (33)..(35): Xaa is C or S
VPTKLSPINVLYFDDMGVPTYGKIPEGMSVAEXGXR

SEQ ID NO: 32525 - protein, 41 aa, Artificial Sequence
  GFR-binding peptide
  MOD_RES (6)..(7)..(39)..(41): Xaa is C or S
TVPKPXXAPTQLSPINVLYFDDSSNVIYGKIPNMVVRAXGX

SEQ ID NO: 32526 - protein, 33 aa, Artificial Sequence
  GFR-binding peptide
  MOD_RES (1)..(1): Xaa is C or S
  MOD_RES (15)..(16)..(17)..(18)..(19): Xaa is A or G
  MOD_RES (20)..(21)..(22)..(23): Xaa is A or G or is absent
XAPTQLSPINVLYFXXXXXXXXXYGKIPNMVVR

SEQ ID NO: 32527 - protein, 35 aa, Artificial Sequence
  GFR-binding peptide
  MOD_RES (2)..(3)..(34): Xaa is C or S
TXXAPVKTSPINMLYFDNGRVLLYGKIPMIVEEXG

SEQ ID NO: 32528 - protein, 34 aa, Artificial Sequence
  GFR-binding peptide
  MOD_RES (1)..(2)..(34): Xaa is C or S
XXVPTRLSPINILYFDSANNVVYGKIPDMVVESX

SEQ ID NO: 32529 - protein, 35 aa, Artificial Sequence
  GFR-binding peptide
  MOD_RES (3)..(4): Xaa is C or S
KAXXVPTKLSPINILYFDKGVVTYYGKIPGMAVSE

SEQ ID NO: 32530 - protein, 43 aa, Artificial Sequence
  GFR-binding peptide
  MOD_RES (6)..(7)..(42): Xaa is C or S
  MOD_RES (21)..(22)..(23)..(24)..(25): Xaa is A or G
  MOD_RES (26)..(27)..(28)..(29): Xaa is A or G or is absent
KVGKAXXVPTKLSPINVLYFXXXXXXXXXYGKIPEGMSVAEXG

SEQ ID NO: 32531 - protein, 43 aa, Artificial Sequence
  GFR-binding peptide
  MOD_RES (5)..(6)..(40)..(42): Xaa is C or S
  MOD_RES (20)..(21)..(22)..(23)..(24): Xaa is A or G
  MOD_RES (25)..(26)..(27)..(28): Xaa is A or G or is absent
VPKPXXAPTQLSPINVLYFXXXXXXXXXYGKIPNMVVRAXGXH

SEQ ID NO: 32532 - protein, 40 aa, Artificial Sequence
  GFR-binding peptide
  MOD_RES (5)..(6)..(38)..(40): Xaa is C or S
TPPTXXVPTRLSPINILYFDSANNVVYGKIPDMVVESXGX

SEQ ID NO: 32533 - protein, 36 aa, Artificial Sequence
  GFR-binding peptide
  MOD_RES (34)..(36): Xaa is C or S
  MOD_RES (14)..(15)..(16)..(17)..(18): Xaa is A or G
  MOD_RES (19)..(20)..(21)..(22): Xaa is A or G or is absent
TPTKMSPINMLYFXXXXXXXXXYGKIPGMVVDRXGX

SEQ ID NO: 32534 - protein, 33 aa, Artificial Sequence
  GFR-binding peptide
  MOD_RES (1)..(1): Xaa is C or S
XVPTKLSPINVLYFDDMGVPTYGKIPEGMSVAE

SEQ ID NO: 32535 - protein, 38 aa, Artificial Sequence
  GFR-binding peptide
  MOD_RES (6)..(6): Xaa is C or S
  MOD_RES (20)..(21)..(22)..(23)..(24): Xaa is A or G
  MOD_RES (25)..(26)..(27)..(28): Xaa is A or G or is absent
VTKPTXAPTKLSPINVLYFXXXXXXXXXYGKIPNMVVR

SEQ ID NO: 32536 - protein, 44 aa, Artificial Sequence
  GFR-binding peptide
  MOD_RES (6)..(7)..(42)..(44): Xaa is C or S
  MOD_RES (21)..(22)..(23)..(24)..(25): Xaa is A or G
  MOD_RES (26)..(27)..(28)..(29): Xaa is A or G or is absent
KVGKAXXVPTKLSPINVLYFXXXXXXXXXYGKIPEGMSVAEXGX

SEQ ID NO: 32537 - protein, 38 aa, Artificial Sequence
  GFR-binding peptide
  MOD_RES (4)..(5)..(37): Xaa is C or S
SKAXXVPTKLSPINILYFDKGVVTYYGKIPGMAVSEXG

SEQ ID NO: 32538 - protein, 39 aa, Artificial Sequence
  GFR-binding peptide
  MOD_RES (4)..(5): Xaa is C or S
  MOD_RES (19)..(20)..(21)..(22)..(23): Xaa is A or G
  MOD_RES (24)..(25)..(26)..(27): Xaa is A or G or is absent
GKAXXVPTKLSPINVLYFXXXXXXXXXYGKIPEGMSVAE

SEQ ID NO: 32539 - protein, 41 aa, Artificial Sequence
  GFR-binding peptide
  MOD_RES (6)..(7)..(41): Xaa is C or S
  MOD_RES (21)..(22)..(23)..(24)..(25): Xaa is A or G
  MOD_RES (26)..(27)..(28)..(29): Xaa is A or G or is absent
YVPKPXXAPTKLSPINVLYFXXXXXXXXXYGKIPNMVVRSX

SEQ ID NO: 32540 - protein, 41 aa, Artificial Sequence
  GFR-binding peptide
  MOD_RES (6)..(7)..(41): Xaa is C or S
  MOD_RES (21)..(22)..(23)..(24)..(25): Xaa is A or G
  MOD_RES (26)..(27)..(28)..(29): Xaa is A or G or is absent
AAPASXXVPARLSPINILYFXXXXXXXXXYGKIPDMVVEAX

SEQ ID NO: 32541 - protein, 33 aa, Artificial Sequence
  GFR-binding peptide
  MOD_RES (1)..(33): Xaa is C or S
XAPTQLSPINVLYFDDSSNVIYGKIPNMVVRAX

SEQ ID NO: 32542 - protein, 34 aa, Artificial Sequence
  GFR-binding peptide
  MOD_RES (34)..(34): Xaa is C or S
  MOD_RES (14)..(15)..(16)..(17)..(18): Xaa is A or G
  MOD_RES (19)..(20)..(21)..(22): Xaa is A or G or is absent
APTKLSPINVLYFXXXXXXXXXYGKIPNMVVKAX

SEQ ID NO: 32543 - protein, 33 aa, Artificial Sequence
  GFR-binding peptide
  MOD_RES (33)..(33): Xaa is C or S
  MOD_RES (14)..(15)..(16)..(17)..(18): Xaa is A or G
  MOD_RES (19)..(20)..(21)..(22): Xaa is A or G or is absent
APVKTSPINMLYFXXXXXXXXXYGKIPMIVEEX

SEQ ID NO: 32544 - protein, 35 aa, Artificial Sequence
  GFR-binding peptide
  MOD_RES (32)..(34): Xaa is C or S
VPTRLSPINILYFDSANNVVYGKIPDMVVESXGXR

SEQ ID NO: 32545 - protein, 39 aa, Artificial Sequence
  GFR-binding peptide
  MOD_RES (3)..(4)..(37)..(39): Xaa is C or S
KAXXVPTKLSPINVLYFDDMGVPTYGKIPEGMSVAEXGX

SEQ ID NO: 32546 - protein, 34 aa, Artificial Sequence
  GFR-binding peptide
  MOD_RES (2)..(3): Xaa is C or S
AXXAPTKLSPINVLYFDSSNNVIYGKIPNMVVKA

SEQ ID NO: 32547 - protein, 32 aa, Artificial Sequence
  GFR-binding peptide
  MOD_RES (1)..(1): Xaa is C or S
XAPTQLSPINVLYFDDSSNVIYGKIPNMVVRA

SEQ ID NO: 32548 - protein, 39 aa, Artificial Sequence
  GFR-binding peptide
  MOD_RES (4)..(5)..(37)..(39): Xaa is C or S
PKAXXVPTELSPINMLYFDEYDKVVYGKIPEMVVEGXGX

SEQ ID NO: 32549 - protein, 38 aa, Artificial Sequence
  GFR-binding peptide
  MOD_RES (5)..(6): Xaa is C or S
  MOD_RES (20)..(21)..(22)..(23)..(24): Xaa is A or G
  MOD_RES (25)..(26)..(27)..(28): Xaa is A or G or is absent
ASKAXXVPTKLSPINILYFXXXXXXXXXYGKIPGMAVS

SEQ ID NO: 32550 - protein, 42 aa, Artificial Sequence
  GFR-binding peptide
  MOD_RES (5)..(6)..(40)..(42): Xaa is C or S
  MOD_RES (20)..(21)..(22)..(23)..(24): Xaa is A or G
  MOD_RES (25)..(26)..(27)..(28): Xaa is A or G or is absent
IPKAXXVPTELSPINMLYFXXXXXXXXXYGKIPEMVVEGXGX

SEQ ID NO: 32551 - protein, 36 aa, Artificial Sequence
  GFR-binding peptide
  MOD_RES (3)..(4)..(36): Xaa is C or S
PTXXVPTRLSPINILYFDSANNVVYGKIPDMVVESX

SEQ ID NO: 32552 - protein, 41 aa, Artificial Sequence
  GFR-binding peptide
  MOD_RES (5)..(6)..(40): Xaa is C or S
  MOD_RES (20)..(21)..(22)..(23)..(24): Xaa is A or G
  MOD_RES (25)..(26)..(27)..(28): Xaa is A or G or is absent
SAGPXXTPTKMSPINMLYFXXXXXXXXXYGKIPGMVVDRXG

SEQ ID NO: 32553 - protein, 41 aa, Artificial Sequence
  GFR-binding peptide
  MOD_RES (5)..(6)..(41): Xaa is C or S
  MOD_RES (20)..(21)..(22)..(23)..(24): Xaa is A or G
  MOD_RES (25)..(26)..(27)..(28): Xaa is A or G or is absent
VGKAXXVPTKLSPINVLYFXXXXXXXXXYGKIPEGMSVAEX

SEQ ID NO: 32554 - protein, 34 aa, Artificial Sequence
  GFR-binding peptide
  MOD_RES (1)..(2): Xaa is C or S
  MOD_RES (16)..(17)..(18)..(19)..(20): Xaa is A or G
  MOD_RES (21)..(22)..(23)..(24): Xaa is A or G or is absent
XXVPTKLSPINILYFXXXXXXXXXYGKIPGMAVS

SEQ ID NO: 32555 - protein, 36 aa, Artificial Sequence
  GFR-binding peptide
  MOD_RES (1)..(35): Xaa is C or S
  MOD_RES (15)..(16)..(17)..(18)..(19): Xaa is A or G
  MOD_RES (20)..(21)..(22)..(23): Xaa is A or G or is absent
XTPTKMSPINMLYFXXXXXXXXXYGKIPGMVVDRXG

SEQ ID NO: 32556 - protein, 37 aa, Artificial Sequence
  GFR-binding peptide
  MOD_RES (4)..(5): Xaa is C or S
  MOD_RES (19)..(20)..(21)..(22)..(23): Xaa is A or G
  MOD_RES (24)..(25)..(26)..(27): Xaa is A or G or is absent
AGPXXTPTKMSPINMLYFXXXXXXXXXYGKIPGMVVD

SEQ ID NO: 32557 - protein, 32 aa, Artificial Sequence
  GFR-binding peptide
  MOD_RES (1)..(2): Xaa is C or S
XXVPTKLSPINILYFDKGVVTYYGKIPGMAVS

SEQ ID NO: 32558 - protein, 38 aa, Artificial Sequence
  GFR-binding peptide
  MOD_RES (2)..(3)..(35)..(37): Xaa is C or S
AXXAPTKLSPINVLYFDSSNNVIYGKIPNMVVKAXGXH

SEQ ID NO: 32559 - protein, 37 aa, Artificial Sequence
  GFR-binding peptide
  MOD_RES (1)..(2)..(36): Xaa is C or S
  MOD_RES (16)..(17)..(18)..(19)..(20): Xaa is A or G
  MOD_RES (21)..(22)..(23)..(24): Xaa is A or G or is absent
XXAPTKLSPINVLYFXXXXXXXXXYGKIPNMVVKAXG

SEQ ID NO: 32560 - protein, 36 aa, Artificial Sequence
  GFR-binding peptide
  MOD_RES (4)..(5): Xaa is C or S
PASXXVPARLSPINILYFDAANNVVYGKIPDMVVEA

SEQ ID NO: 32561 - protein, 31 aa, Artificial Sequence
  GFR-binding peptide
  MOD_RES (31)..(31): Xaa is C or S
APVKTSPINMLYFDNGRVLLYGKIPMIVEEX

SEQ ID NO: 32562 - protein, 34 aa, Artificial Sequence
  GFR-binding peptide
  MOD_RES (31)..(33): Xaa is C or S
APVKTSPINMLYFDNGRVLLYGKIPMIVEEXGXL

SEQ ID NO: 32563 - protein, 40 aa, Artificial Sequence
  GFR-binding peptide
  MOD_RES (3)..(4)..(38)..(40): Xaa is C or S
  MOD_RES (18)..(19)..(20)..(21)..(22): Xaa is A or G
  MOD_RES (23)..(24)..(25)..(26): Xaa is A or G or is absent
KAXXVPTELSPINMLYFXXXXXXXXXYGKIPDMVVEGXGX

SEQ ID NO: 32564 - protein, 39 aa, Artificial Sequence
  GFR-binding peptide
  MOD_RES (6)..(7)..(39): Xaa is C or S
AVPKAXXAPTKLSPINVLYFDSSNNVIYGKIPNMVVKAX

SEQ ID NO: 32565 - protein, 35 aa, Artificial Sequence
  GFR-binding peptide
  MOD_RES (2)..(3): Xaa is C or S
  MOD_RES (17)..(18)..(19)..(20)..(21): Xaa is A or G
  MOD_RES (22)..(23)..(24)..(25): Xaa is A or G or is absent
AXXVPTELSPINMLYFXXXXXXXXXYGKIPEMVVE

SEQ ID NO: 32566 - protein, 42 aa, Artificial Sequence
  GFR-binding peptide
  MOD_RES (6)..(7)..(39)..(41): Xaa is C or S
STPPTXXVPTRLSPINILYFDSANNVVYGKIPDMVVESXGXR

SEQ ID NO: 32567 - protein, 41 aa, Artificial Sequence
  GFR-binding peptide
  MOD_RES (5)..(6)..(38)..(40): Xaa is C or S
ASKAXXVPTKLSPINILYFDKGVVTYYGKIPGMAVSEXGXR

SEQ ID NO: 32568 - protein, 39 aa, Artificial Sequence
  GFR-binding peptide
  MOD_RES (1)..(2)..(36)..(38): Xaa is C or S
  MOD_RES (16)..(17)..(18)..(19)..(20): Xaa is A or G
  MOD_RES (21)..(22)..(23)..(24): Xaa is A or G or is absent
XXVPTRLSPINILYFXXXXXXXXXYGKIPDMVVESXGXR

SEQ ID NO: 32569 - protein, 42 aa, Artificial Sequence
  GFR-binding peptide
  MOD_RES (6)..(7)..(41): Xaa is C or S
  MOD_RES (21)..(22)..(23)..(24)..(25): Xaa is A or G
  MOD_RES (26)..(27)..(28)..(29): Xaa is A or G or is absent
GSAGPXXTPTKMSPINMLYFXXXXXXXXXYGKIPGMVVDRXG

SEQ ID NO: 32570 - protein, 37 aa, Artificial Sequence
  GFR-binding peptide
  MOD_RES (1)..(2)..(36): Xaa is C or S
  MOD_RES (16)..(17)..(18)..(19)..(20): Xaa is A or G
  MOD_RES (21)..(22)..(23)..(24): Xaa is A or G or is absent
XXAPTQLSPINVLYFXXXXXXXXXYGKIPNMVVRAXG

SEQ ID NO: 32571 - protein, 39 aa, Artificial Sequence
  GFR-binding peptide
  MOD_RES (3)..(4)..(38): Xaa is C or S
  MOD_RES (18)..(19)..(20)..(21)..(22): Xaa is A or G
  MOD_RES (23)..(24)..(25)..(26): Xaa is A or G or is absent
ASXXVPARLSPINILYFXXXXXXXXXYGKIPDMVVEAXG

SEQ ID NO: 32572 - protein, 37 aa, Artificial Sequence
  GFR-binding peptide
  MOD_RES (4)..(5)..(37): Xaa is C or S
PKAXXVPTELSPINMLYFDENEKVVYGKIPDMVVEGX

SEQ ID NO: 32573 - protein, 41 aa, Artificial Sequence
  GFR-binding peptide
  MOD_RES (5)..(6)..(38)..(40): Xaa is C or S
VPKPXXAPTKLSPINVLYFDDSSNVIYGKIPNMVVRSXGXH

SEQ ID NO: 32574 - protein, 39 aa, Artificial Sequence
  GFR-binding peptide
  MOD_RES (5)..(6): Xaa is C or S
  MOD_RES (20)..(21)..(22)..(23)..(24): Xaa is A or G
  MOD_RES (25)..(26)..(27)..(28): Xaa is A or G or is absent
TPPTXXVPTRLSPINILYFXXXXXXXXXYGKIPDMVVES

SEQ ID NO: 32575 - protein, 36 aa, Artificial Sequence
  GFR-binding peptide
  MOD_RES (34)..(36): Xaa is C or S
  MOD_RES (14)..(15)..(16)..(17)..(18): Xaa is A or G
  MOD_RES (19)..(20)..(21)..(22): Xaa is A or G or is absent
APTKLSPINVLYFXXXXXXXXXYGKIPNMVVRSXGX

SEQ ID NO: 32576 - protein, 37 aa, Artificial Sequence
  GFR-binding peptide
  MOD_RES (2)..(3)..(35)..(37): Xaa is C or S
AXXVPTELSPINMLYFDENEKVVYGKIPDMVVEGXGX

SEQ ID NO: 32577 - protein, 33 aa, Artificial Sequence
  GFR-binding peptide
  MOD_RES (1)..(32): Xaa is C or S
XAPVKTSPINMLYFDNGRVLLYGKIPMIVEEXG

SEQ ID NO: 32578 - protein, 36 aa, Artificial Sequence
  GFR-binding peptide
  MOD_RES (1)..(2)..(35): Xaa is C or S
  MOD_RES (16)..(17)..(18)..(19)..(20): Xaa is A or G
  MOD_RES (21)..(22)..(23)..(24): Xaa is A or G or is absent
XXAPVKTSPINMLYFXXXXXXXXXYGKIPMIVEEXG

SEQ ID NO: 32579 - protein, 34 aa, Artificial Sequence
  GFR-binding peptide
  MOD_RES (34)..(34): Xaa is C or S
  MOD_RES (14)..(15)..(16)..(17)..(18): Xaa is A or G
  MOD_RES (19)..(20)..(21)..(22): Xaa is A or G or is absent
VPTRLSPINILYFXXXXXXXXXYGKIPDMVVESX

SEQ ID NO: 32580 - protein, 35 aa, Artificial Sequence
  GFR-binding peptide
  MOD_RES (1)..(2)..(34): Xaa is C or S
XXAPTKLSPINVLYFDSSNNVIYGKIPNMVVKAXG

SEQ ID NO: 32581 - protein, 41 aa, Artificial Sequence
  GFR-binding peptide
  MOD_RES (3)..(4)..(38)..(40): Xaa is C or S
  MOD_RES (18)..(19)..(20)..(21)..(22): Xaa is A or G
  MOD_RES (23)..(24)..(25)..(26): Xaa is A or G or is absent
KPXXAPTQLSPINVLYFXXXXXXXXXYGKIPNMVVRAXGXH

SEQ ID NO: 32582 - protein, 43 aa, Artificial Sequence
  GFR-binding peptide
  MOD_RES (6)..(7)..(41)..(43): Xaa is C or S
  MOD_RES (21)..(22)..(23)..(24)..(25): Xaa is A or G
  MOD_RES (26)..(27)..(28)..(29): Xaa is A or G or is absent
AAPASXXVPARLSPINILYFXXXXXXXXXYGKIPDMVVEAXGX

SEQ ID NO: 32583 - protein, 36 aa, Artificial Sequence
  GFR-binding peptide
  MOD_RES (4)..(36): Xaa is C or S
KPTXAPTKLSPINVLYFDDSSNVIYGKIPNMVVRSX

SEQ ID NO: 32584 - protein, 35 aa, Artificial Sequence
  GFR-binding peptide
  MOD_RES (2)..(3): Xaa is C or S
  MOD_RES (17)..(18)..(19)..(20)..(21): Xaa is A or G
  MOD_RES (22)..(23)..(24)..(25): Xaa is A or G or is absent
PXXAPTKLSPINVLYFXXXXXXXXXYGKIPNMVVR

SEQ ID NO: 32585 - protein, 36 aa, Artificial Sequence
  GFR-binding peptide
  MOD_RES (1)..(35): Xaa is C or S
  MOD_RES (15)..(16)..(17)..(18)..(19): Xaa is A or G
  MOD_RES (20)..(21)..(22)..(23): Xaa is A or G or is absent
XVPTRLSPINILYFXXXXXXXXXYGKIPDMVVESXG

SEQ ID NO: 32586 - protein, 35 aa, Artificial Sequence
  GFR-binding peptide
  MOD_RES (1)..(2)..(35): Xaa is C or S
  MOD_RES (16)..(17)..(18)..(19)..(20): Xaa is A or G
  MOD_RES (21)..(22)..(23)..(24): Xaa is A or G or is absent
XXAPVKTSPINMLYFXXXXXXXXXYGKIPMIVEEX

SEQ ID NO: 32587 - protein, 32 aa, Artificial Sequence
  GFR-binding peptide
  MOD_RES (14)..(15)..(16)..(17)..(18): Xaa is A or G
  MOD_RES (19)..(20)..(21)..(22): Xaa is A or G or is absent
VPTRLSPINILYFXXXXXXXXXYGKIPDMVVE

SEQ ID NO: 32588 - protein, 32 aa, Artificial Sequence
  GFR-binding peptide
  MOD_RES (1)..(2): Xaa is C or S
XXAPVKTSPINMLYFDNGRVLLYGKIPMIVEE

SEQ ID NO: 32589 - protein, 40 aa, Artificial Sequence
  GFR-binding peptide
  MOD_RES (4)..(5)..(40): Xaa is C or S
  MOD_RES (19)..(20)..(21)..(22)..(23): Xaa is A or G
  MOD_RES (24)..(25)..(26)..(27): Xaa is A or G or is absent
GKAXXVPTKLSPINVLYFXXXXXXXXXYGKIPEGMSVAEX

SEQ ID NO: 32590 - protein, 32 aa, Artificial Sequence
  GFR-binding peptide
  MOD_RES (14)..(15)..(16)..(17)..(18): Xaa is A or G
  MOD_RES (19)..(20)..(21)..(22): Xaa is A or G or is absent
VPARLSPINILYFXXXXXXXXXYGKIPDMVVE

SEQ ID NO: 32591 - protein, 36 aa, Artificial Sequence
  GFR-binding peptide
  MOD_RES (1)..(33)..(35): Xaa is C or S
XVPTELSPINMLYFDEYDKVVYGKIPEMVVEGXGXR

SEQ ID NO: 32592 - protein, 38 aa, Artificial Sequence
  GFR-binding peptide
  MOD_RES (4)..(5): Xaa is C or S
  MOD_RES (19)..(20)..(21)..(22)..(23): Xaa is A or G
  MOD_RES (24)..(25)..(26)..(27): Xaa is A or G or is absent
AGPXXTPTKMSPINMLYFXXXXXXXXXYGKIPGMVVDR

SEQ ID NO: 32593 - protein, 42 aa, Artificial Sequence
  GFR-binding peptide
  MOD_RES (5)..(6)..(40)..(42): Xaa is C or S
  MOD_RES (20)..(21)..(22)..(23)..(24): Xaa is A or G
  MOD_RES (25)..(26)..(27)..(28): Xaa is A or G or is absent
ASKAXXVPTKLSPINILYFXXXXXXXXXYGKIPGMAVSEXGX

SEQ ID NO: 32594 - protein, 39 aa, Artificial Sequence
  GFR-binding peptide
  MOD_RES (5)..(6)..(39): Xaa is C or S
  MOD_RES (20)..(21)..(22)..(23)..(24): Xaa is A or G
  MOD_RES (25)..(26)..(27)..(28): Xaa is A or G or is absent
VPSTXXAPVKTSPINMLYFXXXXXXXXXYGKIPMIVEEX

SEQ ID NO: 32595 - protein, 43 aa, Artificial Sequence
  GFR-binding peptide
  MOD_RES (6)..(7)..(41)..(43): Xaa is C or S
  MOD_RES (21)..(22)..(23)..(24)..(25): Xaa is A or G
  MOD_RES (26)..(27)..(28)..(29): Xaa is A or G or is absent
SIPKAXXVPTELSPINMLYFXXXXXXXXXYGKIPEMVVEGXGX

SEQ ID NO: 32596 - protein, 43 aa, Artificial Sequence
  GFR-binding peptide
  MOD_RES (5)..(6)..(40)..(42): Xaa is C or S
  MOD_RES (20)..(21)..(22)..(23)..(24): Xaa is A or G
  MOD_RES (25)..(26)..(27)..(28): Xaa is A or G or is absent
APASXXVPARLSPINILYFXXXXXXXXXYGKIPDMVVEAXGXR

SEQ ID NO: 32597 - protein, 42 aa, Artificial Sequence
  GFR-binding peptide
  MOD_RES (6)..(7)..(39)..(41): Xaa is C or S
AAPASXXVPARLSPINILYFDAANNVVYGKIPDMVVEAXGXR

SEQ ID NO: 32598 - protein, 35 aa, Artificial Sequence
  GFR-binding peptide
  MOD_RES (1)..(2): Xaa is C or S
  MOD_RES (16)..(17)..(18)..(19)..(20): Xaa is A or G
  MOD_RES (21)..(22)..(23)..(24): Xaa is A or G or is absent
XXVPTRLSPINILYFXXXXXXXXXYGKIPDMVVES

SEQ ID NO: 32599 - protein, 37 aa, Artificial Sequence
  GFR-binding peptide
  MOD_RES (1)..(35)..(37): Xaa is C or S
  MOD_RES (15)..(16)..(17)..(18)..(19): Xaa is A or G
  MOD_RES (20)..(21)..(22)..(23): Xaa is A or G or is absent
XAPTKLSPINVLYFXXXXXXXXXYGKIPNMVVRSXGX

SEQ ID NO: 32600 - protein, 33 aa, Artificial Sequence
  GFR-binding peptide
  MOD_RES (1)..(1): Xaa is C or S
  MOD_RES (15)..(16)..(17)..(18)..(19): Xaa is A or G
  MOD_RES (20)..(21)..(22)..(23): Xaa is A or G or is absent
XAPVKTSPINMLYFXXXXXXXXXYGKIPMIVEE

SEQ ID NO: 32601 - protein, 37 aa, Artificial Sequence
  GFR-binding peptide
  MOD_RES (6)..(7): Xaa is C or S
HVPKPXXAPTKLSPINVLYFDDSSNVIYGKIPNMVVR

SEQ ID NO: 32602 - protein, 41 aa, Artificial Sequence
  GFR-binding peptide
  MOD_RES (6)..(40): Xaa is C or S
  MOD_RES (20)..(21)..(22)..(23)..(24): Xaa is A or G
  MOD_RES (25)..(26)..(27)..(28): Xaa is A or G or is absent
VTKPTXAPTKLSPINVLYFXXXXXXXXXYGKIPNMVVRSXG

SEQ ID NO: 32603 - protein, 37 aa, Artificial Sequence
  GFR-binding peptide
  MOD_RES (1)..(34)..(36): Xaa is C or S
XVPTKLSPINVLYFDDMGVPTYGKIPEGMSVAEXGXR

SEQ ID NO: 32604 - protein, 40 aa, Artificial Sequence
  GFR-binding peptide
  MOD_RES (3)..(4)..(38)..(40): Xaa is C or S
  MOD_RES (18)..(19)..(20)..(21)..(22): Xaa is A or G
  MOD_RES (23)..(24)..(25)..(26): Xaa is A or G or is absent
KPXXAPTKLSPINVLYFXXXXXXXXXYGKIPNMVVRSXGX

SEQ ID NO: 32605 - protein, 38 aa, Artificial Sequence
  GFR-binding peptide
  MOD_RES (4)..(5)..(37): Xaa is C or S
PKPXXAPTQLSPINVLYFDDSSNVIYGKIPNMVVRAXG

SEQ ID NO: 32606 - protein, 33 aa, Artificial Sequence
  GFR-binding peptide
  MOD_RES (2)..(3): Xaa is C or S
AXXVPTELSPINMLYFDENEKVVYGKIPDMVVE

SEQ ID NO: 32607 - protein, 36 aa, Artificial Sequence
  GFR-binding peptide
  MOD_RES (3)..(4): Xaa is C or S
  MOD_RES (18)..(19)..(20)..(21)..(22): Xaa is A or G
  MOD_RES (23)..(24)..(25)..(26): Xaa is A or G or is absent
PTXXVPTRLSPINILYFXXXXXXXXXYGKIPDMVVE

SEQ ID NO: 32608 - protein, 39 aa, Artificial Sequence
  GFR-binding peptide
  MOD_RES (3)..(4)..(38): Xaa is C or S
  MOD_RES (18)..(19)..(20)..(21)..(22): Xaa is A or G
  MOD_RES (23)..(24)..(25)..(26): Xaa is A or G or is absent
KAXXVPTELSPINMLYFXXXXXXXXXYGKIPEMVVEGXG

SEQ ID NO: 32609 - protein, 38 aa, Artificial Sequence
  GFR-binding peptide
  MOD_RES (4)..(38): Xaa is C or S
  MOD_RES (18)..(19)..(20)..(21)..(22): Xaa is A or G
  MOD_RES (23)..(24)..(25)..(26): Xaa is A or G or is absent
KPTXAPTKLSPINVLYFXXXXXXXXXYGKIPNMVVRSX

SEQ ID NO: 32610 - protein, 38 aa, Artificial Sequence
  GFR-binding peptide
  MOD_RES (3)..(35)..(37): Xaa is C or S
PTXAPTKLSPINVLYFDDSSNVIYGKIPNMVVRSXGXH

SEQ ID NO: 32611 - protein, 42 aa, Artificial Sequence
  GFR-binding peptide
  MOD_RES (6)..(7)..(41): Xaa is C or S
  MOD_RES (21)..(22)..(23)..(24)..(25): Xaa is A or G
  MOD_RES (26)..(27)..(28)..(29): Xaa is A or G or is absent
HVPKPXXAPTKLSPINVLYFXXXXXXXXXYGKIPNMVVRSXG

SEQ ID NO: 32612 - protein, 41 aa, Artificial Sequence
  GFR-binding peptide
  MOD_RES (5)..(39)..(41): Xaa is C or S
  MOD_RES (19)..(20)..(21)..(22)..(23): Xaa is A or G
  MOD_RES (24)..(25)..(26)..(27): Xaa is A or G or is absent
TKPTXAPTKLSPINVLYFXXXXXXXXXYGKIPNMVVRSXGX

SEQ ID NO: 32613 - protein, 40 aa, Artificial Sequence
  GFR-binding peptide
  MOD_RES (6)..(7)..(39): Xaa is C or S
KIPKAXXVPTELSPINMLYFDENEKVVYGKIPDMVVEGXG

SEQ ID NO: 32614 - protein, 37 aa, Artificial Sequence
  GFR-binding peptide
  MOD_RES (2)..(3)..(34)..(36): Xaa is C or S
TXXAPVKTSPINMLYFDNGRVLLYGKIPMIVEEXGXL

SEQ ID NO: 32615 - protein, 39 aa, Artificial Sequence
  GFR-binding peptide
  MOD_RES (3)..(4)..(36)..(38): Xaa is C or S
KAXXVPTELSPINMLYFDEYDKVVYGKIPEMVVEGXGXR

SEQ ID NO: 32616 - protein, 40 aa, Artificial Sequence
  GFR-binding peptide
  MOD_RES (1)..(2)..(37)..(39): Xaa is C or S
  MOD_RES (16)..(17)..(18)..(19)..(20): Xaa is A or G
  MOD_RES (21)..(22)..(23)..(24): Xaa is A or G or is absent
XXVPTKLSPINVLYFXXXXXXXXXYGKIPEGMSVAEXGXR

SEQ ID NO: 32617 - protein, 43 aa, Artificial Sequence
  GFR-binding peptide
  MOD_RES (6)..(40)..(42): Xaa is C or S
  MOD_RES (20)..(21)..(22)..(23)..(24): Xaa is A or G
  MOD_RES (25)..(26)..(27)..(28): Xaa is A or G or is absent
VTKPTXAPTKLSPINVLYFXXXXXXXXXYGKIPNMVVRSXGXH

SEQ ID NO: 32618 - protein, 33 aa, Artificial Sequence
  GFR-binding peptide
  MOD_RES (1)..(33): Xaa is C or S
XAPTKLSPINVLYFDSSNNVIYGKIPNMVVKAX

SEQ ID NO: 32619 - protein, 33 aa, Artificial Sequence
  GFR-binding peptide
  MOD_RES (1)..(1): Xaa is C or S
  MOD_RES (15)..(16)..(17)..(18)..(19): Xaa is A or G
  MOD_RES (20)..(21)..(22)..(23): Xaa is A or G or is absent
XAPTKLSPINVLYFXXXXXXXXXYGKIPNMVVK

SEQ ID NO: 32620 - protein, 36 aa, Artificial Sequence
  GFR-binding peptide
  MOD_RES (2)..(3)..(35): Xaa is C or S
AXXVPTELSPINMLYFDENEKVVYGKIPDMVVEGXG

SEQ ID NO: 32621 - protein, 38 aa, Artificial Sequence
  GFR-binding peptide
  MOD_RES (3)..(37): Xaa is C or S
  MOD_RES (17)..(18)..(19)..(20)..(21): Xaa is A or G
  MOD_RES (22)..(23)..(24)..(25): Xaa is A or G or is absent
PTXAPTKLSPINVLYFXXXXXXXXXYGKIPNMVVRSXG

SEQ ID NO: 32622 - protein, 37 aa, Artificial Sequence
  GFR-binding peptide
  MOD_RES (4)..(5): Xaa is C or S
GKAXXVPTKLSPINVLYFDDMGVPTYGKIPEGMSVAE

SEQ ID NO: 32623 - protein, 33 aa, Artificial Sequence
  GFR-binding peptide
  MOD_RES (1)..(1): Xaa is C or S
  MOD_RES (15)..(16)..(17)..(18)..(19): Xaa is A or G
  MOD_RES (20)..(21)..(22)..(23): Xaa is A or G or is absent
XAPTKLSPINVLYFXXXXXXXXXYGKIPNMVVR

SEQ ID NO: 32624 - protein, 34 aa, Artificial Sequence
  GFR-binding peptide
  MOD_RES (1)..(1): Xaa is C or S
  MOD_RES (15)..(16)..(17)..(18)..(19): Xaa is A or G
  MOD_RES (20)..(21)..(22)..(23): Xaa is A or G or is absent
XAPTKLSPINVLYFXXXXXXXXXYGKIPNMVVKA

SEQ ID NO: 32625 - protein, 38 aa, Artificial Sequence
  GFR-binding peptide
  MOD_RES (2)..(3)..(37): Xaa is C or S
  MOD_RES (17)..(18)..(19)..(20)..(21): Xaa is A or G
  MOD_RES (22)..(23)..(24)..(25): Xaa is A or G or is absent
AXXVPTELSPINMLYFXXXXXXXXXYGKIPDMVVEGXG

SEQ ID NO: 32626 - protein, 41 aa, Artificial Sequence
  GFR-binding peptide
  MOD_RES (5)..(6)..(40): Xaa is C or S
  MOD_RES (20)..(21)..(22)..(23)..(24): Xaa is A or G
  MOD_RES (25)..(26)..(27)..(28): Xaa is A or G or is absent
IPKAXXVPTELSPINMLYFXXXXXXXXXYGKIPDMVVEGXG

SEQ ID NO: 32627 - protein, 37 aa, Artificial Sequence
  GFR-binding peptide
  MOD_RES (3)..(4): Xaa is C or S
  MOD_RES (18)..(19)..(20)..(21)..(22): Xaa is A or G
  MOD_RES (23)..(24)..(25)..(26): Xaa is A or G or is absent
KAXXVPTELSPINMLYFXXXXXXXXXYGKIPDMVVEG

SEQ ID NO: 32628 - protein, 37 aa, Artificial Sequence
  GFR-binding peptide
  MOD_RES (2)..(3)..(37): Xaa is C or S
  MOD_RES (17)..(18)..(19)..(20)..(21): Xaa is A or G
  MOD_RES (22)..(23)..(24)..(25): Xaa is A or G or is absent
AXXVPTELSPINMLYFXXXXXXXXXYGKIPEMVVEGX

SEQ ID NO: 32629 - protein, 38 aa, Artificial Sequence
  GFR-binding peptide
  MOD_RES (5)..(6)..(38): Xaa is C or S
APASXXVPARLSPINILYFDAANNVVYGKIPDMVVEAX

SEQ ID NO: 32630 - protein, 38 aa, Artificial Sequence
  GFR-binding peptide
  MOD_RES (1)..(35)..(37): Xaa is C or S
  MOD_RES (15)..(16)..(17)..(18)..(19): Xaa is A or G
  MOD_RES (20)..(21)..(22)..(23): Xaa is A or G or is absent
XAPTKLSPINVLYFXXXXXXXXXYGKIPNMVVKAXGXH

SEQ ID NO: 32631 - protein, 42 aa, Artificial Sequence
  GFR-binding peptide
  MOD_RES (5)..(6)..(40)..(42): Xaa is C or S
  MOD_RES (20)..(21)..(22)..(23)..(24): Xaa is A or G
  MOD_RES (25)..(26)..(27)..(28): Xaa is A or G or is absent
VPKPXXAPTQLSPINVLYFXXXXXXXXXYGKIPNMVVRAXGX

SEQ ID NO: 32632 - protein, 36 aa, Artificial Sequence
  GFR-binding peptide
  MOD_RES (1)..(35): Xaa is C or S
  MOD_RES (15)..(16)..(17)..(18)..(19): Xaa is A or G
  MOD_RES (20)..(21)..(22)..(23): Xaa is A or G or is absent
XAPTKLSPINVLYFXXXXXXXXXYGKIPNMVVKAXG

SEQ ID NO: 32633 - protein, 30 aa, Artificial Sequence
  GFR-binding peptide
APTQLSPINVLYFDDSSNVIYGKIPNMVVR

SEQ ID NO: 32634 - protein, 36 aa, Artificial Sequence
  GFR-binding peptide
  MOD_RES (1)..(2)..(33)..(35): Xaa is C or S
XXAPVKTSPINMLYFDNGRVLLYGKIPMIVEEXGXL

SEQ ID NO: 32635 - protein, 37 aa, Artificial Sequence
  GFR-binding peptide
  MOD_RES (3)..(4)..(37): Xaa is C or S
KAXXVPTKLSPINVLYFDDMGVPTYGKIPEGMSVAEX

SEQ ID NO: 32636 - protein, 38 aa, Artificial Sequence
  GFR-binding peptide
  MOD_RES (2)..(3)..(35)..(37): Xaa is C or S
PXXAPTKLSPINVLYFDDSSNVIYGKIPNMVVRSXGXH

SEQ ID NO: 32637 - protein, 33 aa, Artificial Sequence
  GFR-binding peptide
  MOD_RES (1)..(33): Xaa is C or S
XVPTELSPINMLYFDEYDKVVYGKIPEMVVEGX

SEQ ID NO: 32638 - protein, 37 aa, Artificial Sequence
  GFR-binding peptide
  MOD_RES (5)..(5): Xaa is C or S
  MOD_RES (19)..(20)..(21)..(22)..(23): Xaa is A or G
  MOD_RES (24)..(25)..(26)..(27): Xaa is A or G or is absent
TKPTXAPTKLSPINVLYFXXXXXXXXXYGKIPNMVVR

SEQ ID NO: 32639 - protein, 35 aa, Artificial Sequence
  GFR-binding peptide
  MOD_RES (2)..(3)..(35): Xaa is C or S
PXXAPTKLSPINVLYFDDSSNVIYGKIPNMVVRSX

SEQ ID NO: 32640 - protein, 43 aa, Artificial Sequence
  GFR-binding peptide
  MOD_RES (5)..(6)..(41)..(43): Xaa is C or S
  MOD_RES (20)..(21)..(22)..(23)..(24): Xaa is A or G
  MOD_RES (25)..(26)..(27)..(28): Xaa is A or G or is absent
VGKAXXVPTKLSPINVLYFXXXXXXXXXYGKIPEGMSVAEXGX

SEQ ID NO: 32641 - protein, 34 aa, Artificial Sequence
  GFR-binding peptide
  MOD_RES (1)..(1): Xaa is C or S
  MOD_RES (15)..(16)..(17)..(18)..(19): Xaa is A or G
  MOD_RES (20)..(21)..(22)..(23): Xaa is A or G or is absent
XVPTELSPINMLYFXXXXXXXXXYGKIPDMVVEG

SEQ ID NO: 32642 - protein, 37 aa, Artificial Sequence
  GFR-binding peptide
  MOD_RES (5)..(6): Xaa is C or S
VPKAXXAPTKLSPINVLYFDSSNNVIYGKIPNMVVKA

SEQ ID NO: 32643 - protein, 39 aa, Artificial Sequence
  GFR-binding peptide
  MOD_RES (1)..(2)..(37)..(39): Xaa is C or S
  MOD_RES (16)..(17)..(18)..(19)..(20): Xaa is A or G
  MOD_RES (21)..(22)..(23)..(24): Xaa is A or G or is absent
XXVPTKLSPINVLYFXXXXXXXXXYGKIPEGMSVAEXGX

SEQ ID NO: 32644 - protein, 35 aa, Artificial Sequence
  GFR-binding peptide
  MOD_RES (1)..(34): Xaa is C or S
XVPTKLSPINVLYFDDMGVPTYGKIPEGMSVAEXG

SEQ ID NO: 32645 - protein, 38 aa, Artificial Sequence
  GFR-binding peptide
  MOD_RES (2)..(3)..(37): Xaa is C or S
  MOD_RES (17)..(18)..(19)..(20)..(21): Xaa is A or G
  MOD_RES (22)..(23)..(24)..(25): Xaa is A or G or is absent
TXXVPTRLSPINILYFXXXXXXXXXYGKIPDMVVESXG

SEQ ID NO: 32646 - protein, 43 aa, Artificial Sequence
  GFR-binding peptide
  MOD_RES (6)..(7)..(40)..(42): Xaa is C or S
KVGKAXXVPTKLSPINVLYFDDMGVPTYGKIPEGMSVAEXGXR

SEQ ID NO: 32647 - protein, 36 aa, Artificial Sequence
  GFR-binding peptide
  MOD_RES (2)..(3)..(36): Xaa is C or S
AXXVPTKLSPINVLYFDDMGVPTYGKIPEGMSVAEX

SEQ ID NO: 32648 - protein, 41 aa, Artificial Sequence
  GFR-binding peptide
  MOD_RES (6)..(7): Xaa is C or S
  MOD_RES (21)..(22)..(23)..(24)..(25): Xaa is A or G
  MOD_RES (26)..(27)..(28)..(29): Xaa is A or G or is absent
KVGKAXXVPTKLSPINVLYFXXXXXXXXXYGKIPEGMSVAE

SEQ ID NO: 32649 - protein, 39 aa, Artificial Sequence
  GFR-binding peptide
  MOD_RES (1)..(2)..(36)..(38): Xaa is C or S
  MOD_RES (16)..(17)..(18)..(19)..(20): Xaa is A or G
  MOD_RES (21)..(22)..(23)..(24): Xaa is A or G or is absent
XXAPTQLSPINVLYFXXXXXXXXXYGKIPNMVVRAXGXH

SEQ ID NO: 32650 - protein, 39 aa, Artificial Sequence
  GFR-binding peptide
  MOD_RES (2)..(3)..(37)..(39): Xaa is C or S
  MOD_RES (17)..(18)..(19)..(20)..(21): Xaa is A or G
  MOD_RES (22)..(23)..(24)..(25): Xaa is A or G or is absent
PXXTPTKMSPINMLYFXXXXXXXXXYGKIPGMVVDRXGX

SEQ ID NO: 32651 - protein, 33 aa, Artificial Sequence
  GFR-binding peptide
  MOD_RES (2)..(3): Xaa is C or S
AXXVPTELSPINMLYFDEYDKVVYGKIPEMVVE

SEQ ID NO: 32652 - protein, 34 aa, Artificial Sequence
  GFR-binding peptide
  MOD_RES (1)..(33): Xaa is C or S
XAPTQLSPINVLYFDDSSNVIYGKIPNMVVRAXG

SEQ ID NO: 32653 - protein, 36 aa, Artificial Sequence
  GFR-binding peptide
  MOD_RES (3)..(4)..(36): Xaa is C or S
KAXXVPTELSPINMLYFDEYDKVVYGKIPEMVVEGX

SEQ ID NO: 32654 - protein, 38 aa, Artificial Sequence
  GFR-binding peptide
  MOD_RES (4)..(5): Xaa is C or S
  MOD_RES (19)..(20)..(21)..(22)..(23): Xaa is A or G
  MOD_RES (24)..(25)..(26)..(27): Xaa is A or G or is absent
PKAXXVPTELSPINMLYFXXXXXXXXXYGKIPEMVVEG

SEQ ID NO: 32655 - protein, 41 aa, Artificial Sequence
  GFR-binding peptide
  MOD_RES (5)..(6)..(39)..(41): Xaa is C or S
VGKAXXVPTKLSPINVLYFDDMGVPTYGKIPEGMSVAEXGX

SEQ ID NO: 32656 - protein, 40 aa, Artificial Sequence
  GFR-binding peptide
  MOD_RES (4)..(5)..(37)..(39): Xaa is C or S
PKAXXVPTELSPINMLYFDEYDKVVYGKIPEMVVEGXGXR

SEQ ID NO: 32657 - protein, 35 aa, Artificial Sequence
  GFR-binding peptide
  MOD_RES (1)..(2)..(34): Xaa is C or S
XXVPARLSPINILYFDAANNVVYGKIPDMVVEAXG

SEQ ID NO: 32658 - protein, 41 aa, Artificial Sequence
  GFR-binding peptide
  MOD_RES (5)..(6)..(40): Xaa is C or S
  MOD_RES (20)..(21)..(22)..(23)..(24): Xaa is A or G
  MOD_RES (25)..(26)..(27)..(28): Xaa is A or G or is absent
VPKPXXAPTQLSPINVLYFXXXXXXXXXYGKIPNMVVRAXG

SEQ ID NO: 32659 - protein, 38 aa, Artificial Sequence
  GFR-binding peptide
  MOD_RES (3)..(4)..(36)..(38): Xaa is C or S
ASXXVPARLSPINILYFDAANNVVYGKIPDMVVEAXGX

SEQ ID NO: 32660 - protein, 34 aa, Artificial Sequence
  GFR-binding peptide
  MOD_RES (1)..(2): Xaa is C or S
  MOD_RES (16)..(17)..(18)..(19)..(20): Xaa is A or G
  MOD_RES (21)..(22)..(23)..(24): Xaa is A or G or is absent
XXTPTKMSPINMLYFXXXXXXXXXYGKIPGMVVD

SEQ ID NO: 32661 - protein, 40 aa, Artificial Sequence
  GFR-binding peptide
  MOD_RES (6)..(7): Xaa is C or S
  MOD_RES (21)..(22)..(23)..(24)..(25): Xaa is A or G
  MOD_RES (26)..(27)..(28)..(29): Xaa is A or G or is absent
AAPASXXVPARLSPINILYFXXXXXXXXXYGKIPDMVVEA

SEQ ID NO: 32662 - protein, 40 aa, Artificial Sequence
  GFR-binding peptide
  MOD_RES (3)..(4)..(38)..(40): Xaa is C or S
  MOD_RES (18)..(19)..(20)..(21)..(22): Xaa is A or G
  MOD_RES (23)..(24)..(25)..(26): Xaa is A or G or is absent
KAXXAPTKLSPINVLYFXXXXXXXXXYGKIPNMVVKAXGX

SEQ ID NO: 32663 - protein, 40 aa, Artificial Sequence
  GFR-binding peptide
  MOD_RES (5)..(6)..(39): Xaa is C or S
VGKAXXVPTKLSPINVLYFDDMGVPTYGKIPEGMSVAEXG

SEQ ID NO: 32664 - protein, 36 aa, Artificial Sequence
  GFR-binding peptide
  MOD_RES (3)..(4): Xaa is C or S
KAXXVPTKLSPINVLYFDDMGVPTYGKIPEGMSVAE

SEQ ID NO: 32665 - protein, 39 aa, Artificial Sequence
  GFR-binding peptide
  MOD_RES (1)..(2)..(36)..(38): Xaa is C or S
  MOD_RES (16)..(17)..(18)..(19)..(20): Xaa is A or G
  MOD_RES (21)..(22)..(23)..(24): Xaa is A or G or is absent
XXVPTELSPINMLYFXXXXXXXXXYGKIPDMVVEGXGXR

SEQ ID NO: 32666 - protein, 39 aa, Artificial Sequence
  GFR-binding peptide
  MOD_RES (5)..(37)..(39): Xaa is C or S
TKPTXAPTKLSPINVLYFDDSSNVIYGKIPNMVVRSXGX

SEQ ID NO: 32667 - protein, 38 aa, Artificial Sequence
  GFR-binding peptide
  MOD_RES (4)..(5): Xaa is C or S
  MOD_RES (19)..(20)..(21)..(22)..(23): Xaa is A or G
  MOD_RES (24)..(25)..(26)..(27): Xaa is A or G or is absent
PKPXXAPTQLSPINVLYFXXXXXXXXXYGKIPNMVVRA

SEQ ID NO: 32668 - protein, 36 aa, Artificial Sequence
  GFR-binding peptide
  MOD_RES (2)..(3): Xaa is C or S
  MOD_RES (17)..(18)..(19)..(20)..(21): Xaa is A or G
  MOD_RES (22)..(23)..(24)..(25): Xaa is A or G or is absent
AXXVPTKLSPINILYFXXXXXXXXXYGKIPGMAVSE

SEQ ID NO: 32669 - protein, 34 aa, Artificial Sequence
  GFR-binding peptide
  MOD_RES (1)..(2): Xaa is C or S
  MOD_RES (16)..(17)..(18)..(19)..(20): Xaa is A or G
  MOD_RES (21)..(22)..(23)..(24): Xaa is A or G or is absent
XXAPVKTSPINMLYFXXXXXXXXXYGKIPMIVEE

SEQ ID NO: 32670 - protein, 33 aa, Artificial Sequence
  GFR-binding peptide
  MOD_RES (2)..(3): Xaa is C or S
SXXVPARLSPINILYFDAANNVVYGKIPDMVVE

SEQ ID NO: 32671 - protein, 38 aa, Artificial Sequence
  GFR-binding peptide
  MOD_RES (1)..(36)..(38): Xaa is C or S
  MOD_RES (15)..(16)..(17)..(18)..(19): Xaa is A or G
  MOD_RES (20)..(21)..(22)..(23): Xaa is A or G or is absent
XVPTKLSPINVLYFXXXXXXXXXYGKIPEGMSVAEXGX

SEQ ID NO: 32672 - protein, 35 aa, Artificial Sequence
  GFR-binding peptide
  MOD_RES (34)..(34): Xaa is C or S
  MOD_RES (14)..(15)..(16)..(17)..(18): Xaa is A or G
  MOD_RES (19)..(20)..(21)..(22): Xaa is A or G or is absent
VPTELSPINMLYFXXXXXXXXXYGKIPEMVVEGXG

SEQ ID NO: 32673 - protein, 32 aa, Artificial Sequence
  GFR-binding peptide
  MOD_RES (1)..(1): Xaa is C or S
XVPTELSPINMLYFDEYDKVVYGKIPEMVVEG

SEQ ID NO: 32674 - protein, 34 aa, Artificial Sequence
  GFR-binding peptide
  MOD_RES (1)..(33): Xaa is C or S
XVPTKLSPINILYFDKGVVTYYGKIPGMAVSEXG

SEQ ID NO: 32675 - protein, 40 aa, Artificial Sequence
  GFR-binding peptide
  MOD_RES (3)..(4)..(37)..(39): Xaa is C or S
  MOD_RES (18)..(19)..(20)..(21)..(22): Xaa is A or G
  MOD_RES (23)..(24)..(25)..(26): Xaa is A or G or is absent
STXXAPVKTSPINMLYFXXXXXXXXXYGKIPMIVEEXGXL

SEQ ID NO: 32676 - protein, 37 aa, Artificial Sequence
  GFR-binding peptide
  MOD_RES (1)..(2)..(36): Xaa is C or S
  MOD_RES (16)..(17)..(18)..(19)..(20): Xaa is A or G
  MOD_RES (21)..(22)..(23)..(24): Xaa is A or G or is absent
XXVPARLSPINILYFXXXXXXXXXYGKIPDMVVEAXG

SEQ ID NO: 32677 - protein, 35 aa, Artificial Sequence
  GFR-binding peptide
  MOD_RES (1)..(2): Xaa is C or S
  MOD_RES (16)..(17)..(18)..(19)..(20): Xaa is A or G
  MOD_RES (21)..(22)..(23)..(24): Xaa is A or G or is absent
XXAPTQLSPINVLYFXXXXXXXXXYGKIPNMVVRA

SEQ ID NO: 32678 - protein, 34 aa, Artificial Sequence
  GFR-binding peptide
  MOD_RES (1)..(2)..(34): Xaa is C or S
XXVPTELSPINMLYFDENEKVVYGKIPDMVVEGX

SEQ ID NO: 32679 - protein, 38 aa, Artificial Sequence
  GFR-binding peptide
  MOD_RES (6)..(7): Xaa is C or S
TVPKPXXAPTQLSPINVLYFDDSSNVIYGKIPNMVVRA

SEQ ID NO: 32680 - protein, 38 aa, Artificial Sequence
  GFR-binding peptide
  MOD_RES (1)..(2)..(36)..(38): Xaa is C or S
  MOD_RES (16)..(17)..(18)..(19)..(20): Xaa is A or G
  MOD_RES (21)..(22)..(23)..(24): Xaa is A or G or is absent
XXTPTKMSPINMLYFXXXXXXXXXYGKIPGMVVDRXGX

SEQ ID NO: 32681 - protein, 34 aa, Artificial Sequence
  GFR-binding peptide
  MOD_RES (1)..(2): Xaa is C or S
  MOD_RES (16)..(17)..(18)..(19)..(20): Xaa is A or G
  MOD_RES (21)..(22)..(23)..(24): Xaa is A or G or is absent
XXAPTKLSPINVLYFXXXXXXXXXYGKIPNMVVR

SEQ ID NO: 32682 - protein, 34 aa, Artificial Sequence
  GFR-binding peptide
  MOD_RES (1)..(2): Xaa is C or S
  MOD_RES (16)..(17)..(18)..(19)..(20): Xaa is A or G
  MOD_RES (21)..(22)..(23)..(24): Xaa is A or G or is absent
XXAPTKLSPINVLYFXXXXXXXXXYGKIPNMVVK

SEQ ID NO: 32683 - protein, 36 aa, Artificial Sequence
  GFR-binding peptide
  MOD_RES (35)..(35): Xaa is C or S
  MOD_RES (14)..(15)..(16)..(17)..(18): Xaa is A or G
  MOD_RES (19)..(20)..(21)..(22): Xaa is A or G or is absent
VPTKLSPINVLYFXXXXXXXXXYGKIPEGMSVAEXG

SEQ ID NO: 32684 - protein, 38 aa, Artificial Sequence
  GFR-binding peptide
  MOD_RES (4)..(5)..(37): Xaa is C or S
PKAXXVPTELSPINMLYFDEYDKVVYGKIPEMVVEGXG

SEQ ID NO: 32685 - protein, 36 aa, Artificial Sequence
  GFR-binding peptide
  MOD_RES (1)..(35): Xaa is C or S
  MOD_RES (15)..(16)..(17)..(18)..(19): Xaa is A or G
  MOD_RES (20)..(21)..(22)..(23): Xaa is A or G or is absent
XVPTELSPINMLYFXXXXXXXXXYGKIPEMVVEGXG

SEQ ID NO: 32686 - protein, 43 aa, Artificial Sequence
  GFR-binding peptide
  MOD_RES (7)..(41)..(43): Xaa is C or S
  MOD_RES (21)..(22)..(23)..(24)..(25): Xaa is A or G
  MOD_RES (26)..(27)..(28)..(29): Xaa is A or G or is absent
HVTKPTXAPTKLSPINVLYFXXXXXXXXXYGKIPNMVVRSXGX

SEQ ID NO: 32687 - protein, 36 aa, Artificial Sequence
  GFR-binding peptide
  MOD_RES (1)..(2): Xaa is C or S
  MOD_RES (16)..(17)..(18)..(19)..(20): Xaa is A or G
  MOD_RES (21)..(22)..(23)..(24): Xaa is A or G or is absent
XXVPTKLSPINVLYFXXXXXXXXXYGKIPEGMSVAE

SEQ ID NO: 32688 - protein, 32 aa, Artificial Sequence
  GFR-binding peptide
  MOD_RES (32)..(32): Xaa is C or S
VPTELSPINMLYFDENEKVVYGKIPDMVVEGX

SEQ ID NO: 32689 - protein, 40 aa, Artificial Sequence
  GFR-binding peptide
  MOD_RES (2)..(3)..(37)..(39): Xaa is C or S
  MOD_RES (17)..(18)..(19)..(20)..(21): Xaa is A or G
  MOD_RES (22)..(23)..(24)..(25): Xaa is A or G or is absent
TXXVPTRLSPINILYFXXXXXXXXXYGKIPDMVVESXGXR

SEQ ID NO: 32690 - protein, 39 aa, Artificial Sequence
  GFR-binding peptide
  MOD_RES (6)..(7): Xaa is C or S
  MOD_RES (21)..(22)..(23)..(24)..(25): Xaa is A or G
  MOD_RES (26)..(27)..(28)..(29): Xaa is A or G or is absent
GSAGPXXTPTKMSPINMLYFXXXXXXXXXYGKIPGMVVD

SEQ ID NO: 32691 - protein, 39 aa, Artificial Sequence
  GFR-binding peptide
  MOD_RES (4)..(5)..(39): Xaa is C or S
  MOD_RES (19)..(20)..(21)..(22)..(23): Xaa is A or G
  MOD_RES (24)..(25)..(26)..(27): Xaa is A or G or is absent
PKPXXAPTKLSPINVLYFXXXXXXXXXYGKIPNMVVRSX

SEQ ID NO: 32692 - protein, 38 aa, Artificial Sequence
  GFR-binding peptide
  MOD_RES (4)..(5): Xaa is C or S
  MOD_RES (19)..(20)..(21)..(22)..(23): Xaa is A or G
  MOD_RES (24)..(25)..(26)..(27): Xaa is A or G or is absent
PASXXVPARLSPINILYFXXXXXXXXXYGKIPDMVVEA

SEQ ID NO: 32693 - protein, 38 aa, Artificial Sequence
  GFR-binding peptide
  MOD_RES (3)..(4)..(35)..(37): Xaa is C or S
STXXAPVKTSPINMLYFDNGRVLLYGKIPMIVEEXGXL

SEQ ID NO: 32694 - protein, 36 aa, Artificial Sequence
  GFR-binding peptide
  MOD_RES (3)..(4): Xaa is C or S
  MOD_RES (18)..(19)..(20)..(21)..(22): Xaa is A or G
  MOD_RES (23)..(24)..(25)..(26): Xaa is A or G or is absent
KAXXVPTKLSPINILYFXXXXXXXXXYGKIPGMAVS

SEQ ID NO: 32695 - protein, 34 aa, Artificial Sequence
  GFR-binding peptide
  MOD_RES (32)..(34): Xaa is C or S
APTKLSPINVLYFDSSNNVIYGKIPNMVVKAXGX

SEQ ID NO: 32696 - protein, 39 aa, Artificial Sequence
  GFR-binding peptide
  MOD_RES (4)..(5)..(39): Xaa is C or S
  MOD_RES (19)..(20)..(21)..(22)..(23): Xaa is A or G
  MOD_RES (24)..(25)..(26)..(27): Xaa is A or G or is absent
PKAXXVPTELSPINMLYFXXXXXXXXXYGKIPDMVVEGX

SEQ ID NO: 32697 - protein, 40 aa, Artificial Sequence
  GFR-binding peptide
  MOD_RES (5)..(6)..(38)..(40): Xaa is C or S
IPKAXXVPTELSPINMLYFDENEKVVYGKIPDMVVEGXGX

SEQ ID NO: 32698 - protein, 34 aa, Artificial Sequence
  GFR-binding peptide
  MOD_RES (1)..(2)..(34): Xaa is C or S
XXVPTELSPINMLYFDEYDKVVYGKIPEMVVEGX

SEQ ID NO: 32699 - protein, 33 aa, Artificial Sequence
  GFR-binding peptide
  MOD_RES (14)..(15)..(16)..(17)..(18): Xaa is A or G
  MOD_RES (19)..(20)..(21)..(22): Xaa is A or G or is absent
APTQLSPINVLYFXXXXXXXXXYGKIPNMVVRA

SEQ ID NO: 32700 - protein, 40 aa, Artificial Sequence
  GFR-binding peptide
  MOD_RES (2)..(3)..(37)..(39): Xaa is C or S
  MOD_RES (17)..(18)..(19)..(20)..(21): Xaa is A or G
  MOD_RES (22)..(23)..(24)..(25): Xaa is A or G or is absent
PXXAPTQLSPINVLYFXXXXXXXXXYGKIPNMVVRAXGXH

SEQ ID NO: 32701 - protein, 36 aa, Artificial Sequence
  GFR-binding peptide
  MOD_RES (34)..(36): Xaa is C or S
  MOD_RES (14)..(15)..(16)..(17)..(18): Xaa is A or G
  MOD_RES (19)..(20)..(21)..(22): Xaa is A or G or is absent
VPTRLSPINILYFXXXXXXXXXYGKIPDMVVESXGX

SEQ ID NO: 32702 - protein, 39 aa, Artificial Sequence
  GFR-binding peptide
  MOD_RES (4)..(5)..(39): Xaa is C or S
  MOD_RES (19)..(20)..(21)..(22)..(23): Xaa is A or G
  MOD_RES (24)..(25)..(26)..(27): Xaa is A or G or is absent
PPTXXVPTRLSPINILYFXXXXXXXXXYGKIPDMVVESX

SEQ ID NO: 32703 - protein, 37 aa, Artificial Sequence
  GFR-binding peptide
  MOD_RES (1)..(2)..(34)..(36): Xaa is C or S
XXVPTELSPINMLYFDEYDKVVYGKIPEMVVEGXGXR

SEQ ID NO: 32704 - protein, 39 aa, Artificial Sequence
  GFR-binding peptide
  MOD_RES (5)..(6): Xaa is C or S
  MOD_RES (20)..(21)..(22)..(23)..(24): Xaa is A or G
  MOD_RES (25)..(26)..(27)..(28): Xaa is A or G or is absent
APASXXVPARLSPINILYFXXXXXXXXXYGKIPDMVVEA

SEQ ID NO: 32705 - protein, 37 aa, Artificial Sequence
  GFR-binding peptide
  MOD_RES (1)..(2)..(34)..(36): Xaa is C or S
XXVPTRLSPINILYFDSANNVVYGKIPDMVVESXGXR

SEQ ID NO: 32706 - protein, 37 aa, Artificial Sequence
  GFR-binding peptide
  MOD_RES (3)..(4)..(36): Xaa is C or S
KAXXVPTKLSPINILYFDKGVVTYYGKIPGMAVSEXG

SEQ ID NO: 32707 - protein, 36 aa, Artificial Sequence
  GFR-binding peptide
  MOD_RES (2)..(3): Xaa is C or S
  MOD_RES (17)..(18)..(19)..(20)..(21): Xaa is A or G
  MOD_RES (22)..(23)..(24)..(25): Xaa is A or G or is absent
AXXAPTKLSPINVLYFXXXXXXXXXYGKIPNMVVKA

SEQ ID NO: 32708 - protein, 38 aa, Artificial Sequence
  GFR-binding peptide
  MOD_RES (3)..(4)..(36)..(38): Xaa is C or S
KAXXAPTKLSPINVLYFDSSNNVIYGKIPNMVVKAXGX

SEQ ID NO: 32709 - protein, 36 aa, Artificial Sequence
  GFR-binding peptide
  MOD_RES (4)..(5): Xaa is C or S
PKPXXAPTKLSPINVLYFDDSSNVIYGKIPNMVVRS

SEQ ID NO: 32710 - protein, 38 aa, Artificial Sequence
  GFR-binding peptide
  MOD_RES (2)..(3)..(38): Xaa is C or S
  MOD_RES (17)..(18)..(19)..(20)..(21): Xaa is A or G
  MOD_RES (22)..(23)..(24)..(25): Xaa is A or G or is absent
AXXVPTKLSPINVLYFXXXXXXXXXYGKIPEGMSVAEX

SEQ ID NO: 32711 - protein, 35 aa, Artificial Sequence
  GFR-binding peptide
  MOD_RES (1)..(2)..(34): Xaa is C or S
XXAPTKLSPINVLYFDDSSNVIYGKIPNMVVRSXG

SEQ ID NO: 32712 - protein, 41 aa, Artificial Sequence
  GFR-binding peptide
  MOD_RES (3)..(4)..(38)..(40): Xaa is C or S
  MOD_RES (18)..(19)..(20)..(21)..(22): Xaa is A or G
  MOD_RES (23)..(24)..(25)..(26): Xaa is A or G or is absent
KPXXAPTKLSPINVLYFXXXXXXXXXYGKIPNMVVRSXGXH

SEQ ID NO: 32713 - protein, 42 aa, Artificial Sequence
  GFR-binding peptide
  MOD_RES (5)..(39)..(41): Xaa is C or S
  MOD_RES (19)..(20)..(21)..(22)..(23): Xaa is A or G
  MOD_RES (24)..(25)..(26)..(27): Xaa is A or G or is absent
TKPTXAPTKLSPINVLYFXXXXXXXXXYGKIPNMVVRSXGXH

SEQ ID NO: 32714 - protein, 38 aa, Artificial Sequence
  GFR-binding peptide
  MOD_RES (3)..(4)..(36)..(38): Xaa is C or S
PTXXVPTRLSPINILYFDSANNVVYGKIPDMVVESXGX

SEQ ID NO: 32715 - protein, 38 aa, Artificial Sequence
  GFR-binding peptide
  MOD_RES (7)..(7): Xaa is C or S
HVTKPTXAPTKLSPINVLYFDDSSNVIYGKIPNMVVRS

SEQ ID NO: 32716 - protein, 37 aa, Artificial Sequence
  GFR-binding peptide
  MOD_RES (1)..(35)..(37): Xaa is C or S
  MOD_RES (15)..(16)..(17)..(18)..(19): Xaa is A or G
  MOD_RES (20)..(21)..(22)..(23): Xaa is A or G or is absent
XAPTQLSPINVLYFXXXXXXXXXYGKIPNMVVRAXGX

SEQ ID NO: 32717 - protein, 34 aa, Artificial Sequence
  GFR-binding peptide
  MOD_RES (32)..(34): Xaa is C or S
APTKLSPINVLYFDDSSNVIYGKIPNMVVRSXGX

SEQ ID NO: 32718 - protein, 40 aa, Artificial Sequence
  GFR-binding peptide
  MOD_RES (5)..(6)..(38)..(40): Xaa is C or S
IPKAXXVPTELSPINMLYFDEYDKVVYGKIPEMVVEGXGX

SEQ ID NO: 32719 - protein, 42 aa, Artificial Sequence
  GFR-binding peptide
  MOD_RES (6)..(7)..(41): Xaa is C or S
  MOD_RES (21)..(22)..(23)..(24)..(25): Xaa is A or G
  MOD_RES (26)..(27)..(28)..(29): Xaa is A or G or is absent
TVPKPXXAPTQLSPINVLYFXXXXXXXXXYGKIPNMVVRAXG

SEQ ID NO: 32720 - protein, 40 aa, Artificial Sequence
  GFR-binding peptide
  MOD_RES (6)..(7): Xaa is C or S
  MOD_RES (21)..(22)..(23)..(24)..(25): Xaa is A or G
  MOD_RES (26)..(27)..(28)..(29): Xaa is A or G or is absent
YVPKPXXAPTKLSPINVLYFXXXXXXXXXYGKIPNMVVRS

SEQ ID NO: 32721 - protein, 33 aa, Artificial Sequence
  GFR-binding peptide
  MOD_RES (31)..(33): Xaa is C or S
APVKTSPINMLYFDNGRVLLYGKIPMIVEEXGX

SEQ ID NO: 32722 - protein, 35 aa, Artificial Sequence
  GFR-binding peptide
  MOD_RES (1)..(35): Xaa is C or S
  MOD_RES (15)..(16)..(17)..(18)..(19): Xaa is A or G
  MOD_RES (20)..(21)..(22)..(23): Xaa is A or G or is absent
XVPTELSPINMLYFXXXXXXXXXYGKIPDMVVEGX

SEQ ID NO: 32723 - protein, 37 aa, Artificial Sequence
  GFR-binding peptide
  MOD_RES (6)..(7): Xaa is C or S
SIPKAXXVPTELSPINMLYFDEYDKVVYGKIPEMVVE

SEQ ID NO: 32724 - protein, 37 aa, Artificial Sequence
  GFR-binding peptide
  MOD_RES (5)..(6): Xaa is C or S
VPKPXXAPTKLSPINVLYFDDSSNVIYGKIPNMVVRS

SEQ ID NO: 32725 - protein, 43 aa, Artificial Sequence
  GFR-binding peptide
  MOD_RES (5)..(6)..(40)..(42): Xaa is C or S
  MOD_RES (20)..(21)..(22)..(23)..(24): Xaa is A or G
  MOD_RES (25)..(26)..(27)..(28): Xaa is A or G or is absent
VPKPXXAPTKLSPINVLYFXXXXXXXXXYGKIPNMVVRSXGXH

SEQ ID NO: 32726 - protein, 37 aa, Artificial Sequence
  GFR-binding peptide
  MOD_RES (1)..(35)..(37): Xaa is C or S
  MOD_RES (15)..(16)..(17)..(18)..(19): Xaa is A or G
  MOD_RES (20)..(21)..(22)..(23): Xaa is A or G or is absent
XVPTELSPINMLYFXXXXXXXXXYGKIPDMVVEGXGX

SEQ ID NO: 32727 - protein, 36 aa, Artificial Sequence
  GFR-binding peptide
  MOD_RES (1)..(2)..(34)..(36): Xaa is C or S
XXAPTQLSPINVLYFDDSSNVIYGKIPNMVVRAXGX

SEQ ID NO: 32728 - protein, 39 aa, Artificial Sequence
  GFR-binding peptide
  MOD_RES (1)..(36)..(38): Xaa is C or S
  MOD_RES (15)..(16)..(17)..(18)..(19): Xaa is A or G
  MOD_RES (20)..(21)..(22)..(23): Xaa is A or G or is absent
XVPTKLSPINVLYFXXXXXXXXXYGKIPEGMSVAEXGXR

SEQ ID NO: 32729 - protein, 33 aa, Artificial Sequence
  GFR-binding peptide
  MOD_RES (1)..(1): Xaa is C or S
  MOD_RES (15)..(16)..(17)..(18)..(19): Xaa is A or G
  MOD_RES (20)..(21)..(22)..(23): Xaa is A or G or is absent
XVPTKLSPINILYFXXXXXXXXXYGKIPGMAVS

SEQ ID NO: 32730 - protein, 40 aa, Artificial Sequence
  GFR-binding peptide
  MOD_RES (4)..(5)..(38)..(40): Xaa is C or S
GKAXXVPTKLSPINVLYFDDMGVPTYGKIPEGMSVAEXGX

SEQ ID NO: 32731 - protein, 37 aa, Artificial Sequence
  GFR-binding peptide
  MOD_RES (6)..(7): Xaa is C or S
STPPTXXVPTRLSPINILYFDSANNVVYGKIPDMVVE

SEQ ID NO: 32732 - protein, 35 aa, Artificial Sequence
  GFR-binding peptide
  MOD_RES (34)..(34): Xaa is C or S
  MOD_RES (14)..(15)..(16)..(17)..(18): Xaa is A or G
  MOD_RES (19)..(20)..(21)..(22): Xaa is A or G or is absent
TPTKMSPINMLYFXXXXXXXXXYGKIPGMVVDRXG

SEQ ID NO: 32733 - protein, 36 aa, Artificial Sequence
  GFR-binding peptide
  MOD_RES (3)..(4)..(36): Xaa is C or S
ASXXVPARLSPINILYFDAANNVVYGKIPDMVVEAX

SEQ ID NO: 32734 - protein, 37 aa, Artificial Sequence
  GFR-binding peptide
  MOD_RES (1)..(35)..(37): Xaa is C or S
  MOD_RES (15)..(16)..(17)..(18)..(19): Xaa is A or G
  MOD_RES (20)..(21)..(22)..(23): Xaa is A or G or is absent
XVPTKLSPINILYFXXXXXXXXXYGKIPGMAVSEXGX

SEQ ID NO: 32735 - protein, 39 aa, Artificial Sequence
  GFR-binding peptide
  MOD_RES (3)..(4)..(38): Xaa is C or S
  MOD_RES (18)..(19)..(20)..(21)..(22): Xaa is A or G
  MOD_RES (23)..(24)..(25)..(26): Xaa is A or G or is absent
GPXXTPTKMSPINMLYFXXXXXXXXXYGKIPGMVVDRXG

SEQ ID NO: 32736 - protein, 38 aa, Artificial Sequence
  GFR-binding peptide
  MOD_RES (1)..(35)..(37): Xaa is C or S
  MOD_RES (15)..(16)..(17)..(18)..(19): Xaa is A or G
  MOD_RES (20)..(21)..(22)..(23): Xaa is A or G or is absent
XVPTELSPINMLYFXXXXXXXXXYGKIPEMVVEGXGXR

SEQ ID NO: 32737 - protein, 40 aa, Artificial Sequence
  GFR-binding peptide
  MOD_RES (4)..(5)..(39): Xaa is C or S
  MOD_RES (19)..(20)..(21)..(22)..(23): Xaa is A or G
  MOD_RES (24)..(25)..(26)..(27): Xaa is A or G or is absent
PKPXXAPTQLSPINVLYFXXXXXXXXXYGKIPNMVVRAXG

SEQ ID NO: 32738 - protein, 36 aa, Artificial Sequence
  GFR-binding peptide
  MOD_RES (2)..(34)..(36): Xaa is C or S
TXAPTKLSPINVLYFDDSSNVIYGKIPNMVVRSXGX

SEQ ID NO: 32739 - protein, 34 aa, Artificial Sequence
  GFR-binding peptide
  MOD_RES (1)..(1): Xaa is C or S
  MOD_RES (15)..(16)..(17)..(18)..(19): Xaa is A or G
  MOD_RES (20)..(21)..(22)..(23): Xaa is A or G or is absent
XAPTKLSPINVLYFXXXXXXXXXYGKIPNMVVRS

SEQ ID NO: 32740 - protein, 36 aa, Artificial Sequence
  GFR-binding peptide
  MOD_RES (1)..(33)..(35): Xaa is C or S
XVPTRLSPINILYFDSANNVVYGKIPDMVVESXGXR

SEQ ID NO: 32741 - protein, 41 aa, Artificial Sequence
  GFR-binding peptide
  MOD_RES (4)..(5)..(39)..(41): Xaa is C or S
  MOD_RES (19)..(20)..(21)..(22)..(23): Xaa is A or G
  MOD_RES (24)..(25)..(26)..(27): Xaa is A or G or is absent
PPTXXVPTRLSPINILYFXXXXXXXXXYGKIPDMVVESXGX

SEQ ID NO: 32742 - protein, 37 aa, Artificial Sequence
  GFR-binding peptide
  MOD_RES (2)..(3)..(37): Xaa is C or S
  MOD_RES (17)..(18)..(19)..(20)..(21): Xaa is A or G
  MOD_RES (22)..(23)..(24)..(25): Xaa is A or G or is absent
AXXAPTKLSPINVLYFXXXXXXXXXYGKIPNMVVKAX

SEQ ID NO: 32743 - protein, 37 aa, Artificial Sequence
  GFR-binding peptide
  MOD_RES (3)..(35)..(37): Xaa is C or S
PTXAPTKLSPINVLYFDDSSNVIYGKIPNMVVRSXGX

SEQ ID NO: 32744 - protein, 39 aa, Artificial Sequence
  GFR-binding peptide
  MOD_RES (5)..(6): Xaa is C or S
  MOD_RES (20)..(21)..(22)..(23)..(24): Xaa is A or G
  MOD_RES (25)..(26)..(27)..(28): Xaa is A or G or is absent
VPKPXXAPTQLSPINVLYFXXXXXXXXXYGKIPNMVVRA

SEQ ID NO: 32745 - protein, 37 aa, Artificial Sequence
  GFR-binding peptide
  MOD_RES (4)..(5)..(37): Xaa is C or S
PASXXVPARLSPINILYFDAANNVVYGKIPDMVVEAX

SEQ ID NO: 32746 - protein, 37 aa, Artificial Sequence
  GFR-binding peptide
  MOD_RES (1)..(35)..(37): Xaa is C or S
  MOD_RES (15)..(16)..(17)..(18)..(19): Xaa is A or G
  MOD_RES (20)..(21)..(22)..(23): Xaa is A or G or is absent
XVPTELSPINMLYFXXXXXXXXXYGKIPEMVVEGXGX

SEQ ID NO: 32747 - protein, 39 aa, Artificial Sequence
  GFR-binding peptide
  MOD_RES (5)..(6)..(39): Xaa is C or S
VGKAXXVPTKLSPINVLYFDDMGVPTYGKIPEGMSVAEX

SEQ ID NO: 32748 - protein, 37 aa, Artificial Sequence
  GFR-binding peptide
  MOD_RES (4)..(5): Xaa is C or S
  MOD_RES (19)..(20)..(21)..(22)..(23): Xaa is A or G
  MOD_RES (24)..(25)..(26)..(27): Xaa is A or G or is absent
PKAXXVPTELSPINMLYFXXXXXXXXXYGKIPEMVVE

SEQ ID NO: 32749 - protein, 35 aa, Artificial Sequence
  GFR-binding peptide
  MOD_RES (1)..(35): Xaa is C or S
  MOD_RES (15)..(16)..(17)..(18)..(19): Xaa is A or G
  MOD_RES (20)..(21)..(22)..(23): Xaa is A or G or is absent
XAPTKLSPINVLYFXXXXXXXXXYGKIPNMVVRSX

SEQ ID NO: 32750 - protein, 34 aa, Artificial Sequence
  GFR-binding peptide
  MOD_RES (34)..(34): Xaa is C or S
  MOD_RES (14)..(15)..(16)..(17)..(18): Xaa is A or G
  MOD_RES (19)..(20)..(21)..(22): Xaa is A or G or is absent
VPTKLSPINILYFXXXXXXXXXYGKIPGMAVSEX

SEQ ID NO: 32751 - protein, 38 aa, Artificial Sequence
  GFR-binding peptide
  MOD_RES (2)..(3)..(35)..(37): Xaa is C or S
SXXVPARLSPINILYFDAANNVVYGKIPDMVVEAXGXR

SEQ ID NO: 32752 - protein, 38 aa, Artificial Sequence
  GFR-binding peptide
  MOD_RES (5)..(6): Xaa is C or S
  MOD_RES (20)..(21)..(22)..(23)..(24): Xaa is A or G
  MOD_RES (25)..(26)..(27)..(28): Xaa is A or G or is absent
IPKAXXVPTELSPINMLYFXXXXXXXXXYGKIPEMVVE

SEQ ID NO: 32753 - protein, 32 aa, Artificial Sequence
  GFR-binding peptide
  MOD_RES (14)..(15)..(16)..(17)..(18): Xaa is A or G
  MOD_RES (19)..(20)..(21)..(22): Xaa is A or G or is absent
APTKLSPINVLYFXXXXXXXXXYGKIPNMVVR

SEQ ID NO: 32754 - protein, 36 aa, Artificial Sequence
  GFR-binding peptide
  MOD_RES (3)..(4): Xaa is C or S
  MOD_RES (18)..(19)..(20)..(21)..(22): Xaa is A or G
  MOD_RES (23)..(24)..(25)..(26): Xaa is A or G or is absent
KAXXAPTKLSPINVLYFXXXXXXXXXYGKIPNMVVK

SEQ ID NO: 32755 - protein, 44 aa, Artificial Sequence
  GFR-binding peptide
  MOD_RES (6)..(7)..(41)..(43): Xaa is C or S
  MOD_RES (21)..(22)..(23)..(24)..(25): Xaa is A or G
  MOD_RES (26)..(27)..(28)..(29): Xaa is A or G or is absent
HVPKPXXAPTKLSPINVLYFXXXXXXXXXYGKIPNMVVRSXGXH

SEQ ID NO: 32756 - protein, 32 aa, Artificial Sequence
  GFR-binding peptide
  MOD_RES (1)..(1): Xaa is C or S
XVPTKLSPINILYFDKGVVTYYGKIPGMAVSE

SEQ ID NO: 32757 - protein, 40 aa, Artificial Sequence
  GFR-binding peptide
  MOD_RES (2)..(3)..(37)..(39): Xaa is C or S
  MOD_RES (17)..(18)..(19)..(20)..(21): Xaa is A or G
  MOD_RES (22)..(23)..(24)..(25): Xaa is A or G or is absent
AXXVPTELSPINMLYFXXXXXXXXXYGKIPDMVVEGXGXR

SEQ ID NO: 32758 - protein, 38 aa, Artificial Sequence
  GFR-binding peptide
  MOD_RES (5)..(6): Xaa is C or S
VGKAXXVPTKLSPINVLYFDDMGVPTYGKIPEGMSVAE

SEQ ID NO: 32759 - protein, 43 aa, Artificial Sequence
  GFR-binding peptide
  MOD_RES (6)..(7)..(41)..(43): Xaa is C or S
  MOD_RES (21)..(22)..(23)..(24)..(25): Xaa is A or G
  MOD_RES (26)..(27)..(28)..(29): Xaa is A or G or is absent
HVPKPXXAPTKLSPINVLYFXXXXXXXXXYGKIPNMVVRSXGX

SEQ ID NO: 32760 - protein, 32 aa, Artificial Sequence
  GFR-binding peptide
  MOD_RES (2)..(2): Xaa is C or S
TXAPTKLSPINVLYFDDSSNVIYGKIPNMVVR

SEQ ID NO: 32761 - protein, 37 aa, Artificial Sequence
  GFR-binding peptide
  MOD_RES (4)..(5): Xaa is C or S
  MOD_RES (19)..(20)..(21)..(22)..(23): Xaa is A or G
  MOD_RES (24)..(25)..(26)..(27): Xaa is A or G or is absent
PKPXXAPTKLSPINVLYFXXXXXXXXXYGKIPNMVVR

SEQ ID NO: 32762 - protein, 37 aa, Artificial Sequence
  GFR-binding peptide
  MOD_RES (1)..(2)..(34)..(36): Xaa is C or S
XXVPTELSPINMLYFDENEKVVYGKIPDMVVEGXGXR

SEQ ID NO: 32763 - protein, 37 aa, Artificial Sequence
  GFR-binding peptide
  MOD_RES (2)..(3)..(35)..(37): Xaa is C or S
PXXAPTKLSPINVLYFDDSSNVIYGKIPNMVVRSXGX

SEQ ID NO: 32764 - protein, 37 aa, Artificial Sequence
  GFR-binding peptide
  MOD_RES (2)..(3)..(35)..(37): Xaa is C or S
TXXVPTRLSPINILYFDSANNVVYGKIPDMVVESXGX

SEQ ID NO: 32765 - protein, 41 aa, Artificial Sequence
  GFR-binding peptide
  MOD_RES (5)..(6)..(38)..(40): Xaa is C or S
VPKAXXAPTKLSPINVLYFDSSNNVIYGKIPNMVVKAXGXH

SEQ ID NO: 32766 - protein, 39 aa, Artificial Sequence
  GFR-binding peptide
  MOD_RES (1)..(2)..(36)..(38): Xaa is C or S
  MOD_RES (16)..(17)..(18)..(19)..(20): Xaa is A or G
  MOD_RES (21)..(22)..(23)..(24): Xaa is A or G or is absent
XXAPTKLSPINVLYFXXXXXXXXXYGKIPNMVVRSXGXH

SEQ ID NO: 32767 - protein, 35 aa, Artificial Sequence
  GFR-binding peptide
  MOD_RES (2)..(34): Xaa is C or S
TXAPTKLSPINVLYFDDSSNVIYGKIPNMVVRSXG

SEQ ID NO: 32768 - protein, 34 aa, Artificial Sequence
  GFR-binding peptide
  MOD_RES (1)..(33): Xaa is C or S
XVPARLSPINILYFDAANNVVYGKIPDMVVEAXG

SEQ ID NO: 32769 - protein, 35 aa, Artificial Sequence
  GFR-binding peptide
  MOD_RES (4)..(5): Xaa is C or S
PPTXXVPTRLSPINILYFDSANNVVYGKIPDMVVE

SEQ ID NO: 32770 - protein, 34 aa, Artificial Sequence
  GFR-binding peptide
  MOD_RES (1)..(2)..(34): Xaa is C or S
XXAPTKLSPINVLYFDSSNNVIYGKIPNMVVKAX

SEQ ID NO: 32771 - protein, 40 aa, Artificial Sequence
  GFR-binding peptide
  MOD_RES (6)..(7)..(39): Xaa is C or S
YVPKPXXAPTKLSPINVLYFDDSSNVIYGKIPNMVVRSXG

SEQ ID NO: 32772 - protein, 36 aa, Artificial Sequence
  GFR-binding peptide
  MOD_RES (3)..(3): Xaa is C or S
  MOD_RES (17)..(18)..(19)..(20)..(21): Xaa is A or G
  MOD_RES (22)..(23)..(24)..(25): Xaa is A or G or is absent
PTXAPTKLSPINVLYFXXXXXXXXXYGKIPNMVVRS

SEQ ID NO: 32773 - protein, 39 aa, Artificial Sequence
  GFR-binding peptide
  MOD_RES (5)..(6)..(38): Xaa is C or S
ASKAXXVPTKLSPINILYFDKGVVTYYGKIPGMAVSEXG

SEQ ID NO: 32774 - protein, 37 aa, Artificial Sequence
  GFR-binding peptide
  MOD_RES (34)..(36): Xaa is C or S
  MOD_RES (14)..(15)..(16)..(17)..(18): Xaa is A or G
  MOD_RES (19)..(20)..(21)..(22): Xaa is A or G or is absent
APTKLSPINVLYFXXXXXXXXXYGKIPNMVVKAXGXH

SEQ ID NO: 32775 - protein, 38 aa, Artificial Sequence
  GFR-binding peptide
  MOD_RES (4)..(5)..(37): Xaa is C or S
PKAXXAPTKLSPINVLYFDSSNNVIYGKIPNMVVKAXG

SEQ ID NO: 32776 - protein, 32 aa, Artificial Sequence
  GFR-binding peptide
  MOD_RES (32)..(32): Xaa is C or S
VPARLSPINILYFDAANNVVYGKIPDMVVEAX

SEQ ID NO: 32777 - protein, 39 aa, Artificial Sequence
  GFR-binding peptide
  MOD_RES (2)..(3)..(38): Xaa is C or S
  MOD_RES (17)..(18)..(19)..(20)..(21): Xaa is A or G
  MOD_RES (22)..(23)..(24)..(25): Xaa is A or G or is absent
AXXVPTKLSPINVLYFXXXXXXXXXYGKIPEGMSVAEXG

SEQ ID NO: 32778 - protein, 35 aa, Artificial Sequence
  GFR-binding peptide
  MOD_RES (4)..(5): Xaa is C or S
PKAXXAPTKLSPINVLYFDSSNNVIYGKIPNMVVK

SEQ ID NO: 32779 - protein, 34 aa, Artificial Sequence
  GFR-binding peptide
  MOD_RES (33)..(33): Xaa is C or S
  MOD_RES (14)..(15)..(16)..(17)..(18): Xaa is A or G
  MOD_RES (19)..(20)..(21)..(22): Xaa is A or G or is absent
APVKTSPINMLYFXXXXXXXXXYGKIPMIVEEXG

SEQ ID NO: 32780 - protein, 34 aa, Artificial Sequence
  GFR-binding peptide
  MOD_RES (3)..(4): Xaa is C or S
KPXXAPTKLSPINVLYFDDSSNVIYGKIPNMVVR

SEQ ID NO: 32781 - protein, 39 aa, Artificial Sequence
  GFR-binding peptide
  MOD_RES (4)..(5)..(39): Xaa is C or S
  MOD_RES (19)..(20)..(21)..(22)..(23): Xaa is A or G
  MOD_RES (24)..(25)..(26)..(27): Xaa is A or G or is absent
AGPXXTPTKMSPINMLYFXXXXXXXXXYGKIPGMVVDRX

SEQ ID NO: 32782 - protein, 41 aa, Artificial Sequence
  GFR-binding peptide
  MOD_RES (6)..(7)..(39)..(41): Xaa is C or S
KIPKAXXVPTELSPINMLYFDENEKVVYGKIPDMVVEGXGX

SEQ ID NO: 32783 - protein, 37 aa, Artificial Sequence
  GFR-binding peptide
  MOD_RES (2)..(36): Xaa is C or S
  MOD_RES (16)..(17)..(18)..(19)..(20): Xaa is A or G
  MOD_RES (21)..(22)..(23)..(24): Xaa is A or G or is absent
TXAPTKLSPINVLYFXXXXXXXXXYGKIPNMVVRSXG

SEQ ID NO: 32784 - protein, 35 aa, Artificial Sequence
  GFR-binding peptide
  MOD_RES (4)..(5): Xaa is C or S
SKAXXVPTKLSPINILYFDKGVVTYYGKIPGMAVS

SEQ ID NO: 32785 - protein, 36 aa, Artificial Sequence
  GFR-binding peptide
  MOD_RES (3)..(4): Xaa is C or S
  MOD_RES (18)..(19)..(20)..(21)..(22): Xaa is A or G
  MOD_RES (23)..(24)..(25)..(26): Xaa is A or G or is absent
STXXAPVKTSPINMLYFXXXXXXXXXYGKIPMIVEE

SEQ ID NO: 32786 - protein, 39 aa, Artificial Sequence
  GFR-binding peptide
  MOD_RES (2)..(3)..(37)..(39): Xaa is C or S
  MOD_RES (17)..(18)..(19)..(20)..(21): Xaa is A or G
  MOD_RES (22)..(23)..(24)..(25): Xaa is A or G or is absent
AXXVPTELSPINMLYFXXXXXXXXXYGKIPEMVVEGXGX

SEQ ID NO: 32787 - protein, 38 aa, Artificial Sequence
  GFR-binding peptide
  MOD_RES (4)..(5)..(37): Xaa is C or S
PASXXVPARLSPINILYFDAANNVVYGKIPDMVVEAXG

SEQ ID NO: 32788 - protein, 39 aa, Artificial Sequence
  GFR-binding peptide
  MOD_RES (4)..(5)..(37)..(39): Xaa is C or S
PASXXVPARLSPINILYFDAANNVVYGKIPDMVVEAXGX

SEQ ID NO: 32789 - protein, 35 aa, Artificial Sequence
  GFR-binding peptide
  MOD_RES (34)..(34): Xaa is C or S
  MOD_RES (14)..(15)..(16)..(17)..(18): Xaa is A or G
  MOD_RES (19)..(20)..(21)..(22): Xaa is A or G or is absent
VPTRLSPINILYFXXXXXXXXXYGKIPDMVVESXG

SEQ ID NO: 32790 - protein, 40 aa, Artificial Sequence
  GFR-binding peptide
  MOD_RES (5)..(6)..(40): Xaa is C or S
  MOD_RES (20)..(21)..(22)..(23)..(24): Xaa is A or G
  MOD_RES (25)..(26)..(27)..(28): Xaa is A or G or is absent
VPKPXXAPTKLSPINVLYFXXXXXXXXXYGKIPNMVVRSX

SEQ ID NO: 32791 - protein, 37 aa, Artificial Sequence
  GFR-binding peptide
  MOD_RES (3)..(37): Xaa is C or S
  MOD_RES (17)..(18)..(19)..(20)..(21): Xaa is A or G
  MOD_RES (22)..(23)..(24)..(25): Xaa is A or G or is absent
PTXAPTKLSPINVLYFXXXXXXXXXYGKIPNMVVRSX

SEQ ID NO: 32792 - protein, 35 aa, Artificial Sequence
  GFR-binding peptide
  MOD_RES (34)..(34): Xaa is C or S
  MOD_RES (14)..(15)..(16)..(17)..(18): Xaa is A or G
  MOD_RES (19)..(20)..(21)..(22): Xaa is A or G or is absent
APTKLSPINVLYFXXXXXXXXXYGKIPNMVVRSXG

SEQ ID NO: 32793 - protein, 38 aa, Artificial Sequence
  GFR-binding peptide
  MOD_RES (5)..(6): Xaa is C or S
  MOD_RES (20)..(21)..(22)..(23)..(24): Xaa is A or G
  MOD_RES (25)..(26)..(27)..(28): Xaa is A or G or is absent
IPKAXXVPTELSPINMLYFXXXXXXXXXYGKIPDMVVE

SEQ ID NO: 32794 - protein, 32 aa, Artificial Sequence
  GFR-binding peptide
  MOD_RES (1)..(1): Xaa is C or S
XAPTKLSPINVLYFDSSNNVIYGKIPNMVVKA

SEQ ID NO: 32795 - protein, 38 aa, Artificial Sequence
  GFR-binding peptide
  MOD_RES (6)..(7): Xaa is C or S
AVPKAXXAPTKLSPINVLYFDSSNNVIYGKIPNMVVKA

SEQ ID NO: 32796 - protein, 34 aa, Artificial Sequence
  GFR-binding peptide
  MOD_RES (33)..(33): Xaa is C or S
VPTKLSPINVLYFDDMGVPTYGKIPEGMSVAEXG

SEQ ID NO: 32797 - protein, 40 aa, Artificial Sequence
  GFR-binding peptide
  MOD_RES (6)..(38)..(40): Xaa is C or S
VTKPTXAPTKLSPINVLYFDDSSNVIYGKIPNMVVRSXGX

SEQ ID NO: 32798 - protein, 37 aa, Artificial Sequence
  GFR-binding peptide
  MOD_RES (5)..(6): Xaa is C or S
VPKPXXAPTQLSPINVLYFDDSSNVIYGKIPNMVVRA

SEQ ID NO: 32799 - protein, 37 aa, Artificial Sequence
  GFR-binding peptide
  MOD_RES (6)..(7): Xaa is C or S
AVPKAXXAPTKLSPINVLYFDSSNNVIYGKIPNMVVK

SEQ ID NO: 32800 - protein, 35 aa, Artificial Sequence
  GFR-binding peptide
  MOD_RES (3)..(4): Xaa is C or S
KAXXVPTELSPINMLYFDEYDKVVYGKIPEMVVEG

SEQ ID NO: 32801 - protein, 40 aa, Artificial Sequence
  GFR-binding peptide
  MOD_RES (2)..(3)..(37)..(39): Xaa is C or S
  MOD_RES (17)..(18)..(19)..(20)..(21): Xaa is A or G
  MOD_RES (22)..(23)..(24)..(25): Xaa is A or G or is absent
SXXVPARLSPINILYFXXXXXXXXXYGKIPDMVVEAXGXR

SEQ ID NO: 32802 - protein, 36 aa, Artificial Sequence
  GFR-binding peptide
  MOD_RES (5)..(6): Xaa is C or S
VPKPXXAPTQLSPINVLYFDDSSNVIYGKIPNMVVR

SEQ ID NO: 32803 - protein, 39 aa, Artificial Sequence
  GFR-binding peptide
  MOD_RES (3)..(4)..(38): Xaa is C or S
  MOD_RES (18)..(19)..(20)..(21)..(22): Xaa is A or G
  MOD_RES (23)..(24)..(25)..(26): Xaa is A or G or is absent
PTXXVPTRLSPINILYFXXXXXXXXXYGKIPDMVVESXG

SEQ ID NO: 32804 - protein, 32 aa, Artificial Sequence
  GFR-binding peptide
  MOD_RES (14)..(15)..(16)..(17)..(18): Xaa is A or G
  MOD_RES (19)..(20)..(21)..(22): Xaa is A or G or is absent
VPTKLSPINILYFXXXXXXXXXYGKIPGMAVS

SEQ ID NO: 32805 - protein, 40 aa, Artificial Sequence
  GFR-binding peptide
  MOD_RES (2)..(3)..(37)..(39): Xaa is C or S
  MOD_RES (17)..(18)..(19)..(20)..(21): Xaa is A or G
  MOD_RES (22)..(23)..(24)..(25): Xaa is A or G or is absent
PXXAPTKLSPINVLYFXXXXXXXXXYGKIPNMVVRSXGXH

SEQ ID NO: 32806 - protein, 40 aa, Artificial Sequence
  GFR-binding peptide
  MOD_RES (4)..(5)..(39): Xaa is C or S
  MOD_RES (19)..(20)..(21)..(22)..(23): Xaa is A or G
  MOD_RES (24)..(25)..(26)..(27): Xaa is A or G or is absent
PKAXXVPTELSPINMLYFXXXXXXXXXYGKIPEMVVEGXG

SEQ ID NO: 32807 - protein, 42 aa, Artificial Sequence
  GFR-binding peptide
  MOD_RES (4)..(5)..(39)..(41): Xaa is C or S
  MOD_RES (19)..(20)..(21)..(22)..(23): Xaa is A or G
  MOD_RES (24)..(25)..(26)..(27): Xaa is A or G or is absent
SKAXXVPTKLSPINILYFXXXXXXXXXYGKIPGMAVSEXGXR

SEQ ID NO: 32808 - protein, 42 aa, Artificial Sequence
  GFR-binding peptide
  MOD_RES (7)..(39)..(41): Xaa is C or S
HVTKPTXAPTKLSPINVLYFDDSSNVIYGKIPNMVVRSXGXH

SEQ ID NO: 32809 - protein, 38 aa, Artificial Sequence
  GFR-binding peptide
  MOD_RES (1)..(35)..(37): Xaa is C or S
  MOD_RES (15)..(16)..(17)..(18)..(19): Xaa is A or G
  MOD_RES (20)..(21)..(22)..(23): Xaa is A or G or is absent
XVPTRLSPINILYFXXXXXXXXXYGKIPDMVVESXGXR

SEQ ID NO: 32810 - protein, 33 aa, Artificial Sequence
  GFR-binding peptide
  MOD_RES (1)..(2)..(33): Xaa is C or S
XXAPVKTSPINMLYFDNGRVLLYGKIPMIVEEX

SEQ ID NO: 32811 - protein, 36 aa, Artificial Sequence
  GFR-binding peptide
  MOD_RES (1)..(2)..(36): Xaa is C or S
  MOD_RES (16)..(17)..(18)..(19)..(20): Xaa is A or G
  MOD_RES (21)..(22)..(23)..(24): Xaa is A or G or is absent
XXAPTKLSPINVLYFXXXXXXXXXYGKIPNMVVKAX

SEQ ID NO: 32812 - protein, 42 aa, Artificial Sequence
  GFR-binding peptide
  MOD_RES (4)..(5)..(39)..(41): Xaa is C or S
  MOD_RES (19)..(20)..(21)..(22)..(23): Xaa is A or G
  MOD_RES (24)..(25)..(26)..(27): Xaa is A or G or is absent
PKPXXAPTKLSPINVLYFXXXXXXXXXYGKIPNMVVRSXGXH

SEQ ID NO: 32813 - protein, 39 aa, Artificial Sequence
  GFR-binding peptide
  MOD_RES (5)..(39): Xaa is C or S
  MOD_RES (19)..(20)..(21)..(22)..(23): Xaa is A or G
  MOD_RES (24)..(25)..(26)..(27): Xaa is A or G or is absent
TKPTXAPTKLSPINVLYFXXXXXXXXXYGKIPNMVVRSX

SEQ ID NO: 32814 - protein, 35 aa, Artificial Sequence
  GFR-binding peptide
  MOD_RES (32)..(34): Xaa is C or S
VPARLSPINILYFDAANNVVYGKIPDMVVEAXGXR

SEQ ID NO: 32815 - protein, 41 aa, Artificial Sequence
  GFR-binding peptide
  MOD_RES (4)..(5)..(38)..(40): Xaa is C or S
GKAXXVPTKLSPINVLYFDDMGVPTYGKIPEGMSVAEXGXR

SEQ ID NO: 32816 - protein, 32 aa, Artificial Sequence
  GFR-binding peptide
  MOD_RES (32)..(32): Xaa is C or S
APTQLSPINVLYFDDSSNVIYGKIPNMVVRAX

SEQ ID NO: 32817 - protein, 41 aa, Artificial Sequence
  GFR-binding peptide
  MOD_RES (5)..(6)..(38)..(40): Xaa is C or S
IPKAXXVPTELSPINMLYFDENEKVVYGKIPDMVVEGXGXR

SEQ ID NO: 32818 - protein, 39 aa, Artificial Sequence
  GFR-binding peptide
  MOD_RES (4)..(5)..(36)..(38): Xaa is C or S
PSTXXAPVKTSPINMLYFDNGRVLLYGKIPMIVEEXGXL

SEQ ID NO: 32819 - protein, 34 aa, Artificial Sequence
  GFR-binding peptide
  MOD_RES (34)..(34): Xaa is C or S
  MOD_RES (14)..(15)..(16)..(17)..(18): Xaa is A or G
  MOD_RES (19)..(20)..(21)..(22): Xaa is A or G or is absent
VPTELSPINMLYFXXXXXXXXXYGKIPDMVVEGX

SEQ ID NO: 32820 - protein, 38 aa, Artificial Sequence
  GFR-binding peptide
  MOD_RES (5)..(6)..(38): Xaa is C or S
VPKPXXAPTQLSPINVLYFDDSSNVIYGKIPNMVVRAX

SEQ ID NO: 32821 - protein, 38 aa, Artificial Sequence
  GFR-binding peptide
  MOD_RES (2)..(3)..(37): Xaa is C or S
  MOD_RES (17)..(18)..(19)..(20)..(21): Xaa is A or G
  MOD_RES (22)..(23)..(24)..(25): Xaa is A or G or is absent
PXXTPTKMSPINMLYFXXXXXXXXXYGKIPGMVVDRXG

SEQ ID NO: 32822 - protein, 39 aa, Artificial Sequence
  GFR-binding peptide
  MOD_RES (2)..(3)..(37)..(39): Xaa is C or S
  MOD_RES (17)..(18)..(19)..(20)..(21): Xaa is A or G
  MOD_RES (22)..(23)..(24)..(25): Xaa is A or G or is absent
AXXVPTKLSPINILYFXXXXXXXXXYGKIPGMAVSEXGX

SEQ ID NO: 32823 - protein, 35 aa, Artificial Sequence
  GFR-binding peptide
  MOD_RES (4)..(5): Xaa is C or S
PSTXXAPVKTSPINMLYFDNGRVLLYGKIPMIVEE

SEQ ID NO: 32824 - protein, 42 aa, Artificial Sequence
  GFR-binding peptide
  MOD_RES (4)..(5)..(39)..(41): Xaa is C or S
  MOD_RES (19)..(20)..(21)..(22)..(23): Xaa is A or G
  MOD_RES (24)..(25)..(26)..(27): Xaa is A or G or is absent
AGPXXTPTKMSPINMLYFXXXXXXXXXYGKIPGMVVDRXGXS

SEQ ID NO: 32825 - protein, 42 aa, Artificial Sequence
  GFR-binding peptide
  MOD_RES (3)..(4)..(39)..(41): Xaa is C or S
  MOD_RES (18)..(19)..(20)..(21)..(22): Xaa is A or G
  MOD_RES (23)..(24)..(25)..(26): Xaa is A or G or is absent
KAXXVPTKLSPINVLYFXXXXXXXXXYGKIPEGMSVAEXGXR

SEQ ID NO: 32826 - protein, 36 aa, Artificial Sequence
  GFR-binding peptide
  MOD_RES (2)..(3): Xaa is C or S
  MOD_RES (17)..(18)..(19)..(20)..(21): Xaa is A or G
  MOD_RES (22)..(23)..(24)..(25): Xaa is A or G or is absent
PXXTPTKMSPINMLYFXXXXXXXXXYGKIPGMVVDR

SEQ ID NO: 32827 - protein, 37 aa, Artificial Sequence
  GFR-binding peptide
  MOD_RES (3)..(4): Xaa is C or S
  MOD_RES (18)..(19)..(20)..(21)..(22): Xaa is A or G
  MOD_RES (23)..(24)..(25)..(26): Xaa is A or G or is absent
KPXXAPTQLSPINVLYFXXXXXXXXXYGKIPNMVVRA

SEQ ID NO: 32828 - protein, 35 aa, Artificial Sequence
  GFR-binding peptide
  MOD_RES (2)..(3)..(35): Xaa is C or S
SXXVPARLSPINILYFDAANNVVYGKIPDMVVEAX

SEQ ID NO: 32829 - protein, 38 aa, Artificial Sequence
  GFR-binding peptide
  MOD_RES (2)..(3)..(37): Xaa is C or S
  MOD_RES (17)..(18)..(19)..(20)..(21): Xaa is A or G
  MOD_RES (22)..(23)..(24)..(25): Xaa is A or G or is absent
PXXAPTKLSPINVLYFXXXXXXXXXYGKIPNMVVRSXG

SEQ ID NO: 32830 - protein, 34 aa, Artificial Sequence
  GFR-binding peptide
  MOD_RES (34)..(34): Xaa is C or S
  MOD_RES (14)..(15)..(16)..(17)..(18): Xaa is A or G
  MOD_RES (19)..(20)..(21)..(22): Xaa is A or G or is absent
APTKLSPINVLYFXXXXXXXXXYGKIPNMVVRSX

SEQ ID NO: 32831 - protein, 35 aa, Artificial Sequence
  GFR-binding peptide
  MOD_RES (2)..(3)..(35): Xaa is C or S
AXXVPTKLSPINILYFDKGVVTYYGKIPGMAVSEX

SEQ ID NO: 32832 - protein, 43 aa, Artificial Sequence
  GFR-binding peptide
  MOD_RES (6)..(7)..(41)..(43): Xaa is C or S
  MOD_RES (21)..(22)..(23)..(24)..(25): Xaa is A or G
  MOD_RES (26)..(27)..(28)..(29): Xaa is A or G or is absent
YVPKPXXAPTKLSPINVLYFXXXXXXXXXYGKIPNMVVRSXGX

SEQ ID NO: 32833 - protein, 41 aa, Artificial Sequence
  GFR-binding peptide
  MOD_RES (4)..(5)..(39)..(41): Xaa is C or S
  MOD_RES (19)..(20)..(21)..(22)..(23): Xaa is A or G
  MOD_RES (24)..(25)..(26)..(27): Xaa is A or G or is absent
PKPXXAPTQLSPINVLYFXXXXXXXXXYGKIPNMVVRAXGX

SEQ ID NO: 32834 - protein, 35 aa, Artificial Sequence
  GFR-binding peptide
  MOD_RES (1)..(34): Xaa is C or S
  MOD_RES (15)..(16)..(17)..(18)..(19): Xaa is A or G
  MOD_RES (20)..(21)..(22)..(23): Xaa is A or G or is absent
XAPVKTSPINMLYFXXXXXXXXXYGKIPMIVEEXG

SEQ ID NO: 32835 - protein, 37 aa, Artificial Sequence
  GFR-binding peptide
  MOD_RES (4)..(5)..(37): Xaa is C or S
PKPXXAPTQLSPINVLYFDDSSNVIYGKIPNMVVRAX

SEQ ID NO: 32836 - protein, 39 aa, Artificial Sequence
  GFR-binding peptide
  MOD_RES (2)..(3)..(37)..(39): Xaa is C or S
  MOD_RES (17)..(18)..(19)..(20)..(21): Xaa is A or G
  MOD_RES (22)..(23)..(24)..(25): Xaa is A or G or is absent
AXXVPTELSPINMLYFXXXXXXXXXYGKIPDMVVEGXGX

SEQ ID NO: 32837 - protein, 41 aa, Artificial Sequence
  GFR-binding peptide
  MOD_RES (4)..(5)..(39)..(41): Xaa is C or S
  MOD_RES (19)..(20)..(21)..(22)..(23): Xaa is A or G
  MOD_RES (24)..(25)..(26)..(27): Xaa is A or G or is absent
AGPXXTPTKMSPINMLYFXXXXXXXXXYGKIPGMVVDRXGX

SEQ ID NO: 32838 - protein, 34 aa, Artificial Sequence
  GFR-binding peptide
  MOD_RES (1)..(2): Xaa is C or S
XXVPTKLSPINVLYFDDMGVPTYGKIPEGMSVAE

SEQ ID NO: 32839 - protein, 35 aa, Artificial Sequence
  GFR-binding peptide
  MOD_RES (1)..(35): Xaa is C or S
  MOD_RES (15)..(16)..(17)..(18)..(19): Xaa is A or G
  MOD_RES (20)..(21)..(22)..(23): Xaa is A or G or is absent
XVPTKLSPINILYFXXXXXXXXXYGKIPGMAVSEX

SEQ ID NO: 32840 - protein, 35 aa, Artificial Sequence
  GFR-binding peptide
  MOD_RES (2)..(3)..(35): Xaa is C or S
PXXAPTQLSPINVLYFDDSSNVIYGKIPNMVVRAX

SEQ ID NO: 32841 - protein, 39 aa, Artificial Sequence
  GFR-binding peptide
  MOD_RES (2)..(36)..(38): Xaa is C or S
  MOD_RES (16)..(17)..(18)..(19)..(20): Xaa is A or G
  MOD_RES (21)..(22)..(23)..(24): Xaa is A or G or is absent
TXAPTKLSPINVLYFXXXXXXXXXYGKIPNMVVRSXGXH

SEQ ID NO: 32842 - protein, 40 aa, Artificial Sequence
  GFR-binding peptide
  MOD_RES (4)..(5)..(37)..(39): Xaa is C or S
PASXXVPARLSPINILYFDAANNVVYGKIPDMVVEAXGXR

SEQ ID NO: 32843 - protein, 36 aa, Artificial Sequence
  GFR-binding peptide
  MOD_RES (1)..(2)..(34)..(36): Xaa is C or S
XXVPARLSPINILYFDAANNVVYGKIPDMVVEAXGX

SEQ ID NO: 32844 - protein, 40 aa, Artificial Sequence
  GFR-binding peptide
  MOD_RES (4)..(5)..(37)..(39): Xaa is C or S
PKAXXAPTKLSPINVLYFDSSNNVIYGKIPNMVVKAXGXH

SEQ ID NO: 32845 - protein, 37 aa, Artificial Sequence
  GFR-binding peptide
  MOD_RES (5)..(37): Xaa is C or S
TKPTXAPTKLSPINVLYFDDSSNVIYGKIPNMVVRSX

SEQ ID NO: 32846 - protein, 41 aa, Artificial Sequence
  GFR-binding peptide
  MOD_RES (5)..(6)..(38)..(40): Xaa is C or S
APASXXVPARLSPINILYFDAANNVVYGKIPDMVVEAXGXR

SEQ ID NO: 32847 - protein, 42 aa, Artificial Sequence
  GFR-binding peptide
  MOD_RES (5)..(6)..(40)..(42): Xaa is C or S
  MOD_RES (20)..(21)..(22)..(23)..(24): Xaa is A or G
  MOD_RES (25)..(26)..(27)..(28): Xaa is A or G or is absent
APASXXVPARLSPINILYFXXXXXXXXXYGKIPDMVVEAXGX

SEQ ID NO: 32848 - protein, 35 aa, Artificial Sequence
  GFR-binding peptide
  MOD_RES (1)..(35): Xaa is C or S
  MOD_RES (15)..(16)..(17)..(18)..(19): Xaa is A or G
  MOD_RES (20)..(21)..(22)..(23): Xaa is A or G or is absent
XVPTELSPINMLYFXXXXXXXXXYGKIPEMVVEGX

SEQ ID NO: 32849 - protein, 36 aa, Artificial Sequence
  GFR-binding peptide
  MOD_RES (2)..(3)..(35): Xaa is C or S
AXXVPTELSPINMLYFDEYDKVVYGKIPEMVVEGXG

SEQ ID NO: 32850 - protein, 37 aa, Artificial Sequence
  GFR-binding peptide
  MOD_RES (34)..(36): Xaa is C or S
  MOD_RES (14)..(15)..(16)..(17)..(18): Xaa is A or G
  MOD_RES (19)..(20)..(21)..(22): Xaa is A or G or is absent
VPTRLSPINILYFXXXXXXXXXYGKIPDMVVESXGXR

SEQ ID NO: 32851 - protein, 32 aa, Artificial Sequence
  GFR-binding peptide
VPTKLSPINVLYFDDMGVPTYGKIPEGMSVAE

SEQ ID NO: 32852 - protein, 38 aa, Artificial Sequence
  GFR-binding peptide
  MOD_RES (2)..(3)..(36)..(38): Xaa is C or S
  MOD_RES (17)..(18)..(19)..(20)..(21): Xaa is A or G
  MOD_RES (22)..(23)..(24)..(25): Xaa is A or G or is absent
TXXAPVKTSPINMLYFXXXXXXXXXYGKIPMIVEEXGX

SEQ ID NO: 32853 - protein, 38 aa, Artificial Sequence
  GFR-binding peptide
  MOD_RES (3)..(4)..(38): Xaa is C or S
  MOD_RES (18)..(19)..(20)..(21)..(22): Xaa is A or G
  MOD_RES (23)..(24)..(25)..(26): Xaa is A or G or is absent
PTXXVPTRLSPINILYFXXXXXXXXXYGKIPDMVVESX

SEQ ID NO: 32854 - protein, 40 aa, Artificial Sequence
  GFR-binding peptide
  MOD_RES (4)..(5)..(38)..(40): Xaa is C or S
  MOD_RES (19)..(20)..(21)..(22)..(23): Xaa is A or G
  MOD_RES (24)..(25)..(26)..(27): Xaa is A or G or is absent
PSTXXAPVKTSPINMLYFXXXXXXXXXYGKIPMIVEEXGX

SEQ ID NO: 32855 - protein, 35 aa, Artificial Sequence
  GFR-binding peptide
  MOD_RES (1)..(2)..(34): Xaa is C or S
XXVPTKLSPINILYFDKGVVTYYGKIPGMAVSEXG

SEQ ID NO: 32856 - protein, 36 aa, Artificial Sequence
  GFR-binding peptide
  MOD_RES (5)..(6): Xaa is C or S
IPKAXXVPTELSPINMLYFDENEKVVYGKIPDMVVE

SEQ ID NO: 32857 - protein, 40 aa, Artificial Sequence
  GFR-binding peptide
  MOD_RES (7)..(39): Xaa is C or S
HVTKPTXAPTKLSPINVLYFDDSSNVIYGKIPNMVVRSXG

SEQ ID NO: 32858 - protein, 39 aa, Artificial Sequence
  GFR-binding peptide
  MOD_RES (3)..(4)..(36)..(38): Xaa is C or S
KAXXVPTELSPINMLYFDENEKVVYGKIPDMVVEGXGXR

SEQ ID NO: 32859 - protein, 35 aa, Artificial Sequence
  GFR-binding peptide
  MOD_RES (33)..(35): Xaa is C or S
VPTKLSPINVLYFDDMGVPTYGKIPEGMSVAEXGX

SEQ ID NO: 32860 - protein, 36 aa, Artificial Sequence
  GFR-binding peptide
  MOD_RES (5)..(6): Xaa is C or S
VPKPXXAPTKLSPINVLYFDDSSNVIYGKIPNMVVR

SEQ ID NO: 32861 - protein, 37 aa, Artificial Sequence
  GFR-binding peptide
  MOD_RES (3)..(4)..(35)..(37): Xaa is C or S
STXXAPVKTSPINMLYFDNGRVLLYGKIPMIVEEXGX

SEQ ID NO: 32862 - protein, 41 aa, Artificial Sequence
  GFR-binding peptide
  MOD_RES (6)..(7)..(39)..(41): Xaa is C or S
STPPTXXVPTRLSPINILYFDSANNVVYGKIPDMVVESXGX

SEQ ID NO: 32863 - protein, 36 aa, Artificial Sequence
  GFR-binding peptide
  MOD_RES (2)..(3): Xaa is C or S
  MOD_RES (17)..(18)..(19)..(20)..(21): Xaa is A or G
  MOD_RES (22)..(23)..(24)..(25): Xaa is A or G or is absent
SXXVPARLSPINILYFXXXXXXXXXYGKIPDMVVEA

SEQ ID NO: 32864 - protein, 36 aa, Artificial Sequence
  GFR-binding peptide
  MOD_RES (3)..(4): Xaa is C or S
  MOD_RES (18)..(19)..(20)..(21)..(22): Xaa is A or G
  MOD_RES (23)..(24)..(25)..(26): Xaa is A or G or is absent
KPXXAPTQLSPINVLYFXXXXXXXXXYGKIPNMVVR

SEQ ID NO: 32865 - protein, 36 aa, Artificial Sequence
  GFR-binding peptide
  MOD_RES (1)..(35): Xaa is C or S
  MOD_RES (15)..(16)..(17)..(18)..(19): Xaa is A or G
  MOD_RES (20)..(21)..(22)..(23): Xaa is A or G or is absent
XVPTKLSPINILYFXXXXXXXXXYGKIPGMAVSEXG

SEQ ID NO: 32866 - protein, 32 aa, Artificial Sequence
  GFR-binding peptide
  MOD_RES (14)..(15)..(16)..(17)..(18): Xaa is A or G
  MOD_RES (19)..(20)..(21)..(22): Xaa is A or G or is absent
APTQLSPINVLYFXXXXXXXXXYGKIPNMVVR

SEQ ID NO: 32867 - protein, 40 aa, Artificial Sequence
  GFR-binding peptide
  MOD_RES (5)..(6)..(40): Xaa is C or S
  MOD_RES (20)..(21)..(22)..(23)..(24): Xaa is A or G
  MOD_RES (25)..(26)..(27)..(28): Xaa is A or G or is absent
TPPTXXVPTRLSPINILYFXXXXXXXXXYGKIPDMVVESX

SEQ ID NO: 32868 - protein, 39 aa, Artificial Sequence
  GFR-binding peptide
  MOD_RES (5)..(6)..(38): Xaa is C or S
TPPTXXVPTRLSPINILYFDSANNVVYGKIPDMVVESXG

SEQ ID NO: 32869 - protein, 35 aa, Artificial Sequence
  GFR-binding peptide
  MOD_RES (33)..(35): Xaa is C or S
  MOD_RES (14)..(15)..(16)..(17)..(18): Xaa is A or G
  MOD_RES (19)..(20)..(21)..(22): Xaa is A or G or is absent
APVKTSPINMLYFXXXXXXXXXYGKIPMIVEEXGX

SEQ ID NO: 32870 - protein, 36 aa, Artificial Sequence
  GFR-binding peptide
  MOD_RES (5)..(6): Xaa is C or S
VPSTXXAPVKTSPINMLYFDNGRVLLYGKIPMIVEE

SEQ ID NO: 32871 - protein, 37 aa, Artificial Sequence
  GFR-binding peptide
  MOD_RES (2)..(3)..(35)..(37): Xaa is C or S
AXXAPTKLSPINVLYFDSSNNVIYGKIPNMVVKAXGX

SEQ ID NO: 32872 - protein, 40 aa, Artificial Sequence
  GFR-binding peptide
  MOD_RES (3)..(4)..(38)..(40): Xaa is C or S
  MOD_RES (18)..(19)..(20)..(21)..(22): Xaa is A or G
  MOD_RES (23)..(24)..(25)..(26): Xaa is A or G or is absent
KAXXVPTELSPINMLYFXXXXXXXXXYGKIPEMVVEGXGX

SEQ ID NO: 32873 - protein, 37 aa, Artificial Sequence
  GFR-binding peptide
  MOD_RES (1)..(34)..(36): Xaa is C or S
  MOD_RES (15)..(16)..(17)..(18)..(19): Xaa is A or G
  MOD_RES (20)..(21)..(22)..(23): Xaa is A or G or is absent
XAPVKTSPINMLYFXXXXXXXXXYGKIPMIVEEXGXL

SEQ ID NO: 32874 - protein, 41 aa, Artificial Sequence
  GFR-binding peptide
  MOD_RES (6)..(38)..(40): Xaa is C or S
VTKPTXAPTKLSPINVLYFDDSSNVIYGKIPNMVVRSXGXH

SEQ ID NO: 32875 - protein, 37 aa, Artificial Sequence
  GFR-binding peptide
  MOD_RES (34)..(36): Xaa is C or S
  MOD_RES (14)..(15)..(16)..(17)..(18): Xaa is A or G
  MOD_RES (19)..(20)..(21)..(22): Xaa is A or G or is absent
APTKLSPINVLYFXXXXXXXXXYGKIPNMVVRSXGXH

SEQ ID NO: 32876 - protein, 35 aa, Artificial Sequence
  GFR-binding peptide
  MOD_RES (1)..(2): Xaa is C or S
  MOD_RES (16)..(17)..(18)..(19)..(20): Xaa is A or G
  MOD_RES (21)..(22)..(23)..(24): Xaa is A or G or is absent
XXTPTKMSPINMLYFXXXXXXXXXYGKIPGMVVDR

SEQ ID NO: 32877 - protein, 45 aa, Artificial Sequence
  GFR-binding peptide
  MOD_RES (6)..(7)..(42)..(44): Xaa is C or S
  MOD_RES (21)..(22)..(23)..(24)..(25): Xaa is A or G
  MOD_RES (26)..(27)..(28)..(29): Xaa is A or G or is absent
KVGKAXXVPTKLSPINVLYFXXXXXXXXXYGKIPEGMSVAEXGXR

SEQ ID NO: 32878 - protein, 33 aa, Artificial Sequence
  GFR-binding peptide
  MOD_RES (1)..(2): Xaa is C or S
XXAPTKLSPINVLYFDSSNNVIYGKIPNMVVKA

SEQ ID NO: 32879 - protein, 36 aa, Artificial Sequence
  GFR-binding peptide
  MOD_RES (1)..(33)..(35): Xaa is C or S
XAPTKLSPINVLYFDDSSNVIYGKIPNMVVRSXGXH

SEQ ID NO: 32880 - protein, 39 aa, Artificial Sequence
  GFR-binding peptide
  MOD_RES (6)..(7): Xaa is C or S
  MOD_RES (21)..(22)..(23)..(24)..(25): Xaa is A or G
  MOD_RES (26)..(27)..(28)..(29): Xaa is A or G or is absent
SIPKAXXVPTELSPINMLYFXXXXXXXXXYGKIPEMVVE

SEQ ID NO: 32881 - protein, 32 aa, Artificial Sequence
  GFR-binding peptide
  MOD_RES (32)..(32): Xaa is C or S
VPTRLSPINILYFDSANNVVYGKIPDMVVESX

SEQ ID NO: 32882 - protein, 35 aa, Artificial Sequence
  GFR-binding peptide
  MOD_RES (2)..(3): Xaa is C or S
  MOD_RES (17)..(18)..(19)..(20)..(21): Xaa is A or G
  MOD_RES (22)..(23)..(24)..(25): Xaa is A or G or is absent
AXXAPTKLSPINVLYFXXXXXXXXXYGKIPNMVVK

SEQ ID NO: 32883 - protein, 39 aa, Artificial Sequence
  GFR-binding peptide
  MOD_RES (4)..(5)..(39): Xaa is C or S
  MOD_RES (19)..(20)..(21)..(22)..(23): Xaa is A or G
  MOD_RES (24)..(25)..(26)..(27): Xaa is A or G or is absent
PKPXXAPTQLSPINVLYFXXXXXXXXXYGKIPNMVVRAX

SEQ ID NO: 32884 - protein, 38 aa, Artificial Sequence
  GFR-binding peptide
  MOD_RES (5)..(6): Xaa is C or S
  MOD_RES (20)..(21)..(22)..(23)..(24): Xaa is A or G
  MOD_RES (25)..(26)..(27)..(28): Xaa is A or G or is absent
VPKPXXAPTKLSPINVLYFXXXXXXXXXYGKIPNMVVR

SEQ ID NO: 32885 - protein, 32 aa, Artificial Sequence
  GFR-binding peptide
  MOD_RES (14)..(15)..(16)..(17)..(18): Xaa is A or G
  MOD_RES (19)..(20)..(21)..(22): Xaa is A or G or is absent
VPTELSPINMLYFXXXXXXXXXYGKIPEMVVE

SEQ ID NO: 32886 - protein, 36 aa, Artificial Sequence
  GFR-binding peptide
  MOD_RES (1)..(33)..(35): Xaa is C or S
XAPTKLSPINVLYFDSSNNVIYGKIPNMVVKAXGXH

SEQ ID NO: 32887 - protein, 31 aa, Artificial Sequence
  GFR-binding peptide
  MOD_RES (1)..(1): Xaa is C or S
XAPVKTSPINMLYFDNGRVLLYGKIPMIVEE

SEQ ID NO: 32888 - protein, 41 aa, Artificial Sequence
  GFR-binding peptide
  MOD_RES (5)..(6)..(40): Xaa is C or S
  MOD_RES (20)..(21)..(22)..(23)..(24): Xaa is A or G
  MOD_RES (25)..(26)..(27)..(28): Xaa is A or G or is absent
ASKAXXVPTKLSPINILYFXXXXXXXXXYGKIPGMAVSEXG

SEQ ID NO: 32889 - protein, 34 aa, Artificial Sequence
  GFR-binding peptide
  MOD_RES (2)..(3): Xaa is C or S
AXXVPTKLSPINILYFDKGVVTYYGKIPGMAVSE

SEQ ID NO: 32890 - protein, 34 aa, Artificial Sequence
  GFR-binding peptide
  MOD_RES (32)..(34): Xaa is C or S
VPTELSPINMLYFDENEKVVYGKIPDMVVEGXGX

SEQ ID NO: 32891 - protein, 34 aa, Artificial Sequence
  GFR-binding peptide
  MOD_RES (2)..(3): Xaa is C or S
TXXVPTRLSPINILYFDSANNVVYGKIPDMVVES

SEQ ID NO: 32892 - protein, 41 aa, Artificial Sequence
  GFR-binding peptide
  MOD_RES (3)..(4)..(38)..(40): Xaa is C or S
  MOD_RES (18)..(19)..(20)..(21)..(22): Xaa is A or G
  MOD_RES (23)..(24)..(25)..(26): Xaa is A or G or is absent
KAXXAPTKLSPINVLYFXXXXXXXXXYGKIPNMVVKAXGXH

SEQ ID NO: 32893 - protein, 40 aa, Artificial Sequence
  GFR-binding peptide
  MOD_RES (6)..(7)..(39): Xaa is C or S
SIPKAXXVPTELSPINMLYFDEYDKVVYGKIPEMVVEGXG

SEQ ID NO: 32894 - protein, 40 aa, Artificial Sequence
  GFR-binding peptide
  MOD_RES (3)..(37)..(39): Xaa is C or S
  MOD_RES (17)..(18)..(19)..(20)..(21): Xaa is A or G
  MOD_RES (22)..(23)..(24)..(25): Xaa is A or G or is absent
PTXAPTKLSPINVLYFXXXXXXXXXYGKIPNMVVRSXGXH

SEQ ID NO: 32895 - protein, 33 aa, Artificial Sequence
  GFR-binding peptide
  MOD_RES (14)..(15)..(16)..(17)..(18): Xaa is A or G
  MOD_RES (19)..(20)..(21)..(22): Xaa is A or G or is absent
VPTELSPINMLYFXXXXXXXXXYGKIPDMVVEG

SEQ ID NO: 32896 - protein, 40 aa, Artificial Sequence
  GFR-binding peptide
  MOD_RES (6)..(7)..(39): Xaa is C or S
KASKAXXVPTKLSPINILYFDKGVVTYYGKIPGMAVSEXG

SEQ ID NO: 32897 - protein, 33 aa, Artificial Sequence
  GFR-binding peptide
  MOD_RES (14)..(15)..(16)..(17)..(18): Xaa is A or G
  MOD_RES (19)..(20)..(21)..(22): Xaa is A or G or is absent
APTKLSPINVLYFXXXXXXXXXYGKIPNMVVKA

SEQ ID NO: 32898 - protein, 38 aa, Artificial Sequence
  GFR-binding peptide
  MOD_RES (6)..(7): Xaa is C or S
KASKAXXVPTKLSPINILYFDKGVVTYYGKIPGMAVSE

SEQ ID NO: 32899 - protein, 36 aa, Artificial Sequence
  GFR-binding peptide
  MOD_RES (2)..(3): Xaa is C or S
  MOD_RES (17)..(18)..(19)..(20)..(21): Xaa is A or G
  MOD_RES (22)..(23)..(24)..(25): Xaa is A or G or is absent
AXXVPTELSPINMLYFXXXXXXXXXYGKIPEMVVEG

SEQ ID NO: 32900 - protein, 36 aa, Artificial Sequence
  GFR-binding peptide
  MOD_RES (34)..(36): Xaa is C or S
  MOD_RES (14)..(15)..(16)..(17)..(18): Xaa is A or G
  MOD_RES (19)..(20)..(21)..(22): Xaa is A or G or is absent
VPTELSPINMLYFXXXXXXXXXYGKIPDMVVEGXGX

SEQ ID NO: 32901 - protein, 37 aa, Artificial Sequence
  GFR-binding peptide
  MOD_RES (34)..(36): Xaa is C or S
  MOD_RES (14)..(15)..(16)..(17)..(18): Xaa is A or G
  MOD_RES (19)..(20)..(21)..(22): Xaa is A or G or is absent
VPTELSPINMLYFXXXXXXXXXYGKIPEMVVEGXGXR

SEQ ID NO: 32902 - protein, 42 aa, Artificial Sequence
  GFR-binding peptide
  MOD_RES (6)..(7)..(41): Xaa is C or S
  MOD_RES (21)..(22)..(23)..(24)..(25): Xaa is A or G
  MOD_RES (26)..(27)..(28)..(29): Xaa is A or G or is absent
YVPKPXXAPTKLSPINVLYFXXXXXXXXXYGKIPNMVVRSXG

SEQ ID NO: 32903 - protein, 38 aa, Artificial Sequence
  GFR-binding peptide
  MOD_RES (3)..(4)..(38): Xaa is C or S
  MOD_RES (18)..(19)..(20)..(21)..(22): Xaa is A or G
  MOD_RES (23)..(24)..(25)..(26): Xaa is A or G or is absent
KAXXVPTELSPINMLYFXXXXXXXXXYGKIPEMVVEGX

SEQ ID NO: 32904 - protein, 38 aa, Artificial Sequence
  GFR-binding peptide
  MOD_RES (2)..(3)..(37): Xaa is C or S
  MOD_RES (17)..(18)..(19)..(20)..(21): Xaa is A or G
  MOD_RES (22)..(23)..(24)..(25): Xaa is A or G or is absent
SXXVPARLSPINILYFXXXXXXXXXYGKIPDMVVEAXG

SEQ ID NO: 32905 - protein, 34 aa, Artificial Sequence
  GFR-binding peptide
  MOD_RES (2)..(34): Xaa is C or S
TXAPTKLSPINVLYFDDSSNVIYGKIPNMVVRSX

SEQ ID NO: 32906 - protein, 38 aa, Artificial Sequence
  GFR-binding peptide
  MOD_RES (3)..(4)..(38): Xaa is C or S
  MOD_RES (18)..(19)..(20)..(21)..(22): Xaa is A or G
  MOD_RES (23)..(24)..(25)..(26): Xaa is A or G or is absent
KAXXVPTKLSPINILYFXXXXXXXXXYGKIPGMAVSEX

SEQ ID NO: 32907 - protein, 33 aa, Artificial Sequence
  GFR-binding peptide
  MOD_RES (14)..(15)..(16)..(17)..(18): Xaa is A or G
  MOD_RES (19)..(20)..(21)..(22): Xaa is A or G or is absent
APTKLSPINVLYFXXXXXXXXXYGKIPNMVVRS

SEQ ID NO: 32908 - protein, 43 aa, Artificial Sequence
  GFR-binding peptide
  MOD_RES (4)..(5)..(40)..(42): Xaa is C or S
  MOD_RES (19)..(20)..(21)..(22)..(23): Xaa is A or G
  MOD_RES (24)..(25)..(26)..(27): Xaa is A or G or is absent
GKAXXVPTKLSPINVLYFXXXXXXXXXYGKIPEGMSVAEXGXR

SEQ ID NO: 32909 - protein, 40 aa, Artificial Sequence
  GFR-binding peptide
  MOD_RES (5)..(6)..(38)..(40): Xaa is C or S
APASXXVPARLSPINILYFDAANNVVYGKIPDMVVEAXGX

SEQ ID NO: 32910 - protein, 36 aa, Artificial Sequence
  GFR-binding peptide
  MOD_RES (1)..(2)..(34)..(36): Xaa is C or S
XXVPTKLSPINILYFDKGVVTYYGKIPGMAVSEXGX

SEQ ID NO: 32911 - protein, 36 aa, Artificial Sequence
  GFR-binding peptide
  MOD_RES (34)..(36): Xaa is C or S
  MOD_RES (14)..(15)..(16)..(17)..(18): Xaa is A or G
  MOD_RES (19)..(20)..(21)..(22): Xaa is A or G or is absent
VPARLSPINILYFXXXXXXXXXYGKIPDMVVEAXGX

SEQ ID NO: 32912 - protein, 30 aa, Artificial Sequence
  GFR-binding peptide
VPTRLSPINILYFDSANNVVYGKIPDMVVE

SEQ ID NO: 32913 - protein, 35 aa, Artificial Sequence
  GFR-binding peptide
  MOD_RES (1)..(2)..(34): Xaa is C or S
XXVPTELSPINMLYFDENEKVVYGKIPDMVVEGXG

SEQ ID NO: 32914 - protein, 38 aa, Artificial Sequence
  GFR-binding peptide
  MOD_RES (3)..(4): Xaa is C or S
  MOD_RES (18)..(19)..(20)..(21)..(22): Xaa is A or G
  MOD_RES (23)..(24)..(25)..(26): Xaa is A or G or is absent
KAXXVPTKLSPINVLYFXXXXXXXXXYGKIPEGMSVAE

SEQ ID NO: 32915 - protein, 34 aa, Artificial Sequence
  GFR-binding peptide
  MOD_RES (32)..(34): Xaa is C or S
VPARLSPINILYFDAANNVVYGKIPDMVVEAXGX

SEQ ID NO: 32916 - protein, 33 aa, Artificial Sequence
  GFR-binding peptide
  MOD_RES (32)..(32): Xaa is C or S
VPTELSPINMLYFDEYDKVVYGKIPEMVVEGXG

SEQ ID NO: 32917 - protein, 34 aa, Artificial Sequence
  GFR-binding peptide
  MOD_RES (3)..(4): Xaa is C or S
STXXAPVKTSPINMLYFDNGRVLLYGKIPMIVEE

SEQ ID NO: 32918 - protein, 40 aa, Artificial Sequence
  GFR-binding peptide
  MOD_RES (5)..(6)..(40): Xaa is C or S
  MOD_RES (20)..(21)..(22)..(23)..(24): Xaa is A or G
  MOD_RES (25)..(26)..(27)..(28): Xaa is A or G or is absent
IPKAXXVPTELSPINMLYFXXXXXXXXXYGKIPEMVVEGX

SEQ ID NO: 32919 - protein, 33 aa, Artificial Sequence
  GFR-binding peptide
  MOD_RES (14)..(15)..(16)..(17)..(18): Xaa is A or G
  MOD_RES (19)..(20)..(21)..(22): Xaa is A or G or is absent
VPTKLSPINILYFXXXXXXXXXYGKIPGMAVSE

SEQ ID NO: 32920 - protein, 37 aa, Artificial Sequence
  GFR-binding peptide
  MOD_RES (1)..(2)..(34)..(36): Xaa is C or S
XXAPTKLSPINVLYFDDSSNVIYGKIPNMVVRSXGXH

SEQ ID NO: 32921 - protein, 41 aa, Artificial Sequence
  GFR-binding peptide
  MOD_RES (6)..(7)..(39)..(41): Xaa is C or S
AAPASXXVPARLSPINILYFDAANNVVYGKIPDMVVEAXGX

SEQ ID NO: 32922 - protein, 41 aa, Artificial Sequence
  GFR-binding peptide
  MOD_RES (6)..(7)..(39)..(41): Xaa is C or S
AVPKAXXAPTKLSPINVLYFDSSNNVIYGKIPNMVVKAXGX

SEQ ID NO: 32923 - protein, 35 aa, Artificial Sequence
  GFR-binding peptide
  MOD_RES (3)..(3): Xaa is C or S
  MOD_RES (17)..(18)..(19)..(20)..(21): Xaa is A or G
  MOD_RES (22)..(23)..(24)..(25): Xaa is A or G or is absent
PTXAPTKLSPINVLYFXXXXXXXXXYGKIPNMVVR

SEQ ID NO: 32924 - protein, 38 aa, Artificial Sequence
  GFR-binding peptide
  MOD_RES (4)..(5)..(37): Xaa is C or S
PKAXXVPTELSPINMLYFDENEKVVYGKIPDMVVEGXG

SEQ ID NO: 32925 - protein, 37 aa, Artificial Sequence
  GFR-binding peptide
  MOD_RES (2)..(3)..(37): Xaa is C or S
  MOD_RES (17)..(18)..(19)..(20)..(21): Xaa is A or G
  MOD_RES (22)..(23)..(24)..(25): Xaa is A or G or is absent
SXXVPARLSPINILYFXXXXXXXXXYGKIPDMVVEAX

SEQ ID NO: 32926 - protein, 40 aa, Artificial Sequence
  GFR-binding peptide
  MOD_RES (2)..(3)..(37)..(39): Xaa is C or S
  MOD_RES (17)..(18)..(19)..(20)..(21): Xaa is A or G
  MOD_RES (22)..(23)..(24)..(25): Xaa is A or G or is absent
PXXTPTKMSPINMLYFXXXXXXXXXYGKIPGMVVDRXGXS

SEQ ID NO: 32927 - protein, 40 aa, Artificial Sequence
  GFR-binding peptide
  MOD_RES (5)..(6)..(37)..(39): Xaa is C or S
VPSTXXAPVKTSPINMLYFDNGRVLLYGKIPMIVEEXGXL

SEQ ID NO: 32928 - protein, 41 aa, Artificial Sequence
  GFR-binding peptide
  MOD_RES (4)..(5)..(39)..(41): Xaa is C or S
  MOD_RES (19)..(20)..(21)..(22)..(23): Xaa is A or G
  MOD_RES (24)..(25)..(26)..(27): Xaa is A or G or is absent
PKAXXVPTELSPINMLYFXXXXXXXXXYGKIPDMVVEGXGX

SEQ ID NO: 32929 - protein, 35 aa, Artificial Sequence
  GFR-binding peptide
  MOD_RES (1)..(2)..(34): Xaa is C or S
XXVPTRLSPINILYFDSANNVVYGKIPDMVVESXG

SEQ ID NO: 32930 - protein, 31 aa, Artificial Sequence
  GFR-binding peptide
VPTRLSPINILYFDSANNVVYGKIPDMVVES

SEQ ID NO: 32931 - protein, 35 aa, Artificial Sequence
  GFR-binding peptide
  MOD_RES (4)..(5): Xaa is C or S
PKAXXVPTELSPINMLYFDENEKVVYGKIPDMVVE

SEQ ID NO: 32932 - protein, 37 aa, Artificial Sequence
  GFR-binding peptide
  MOD_RES (1)..(2)..(34)..(36): Xaa is C or S
XXVPARLSPINILYFDAANNVVYGKIPDMVVEAXGXR

SEQ ID NO: 32933 - protein, 41 aa, Artificial Sequence
  GFR-binding peptide
  MOD_RES (5)..(6)..(40): Xaa is C or S
  MOD_RES (20)..(21)..(22)..(23)..(24): Xaa is A or G
  MOD_RES (25)..(26)..(27)..(28): Xaa is A or G or is absent
VPKAXXAPTKLSPINVLYFXXXXXXXXXYGKIPNMVVKAXG

SEQ ID NO: 32934 - protein, 36 aa, Artificial Sequence
  GFR-binding peptide
  MOD_RES (1)..(2)..(34)..(36): Xaa is C or S
XXVPTELSPINMLYFDEYDKVVYGKIPEMVVEGXGX

SEQ ID NO: 32935 - protein, 33 aa, Artificial Sequence
  GFR-binding peptide
  MOD_RES (2)..(3): Xaa is C or S
AXXAPTKLSPINVLYFDSSNNVIYGKIPNMVVK

SEQ ID NO: 32936 - protein, 43 aa, Artificial Sequence
  GFR-binding peptide
  MOD_RES (6)..(7)..(40)..(42): Xaa is C or S
  MOD_RES (21)..(22)..(23)..(24)..(25): Xaa is A or G
  MOD_RES (26)..(27)..(28)..(29): Xaa is A or G or is absent
RVPSTXXAPVKTSPINMLYFXXXXXXXXXYGKIPMIVEEXGXL

SEQ ID NO: 32937 - protein, 36 aa, Artificial Sequence
  GFR-binding peptide
  MOD_RES (1)..(34)..(36): Xaa is C or S
XVPTKLSPINVLYFDDMGVPTYGKIPEGMSVAEXGX

SEQ ID NO: 32938 - protein, 31 aa, Artificial Sequence
  GFR-binding peptide
  MOD_RES (1)..(1): Xaa is C or S
XVPTRLSPINILYFDSANNVVYGKIPDMVVE

SEQ ID NO: 32939 - protein, 37 aa, Artificial Sequence
  GFR-binding peptide
  MOD_RES (4)..(5): Xaa is C or S
  MOD_RES (19)..(20)..(21)..(22)..(23): Xaa is A or G
  MOD_RES (24)..(25)..(26)..(27): Xaa is A or G or is absent
PKAXXVPTELSPINMLYFXXXXXXXXXYGKIPDMVVE

SEQ ID NO: 32940 - protein, 41 aa, Artificial Sequence
  GFR-binding peptide
  MOD_RES (3)..(4)..(38)..(40): Xaa is C or S
  MOD_RES (18)..(19)..(20)..(21)..(22): Xaa is A or G
  MOD_RES (23)..(24)..(25)..(26): Xaa is A or G or is absent
GPXXTPTKMSPINMLYFXXXXXXXXXYGKIPGMVVDRXGXS

SEQ ID NO: 32941 - protein, 33 aa, Artificial Sequence
  GFR-binding peptide
  MOD_RES (2)..(3): Xaa is C or S
AXXVPTKLSPINILYFDKGVVTYYGKIPGMAVS

SEQ ID NO: 32942 - protein, 36 aa, Artificial Sequence
  GFR-binding peptide
  MOD_RES (1)..(33)..(35): Xaa is C or S
XVPTKLSPINILYFDKGVVTYYGKIPGMAVSEXGXR

SEQ ID NO: 32943 - protein, 36 aa, Artificial Sequence
  GFR-binding peptide
  MOD_RES (1)..(34)..(36): Xaa is C or S
  MOD_RES (15)..(16)..(17)..(18)..(19): Xaa is A or G
  MOD_RES (20)..(21)..(22)..(23): Xaa is A or G or is absent
XAPVKTSPINMLYFXXXXXXXXXYGKIPMIVEEXGX

SEQ ID NO: 32944 - protein, 32 aa, Artificial Sequence
  GFR-binding peptide
  MOD_RES (14)..(15)..(16)..(17)..(18): Xaa is A or G
  MOD_RES (19)..(20)..(21)..(22): Xaa is A or G or is absent
VPTELSPINMLYFXXXXXXXXXYGKIPDMVVE

SEQ ID NO: 32945 - protein, 38 aa, Artificial Sequence
  GFR-binding peptide
  MOD_RES (1)..(35)..(37): Xaa is C or S
  MOD_RES (15)..(16)..(17)..(18)..(19): Xaa is A or G
  MOD_RES (20)..(21)..(22)..(23): Xaa is A or G or is absent
XTPTKMSPINMLYFXXXXXXXXXYGKIPGMVVDRXGXS

SEQ ID NO: 32946 - protein, 44 aa, Artificial Sequence
  GFR-binding peptide
  MOD_RES (6)..(7)..(41)..(43): Xaa is C or S
  MOD_RES (21)..(22)..(23)..(24)..(25): Xaa is A or G
  MOD_RES (26)..(27)..(28)..(29): Xaa is A or G or is absent
AAPASXXVPARLSPINILYFXXXXXXXXXYGKIPDMVVEAXGXR

SEQ ID NO: 32947 - protein, 41 aa, Artificial Sequence
  GFR-binding peptide
  MOD_RES (6)..(7)..(41): Xaa is C or S
  MOD_RES (21)..(22)..(23)..(24)..(25): Xaa is A or G
  MOD_RES (26)..(27)..(28)..(29): Xaa is A or G or is absent
KASKAXXVPTKLSPINILYFXXXXXXXXXYGKIPGMAVSEX

SEQ ID NO: 32948 - protein, 34 aa, Artificial Sequence
  GFR-binding peptide
  MOD_RES (1)..(1): Xaa is C or S
  MOD_RES (15)..(16)..(17)..(18)..(19): Xaa is A or G
  MOD_RES (20)..(21)..(22)..(23): Xaa is A or G or is absent
XAPTQLSPINVLYFXXXXXXXXXYGKIPNMVVRA

SEQ ID NO: 32949 - protein, 36 aa, Artificial Sequence
  GFR-binding peptide
  MOD_RES (3)..(4)..(36): Xaa is C or S
KAXXVPTELSPINMLYFDENEKVVYGKIPDMVVEGX

SEQ ID NO: 32950 - protein, 37 aa, Artificial Sequence
  GFR-binding peptide
  MOD_RES (2)..(3)..(36): Xaa is C or S
  MOD_RES (17)..(18)..(19)..(20)..(21): Xaa is A or G
  MOD_RES (22)..(23)..(24)..(25): Xaa is A or G or is absent
TXXAPVKTSPINMLYFXXXXXXXXXYGKIPMIVEEXG

SEQ ID NO: 32951 - protein, 35 aa, Artificial Sequence
  GFR-binding peptide
  MOD_RES (5)..(5): Xaa is C or S
TKPTXAPTKLSPINVLYFDDSSNVIYGKIPNMVVR

SEQ ID NO: 32952 - protein, 35 aa, Artificial Sequence
  GFR-binding peptide
  MOD_RES (2)..(3): Xaa is C or S
  MOD_RES (17)..(18)..(19)..(20)..(21): Xaa is A or G
  MOD_RES (22)..(23)..(24)..(25): Xaa is A or G or is absent
PXXAPTQLSPINVLYFXXXXXXXXXYGKIPNMVVR

SEQ ID NO: 32953 - protein, 39 aa, Artificial Sequence
  GFR-binding peptide
  MOD_RES (5)..(6): Xaa is C or S
  MOD_RES (20)..(21)..(22)..(23)..(24): Xaa is A or G
  MOD_RES (25)..(26)..(27)..(28): Xaa is A or G or is absent
SAGPXXTPTKMSPINMLYFXXXXXXXXXYGKIPGMVVDR

SEQ ID NO: 32954 - protein, 35 aa, Artificial Sequence
  GFR-binding peptide
  MOD_RES (32)..(34): Xaa is C or S
APTQLSPINVLYFDDSSNVIYGKIPNMVVRAXGXH

SEQ ID NO: 32955 - protein, 38 aa, Artificial Sequence
  GFR-binding peptide
  MOD_RES (1)..(35)..(37): Xaa is C or S
  MOD_RES (15)..(16)..(17)..(18)..(19): Xaa is A or G
  MOD_RES (20)..(21)..(22)..(23): Xaa is A or G or is absent
XVPARLSPINILYFXXXXXXXXXYGKIPDMVVEAXGXR

SEQ ID NO: 32956 - protein, 36 aa, Artificial Sequence
  GFR-binding peptide
  MOD_RES (1)..(2)..(36): Xaa is C or S
  MOD_RES (16)..(17)..(18)..(19)..(20): Xaa is A or G
  MOD_RES (21)..(22)..(23)..(24): Xaa is A or G or is absent
XXVPTELSPINMLYFXXXXXXXXXYGKIPEMVVEGX

SEQ ID NO: 32957 - protein, 35 aa, Artificial Sequence
  GFR-binding peptide
  MOD_RES (2)..(3)..(35): Xaa is C or S
TXXVPTRLSPINILYFDSANNVVYGKIPDMVVESX

SEQ ID NO: 32958 - protein, 35 aa, Artificial Sequence
  GFR-binding peptide
  MOD_RES (32)..(34): Xaa is C or S
VPTKLSPINILYFDKGVVTYYGKIPGMAVSEXGXR

SEQ ID NO: 32959 - protein, 39 aa, Artificial Sequence
  GFR-binding peptide
  MOD_RES (2)..(3)..(37)..(39): Xaa is C or S
  MOD_RES (17)..(18)..(19)..(20)..(21): Xaa is A or G
  MOD_RES (22)..(23)..(24)..(25): Xaa is A or G or is absent
SXXVPARLSPINILYFXXXXXXXXXYGKIPDMVVEAXGX

SEQ ID NO: 32960 - protein, 39 aa, Artificial Sequence
  GFR-binding peptide
  MOD_RES (4)..(38): Xaa is C or S
  MOD_RES (18)..(19)..(20)..(21)..(22): Xaa is A or G
  MOD_RES (23)..(24)..(25)..(26): Xaa is A or G or is absent
KPTXAPTKLSPINVLYFXXXXXXXXXYGKIPNMVVRSXG

SEQ ID NO: 32961 - protein, 40 aa, Artificial Sequence
  GFR-binding peptide
  MOD_RES (5)..(6)..(38)..(40): Xaa is C or S
VPKAXXAPTKLSPINVLYFDSSNNVIYGKIPNMVVKAXGX

SEQ ID NO: 32962 - protein, 33 aa, Artificial Sequence
  GFR-binding peptide
  MOD_RES (1)..(33): Xaa is C or S
XVPTELSPINMLYFDENEKVVYGKIPDMVVEGX

SEQ ID NO: 32963 - protein, 40 aa, Artificial Sequence
  GFR-binding peptide
  MOD_RES (5)..(6)..(40): Xaa is C or S
  MOD_RES (20)..(21)..(22)..(23)..(24): Xaa is A or G
  MOD_RES (25)..(26)..(27)..(28): Xaa is A or G or is absent
SAGPXXTPTKMSPINMLYFXXXXXXXXXYGKIPGMVVDRX

SEQ ID NO: 32964 - protein, 38 aa, Artificial Sequence
  GFR-binding peptide
  MOD_RES (35)..(37): Xaa is C or S
  MOD_RES (14)..(15)..(16)..(17)..(18): Xaa is A or G
  MOD_RES (19)..(20)..(21)..(22): Xaa is A or G or is absent
VPTKLSPINVLYFXXXXXXXXXYGKIPEGMSVAEXGXR

SEQ ID NO: 32965 - protein, 37 aa, Artificial Sequence
  GFR-binding peptide
  MOD_RES (2)..(3)..(35)..(37): Xaa is C or S
AXXVPTKLSPINILYFDKGVVTYYGKIPGMAVSEXGX

SEQ ID NO: 32966 - protein, 38 aa, Artificial Sequence
  GFR-binding peptide
  MOD_RES (6)..(7): Xaa is C or S
KIPKAXXVPTELSPINMLYFDENEKVVYGKIPDMVVEG

SEQ ID NO: 32967 - protein, 36 aa, Artificial Sequence
  GFR-binding peptide
  MOD_RES (1)..(33)..(35): Xaa is C or S
XAPTQLSPINVLYFDDSSNVIYGKIPNMVVRAXGXH

SEQ ID NO: 32968 - protein, 39 aa, Artificial Sequence
  GFR-binding peptide
  MOD_RES (3)..(4)..(38): Xaa is C or S
  MOD_RES (18)..(19)..(20)..(21)..(22): Xaa is A or G
  MOD_RES (23)..(24)..(25)..(26): Xaa is A or G or is absent
KPXXAPTQLSPINVLYFXXXXXXXXXYGKIPNMVVRAXG

SEQ ID NO: 32969 - protein, 38 aa, Artificial Sequence
  GFR-binding peptide
  MOD_RES (2)..(3)..(35)..(37): Xaa is C or S
AXXVPTELSPINMLYFDENEKVVYGKIPDMVVEGXGXR

SEQ ID NO: 32970 - protein, 42 aa, Artificial Sequence
  GFR-binding peptide
  MOD_RES (4)..(5)..(39)..(41): Xaa is C or S
  MOD_RES (19)..(20)..(21)..(22)..(23): Xaa is A or G
  MOD_RES (24)..(25)..(26)..(27): Xaa is A or G or is absent
PKPXXAPTQLSPINVLYFXXXXXXXXXYGKIPNMVVRAXGXH

SEQ ID NO: 32971 - protein, 40 aa, Artificial Sequence
  GFR-binding peptide
  MOD_RES (3)..(4)..(38)..(40): Xaa is C or S
  MOD_RES (18)..(19)..(20)..(21)..(22): Xaa is A or G
  MOD_RES (23)..(24)..(25)..(26): Xaa is A or G or is absent
PTXXVPTRLSPINILYFXXXXXXXXXYGKIPDMVVESXGX

SEQ ID NO: 32972 - protein, 36 aa, Artificial Sequence
  GFR-binding peptide
  MOD_RES (1)..(36): Xaa is C or S
  MOD_RES (15)..(16)..(17)..(18)..(19): Xaa is A or G
  MOD_RES (20)..(21)..(22)..(23): Xaa is A or G or is absent
XVPTKLSPINVLYFXXXXXXXXXYGKIPEGMSVAEX

SEQ ID NO: 32973 - protein, 33 aa, Artificial Sequence
  GFR-binding peptide
  MOD_RES (1)..(2): Xaa is C or S
XXVPTELSPINMLYFDEYDKVVYGKIPEMVVEG

SEQ ID NO: 32974 - protein, 42 aa, Artificial Sequence
  GFR-binding peptide
  MOD_RES (5)..(6)..(39)..(41): Xaa is C or S
  MOD_RES (20)..(21)..(22)..(23)..(24): Xaa is A or G
  MOD_RES (25)..(26)..(27)..(28): Xaa is A or G or is absent
VPSTXXAPVKTSPINMLYFXXXXXXXXXYGKIPMIVEEXGXL

SEQ ID NO: 32975 - protein, 38 aa, Artificial Sequence
  GFR-binding peptide
  MOD_RES (1)..(35)..(37): Xaa is C or S
  MOD_RES (15)..(16)..(17)..(18)..(19): Xaa is A or G
  MOD_RES (20)..(21)..(22)..(23): Xaa is A or G or is absent
XAPTKLSPINVLYFXXXXXXXXXYGKIPNMVVRSXGXH

SEQ ID NO: 32976 - protein, 37 aa, Artificial Sequence
  GFR-binding peptide
  MOD_RES (34)..(36): Xaa is C or S
  MOD_RES (14)..(15)..(16)..(17)..(18): Xaa is A or G
  MOD_RES (19)..(20)..(21)..(22): Xaa is A or G or is absent
TPTKMSPINMLYFXXXXXXXXXYGKIPGMVVDRXGXS

SEQ ID NO: 32977 - protein, 37 aa, Artificial Sequence
  GFR-binding peptide
  MOD_RES (2)..(3)..(35)..(37): Xaa is C or S
AXXVPTELSPINMLYFDEYDKVVYGKIPEMVVEGXGX

SEQ ID NO: 32978 - protein, 35 aa, Artificial Sequence
  GFR-binding peptide
  MOD_RES (3)..(4): Xaa is C or S
KAXXAPTKLSPINVLYFDSSNNVIYGKIPNMVVKA

SEQ ID NO: 32979 - protein, 34 aa, Artificial Sequence
  GFR-binding peptide
  MOD_RES (32)..(34): Xaa is C or S
VPTKLSPINILYFDKGVVTYYGKIPGMAVSEXGX

SEQ ID NO: 32980 - protein, 37 aa, Artificial Sequence
  GFR-binding peptide
  MOD_RES (1)..(35)..(37): Xaa is C or S
  MOD_RES (15)..(16)..(17)..(18)..(19): Xaa is A or G
  MOD_RES (20)..(21)..(22)..(23): Xaa is A or G or is absent
XVPTRLSPINILYFXXXXXXXXXYGKIPDMVVESXGX

SEQ ID NO: 32981 - protein, 37 aa, Artificial Sequence
  GFR-binding peptide
  MOD_RES (1)..(35)..(37): Xaa is C or S
  MOD_RES (15)..(16)..(17)..(18)..(19): Xaa is A or G
  MOD_RES (20)..(21)..(22)..(23): Xaa is A or G or is absent
XAPTKLSPINVLYFXXXXXXXXXYGKIPNMVVKAXGX

SEQ ID NO: 32982 - protein, 35 aa, Artificial Sequence
  GFR-binding peptide
  MOD_RES (4)..(5): Xaa is C or S
PKPXXAPTQLSPINVLYFDDSSNVIYGKIPNMVVR

SEQ ID NO: 32983 - protein, 34 aa, Artificial Sequence
  GFR-binding peptide
  MOD_RES (32)..(34): Xaa is C or S
VPTELSPINMLYFDEYDKVVYGKIPEMVVEGXGX

SEQ ID NO: 32984 - protein, 32 aa, Artificial Sequence
  GFR-binding peptide
  MOD_RES (1)..(1): Xaa is C or S
XVPTRLSPINILYFDSANNVVYGKIPDMVVES

SEQ ID NO: 32985 - protein, 31 aa, Artificial Sequence
  GFR-binding peptide
  MOD_RES (1)..(1): Xaa is C or S
XVPTKLSPINILYFDKGVVTYYGKIPGMAVS

SEQ ID NO: 32986 - protein, 35 aa, Artificial Sequence
  GFR-binding peptide
  MOD_RES (34)..(34): Xaa is C or S
  MOD_RES (14)..(15)..(16)..(17)..(18): Xaa is A or G
  MOD_RES (19)..(20)..(21)..(22): Xaa is A or G or is absent
VPARLSPINILYFXXXXXXXXXYGKIPDMVVEAXG

SEQ ID NO: 32987 - protein, 37 aa, Artificial Sequence
  GFR-binding peptide
  MOD_RES (2)..(3)..(37): Xaa is C or S
  MOD_RES (17)..(18)..(19)..(20)..(21): Xaa is A or G
  MOD_RES (22)..(23)..(24)..(25): Xaa is A or G or is absent
AXXVPTKLSPINILYFXXXXXXXXXYGKIPGMAVSEX

SEQ ID NO: 32988 - protein, 40 aa, Artificial Sequence
  GFR-binding peptide
  MOD_RES (5)..(39): Xaa is C or S
  MOD_RES (19)..(20)..(21)..(22)..(23): Xaa is A or G
  MOD_RES (24)..(25)..(26)..(27): Xaa is A or G or is absent
TKPTXAPTKLSPINVLYFXXXXXXXXXYGKIPNMVVRSXG

SEQ ID NO: 32989 - protein, 37 aa, Artificial Sequence
  GFR-binding peptide
  MOD_RES (4)..(5): Xaa is C or S
  MOD_RES (19)..(20)..(21)..(22)..(23): Xaa is A or G
  MOD_RES (24)..(25)..(26)..(27): Xaa is A or G or is absent
PASXXVPARLSPINILYFXXXXXXXXXYGKIPDMVVE

SEQ ID NO: 32990 - protein, 36 aa, Artificial Sequence
  GFR-binding peptide
  MOD_RES (4)..(5): Xaa is C or S
PKAXXAPTKLSPINVLYFDSSNNVIYGKIPNMVVKA

SEQ ID NO: 32991 - protein, 37 aa, Artificial Sequence
  GFR-binding peptide
  MOD_RES (5)..(6): Xaa is C or S
TPPTXXVPTRLSPINILYFDSANNVVYGKIPDMVVES

SEQ ID NO: 32992 - protein, 36 aa, Artificial Sequence
  GFR-binding peptide
  MOD_RES (5)..(6): Xaa is C or S
ASKAXXVPTKLSPINILYFDKGVVTYYGKIPGMAVS

SEQ ID NO: 32993 - protein, 34 aa, Artificial Sequence
  GFR-binding peptide
  MOD_RES (2)..(3): Xaa is C or S
SXXVPARLSPINILYFDAANNVVYGKIPDMVVEA

SEQ ID NO: 32994 - protein, 32 aa, Artificial Sequence
  GFR-binding peptide
  MOD_RES (32)..(32): Xaa is C or S
VPTELSPINMLYFDEYDKVVYGKIPEMVVEGX

SEQ ID NO: 32995 - protein, 36 aa, Artificial Sequence
  GFR-binding peptide
  MOD_RES (1)..(2)..(36): Xaa is C or S
  MOD_RES (16)..(17)..(18)..(19)..(20): Xaa is A or G
  MOD_RES (21)..(22)..(23)..(24): Xaa is A or G or is absent
XXAPTKLSPINVLYFXXXXXXXXXYGKIPNMVVRSX

SEQ ID NO: 32996 - protein, 40 aa, Artificial Sequence
  GFR-binding peptide
  MOD_RES (6)..(7)..(40): Xaa is C or S
  MOD_RES (21)..(22)..(23)..(24)..(25): Xaa is A or G
  MOD_RES (26)..(27)..(28)..(29): Xaa is A or G or is absent
RVPSTXXAPVKTSPINMLYFXXXXXXXXXYGKIPMIVEEX

SEQ ID NO: 32997 - protein, 40 aa, Artificial Sequence
  GFR-binding peptide
  MOD_RES (4)..(5)..(37)..(39): Xaa is C or S
PPTXXVPTRLSPINILYFDSANNVVYGKIPDMVVESXGXR

SEQ ID NO: 32998 - protein, 39 aa, Artificial Sequence
  GFR-binding peptide
  MOD_RES (3)..(4)..(38): Xaa is C or S
  MOD_RES (18)..(19)..(20)..(21)..(22): Xaa is A or G
  MOD_RES (23)..(24)..(25)..(26): Xaa is A or G or is absent
KPXXAPTKLSPINVLYFXXXXXXXXXYGKIPNMVVRSXG

SEQ ID NO: 32999 - protein, 38 aa, Artificial Sequence
  GFR-binding peptide
  MOD_RES (5)..(6)..(38): Xaa is C or S
TPPTXXVPTRLSPINILYFDSANNVVYGKIPDMVVESX

SEQ ID NO: 33000 - protein, 38 aa, Artificial Sequence
  GFR-binding peptide
  MOD_RES (4)..(5): Xaa is C or S
  MOD_RES (19)..(20)..(21)..(22)..(23): Xaa is A or G
  MOD_RES (24)..(25)..(26)..(27): Xaa is A or G or is absent
SKAXXVPTKLSPINILYFXXXXXXXXXYGKIPGMAVSE

SEQ ID NO: 33001 - protein, 41 aa, Artificial Sequence
  GFR-binding peptide
  MOD_RES (5)..(6)..(40): Xaa is C or S
  MOD_RES (20)..(21)..(22)..(23)..(24): Xaa is A or G
  MOD_RES (25)..(26)..(27)..(28): Xaa is A or G or is absent
TPPTXXVPTRLSPINILYFXXXXXXXXXYGKIPDMVVESXG

SEQ ID NO: 33002 - protein, 36 aa, Artificial Sequence
  GFR-binding peptide
  MOD_RES (2)..(3)..(34)..(36): Xaa is C or S
TXXAPVKTSPINMLYFDNGRVLLYGKIPMIVEEXGX

SEQ ID NO: 33003 - protein, 36 aa, Artificial Sequence
  GFR-binding peptide
  MOD_RES (1)..(2)..(34)..(36): Xaa is C or S
XXAPTKLSPINVLYFDSSNNVIYGKIPNMVVKAXGX

SEQ ID NO: 33004 - protein, 33 aa, Artificial Sequence
  GFR-binding peptide
  MOD_RES (2)..(3): Xaa is C or S
TXXVPTRLSPINILYFDSANNVVYGKIPDMVVE

SEQ ID NO: 33005 - protein, 39 aa, Artificial Sequence
  GFR-binding peptide
  MOD_RES (6)..(6): Xaa is C or S
  MOD_RES (20)..(21)..(22)..(23)..(24): Xaa is A or G
  MOD_RES (25)..(26)..(27)..(28): Xaa is A or G or is absent
VTKPTXAPTKLSPINVLYFXXXXXXXXXYGKIPNMVVRS

SEQ ID NO: 33006 - protein, 34 aa, Artificial Sequence
  GFR-binding peptide
  MOD_RES (2)..(3): Xaa is C or S
AXXVPTELSPINMLYFDENEKVVYGKIPDMVVEG

SEQ ID NO: 33007 - protein, 38 aa, Artificial Sequence
  GFR-binding peptide
  MOD_RES (5)..(37): Xaa is C or S
TKPTXAPTKLSPINVLYFDDSSNVIYGKIPNMVVRSXG

SEQ ID NO: 33008 - protein, 35 aa, Artificial Sequence
  GFR-binding peptide
  MOD_RES (32)..(34): Xaa is C or S
APTKLSPINVLYFDDSSNVIYGKIPNMVVRSXGXH

SEQ ID NO: 33009 - protein, 41 aa, Artificial Sequence
  GFR-binding peptide
  MOD_RES (3)..(4)..(38)..(40): Xaa is C or S
  MOD_RES (18)..(19)..(20)..(21)..(22): Xaa is A or G
  MOD_RES (23)..(24)..(25)..(26): Xaa is A or G or is absent
PTXXVPTRLSPINILYFXXXXXXXXXYGKIPDMVVESXGXR

SEQ ID NO: 33010 - protein, 30 aa, Artificial Sequence
  GFR-binding peptide
APTKLSPINVLYFDSSNNVIYGKIPNMVVK

SEQ ID NO: 33011 - protein, 38 aa, Artificial Sequence
  GFR-binding peptide
  MOD_RES (6)..(38): Xaa is C or S
VTKPTXAPTKLSPINVLYFDDSSNVIYGKIPNMVVRSX

SEQ ID NO: 33012 - protein, 41 aa, Artificial Sequence
  GFR-binding peptide
  MOD_RES (6)..(7)..(39)..(41): Xaa is C or S
SIPKAXXVPTELSPINMLYFDEYDKVVYGKIPEMVVEGXGX

SEQ ID NO: 33013 - protein, 42 aa, Artificial Sequence
  GFR-binding peptide
  MOD_RES (6)..(40)..(42): Xaa is C or S
  MOD_RES (20)..(21)..(22)..(23)..(24): Xaa is A or G
  MOD_RES (25)..(26)..(27)..(28): Xaa is A or G or is absent
VTKPTXAPTKLSPINVLYFXXXXXXXXXYGKIPNMVVRSXGX

SEQ ID NO: 33014 - protein, 36 aa, Artificial Sequence
  GFR-binding peptide
  MOD_RES (5)..(5): Xaa is C or S
TKPTXAPTKLSPINVLYFDDSSNVIYGKIPNMVVRS

SEQ ID NO: 33015 - protein, 36 aa, Artificial Sequence
  GFR-binding peptide
  MOD_RES (1)..(35): Xaa is C or S
  MOD_RES (15)..(16)..(17)..(18)..(19): Xaa is A or G
  MOD_RES (20)..(21)..(22)..(23): Xaa is A or G or is absent
XAPTQLSPINVLYFXXXXXXXXXYGKIPNMVVRAXG

SEQ ID NO: 33016 - protein, 35 aa, Artificial Sequence
  GFR-binding peptide
  MOD_RES (1)..(35): Xaa is C or S
  MOD_RES (15)..(16)..(17)..(18)..(19): Xaa is A or G
  MOD_RES (20)..(21)..(22)..(23): Xaa is A or G or is absent
XVPTRLSPINILYFXXXXXXXXXYGKIPDMVVESX

SEQ ID NO: 33017 - protein, 37 aa, Artificial Sequence
  GFR-binding peptide
  MOD_RES (3)..(4): Xaa is C or S
  MOD_RES (18)..(19)..(20)..(21)..(22): Xaa is A or G
  MOD_RES (23)..(24)..(25)..(26): Xaa is A or G or is absent
KAXXVPTKLSPINILYFXXXXXXXXXYGKIPGMAVSE

SEQ ID NO: 33018 - protein, 34 aa, Artificial Sequence
  GFR-binding peptide
  MOD_RES (1)..(2)..(34): Xaa is C or S
XXVPARLSPINILYFDAANNVVYGKIPDMVVEAX

SEQ ID NO: 33019 - protein, 40 aa, Artificial Sequence
  GFR-binding peptide
  MOD_RES (6)..(7)..(40): Xaa is C or S
KVGKAXXVPTKLSPINVLYFDDMGVPTYGKIPEGMSVAEX

SEQ ID NO: 33020 - protein, 39 aa, Artificial Sequence
  GFR-binding peptide
  MOD_RES (4)..(5)..(37)..(39): Xaa is C or S
SKAXXVPTKLSPINILYFDKGVVTYYGKIPGMAVSEXGX

SEQ ID NO: 33021 - protein, 34 aa, Artificial Sequence
  GFR-binding peptide
  MOD_RES (1)..(2)..(33): Xaa is C or S
XXAPVKTSPINMLYFDNGRVLLYGKIPMIVEEXG

SEQ ID NO: 33022 - protein, 39 aa, Artificial Sequence
  GFR-binding peptide
  MOD_RES (4)..(5)..(38): Xaa is C or S
GKAXXVPTKLSPINVLYFDDMGVPTYGKIPEGMSVAEXG

SEQ ID NO: 33023 - protein, 38 aa, Artificial Sequence
  GFR-binding peptide
  MOD_RES (3)..(4)..(38): Xaa is C or S
  MOD_RES (18)..(19)..(20)..(21)..(22): Xaa is A or G
  MOD_RES (23)..(24)..(25)..(26): Xaa is A or G or is absent
GPXXTPTKMSPINMLYFXXXXXXXXXYGKIPGMVVDRX

SEQ ID NO: 33024 - protein, 41 aa, Artificial Sequence
  GFR-binding peptide
  MOD_RES (3)..(4)..(38)..(40): Xaa is C or S
  MOD_RES (18)..(19)..(20)..(21)..(22): Xaa is A or G
  MOD_RES (23)..(24)..(25)..(26): Xaa is A or G or is absent
KAXXVPTELSPINMLYFXXXXXXXXXYGKIPDMVVEGXGXR

SEQ ID NO: 33025 - protein, 35 aa, Artificial Sequence
  GFR-binding peptide
  MOD_RES (3)..(4): Xaa is C or S
KPXXAPTQLSPINVLYFDDSSNVIYGKIPNMVVRA

SEQ ID NO: 33026 - protein, 39 aa, Artificial Sequence
  GFR-binding peptide
  MOD_RES (5)..(6): Xaa is C or S
  MOD_RES (20)..(21)..(22)..(23)..(24): Xaa is A or G
  MOD_RES (25)..(26)..(27)..(28): Xaa is A or G or is absent
VPKPXXAPTKLSPINVLYFXXXXXXXXXYGKIPNMVVRS

SEQ ID NO: 33027 - protein, 39 aa, Artificial Sequence
  GFR-binding peptide
  MOD_RES (3)..(4)..(38): Xaa is C or S
  MOD_RES (18)..(19)..(20)..(21)..(22): Xaa is A or G
  MOD_RES (23)..(24)..(25)..(26): Xaa is A or G or is absent
KAXXVPTKLSPINILYFXXXXXXXXXYGKIPGMAVSEXG

SEQ ID NO: 33028 - protein, 32 aa, Artificial Sequence
  GFR-binding peptide
  MOD_RES (32)..(32): Xaa is C or S
APTKLSPINVLYFDSSNNVIYGKIPNMVVKAX

SEQ ID NO: 33029 - protein, 39 aa, Artificial Sequence
  GFR-binding peptide
  MOD_RES (6)..(7)..(39): Xaa is C or S
SIPKAXXVPTELSPINMLYFDEYDKVVYGKIPEMVVEGX

SEQ ID NO: 33030 - protein, 39 aa, Artificial Sequence
  GFR-binding peptide
  MOD_RES (5)..(6): Xaa is C or S
  MOD_RES (20)..(21)..(22)..(23)..(24): Xaa is A or G
  MOD_RES (25)..(26)..(27)..(28): Xaa is A or G or is absent
ASKAXXVPTKLSPINILYFXXXXXXXXXYGKIPGMAVSE

SEQ ID NO: 33031 - protein, 42 aa, Artificial Sequence
  GFR-binding peptide
  MOD_RES (4)..(5)..(39)..(41): Xaa is C or S
  MOD_RES (19)..(20)..(21)..(22)..(23): Xaa is A or G
  MOD_RES (24)..(25)..(26)..(27): Xaa is A or G or is absent
PKAXXVPTELSPINMLYFXXXXXXXXXYGKIPEMVVEGXGXR

SEQ ID NO: 33032 - protein, 37 aa, Artificial Sequence
  GFR-binding peptide
  MOD_RES (4)..(5): Xaa is C or S
  MOD_RES (19)..(20)..(21)..(22)..(23): Xaa is A or G
  MOD_RES (24)..(25)..(26)..(27): Xaa is A or G or is absent
SKAXXVPTKLSPINILYFXXXXXXXXXYGKIPGMAVS

SEQ ID NO: 33033 - protein, 40 aa, Artificial Sequence
  GFR-binding peptide
  MOD_RES (3)..(4)..(38)..(40): Xaa is C or S
  MOD_RES (18)..(19)..(20)..(21)..(22): Xaa is A or G
  MOD_RES (23)..(24)..(25)..(26): Xaa is A or G or is absent
KPXXAPTQLSPINVLYFXXXXXXXXXYGKIPNMVVRAXGX

SEQ ID NO: 33034 - protein, 33 aa, Artificial Sequence
  GFR-binding peptide
  MOD_RES (1)..(33): Xaa is C or S
XVPTRLSPINILYFDSANNVVYGKIPDMVVESX

SEQ ID NO: 33035 - protein, 39 aa, Artificial Sequence
  GFR-binding peptide
  MOD_RES (6)..(7): Xaa is C or S
  MOD_RES (21)..(22)..(23)..(24)..(25): Xaa is A or G
  MOD_RES (26)..(27)..(28)..(29): Xaa is A or G or is absent
AAPASXXVPARLSPINILYFXXXXXXXXXYGKIPDMVVE

SEQ ID NO: 33036 - protein, 37 aa, Artificial Sequence
  GFR-binding peptide
  MOD_RES (3)..(4)..(36): Xaa is C or S
KAXXVPTELSPINMLYFDENEKVVYGKIPDMVVEGXG

SEQ ID NO: 33037 - protein, 31 aa, Artificial Sequence
  GFR-binding peptide
VPTKLSPINILYFDKGVVTYYGKIPGMAVSE

SEQ ID NO: 33038 - protein, 34 aa, Artificial Sequence
  GFR-binding peptide
  MOD_RES (2)..(2): Xaa is C or S
  MOD_RES (16)..(17)..(18)..(19)..(20): Xaa is A or G
  MOD_RES (21)..(22)..(23)..(24): Xaa is A or G or is absent
TXAPTKLSPINVLYFXXXXXXXXXYGKIPNMVVR

SEQ ID NO: 33039 - protein, 34 aa, Artificial Sequence
  GFR-binding peptide
  MOD_RES (32)..(34): Xaa is C or S
APTQLSPINVLYFDDSSNVIYGKIPNMVVRAXGX

SEQ ID NO: 33040 - protein, 38 aa, Artificial Sequence
  GFR-binding peptide
  MOD_RES (5)..(6)..(38): Xaa is C or S
VPKPXXAPTKLSPINVLYFDDSSNVIYGKIPNMVVRSX

SEQ ID NO: 33041 - protein, 37 aa, Artificial Sequence
  GFR-binding peptide
  MOD_RES (1)..(2)..(34)..(36): Xaa is C or S
XXVPTKLSPINILYFDKGVVTYYGKIPGMAVSEXGXR

SEQ ID NO: 33042 - protein, 37 aa, Artificial Sequence
  GFR-binding peptide
  MOD_RES (34)..(36): Xaa is C or S
  MOD_RES (14)..(15)..(16)..(17)..(18): Xaa is A or G
  MOD_RES (19)..(20)..(21)..(22): Xaa is A or G or is absent
VPARLSPINILYFXXXXXXXXXYGKIPDMVVEAXGXR

SEQ ID NO: 33043 - protein, 36 aa, Artificial Sequence
  GFR-binding peptide
  MOD_RES (1)..(35): Xaa is C or S
  MOD_RES (15)..(16)..(17)..(18)..(19): Xaa is A or G
  MOD_RES (20)..(21)..(22)..(23): Xaa is A or G or is absent
XVPTELSPINMLYFXXXXXXXXXYGKIPDMVVEGXG

SEQ ID NO: 33044 - protein, 38 aa, Artificial Sequence
  GFR-binding peptide
  MOD_RES (1)..(2)..(36)..(38): Xaa is C or S
  MOD_RES (16)..(17)..(18)..(19)..(20): Xaa is A or G
  MOD_RES (21)..(22)..(23)..(24): Xaa is A or G or is absent
XXAPTKLSPINVLYFXXXXXXXXXYGKIPNMVVKAXGX

SEQ ID NO: 33045 - protein, 33 aa, Artificial Sequence
  GFR-binding peptide
  MOD_RES (14)..(15)..(16)..(17)..(18): Xaa is A or G
  MOD_RES (19)..(20)..(21)..(22): Xaa is A or G or is absent
VPTELSPINMLYFXXXXXXXXXYGKIPEMVVEG

SEQ ID NO: 33046 - protein, 41 aa, Artificial Sequence
  GFR-binding peptide
  MOD_RES (6)..(7)..(39)..(41): Xaa is C or S
YVPKPXXAPTKLSPINVLYFDDSSNVIYGKIPNMVVRSXGX

SEQ ID NO: 33047 - protein, 39 aa, Artificial Sequence
  GFR-binding peptide
  MOD_RES (6)..(7): Xaa is C or S
  MOD_RES (21)..(22)..(23)..(24)..(25): Xaa is A or G
  MOD_RES (26)..(27)..(28)..(29): Xaa is A or G or is absent
YVPKPXXAPTKLSPINVLYFXXXXXXXXXYGKIPNMVVR

SEQ ID NO: 33048 - protein, 41 aa, Artificial Sequence
  GFR-binding peptide
  MOD_RES (5)..(6)..(40): Xaa is C or S
  MOD_RES (20)..(21)..(22)..(23)..(24): Xaa is A or G
  MOD_RES (25)..(26)..(27)..(28): Xaa is A or G or is absent
IPKAXXVPTELSPINMLYFXXXXXXXXXYGKIPEMVVEGXG

SEQ ID NO: 33049 - protein, 37 aa, Artificial Sequence
  GFR-binding peptide
  MOD_RES (4)..(5)..(36): Xaa is C or S
PSTXXAPVKTSPINMLYFDNGRVLLYGKIPMIVEEXG

SEQ ID NO: 33050 - protein, 36 aa, Artificial Sequence
  GFR-binding peptide
  MOD_RES (1)..(2)..(34)..(36): Xaa is C or S
XXAPTKLSPINVLYFDDSSNVIYGKIPNMVVRSXGX

SEQ ID NO: 33051 - protein, 37 aa, Artificial Sequence
  GFR-binding peptide
  MOD_RES (5)..(6)..(37): Xaa is C or S
VPSTXXAPVKTSPINMLYFDNGRVLLYGKIPMIVEEX

SEQ ID NO: 33052 - protein, 37 aa, Artificial Sequence
  GFR-binding peptide
  MOD_RES (3)..(4): Xaa is C or S
  MOD_RES (18)..(19)..(20)..(21)..(22): Xaa is A or G
  MOD_RES (23)..(24)..(25)..(26): Xaa is A or G or is absent
KPXXAPTKLSPINVLYFXXXXXXXXXYGKIPNMVVRS

SEQ ID NO: 33053 - protein, 37 aa, Artificial Sequence
  GFR-binding peptide
  MOD_RES (2)..(3)..(35)..(37): Xaa is C or S
SXXVPARLSPINILYFDAANNVVYGKIPDMVVEAXGX

SEQ ID NO: 33054 - protein, 37 aa, Artificial Sequence
  GFR-binding peptide
  MOD_RES (1)..(2)..(36): Xaa is C or S
  MOD_RES (16)..(17)..(18)..(19)..(20): Xaa is A or G
  MOD_RES (21)..(22)..(23)..(24): Xaa is A or G or is absent
XXTPTKMSPINMLYFXXXXXXXXXYGKIPGMVVDRXG

SEQ ID NO: 33055 - protein, 38 aa, Artificial Sequence
  GFR-binding peptide
  MOD_RES (3)..(4)..(37): Xaa is C or S
  MOD_RES (18)..(19)..(20)..(21)..(22): Xaa is A or G
  MOD_RES (23)..(24)..(25)..(26): Xaa is A or G or is absent
STXXAPVKTSPINMLYFXXXXXXXXXYGKIPMIVEEXG

SEQ ID NO: 33056 - protein, 32 aa, Artificial Sequence
  GFR-binding peptide
  MOD_RES (32)..(32): Xaa is C or S
APTKLSPINVLYFDDSSNVIYGKIPNMVVRSX

SEQ ID NO: 33057 - protein, 40 aa, Artificial Sequence
  GFR-binding peptide
  MOD_RES (6)..(7): Xaa is C or S
  MOD_RES (21)..(22)..(23)..(24)..(25): Xaa is A or G
  MOD_RES (26)..(27)..(28)..(29): Xaa is A or G or is absent
KIPKAXXVPTELSPINMLYFXXXXXXXXXYGKIPDMVVEG

SEQ ID NO: 33058 - protein, 38 aa, Artificial Sequence
  GFR-binding peptide
  MOD_RES (6)..(7): Xaa is C or S
HVPKPXXAPTKLSPINVLYFDDSSNVIYGKIPNMVVRS

SEQ ID NO: 33059 - protein, 34 aa, Artificial Sequence
  GFR-binding peptide
  MOD_RES (1)..(2)..(34): Xaa is C or S
XXVPTKLSPINILYFDKGVVTYYGKIPGMAVSEX

SEQ ID NO: 33060 - protein, 42 aa, Artificial Sequence
  GFR-binding peptide
  MOD_RES (6)..(7)..(39)..(41): Xaa is C or S
TVPKPXXAPTQLSPINVLYFDDSSNVIYGKIPNMVVRAXGXH

SEQ ID NO: 33061 - protein, 35 aa, Artificial Sequence
  GFR-binding peptide
  MOD_RES (32)..(34): Xaa is C or S
VPTELSPINMLYFDEYDKVVYGKIPEMVVEGXGXR

SEQ ID NO: 33062 - protein, 32 aa, Artificial Sequence
  GFR-binding peptide
  MOD_RES (1)..(32): Xaa is C or S
XAPVKTSPINMLYFDNGRVLLYGKIPMIVEEX

SEQ ID NO: 33063 - protein, 34 aa, Artificial Sequence
  GFR-binding peptide
  MOD_RES (3)..(3): Xaa is C or S
PTXAPTKLSPINVLYFDDSSNVIYGKIPNMVVRS

SEQ ID NO: 33064 - protein, 37 aa, Artificial Sequence
  GFR-binding peptide
  MOD_RES (3)..(4)..(36): Xaa is C or S
KAXXAPTKLSPINVLYFDSSNNVIYGKIPNMVVKAXG

SEQ ID NO: 33065 - protein, 37 aa, Artificial Sequence
  GFR-binding peptide
  MOD_RES (6)..(7): Xaa is C or S
TVPKPXXAPTQLSPINVLYFDDSSNVIYGKIPNMVVR

SEQ ID NO: 33066 - protein, 40 aa, Artificial Sequence
  GFR-binding peptide
  MOD_RES (3)..(4)..(38)..(40): Xaa is C or S
  MOD_RES (18)..(19)..(20)..(21)..(22): Xaa is A or G
  MOD_RES (23)..(24)..(25)..(26): Xaa is A or G or is absent
KAXXVPTKLSPINILYFXXXXXXXXXYGKIPGMAVSEXGX

SEQ ID NO: 33067 - protein, 34 aa, Artificial Sequence
  GFR-binding peptide
  MOD_RES (1)..(1): Xaa is C or S
  MOD_RES (15)..(16)..(17)..(18)..(19): Xaa is A or G
  MOD_RES (20)..(21)..(22)..(23): Xaa is A or G or is absent
XVPTRLSPINILYFXXXXXXXXXYGKIPDMVVES

SEQ ID NO: 33068 - protein, 32 aa, Artificial Sequence
  GFR-binding peptide
  MOD_RES (1)..(2): Xaa is C or S
XXAPTQLSPINVLYFDDSSNVIYGKIPNMVVR

SEQ ID NO: 33069 - protein, 36 aa, Artificial Sequence
  GFR-binding peptide
  MOD_RES (4)..(5): Xaa is C or S
PKPXXAPTQLSPINVLYFDDSSNVIYGKIPNMVVRA

SEQ ID NO: 33070 - protein, 37 aa, Artificial Sequence
  GFR-binding peptide
  MOD_RES (2)..(3)..(37): Xaa is C or S
  MOD_RES (17)..(18)..(19)..(20)..(21): Xaa is A or G
  MOD_RES (22)..(23)..(24)..(25): Xaa is A or G or is absent
PXXAPTQLSPINVLYFXXXXXXXXXYGKIPNMVVRAX

SEQ ID NO: 33071 - protein, 44 aa, Artificial Sequence
  GFR-binding peptide
  MOD_RES (7)..(41)..(43): Xaa is C or S
  MOD_RES (21)..(22)..(23)..(24)..(25): Xaa is A or G
  MOD_RES (26)..(27)..(28)..(29): Xaa is A or G or is absent
HVTKPTXAPTKLSPINVLYFXXXXXXXXXYGKIPNMVVRSXGXH

SEQ ID NO: 33072 - protein, 33 aa, Artificial Sequence
  GFR-binding peptide
  MOD_RES (2)..(2): Xaa is C or S
TXAPTKLSPINVLYFDDSSNVIYGKIPNMVVRS

SEQ ID NO: 33073 - protein, 36 aa, Artificial Sequence
  GFR-binding peptide
  MOD_RES (1)..(2)..(36): Xaa is C or S
  MOD_RES (16)..(17)..(18)..(19)..(20): Xaa is A or G
  MOD_RES (21)..(22)..(23)..(24): Xaa is A or G or is absent
XXTPTKMSPINMLYFXXXXXXXXXYGKIPGMVVDRX

SEQ ID NO: 33074 - protein, 44 aa, Artificial Sequence
  GFR-binding peptide
  MOD_RES (6)..(7)..(41)..(43): Xaa is C or S
  MOD_RES (21)..(22)..(23)..(24)..(25): Xaa is A or G
  MOD_RES (26)..(27)..(28)..(29): Xaa is A or G or is absent
SIPKAXXVPTELSPINMLYFXXXXXXXXXYGKIPEMVVEGXGXR

SEQ ID NO: 33075 - protein, 38 aa, Artificial Sequence
  GFR-binding peptide
  MOD_RES (1)..(2)..(36)..(38): Xaa is C or S
  MOD_RES (16)..(17)..(18)..(19)..(20): Xaa is A or G
  MOD_RES (21)..(22)..(23)..(24): Xaa is A or G or is absent
XXVPTRLSPINILYFXXXXXXXXXYGKIPDMVVESXGX

SEQ ID NO: 33076 - protein, 38 aa, Artificial Sequence
  GFR-binding peptide
  MOD_RES (6)..(7): Xaa is C or S
YVPKPXXAPTKLSPINVLYFDDSSNVIYGKIPNMVVRS

SEQ ID NO: 33077 - protein, 36 aa, Artificial Sequence
  GFR-binding peptide
  MOD_RES (2)..(3)..(35): Xaa is C or S
PXXAPTQLSPINVLYFDDSSNVIYGKIPNMVVRAXG

SEQ ID NO: 33078 - protein, 38 aa, Artificial Sequence
  GFR-binding peptide
  MOD_RES (2)..(3)..(37): Xaa is C or S
  MOD_RES (17)..(18)..(19)..(20)..(21): Xaa is A or G
  MOD_RES (22)..(23)..(24)..(25): Xaa is A or G or is absent
AXXAPTKLSPINVLYFXXXXXXXXXYGKIPNMVVKAXG

SEQ ID NO: 33079 - protein, 41 aa, Artificial Sequence
  GFR-binding peptide
  MOD_RES (6)..(7)..(41): Xaa is C or S
  MOD_RES (21)..(22)..(23)..(24)..(25): Xaa is A or G
  MOD_RES (26)..(27)..(28)..(29): Xaa is A or G or is absent
GSAGPXXTPTKMSPINMLYFXXXXXXXXXYGKIPGMVVDRX

SEQ ID NO: 33080 - protein, 35 aa, Artificial Sequence
  GFR-binding peptide
  MOD_RES (1)..(35): Xaa is C or S
  MOD_RES (15)..(16)..(17)..(18)..(19): Xaa is A or G
  MOD_RES (20)..(21)..(22)..(23): Xaa is A or G or is absent
XAPTKLSPINVLYFXXXXXXXXXYGKIPNMVVKAX

SEQ ID NO: 33081 - protein, 31 aa, Artificial Sequence
  GFR-binding peptide
  MOD_RES (1)..(1): Xaa is C or S
XAPTQLSPINVLYFDDSSNVIYGKIPNMVVR

SEQ ID NO: 33082 - protein, 35 aa, Artificial Sequence
  GFR-binding peptide
  MOD_RES (4)..(5): Xaa is C or S
PASXXVPARLSPINILYFDAANNVVYGKIPDMVVE

SEQ ID NO: 33083 - protein, 43 aa, Artificial Sequence
  GFR-binding peptide
  MOD_RES (6)..(7)..(41)..(43): Xaa is C or S
  MOD_RES (21)..(22)..(23)..(24)..(25): Xaa is A or G
  MOD_RES (26)..(27)..(28)..(29): Xaa is A or G or is absent
KIPKAXXVPTELSPINMLYFXXXXXXXXXYGKIPDMVVEGXGX

SEQ ID NO: 33084 - protein, 37 aa, Artificial Sequence
  GFR-binding peptide
  MOD_RES (3)..(4): Xaa is C or S
  MOD_RES (18)..(19)..(20)..(21)..(22): Xaa is A or G
  MOD_RES (23)..(24)..(25)..(26): Xaa is A or G or is absent
ASXXVPARLSPINILYFXXXXXXXXXYGKIPDMVVEA

SEQ ID NO: 33085 - protein, 33 aa, Artificial Sequence
  GFR-binding peptide
  MOD_RES (2)..(3): Xaa is C or S
PXXAPTQLSPINVLYFDDSSNVIYGKIPNMVVR

SEQ ID NO: 33086 - protein, 42 aa, Artificial Sequence
  GFR-binding peptide
  MOD_RES (5)..(6)..(40)..(42): Xaa is C or S
  MOD_RES (20)..(21)..(22)..(23)..(24): Xaa is A or G
  MOD_RES (25)..(26)..(27)..(28): Xaa is A or G or is absent
IPKAXXVPTELSPINMLYFXXXXXXXXXYGKIPDMVVEGXGX

SEQ ID NO: 33087 - protein, 38 aa, Artificial Sequence
  GFR-binding peptide
  MOD_RES (1)..(2)..(37): Xaa is C or S
  MOD_RES (16)..(17)..(18)..(19)..(20): Xaa is A or G
  MOD_RES (21)..(22)..(23)..(24): Xaa is A or G or is absent
XXVPTKLSPINVLYFXXXXXXXXXYGKIPEGMSVAEXG

SEQ ID NO: 33088 - protein, 35 aa, Artificial Sequence
  GFR-binding peptide
  MOD_RES (2)..(3)..(35): Xaa is C or S
AXXAPTKLSPINVLYFDSSNNVIYGKIPNMVVKAX

SEQ ID NO: 33089 - protein, 39 aa, Artificial Sequence
  GFR-binding peptide
  MOD_RES (4)..(5)..(39): Xaa is C or S
  MOD_RES (19)..(20)..(21)..(22)..(23): Xaa is A or G
  MOD_RES (24)..(25)..(26)..(27): Xaa is A or G or is absent
PASXXVPARLSPINILYFXXXXXXXXXYGKIPDMVVEAX

SEQ ID NO: 33090 - protein, 33 aa, Artificial Sequence
  GFR-binding peptide
  MOD_RES (1)..(2): Xaa is C or S
XXVPARLSPINILYFDAANNVVYGKIPDMVVEA

SEQ ID NO: 33091 - protein, 34 aa, Artificial Sequence
  GFR-binding peptide
  MOD_RES (1)..(2)..(34): Xaa is C or S
XXAPTQLSPINVLYFDDSSNVIYGKIPNMVVRAX

SEQ ID NO: 33092 - protein, 39 aa, Artificial Sequence
  GFR-binding peptide
  MOD_RES (3)..(4)..(36)..(38): Xaa is C or S
KPXXAPTQLSPINVLYFDDSSNVIYGKIPNMVVRAXGXH

SEQ ID NO: 33093 - protein, 36 aa, Artificial Sequence
  GFR-binding peptide
  MOD_RES (2)..(3)..(35): Xaa is C or S
AXXVPTKLSPINILYFDKGVVTYYGKIPGMAVSEXG

SEQ ID NO: 33094 - protein, 41 aa, Artificial Sequence
  GFR-binding peptide
  MOD_RES (5)..(6)..(40): Xaa is C or S
  MOD_RES (20)..(21)..(22)..(23)..(24): Xaa is A or G
  MOD_RES (25)..(26)..(27)..(28): Xaa is A or G or is absent
APASXXVPARLSPINILYFXXXXXXXXXYGKIPDMVVEAXG

SEQ ID NO: 33095 - protein, 39 aa, Artificial Sequence
  GFR-binding peptide
  MOD_RES (6)..(7): Xaa is C or S
  MOD_RES (21)..(22)..(23)..(24)..(25): Xaa is A or G
  MOD_RES (26)..(27)..(28)..(29): Xaa is A or G or is absent
KASKAXXVPTKLSPINILYFXXXXXXXXXYGKIPGMAVS

SEQ ID NO: 33096 - protein, 39 aa, Artificial Sequence
  GFR-binding peptide
  MOD_RES (5)..(6)..(38): Xaa is C or S
APASXXVPARLSPINILYFDAANNVVYGKIPDMVVEAXG

SEQ ID NO: 33097 - protein, 36 aa, Artificial Sequence
  GFR-binding peptide
  MOD_RES (1)..(2)..(36): Xaa is C or S
  MOD_RES (16)..(17)..(18)..(19)..(20): Xaa is A or G
  MOD_RES (21)..(22)..(23)..(24): Xaa is A or G or is absent
XXVPTKLSPINILYFXXXXXXXXXYGKIPGMAVSEX

SEQ ID NO: 33098 - protein, 37 aa, Artificial Sequence
  GFR-binding peptide
  MOD_RES (3)..(4)..(36): Xaa is C or S
PTXXVPTRLSPINILYFDSANNVVYGKIPDMVVESXG

SEQ ID NO: 33099 - protein, 36 aa, Artificial Sequence
  GFR-binding peptide
  MOD_RES (1)..(35): Xaa is C or S
  MOD_RES (15)..(16)..(17)..(18)..(19): Xaa is A or G
  MOD_RES (20)..(21)..(22)..(23): Xaa is A or G or is absent
XAPTKLSPINVLYFXXXXXXXXXYGKIPNMVVRSXG

SEQ ID NO: 33100 - protein, 36 aa, Artificial Sequence
  GFR-binding peptide
  MOD_RES (1)..(2)..(34)..(36): Xaa is C or S
XXVPTELSPINMLYFDENEKVVYGKIPDMVVEGXGX

SEQ ID NO: 33101 - protein, 37 aa, Artificial Sequence
  GFR-binding peptide
  MOD_RES (3)..(4): Xaa is C or S
  MOD_RES (18)..(19)..(20)..(21)..(22): Xaa is A or G
  MOD_RES (23)..(24)..(25)..(26): Xaa is A or G or is absent
PTXXVPTRLSPINILYFXXXXXXXXXYGKIPDMVVES

SEQ ID NO: 33102 - protein, 36 aa, Artificial Sequence
  GFR-binding peptide
  MOD_RES (1)..(33)..(35): Xaa is C or S
XVPARLSPINILYFDAANNVVYGKIPDMVVEAXGXR

SEQ ID NO: 33103 - protein, 37 aa, Artificial Sequence
  GFR-binding peptide
  MOD_RES (5)..(6): Xaa is C or S
IPKAXXVPTELSPINMLYFDEYDKVVYGKIPEMVVEG

SEQ ID NO: 33104 - protein, 37 aa, Artificial Sequence
  GFR-binding peptide
  MOD_RES (3)..(4)..(36): Xaa is C or S
ASXXVPARLSPINILYFDAANNVVYGKIPDMVVEAXG

SEQ ID NO: 33105 - protein, 41 aa, Artificial Sequence
  GFR-binding peptide
  MOD_RES (7)..(41): Xaa is C or S
  MOD_RES (21)..(22)..(23)..(24)..(25): Xaa is A or G
  MOD_RES (26)..(27)..(28)..(29): Xaa is A or G or is absent
HVTKPTXAPTKLSPINVLYFXXXXXXXXXYGKIPNMVVRSX

SEQ ID NO: 33106 - protein, 39 aa, Artificial Sequence
  GFR-binding peptide
  MOD_RES (3)..(4)..(36)..(38): Xaa is C or S
KPXXAPTKLSPINVLYFDDSSNVIYGKIPNMVVRSXGXH

SEQ ID NO: 33107 - protein, 39 aa, Artificial Sequence
  GFR-binding peptide
  MOD_RES (6)..(7)..(39): Xaa is C or S
AAPASXXVPARLSPINILYFDAANNVVYGKIPDMVVEAX

SEQ ID NO: 33108 - protein, 42 aa, Artificial Sequence
  GFR-binding peptide
  MOD_RES (6)..(7)..(40)..(42): Xaa is C or S
KVGKAXXVPTKLSPINVLYFDDMGVPTYGKIPEGMSVAEXGX

SEQ ID NO: 33109 - protein, 39 aa, Artificial Sequence
  GFR-binding peptide
  MOD_RES (4)..(5)..(37)..(39): Xaa is C or S
PKPXXAPTKLSPINVLYFDDSSNVIYGKIPNMVVRSXGX

SEQ ID NO: 33110 - protein, 35 aa, Artificial Sequence
  GFR-binding peptide
  MOD_RES (1)..(2): Xaa is C or S
  MOD_RES (16)..(17)..(18)..(19)..(20): Xaa is A or G
  MOD_RES (21)..(22)..(23)..(24): Xaa is A or G or is absent
XXVPTELSPINMLYFXXXXXXXXXYGKIPEMVVEG

SEQ ID NO: 33111 - protein, 40 aa, Artificial Sequence
  GFR-binding peptide
  MOD_RES (6)..(7)..(39): Xaa is C or S
AAPASXXVPARLSPINILYFDAANNVVYGKIPDMVVEAXG

SEQ ID NO: 33112 - protein, 38 aa, Artificial Sequence
  GFR-binding peptide
  MOD_RES (3)..(4)..(38): Xaa is C or S
  MOD_RES (18)..(19)..(20)..(21)..(22): Xaa is A or G
  MOD_RES (23)..(24)..(25)..(26): Xaa is A or G or is absent
ASXXVPARLSPINILYFXXXXXXXXXYGKIPDMVVEAX

SEQ ID NO: 33113 - protein, 43 aa, Artificial Sequence
  GFR-binding peptide
  MOD_RES (5)..(6)..(40)..(42): Xaa is C or S
  MOD_RES (20)..(21)..(22)..(23)..(24): Xaa is A or G
  MOD_RES (25)..(26)..(27)..(28): Xaa is A or G or is absent
IPKAXXVPTELSPINMLYFXXXXXXXXXYGKIPEMVVEGXGXR

SEQ ID NO: 33114 - protein, 41 aa, Artificial Sequence
  GFR-binding peptide
  MOD_RES (6)..(7)..(41): Xaa is C or S
  MOD_RES (21)..(22)..(23)..(24)..(25): Xaa is A or G
  MOD_RES (26)..(27)..(28)..(29): Xaa is A or G or is absent
KIPKAXXVPTELSPINMLYFXXXXXXXXXYGKIPDMVVEGX

SEQ ID NO: 33115 - protein, 39 aa, Artificial Sequence
  GFR-binding peptide
  MOD_RES (5)..(6)..(38): Xaa is C or S
VPKAXXAPTKLSPINVLYFDSSNNVIYGKIPNMVVKAXG

SEQ ID NO: 33116 - protein, 37 aa, Artificial Sequence
  GFR-binding peptide
  MOD_RES (1)..(2)..(36): Xaa is C or S
  MOD_RES (16)..(17)..(18)..(19)..(20): Xaa is A or G
  MOD_RES (21)..(22)..(23)..(24): Xaa is A or G or is absent
XXVPTRLSPINILYFXXXXXXXXXYGKIPDMVVESXG

SEQ ID NO: 33117 - protein, 34 aa, Artificial Sequence
  GFR-binding peptide
  MOD_RES (1)..(34): Xaa is C or S
  MOD_RES (15)..(16)..(17)..(18)..(19): Xaa is A or G
  MOD_RES (20)..(21)..(22)..(23): Xaa is A or G or is absent
XAPVKTSPINMLYFXXXXXXXXXYGKIPMIVEEX

SEQ ID NO: 33118 - protein, 37 aa, Artificial Sequence
  GFR-binding peptide
  MOD_RES (4)..(5)..(37): Xaa is C or S
PKAXXAPTKLSPINVLYFDSSNNVIYGKIPNMVVKAX

SEQ ID NO: 33119 - protein, 34 aa, Artificial Sequence
  GFR-binding peptide
  MOD_RES (1)..(2)..(34): Xaa is C or S
XXAPTKLSPINVLYFDDSSNVIYGKIPNMVVRSX

SEQ ID NO: 33120 - protein, 38 aa, Artificial Sequence
  GFR-binding peptide
  MOD_RES (3)..(4)..(37): Xaa is C or S
KAXXVPTKLSPINVLYFDDMGVPTYGKIPEGMSVAEXG

SEQ ID NO: 33121 - protein, 40 aa, Artificial Sequence
  GFR-binding peptide
  MOD_RES (5)..(6)..(40): Xaa is C or S
  MOD_RES (20)..(21)..(22)..(23)..(24): Xaa is A or G
  MOD_RES (25)..(26)..(27)..(28): Xaa is A or G or is absent
VPKAXXAPTKLSPINVLYFXXXXXXXXXYGKIPNMVVKAX

SEQ ID NO: 33122 - protein, 39 aa, Artificial Sequence
  GFR-binding peptide
  MOD_RES (7)..(7): Xaa is C or S
  MOD_RES (21)..(22)..(23)..(24)..(25): Xaa is A or G
  MOD_RES (26)..(27)..(28)..(29): Xaa is A or G or is absent
HVTKPTXAPTKLSPINVLYFXXXXXXXXXYGKIPNMVVR

SEQ ID NO: 33123 - protein, 39 aa, Artificial Sequence
  GFR-binding peptide
  MOD_RES (4)..(5)..(39): Xaa is C or S
  MOD_RES (19)..(20)..(21)..(22)..(23): Xaa is A or G
  MOD_RES (24)..(25)..(26)..(27): Xaa is A or G or is absent
PKAXXVPTELSPINMLYFXXXXXXXXXYGKIPEMVVEGX

SEQ ID NO: 33124 - protein, 36 aa, Artificial Sequence
  GFR-binding peptide
  MOD_RES (1)..(2)..(36): Xaa is C or S
  MOD_RES (16)..(17)..(18)..(19)..(20): Xaa is A or G
  MOD_RES (21)..(22)..(23)..(24): Xaa is A or G or is absent
XXVPARLSPINILYFXXXXXXXXXYGKIPDMVVEAX

SEQ ID NO: 33125 - protein, 38 aa, Artificial Sequence
  GFR-binding peptide
  MOD_RES (3)..(4)..(36)..(38): Xaa is C or S
KPXXAPTKLSPINVLYFDDSSNVIYGKIPNMVVRSXGX

SEQ ID NO: 33126 - protein, 37 aa, Artificial Sequence
  GFR-binding peptide
  MOD_RES (1)..(2)..(36): Xaa is C or S
  MOD_RES (16)..(17)..(18)..(19)..(20): Xaa is A or G
  MOD_RES (21)..(22)..(23)..(24): Xaa is A or G or is absent
XXVPTELSPINMLYFXXXXXXXXXYGKIPEMVVEGXG

SEQ ID NO: 33127 - protein, 38 aa, Artificial Sequence
  GFR-binding peptide
  MOD_RES (5)..(5): Xaa is C or S
  MOD_RES (19)..(20)..(21)..(22)..(23): Xaa is A or G
  MOD_RES (24)..(25)..(26)..(27): Xaa is A or G or is absent
TKPTXAPTKLSPINVLYFXXXXXXXXXYGKIPNMVVRS

SEQ ID NO: 33128 - protein, 43 aa, Artificial Sequence
  GFR-binding peptide
  MOD_RES (5)..(6)..(40)..(42): Xaa is C or S
  MOD_RES (20)..(21)..(22)..(23)..(24): Xaa is A or G
  MOD_RES (25)..(26)..(27)..(28): Xaa is A or G or is absent
SAGPXXTPTKMSPINMLYFXXXXXXXXXYGKIPGMVVDRXGXS

SEQ ID NO: 33129 - protein, 31 aa, Artificial Sequence
  GFR-binding peptide
VPTELSPINMLYFDENEKVVYGKIPDMVVEG

SEQ ID NO: 33130 - protein, 38 aa, Artificial Sequence
  GFR-binding peptide
  MOD_RES (3)..(4)..(38): Xaa is C or S
  MOD_RES (18)..(19)..(20)..(21)..(22): Xaa is A or G
  MOD_RES (23)..(24)..(25)..(26): Xaa is A or G or is absent
KPXXAPTQLSPINVLYFXXXXXXXXXYGKIPNMVVRAX

SEQ ID NO: 33131 - protein, 33 aa, Artificial Sequence
  GFR-binding peptide
  MOD_RES (1)..(1): Xaa is C or S
  MOD_RES (15)..(16)..(17)..(18)..(19): Xaa is A or G
  MOD_RES (20)..(21)..(22)..(23): Xaa is A or G or is absent
XVPTELSPINMLYFXXXXXXXXXYGKIPEMVVE

SEQ ID NO: 33132 - protein, 37 aa, Artificial Sequence
  GFR-binding peptide
  MOD_RES (3)..(4): Xaa is C or S
  MOD_RES (18)..(19)..(20)..(21)..(22): Xaa is A or G
  MOD_RES (23)..(24)..(25)..(26): Xaa is A or G or is absent
KAXXAPTKLSPINVLYFXXXXXXXXXYGKIPNMVVKA

SEQ ID NO: 33133 - protein, 37 aa, Artificial Sequence
  GFR-binding peptide
  MOD_RES (2)..(3)..(37): Xaa is C or S
  MOD_RES (17)..(18)..(19)..(20)..(21): Xaa is A or G
  MOD_RES (22)..(23)..(24)..(25): Xaa is A or G or is absent
TXXVPTRLSPINILYFXXXXXXXXXYGKIPDMVVESX

SEQ ID NO: 33134 - protein, 33 aa, Artificial Sequence
  GFR-binding peptide
  MOD_RES (1)..(33): Xaa is C or S
XVPARLSPINILYFDAANNVVYGKIPDMVVEAX

SEQ ID NO: 33135 - protein, 35 aa, Artificial Sequence
  GFR-binding peptide
  MOD_RES (4)..(4): Xaa is C or S
KPTXAPTKLSPINVLYFDDSSNVIYGKIPNMVVRS

SEQ ID NO: 33136 - protein, 40 aa, Artificial Sequence
  GFR-binding peptide
  MOD_RES (4)..(5)..(37)..(39): Xaa is C or S
PKPXXAPTKLSPINVLYFDDSSNVIYGKIPNMVVRSXGXH

SEQ ID NO: 33137 - protein, 42 aa, Artificial Sequence
  GFR-binding peptide
  MOD_RES (6)..(7)..(40)..(42): Xaa is C or S
  MOD_RES (21)..(22)..(23)..(24)..(25): Xaa is A or G
  MOD_RES (26)..(27)..(28)..(29): Xaa is A or G or is absent
RVPSTXXAPVKTSPINMLYFXXXXXXXXXYGKIPMIVEEXGX

SEQ ID NO: 33138 - protein, 41 aa, Artificial Sequence
  GFR-binding peptide
  MOD_RES (4)..(5)..(39)..(41): Xaa is C or S
  MOD_RES (19)..(20)..(21)..(22)..(23): Xaa is A or G
  MOD_RES (24)..(25)..(26)..(27): Xaa is A or G or is absent
PASXXVPARLSPINILYFXXXXXXXXXYGKIPDMVVEAXGX

SEQ ID NO: 33139 - protein, 40 aa, Artificial Sequence
  GFR-binding peptide
  MOD_RES (5)..(6): Xaa is C or S
  MOD_RES (20)..(21)..(22)..(23)..(24): Xaa is A or G
  MOD_RES (25)..(26)..(27)..(28): Xaa is A or G or is absent
VGKAXXVPTKLSPINVLYFXXXXXXXXXYGKIPEGMSVAE

SEQ ID NO: 33140 - protein, 37 aa, Artificial Sequence
  GFR-binding peptide
  MOD_RES (4)..(5): Xaa is C or S
  MOD_RES (19)..(20)..(21)..(22)..(23): Xaa is A or G
  MOD_RES (24)..(25)..(26)..(27): Xaa is A or G or is absent
PPTXXVPTRLSPINILYFXXXXXXXXXYGKIPDMVVE

SEQ ID NO: 33141 - protein, 35 aa, Artificial Sequence
  GFR-binding peptide
  MOD_RES (1)..(35): Xaa is C or S
  MOD_RES (15)..(16)..(17)..(18)..(19): Xaa is A or G
  MOD_RES (20)..(21)..(22)..(23): Xaa is A or G or is absent
XVPARLSPINILYFXXXXXXXXXYGKIPDMVVEAX

SEQ ID NO: 33142 - protein, 36 aa, Artificial Sequence
  GFR-binding peptide
  MOD_RES (4)..(5): Xaa is C or S
SKAXXVPTKLSPINILYFDKGVVTYYGKIPGMAVSE

SEQ ID NO: 33143 - protein, 41 aa, Artificial Sequence
  GFR-binding peptide
  MOD_RES (2)..(3)..(38)..(40): Xaa is C or S
  MOD_RES (17)..(18)..(19)..(20)..(21): Xaa is A or G
  MOD_RES (22)..(23)..(24)..(25): Xaa is A or G or is absent
AXXVPTKLSPINVLYFXXXXXXXXXYGKIPEGMSVAEXGXR

SEQ ID NO: 33144 - protein, 44 aa, Artificial Sequence
  GFR-binding peptide
  MOD_RES (6)..(7)..(41)..(43): Xaa is C or S
  MOD_RES (21)..(22)..(23)..(24)..(25): Xaa is A or G
  MOD_RES (26)..(27)..(28)..(29): Xaa is A or G or is absent
KASKAXXVPTKLSPINILYFXXXXXXXXXYGKIPGMAVSEXGXR

SEQ ID NO: 33145 - protein, 41 aa, Artificial Sequence
  GFR-binding peptide
  MOD_RES (4)..(5)..(39)..(41): Xaa is C or S
  MOD_RES (19)..(20)..(21)..(22)..(23): Xaa is A or G
  MOD_RES (24)..(25)..(26)..(27): Xaa is A or G or is absent
PKAXXVPTELSPINMLYFXXXXXXXXXYGKIPEMVVEGXGX

SEQ ID NO: 33146 - protein, 39 aa, Artificial Sequence
  GFR-binding peptide
  MOD_RES (2)..(3)..(37)..(39): Xaa is C or S
  MOD_RES (17)..(18)..(19)..(20)..(21): Xaa is A or G
  MOD_RES (22)..(23)..(24)..(25): Xaa is A or G or is absent
PXXAPTKLSPINVLYFXXXXXXXXXYGKIPNMVVRSXGX

SEQ ID NO: 33147 - protein, 42 aa, Artificial Sequence
  GFR-binding peptide
  MOD_RES (6)..(7)..(39)..(41): Xaa is C or S
HVPKPXXAPTKLSPINVLYFDDSSNVIYGKIPNMVVRSXGXH

SEQ ID NO: 33148 - protein, 42 aa, Artificial Sequence
  GFR-binding peptide
  MOD_RES (7)..(41): Xaa is C or S
  MOD_RES (21)..(22)..(23)..(24)..(25): Xaa is A or G
  MOD_RES (26)..(27)..(28)..(29): Xaa is A or G or is absent
HVTKPTXAPTKLSPINVLYFXXXXXXXXXYGKIPNMVVRSXG

SEQ ID NO: 33149 - protein, 35 aa, Artificial Sequence
  GFR-binding peptide
  MOD_RES (1)..(33)..(35): Xaa is C or S
XAPTKLSPINVLYFDDSSNVIYGKIPNMVVRSXGX

SEQ ID NO: 33150 - protein, 36 aa, Artificial Sequence
  GFR-binding peptide
  MOD_RES (1)..(2)..(35): Xaa is C or S
XXVPTKLSPINVLYFDDMGVPTYGKIPEGMSVAEXG

SEQ ID NO: 33151 - protein, 36 aa, Artificial Sequence
  GFR-binding peptide
  MOD_RES (2)..(3)..(36): Xaa is C or S
  MOD_RES (17)..(18)..(19)..(20)..(21): Xaa is A or G
  MOD_RES (22)..(23)..(24)..(25): Xaa is A or G or is absent
TXXAPVKTSPINMLYFXXXXXXXXXYGKIPMIVEEX

SEQ ID NO: 33152 - protein, 36 aa, Artificial Sequence
  GFR-binding peptide
  MOD_RES (1)..(35): Xaa is C or S
  MOD_RES (15)..(16)..(17)..(18)..(19): Xaa is A or G
  MOD_RES (20)..(21)..(22)..(23): Xaa is A or G or is absent
XVPARLSPINILYFXXXXXXXXXYGKIPDMVVEAXG

SEQ ID NO: 33153 - protein, 40 aa, Artificial Sequence
  GFR-binding peptide
  MOD_RES (2)..(3)..(37)..(39): Xaa is C or S
  MOD_RES (17)..(18)..(19)..(20)..(21): Xaa is A or G
  MOD_RES (22)..(23)..(24)..(25): Xaa is A or G or is absent
AXXVPTELSPINMLYFXXXXXXXXXYGKIPEMVVEGXGXR

SEQ ID NO: 33154 - protein, 35 aa, Artificial Sequence
  GFR-binding peptide
  MOD_RES (2)..(3): Xaa is C or S
  MOD_RES (17)..(18)..(19)..(20)..(21): Xaa is A or G
  MOD_RES (22)..(23)..(24)..(25): Xaa is A or G or is absent
PXXTPTKMSPINMLYFXXXXXXXXXYGKIPGMVVD

SEQ ID NO: 33155 - protein, 40 aa, Artificial Sequence
  GFR-binding peptide
  MOD_RES (4)..(5)..(39): Xaa is C or S
  MOD_RES (19)..(20)..(21)..(22)..(23): Xaa is A or G
  MOD_RES (24)..(25)..(26)..(27): Xaa is A or G or is absent
PKAXXAPTKLSPINVLYFXXXXXXXXXYGKIPNMVVKAXG

SEQ ID NO: 33156 - protein, 39 aa, Artificial Sequence
  GFR-binding peptide
  MOD_RES (3)..(4)..(38): Xaa is C or S
  MOD_RES (18)..(19)..(20)..(21)..(22): Xaa is A or G
  MOD_RES (23)..(24)..(25)..(26): Xaa is A or G or is absent
KAXXAPTKLSPINVLYFXXXXXXXXXYGKIPNMVVKAXG

SEQ ID NO: 33157 - protein, 37 aa, Artificial Sequence
  GFR-binding peptide
  MOD_RES (4)..(5)..(37): Xaa is C or S
PKAXXVPTELSPINMLYFDEYDKVVYGKIPEMVVEGX

SEQ ID NO: 33158 - protein, 37 aa, Artificial Sequence
  GFR-binding peptide
  MOD_RES (4)..(5)..(37): Xaa is C or S
SKAXXVPTKLSPINILYFDKGVVTYYGKIPGMAVSEX

SEQ ID NO: 33159 - protein, 34 aa, Artificial Sequence
  GFR-binding peptide
  MOD_RES (34)..(34): Xaa is C or S
  MOD_RES (14)..(15)..(16)..(17)..(18): Xaa is A or G
  MOD_RES (19)..(20)..(21)..(22): Xaa is A or G or is absent
TPTKMSPINMLYFXXXXXXXXXYGKIPGMVVDRX

SEQ ID NO: 33160 - protein, 40 aa, Artificial Sequence
  GFR-binding peptide
  MOD_RES (6)..(7): Xaa is C or S
  MOD_RES (21)..(22)..(23)..(24)..(25): Xaa is A or G
  MOD_RES (26)..(27)..(28)..(29): Xaa is A or G or is absent
SIPKAXXVPTELSPINMLYFXXXXXXXXXYGKIPEMVVEG

SEQ ID NO: 33161 - protein, 32 aa, Artificial Sequence
  GFR-binding peptide
  MOD_RES (32)..(32): Xaa is C or S
VPTKLSPINILYFDKGVVTYYGKIPGMAVSEX

SEQ ID NO: 33162 - protein, 33 aa, Artificial Sequence
  GFR-binding peptide
  MOD_RES (32)..(32): Xaa is C or S
APTQLSPINVLYFDDSSNVIYGKIPNMVVRAXG

SEQ ID NO: 33163 - protein, 40 aa, Artificial Sequence
  GFR-binding peptide
  MOD_RES (6)..(40): Xaa is C or S
  MOD_RES (20)..(21)..(22)..(23)..(24): Xaa is A or G
  MOD_RES (25)..(26)..(27)..(28): Xaa is A or G or is absent
VTKPTXAPTKLSPINVLYFXXXXXXXXXYGKIPNMVVRSX

SEQ ID NO: 33164 - protein, 37 aa, Artificial Sequence
  GFR-binding peptide
  MOD_RES (34)..(36): Xaa is C or S
  MOD_RES (14)..(15)..(16)..(17)..(18): Xaa is A or G
  MOD_RES (19)..(20)..(21)..(22): Xaa is A or G or is absent
APTQLSPINVLYFXXXXXXXXXYGKIPNMVVRAXGXH

SEQ ID NO: 33165 - protein, 42 aa, Artificial Sequence
  GFR-binding peptide
  MOD_RES (6)..(7)..(41): Xaa is C or S
  MOD_RES (21)..(22)..(23)..(24)..(25): Xaa is A or G
  MOD_RES (26)..(27)..(28)..(29): Xaa is A or G or is absent
SIPKAXXVPTELSPINMLYFXXXXXXXXXYGKIPEMVVEGXG

SEQ ID NO: 33166 - protein, 31 aa, Artificial Sequence
  GFR-binding peptide
  MOD_RES (1)..(1): Xaa is C or S
XVPTELSPINMLYFDEYDKVVYGKIPEMVVE

SEQ ID NO: 33167 - protein, 39 aa, Artificial Sequence
  GFR-binding peptide
  MOD_RES (1)..(2)..(36)..(38): Xaa is C or S
  MOD_RES (16)..(17)..(18)..(19)..(20): Xaa is A or G
  MOD_RES (21)..(22)..(23)..(24): Xaa is A or G or is absent
XXAPTKLSPINVLYFXXXXXXXXXYGKIPNMVVKAXGXH

SEQ ID NO: 33168 - protein, 44 aa, Artificial Sequence
  GFR-binding peptide
  MOD_RES (6)..(7)..(41)..(43): Xaa is C or S
  MOD_RES (21)..(22)..(23)..(24)..(25): Xaa is A or G
  MOD_RES (26)..(27)..(28)..(29): Xaa is A or G or is absent
TVPKPXXAPTQLSPINVLYFXXXXXXXXXYGKIPNMVVRAXGXH

SEQ ID NO: 33169 - protein, 36 aa, Artificial Sequence
  GFR-binding peptide
  MOD_RES (2)..(36): Xaa is C or S
  MOD_RES (16)..(17)..(18)..(19)..(20): Xaa is A or G
  MOD_RES (21)..(22)..(23)..(24): Xaa is A or G or is absent
TXAPTKLSPINVLYFXXXXXXXXXYGKIPNMVVRSX

SEQ ID NO: 33170 - protein, 37 aa, Artificial Sequence
  GFR-binding peptide
  MOD_RES (34)..(36): Xaa is C or S
  MOD_RES (14)..(15)..(16)..(17)..(18): Xaa is A or G
  MOD_RES (19)..(20)..(21)..(22): Xaa is A or G or is absent
VPTELSPINMLYFXXXXXXXXXYGKIPDMVVEGXGXR

SEQ ID NO: 33171 - protein, 39 aa, Artificial Sequence
  GFR-binding peptide
  MOD_RES (5)..(6)..(38): Xaa is C or S
IPKAXXVPTELSPINMLYFDENEKVVYGKIPDMVVEGXG

SEQ ID NO: 33172 - protein, 37 aa, Artificial Sequence
  GFR-binding peptide
  MOD_RES (1)..(35)..(37): Xaa is C or S
  MOD_RES (15)..(16)..(17)..(18)..(19): Xaa is A or G
  MOD_RES (20)..(21)..(22)..(23): Xaa is A or G or is absent
XTPTKMSPINMLYFXXXXXXXXXYGKIPGMVVDRXGX

SEQ ID NO: 33173 - protein, 44 aa, Artificial Sequence
  GFR-binding peptide
  MOD_RES (6)..(7)..(41)..(43): Xaa is C or S
  MOD_RES (21)..(22)..(23)..(24)..(25): Xaa is A or G
  MOD_RES (26)..(27)..(28)..(29): Xaa is A or G or is absent
KIPKAXXVPTELSPINMLYFXXXXXXXXXYGKIPDMVVEGXGXR

SEQ ID NO: 33174 - protein, 33 aa, Artificial Sequence
  GFR-binding peptide
  MOD_RES (32)..(32): Xaa is C or S
VPTKLSPINILYFDKGVVTYYGKIPGMAVSEXG

SEQ ID NO: 33175 - protein, 37 aa, Artificial Sequence
  GFR-binding peptide
  MOD_RES (35)..(37): Xaa is C or S
  MOD_RES (14)..(15)..(16)..(17)..(18): Xaa is A or G
  MOD_RES (19)..(20)..(21)..(22): Xaa is A or G or is absent
VPTKLSPINVLYFXXXXXXXXXYGKIPEGMSVAEXGX

SEQ ID NO: 33176 - protein, 37 aa, Artificial Sequence
  GFR-binding peptide
  MOD_RES (4)..(5): Xaa is C or S
  MOD_RES (19)..(20)..(21)..(22)..(23): Xaa is A or G
  MOD_RES (24)..(25)..(26)..(27): Xaa is A or G or is absent
PSTXXAPVKTSPINMLYFXXXXXXXXXYGKIPMIVEE

SEQ ID NO: 33177 - protein, 40 aa, Artificial Sequence
  GFR-binding peptide
  MOD_RES (6)..(7): Xaa is C or S
  MOD_RES (21)..(22)..(23)..(24)..(25): Xaa is A or G
  MOD_RES (26)..(27)..(28)..(29): Xaa is A or G or is absent
GSAGPXXTPTKMSPINMLYFXXXXXXXXXYGKIPGMVVDR

SEQ ID NO: 33178 - protein, 38 aa, Artificial Sequence
  GFR-binding peptide
  MOD_RES (2)..(36)..(38): Xaa is C or S
  MOD_RES (16)..(17)..(18)..(19)..(20): Xaa is A or G
  MOD_RES (21)..(22)..(23)..(24): Xaa is A or G or is absent
TXAPTKLSPINVLYFXXXXXXXXXYGKIPNMVVRSXGX

SEQ ID NO: 33179 - protein, 35 aa, Artificial Sequence
  GFR-binding peptide
  MOD_RES (3)..(4): Xaa is C or S
KPXXAPTKLSPINVLYFDDSSNVIYGKIPNMVVRS

SEQ ID NO: 33180 - protein, 38 aa, Artificial Sequence
  GFR-binding peptide
  MOD_RES (4)..(36)..(38): Xaa is C or S
KPTXAPTKLSPINVLYFDDSSNVIYGKIPNMVVRSXGX

SEQ ID NO: 33181 - protein, 33 aa, Artificial Sequence
  GFR-binding peptide
  MOD_RES (1)..(2): Xaa is C or S
XXVPTRLSPINILYFDSANNVVYGKIPDMVVES

SEQ ID NO: 33182 - protein, 38 aa, Artificial Sequence
  GFR-binding peptide
  MOD_RES (6)..(7): Xaa is C or S
STPPTXXVPTRLSPINILYFDSANNVVYGKIPDMVVES

SEQ ID NO: 33183 - protein, 40 aa, Artificial Sequence
  GFR-binding peptide
  MOD_RES (5)..(6)..(40): Xaa is C or S
  MOD_RES (20)..(21)..(22)..(23)..(24): Xaa is A or G
  MOD_RES (25)..(26)..(27)..(28): Xaa is A or G or is absent
APASXXVPARLSPINILYFXXXXXXXXXYGKIPDMVVEAX

SEQ ID NO: 33184 - protein, 39 aa, Artificial Sequence
  GFR-binding peptide
  MOD_RES (4)..(5)..(37)..(39): Xaa is C or S
PKPXXAPTQLSPINVLYFDDSSNVIYGKIPNMVVRAXGX

SEQ ID NO: 33185 - protein, 31 aa, Artificial Sequence
  GFR-binding peptide
  MOD_RES (1)..(1): Xaa is C or S
XVPARLSPINILYFDAANNVVYGKIPDMVVE

SEQ ID NO: 33186 - protein, 39 aa, Artificial Sequence
  GFR-binding peptide
  MOD_RES (2)..(3)..(36)..(38): Xaa is C or S
  MOD_RES (17)..(18)..(19)..(20)..(21): Xaa is A or G
  MOD_RES (22)..(23)..(24)..(25): Xaa is A or G or is absent
TXXAPVKTSPINMLYFXXXXXXXXXYGKIPMIVEEXGXL

SEQ ID NO: 33187 - protein, 38 aa, Artificial Sequence
  GFR-binding peptide
  MOD_RES (4)..(5): Xaa is C or S
  MOD_RES (19)..(20)..(21)..(22)..(23): Xaa is A or G
  MOD_RES (24)..(25)..(26)..(27): Xaa is A or G or is absent
PKAXXAPTKLSPINVLYFXXXXXXXXXYGKIPNMVVKA

SEQ ID NO: 33188 - protein, 38 aa, Artificial Sequence
  GFR-binding peptide
  MOD_RES (5)..(6)..(38): Xaa is C or S
VPKAXXAPTKLSPINVLYFDSSNNVIYGKIPNMVVKAX

SEQ ID NO: 33189 - protein, 34 aa, Artificial Sequence
  GFR-binding peptide
  MOD_RES (34)..(34): Xaa is C or S
  MOD_RES (14)..(15)..(16)..(17)..(18): Xaa is A or G
  MOD_RES (19)..(20)..(21)..(22): Xaa is A or G or is absent
VPARLSPINILYFXXXXXXXXXYGKIPDMVVEAX

SEQ ID NO: 33190 - protein, 38 aa, Artificial Sequence
  GFR-binding peptide
  MOD_RES (5)..(6): Xaa is C or S
  MOD_RES (20)..(21)..(22)..(23)..(24): Xaa is A or G
  MOD_RES (25)..(26)..(27)..(28): Xaa is A or G or is absent
TPPTXXVPTRLSPINILYFXXXXXXXXXYGKIPDMVVE

SEQ ID NO: 33191 - protein, 38 aa, Artificial Sequence
  GFR-binding peptide
  MOD_RES (1)..(2)..(35)..(37): Xaa is C or S
XXVPTKLSPINVLYFDDMGVPTYGKIPEGMSVAEXGXR

SEQ ID NO: 33192 - protein, 37 aa, Artificial Sequence
  GFR-binding peptide
  MOD_RES (3)..(4)..(36): Xaa is C or S
KPXXAPTKLSPINVLYFDDSSNVIYGKIPNMVVRSXG

SEQ ID NO: 33193 - protein, 40 aa, Artificial Sequence
  GFR-binding peptide
  MOD_RES (4)..(5)..(39): Xaa is C or S
  MOD_RES (19)..(20)..(21)..(22)..(23): Xaa is A or G
  MOD_RES (24)..(25)..(26)..(27): Xaa is A or G or is absent
AGPXXTPTKMSPINMLYFXXXXXXXXXYGKIPGMVVDRXG

SEQ ID NO: 33194 - protein, 30 aa, Artificial Sequence
  GFR-binding peptide
VPARLSPINILYFDAANNVVYGKIPDMVVE

SEQ ID NO: 33195 - protein, 41 aa, Artificial Sequence
  GFR-binding peptide
  MOD_RES (5)..(6)..(39)..(41): Xaa is C or S
  MOD_RES (20)..(21)..(22)..(23)..(24): Xaa is A or G
  MOD_RES (25)..(26)..(27)..(28): Xaa is A or G or is absent
VPSTXXAPVKTSPINMLYFXXXXXXXXXYGKIPMIVEEXGX

SEQ ID NO: 33196 - protein, 31 aa, Artificial Sequence
  GFR-binding peptide
  MOD_RES (1)..(1): Xaa is C or S
XVPTELSPINMLYFDENEKVVYGKIPDMVVE

SEQ ID NO: 33197 - protein, 35 aa, Artificial Sequence
  GFR-binding peptide
  MOD_RES (2)..(3): Xaa is C or S
  MOD_RES (17)..(18)..(19)..(20)..(21): Xaa is A or G
  MOD_RES (22)..(23)..(24)..(25): Xaa is A or G or is absent
SXXVPARLSPINILYFXXXXXXXXXYGKIPDMVVE

SEQ ID NO: 33198 - protein, 38 aa, Artificial Sequence
  GFR-binding peptide
  MOD_RES (1)..(2)..(36)..(38): Xaa is C or S
  MOD_RES (16)..(17)..(18)..(19)..(20): Xaa is A or G
  MOD_RES (21)..(22)..(23)..(24): Xaa is A or G or is absent
XXAPTKLSPINVLYFXXXXXXXXXYGKIPNMVVRSXGX

SEQ ID NO: 33199 - protein, 39 aa, Artificial Sequence
  GFR-binding peptide
  MOD_RES (6)..(7)..(38): Xaa is C or S
RVPSTXXAPVKTSPINMLYFDNGRVLLYGKIPMIVEEXG

SEQ ID NO: 33200 - protein, 35 aa, Artificial Sequence
  GFR-binding peptide
  MOD_RES (1)..(33)..(35): Xaa is C or S
XVPTRLSPINILYFDSANNVVYGKIPDMVVESXGX

SEQ ID NO: 33201 - protein, 37 aa, Artificial Sequence
  GFR-binding peptide
  MOD_RES (2)..(3)..(37): Xaa is C or S
  MOD_RES (17)..(18)..(19)..(20)..(21): Xaa is A or G
  MOD_RES (22)..(23)..(24)..(25): Xaa is A or G or is absent
PXXTPTKMSPINMLYFXXXXXXXXXYGKIPGMVVDRX

SEQ ID NO: 33202 - protein, 33 aa, Artificial Sequence
  GFR-binding peptide
  MOD_RES (1)..(1): Xaa is C or S
  MOD_RES (15)..(16)..(17)..(18)..(19): Xaa is A or G
  MOD_RES (20)..(21)..(22)..(23): Xaa is A or G or is absent
XVPTELSPINMLYFXXXXXXXXXYGKIPDMVVE

SEQ ID NO: 33203 - protein, 34 aa, Artificial Sequence
  GFR-binding peptide
  MOD_RES (3)..(4): Xaa is C or S
ASXXVPARLSPINILYFDAANNVVYGKIPDMVVE

SEQ ID NO: 33204 - protein, 34 aa, Artificial Sequence
  GFR-binding peptide
  MOD_RES (4)..(4): Xaa is C or S
KPTXAPTKLSPINVLYFDDSSNVIYGKIPNMVVR

SEQ ID NO: 33205 - protein, 40 aa, Artificial Sequence
  GFR-binding peptide
  MOD_RES (6)..(7): Xaa is C or S
  MOD_RES (21)..(22)..(23)..(24)..(25): Xaa is A or G
  MOD_RES (26)..(27)..(28)..(29): Xaa is A or G or is absent
STPPTXXVPTRLSPINILYFXXXXXXXXXYGKIPDMVVES

SEQ ID NO: 33206 - protein, 38 aa, Artificial Sequence
  GFR-binding peptide
  MOD_RES (1)..(35)..(37): Xaa is C or S
  MOD_RES (15)..(16)..(17)..(18)..(19): Xaa is A or G
  MOD_RES (20)..(21)..(22)..(23): Xaa is A or G or is absent
XAPTQLSPINVLYFXXXXXXXXXYGKIPNMVVRAXGXH

SEQ ID NO: 33207 - protein, 35 aa, Artificial Sequence
  GFR-binding peptide
  MOD_RES (2)..(2): Xaa is C or S
  MOD_RES (16)..(17)..(18)..(19)..(20): Xaa is A or G
  MOD_RES (21)..(22)..(23)..(24): Xaa is A or G or is absent
TXAPTKLSPINVLYFXXXXXXXXXYGKIPNMVVRS

SEQ ID NO: 33208 - protein, 36 aa, Artificial Sequence
  GFR-binding peptide
  MOD_RES (3)..(4)..(36): Xaa is C or S
KAXXAPTKLSPINVLYFDSSNNVIYGKIPNMVVKAX

SEQ ID NO: 33209 - protein, 35 aa, Artificial Sequence
  GFR-binding peptide
  MOD_RES (2)..(3): Xaa is C or S
  MOD_RES (17)..(18)..(19)..(20)..(21): Xaa is A or G
  MOD_RES (22)..(23)..(24)..(25): Xaa is A or G or is absent
AXXVPTKLSPINILYFXXXXXXXXXYGKIPGMAVS

SEQ ID NO: 33210 - protein, 32 aa, Artificial Sequence
  GFR-binding peptide
  MOD_RES (14)..(15)..(16)..(17)..(18): Xaa is A or G
  MOD_RES (19)..(20)..(21)..(22): Xaa is A or G or is absent
TPTKMSPINMLYFXXXXXXXXXYGKIPGMVVD

SEQ ID NO: 33211 - protein, 36 aa, Artificial Sequence
  GFR-binding peptide
  MOD_RES (4)..(5): Xaa is C or S
PKAXXVPTELSPINMLYFDEYDKVVYGKIPEMVVEG

SEQ ID NO: 33212 - protein, 36 aa, Artificial Sequence
  GFR-binding peptide
  MOD_RES (3)..(4)..(36): Xaa is C or S
KPXXAPTKLSPINVLYFDDSSNVIYGKIPNMVVRSX

SEQ ID NO: 33213 - protein, 36 aa, Artificial Sequence
  GFR-binding peptide
  MOD_RES (2)..(3): Xaa is C or S
  MOD_RES (17)..(18)..(19)..(20)..(21): Xaa is A or G
  MOD_RES (22)..(23)..(24)..(25): Xaa is A or G or is absent
PXXAPTQLSPINVLYFXXXXXXXXXYGKIPNMVVRA

SEQ ID NO: 33214 - protein, 40 aa, Artificial Sequence
  GFR-binding peptide
  MOD_RES (6)..(7): Xaa is C or S
  MOD_RES (21)..(22)..(23)..(24)..(25): Xaa is A or G
  MOD_RES (26)..(27)..(28)..(29): Xaa is A or G or is absent
HVPKPXXAPTKLSPINVLYFXXXXXXXXXYGKIPNMVVRS

SEQ ID NO: 33215 - protein, 37 aa, Artificial Sequence
  GFR-binding peptide
  MOD_RES (7)..(7): Xaa is C or S
HVTKPTXAPTKLSPINVLYFDDSSNVIYGKIPNMVVR

SEQ ID NO: 33216 - protein, 38 aa, Artificial Sequence
  GFR-binding peptide
  MOD_RES (5)..(6)..(38): Xaa is C or S
IPKAXXVPTELSPINMLYFDENEKVVYGKIPDMVVEGX

SEQ ID NO: 33217 - protein, 41 aa, Artificial Sequence
  GFR-binding peptide
  MOD_RES (6)..(7)..(41): Xaa is C or S
  MOD_RES (21)..(22)..(23)..(24)..(25): Xaa is A or G
  MOD_RES (26)..(27)..(28)..(29): Xaa is A or G or is absent
HVPKPXXAPTKLSPINVLYFXXXXXXXXXYGKIPNMVVRSX

SEQ ID NO: 33218 - protein, 42 aa, Artificial Sequence
  GFR-binding peptide
  MOD_RES (5)..(6)..(40)..(42): Xaa is C or S
  MOD_RES (20)..(21)..(22)..(23)..(24): Xaa is A or G
  MOD_RES (25)..(26)..(27)..(28): Xaa is A or G or is absent
VPKAXXAPTKLSPINVLYFXXXXXXXXXYGKIPNMVVKAXGX

SEQ ID NO: 33219 - protein, 34 aa, Artificial Sequence
  GFR-binding peptide
  MOD_RES (1)..(2): Xaa is C or S
  MOD_RES (16)..(17)..(18)..(19)..(20): Xaa is A or G
  MOD_RES (21)..(22)..(23)..(24): Xaa is A or G or is absent
XXVPTELSPINMLYFXXXXXXXXXYGKIPDMVVE

SEQ ID NO: 33220 - protein, 39 aa, Artificial Sequence
  GFR-binding peptide
  MOD_RES (6)..(7): Xaa is C or S
  MOD_RES (21)..(22)..(23)..(24)..(25): Xaa is A or G
  MOD_RES (26)..(27)..(28)..(29): Xaa is A or G or is absent
TVPKPXXAPTQLSPINVLYFXXXXXXXXXYGKIPNMVVR

SEQ ID NO: 33221 - protein, 38 aa, Artificial Sequence
  GFR-binding peptide
  MOD_RES (2)..(3)..(35)..(37): Xaa is C or S
PXXAPTQLSPINVLYFDDSSNVIYGKIPNMVVRAXGXH

SEQ ID NO: 33222 - protein, 41 aa, Artificial Sequence
  GFR-binding peptide
  MOD_RES (4)..(5)..(40): Xaa is C or S
  MOD_RES (19)..(20)..(21)..(22)..(23): Xaa is A or G
  MOD_RES (24)..(25)..(26)..(27): Xaa is A or G or is absent
GKAXXVPTKLSPINVLYFXXXXXXXXXYGKIPEGMSVAEXG

SEQ ID NO: 33223 - protein, 41 aa, Artificial Sequence
  GFR-binding peptide
  MOD_RES (5)..(6)..(38)..(40): Xaa is C or S
VPKPXXAPTQLSPINVLYFDDSSNVIYGKIPNMVVRAXGXH

SEQ ID NO: 33224 - protein, 39 aa, Artificial Sequence
  GFR-binding peptide
  MOD_RES (4)..(5)..(39): Xaa is C or S
  MOD_RES (19)..(20)..(21)..(22)..(23): Xaa is A or G
  MOD_RES (24)..(25)..(26)..(27): Xaa is A or G or is absent
PKAXXAPTKLSPINVLYFXXXXXXXXXYGKIPNMVVKAX

SEQ ID NO: 33225 - protein, 41 aa, Artificial Sequence
  GFR-binding peptide
  MOD_RES (6)..(7)..(41): Xaa is C or S
  MOD_RES (21)..(22)..(23)..(24)..(25): Xaa is A or G
  MOD_RES (26)..(27)..(28)..(29): Xaa is A or G or is absent
TVPKPXXAPTQLSPINVLYFXXXXXXXXXYGKIPNMVVRAX

SEQ ID NO: 33226 - protein, 35 aa, Artificial Sequence
  GFR-binding peptide
  MOD_RES (1)..(2)..(34): Xaa is C or S
XXVPTELSPINMLYFDEYDKVVYGKIPEMVVEGXG

SEQ ID NO: 33227 - protein, 33 aa, Artificial Sequence
  GFR-binding peptide
  MOD_RES (33)..(33): Xaa is C or S
VPTKLSPINVLYFDDMGVPTYGKIPEGMSVAEX

SEQ ID NO: 33228 - protein, 40 aa, Artificial Sequence
  GFR-binding peptide
  MOD_RES (2)..(3)..(37)..(39): Xaa is C or S
  MOD_RES (17)..(18)..(19)..(20)..(21): Xaa is A or G
  MOD_RES (22)..(23)..(24)..(25): Xaa is A or G or is absent
AXXVPTKLSPINILYFXXXXXXXXXYGKIPGMAVSEXGXR

SEQ ID NO: 33229 - protein, 34 aa, Artificial Sequence
  GFR-binding peptide
  MOD_RES (1)..(34): Xaa is C or S
XVPTKLSPINVLYFDDMGVPTYGKIPEGMSVAEX

SEQ ID NO: 33230 - protein, 39 aa, Artificial Sequence
  GFR-binding peptide
  MOD_RES (6)..(7)..(39): Xaa is C or S
KASKAXXVPTKLSPINILYFDKGVVTYYGKIPGMAVSEX

SEQ ID NO: 33231 - protein, 33 aa, Artificial Sequence
  GFR-binding peptide
  MOD_RES (32)..(32): Xaa is C or S
VPTELSPINMLYFDENEKVVYGKIPDMVVEGXG

SEQ ID NO: 33232 - protein, 34 aa, Artificial Sequence
  GFR-binding peptide
  MOD_RES (1)..(33): Xaa is C or S
XVPTELSPINMLYFDEYDKVVYGKIPEMVVEGXG

SEQ ID NO: 33233 - protein, 38 aa, Artificial Sequence
  GFR-binding peptide
  MOD_RES (4)..(5)..(38): Xaa is C or S
  MOD_RES (19)..(20)..(21)..(22)..(23): Xaa is A or G
  MOD_RES (24)..(25)..(26)..(27): Xaa is A or G or is absent
PSTXXAPVKTSPINMLYFXXXXXXXXXYGKIPMIVEEX

SEQ ID NO: 33234 - protein, 41 aa, Artificial Sequence
  GFR-binding peptide
  MOD_RES (6)..(7)..(41): Xaa is C or S
  MOD_RES (21)..(22)..(23)..(24)..(25): Xaa is A or G
  MOD_RES (26)..(27)..(28)..(29): Xaa is A or G or is absent
SIPKAXXVPTELSPINMLYFXXXXXXXXXYGKIPEMVVEGX

SEQ ID NO: 33235 - protein, 41 aa, Artificial Sequence
  GFR-binding peptide
  MOD_RES (3)..(4)..(38)..(40): Xaa is C or S
  MOD_RES (18)..(19)..(20)..(21)..(22): Xaa is A or G
  MOD_RES (23)..(24)..(25)..(26): Xaa is A or G or is absent
KAXXVPTKLSPINILYFXXXXXXXXXYGKIPGMAVSEXGXR

SEQ ID NO: 33236 - protein, 39 aa, Artificial Sequence
  GFR-binding peptide
  MOD_RES (6)..(7): Xaa is C or S
  MOD_RES (21)..(22)..(23)..(24)..(25): Xaa is A or G
  MOD_RES (26)..(27)..(28)..(29): Xaa is A or G or is absent
HVPKPXXAPTKLSPINVLYFXXXXXXXXXYGKIPNMVVR

SEQ ID NO: 33237 - protein, 37 aa, Artificial Sequence
  GFR-binding peptide
  MOD_RES (4)..(5)..(37): Xaa is C or S
PPTXXVPTRLSPINILYFDSANNVVYGKIPDMVVESX

SEQ ID NO: 33238 - protein, 40 aa, Artificial Sequence
  GFR-binding peptide
  MOD_RES (6)..(7)..(39): Xaa is C or S
HVPKPXXAPTKLSPINVLYFDDSSNVIYGKIPNMVVRSXG

SEQ ID NO: 33239 - protein, 34 aa, Artificial Sequence
  GFR-binding peptide
  MOD_RES (2)..(3): Xaa is C or S
PXXAPTKLSPINVLYFDDSSNVIYGKIPNMVVRS

SEQ ID NO: 33240 - protein, 40 aa, Artificial Sequence
  GFR-binding peptide
  MOD_RES (4)..(5)..(39): Xaa is C or S
  MOD_RES (19)..(20)..(21)..(22)..(23): Xaa is A or G
  MOD_RES (24)..(25)..(26)..(27): Xaa is A or G or is absent
PKAXXVPTELSPINMLYFXXXXXXXXXYGKIPDMVVEGXG

SEQ ID NO: 33241 - protein, 37 aa, Artificial Sequence
  GFR-binding peptide
  MOD_RES (6)..(6): Xaa is C or S
VTKPTXAPTKLSPINVLYFDDSSNVIYGKIPNMVVRS

SEQ ID NO: 33242 - protein, 36 aa, Artificial Sequence
  GFR-binding peptide
  MOD_RES (4)..(4): Xaa is C or S
  MOD_RES (18)..(19)..(20)..(21)..(22): Xaa is A or G
  MOD_RES (23)..(24)..(25)..(26): Xaa is A or G or is absent
KPTXAPTKLSPINVLYFXXXXXXXXXYGKIPNMVVR

SEQ ID NO: 33243 - protein, 40 aa, Artificial Sequence
  GFR-binding peptide
  MOD_RES (4)..(5)..(39): Xaa is C or S
  MOD_RES (19)..(20)..(21)..(22)..(23): Xaa is A or G
  MOD_RES (24)..(25)..(26)..(27): Xaa is A or G or is absent
SKAXXVPTKLSPINILYFXXXXXXXXXYGKIPGMAVSEXG

SEQ ID NO: 33244 - protein, 40 aa, Artificial Sequence
  GFR-binding peptide
  MOD_RES (5)..(6)..(40): Xaa is C or S
  MOD_RES (20)..(21)..(22)..(23)..(24): Xaa is A or G
  MOD_RES (25)..(26)..(27)..(28): Xaa is A or G or is absent
VPKPXXAPTQLSPINVLYFXXXXXXXXXYGKIPNMVVRAX

SEQ ID NO: 33245 - protein, 38 aa, Artificial Sequence
  GFR-binding peptide
  MOD_RES (4)..(5)..(37): Xaa is C or S
PPTXXVPTRLSPINILYFDSANNVVYGKIPDMVVESXG

SEQ ID NO: 33246 - protein, 31 aa, Artificial Sequence
  GFR-binding peptide
APTQLSPINVLYFDDSSNVIYGKIPNMVVRA

SEQ ID NO: 33247 - protein, 39 aa, Artificial Sequence
  GFR-binding peptide
  MOD_RES (6)..(7)..(39): Xaa is C or S
YVPKPXXAPTKLSPINVLYFDDSSNVIYGKIPNMVVRSX

SEQ ID NO: 33248 - protein, 38 aa, Artificial Sequence
  GFR-binding peptide
  MOD_RES (1)..(35)..(37): Xaa is C or S
  MOD_RES (15)..(16)..(17)..(18)..(19): Xaa is A or G
  MOD_RES (20)..(21)..(22)..(23): Xaa is A or G or is absent
XVPTELSPINMLYFXXXXXXXXXYGKIPDMVVEGXGXR

SEQ ID NO: 33249 - protein, 39 aa, Artificial Sequence
  GFR-binding peptide
  MOD_RES (3)..(4)..(36)..(38): Xaa is C or S
PTXXVPTRLSPINILYFDSANNVVYGKIPDMVVESXGXR

SEQ ID NO: 33250 - protein, 37 aa, Artificial Sequence
  GFR-binding peptide
  MOD_RES (1)..(36): Xaa is C or S
  MOD_RES (15)..(16)..(17)..(18)..(19): Xaa is A or G
  MOD_RES (20)..(21)..(22)..(23): Xaa is A or G or is absent
XVPTKLSPINVLYFXXXXXXXXXYGKIPEGMSVAEXG

SEQ ID NO: 33251 - protein, 41 aa, Artificial Sequence
  GFR-binding peptide
  MOD_RES (5)..(6)..(40): Xaa is C or S
  MOD_RES (20)..(21)..(22)..(23)..(24): Xaa is A or G
  MOD_RES (25)..(26)..(27)..(28): Xaa is A or G or is absent
VPKPXXAPTKLSPINVLYFXXXXXXXXXYGKIPNMVVRSXG

SEQ ID NO: 33252 - protein, 42 aa, Artificial Sequence
  GFR-binding peptide
  MOD_RES (5)..(6)..(40)..(42): Xaa is C or S
  MOD_RES (20)..(21)..(22)..(23)..(24): Xaa is A or G
  MOD_RES (25)..(26)..(27)..(28): Xaa is A or G or is absent
SAGPXXTPTKMSPINMLYFXXXXXXXXXYGKIPGMVVDRXGX

SEQ ID NO: 33253 - protein, 36 aa, Artificial Sequence
  GFR-binding peptide
  MOD_RES (3)..(4): Xaa is C or S
  MOD_RES (18)..(19)..(20)..(21)..(22): Xaa is A or G
  MOD_RES (23)..(24)..(25)..(26): Xaa is A or G or is absent
KPXXAPTKLSPINVLYFXXXXXXXXXYGKIPNMVVR

SEQ ID NO: 33254 - protein, 41 aa, Artificial Sequence
  GFR-binding peptide
  MOD_RES (6)..(7)..(41): Xaa is C or S
  MOD_RES (21)..(22)..(23)..(24)..(25): Xaa is A or G
  MOD_RES (26)..(27)..(28)..(29): Xaa is A or G or is absent
STPPTXXVPTRLSPINILYFXXXXXXXXXYGKIPDMVVESX

SEQ ID NO: 33255 - protein, 39 aa, Artificial Sequence
  GFR-binding peptide
  MOD_RES (1)..(2)..(36)..(38): Xaa is C or S
  MOD_RES (16)..(17)..(18)..(19)..(20): Xaa is A or G
  MOD_RES (21)..(22)..(23)..(24): Xaa is A or G or is absent
XXVPTKLSPINILYFXXXXXXXXXYGKIPGMAVSEXGXR

SEQ ID NO: 33256 - protein, 41 aa, Artificial Sequence
  GFR-binding peptide
  MOD_RES (6)..(7)..(41): Xaa is C or S
  MOD_RES (21)..(22)..(23)..(24)..(25): Xaa is A or G
  MOD_RES (26)..(27)..(28)..(29): Xaa is A or G or is absent
AVPKAXXAPTKLSPINVLYFXXXXXXXXXYGKIPNMVVKAX

SEQ ID NO: 33257 - protein, 30 aa, Artificial Sequence
  GFR-binding peptide
APTKLSPINVLYFDDSSNVIYGKIPNMVVR

SEQ ID NO: 33258 - protein, 33 aa, Artificial Sequence
  GFR-binding peptide
  MOD_RES (1)..(1): Xaa is C or S
  MOD_RES (15)..(16)..(17)..(18)..(19): Xaa is A or G
  MOD_RES (20)..(21)..(22)..(23): Xaa is A or G or is absent
XTPTKMSPINMLYFXXXXXXXXXYGKIPGMVVD

SEQ ID NO: 33259 - protein, 34 aa, Artificial Sequence
  GFR-binding peptide
  MOD_RES (34)..(34): Xaa is C or S
  MOD_RES (14)..(15)..(16)..(17)..(18): Xaa is A or G
  MOD_RES (19)..(20)..(21)..(22): Xaa is A or G or is absent
APTQLSPINVLYFXXXXXXXXXYGKIPNMVVRAX

SEQ ID NO: 33260 - protein, 42 aa, Artificial Sequence
  GFR-binding peptide
  MOD_RES (6)..(7)..(41): Xaa is C or S
  MOD_RES (21)..(22)..(23)..(24)..(25): Xaa is A or G
  MOD_RES (26)..(27)..(28)..(29): Xaa is A or G or is absent
STPPTXXVPTRLSPINILYFXXXXXXXXXYGKIPDMVVESXG

SEQ ID NO: 33261 - protein, 40 aa, Artificial Sequence
  GFR-binding peptide
  MOD_RES (3)..(4)..(39): Xaa is C or S
  MOD_RES (18)..(19)..(20)..(21)..(22): Xaa is A or G
  MOD_RES (23)..(24)..(25)..(26): Xaa is A or G or is absent
KAXXVPTKLSPINVLYFXXXXXXXXXYGKIPEGMSVAEXG

SEQ ID NO: 33262 - protein, 36 aa, Artificial Sequence
  GFR-binding peptide
  MOD_RES (5)..(6): Xaa is C or S
APASXXVPARLSPINILYFDAANNVVYGKIPDMVVE

SEQ ID NO: 33263 - protein, 32 aa, Artificial Sequence
  GFR-binding peptide
  MOD_RES (1)..(2): Xaa is C or S
XXVPTELSPINMLYFDEYDKVVYGKIPEMVVE

SEQ ID NO: 33264 - protein, 36 aa, Artificial Sequence
  GFR-binding peptide
  MOD_RES (4)..(5)..(36): Xaa is C or S
PSTXXAPVKTSPINMLYFDNGRVLLYGKIPMIVEEX

SEQ ID NO: 33265 - protein, 35 aa, Artificial Sequence
  GFR-binding peptide
  MOD_RES (2)..(3)..(35): Xaa is C or S
AXXVPTELSPINMLYFDEYDKVVYGKIPEMVVEGX

SEQ ID NO: 33266 - protein, 36 aa, Artificial Sequence
  GFR-binding peptide
  MOD_RES (3)..(4): Xaa is C or S
  MOD_RES (18)..(19)..(20)..(21)..(22): Xaa is A or G
  MOD_RES (23)..(24)..(25)..(26): Xaa is A or G or is absent
KAXXVPTELSPINMLYFXXXXXXXXXYGKIPEMVVE

SEQ ID NO: 33267 - protein, 31 aa, Artificial Sequence
  GFR-binding peptide
  MOD_RES (1)..(1): Xaa is C or S
XAPTKLSPINVLYFDSSNNVIYGKIPNMVVK

SEQ ID NO: 33268 - protein, 38 aa, Artificial Sequence
  GFR-binding peptide
  MOD_RES (1)..(2)..(36)..(38): Xaa is C or S
  MOD_RES (16)..(17)..(18)..(19)..(20): Xaa is A or G
  MOD_RES (21)..(22)..(23)..(24): Xaa is A or G or is absent
XXVPTKLSPINILYFXXXXXXXXXYGKIPGMAVSEXGX

SEQ ID NO: 33269 - protein, 33 aa, Artificial Sequence
  GFR-binding peptide
  MOD_RES (1)..(33): Xaa is C or S
XAPTKLSPINVLYFDDSSNVIYGKIPNMVVRSX

SEQ ID NO: 33270 - protein, 34 aa, Artificial Sequence
  GFR-binding peptide
  MOD_RES (1)..(1): Xaa is C or S
  MOD_RES (15)..(16)..(17)..(18)..(19): Xaa is A or G
  MOD_RES (20)..(21)..(22)..(23): Xaa is A or G or is absent
XVPTKLSPINILYFXXXXXXXXXYGKIPGMAVSE

SEQ ID NO: 33271 - protein, 40 aa, Artificial Sequence
  GFR-binding peptide
  MOD_RES (2)..(3)..(37)..(39): Xaa is C or S
  MOD_RES (17)..(18)..(19)..(20)..(21): Xaa is A or G
  MOD_RES (22)..(23)..(24)..(25): Xaa is A or G or is absent
AXXAPTKLSPINVLYFXXXXXXXXXYGKIPNMVVKAXGXH

SEQ ID NO: 33272 - protein, 40 aa, Artificial Sequence
  GFR-binding peptide
  MOD_RES (4)..(5)..(37)..(39): Xaa is C or S
SKAXXVPTKLSPINILYFDKGVVTYYGKIPGMAVSEXGXR

SEQ ID NO: 33273 - protein, 34 aa, Artificial Sequence
  GFR-binding peptide
  MOD_RES (3)..(4): Xaa is C or S
KPXXAPTQLSPINVLYFDDSSNVIYGKIPNMVVR

SEQ ID NO: 33274 - protein, 42 aa, Artificial Sequence
  GFR-binding peptide
  MOD_RES (6)..(7)..(41): Xaa is C or S
  MOD_RES (21)..(22)..(23)..(24)..(25): Xaa is A or G
  MOD_RES (26)..(27)..(28)..(29): Xaa is A or G or is absent
KASKAXXVPTKLSPINILYFXXXXXXXXXYGKIPGMAVSEXG

SEQ ID NO: 33275 - protein, 38 aa, Artificial Sequence
  GFR-binding peptide
  MOD_RES (1)..(2)..(36)..(38): Xaa is C or S
  MOD_RES (16)..(17)..(18)..(19)..(20): Xaa is A or G
  MOD_RES (21)..(22)..(23)..(24): Xaa is A or G or is absent
XXVPTELSPINMLYFXXXXXXXXXYGKIPDMVVEGXGX

SEQ ID NO: 33276 - protein, 36 aa, Artificial Sequence
  GFR-binding peptide
  MOD_RES (3)..(4)..(36): Xaa is C or S
KAXXVPTKLSPINILYFDKGVVTYYGKIPGMAVSEX

SEQ ID NO: 33277 - protein, 39 aa, Artificial Sequence
  GFR-binding peptide
  MOD_RES (2)..(3)..(37)..(39): Xaa is C or S
  MOD_RES (17)..(18)..(19)..(20)..(21): Xaa is A or G
  MOD_RES (22)..(23)..(24)..(25): Xaa is A or G or is absent
PXXAPTQLSPINVLYFXXXXXXXXXYGKIPNMVVRAXGX

SEQ ID NO: 33278 - protein, 35 aa, Artificial Sequence
  GFR-binding peptide
  MOD_RES (32)..(34): Xaa is C or S
APTKLSPINVLYFDSSNNVIYGKIPNMVVKAXGXH

SEQ ID NO: 33279 - protein, 38 aa, Artificial Sequence
  GFR-binding peptide
  MOD_RES (3)..(4)..(36)..(38): Xaa is C or S
KPXXAPTQLSPINVLYFDDSSNVIYGKIPNMVVRAXGX

SEQ ID NO: 33280 - protein, 37 aa, Artificial Sequence
  GFR-binding peptide
  MOD_RES (6)..(7): Xaa is C or S
KIPKAXXVPTELSPINMLYFDENEKVVYGKIPDMVVE

SEQ ID NO: 33281 - protein, 38 aa, Artificial Sequence
  GFR-binding peptide
  MOD_RES (2)..(3)..(35)..(37): Xaa is C or S
AXXVPTELSPINMLYFDEYDKVVYGKIPEMVVEGXGXR

SEQ ID NO: 33282 - protein, 39 aa, Artificial Sequence
  GFR-binding peptide
  MOD_RES (6)..(7): Xaa is C or S
  MOD_RES (21)..(22)..(23)..(24)..(25): Xaa is A or G
  MOD_RES (26)..(27)..(28)..(29): Xaa is A or G or is absent
STPPTXXVPTRLSPINILYFXXXXXXXXXYGKIPDMVVE

SEQ ID NO: 33283 - protein, 39 aa, Artificial Sequence
  GFR-binding peptide
  MOD_RES (4)..(36)..(38): Xaa is C or S
KPTXAPTKLSPINVLYFDDSSNVIYGKIPNMVVRSXGXH

SEQ ID NO: 33284 - protein, 40 aa, Artificial Sequence
  GFR-binding peptide
  MOD_RES (4)..(5)..(39): Xaa is C or S
  MOD_RES (19)..(20)..(21)..(22)..(23): Xaa is A or G
  MOD_RES (24)..(25)..(26)..(27): Xaa is A or G or is absent
PKPXXAPTKLSPINVLYFXXXXXXXXXYGKIPNMVVRSXG

SEQ ID NO: 33285 - protein, 38 aa, Artificial Sequence
  GFR-binding peptide
  MOD_RES (5)..(6): Xaa is C or S
  MOD_RES (20)..(21)..(22)..(23)..(24): Xaa is A or G
  MOD_RES (25)..(26)..(27)..(28): Xaa is A or G or is absent
VPSTXXAPVKTSPINMLYFXXXXXXXXXYGKIPMIVEE

SEQ ID NO: 33286 - protein, 35 aa, Artificial Sequence
  GFR-binding peptide
  MOD_RES (34)..(34): Xaa is C or S
  MOD_RES (14)..(15)..(16)..(17)..(18): Xaa is A or G
  MOD_RES (19)..(20)..(21)..(22): Xaa is A or G or is absent
APTKLSPINVLYFXXXXXXXXXYGKIPNMVVKAXG

SEQ ID NO: 33287 - protein, 41 aa, Artificial Sequence
  GFR-binding peptide
  MOD_RES (6)..(7)..(40): Xaa is C or S
  MOD_RES (21)..(22)..(23)..(24)..(25): Xaa is A or G
  MOD_RES (26)..(27)..(28)..(29): Xaa is A or G or is absent
RVPSTXXAPVKTSPINMLYFXXXXXXXXXYGKIPMIVEEXG

SEQ ID NO: 33288 - protein, 43 aa, Artificial Sequence
  GFR-binding peptide
  MOD_RES (5)..(6)..(40)..(42): Xaa is C or S
  MOD_RES (20)..(21)..(22)..(23)..(24): Xaa is A or G
  MOD_RES (25)..(26)..(27)..(28): Xaa is A or G or is absent
VPKAXXAPTKLSPINVLYFXXXXXXXXXYGKIPNMVVKAXGXH

SEQ ID NO: 33289 - protein, 34 aa, Artificial Sequence
  GFR-binding peptide
  MOD_RES (1)..(2): Xaa is C or S
  MOD_RES (16)..(17)..(18)..(19)..(20): Xaa is A or G
  MOD_RES (21)..(22)..(23)..(24): Xaa is A or G or is absent
XXVPTELSPINMLYFXXXXXXXXXYGKIPEMVVE

SEQ ID NO: 33290 - protein, 42 aa, Artificial Sequence
  GFR-binding peptide
  MOD_RES (6)..(7)..(41): Xaa is C or S
  MOD_RES (21)..(22)..(23)..(24)..(25): Xaa is A or G
  MOD_RES (26)..(27)..(28)..(29): Xaa is A or G or is absent
AAPASXXVPARLSPINILYFXXXXXXXXXYGKIPDMVVEAXG

SEQ ID NO: 33291 - protein, 39 aa, Artificial Sequence
  GFR-binding peptide
  MOD_RES (5)..(6)..(38): Xaa is C or S
VPKPXXAPTKLSPINVLYFDDSSNVIYGKIPNMVVRSXG

SEQ ID NO: 33292 - protein, 39 aa, Artificial Sequence
  GFR-binding peptide
  MOD_RES (5)..(6): Xaa is C or S
  MOD_RES (20)..(21)..(22)..(23)..(24): Xaa is A or G
  MOD_RES (25)..(26)..(27)..(28): Xaa is A or G or is absent
VPKAXXAPTKLSPINVLYFXXXXXXXXXYGKIPNMVVKA

SEQ ID NO: 33293 - protein, 39 aa, Artificial Sequence
  GFR-binding peptide
  MOD_RES (6)..(7)..(39): Xaa is C or S
TVPKPXXAPTQLSPINVLYFDDSSNVIYGKIPNMVVRAX

SEQ ID NO: 33294 - protein, 38 aa, Artificial Sequence
  GFR-binding peptide
  MOD_RES (3)..(4)..(38): Xaa is C or S
  MOD_RES (18)..(19)..(20)..(21)..(22): Xaa is A or G
  MOD_RES (23)..(24)..(25)..(26): Xaa is A or G or is absent
KAXXAPTKLSPINVLYFXXXXXXXXXYGKIPNMVVKAX

SEQ ID NO: 33295 - protein, 40 aa, Artificial Sequence
  GFR-binding peptide
  MOD_RES (5)..(6)..(40): Xaa is C or S
  MOD_RES (20)..(21)..(22)..(23)..(24): Xaa is A or G
  MOD_RES (25)..(26)..(27)..(28): Xaa is A or G or is absent
IPKAXXVPTELSPINMLYFXXXXXXXXXYGKIPDMVVEGX

SEQ ID NO: 33296 - protein, 40 aa, Artificial Sequence
  GFR-binding peptide
  MOD_RES (3)..(4)..(37)..(39): Xaa is C or S
KAXXVPTKLSPINVLYFDDMGVPTYGKIPEGMSVAEXGXR

SEQ ID NO: 33297 - protein, 36 aa, Artificial Sequence
  GFR-binding peptide
  MOD_RES (1)..(2)..(36): Xaa is C or S
  MOD_RES (16)..(17)..(18)..(19)..(20): Xaa is A or G
  MOD_RES (21)..(22)..(23)..(24): Xaa is A or G or is absent
XXVPTRLSPINILYFXXXXXXXXXYGKIPDMVVESX

SEQ ID NO: 33298 - protein, 38 aa, Artificial Sequence
  GFR-binding peptide
  MOD_RES (1)..(2)..(36)..(38): Xaa is C or S
  MOD_RES (16)..(17)..(18)..(19)..(20): Xaa is A or G
  MOD_RES (21)..(22)..(23)..(24): Xaa is A or G or is absent
XXVPARLSPINILYFXXXXXXXXXYGKIPDMVVEAXGX

SEQ ID NO: 33299 - protein, 37 aa, Artificial Sequence
  GFR-binding peptide
  MOD_RES (5)..(6): Xaa is C or S
ASKAXXVPTKLSPINILYFDKGVVTYYGKIPGMAVSE

SEQ ID NO: 33300 - protein, 40 aa, Artificial Sequence
  GFR-binding peptide
  MOD_RES (5)..(6)..(39): Xaa is C or S
  MOD_RES (20)..(21)..(22)..(23)..(24): Xaa is A or G
  MOD_RES (25)..(26)..(27)..(28): Xaa is A or G or is absent
VPSTXXAPVKTSPINMLYFXXXXXXXXXYGKIPMIVEEXG

SEQ ID NO: 33301 - protein, 37 aa, Artificial Sequence
  GFR-binding peptide
  MOD_RES (6)..(7): Xaa is C or S
RVPSTXXAPVKTSPINMLYFDNGRVLLYGKIPMIVEE

SEQ ID NO: 33302 - protein, 35 aa, Artificial Sequence
  GFR-binding peptide
  MOD_RES (1)..(35): Xaa is C or S
  MOD_RES (15)..(16)..(17)..(18)..(19): Xaa is A or G
  MOD_RES (20)..(21)..(22)..(23): Xaa is A or G or is absent
XTPTKMSPINMLYFXXXXXXXXXYGKIPGMVVDRX

SEQ ID NO: 33303 - protein, 42 aa, Artificial Sequence
  GFR-binding peptide
  MOD_RES (4)..(5)..(39)..(41): Xaa is C or S
  MOD_RES (19)..(20)..(21)..(22)..(23): Xaa is A or G
  MOD_RES (24)..(25)..(26)..(27): Xaa is A or G or is absent
PASXXVPARLSPINILYFXXXXXXXXXYGKIPDMVVEAXGXR

SEQ ID NO: 33304 - protein, 36 aa, Artificial Sequence
  GFR-binding peptide
  MOD_RES (2)..(3): Xaa is C or S
  MOD_RES (17)..(18)..(19)..(20)..(21): Xaa is A or G
  MOD_RES (22)..(23)..(24)..(25): Xaa is A or G or is absent
AXXVPTELSPINMLYFXXXXXXXXXYGKIPDMVVEG

SEQ ID NO: 33305 - protein, 34 aa, Artificial Sequence
  GFR-binding peptide
  MOD_RES (3)..(4): Xaa is C or S
KAXXVPTELSPINMLYFDEYDKVVYGKIPEMVVE

SEQ ID NO: 33306 - protein, 33 aa, Artificial Sequence
  GFR-binding peptide
  MOD_RES (1)..(2): Xaa is C or S
XXAPTQLSPINVLYFDDSSNVIYGKIPNMVVRA

SEQ ID NO: 33307 - protein, 37 aa, Artificial Sequence
  GFR-binding peptide
  MOD_RES (1)..(2)..(34)..(36): Xaa is C or S
XXAPTKLSPINVLYFDSSNNVIYGKIPNMVVKAXGXH

SEQ ID NO: 33308 - protein, 32 aa, Artificial Sequence
  GFR-binding peptide
  MOD_RES (1)..(2): Xaa is C or S
XXAPTKLSPINVLYFDSSNNVIYGKIPNMVVK

SEQ ID NO: 33309 - protein, 35 aa, Artificial Sequence
  GFR-binding peptide
  MOD_RES (1)..(32)..(34): Xaa is C or S
XAPVKTSPINMLYFDNGRVLLYGKIPMIVEEXGXL

SEQ ID NO: 33310 - protein, 34 aa, Artificial Sequence
  GFR-binding peptide
  MOD_RES (1)..(1): Xaa is C or S
  MOD_RES (15)..(16)..(17)..(18)..(19): Xaa is A or G
  MOD_RES (20)..(21)..(22)..(23): Xaa is A or G or is absent
XVPARLSPINILYFXXXXXXXXXYGKIPDMVVEA

SEQ ID NO: 33311 - protein, 38 aa, Artificial Sequence
  GFR-binding peptide
  MOD_RES (4)..(5)..(38): Xaa is C or S
GKAXXVPTKLSPINVLYFDDMGVPTYGKIPEGMSVAEX

SEQ ID NO: 33312 - protein, 33 aa, Artificial Sequence
  GFR-binding peptide
  MOD_RES (3)..(3): Xaa is C or S
PTXAPTKLSPINVLYFDDSSNVIYGKIPNMVVR

SEQ ID NO: 33313 - protein, 38 aa, Artificial Sequence
  GFR-binding peptide
  MOD_RES (2)..(3)..(37): Xaa is C or S
  MOD_RES (17)..(18)..(19)..(20)..(21): Xaa is A or G
  MOD_RES (22)..(23)..(24)..(25): Xaa is A or G or is absent
PXXAPTQLSPINVLYFXXXXXXXXXYGKIPNMVVRAXG

SEQ ID NO: 33314 - protein, 44 aa, Artificial Sequence
  GFR-binding peptide
  MOD_RES (5)..(6)..(41)..(43): Xaa is C or S
  MOD_RES (20)..(21)..(22)..(23)..(24): Xaa is A or G
  MOD_RES (25)..(26)..(27)..(28): Xaa is A or G or is absent
VGKAXXVPTKLSPINVLYFXXXXXXXXXYGKIPEGMSVAEXGXR

SEQ ID NO: 33315 - protein, 35 aa, Artificial Sequence
  GFR-binding peptide
  MOD_RES (1)..(33)..(35): Xaa is C or S
XAPTQLSPINVLYFDDSSNVIYGKIPNMVVRAXGX

SEQ ID NO: 33316 - protein, 39 aa, Artificial Sequence
  GFR-binding peptide
  MOD_RES (5)..(6)..(38): Xaa is C or S
VPKPXXAPTQLSPINVLYFDDSSNVIYGKIPNMVVRAXG

SEQ ID NO: 33317 - protein, 42 aa, Artificial Sequence
  GFR-binding peptide
  MOD_RES (6)..(7)..(39)..(41): Xaa is C or S
AVPKAXXAPTKLSPINVLYFDSSNNVIYGKIPNMVVKAXGXH

SEQ ID NO: 33318 - protein, 42 aa, Artificial Sequence
  GFR-binding peptide
  MOD_RES (6)..(7)..(41): Xaa is C or S
  MOD_RES (21)..(22)..(23)..(24)..(25): Xaa is A or G
  MOD_RES (26)..(27)..(28)..(29): Xaa is A or G or is absent
AVPKAXXAPTKLSPINVLYFXXXXXXXXXYGKIPNMVVKAXG

SEQ ID NO: 33319 - protein, 39 aa, Artificial Sequence
  GFR-binding peptide
  MOD_RES (3)..(4)..(39): Xaa is C or S
  MOD_RES (18)..(19)..(20)..(21)..(22): Xaa is A or G
  MOD_RES (23)..(24)..(25)..(26): Xaa is A or G or is absent
KAXXVPTKLSPINVLYFXXXXXXXXXYGKIPEGMSVAEX

SEQ ID NO: 33320 - protein, 36 aa, Artificial Sequence
  GFR-binding peptide
  MOD_RES (34)..(36): Xaa is C or S
  MOD_RES (14)..(15)..(16)..(17)..(18): Xaa is A or G
  MOD_RES (19)..(20)..(21)..(22): Xaa is A or G or is absent
APTQLSPINVLYFXXXXXXXXXYGKIPNMVVRAXGX

SEQ ID NO: 33321 - protein, 35 aa, Artificial Sequence
  GFR-binding peptide
  MOD_RES (3)..(35): Xaa is C or S
PTXAPTKLSPINVLYFDDSSNVIYGKIPNMVVRSX

SEQ ID NO: 33322 - protein, 34 aa, Artificial Sequence
  GFR-binding peptide
  MOD_RES (1)..(1): Xaa is C or S
  MOD_RES (15)..(16)..(17)..(18)..(19): Xaa is A or G
  MOD_RES (20)..(21)..(22)..(23): Xaa is A or G or is absent
XTPTKMSPINMLYFXXXXXXXXXYGKIPGMVVDR

SEQ ID NO: 33323 - protein, 38 aa, Artificial Sequence
  GFR-binding peptide
  MOD_RES (2)..(3)..(37): Xaa is C or S
  MOD_RES (17)..(18)..(19)..(20)..(21): Xaa is A or G
  MOD_RES (22)..(23)..(24)..(25): Xaa is A or G or is absent
AXXVPTKLSPINILYFXXXXXXXXXYGKIPGMAVSEXG

SEQ ID NO: 33324 - protein, 34 aa, Artificial Sequence
  GFR-binding peptide
  MOD_RES (1)..(1): Xaa is C or S
  MOD_RES (15)..(16)..(17)..(18)..(19): Xaa is A or G
  MOD_RES (20)..(21)..(22)..(23): Xaa is A or G or is absent
XVPTELSPINMLYFXXXXXXXXXYGKIPEMVVEG

SEQ ID NO: 33325 - protein, 40 aa, Artificial Sequence
  GFR-binding peptide
  MOD_RES (6)..(7): Xaa is C or S
  MOD_RES (21)..(22)..(23)..(24)..(25): Xaa is A or G
  MOD_RES (26)..(27)..(28)..(29): Xaa is A or G or is absent
KASKAXXVPTKLSPINILYFXXXXXXXXXYGKIPGMAVSE

SEQ ID NO: 33326 - protein, 39 aa, Artificial Sequence
  GFR-binding peptide
  MOD_RES (4)..(5)..(39): Xaa is C or S
  MOD_RES (19)..(20)..(21)..(22)..(23): Xaa is A or G
  MOD_RES (24)..(25)..(26)..(27): Xaa is A or G or is absent
SKAXXVPTKLSPINILYFXXXXXXXXXYGKIPGMAVSEX

SEQ ID NO: 33327 - protein, 41 aa, Artificial Sequence
  GFR-binding peptide
  MOD_RES (4)..(5)..(38)..(40): Xaa is C or S
  MOD_RES (19)..(20)..(21)..(22)..(23): Xaa is A or G
  MOD_RES (24)..(25)..(26)..(27): Xaa is A or G or is absent
PSTXXAPVKTSPINMLYFXXXXXXXXXYGKIPMIVEEXGXL

SEQ ID NO: 33328 - protein, 35 aa, Artificial Sequence
  GFR-binding peptide
  MOD_RES (2)..(3): Xaa is C or S
  MOD_RES (17)..(18)..(19)..(20)..(21): Xaa is A or G
  MOD_RES (22)..(23)..(24)..(25): Xaa is A or G or is absent
TXXVPTRLSPINILYFXXXXXXXXXYGKIPDMVVE

SEQ ID NO: 33329 - protein, 31 aa, Artificial Sequence
  GFR-binding peptide
APTKLSPINVLYFDDSSNVIYGKIPNMVVRS

SEQ ID NO: 33330 - protein, 39 aa, Artificial Sequence
  GFR-binding peptide
  MOD_RES (6)..(7): Xaa is C or S
  MOD_RES (21)..(22)..(23)..(24)..(25): Xaa is A or G
  MOD_RES (26)..(27)..(28)..(29): Xaa is A or G or is absent
KIPKAXXVPTELSPINMLYFXXXXXXXXXYGKIPDMVVE

SEQ ID NO: 33331 - protein, 42 aa, Artificial Sequence
  GFR-binding peptide
  MOD_RES (5)..(6)..(40)..(42): Xaa is C or S
  MOD_RES (20)..(21)..(22)..(23)..(24): Xaa is A or G
  MOD_RES (25)..(26)..(27)..(28): Xaa is A or G or is absent
VPKPXXAPTKLSPINVLYFXXXXXXXXXYGKIPNMVVRSXGX

SEQ ID NO: 33332 - protein, 34 aa, Artificial Sequence
  GFR-binding peptide
  MOD_RES (1)..(2): Xaa is C or S
  MOD_RES (16)..(17)..(18)..(19)..(20): Xaa is A or G
  MOD_RES (21)..(22)..(23)..(24): Xaa is A or G or is absent
XXAPTQLSPINVLYFXXXXXXXXXYGKIPNMVVR

SEQ ID NO: 33333 - protein, 36 aa, Artificial Sequence
  GFR-binding peptide
  MOD_RES (34)..(36): Xaa is C or S
  MOD_RES (14)..(15)..(16)..(17)..(18): Xaa is A or G
  MOD_RES (19)..(20)..(21)..(22): Xaa is A or G or is absent
VPTELSPINMLYFXXXXXXXXXYGKIPEMVVEGXGX

SEQ ID NO: 33334 - protein, 39 aa, Artificial Sequence
  GFR-binding peptide
  MOD_RES (3)..(4)..(37)..(39): Xaa is C or S
  MOD_RES (18)..(19)..(20)..(21)..(22): Xaa is A or G
  MOD_RES (23)..(24)..(25)..(26): Xaa is A or G or is absent
STXXAPVKTSPINMLYFXXXXXXXXXYGKIPMIVEEXGX

SEQ ID NO: 33335 - protein, 38 aa, Artificial Sequence
  GFR-binding peptide
  MOD_RES (4)..(5)..(36)..(38): Xaa is C or S
PSTXXAPVKTSPINMLYFDNGRVLLYGKIPMIVEEXGX

SEQ ID NO: 33336 - protein, 37 aa, Artificial Sequence
  GFR-binding peptide
  MOD_RES (1)..(2)..(36): Xaa is C or S
  MOD_RES (16)..(17)..(18)..(19)..(20): Xaa is A or G
  MOD_RES (21)..(22)..(23)..(24): Xaa is A or G or is absent
XXVPTKLSPINILYFXXXXXXXXXYGKIPGMAVSEXG

SEQ ID NO: 33337 - protein, 36 aa, Artificial Sequence
  GFR-binding peptide
  MOD_RES (3)..(4): Xaa is C or S
  MOD_RES (18)..(19)..(20)..(21)..(22): Xaa is A or G
  MOD_RES (23)..(24)..(25)..(26): Xaa is A or G or is absent
KAXXVPTELSPINMLYFXXXXXXXXXYGKIPDMVVE

SEQ ID NO: 33338 - protein, 37 aa, Artificial Sequence
  GFR-binding peptide
  MOD_RES (1)..(2)..(34)..(36): Xaa is C or S
XXAPTQLSPINVLYFDDSSNVIYGKIPNMVVRAXGXH

SEQ ID NO: 33339 - protein, 38 aa, Artificial Sequence
  GFR-binding peptide
  MOD_RES (6)..(7)..(38): Xaa is C or S
RVPSTXXAPVKTSPINMLYFDNGRVLLYGKIPMIVEEX

SEQ ID NO: 33340 - protein, 34 aa, Artificial Sequence
  GFR-binding peptide
  MOD_RES (1)..(33): Xaa is C or S
XAPTKLSPINVLYFDSSNNVIYGKIPNMVVKAXG

SEQ ID NO: 33341 - protein, 39 aa, Artificial Sequence
  GFR-binding peptide
  MOD_RES (6)..(7): Xaa is C or S
  MOD_RES (21)..(22)..(23)..(24)..(25): Xaa is A or G
  MOD_RES (26)..(27)..(28)..(29): Xaa is A or G or is absent
AVPKAXXAPTKLSPINVLYFXXXXXXXXXYGKIPNMVVK

SEQ ID NO: 33342 - protein, 39 aa, Artificial Sequence
  GFR-binding peptide
  MOD_RES (3)..(4)..(38): Xaa is C or S
  MOD_RES (18)..(19)..(20)..(21)..(22): Xaa is A or G
  MOD_RES (23)..(24)..(25)..(26): Xaa is A or G or is absent
KAXXVPTELSPINMLYFXXXXXXXXXYGKIPDMVVEGXG

SEQ ID NO: 33343 - protein, 30 aa, Artificial Sequence
  GFR-binding peptide
VPTKLSPINILYFDKGVVTYYGKIPGMAVS

SEQ ID NO: 33344 - protein, 35 aa, Artificial Sequence
  GFR-binding peptide
  MOD_RES (34)..(34): Xaa is C or S
  MOD_RES (14)..(15)..(16)..(17)..(18): Xaa is A or G
  MOD_RES (19)..(20)..(21)..(22): Xaa is A or G or is absent
VPTELSPINMLYFXXXXXXXXXYGKIPDMVVEGXG

SEQ ID NO: 33345 - protein, 39 aa, Artificial Sequence
  GFR-binding peptide
  MOD_RES (7)..(39): Xaa is C or S
HVTKPTXAPTKLSPINVLYFDDSSNVIYGKIPNMVVRSX

SEQ ID NO: 33346 - protein, 32 aa, Artificial Sequence
  GFR-binding peptide
  MOD_RES (1)..(1): Xaa is C or S
XVPARLSPINILYFDAANNVVYGKIPDMVVEA

SEQ ID NO: 33347 - protein, 36 aa, Artificial Sequence
  GFR-binding peptide
  MOD_RES (3)..(35): Xaa is C or S
PTXAPTKLSPINVLYFDDSSNVIYGKIPNMVVRSXG

SEQ ID NO: 33348 - protein, 33 aa, Artificial Sequence
  GFR-binding peptide
  MOD_RES (14)..(15)..(16)..(17)..(18): Xaa is A or G
  MOD_RES (19)..(20)..(21)..(22): Xaa is A or G or is absent
VPTRLSPINILYFXXXXXXXXXYGKIPDMVVES

SEQ ID NO: 33349 - protein, 33 aa, Artificial Sequence
  GFR-binding peptide
  MOD_RES (2)..(3): Xaa is C or S
TXXAPVKTSPINMLYFDNGRVLLYGKIPMIVEE

SEQ ID NO: 33350 - protein, 37 aa, Artificial Sequence
  GFR-binding peptide
  MOD_RES (1)..(2)..(35)..(37): Xaa is C or S
XXVPTKLSPINVLYFDDMGVPTYGKIPEGMSVAEXGX

SEQ ID NO: 33351 - protein, 38 aa, Artificial Sequence
  GFR-binding peptide
  MOD_RES (1)..(2)..(35)..(37): Xaa is C or S
  MOD_RES (16)..(17)..(18)..(19)..(20): Xaa is A or G
  MOD_RES (21)..(22)..(23)..(24): Xaa is A or G or is absent
XXAPVKTSPINMLYFXXXXXXXXXYGKIPMIVEEXGXL

SEQ ID NO: 33352 - protein, 35 aa, Artificial Sequence
  GFR-binding peptide
  MOD_RES (1)..(2): Xaa is C or S
  MOD_RES (16)..(17)..(18)..(19)..(20): Xaa is A or G
  MOD_RES (21)..(22)..(23)..(24): Xaa is A or G or is absent
XXVPARLSPINILYFXXXXXXXXXYGKIPDMVVEA

SEQ ID NO: 33353 - protein, 38 aa, Artificial Sequence
  GFR-binding peptide
  MOD_RES (5)..(6): Xaa is C or S
  MOD_RES (20)..(21)..(22)..(23)..(24): Xaa is A or G
  MOD_RES (25)..(26)..(27)..(28): Xaa is A or G or is absent
VPKAXXAPTKLSPINVLYFXXXXXXXXXYGKIPNMVVK

SEQ ID NO: 33354 - protein, 37 aa, Artificial Sequence
  GFR-binding peptide
  MOD_RES (1)..(2)..(35)..(37): Xaa is C or S
  MOD_RES (16)..(17)..(18)..(19)..(20): Xaa is A or G
  MOD_RES (21)..(22)..(23)..(24): Xaa is A or G or is absent
XXAPVKTSPINMLYFXXXXXXXXXYGKIPMIVEEXGX

SEQ ID NO: 33355 - protein, 39 aa, Artificial Sequence; identical to SEQ ID NO: 31199
  GFR-binding peptide
  MOD_RES (1)..(33)..(34): Xaa is C or S

SEQ ID NO: 33356 - protein, 35 aa, Artificial Sequence; identical to SEQ ID NO: 31200
  GFR-binding peptide
  MOD_RES (31)..(32): Xaa is C or S

SEQ ID NO: 33357 - protein, 43 aa, Artificial Sequence; identical to SEQ ID NO: 31201
  GFR-binding peptide
  MOD_RES (1)..(3)..(37)..(38): Xaa is C or S
  MOD_RES (15)..(16)..(17)..(18)..(19): Xaa is A or G
  MOD_RES (20)..(21)..(22)..(23): Xaa is A or G or is absent

SEQ ID NO: 33358 - protein, 40 aa, Artificial Sequence; identical to SEQ ID NO: 31202
  GFR-binding peptide
  MOD_RES (34)..(35): Xaa is C or S
  MOD_RES (12)..(13)..(14)..(15)..(16): Xaa is A or G
  MOD_RES (17)..(18)..(19)..(20): Xaa is A or G or is absent

SEQ ID NO: 33359 - protein, 37 aa, Artificial Sequence; identical to SEQ ID NO: 31203
  GFR-binding peptide
  MOD_RES (32)..(33): Xaa is C or S

SEQ ID NO: 33360 - protein, 40 aa, Artificial Sequence; identical to SEQ ID NO: 31204
  GFR-binding peptide
  MOD_RES (1)..(3)..(37)..(38): Xaa is C or S
  MOD_RES (15)..(16)..(17)..(18)..(19): Xaa is A or G
  MOD_RES (20)..(21)..(22)..(23): Xaa is A or G or is absent

SEQ ID NO: 33361 - protein, 32 aa, Artificial Sequence; identical to SEQ ID NO: 31205
  GFR-binding peptide
  MOD_RES (2)..(2): Xaa is C or S

SEQ ID NO: 33362 - protein, 35 aa, Artificial Sequence; identical to SEQ ID NO: 31206
  GFR-binding peptide
  MOD_RES (32)..(33): Xaa is C or S

SEQ ID NO: 33363 - protein, 42 aa, Artificial Sequence; identical to SEQ ID NO: 31207
  GFR-binding peptide
  MOD_RES (1)..(3)..(37)..(38): Xaa is C or S
  MOD_RES (15)..(16)..(17)..(18)..(19): Xaa is A or G
  MOD_RES (20)..(21)..(22)..(23): Xaa is A or G or is absent

SEQ ID NO: 33364 - protein, 39 aa, Artificial Sequence; identical to SEQ ID NO: 31208
  GFR-binding peptide
  MOD_RES (2)..(4)..(36)..(37): Xaa is C or S

SEQ ID NO: 33365 - protein, 40 aa, Artificial Sequence; identical to SEQ ID NO: 31209
  GFR-binding peptide
  MOD_RES (1)..(3)..(35)..(36): Xaa is C or S

SEQ ID NO: 33366 - protein, 41 aa, Artificial Sequence; identical to SEQ ID NO: 31210
  GFR-binding peptide
  MOD_RES (1)..(3)..(37)..(38): Xaa is C or S
  MOD_RES (15)..(16)..(17)..(18)..(19): Xaa is A or G
  MOD_RES (20)..(21)..(22)..(23): Xaa is A or G or is absent

SEQ ID NO: 33367 - protein, 35 aa, Artificial Sequence; identical to SEQ ID NO: 31211
  GFR-binding peptide
  MOD_RES (1)..(33)..(34): Xaa is C or S

SEQ ID NO: 33368 - protein, 33 aa, Artificial Sequence; identical to SEQ ID NO: 31212
  GFR-binding peptide
  MOD_RES (1)..(33): Xaa is C or S

SEQ ID NO: 33369 - protein, 35 aa, Artificial Sequence; identical to SEQ ID NO: 31213
  GFR-binding peptide
  MOD_RES (34)..(35): Xaa is C or S
  MOD_RES (12)..(13)..(14)..(15)..(16): Xaa is A or G
  MOD_RES (17)..(18)..(19)..(20): Xaa is A or G or is absent

SEQ ID NO: 33370 - protein, 40 aa, Artificial Sequence; identical to SEQ ID NO: 31214
  GFR-binding peptide
  MOD_RES (1)..(3)..(35)..(36): Xaa is C or S

SEQ ID NO: 33371 - protein, 37 aa, Artificial Sequence; identical to SEQ ID NO: 31215
  GFR-binding peptide
  MOD_RES (2)..(34): Xaa is C or S

SEQ ID NO: 33372 - protein, 40 aa, Artificial Sequence; identical to SEQ ID NO: 31216
  GFR-binding peptide
  MOD_RES (34)..(34): Xaa is C or S
  MOD_RES (12)..(13)..(14)..(15)..(16): Xaa is A or G
  MOD_RES (17)..(18)..(19)..(20): Xaa is A or G or is absent

SEQ ID NO: 33373 - protein, 37 aa, Artificial Sequence; identical to SEQ ID NO: 31217
  GFR-binding peptide
  MOD_RES (34)..(35): Xaa is C or S
  MOD_RES (12)..(13)..(14)..(15)..(16): Xaa is A or G
  MOD_RES (17)..(18)..(19)..(20): Xaa is A or G or is absent

SEQ ID NO: 33374 - protein, 34 aa, Artificial Sequence; identical to SEQ ID NO: 31218
  GFR-binding peptide
  MOD_RES (2)..(34): Xaa is C or S

SEQ ID NO: 33375 - protein, 41 aa, Artificial Sequence; identical to SEQ ID NO: 31219
  GFR-binding peptide
  MOD_RES (1)..(3)..(37)..(38): Xaa is C or S
  MOD_RES (15)..(16)..(17)..(18)..(19): Xaa is A or G
  MOD_RES (20)..(21)..(22)..(23): Xaa is A or G or is absent

SEQ ID NO: 33376 - protein, 40 aa, Artificial Sequence; identical to SEQ ID NO: 31220
  GFR-binding peptide
  MOD_RES (1)..(35)..(36): Xaa is C or S
  MOD_RES (13)..(14)..(15)..(16)..(17): Xaa is A or G
  MOD_RES (18)..(19)..(20)..(21): Xaa is A or G or is absent

SEQ ID NO: 33377 - protein, 35 aa, Artificial Sequence; identical to SEQ ID NO: 31221
  GFR-binding peptide
  MOD_RES (32)..(33): Xaa is C or S

SEQ ID NO: 33378 - protein, 38 aa, Artificial Sequence; identical to SEQ ID NO: 31222
  GFR-binding peptide
  MOD_RES (2)..(34)..(35): Xaa is C or S

SEQ ID NO: 33379 - protein, 36 aa, Artificial Sequence; identical to SEQ ID NO: 31223
  GFR-binding peptide
  MOD_RES (31)..(32): Xaa is C or S

SEQ ID NO: 33380 - protein, 39 aa, Artificial Sequence; identical to SEQ ID NO: 31224
  GFR-binding peptide
  MOD_RES (2)..(4)..(38)..(39): Xaa is C or S
  MOD_RES (16)..(17)..(18)..(19)..(20): Xaa is A or G
  MOD_RES (21)..(22)..(23)..(24): Xaa is A or G or is absent

SEQ ID NO: 33381 - protein, 35 aa, Artificial Sequence; identical to SEQ ID NO: 31225
  GFR-binding peptide
  MOD_RES (33)..(34): Xaa is C or S
  MOD_RES (11)..(12)..(13)..(14)..(15): Xaa is A or G
  MOD_RES (16)..(17)..(18)..(19): Xaa is A or G or is absent

SEQ ID NO: 33382 - protein, 39 aa, Artificial Sequence; identical to SEQ ID NO: 31226
  GFR-binding peptide
  MOD_RES (2)..(4)..(37)..(38): Xaa is C or S

SEQ ID NO: 33383 - protein, 39 aa, Artificial Sequence; identical to SEQ ID NO: 31227
  GFR-binding peptide
  MOD_RES (1)..(3)..(37): Xaa is C or S
  MOD_RES (15)..(16)..(17)..(18)..(19): Xaa is A or G
  MOD_RES (20)..(21)..(22)..(23): Xaa is A or G or is absent

SEQ ID NO: 33384 - protein, 36 aa, Artificial Sequence; identical to SEQ ID NO: 31228
  GFR-binding peptide
  MOD_RES (32)..(33): Xaa is C or S

SEQ ID NO: 33385 - protein, 37 aa, Artificial Sequence; identical to SEQ ID NO: 31229
  GFR-binding peptide
  MOD_RES (33)..(34): Xaa is C or S
  MOD_RES (11)..(12)..(13)..(14)..(15): Xaa is A or G
  MOD_RES (16)..(17)..(18)..(19): Xaa is A or G or is absent

SEQ ID NO: 33386 - protein, 36 aa, Artificial Sequence; identical to SEQ ID NO: 31230
  GFR-binding peptide
  MOD_RES (2)..(34)..(35): Xaa is C or S

SEQ ID NO: 33387 - protein, 42 aa, Artificial Sequence; identical to SEQ ID NO: 31231
  GFR-binding peptide
  MOD_RES (2)..(4)..(37)..(38): Xaa is C or S

SEQ ID NO: 33388 - protein, 33 aa, Artificial Sequence; identical to SEQ ID NO: 31232
  GFR-binding peptide
  MOD_RES (32)..(33): Xaa is C or S

SEQ ID NO: 33389 - protein, 35 aa, Artificial Sequence; identical to SEQ ID NO: 31233
  GFR-binding peptide
  MOD_RES (1)..(3)..(35): Xaa is C or S

SEQ ID NO: 33390 - protein, 39 aa, Artificial Sequence; identical to SEQ ID NO: 31234
  GFR-binding peptide
  MOD_RES (2)..(4)..(36)..(37): Xaa is C or S

SEQ ID NO: 33391 - protein, 35 aa, Artificial Sequence; identical to SEQ ID NO: 31235
  GFR-binding peptide
  MOD_RES (1)..(34)..(35): Xaa is C or S

SEQ ID NO: 33392 - protein, 38 aa, Artificial Sequence; identical to SEQ ID NO: 31236
  GFR-binding peptide
  MOD_RES (2)..(33)..(34): Xaa is C or S

SEQ ID NO: 33393 - protein, 43 aa, Artificial Sequence; identical to SEQ ID NO: 31237
  GFR-binding peptide
  MOD_RES (2)..(4)..(38)..(39): Xaa is C or S
  MOD_RES (16)..(17)..(18)..(19)..(20): Xaa is A or G
  MOD_RES (21)..(22)..(23)..(24): Xaa is A or G or is absent

SEQ ID NO: 33394 - protein, 43 aa, Artificial Sequence; identical to SEQ ID NO: 31238
  GFR-binding peptide
  MOD_RES (1)..(3)..(37)..(38): Xaa is C or S
  MOD_RES (15)..(16)..(17)..(18)..(19): Xaa is A or G
  MOD_RES (20)..(21)..(22)..(23): Xaa is A or G or is absent

SEQ ID NO: 33395 - protein, 36 aa, Artificial Sequence; identical to SEQ ID NO: 31239
  GFR-binding peptide
  MOD_RES (1)..(3): Xaa is C or S
  MOD_RES (15)..(16)..(17)..(18)..(19): Xaa is A or G
  MOD_RES (20)..(21)..(22)..(23): Xaa is A or G or is absent

SEQ ID NO: 33396 - protein, 40 aa, Artificial Sequence; identical to SEQ ID NO: 31240
  GFR-binding peptide
  MOD_RES (1)..(3)..(37): Xaa is C or S
  MOD_RES (15)..(16)..(17)..(18)..(19): Xaa is A or G
  MOD_RES (20)..(21)..(22)..(23): Xaa is A or G or is absent

SEQ ID NO: 33397 - protein, 44 aa, Artificial Sequence; identical to SEQ ID NO: 31241
  GFR-binding peptide
  MOD_RES (2)..(4)..(38)..(39): Xaa is C or S
  MOD_RES (16)..(17)..(18)..(19)..(20): Xaa is A or G
  MOD_RES (21)..(22)..(23)..(24): Xaa is A or G or is absent

SEQ ID NO: 33398 - protein, 44 aa, Artificial Sequence; identical to SEQ ID NO: 31242
  GFR-binding peptide
  MOD_RES (2)..(4)..(38)..(39): Xaa is C or S
  MOD_RES (16)..(17)..(18)..(19)..(20): Xaa is A or G
  MOD_RES (21)..(22)..(23)..(24): Xaa is A or G or is absent

SEQ ID NO: 33399 - protein, 39 aa, Artificial Sequence; identical to SEQ ID NO: 31243
  GFR-binding peptide
  MOD_RES (1)..(33)..(34): Xaa is C or S

SEQ ID NO: 33400 - protein, 43 aa, Artificial Sequence; identical to SEQ ID NO: 31244
  GFR-binding peptide
  MOD_RES (1)..(3)..(37)..(38): Xaa is C or S
  MOD_RES (15)..(16)..(17)..(18)..(19): Xaa is A or G
  MOD_RES (20)..(21)..(22)..(23): Xaa is A or G or is absent

SEQ ID NO: 33401 - protein, 34 aa, Artificial Sequence; identical to SEQ ID NO: 31245
  GFR-binding peptide
  MOD_RES (32)..(33): Xaa is C or S

SEQ ID NO: 33402 - protein, 37 aa, Artificial Sequence; identical to SEQ ID NO: 31246
  GFR-binding peptide
  MOD_RES (2)..(4)..(36): Xaa is C or S

SEQ ID NO: 33403 - protein, 35 aa, Artificial Sequence; identical to SEQ ID NO: 31247
  GFR-binding peptide
  MOD_RES (1)..(1): Xaa is C or S
  MOD_RES (14)..(15)..(16)..(17)..(18): Xaa is A or G
  MOD_RES (19)..(20)..(21)..(22): Xaa is A or G or is absent

SEQ ID NO: 33404 - protein, 39 aa, Artificial Sequence; identical to SEQ ID NO: 31248
  GFR-binding peptide
  MOD_RES (2)..(4)..(36)..(37): Xaa is C or S

SEQ ID NO: 33405 - protein, 37 aa, Artificial Sequence; identical to SEQ ID NO: 31249
  GFR-binding peptide
  MOD_RES (2)..(35)..(36): Xaa is C or S

SEQ ID NO: 33406 - protein, 42 aa, Artificial Sequence; identical to SEQ ID NO: 31250
  GFR-binding peptide
  MOD_RES (2)..(4)..(38)..(39): Xaa is C or S
  MOD_RES (16)..(17)..(18)..(19)..(20): Xaa is A or G
  MOD_RES (21)..(22)..(23)..(24): Xaa is A or G or is absent

SEQ ID NO: 33407 - protein, 34 aa, Artificial Sequence; identical to SEQ ID NO: 31251
  GFR-binding peptide
  MOD_RES (1)..(3)..(34): Xaa is C or S

SEQ ID NO: 33408 - protein, 42 aa, Artificial Sequence; identical to SEQ ID NO: 31252
  GFR-binding peptide
  MOD_RES (2)..(4)..(38)..(39): Xaa is C or S
  MOD_RES (16)..(17)..(18)..(19)..(20): Xaa is A or G
  MOD_RES (21)..(22)..(23)..(24): Xaa is A or G or is absent

SEQ ID NO: 33409 - protein, 36 aa, Artificial Sequence; identical to SEQ ID NO: 31253
  GFR-binding peptide
  MOD_RES (2)..(4)..(36): Xaa is C or S

SEQ ID NO: 33410 - protein, 37 aa, Artificial Sequence; identical to SEQ ID NO: 31254
  GFR-binding peptide
  MOD_RES (31)..(32): Xaa is C or S

SEQ ID NO: 33411 - protein, 40 aa, Artificial Sequence; identical to SEQ ID NO: 31255
  GFR-binding peptide
  MOD_RES (1)..(3)..(37)..(38): Xaa is C or S
  MOD_RES (15)..(16)..(17)..(18)..(19): Xaa is A or G
  MOD_RES (20)..(21)..(22)..(23): Xaa is A or G or is absent

SEQ ID NO: 33412 - protein, 40 aa, Artificial Sequence; identical to SEQ ID NO: 31256
  GFR-binding peptide
  MOD_RES (2)..(34)..(35): Xaa is C or S

SEQ ID NO: 33413 - protein, 40 aa, Artificial Sequence; identical to SEQ ID NO: 31257
  GFR-binding peptide
  MOD_RES (2)..(36)..(37): Xaa is C or S
  MOD_RES (14)..(15)..(16)..(17)..(18): Xaa is A or G
  MOD_RES (19)..(20)..(21)..(22): Xaa is A or G or is absent

SEQ ID NO: 33414 - protein, 35 aa, Artificial Sequence; identical to SEQ ID NO: 31258
  GFR-binding peptide
  MOD_RES (34)..(35): Xaa is C or S
  MOD_RES (12)..(13)..(14)..(15)..(16): Xaa is A or G
  MOD_RES (17)..(18)..(19)..(20): Xaa is A or G or is absent

SEQ ID NO: 33415 - protein, 39 aa, Artificial Sequence; identical to SEQ ID NO: 31259
  GFR-binding peptide
  MOD_RES (34)..(35): Xaa is C or S
  MOD_RES (12)..(13)..(14)..(15)..(16): Xaa is A or G
  MOD_RES (17)..(18)..(19)..(20): Xaa is A or G or is absent

SEQ ID NO: 33416 - protein, 35 aa, Artificial Sequence; identical to SEQ ID NO: 31260
  GFR-binding peptide
  MOD_RES (1)..(3)..(35): Xaa is C or S

SEQ ID NO: 33417 - protein, 35 aa, Artificial Sequence; identical to SEQ ID NO: 31261
  GFR-binding peptide
  MOD_RES (2)..(2): Xaa is C or S
  MOD_RES (14)..(15)..(16)..(17)..(18): Xaa is A or G
  MOD_RES (19)..(20)..(21)..(22): Xaa is A or G or is absent

SEQ ID NO: 33418 - protein, 36 aa, Artificial Sequence; identical to SEQ ID NO: 31262
  GFR-binding peptide
  MOD_RES (31)..(32): Xaa is C or S

SEQ ID NO: 33419 - protein, 38 aa, Artificial Sequence; identical to SEQ ID NO: 31263
  GFR-binding peptide
  MOD_RES (1)..(3)..(35)..(36): Xaa is C or S

SEQ ID NO: 33420 - protein, 36 aa, Artificial Sequence; identical to SEQ ID NO: 31264
  GFR-binding peptide
  MOD_RES (1)..(33)..(34): Xaa is C or S

SEQ ID NO: 33421 - protein, 42 aa, Artificial Sequence; identical to SEQ ID NO: 31265
  GFR-binding peptide
  MOD_RES (2)..(4)..(38)..(39): Xaa is C or S
  MOD_RES (16)..(17)..(18)..(19)..(20): Xaa is A or G
  MOD_RES (21)..(22)..(23)..(24): Xaa is A or G or is absent

SEQ ID NO: 33422 - protein, 41 aa, Artificial Sequence; identical to SEQ ID NO: 31266
  GFR-binding peptide
  MOD_RES (1)..(3)..(38)..(39): Xaa is C or S
  MOD_RES (16)..(17)..(18)..(19)..(20): Xaa is A or G
  MOD_RES (21)..(22)..(23)..(24): Xaa is A or G or is absent

SEQ ID NO: 33423 - protein, 36 aa, Artificial Sequence; identical to SEQ ID NO: 31267
  GFR-binding peptide
  MOD_RES (32)..(33): Xaa is C or S

SEQ ID NO: 33424 - protein, 39 aa, Artificial Sequence; identical to SEQ ID NO: 31268
  GFR-binding peptide
  MOD_RES (2)..(35)..(36): Xaa is C or S
  MOD_RES (13)..(14)..(15)..(16)..(17): Xaa is A or G
  MOD_RES (18)..(19)..(20)..(21): Xaa is A or G or is absent

SEQ ID NO: 33425 - protein, 39 aa, Artificial Sequence; identical to SEQ ID NO: 31269
  GFR-binding peptide
  MOD_RES (2)..(34): Xaa is C or S

SEQ ID NO: 33426 - protein, 42 aa, Artificial Sequence; identical to SEQ ID NO: 31270
  GFR-binding peptide
  MOD_RES (2)..(37)..(38): Xaa is C or S
  MOD_RES (15)..(16)..(17)..(18)..(19): Xaa is A or G
  MOD_RES (20)..(21)..(22)..(23): Xaa is A or G or is absent

SEQ ID NO: 33427 - protein, 40 aa, Artificial Sequence; identical to SEQ ID NO: 31271
  GFR-binding peptide
  MOD_RES (2)..(34)..(35): Xaa is C or S

SEQ ID NO: 33428 - protein, 38 aa, Artificial Sequence; identical to SEQ ID NO: 31272
  GFR-binding peptide
  MOD_RES (1)..(35)..(36): Xaa is C or S
  MOD_RES (13)..(14)..(15)..(16)..(17): Xaa is A or G
  MOD_RES (18)..(19)..(20)..(21): Xaa is A or G or is absent

SEQ ID NO: 33429 - protein, 34 aa, Artificial Sequence; identical to SEQ ID NO: 31273
  GFR-binding peptide
  MOD_RES (13)..(14)..(15)..(16)..(17): Xaa is A or G
  MOD_RES (18)..(19)..(20)..(21): Xaa is A or G or is absent

SEQ ID NO: 33430 - protein, 32 aa, Artificial Sequence; identical to SEQ ID NO: 31274
  GFR-binding peptide
  MOD_RES (32)..(32): Xaa is C or S

SEQ ID NO: 33431 - protein, 37 aa, Artificial Sequence; identical to SEQ ID NO: 31275
  GFR-binding peptide
  MOD_RES (2)..(34)..(35): Xaa is C or S

SEQ ID NO: 33432 - protein, 36 aa, Artificial Sequence; identical to SEQ ID NO: 31276
  GFR-binding peptide
  MOD_RES (33)..(34): Xaa is C or S
  MOD_RES (11)..(12)..(13)..(14)..(15): Xaa is A or G
  MOD_RES (16)..(17)..(18)..(19): Xaa is A or G or is absent

SEQ ID NO: 33433 - protein, 41 aa, Artificial Sequence; identical to SEQ ID NO: 31277
  GFR-binding peptide
  MOD_RES (1)..(3)..(37)..(38): Xaa is C or S
  MOD_RES (15)..(16)..(17)..(18)..(19): Xaa is A or G
  MOD_RES (20)..(21)..(22)..(23): Xaa is A or G or is absent

SEQ ID NO: 33434 - protein, 40 aa, Artificial Sequence; identical to SEQ ID NO: 31278
  GFR-binding peptide
  MOD_RES (1)..(3)..(35)..(36): Xaa is C or S

SEQ ID NO: 33435 - protein, 36 aa, Artificial Sequence; identical to SEQ ID NO: 31279
  GFR-binding peptide
  MOD_RES (1)..(3): Xaa is C or S
  MOD_RES (15)..(16)..(17)..(18)..(19): Xaa is A or G
  MOD_RES (20)..(21)..(22)..(23): Xaa is A or G or is absent

SEQ ID NO: 33436 - protein, 34 aa, Artificial Sequence; identical to SEQ ID NO: 31280
  GFR-binding peptide
  MOD_RES (2)..(34): Xaa is C or S

SEQ ID NO: 33437 - protein, 37 aa, Artificial Sequence; identical to SEQ ID NO: 31281
  GFR-binding peptide
  MOD_RES (32)..(33): Xaa is C or S

SEQ ID NO: 33438 - protein, 35 aa, Artificial Sequence; identical to SEQ ID NO: 31282
  GFR-binding peptide
  MOD_RES (2)..(4): Xaa is C or S

SEQ ID NO: 33439 - protein, 41 aa, Artificial Sequence; identical to SEQ ID NO: 31283
  GFR-binding peptide
  MOD_RES (2)..(4)..(36)..(37): Xaa is C or S

SEQ ID NO: 33440 - protein, 34 aa, Artificial Sequence; identical to SEQ ID NO: 31284
  GFR-binding peptide
  MOD_RES (31)..(32): Xaa is C or S

SEQ ID NO: 33441 - protein, 41 aa, Artificial Sequence; identical to SEQ ID NO: 31285
  GFR-binding peptide
  MOD_RES (1)..(3)..(35): Xaa is C or S

SEQ ID NO: 33442 - protein, 40 aa, Artificial Sequence; identical to SEQ ID NO: 31286
  GFR-binding peptide
  MOD_RES (2)..(4)..(36)..(37): Xaa is C or S

SEQ ID NO: 33443 - protein, 35 aa, Artificial Sequence; identical to SEQ ID NO: 31287
  GFR-binding peptide
  MOD_RES (31)..(32): Xaa is C or S

SEQ ID NO: 33444 - protein, 41 aa, Artificial Sequence; identical to SEQ ID NO: 31288
  GFR-binding peptide
  MOD_RES (1)..(3)..(35)..(36): Xaa is C or S

SEQ ID NO: 33445 - protein, 38 aa, Artificial Sequence; identical to SEQ ID NO: 31289
  GFR-binding peptide
  MOD_RES (2)..(36)..(37): Xaa is C or S
  MOD_RES (14)..(15)..(16)..(17)..(18): Xaa is A or G
  MOD_RES (19)..(20)..(21)..(22): Xaa is A or G or is absent

SEQ ID NO: 33446 - protein, 38 aa, Artificial Sequence; identical to SEQ ID NO: 31290
  GFR-binding peptide
  MOD_RES (1)..(3)..(37)..(38): Xaa is C or S
  MOD_RES (15)..(16)..(17)..(18)..(19): Xaa is A or G
  MOD_RES (20)..(21)..(22)..(23): Xaa is A or G or is absent

SEQ ID NO: 33447 - protein, 38 aa, Artificial Sequence; identical to SEQ ID NO: 31291
  GFR-binding peptide
  MOD_RES (1)..(33)..(34): Xaa is C or S

SEQ ID NO: 33448 - protein, 37 aa, Artificial Sequence; identical to SEQ ID NO: 31292
  GFR-binding peptide
  MOD_RES (1)..(34)..(35): Xaa is C or S
  MOD_RES (12)..(13)..(14)..(15)..(16): Xaa is A or G
  MOD_RES (17)..(18)..(19)..(20): Xaa is A or G or is absent

SEQ ID NO: 33449 - protein, 35 aa, Artificial Sequence; identical to SEQ ID NO: 31293
  GFR-binding peptide
  MOD_RES (31)..(32): Xaa is C or S

SEQ ID NO: 33450 - protein, 41 aa, Artificial Sequence; identical to SEQ ID NO: 31294
  GFR-binding peptide
  MOD_RES (2)..(4)..(38): Xaa is C or S
  MOD_RES (16)..(17)..(18)..(19)..(20): Xaa is A or G
  MOD_RES (21)..(22)..(23)..(24): Xaa is A or G or is absent

SEQ ID NO: 33451 - protein, 39 aa, Artificial Sequence; identical to SEQ ID NO: 31295
  GFR-binding peptide
  MOD_RES (33)..(34): Xaa is C or S

SEQ ID NO: 33452 - protein, 31 aa, Artificial Sequence; identical to SEQ ID NO: 31296
  GFR-binding peptide

SEQ ID NO: 33453 - protein, 32 aa, Artificial Sequence; identical to SEQ ID NO: 31297
  GFR-binding peptide
  MOD_RES (11)..(12)..(13)..(14)..(15): Xaa is A or G
  MOD_RES (16)..(17)..(18)..(19): Xaa is A or G or is absent

SEQ ID NO: 33454 - protein, 43 aa, Artificial Sequence; identical to SEQ ID NO: 31298
  GFR-binding peptide
  MOD_RES (2)..(4)..(38)..(39): Xaa is C or S
  MOD_RES (16)..(17)..(18)..(19)..(20): Xaa is A or G
  MOD_RES (21)..(22)..(23)..(24): Xaa is A or G or is absent

SEQ ID NO: 33455 - protein, 42 aa, Artificial Sequence; identical to SEQ ID NO: 31299
  GFR-binding peptide
  MOD_RES (2)..(36)..(37): Xaa is C or S
  MOD_RES (14)..(15)..(16)..(17)..(18): Xaa is A or G
  MOD_RES (19)..(20)..(21)..(22): Xaa is A or G or is absent

SEQ ID NO: 33456 - protein, 38 aa, Artificial Sequence; identical to SEQ ID NO: 31300
  GFR-binding peptide
  MOD_RES (1)..(3)..(35)..(36): Xaa is C or S

SEQ ID NO: 33457 - protein, 32 aa, Artificial Sequence; identical to SEQ ID NO: 31301
  GFR-binding peptide
  MOD_RES (11)..(12)..(13)..(14)..(15): Xaa is A or G
  MOD_RES (16)..(17)..(18)..(19): Xaa is A or G or is absent

SEQ ID NO: 33458 - protein, 38 aa, Artificial Sequence; identical to SEQ ID NO: 31302
  GFR-binding peptide
  MOD_RES (1)..(3)..(35)..(36): Xaa is C or S

SEQ ID NO: 33459 - protein, 33 aa, Artificial Sequence; identical to SEQ ID NO: 31303
  GFR-binding peptide
  MOD_RES (33)..(33): Xaa is C or S
  MOD_RES (11)..(12)..(13)..(14)..(15): Xaa is A or G
  MOD_RES (16)..(17)..(18)..(19): Xaa is A or G or is absent

SEQ ID NO: 33460 - protein, 39 aa, Artificial Sequence; identical to SEQ ID NO: 31304
  GFR-binding peptide
  MOD_RES (2)..(4)..(38)..(39): Xaa is C or S
  MOD_RES (16)..(17)..(18)..(19)..(20): Xaa is A or G
  MOD_RES (21)..(22)..(23)..(24): Xaa is A or G or is absent

SEQ ID NO: 33461 - protein, 34 aa, Artificial Sequence; identical to SEQ ID NO: 31305
  GFR-binding peptide
  MOD_RES (2)..(34): Xaa is C or S

SEQ ID NO: 33462 - protein, 35 aa, Artificial Sequence; identical to SEQ ID NO: 31306
  GFR-binding peptide
  MOD_RES (2)..(34)..(35): Xaa is C or S

SEQ ID NO: 33463 - protein, 31 aa, Artificial Sequence; identical to SEQ ID NO: 31307
  GFR-binding peptide

SEQ ID NO: 33464 - protein, 38 aa, Artificial Sequence; identical to SEQ ID NO: 31308
  GFR-binding peptide
  MOD_RES (2)..(4)..(36)..(37): Xaa is C or S

SEQ ID NO: 33465 - protein, 40 aa, Artificial Sequence; identical to SEQ ID NO: 31309
  GFR-binding peptide
  MOD_RES (2)..(4)..(36)..(37): Xaa is C or S

SEQ ID NO: 33466 - protein, 37 aa, Artificial Sequence; identical to SEQ ID NO: 31310
  GFR-binding peptide
  MOD_RES (2)..(4): Xaa is C or S
  MOD_RES (16)..(17)..(18)..(19)..(20): Xaa is A or G
  MOD_RES (21)..(22)..(23)..(24): Xaa is A or G or is absent

SEQ ID NO: 33467 - protein, 40 aa, Artificial Sequence; identical to SEQ ID NO: 31311
  GFR-binding peptide
  MOD_RES (2)..(34)..(35): Xaa is C or S

SEQ ID NO: 33468 - protein, 36 aa, Artificial Sequence; identical to SEQ ID NO: 31312
  GFR-binding peptide
  MOD_RES (2)..(34)..(35): Xaa is C or S

SEQ ID NO: 33469 - protein, 34 aa, Artificial Sequence; identical to SEQ ID NO: 31313
  GFR-binding peptide
  MOD_RES (1)..(3): Xaa is C or S

SEQ ID NO: 33470 - protein, 37 aa, Artificial Sequence; identical to SEQ ID NO: 31314
  GFR-binding peptide
  MOD_RES (31)..(32): Xaa is C or S

SEQ ID NO: 33471 - protein, 39 aa, Artificial Sequence; identical to SEQ ID NO: 31315
  GFR-binding peptide
  MOD_RES (2)..(34)..(35): Xaa is C or S

SEQ ID NO: 33472 - protein, 32 aa, Artificial Sequence; identical to SEQ ID NO: 31316
  GFR-binding peptide
  MOD_RES (32)..(32): Xaa is C or S

SEQ ID NO: 33473 - protein, 35 aa, Artificial Sequence; identical to SEQ ID NO: 31317
  GFR-binding peptide
  MOD_RES (1)..(3)..(35): Xaa is C or S

SEQ ID NO: 33474 - protein, 36 aa, Artificial Sequence; identical to SEQ ID NO: 31318
  GFR-binding peptide
  MOD_RES (32)..(33): Xaa is C or S

SEQ ID NO: 33475 - protein, 40 aa, Artificial Sequence; identical to SEQ ID NO: 31319
  GFR-binding peptide
  MOD_RES (2)..(36)..(37): Xaa is C or S
  MOD_RES (14)..(15)..(16)..(17)..(18): Xaa is A or G
  MOD_RES (19)..(20)..(21)..(22): Xaa is A or G or is absent

SEQ ID NO: 33476 - protein, 35 aa, Artificial Sequence; identical to SEQ ID NO: 31320
  GFR-binding peptide
  MOD_RES (1)..(32)..(33): Xaa is C or S

SEQ ID NO: 33477 - protein, 36 aa, Artificial Sequence; identical to SEQ ID NO: 31321
  GFR-binding peptide
  MOD_RES (31)..(31): Xaa is C or S

SEQ ID NO: 33478 - protein, 39 aa, Artificial Sequence; identical to SEQ ID NO: 31322
  GFR-binding peptide
  MOD_RES (1)..(33)..(34): Xaa is C or S

SEQ ID NO: 33479 - protein, 40 aa, Artificial Sequence; identical to SEQ ID NO: 31323
  GFR-binding peptide
  MOD_RES (1)..(3)..(34)..(35): Xaa is C or S

SEQ ID NO: 33480 - protein, 38 aa, Artificial Sequence; identical to SEQ ID NO: 31324
  GFR-binding peptide
  MOD_RES (2)..(34)..(35): Xaa is C or S

SEQ ID NO: 33481 - protein, 36 aa, Artificial Sequence; identical to SEQ ID NO: 31325
  GFR-binding peptide
  MOD_RES (1)..(33)..(34): Xaa is C or S

SEQ ID NO: 33482 - protein, 36 aa, Artificial Sequence; identical to SEQ ID NO: 31326
  GFR-binding peptide
  MOD_RES (34)..(35): Xaa is C or S
  MOD_RES (12)..(13)..(14)..(15)..(16): Xaa is A or G
  MOD_RES (17)..(18)..(19)..(20): Xaa is A or G or is absent

SEQ ID NO: 33483 - protein, 36 aa, Artificial Sequence; identical to SEQ ID NO: 31327
  GFR-binding peptide
  MOD_RES (2)..(33)..(34): Xaa is C or S

SEQ ID NO: 33484 - protein, 40 aa, Artificial Sequence; identical to SEQ ID NO: 31328
  GFR-binding peptide
  MOD_RES (34)..(35): Xaa is C or S
  MOD_RES (12)..(13)..(14)..(15)..(16): Xaa is A or G
  MOD_RES (17)..(18)..(19)..(20): Xaa is A or G or is absent

SEQ ID NO: 33485 - protein, 32 aa, Artificial Sequence; identical to SEQ ID NO: 31329
  GFR-binding peptide
  MOD_RES (31)..(32): Xaa is C or S

SEQ ID NO: 33486 - protein, 35 aa, Artificial Sequence; identical to SEQ ID NO: 31330
  GFR-binding peptide
  MOD_RES (1)..(35): Xaa is C or S
  MOD_RES (13)..(14)..(15)..(16)..(17): Xaa is A or G
  MOD_RES (18)..(19)..(20)..(21): Xaa is A or G or is absent

SEQ ID NO: 33487 - protein, 44 aa, Artificial Sequence; identical to SEQ ID NO: 31331
  GFR-binding peptide
  MOD_RES (2)..(4)..(38)..(39): Xaa is C or S
  MOD_RES (16)..(17)..(18)..(19)..(20): Xaa is A or G
  MOD_RES (21)..(22)..(23)..(24): Xaa is A or G or is absent

SEQ ID NO: 33488 - protein, 39 aa, Artificial Sequence; identical to SEQ ID NO: 31332
  GFR-binding peptide
  MOD_RES (33)..(34): Xaa is C or S
  MOD_RES (11)..(12)..(13)..(14)..(15): Xaa is A or G
  MOD_RES (16)..(17)..(18)..(19): Xaa is A or G or is absent

SEQ ID NO: 33489 - protein, 34 aa, Artificial Sequence; identical to SEQ ID NO: 31333
  GFR-binding peptide
  MOD_RES (1)..(1): Xaa is C or S
  MOD_RES (13)..(14)..(15)..(16)..(17): Xaa is A or G
  MOD_RES (18)..(19)..(20)..(21): Xaa is A or G or is absent

SEQ ID NO: 33490 - protein, 38 aa, Artificial Sequence; identical to SEQ ID NO: 31334
  GFR-binding peptide
  MOD_RES (33)..(34): Xaa is C or S
  MOD_RES (11)..(12)..(13)..(14)..(15): Xaa is A or G
  MOD_RES (16)..(17)..(18)..(19): Xaa is A or G or is absent

SEQ ID NO: 33491 - protein, 38 aa, Artificial Sequence; identical to SEQ ID NO: 31335
  GFR-binding peptide
  MOD_RES (34)..(35): Xaa is C or S
  MOD_RES (12)..(13)..(14)..(15)..(16): Xaa is A or G
  MOD_RES (17)..(18)..(19)..(20): Xaa is A or G or is absent

SEQ ID NO: 33492 - protein, 36 aa, Artificial Sequence; identical to SEQ ID NO: 31336
  GFR-binding peptide
  MOD_RES (2)..(4): Xaa is C or S
  MOD_RES (15)..(16)..(17)..(18)..(19): Xaa is A or G
  MOD_RES (20)..(21)..(22)..(23): Xaa is A or G or is absent

SEQ ID NO: 33493 - protein, 33 aa, Artificial Sequence; identical to SEQ ID NO: 31337
  GFR-binding peptide
  MOD_RES (32)..(33): Xaa is C or S

SEQ ID NO: 33494 - protein, 35 aa, Artificial Sequence; identical to SEQ ID NO: 31338
  GFR-binding peptide
  MOD_RES (1)..(3)..(35): Xaa is C or S

SEQ ID NO: 33495 - protein, 37 aa, Artificial Sequence; identical to SEQ ID NO: 31339
  GFR-binding peptide
  MOD_RES (2)..(34)..(35): Xaa is C or S

SEQ ID NO: 33496 - protein, 37 aa, Artificial Sequence; identical to SEQ ID NO: 31340
  GFR-binding peptide
  MOD_RES (32)..(33): Xaa is C or S

SEQ ID NO: 33497 - protein, 37 aa, Artificial Sequence; identical to SEQ ID NO: 31341
  GFR-binding peptide
  MOD_RES (1)..(36)..(37): Xaa is C or S
  MOD_RES (14)..(15)..(16)..(17)..(18): Xaa is A or G
  MOD_RES (19)..(20)..(21)..(22): Xaa is A or G or is absent

SEQ ID NO: 33498 - protein, 33 aa, Artificial Sequence; identical to SEQ ID NO: 31342
  GFR-binding peptide
  MOD_RES (33)..(33): Xaa is C or S
  MOD_RES (11)..(12)..(13)..(14)..(15): Xaa is A or G
  MOD_RES (16)..(17)..(18)..(19): Xaa is A or G or is absent

SEQ ID NO: 33499 - protein, 39 aa, Artificial Sequence; identical to SEQ ID NO: 31343
  GFR-binding peptide
  MOD_RES (1)..(3)..(34)..(35): Xaa is C or S

SEQ ID NO: 33500 - protein, 34 aa, Artificial Sequence; identical to SEQ ID NO: 31344
  GFR-binding peptide
  MOD_RES (31)..(32): Xaa is C or S

SEQ ID NO: 33501 - protein, 37 aa, Artificial Sequence; identical to SEQ ID NO: 31345
  GFR-binding peptide
  MOD_RES (1)..(3)..(37): Xaa is C or S
  MOD_RES (15)..(16)..(17)..(18)..(19): Xaa is A or G
  MOD_RES (20)..(21)..(22)..(23): Xaa is A or G or is absent

SEQ ID NO: 33502 - protein, 42 aa, Artificial Sequence; identical to SEQ ID NO: 31346
  GFR-binding peptide
  MOD_RES (2)..(4)..(36)..(37): Xaa is C or S

SEQ ID NO: 33503 - protein, 35 aa, Artificial Sequence; identical to SEQ ID NO: 31347
  GFR-binding peptide
  MOD_RES (35)..(35): Xaa is C or S
  MOD_RES (13)..(14)..(15)..(16)..(17): Xaa is A or G
  MOD_RES (18)..(19)..(20)..(21): Xaa is A or G or is absent

SEQ ID NO: 33504 - protein, 36 aa, Artificial Sequence; identical to SEQ ID NO: 31348
  GFR-binding peptide
  MOD_RES (2)..(34)..(35): Xaa is C or S

SEQ ID NO: 33505 - protein, 38 aa, Artificial Sequence; identical to SEQ ID NO: 31349
  GFR-binding peptide
  MOD_RES (32)..(33): Xaa is C or S

SEQ ID NO: 33506 - protein, 38 aa, Artificial Sequence; identical to SEQ ID NO: 31350
  GFR-binding peptide
  MOD_RES (1)..(3)..(37)..(38): Xaa is C or S
  MOD_RES (15)..(16)..(17)..(18)..(19): Xaa is A or G
  MOD_RES (20)..(21)..(22)..(23): Xaa is A or G or is absent

SEQ ID NO: 33507 - protein, 36 aa, Artificial Sequence; identical to SEQ ID NO: 31351
  GFR-binding peptide
  MOD_RES (1)..(35)..(36): Xaa is C or S
  MOD_RES (13)..(14)..(15)..(16)..(17): Xaa is A or G
  MOD_RES (18)..(19)..(20)..(21): Xaa is A or G or is absent

SEQ ID NO: 33508 - protein, 36 aa, Artificial Sequence; identical to SEQ ID NO: 31352
  GFR-binding peptide
  MOD_RES (31)..(32): Xaa is C or S

SEQ ID NO: 33509 - protein, 43 aa, Artificial Sequence; identical to SEQ ID NO: 31353
  GFR-binding peptide
  MOD_RES (1)..(3)..(37)..(38): Xaa is C or S
  MOD_RES (15)..(16)..(17)..(18)..(19): Xaa is A or G
  MOD_RES (20)..(21)..(22)..(23): Xaa is A or G or is absent

SEQ ID NO: 33510 - protein, 37 aa, Artificial Sequence; identical to SEQ ID NO: 31354
  GFR-binding peptide
  MOD_RES (33)..(34): Xaa is C or S
  MOD_RES (11)..(12)..(13)..(14)..(15): Xaa is A or G
  MOD_RES (16)..(17)..(18)..(19): Xaa is A or G or is absent

SEQ ID NO: 33511 - protein, 35 aa, Artificial Sequence; identical to SEQ ID NO: 31355
  GFR-binding peptide
  MOD_RES (34)..(35): Xaa is C or S
  MOD_RES (12)..(13)..(14)..(15)..(16): Xaa is A or G
  MOD_RES (17)..(18)..(19)..(20): Xaa is A or G or is absent

SEQ ID NO: 33512 - protein, 31 aa, Artificial Sequence; identical to SEQ ID NO: 31356
  GFR-binding peptide

SEQ ID NO: 33513 - protein, 41 aa, Artificial Sequence; identical to SEQ ID NO: 31357
  GFR-binding peptide
  MOD_RES (2)..(4)..(38)..(39): Xaa is C or S
  MOD_RES (16)..(17)..(18)..(19)..(20): Xaa is A or G
  MOD_RES (21)..(22)..(23)..(24): Xaa is A or G or is absent

SEQ ID NO: 33514 - protein, 40 aa, Artificial Sequence; identical to SEQ ID NO: 31358
  GFR-binding peptide
  MOD_RES (1)..(3)..(35)..(36): Xaa is C or S

SEQ ID NO: 33515 - protein, 37 aa, Artificial Sequence; identical to SEQ ID NO: 31359
  GFR-binding peptide
  MOD_RES (1)..(33)..(34): Xaa is C or S

SEQ ID NO: 33516 - protein, 37 aa, Artificial Sequence; identical to SEQ ID NO: 31360
  GFR-binding peptide
  MOD_RES (31)..(32): Xaa is C or S

SEQ ID NO: 33517 - protein, 34 aa, Artificial Sequence; identical to SEQ ID NO: 31361
  GFR-binding peptide
  MOD_RES (1)..(32)..(33): Xaa is C or S

SEQ ID NO: 33518 - protein, 36 aa, Artificial Sequence; identical to SEQ ID NO: 31362
  GFR-binding peptide
  MOD_RES (34)..(35): Xaa is C or S
  MOD_RES (12)..(13)..(14)..(15)..(16): Xaa is A or G
  MOD_RES (17)..(18)..(19)..(20): Xaa is A or G or is absent

SEQ ID NO: 33519 - protein, 31 aa, Artificial Sequence; identical to SEQ ID NO: 31363
  GFR-binding peptide
  MOD_RES (31)..(31): Xaa is C or S

SEQ ID NO: 33520 - protein, 41 aa, Artificial Sequence; identical to SEQ ID NO: 31364
  GFR-binding peptide
  MOD_RES (2)..(35)..(36): Xaa is C or S

SEQ ID NO: 33521 - protein, 37 aa, Artificial Sequence; identical to SEQ ID NO: 31365
  GFR-binding peptide
  MOD_RES (35)..(36): Xaa is C or S
  MOD_RES (13)..(14)..(15)..(16)..(17): Xaa is A or G
  MOD_RES (18)..(19)..(20)..(21): Xaa is A or G or is absent

SEQ ID NO: 33522 - protein, 37 aa, Artificial Sequence; identical to SEQ ID NO: 31366
  GFR-binding peptide
  MOD_RES (2)..(36)..(37): Xaa is C or S
  MOD_RES (14)..(15)..(16)..(17)..(18): Xaa is A or G
  MOD_RES (19)..(20)..(21)..(22): Xaa is A or G or is absent

SEQ ID NO: 33523 - protein, 32 aa, Artificial Sequence; identical to SEQ ID NO: 31367
  GFR-binding peptide
  MOD_RES (31)..(32): Xaa is C or S

SEQ ID NO: 33524 - protein, 34 aa, Artificial Sequence; identical to SEQ ID NO: 31368
  GFR-binding peptide
  MOD_RES (33)..(34): Xaa is C or S
  MOD_RES (11)..(12)..(13)..(14)..(15): Xaa is A or G
  MOD_RES (16)..(17)..(18)..(19): Xaa is A or G or is absent

SEQ ID NO: 33525 - protein, 38 aa, Artificial Sequence; identical to SEQ ID NO: 31369
  GFR-binding peptide
  MOD_RES (1)..(3)..(36)..(37): Xaa is C or S

SEQ ID NO: 33526 - protein, 36 aa, Artificial Sequence; identical to SEQ ID NO: 31370
  GFR-binding peptide
  MOD_RES (2)..(34)..(35): Xaa is C or S

SEQ ID NO: 33527 - protein, 34 aa, Artificial Sequence; identical to SEQ ID NO: 31371
  GFR-binding peptide
  MOD_RES (31)..(32): Xaa is C or S

SEQ ID NO: 33528 - protein, 43 aa, Artificial Sequence; identical to SEQ ID NO: 31372
  GFR-binding peptide
  MOD_RES (2)..(4)..(38)..(39): Xaa is C or S
  MOD_RES (16)..(17)..(18)..(19)..(20): Xaa is A or G
  MOD_RES (21)..(22)..(23)..(24): Xaa is A or G or is absent

SEQ ID NO: 33529 - protein, 32 aa, Artificial Sequence; identical to SEQ ID NO: 31373
  GFR-binding peptide
  MOD_RES (31)..(32): Xaa is C or S

SEQ ID NO: 33530 - protein, 41 aa, Artificial Sequence; identical to SEQ ID NO: 31374
  GFR-binding peptide
  MOD_RES (1)..(3)..(35)..(36): Xaa is C or S

SEQ ID NO: 33531 - protein, 36 aa, Artificial Sequence; identical to SEQ ID NO: 31375
  GFR-binding peptide
  MOD_RES (1)..(3)..(35)..(36): Xaa is C or S

SEQ ID NO: 33532 - protein, 37 aa, Artificial Sequence; identical to SEQ ID NO: 31376
  GFR-binding peptide
  MOD_RES (34)..(34): Xaa is C or S
  MOD_RES (12)..(13)..(14)..(15)..(16): Xaa is A or G
  MOD_RES (17)..(18)..(19)..(20): Xaa is A or G or is absent

SEQ ID NO: 33533 - protein, 38 aa, Artificial Sequence; identical to SEQ ID NO: 31377
  GFR-binding peptide
  MOD_RES (1)..(33)..(34): Xaa is C or S

SEQ ID NO: 33534 - protein, 38 aa, Artificial Sequence; identical to SEQ ID NO: 31378
  GFR-binding peptide
  MOD_RES (1)..(35)..(36): Xaa is C or S
  MOD_RES (13)..(14)..(15)..(16)..(17): Xaa is A or G
  MOD_RES (18)..(19)..(20)..(21): Xaa is A or G or is absent

SEQ ID NO: 33535 - protein, 37 aa, Artificial Sequence; identical to SEQ ID NO: 31379
  GFR-binding peptide
  MOD_RES (1)..(3)..(35)..(36): Xaa is C or S

SEQ ID NO: 33536 - protein, 38 aa, Artificial Sequence; identical to SEQ ID NO: 31380
  GFR-binding peptide
  MOD_RES (33)..(34): Xaa is C or S
  MOD_RES (11)..(12)..(13)..(14)..(15): Xaa is A or G
  MOD_RES (16)..(17)..(18)..(19): Xaa is A or G or is absent

SEQ ID NO: 33537 - protein, 35 aa, Artificial Sequence; identical to SEQ ID NO: 31381
  GFR-binding peptide
  MOD_RES (34)..(35): Xaa is C or S
  MOD_RES (12)..(13)..(14)..(15)..(16): Xaa is A or G
  MOD_RES (17)..(18)..(19)..(20): Xaa is A or G or is absent

SEQ ID NO: 33538 - protein, 33 aa, Artificial Sequence; identical to SEQ ID NO: 31382
  GFR-binding peptide
  MOD_RES (12)..(13)..(14)..(15)..(16): Xaa is A or G
  MOD_RES (17)..(18)..(19)..(20): Xaa is A or G or is absent

SEQ ID NO: 33539 - protein, 34 aa, Artificial Sequence; identical to SEQ ID NO: 31383
  GFR-binding peptide
  MOD_RES (31)..(32): Xaa is C or S

SEQ ID NO: 33540 - protein, 36 aa, Artificial Sequence; identical to SEQ ID NO: 31384
  GFR-binding peptide
  MOD_RES (33)..(34): Xaa is C or S
  MOD_RES (11)..(12)..(13)..(14)..(15): Xaa is A or G
  MOD_RES (16)..(17)..(18)..(19): Xaa is A or G or is absent

SEQ ID NO: 33541 - protein, 40 aa, Artificial Sequence; identical to SEQ ID NO: 31385
  GFR-binding peptide
  MOD_RES (2)..(4)..(36): Xaa is C or S

SEQ ID NO: 33542 - protein, 37 aa, Artificial Sequence; identical to SEQ ID NO: 31386
  GFR-binding peptide
  MOD_RES (2)..(4)..(36)..(37): Xaa is C or S

SEQ ID NO: 33543 - protein, 39 aa, Artificial Sequence; identical to SEQ ID NO: 31387
  GFR-binding peptide
  MOD_RES (1)..(3)..(35)..(36): Xaa is C or S

SEQ ID NO: 33544 - protein, 42 aa, Artificial Sequence; identical to SEQ ID NO: 31388
  GFR-binding peptide
  MOD_RES (1)..(3)..(38)..(39): Xaa is C or S
  MOD_RES (16)..(17)..(18)..(19)..(20): Xaa is A or G
  MOD_RES (21)..(22)..(23)..(24): Xaa is A or G or is absent

SEQ ID NO: 33545 - protein, 39 aa, Artificial Sequence; identical to SEQ ID NO: 31389
  GFR-binding peptide
  MOD_RES (34)..(35): Xaa is C or S
  MOD_RES (12)..(13)..(14)..(15)..(16): Xaa is A or G
  MOD_RES (17)..(18)..(19)..(20): Xaa is A or G or is absent

SEQ ID NO: 33546 - protein, 34 aa, Artificial Sequence; identical to SEQ ID NO: 31390
  GFR-binding peptide
  MOD_RES (33)..(34): Xaa is C or S
  MOD_RES (11)..(12)..(13)..(14)..(15): Xaa is A or G
  MOD_RES (16)..(17)..(18)..(19): Xaa is A or G or is absent

SEQ ID NO: 33547 - protein, 37 aa, Artificial Sequence; identical to SEQ ID NO: 31391
  GFR-binding peptide
  MOD_RES (34)..(35): Xaa is C or S
  MOD_RES (12)..(13)..(14)..(15)..(16): Xaa is A or G
  MOD_RES (17)..(18)..(19)..(20): Xaa is A or G or is absent

SEQ ID NO: 33548 - protein, 34 aa, Artificial Sequence; identical to SEQ ID NO: 31392
  GFR-binding peptide
  MOD_RES (32)..(33): Xaa is C or S

SEQ ID NO: 33549 - protein, 38 aa, Artificial Sequence; identical to SEQ ID NO: 31393
  GFR-binding peptide
  MOD_RES (2)..(4)..(36)..(37): Xaa is C or S

SEQ ID NO: 33550 - protein, 33 aa, Artificial Sequence; identical to SEQ ID NO: 31394
  GFR-binding peptide
  MOD_RES (31)..(32): Xaa is C or S

SEQ ID NO: 33551 - protein, 38 aa, Artificial Sequence; identical to SEQ ID NO: 31395
  GFR-binding peptide
  MOD_RES (2)..(4)..(38): Xaa is C or S
  MOD_RES (16)..(17)..(18)..(19)..(20): Xaa is A or G
  MOD_RES (21)..(22)..(23)..(24): Xaa is A or G or is absent

SEQ ID NO: 33552 - protein, 33 aa, Artificial Sequence; identical to SEQ ID NO: 31396
  GFR-binding peptide
  MOD_RES (2)..(2): Xaa is C or S

SEQ ID NO: 33553 - protein, 37 aa, Artificial Sequence; identical to SEQ ID NO: 31397
  GFR-binding peptide
  MOD_RES (1)..(35)..(36): Xaa is C or S
  MOD_RES (13)..(14)..(15)..(16)..(17): Xaa is A or G
  MOD_RES (18)..(19)..(20)..(21): Xaa is A or G or is absent

SEQ ID NO: 33554 - protein, 39 aa, Artificial Sequence; identical to SEQ ID NO: 31398
  GFR-binding peptide
  MOD_RES (2)..(4)..(38)..(39): Xaa is C or S
  MOD_RES (16)..(17)..(18)..(19)..(20): Xaa is A or G
  MOD_RES (21)..(22)..(23)..(24): Xaa is A or G or is absent

SEQ ID NO: 33555 - protein, 41 aa, Artificial Sequence; identical to SEQ ID NO: 31399
  GFR-binding peptide
  MOD_RES (2)..(4)..(38)..(39): Xaa is C or S
  MOD_RES (16)..(17)..(18)..(19)..(20): Xaa is A or G
  MOD_RES (21)..(22)..(23)..(24): Xaa is A or G or is absent

SEQ ID NO: 33556 - protein, 40 aa, Artificial Sequence; identical to SEQ ID NO: 31400
  GFR-binding peptide
  MOD_RES (1)..(3)..(38)..(39): Xaa is C or S
  MOD_RES (16)..(17)..(18)..(19)..(20): Xaa is A or G
  MOD_RES (21)..(22)..(23)..(24): Xaa is A or G or is absent

SEQ ID NO: 33557 - protein, 39 aa, Artificial Sequence; identical to SEQ ID NO: 31401
  GFR-binding peptide
  MOD_RES (1)..(3)..(35)..(36): Xaa is C or S

SEQ ID NO: 33558 - protein, 33 aa, Artificial Sequence; identical to SEQ ID NO: 31402
  GFR-binding peptide
  MOD_RES (2)..(2): Xaa is C or S

SEQ ID NO: 33559 - protein, 35 aa, Artificial Sequence; identical to SEQ ID NO: 31403
  GFR-binding peptide
  MOD_RES (2)..(2): Xaa is C or S
  MOD_RES (14)..(15)..(16)..(17)..(18): Xaa is A or G
  MOD_RES (19)..(20)..(21)..(22): Xaa is A or G or is absent

SEQ ID NO: 33560 - protein, 33 aa, Artificial Sequence; identical to SEQ ID NO: 31404
  GFR-binding peptide
  MOD_RES (2)..(2): Xaa is C or S

SEQ ID NO: 33561 - protein, 39 aa, Artificial Sequence; identical to SEQ ID NO: 31405
  GFR-binding peptide
  MOD_RES (1)..(3)..(37)..(38): Xaa is C or S
  MOD_RES (15)..(16)..(17)..(18)..(19): Xaa is A or G
  MOD_RES (20)..(21)..(22)..(23): Xaa is A or G or is absent

SEQ ID NO: 33562 - protein, 37 aa, Artificial Sequence; identical to SEQ ID NO: 31406
  GFR-binding peptide
  MOD_RES (1)..(35)..(36): Xaa is C or S
  MOD_RES (13)..(14)..(15)..(16)..(17): Xaa is A or G
  MOD_RES (18)..(19)..(20)..(21): Xaa is A or G or is absent

SEQ ID NO: 33563 - protein, 33 aa, Artificial Sequence; identical to SEQ ID NO: 31407
  GFR-binding peptide
  MOD_RES (1)..(33): Xaa is C or S

SEQ ID NO: 33564 - protein, 36 aa, Artificial Sequence; identical to SEQ ID NO: 31408
  GFR-binding peptide
  MOD_RES (1)..(35)..(36): Xaa is C or S
  MOD_RES (13)..(14)..(15)..(16)..(17): Xaa is A or G
  MOD_RES (18)..(19)..(20)..(21): Xaa is A or G or is absent

SEQ ID NO: 33565 - protein, 35 aa, Artificial Sequence; identical to SEQ ID NO: 31409
  GFR-binding peptide
  MOD_RES (33)..(34): Xaa is C or S

SEQ ID NO: 33566 - protein, 42 aa, Artificial Sequence; identical to SEQ ID NO: 31410
  GFR-binding peptide
  MOD_RES (1)..(36)..(37): Xaa is C or S
  MOD_RES (14)..(15)..(16)..(17)..(18): Xaa is A or G
  MOD_RES (19)..(20)..(21)..(22): Xaa is A or G or is absent

SEQ ID NO: 33567 - protein, 39 aa, Artificial Sequence; identical to SEQ ID NO: 31411
  GFR-binding peptide
  MOD_RES (1)..(3)..(35)..(36): Xaa is C or S

SEQ ID NO: 33568 - protein, 33 aa, Artificial Sequence; identical to SEQ ID NO: 31412
  GFR-binding peptide
  MOD_RES (12)..(13)..(14)..(15)..(16): Xaa is A or G
  MOD_RES (17)..(18)..(19)..(20): Xaa is A or G or is absent

SEQ ID NO: 33569 - protein, 38 aa, Artificial Sequence; identical to SEQ ID NO: 31413
  GFR-binding peptide
  MOD_RES (33)..(34): Xaa is C or S
  MOD_RES (11)..(12)..(13)..(14)..(15): Xaa is A or G
  MOD_RES (16)..(17)..(18)..(19): Xaa is A or G or is absent

SEQ ID NO: 33570 - protein, 37 aa, Artificial Sequence; identical to SEQ ID NO: 31414
  GFR-binding peptide
  MOD_RES (2)..(36)..(37): Xaa is C or S
  MOD_RES (14)..(15)..(16)..(17)..(18): Xaa is A or G
  MOD_RES (19)..(20)..(21)..(22): Xaa is A or G or is absent

SEQ ID NO: 33571 - protein, 38 aa, Artificial Sequence; identical to SEQ ID NO: 31415
  GFR-binding peptide
  MOD_RES (34)..(35): Xaa is C or S
  MOD_RES (12)..(13)..(14)..(15)..(16): Xaa is A or G
  MOD_RES (17)..(18)..(19)..(20): Xaa is A or G or is absent

SEQ ID NO: 33572 - protein, 33 aa, Artificial Sequence; identical to SEQ ID NO: 31416
  GFR-binding peptide
  MOD_RES (2)..(2): Xaa is C or S

SEQ ID NO: 33573 - protein, 35 aa, Artificial Sequence; identical to SEQ ID NO: 31417
  GFR-binding peptide
  MOD_RES (32)..(33): Xaa is C or S

SEQ ID NO: 33574 - protein, 35 aa, Artificial Sequence; identical to SEQ ID NO: 31418
  GFR-binding peptide
  MOD_RES (1)..(3)..(34)..(35): Xaa is C or S

SEQ ID NO: 33575 - protein, 42 aa, Artificial Sequence; identical to SEQ ID NO: 31419
  GFR-binding peptide
  MOD_RES (2)..(4)..(36)..(37): Xaa is C or S

SEQ ID NO: 33576 - protein, 35 aa, Artificial Sequence; identical to SEQ ID NO: 31420
  GFR-binding peptide
  MOD_RES (33)..(34): Xaa is C or S
  MOD_RES (11)..(12)..(13)..(14)..(15): Xaa is A or G
  MOD_RES (16)..(17)..(18)..(19): Xaa is A or G or is absent

SEQ ID NO: 33577 - protein, 39 aa, Artificial Sequence; identical to SEQ ID NO: 31421
  GFR-binding peptide
  MOD_RES (1)..(3)..(37)..(38): Xaa is C or S
  MOD_RES (15)..(16)..(17)..(18)..(19): Xaa is A or G
  MOD_RES (20)..(21)..(22)..(23): Xaa is A or G or is absent

SEQ ID NO: 33578 - protein, 33 aa, Artificial Sequence; identical to SEQ ID NO: 31422
  GFR-binding peptide
  MOD_RES (32)..(33): Xaa is C or S

SEQ ID NO: 33579 - protein, 38 aa, Artificial Sequence; identical to SEQ ID NO: 31423
  GFR-binding peptide
  MOD_RES (34)..(35): Xaa is C or S
  MOD_RES (12)..(13)..(14)..(15)..(16): Xaa is A or G
  MOD_RES (17)..(18)..(19)..(20): Xaa is A or G or is absent

SEQ ID NO: 33580 - protein, 35 aa, Artificial Sequence; identical to SEQ ID NO: 31424
  GFR-binding peptide
  MOD_RES (1)..(3)..(35): Xaa is C or S

SEQ ID NO: 33581 - protein, 40 aa, Artificial Sequence; identical to SEQ ID NO: 31425
  GFR-binding peptide
  MOD_RES (2)..(4)..(36)..(37): Xaa is C or S

SEQ ID NO: 33582 - protein, 41 aa, Artificial Sequence; identical to SEQ ID NO: 31426
  GFR-binding peptide
  MOD_RES (1)..(3)..(35)..(36): Xaa is C or S

SEQ ID NO: 33583 - protein, 32 aa, Artificial Sequence; identical to SEQ ID NO: 31427
  GFR-binding peptide
  MOD_RES (31)..(32): Xaa is C or S

SEQ ID NO: 33584 - protein, 43 aa, Artificial Sequence; identical to SEQ ID NO: 31428
  GFR-binding peptide
  MOD_RES (1)..(3)..(37)..(38): Xaa is C or S
  MOD_RES (15)..(16)..(17)..(18)..(19): Xaa is A or G
  MOD_RES (20)..(21)..(22)..(23): Xaa is A or G or is absent

SEQ ID NO: 33585 - protein, 38 aa, Artificial Sequence; identical to SEQ ID NO: 31429
  GFR-binding peptide
  MOD_RES (1)..(3)..(35)..(36): Xaa is C or S

SEQ ID NO: 33586 - protein, 38 aa, Artificial Sequence; identical to SEQ ID NO: 31430
  GFR-binding peptide
  MOD_RES (32)..(33): Xaa is C or S

SEQ ID NO: 33587 - protein, 44 aa, Artificial Sequence; identical to SEQ ID NO: 31431
  GFR-binding peptide
  MOD_RES (2)..(4)..(38)..(39): Xaa is C or S
  MOD_RES (16)..(17)..(18)..(19)..(20): Xaa is A or G
  MOD_RES (21)..(22)..(23)..(24): Xaa is A or G or is absent

SEQ ID NO: 33588 - protein, 41 aa, Artificial Sequence; identical to SEQ ID NO: 31432
  GFR-binding peptide
  MOD_RES (2)..(4)..(36)..(37): Xaa is C or S

SEQ ID NO: 33589 - protein, 36 aa, Artificial Sequence; identical to SEQ ID NO: 31433
  GFR-binding peptide
  MOD_RES (2)..(4): Xaa is C or S

SEQ ID NO: 33590 - protein, 41 aa, Artificial Sequence; identical to SEQ ID NO: 31434
  GFR-binding peptide
  MOD_RES (1)..(3)..(35)..(36): Xaa is C or S

SEQ ID NO: 33591 - protein, 33 aa, Artificial Sequence; identical to SEQ ID NO: 31435
  GFR-binding peptide
  MOD_RES (33)..(33): Xaa is C or S
  MOD_RES (11)..(12)..(13)..(14)..(15): Xaa is A or G
  MOD_RES (16)..(17)..(18)..(19): Xaa is A or G or is absent

SEQ ID NO: 33592 - protein, 35 aa, Artificial Sequence; identical to SEQ ID NO: 31436
  GFR-binding peptide
  MOD_RES (2)..(33)..(34): Xaa is C or S

SEQ ID NO: 33593 - protein, 34 aa, Artificial Sequence; identical to SEQ ID NO: 31437
  GFR-binding peptide
  MOD_RES (1)..(33)..(34): Xaa is C or S

SEQ ID NO: 33594 - protein, 35 aa, Artificial Sequence; identical to SEQ ID NO: 31438
  GFR-binding peptide
  MOD_RES (32)..(33): Xaa is C or S

SEQ ID NO: 33595 - protein, 43 aa, Artificial Sequence; identical to SEQ ID NO: 31439
  GFR-binding peptide
  MOD_RES (2)..(37)..(38): Xaa is C or S
  MOD_RES (15)..(16)..(17)..(18)..(19): Xaa is A or G
  MOD_RES (20)..(21)..(22)..(23): Xaa is A or G or is absent

SEQ ID NO: 33596 - protein, 43 aa, Artificial Sequence; identical to SEQ ID NO: 31440
  GFR-binding peptide
  MOD_RES (2)..(4)..(38)..(39): Xaa is C or S
  MOD_RES (16)..(17)..(18)..(19)..(20): Xaa is A or G
  MOD_RES (21)..(22)..(23)..(24): Xaa is A or G or is absent

SEQ ID NO: 33597 - protein, 40 aa, Artificial Sequence; identical to SEQ ID NO: 31441
  GFR-binding peptide
  MOD_RES (1)..(3)..(35)..(36): Xaa is C or S

SEQ ID NO: 33598 - protein, 36 aa, Artificial Sequence; identical to SEQ ID NO: 31442
  GFR-binding peptide
  MOD_RES (1)..(3): Xaa is C or S
  MOD_RES (15)..(16)..(17)..(18)..(19): Xaa is A or G
  MOD_RES (20)..(21)..(22)..(23): Xaa is A or G or is absent

SEQ ID NO: 33599 - protein, 33 aa, Artificial Sequence; identical to SEQ ID NO: 31443
  GFR-binding peptide
  MOD_RES (33)..(33): Xaa is C or S

SEQ ID NO: 33600 - protein, 38 aa, Artificial Sequence; identical to SEQ ID NO: 31444
  GFR-binding peptide
  MOD_RES (33)..(33): Xaa is C or S
  MOD_RES (11)..(12)..(13)..(14)..(15): Xaa is A or G
  MOD_RES (16)..(17)..(18)..(19): Xaa is A or G or is absent

SEQ ID NO: 33601 - protein, 44 aa, Artificial Sequence; identical to SEQ ID NO: 31445
  GFR-binding peptide
  MOD_RES (1)..(3)..(38)..(39): Xaa is C or S
  MOD_RES (16)..(17)..(18)..(19)..(20): Xaa is A or G
  MOD_RES (21)..(22)..(23)..(24): Xaa is A or G or is absent

SEQ ID NO: 33602 - protein, 38 aa, Artificial Sequence; identical to SEQ ID NO: 31446
  GFR-binding peptide
  MOD_RES (2)..(34)..(35): Xaa is C or S

SEQ ID NO: 33603 - protein, 39 aa, Artificial Sequence; identical to SEQ ID NO: 31447
  GFR-binding peptide
  MOD_RES (35)..(36): Xaa is C or S
  MOD_RES (13)..(14)..(15)..(16)..(17): Xaa is A or G
  MOD_RES (18)..(19)..(20)..(21): Xaa is A or G or is absent

SEQ ID NO: 33604 - protein, 41 aa, Artificial Sequence; identical to SEQ ID NO: 31448
  GFR-binding peptide
  MOD_RES (1)..(35)..(36): Xaa is C or S
  MOD_RES (13)..(14)..(15)..(16)..(17): Xaa is A or G
  MOD_RES (18)..(19)..(20)..(21): Xaa is A or G or is absent

SEQ ID NO: 33605 - protein, 41 aa, Artificial Sequence; identical to SEQ ID NO: 31449
  GFR-binding peptide
  MOD_RES (1)..(35)..(36): Xaa is C or S
  MOD_RES (13)..(14)..(15)..(16)..(17): Xaa is A or G
  MOD_RES (18)..(19)..(20)..(21): Xaa is A or G or is absent

SEQ ID NO: 33606 - protein, 33 aa, Artificial Sequence; identical to SEQ ID NO: 31450
  GFR-binding peptide
  MOD_RES (1)..(33): Xaa is C or S

SEQ ID NO: 33607 - protein, 34 aa, Artificial Sequence; identical to SEQ ID NO: 31451
  GFR-binding peptide
  MOD_RES (1)..(1): Xaa is C or S
  MOD_RES (13)..(14)..(15)..(16)..(17): Xaa is A or G
  MOD_RES (18)..(19)..(20)..(21): Xaa is A or G or is absent

SEQ ID NO: 33608 - protein, 33 aa, Artificial Sequence; identical to SEQ ID NO: 31452
  GFR-binding peptide
  MOD_RES (1)..(1): Xaa is C or S
  MOD_RES (12)..(13)..(14)..(15)..(16): Xaa is A or G
  MOD_RES (17)..(18)..(19)..(20): Xaa is A or G or is absent

SEQ ID NO: 33609 - protein, 35 aa, Artificial Sequence; identical to SEQ ID NO: 31453
  GFR-binding peptide
  MOD_RES (2)..(4): Xaa is C or S

SEQ ID NO: 33610 - protein, 39 aa, Artificial Sequence; identical to SEQ ID NO: 31454
  GFR-binding peptide
  MOD_RES (1)..(3)..(36)..(37): Xaa is C or S

SEQ ID NO: 33611 - protein, 34 aa, Artificial Sequence; identical to SEQ ID NO: 31455
  GFR-binding peptide
  MOD_RES (32)..(33): Xaa is C or S

SEQ ID NO: 33612 - protein, 32 aa, Artificial Sequence; identical to SEQ ID NO: 31456
  GFR-binding peptide
  MOD_RES (32)..(32): Xaa is C or S

SEQ ID NO: 33613 - protein, 39 aa, Artificial Sequence; identical to SEQ ID NO: 31457
  GFR-binding peptide
  MOD_RES (1)..(3)..(35)..(36): Xaa is C or S

SEQ ID NO: 33614 - protein, 38 aa, Artificial Sequence; identical to SEQ ID NO: 31458
  GFR-binding peptide
  MOD_RES (33)..(34): Xaa is C or S
  MOD_RES (11)..(12)..(13)..(14)..(15): Xaa is A or G
  MOD_RES (16)..(17)..(18)..(19): Xaa is A or G or is absent

SEQ ID NO: 33615 - protein, 42 aa, Artificial Sequence; identical to SEQ ID NO: 31459
  GFR-binding peptide
  MOD_RES (1)..(3)..(37)..(38): Xaa is C or S
  MOD_RES (15)..(16)..(17)..(18)..(19): Xaa is A or G
  MOD_RES (20)..(21)..(22)..(23): Xaa is A or G or is absent

SEQ ID NO: 33616 - protein, 36 aa, Artificial Sequence; identical to SEQ ID NO: 31460
  GFR-binding peptide
  MOD_RES (1)..(33)..(34): Xaa is C or S

SEQ ID NO: 33617 - protein, 41 aa, Artificial Sequence; identical to SEQ ID NO: 31461
  GFR-binding peptide
  MOD_RES (2)..(36)..(37): Xaa is C or S
  MOD_RES (14)..(15)..(16)..(17)..(18): Xaa is A or G
  MOD_RES (19)..(20)..(21)..(22): Xaa is A or G or is absent

SEQ ID NO: 33618 - protein, 41 aa, Artificial Sequence; identical to SEQ ID NO: 31462
  GFR-binding peptide
  MOD_RES (1)..(36)..(37): Xaa is C or S
  MOD_RES (14)..(15)..(16)..(17)..(18): Xaa is A or G
  MOD_RES (19)..(20)..(21)..(22): Xaa is A or G or is absent

SEQ ID NO: 33619 - protein, 34 aa, Artificial Sequence; identical to SEQ ID NO: 31463
  GFR-binding peptide
  MOD_RES (33)..(34): Xaa is C or S
  MOD_RES (11)..(12)..(13)..(14)..(15): Xaa is A or G
  MOD_RES (16)..(17)..(18)..(19): Xaa is A or G or is absent

SEQ ID NO: 33620 - protein, 36 aa, Artificial Sequence; identical to SEQ ID NO: 31464
  GFR-binding peptide
  MOD_RES (2)..(36): Xaa is C or S
  MOD_RES (14)..(15)..(16)..(17)..(18): Xaa is A or G
  MOD_RES (19)..(20)..(21)..(22): Xaa is A or G or is absent

SEQ ID NO: 33621 - protein, 37 aa, Artificial Sequence; identical to SEQ ID NO: 31465
  GFR-binding peptide
  MOD_RES (33)..(34): Xaa is C or S
  MOD_RES (11)..(12)..(13)..(14)..(15): Xaa is A or G
  MOD_RES (16)..(17)..(18)..(19): Xaa is A or G or is absent

SEQ ID NO: 33622 - protein, 32 aa, Artificial Sequence; identical to SEQ ID NO: 31466
  GFR-binding peptide
  MOD_RES (31)..(32): Xaa is C or S

SEQ ID NO: 33623 - protein, 38 aa, Artificial Sequence; identical to SEQ ID NO: 31467
  GFR-binding peptide
  MOD_RES (2)..(4)..(36)..(37): Xaa is C or S

SEQ ID NO: 33624 - protein, 37 aa, Artificial Sequence; identical to SEQ ID NO: 31468
  GFR-binding peptide
  MOD_RES (2)..(36)..(37): Xaa is C or S
  MOD_RES (14)..(15)..(16)..(17)..(18): Xaa is A or G
  MOD_RES (19)..(20)..(21)..(22): Xaa is A or G or is absent

SEQ ID NO: 33625 - protein, 36 aa, Artificial Sequence; identical to SEQ ID NO: 31469
  GFR-binding peptide
  MOD_RES (32)..(33): Xaa is C or S

SEQ ID NO: 33626 - protein, 31 aa, Artificial Sequence; identical to SEQ ID NO: 31470
  GFR-binding peptide
  MOD_RES (1)..(1): Xaa is C or S

SEQ ID NO: 33627 - protein, 34 aa, Artificial Sequence; identical to SEQ ID NO: 31471
  GFR-binding peptide
  MOD_RES (2)..(4): Xaa is C or S

SEQ ID NO: 33628 - protein, 40 aa, Artificial Sequence; identical to SEQ ID NO: 31472
  GFR-binding peptide
  MOD_RES (1)..(3)..(37)..(38): Xaa is C or S
  MOD_RES (15)..(16)..(17)..(18)..(19): Xaa is A or G
  MOD_RES (20)..(21)..(22)..(23): Xaa is A or G or is absent

SEQ ID NO: 33629 - protein, 39 aa, Artificial Sequence; identical to SEQ ID NO: 31473
  GFR-binding peptide
  MOD_RES (1)..(33)..(34): Xaa is C or S

SEQ ID NO: 33630 - protein, 39 aa, Artificial Sequence; identical to SEQ ID NO: 31474
  GFR-binding peptide
  MOD_RES (1)..(3)..(35)..(36): Xaa is C or S

SEQ ID NO: 33631 - protein, 35 aa, Artificial Sequence; identical to SEQ ID NO: 31475
  GFR-binding peptide
  MOD_RES (33)..(34): Xaa is C or S
  MOD_RES (11)..(12)..(13)..(14)..(15): Xaa is A or G
  MOD_RES (16)..(17)..(18)..(19): Xaa is A or G or is absent

SEQ ID NO: 33632 - protein, 42 aa, Artificial Sequence; identical to SEQ ID NO: 31476
  GFR-binding peptide
  MOD_RES (2)..(4)..(36)..(37): Xaa is C or S

SEQ ID NO: 33633 - protein, 41 aa, Artificial Sequence; identical to SEQ ID NO: 31477
  GFR-binding peptide
  MOD_RES (2)..(4)..(36)..(37): Xaa is C or S

SEQ ID NO: 33634 - protein, 30 aa, Artificial Sequence; identical to SEQ ID NO: 31478
  GFR-binding peptide

SEQ ID NO: 33635 - protein, 39 aa, Artificial Sequence; identical to SEQ ID NO: 31479
  GFR-binding peptide
  MOD_RES (2)..(4)..(38)..(39): Xaa is C or S
  MOD_RES (16)..(17)..(18)..(19)..(20): Xaa is A or G
  MOD_RES (21)..(22)..(23)..(24): Xaa is A or G or is absent

SEQ ID NO: 33636 - protein, 42 aa, Artificial Sequence; identical to SEQ ID NO: 31480
  GFR-binding peptide
  MOD_RES (2)..(36)..(37): Xaa is C or S
  MOD_RES (14)..(15)..(16)..(17)..(18): Xaa is A or G
  MOD_RES (19)..(20)..(21)..(22): Xaa is A or G or is absent

SEQ ID NO: 33637 - protein, 37 aa, Artificial Sequence; identical to SEQ ID NO: 31481
  GFR-binding peptide
  MOD_RES (2)..(36)..(37): Xaa is C or S
  MOD_RES (14)..(15)..(16)..(17)..(18): Xaa is A or G
  MOD_RES (19)..(20)..(21)..(22): Xaa is A or G or is absent

SEQ ID NO: 33638 - protein, 39 aa, Artificial Sequence; identical to SEQ ID NO: 31482
  GFR-binding peptide
  MOD_RES (2)..(36)..(37): Xaa is C or S
  MOD_RES (14)..(15)..(16)..(17)..(18): Xaa is A or G
  MOD_RES (19)..(20)..(21)..(22): Xaa is A or G or is absent

SEQ ID NO: 33639 - protein, 37 aa, Artificial Sequence; identical to SEQ ID NO: 31483
  GFR-binding peptide
  MOD_RES (1)..(33)..(34): Xaa is C or S

SEQ ID NO: 33640 - protein, 41 aa, Artificial Sequence; identical to SEQ ID NO: 31484
  GFR-binding peptide
  MOD_RES (2)..(4)..(36)..(37): Xaa is C or S

SEQ ID NO: 33641 - protein, 39 aa, Artificial Sequence; identical to SEQ ID NO: 31485
  GFR-binding peptide
  MOD_RES (34)..(35): Xaa is C or S
  MOD_RES (12)..(13)..(14)..(15)..(16): Xaa is A or G
  MOD_RES (17)..(18)..(19)..(20): Xaa is A or G or is absent

SEQ ID NO: 33642 - protein, 36 aa, Artificial Sequence; identical to SEQ ID NO: 31486
  GFR-binding peptide
  MOD_RES (1)..(3): Xaa is C or S
  MOD_RES (15)..(16)..(17)..(18)..(19): Xaa is A or G
  MOD_RES (20)..(21)..(22)..(23): Xaa is A or G or is absent

SEQ ID NO: 33643 - protein, 37 aa, Artificial Sequence; identical to SEQ ID NO: 31487
  GFR-binding peptide
  MOD_RES (1)..(3)..(35)..(36): Xaa is C or S

SEQ ID NO: 33644 - protein, 33 aa, Artificial Sequence; identical to SEQ ID NO: 31488
  GFR-binding peptide
  MOD_RES (2)..(33): Xaa is C or S

SEQ ID NO: 33645 - protein, 36 aa, Artificial Sequence; identical to SEQ ID NO: 31489
  GFR-binding peptide
  MOD_RES (2)..(35)..(36): Xaa is C or S
  MOD_RES (13)..(14)..(15)..(16)..(17): Xaa is A or G
  MOD_RES (18)..(19)..(20)..(21): Xaa is A or G or is absent

SEQ ID NO: 33646 - protein, 34 aa, Artificial Sequence; identical to SEQ ID NO: 31490
  GFR-binding peptide
  MOD_RES (1)..(1): Xaa is C or S
  MOD_RES (13)..(14)..(15)..(16)..(17): Xaa is A or G
  MOD_RES (18)..(19)..(20)..(21): Xaa is A or G or is absent

SEQ ID NO: 33647 - protein, 35 aa, Artificial Sequence; identical to SEQ ID NO: 31491
  GFR-binding peptide
  MOD_RES (2)..(34)..(35): Xaa is C or S

SEQ ID NO: 33648 - protein, 41 aa, Artificial Sequence; identical to SEQ ID NO: 31492
  GFR-binding peptide
  MOD_RES (2)..(4)..(38)..(39): Xaa is C or S
  MOD_RES (16)..(17)..(18)..(19)..(20): Xaa is A or G
  MOD_RES (21)..(22)..(23)..(24): Xaa is A or G or is absent

SEQ ID NO: 33649 - protein, 43 aa, Artificial Sequence; identical to SEQ ID NO: 31493
  GFR-binding peptide
  MOD_RES (1)..(3)..(37)..(38): Xaa is C or S
  MOD_RES (15)..(16)..(17)..(18)..(19): Xaa is A or G
  MOD_RES (20)..(21)..(22)..(23): Xaa is A or G or is absent

SEQ ID NO: 33650 - protein, 36 aa, Artificial Sequence; identical to SEQ ID NO: 31494
  GFR-binding peptide
  MOD_RES (1)..(33): Xaa is C or S

SEQ ID NO: 33651 - protein, 35 aa, Artificial Sequence; identical to SEQ ID NO: 31495
  GFR-binding peptide
  MOD_RES (33)..(34): Xaa is C or S
  MOD_RES (11)..(12)..(13)..(14)..(15): Xaa is A or G
  MOD_RES (16)..(17)..(18)..(19): Xaa is A or G or is absent

SEQ ID NO: 33652 - protein, 36 aa, Artificial Sequence; identical to SEQ ID NO: 31496
  GFR-binding peptide
  MOD_RES (2)..(36): Xaa is C or S
  MOD_RES (14)..(15)..(16)..(17)..(18): Xaa is A or G
  MOD_RES (19)..(20)..(21)..(22): Xaa is A or G or is absent

SEQ ID NO: 33653 - protein, 35 aa, Artificial Sequence; identical to SEQ ID NO: 31497
  GFR-binding peptide
  MOD_RES (1)..(34)..(35): Xaa is C or S
  MOD_RES (12)..(13)..(14)..(15)..(16): Xaa is A or G
  MOD_RES (17)..(18)..(19)..(20): Xaa is A or G or is absent

SEQ ID NO: 33654 - protein, 32 aa, Artificial Sequence; identical to SEQ ID NO: 31498
  GFR-binding peptide
  MOD_RES (11)..(12)..(13)..(14)..(15): Xaa is A or G
  MOD_RES (16)..(17)..(18)..(19): Xaa is A or G or is absent

SEQ ID NO: 33655 - protein, 32 aa, Artificial Sequence; identical to SEQ ID NO: 31499
  GFR-binding peptide
  MOD_RES (31)..(32): Xaa is C or S

SEQ ID NO: 33656 - protein, 40 aa, Artificial Sequence; identical to SEQ ID NO: 31500
  GFR-binding peptide
  MOD_RES (1)..(36)..(37): Xaa is C or S
  MOD_RES (14)..(15)..(16)..(17)..(18): Xaa is A or G
  MOD_RES (19)..(20)..(21)..(22): Xaa is A or G or is absent

SEQ ID NO: 33657 - protein, 32 aa, Artificial Sequence; identical to SEQ ID NO: 31501
  GFR-binding peptide
  MOD_RES (11)..(12)..(13)..(14)..(15): Xaa is A or G
  MOD_RES (16)..(17)..(18)..(19): Xaa is A or G or is absent

SEQ ID NO: 33658 - protein, 36 aa, Artificial Sequence; identical to SEQ ID NO: 31502
  GFR-binding peptide
  MOD_RES (2)..(4)..(36): Xaa is C or S

SEQ ID NO: 33659 - protein, 35 aa, Artificial Sequence; identical to SEQ ID NO: 31503
  GFR-binding peptide
  MOD_RES (32)..(33): Xaa is C or S

SEQ ID NO: 33660 - protein, 38 aa, Artificial Sequence; identical to SEQ ID NO: 31504
  GFR-binding peptide
  MOD_RES (34)..(35): Xaa is C or S
  MOD_RES (12)..(13)..(14)..(15)..(16): Xaa is A or G
  MOD_RES (17)..(18)..(19)..(20): Xaa is A or G or is absent

SEQ ID NO: 33661 - protein, 42 aa, Artificial Sequence; identical to SEQ ID NO: 31505
  GFR-binding peptide
  MOD_RES (1)..(3)..(37)..(38): Xaa is C or S
  MOD_RES (15)..(16)..(17)..(18)..(19): Xaa is A or G
  MOD_RES (20)..(21)..(22)..(23): Xaa is A or G or is absent

SEQ ID NO: 33662 - protein, 39 aa, Artificial Sequence; identical to SEQ ID NO: 31506
  GFR-binding peptide
  MOD_RES (1)..(34)..(35): Xaa is C or S
  MOD_RES (12)..(13)..(14)..(15)..(16): Xaa is A or G
  MOD_RES (17)..(18)..(19)..(20): Xaa is A or G or is absent

SEQ ID NO: 33663 - protein, 43 aa, Artificial Sequence; identical to SEQ ID NO: 31507
  GFR-binding peptide
  MOD_RES (1)..(3)..(37)..(38): Xaa is C or S
  MOD_RES (15)..(16)..(17)..(18)..(19): Xaa is A or G
  MOD_RES (20)..(21)..(22)..(23): Xaa is A or G or is absent

SEQ ID NO: 33664 - protein, 43 aa, Artificial Sequence; identical to SEQ ID NO: 31508
  GFR-binding peptide
  MOD_RES (2)..(4)..(38)..(39): Xaa is C or S
  MOD_RES (16)..(17)..(18)..(19)..(20): Xaa is A or G
  MOD_RES (21)..(22)..(23)..(24): Xaa is A or G or is absent

SEQ ID NO: 33665 - protein, 42 aa, Artificial Sequence; identical to SEQ ID NO: 31509
  GFR-binding peptide
  MOD_RES (2)..(4)..(36)..(37): Xaa is C or S

SEQ ID NO: 33666 - protein, 35 aa, Artificial Sequence; identical to SEQ ID NO: 31510
  GFR-binding peptide
  MOD_RES (34)..(35): Xaa is C or S
  MOD_RES (12)..(13)..(14)..(15)..(16): Xaa is A or G
  MOD_RES (17)..(18)..(19)..(20): Xaa is A or G or is absent

SEQ ID NO: 33667 - protein, 37 aa, Artificial Sequence; identical to SEQ ID NO: 31511
  GFR-binding peptide
  MOD_RES (1)..(3)..(37): Xaa is C or S
  MOD_RES (15)..(16)..(17)..(18)..(19): Xaa is A or G
  MOD_RES (20)..(21)..(22)..(23): Xaa is A or G or is absent

SEQ ID NO: 33668 - protein, 33 aa, Artificial Sequence; identical to SEQ ID NO: 31512
  GFR-binding peptide
  MOD_RES (33)..(33): Xaa is C or S
  MOD_RES (11)..(12)..(13)..(14)..(15): Xaa is A or G
  MOD_RES (16)..(17)..(18)..(19): Xaa is A or G or is absent

SEQ ID NO: 33669 - protein, 37 aa, Artificial Sequence; identical to SEQ ID NO: 31513
  GFR-binding peptide
  MOD_RES (31)..(32): Xaa is C or S

SEQ ID NO: 33670 - protein, 41 aa, Artificial Sequence; identical to SEQ ID NO: 31514
  GFR-binding peptide
  MOD_RES (2)..(36): Xaa is C or S
  MOD_RES (14)..(15)..(16)..(17)..(18): Xaa is A or G
  MOD_RES (19)..(20)..(21)..(22): Xaa is A or G or is absent

SEQ ID NO: 33671 - protein, 37 aa, Artificial Sequence; identical to SEQ ID NO: 31515
  GFR-binding peptide
  MOD_RES (2)..(4)..(37): Xaa is C or S

SEQ ID NO: 33672 - protein, 40 aa, Artificial Sequence; identical to SEQ ID NO: 31516
  GFR-binding peptide
  MOD_RES (1)..(3)..(37)..(38): Xaa is C or S
  MOD_RES (15)..(16)..(17)..(18)..(19): Xaa is A or G
  MOD_RES (20)..(21)..(22)..(23): Xaa is A or G or is absent

SEQ ID NO: 33673 - protein, 38 aa, Artificial Sequence; identical to SEQ ID NO: 31517
  GFR-binding peptide
  MOD_RES (2)..(34)..(35): Xaa is C or S

SEQ ID NO: 33674 - protein, 33 aa, Artificial Sequence; identical to SEQ ID NO: 31518
  GFR-binding peptide
  MOD_RES (31)..(32): Xaa is C or S

SEQ ID NO: 33675 - protein, 36 aa, Artificial Sequence; identical to SEQ ID NO: 31519
  GFR-binding peptide
  MOD_RES (33)..(34): Xaa is C or S
  MOD_RES (11)..(12)..(13)..(14)..(15): Xaa is A or G
  MOD_RES (16)..(17)..(18)..(19): Xaa is A or G or is absent

SEQ ID NO: 33676 - protein, 39 aa, Artificial Sequence; identical to SEQ ID NO: 31520
  GFR-binding peptide
  MOD_RES (2)..(36)..(37): Xaa is C or S
  MOD_RES (14)..(15)..(16)..(17)..(18): Xaa is A or G
  MOD_RES (19)..(20)..(21)..(22): Xaa is A or G or is absent

SEQ ID NO: 33677 - protein, 38 aa, Artificial Sequence; identical to SEQ ID NO: 31521
  GFR-binding peptide
  MOD_RES (1)..(35): Xaa is C or S
  MOD_RES (13)..(14)..(15)..(16)..(17): Xaa is A or G
  MOD_RES (18)..(19)..(20)..(21): Xaa is A or G or is absent

SEQ ID NO: 33678 - protein, 38 aa, Artificial Sequence; identical to SEQ ID NO: 31522
  GFR-binding peptide
  MOD_RES (2)..(4)..(36): Xaa is C or S

SEQ ID NO: 33679 - protein, 42 aa, Artificial Sequence; identical to SEQ ID NO: 31523
  GFR-binding peptide
  MOD_RES (2)..(36)..(37): Xaa is C or S
  MOD_RES (14)..(15)..(16)..(17)..(18): Xaa is A or G
  MOD_RES (19)..(20)..(21)..(22): Xaa is A or G or is absent

SEQ ID NO: 33680 - protein, 41 aa, Artificial Sequence; identical to SEQ ID NO: 31524
  GFR-binding peptide
  MOD_RES (1)..(3)..(37): Xaa is C or S
  MOD_RES (15)..(16)..(17)..(18)..(19): Xaa is A or G
  MOD_RES (20)..(21)..(22)..(23): Xaa is A or G or is absent

SEQ ID NO: 33681 - protein, 40 aa, Artificial Sequence; identical to SEQ ID NO: 31525
  GFR-binding peptide
  MOD_RES (2)..(34)..(35): Xaa is C or S

SEQ ID NO: 33682 - protein, 37 aa, Artificial Sequence; identical to SEQ ID NO: 31526
  GFR-binding peptide
  MOD_RES (2)..(4)..(35)..(36): Xaa is C or S

SEQ ID NO: 33683 - protein, 39 aa, Artificial Sequence; identical to SEQ ID NO: 31527
  GFR-binding peptide
  MOD_RES (2)..(4)..(36)..(37): Xaa is C or S

SEQ ID NO: 33684 - protein, 40 aa, Artificial Sequence; identical to SEQ ID NO: 31528
  GFR-binding peptide
  MOD_RES (2)..(4)..(39)..(40): Xaa is C or S
  MOD_RES (17)..(18)..(19)..(20)..(21): Xaa is A or G
  MOD_RES (22)..(23)..(24)..(25): Xaa is A or G or is absent

SEQ ID NO: 33685 - protein, 43 aa, Artificial Sequence; identical to SEQ ID NO: 31529
  GFR-binding peptide
  MOD_RES (2)..(4)..(38): Xaa is C or S
  MOD_RES (16)..(17)..(18)..(19)..(20): Xaa is A or G
  MOD_RES (21)..(22)..(23)..(24): Xaa is A or G or is absent

SEQ ID NO: 33686 - protein, 33 aa, Artificial Sequence; identical to SEQ ID NO: 31530
  GFR-binding peptide
  MOD_RES (1)..(33): Xaa is C or S

SEQ ID NO: 33687 - protein, 39 aa, Artificial Sequence; identical to SEQ ID NO: 31531
  GFR-binding peptide
  MOD_RES (1)..(33)..(34): Xaa is C or S

SEQ ID NO: 33688 - protein, 33 aa, Artificial Sequence; identical to SEQ ID NO: 31532
  GFR-binding peptide
  MOD_RES (33)..(33): Xaa is C or S
  MOD_RES (11)..(12)..(13)..(14)..(15): Xaa is A or G
  MOD_RES (16)..(17)..(18)..(19): Xaa is A or G or is absent

SEQ ID NO: 33689 - protein, 41 aa, Artificial Sequence; identical to SEQ ID NO: 31533
  GFR-binding peptide
  MOD_RES (2)..(4)..(36)..(37): Xaa is C or S

SEQ ID NO: 33690 - protein, 36 aa, Artificial Sequence; identical to SEQ ID NO: 31534
  GFR-binding peptide
  MOD_RES (2)..(34)..(35): Xaa is C or S

SEQ ID NO: 33691 - protein, 38 aa, Artificial Sequence; identical to SEQ ID NO: 31535
  GFR-binding peptide
  MOD_RES (2)..(36): Xaa is C or S
  MOD_RES (14)..(15)..(16)..(17)..(18): Xaa is A or G
  MOD_RES (19)..(20)..(21)..(22): Xaa is A or G or is absent

SEQ ID NO: 33692 - protein, 37 aa, Artificial Sequence; identical to SEQ ID NO: 31536
  GFR-binding peptide
  MOD_RES (33)..(34): Xaa is C or S

SEQ ID NO: 33693 - protein, 33 aa, Artificial Sequence; identical to SEQ ID NO: 31537
  GFR-binding peptide
  MOD_RES (33)..(33): Xaa is C or S
  MOD_RES (11)..(12)..(13)..(14)..(15): Xaa is A or G
  MOD_RES (16)..(17)..(18)..(19): Xaa is A or G or is absent

SEQ ID NO: 33694 - protein, 34 aa, Artificial Sequence; identical to SEQ ID NO: 31538
  GFR-binding peptide
  MOD_RES (34)..(34): Xaa is C or S
  MOD_RES (12)..(13)..(14)..(15)..(16): Xaa is A or G
  MOD_RES (17)..(18)..(19)..(20): Xaa is A or G or is absent

SEQ ID NO: 33695 - protein, 38 aa, Artificial Sequence; identical to SEQ ID NO: 31539
  GFR-binding peptide
  MOD_RES (2)..(36)..(37): Xaa is C or S
  MOD_RES (14)..(15)..(16)..(17)..(18): Xaa is A or G
  MOD_RES (19)..(20)..(21)..(22): Xaa is A or G or is absent

SEQ ID NO: 33696 - protein, 41 aa, Artificial Sequence; identical to SEQ ID NO: 31540
  GFR-binding peptide
  MOD_RES (2)..(36)..(37): Xaa is C or S
  MOD_RES (14)..(15)..(16)..(17)..(18): Xaa is A or G
  MOD_RES (19)..(20)..(21)..(22): Xaa is A or G or is absent

SEQ ID NO: 33697 - protein, 37 aa, Artificial Sequence; identical to SEQ ID NO: 31541
  GFR-binding peptide
  MOD_RES (34)..(35): Xaa is C or S
  MOD_RES (12)..(13)..(14)..(15)..(16): Xaa is A or G
  MOD_RES (17)..(18)..(19)..(20): Xaa is A or G or is absent

SEQ ID NO: 33698 - protein, 37 aa, Artificial Sequence; identical to SEQ ID NO: 31542
  GFR-binding peptide
  MOD_RES (1)..(35)..(36): Xaa is C or S
  MOD_RES (13)..(14)..(15)..(16)..(17): Xaa is A or G
  MOD_RES (18)..(19)..(20)..(21): Xaa is A or G or is absent

SEQ ID NO: 33699 - protein, 38 aa, Artificial Sequence; identical to SEQ ID NO: 31543
  GFR-binding peptide
  MOD_RES (1)..(33)..(34): Xaa is C or S

SEQ ID NO: 33700 - protein, 38 aa, Artificial Sequence; identical to SEQ ID NO: 31544
  GFR-binding peptide
  MOD_RES (2)..(4)..(38): Xaa is C or S
  MOD_RES (16)..(17)..(18)..(19)..(20): Xaa is A or G
  MOD_RES (21)..(22)..(23)..(24): Xaa is A or G or is absent

SEQ ID NO: 33701 - protein, 42 aa, Artificial Sequence; identical to SEQ ID NO: 31545
  GFR-binding peptide
  MOD_RES (1)..(3)..(37)..(38): Xaa is C or S
  MOD_RES (15)..(16)..(17)..(18)..(19): Xaa is A or G
  MOD_RES (20)..(21)..(22)..(23): Xaa is A or G or is absent

SEQ ID NO: 33702 - protein, 36 aa, Artificial Sequence; identical to SEQ ID NO: 31546
  GFR-binding peptide
  MOD_RES (2)..(36): Xaa is C or S
  MOD_RES (14)..(15)..(16)..(17)..(18): Xaa is A or G
  MOD_RES (19)..(20)..(21)..(22): Xaa is A or G or is absent

SEQ ID NO: 33703 - protein, 30 aa, Artificial Sequence; identical to SEQ ID NO: 31547
  GFR-binding peptide

SEQ ID NO: 33704 - protein, 36 aa, Artificial Sequence; identical to SEQ ID NO: 31548
  GFR-binding peptide
  MOD_RES (2)..(4)..(35)..(36): Xaa is C or S

SEQ ID NO: 33705 - protein, 37 aa, Artificial Sequence; identical to SEQ ID NO: 31549
  GFR-binding peptide
  MOD_RES (1)..(34)..(35): Xaa is C or S

SEQ ID NO: 33706 - protein, 38 aa, Artificial Sequence; identical to SEQ ID NO: 31550
  GFR-binding peptide
  MOD_RES (2)..(4)..(36)..(37): Xaa is C or S

SEQ ID NO: 33707 - protein, 33 aa, Artificial Sequence; identical to SEQ ID NO: 31551
  GFR-binding peptide
  MOD_RES (1)..(33): Xaa is C or S

SEQ ID NO: 33708 - protein, 37 aa, Artificial Sequence; identical to SEQ ID NO: 31552
  GFR-binding peptide
  MOD_RES (33)..(33): Xaa is C or S
  MOD_RES (11)..(12)..(13)..(14)..(15): Xaa is A or G
  MOD_RES (16)..(17)..(18)..(19): Xaa is A or G or is absent

SEQ ID NO: 33709 - protein, 35 aa, Artificial Sequence; identical to SEQ ID NO: 31553
  GFR-binding peptide
  MOD_RES (1)..(33)..(34): Xaa is C or S

SEQ ID NO: 33710 - protein, 43 aa, Artificial Sequence; identical to SEQ ID NO: 31554
  GFR-binding peptide
  MOD_RES (1)..(3)..(38)..(39): Xaa is C or S
  MOD_RES (16)..(17)..(18)..(19)..(20): Xaa is A or G
  MOD_RES (21)..(22)..(23)..(24): Xaa is A or G or is absent

SEQ ID NO: 33711 - protein, 34 aa, Artificial Sequence; identical to SEQ ID NO: 31555
  GFR-binding peptide
  MOD_RES (34)..(34): Xaa is C or S
  MOD_RES (12)..(13)..(14)..(15)..(16): Xaa is A or G
  MOD_RES (17)..(18)..(19)..(20): Xaa is A or G or is absent

SEQ ID NO: 33712 - protein, 37 aa, Artificial Sequence; identical to SEQ ID NO: 31556
  GFR-binding peptide
  MOD_RES (32)..(33): Xaa is C or S

SEQ ID NO: 33713 - protein, 39 aa, Artificial Sequence; identical to SEQ ID NO: 31557
  GFR-binding peptide
  MOD_RES (1)..(3)..(38)..(39): Xaa is C or S
  MOD_RES (16)..(17)..(18)..(19)..(20): Xaa is A or G
  MOD_RES (21)..(22)..(23)..(24): Xaa is A or G or is absent

SEQ ID NO: 33714 - protein, 35 aa, Artificial Sequence; identical to SEQ ID NO: 31558
  GFR-binding peptide
  MOD_RES (2)..(35): Xaa is C or S

SEQ ID NO: 33715 - protein, 38 aa, Artificial Sequence; identical to SEQ ID NO: 31559
  GFR-binding peptide
  MOD_RES (2)..(36)..(37): Xaa is C or S
  MOD_RES (14)..(15)..(16)..(17)..(18): Xaa is A or G
  MOD_RES (19)..(20)..(21)..(22): Xaa is A or G or is absent

SEQ ID NO: 33716 - protein, 43 aa, Artificial Sequence; identical to SEQ ID NO: 31560
  GFR-binding peptide
  MOD_RES (2)..(4)..(37)..(38): Xaa is C or S

SEQ ID NO: 33717 - protein, 36 aa, Artificial Sequence; identical to SEQ ID NO: 31561
  GFR-binding peptide
  MOD_RES (1)..(34)..(35): Xaa is C or S

SEQ ID NO: 33718 - protein, 35 aa, Artificial Sequence; identical to SEQ ID NO: 31562
  GFR-binding peptide
  MOD_RES (2)..(4): Xaa is C or S

SEQ ID NO: 33719 - protein, 41 aa, Artificial Sequence; identical to SEQ ID NO: 31563
  GFR-binding peptide
  MOD_RES (35)..(36): Xaa is C or S
  MOD_RES (13)..(14)..(15)..(16)..(17): Xaa is A or G
  MOD_RES (18)..(19)..(20)..(21): Xaa is A or G or is absent

SEQ ID NO: 33720 - protein, 39 aa, Artificial Sequence; identical to SEQ ID NO: 31564
  GFR-binding peptide
  MOD_RES (2)..(4)..(38)..(39): Xaa is C or S
  MOD_RES (16)..(17)..(18)..(19)..(20): Xaa is A or G
  MOD_RES (21)..(22)..(23)..(24): Xaa is A or G or is absent

SEQ ID NO: 33721 - protein, 39 aa, Artificial Sequence; identical to SEQ ID NO: 31565
  GFR-binding peptide
  MOD_RES (1)..(3)..(37)..(38): Xaa is C or S
  MOD_RES (15)..(16)..(17)..(18)..(19): Xaa is A or G
  MOD_RES (20)..(21)..(22)..(23): Xaa is A or G or is absent

SEQ ID NO: 33722 - protein, 33 aa, Artificial Sequence; identical to SEQ ID NO: 31566
  GFR-binding peptide
  MOD_RES (31)..(32): Xaa is C or S

SEQ ID NO: 33723 - protein, 34 aa, Artificial Sequence; identical to SEQ ID NO: 31567
  GFR-binding peptide
  MOD_RES (2)..(34): Xaa is C or S

SEQ ID NO: 33724 - protein, 36 aa, Artificial Sequence; identical to SEQ ID NO: 31568
  GFR-binding peptide
  MOD_RES (1)..(33)..(34): Xaa is C or S

SEQ ID NO: 33725 - protein, 38 aa, Artificial Sequence; identical to SEQ ID NO: 31569
  GFR-binding peptide
  MOD_RES (34)..(35): Xaa is C or S
  MOD_RES (12)..(13)..(14)..(15)..(16): Xaa is A or G
  MOD_RES (17)..(18)..(19)..(20): Xaa is A or G or is absent

SEQ ID NO: 33726 - protein, 41 aa, Artificial Sequence; identical to SEQ ID NO: 31570
  GFR-binding peptide
  MOD_RES (1)..(3)..(36)..(37): Xaa is C or S

SEQ ID NO: 33727 - protein, 40 aa, Artificial Sequence; identical to SEQ ID NO: 31571
  GFR-binding peptide
  MOD_RES (2)..(4)..(36)..(37): Xaa is C or S

SEQ ID NO: 33728 - protein, 35 aa, Artificial Sequence; identical to SEQ ID NO: 31572
  GFR-binding peptide
  MOD_RES (2)..(34)..(35): Xaa is C or S

SEQ ID NO: 33729 - protein, 41 aa, Artificial Sequence; identical to SEQ ID NO: 31573
  GFR-binding peptide
  MOD_RES (2)..(36)..(37): Xaa is C or S
  MOD_RES (14)..(15)..(16)..(17)..(18): Xaa is A or G
  MOD_RES (19)..(20)..(21)..(22): Xaa is A or G or is absent

SEQ ID NO: 33730 - protein, 38 aa, Artificial Sequence; identical to SEQ ID NO: 31574
  GFR-binding peptide
  MOD_RES (1)..(3)..(35)..(36): Xaa is C or S

SEQ ID NO: 33731 - protein, 34 aa, Artificial Sequence; identical to SEQ ID NO: 31575
  GFR-binding peptide
  MOD_RES (33)..(34): Xaa is C or S
  MOD_RES (11)..(12)..(13)..(14)..(15): Xaa is A or G
  MOD_RES (16)..(17)..(18)..(19): Xaa is A or G or is absent

SEQ ID NO: 33732 - protein, 40 aa, Artificial Sequence; identical to SEQ ID NO: 31576
  GFR-binding peptide
  MOD_RES (34)..(35): Xaa is C or S
  MOD_RES (12)..(13)..(14)..(15)..(16): Xaa is A or G
  MOD_RES (17)..(18)..(19)..(20): Xaa is A or G or is absent

SEQ ID NO: 33733 - protein, 40 aa, Artificial Sequence; identical to SEQ ID NO: 31577
  GFR-binding peptide
  MOD_RES (1)..(3)..(37)..(38): Xaa is C or S
  MOD_RES (15)..(16)..(17)..(18)..(19): Xaa is A or G
  MOD_RES (20)..(21)..(22)..(23): Xaa is A or G or is absent

SEQ ID NO: 33734 - protein, 40 aa, Artificial Sequence; identical to SEQ ID NO: 31578
  GFR-binding peptide
  MOD_RES (2)..(35)..(36): Xaa is C or S

SEQ ID NO: 33735 - protein, 36 aa, Artificial Sequence; identical to SEQ ID NO: 31579
  GFR-binding peptide
  MOD_RES (33)..(34): Xaa is C or S

SEQ ID NO: 33736 - protein, 39 aa, Artificial Sequence; identical to SEQ ID NO: 31580
  GFR-binding peptide
  MOD_RES (2)..(4)..(38)..(39): Xaa is C or S
  MOD_RES (16)..(17)..(18)..(19)..(20): Xaa is A or G
  MOD_RES (21)..(22)..(23)..(24): Xaa is A or G or is absent

SEQ ID NO: 33737 - protein, 39 aa, Artificial Sequence; identical to SEQ ID NO: 31581
  GFR-binding peptide
  MOD_RES (1)..(3)..(35): Xaa is C or S

SEQ ID NO: 33738 - protein, 38 aa, Artificial Sequence; identical to SEQ ID NO: 31582
  GFR-binding peptide
  MOD_RES (34)..(35): Xaa is C or S
  MOD_RES (12)..(13)..(14)..(15)..(16): Xaa is A or G
  MOD_RES (17)..(18)..(19)..(20): Xaa is A or G or is absent

SEQ ID NO: 33739 - protein, 36 aa, Artificial Sequence; identical to SEQ ID NO: 31583
  GFR-binding peptide
  MOD_RES (34)..(35): Xaa is C or S
  MOD_RES (12)..(13)..(14)..(15)..(16): Xaa is A or G
  MOD_RES (17)..(18)..(19)..(20): Xaa is A or G or is absent

SEQ ID NO: 33740 - protein, 34 aa, Artificial Sequence; identical to SEQ ID NO: 31584
  GFR-binding peptide
  MOD_RES (33)..(34): Xaa is C or S
  MOD_RES (11)..(12)..(13)..(14)..(15): Xaa is A or G
  MOD_RES (16)..(17)..(18)..(19): Xaa is A or G or is absent

SEQ ID NO: 33741 - protein, 33 aa, Artificial Sequence; identical to SEQ ID NO: 31585
  GFR-binding peptide
  MOD_RES (31)..(32): Xaa is C or S

SEQ ID NO: 33742 - protein, 38 aa, Artificial Sequence; identical to SEQ ID NO: 31586
  GFR-binding peptide
  MOD_RES (1)..(3)..(38): Xaa is C or S
  MOD_RES (16)..(17)..(18)..(19)..(20): Xaa is A or G
  MOD_RES (21)..(22)..(23)..(24): Xaa is A or G or is absent

SEQ ID NO: 33743 - protein, 35 aa, Artificial Sequence; identical to SEQ ID NO: 31587
  GFR-binding peptide
  MOD_RES (2)..(2): Xaa is C or S
  MOD_RES (14)..(15)..(16)..(17)..(18): Xaa is A or G
  MOD_RES (19)..(20)..(21)..(22): Xaa is A or G or is absent

SEQ ID NO: 33744 - protein, 32 aa, Artificial Sequence; identical to SEQ ID NO: 31588
  GFR-binding peptide
  MOD_RES (32)..(32): Xaa is C or S

SEQ ID NO: 33745 - protein, 34 aa, Artificial Sequence; identical to SEQ ID NO: 31589
  GFR-binding peptide
  MOD_RES (2)..(34): Xaa is C or S

SEQ ID NO: 33746 - protein, 40 aa, Artificial Sequence; identical to SEQ ID NO: 31590
  GFR-binding peptide
  MOD_RES (2)..(4)..(37)..(38): Xaa is C or S
  MOD_RES (15)..(16)..(17)..(18)..(19): Xaa is A or G
  MOD_RES (20)..(21)..(22)..(23): Xaa is A or G or is absent

SEQ ID NO: 33747 - protein, 37 aa, Artificial Sequence; identical to SEQ ID NO: 31591
  GFR-binding peptide
  MOD_RES (2)..(36)..(37): Xaa is C or S
  MOD_RES (14)..(15)..(16)..(17)..(18): Xaa is A or G
  MOD_RES (19)..(20)..(21)..(22): Xaa is A or G or is absent

SEQ ID NO: 33748 - protein, 35 aa, Artificial Sequence; identical to SEQ ID NO: 31592
  GFR-binding peptide
  MOD_RES (34)..(35): Xaa is C or S
  MOD_RES (12)..(13)..(14)..(15)..(16): Xaa is A or G
  MOD_RES (17)..(18)..(19)..(20): Xaa is A or G or is absent

SEQ ID NO: 33749 - protein, 34 aa, Artificial Sequence; identical to SEQ ID NO: 31593
  GFR-binding peptide
  MOD_RES (1)..(33)..(34): Xaa is C or S

SEQ ID NO: 33750 - protein, 38 aa, Artificial Sequence; identical to SEQ ID NO: 31594
  GFR-binding peptide
  MOD_RES (32)..(33): Xaa is C or S

SEQ ID NO: 33751 - protein, 38 aa, Artificial Sequence; identical to SEQ ID NO: 31595
  GFR-binding peptide
  MOD_RES (1)..(3)..(37)..(38): Xaa is C or S
  MOD_RES (15)..(16)..(17)..(18)..(19): Xaa is A or G
  MOD_RES (20)..(21)..(22)..(23): Xaa is A or G or is absent

SEQ ID NO: 33752 - protein, 34 aa, Artificial Sequence; identical to SEQ ID NO: 31596
  GFR-binding peptide
  MOD_RES (33)..(34): Xaa is C or S
  MOD_RES (11)..(12)..(13)..(14)..(15): Xaa is A or G
  MOD_RES (16)..(17)..(18)..(19): Xaa is A or G or is absent

SEQ ID NO: 33753 - protein, 34 aa, Artificial Sequence; identical to SEQ ID NO: 31597
  GFR-binding peptide
  MOD_RES (33)..(34): Xaa is C or S
  MOD_RES (11)..(12)..(13)..(14)..(15): Xaa is A or G
  MOD_RES (16)..(17)..(18)..(19): Xaa is A or G or is absent

SEQ ID NO: 33754 - protein, 36 aa, Artificial Sequence; identical to SEQ ID NO: 31598
  GFR-binding peptide
  MOD_RES (2)..(2): Xaa is C or S
  MOD_RES (15)..(16)..(17)..(18)..(19): Xaa is A or G
  MOD_RES (20)..(21)..(22)..(23): Xaa is A or G or is absent

SEQ ID NO: 33755 - protein, 38 aa, Artificial Sequence; identical to SEQ ID NO: 31599
  GFR-binding peptide
  MOD_RES (2)..(34)..(35): Xaa is C or S

SEQ ID NO: 33756 - protein, 36 aa, Artificial Sequence; identical to SEQ ID NO: 31600
  GFR-binding peptide
  MOD_RES (2)..(36): Xaa is C or S
  MOD_RES (14)..(15)..(16)..(17)..(18): Xaa is A or G
  MOD_RES (19)..(20)..(21)..(22): Xaa is A or G or is absent

SEQ ID NO: 33757 - protein, 43 aa, Artificial Sequence; identical to SEQ ID NO: 31601
  GFR-binding peptide
  MOD_RES (1)..(3)..(37): Xaa is C or S
  MOD_RES (15)..(16)..(17)..(18)..(19): Xaa is A or G
  MOD_RES (20)..(21)..(22)..(23): Xaa is A or G or is absent

SEQ ID NO: 33758 - protein, 36 aa, Artificial Sequence; identical to SEQ ID NO: 31602
  GFR-binding peptide
  MOD_RES (35)..(36): Xaa is C or S
  MOD_RES (13)..(14)..(15)..(16)..(17): Xaa is A or G
  MOD_RES (18)..(19)..(20)..(21): Xaa is A or G or is absent

SEQ ID NO: 33759 - protein, 32 aa, Artificial Sequence; identical to SEQ ID NO: 31603
  GFR-binding peptide
  MOD_RES (1)..(1): Xaa is C or S

SEQ ID NO: 33760 - protein, 40 aa, Artificial Sequence; identical to SEQ ID NO: 31604
  GFR-binding peptide
  MOD_RES (2)..(4)..(38)..(39): Xaa is C or S
  MOD_RES (16)..(17)..(18)..(19)..(20): Xaa is A or G
  MOD_RES (21)..(22)..(23)..(24): Xaa is A or G or is absent

SEQ ID NO: 33761 - protein, 39 aa, Artificial Sequence; identical to SEQ ID NO: 31605
  GFR-binding peptide
  MOD_RES (33)..(34): Xaa is C or S
  MOD_RES (11)..(12)..(13)..(14)..(15): Xaa is A or G
  MOD_RES (16)..(17)..(18)..(19): Xaa is A or G or is absent

SEQ ID NO: 33762 - protein, 39 aa, Artificial Sequence; identical to SEQ ID NO: 31606
  GFR-binding peptide
  MOD_RES (1)..(35)..(36): Xaa is C or S
  MOD_RES (13)..(14)..(15)..(16)..(17): Xaa is A or G
  MOD_RES (18)..(19)..(20)..(21): Xaa is A or G or is absent

SEQ ID NO: 33763 - protein, 38 aa, Artificial Sequence; identical to SEQ ID NO: 31607
  GFR-binding peptide
  MOD_RES (34)..(35): Xaa is C or S
  MOD_RES (12)..(13)..(14)..(15)..(16): Xaa is A or G
  MOD_RES (17)..(18)..(19)..(20): Xaa is A or G or is absent

SEQ ID NO: 33764 - protein, 38 aa, Artificial Sequence; identical to SEQ ID NO: 31608
  GFR-binding peptide
  MOD_RES (2)..(4)..(35)..(36): Xaa is C or S

SEQ ID NO: 33765 - protein, 36 aa, Artificial Sequence; identical to SEQ ID NO: 31609
  GFR-binding peptide
  MOD_RES (33)..(34): Xaa is C or S
  MOD_RES (11)..(12)..(13)..(14)..(15): Xaa is A or G
  MOD_RES (16)..(17)..(18)..(19): Xaa is A or G or is absent

SEQ ID NO: 33766 - protein, 34 aa, Artificial Sequence; identical to SEQ ID NO: 31610
  GFR-binding peptide
  MOD_RES (1)..(3): Xaa is C or S

SEQ ID NO: 33767 - protein, 39 aa, Artificial Sequence; identical to SEQ ID NO: 31611
  GFR-binding peptide
  MOD_RES (1)..(35)..(36): Xaa is C or S
  MOD_RES (13)..(14)..(15)..(16)..(17): Xaa is A or G
  MOD_RES (18)..(19)..(20)..(21): Xaa is A or G or is absent

SEQ ID NO: 33768 - protein, 40 aa, Artificial Sequence; identical to SEQ ID NO: 31612
  GFR-binding peptide
  MOD_RES (1)..(3)..(35)..(36): Xaa is C or S

SEQ ID NO: 33769 - protein, 34 aa, Artificial Sequence; identical to SEQ ID NO: 31613
  GFR-binding peptide
  MOD_RES (1)..(33)..(34): Xaa is C or S

SEQ ID NO: 33770 - protein, 33 aa, Artificial Sequence; identical to SEQ ID NO: 31614
  GFR-binding peptide
  MOD_RES (12)..(13)..(14)..(15)..(16): Xaa is A or G
  MOD_RES (17)..(18)..(19)..(20): Xaa is A or G or is absent

SEQ ID NO: 33771 - protein, 40 aa, Artificial Sequence; identical to SEQ ID NO: 31615
  GFR-binding peptide
  MOD_RES (2)..(4)..(38)..(39): Xaa is C or S
  MOD_RES (16)..(17)..(18)..(19)..(20): Xaa is A or G
  MOD_RES (21)..(22)..(23)..(24): Xaa is A or G or is absent

SEQ ID NO: 33772 - protein, 36 aa, Artificial Sequence; identical to SEQ ID NO: 31616
  GFR-binding peptide
  MOD_RES (1)..(3): Xaa is C or S
  MOD_RES (15)..(16)..(17)..(18)..(19): Xaa is A or G
  MOD_RES (20)..(21)..(22)..(23): Xaa is A or G or is absent

SEQ ID NO: 33773 - protein, 33 aa, Artificial Sequence; identical to SEQ ID NO: 31617
  GFR-binding peptide
  MOD_RES (2)..(2): Xaa is C or S

SEQ ID NO: 33774 - protein, 39 aa, Artificial Sequence; identical to SEQ ID NO: 31618
  GFR-binding peptide
  MOD_RES (1)..(35)..(36): Xaa is C or S
  MOD_RES (13)..(14)..(15)..(16)..(17): Xaa is A or G
  MOD_RES (18)..(19)..(20)..(21): Xaa is A or G or is absent

SEQ ID NO: 33775 - protein, 37 aa, Artificial Sequence; identical to SEQ ID NO: 31619
  GFR-binding peptide
  MOD_RES (2)..(4)..(36)..(37): Xaa is C or S

SEQ ID NO: 33776 - protein, 39 aa, Artificial Sequence; identical to SEQ ID NO: 31620
  GFR-binding peptide
  MOD_RES (34)..(35): Xaa is C or S
  MOD_RES (12)..(13)..(14)..(15)..(16): Xaa is A or G
  MOD_RES (17)..(18)..(19)..(20): Xaa is A or G or is absent

SEQ ID NO: 33777 - protein, 37 aa, Artificial Sequence; identical to SEQ ID NO: 31621
  GFR-binding peptide
  MOD_RES (2)..(4)..(36)..(37): Xaa is C or S

SEQ ID NO: 33778 - protein, 37 aa, Artificial Sequence; identical to SEQ ID NO: 31622
  GFR-binding peptide
  MOD_RES (2)..(34)..(35): Xaa is C or S

SEQ ID NO: 33779 - protein, 36 aa, Artificial Sequence; identical to SEQ ID NO: 31623
  GFR-binding peptide
  MOD_RES (34)..(35): Xaa is C or S
  MOD_RES (12)..(13)..(14)..(15)..(16): Xaa is A or G
  MOD_RES (17)..(18)..(19)..(20): Xaa is A or G or is absent

SEQ ID NO: 33780 - protein, 38 aa, Artificial Sequence; identical to SEQ ID NO: 31624
  GFR-binding peptide
  MOD_RES (1)..(3)..(35)..(36): Xaa is C or S

SEQ ID NO: 33781 - protein, 36 aa, Artificial Sequence; identical to SEQ ID NO: 31625
  GFR-binding peptide
  MOD_RES (32)..(33): Xaa is C or S

SEQ ID NO: 33782 - protein, 38 aa, Artificial Sequence; identical to SEQ ID NO: 31626
  GFR-binding peptide
  MOD_RES (1)..(36)..(37): Xaa is C or S
  MOD_RES (14)..(15)..(16)..(17)..(18): Xaa is A or G
  MOD_RES (19)..(20)..(21)..(22): Xaa is A or G or is absent

SEQ ID NO: 33783 - protein, 35 aa, Artificial Sequence; identical to SEQ ID NO: 31627
  GFR-binding peptide
  MOD_RES (2)..(34)..(35): Xaa is C or S

SEQ ID NO: 33784 - protein, 41 aa, Artificial Sequence; identical to SEQ ID NO: 31628
  GFR-binding peptide
  MOD_RES (2)..(4)..(38)..(39): Xaa is C or S
  MOD_RES (16)..(17)..(18)..(19)..(20): Xaa is A or G
  MOD_RES (21)..(22)..(23)..(24): Xaa is A or G or is absent

SEQ ID NO: 33785 - protein, 42 aa, Artificial Sequence; identical to SEQ ID NO: 31629
  GFR-binding peptide
  MOD_RES (2)..(4)..(38): Xaa is C or S
  MOD_RES (16)..(17)..(18)..(19)..(20): Xaa is A or G
  MOD_RES (21)..(22)..(23)..(24): Xaa is A or G or is absent

SEQ ID NO: 33786 - protein, 38 aa, Artificial Sequence; identical to SEQ ID NO: 31630
  GFR-binding peptide
  MOD_RES (1)..(3)..(35)..(36): Xaa is C or S

SEQ ID NO: 33787 - protein, 38 aa, Artificial Sequence; identical to SEQ ID NO: 31631
  GFR-binding peptide
  MOD_RES (32)..(32): Xaa is C or S

SEQ ID NO: 33788 - protein, 37 aa, Artificial Sequence; identical to SEQ ID NO: 31632
  GFR-binding peptide
  MOD_RES (1)..(3)..(37): Xaa is C or S
  MOD_RES (15)..(16)..(17)..(18)..(19): Xaa is A or G
  MOD_RES (20)..(21)..(22)..(23): Xaa is A or G or is absent

SEQ ID NO: 33789 - protein, 34 aa, Artificial Sequence; identical to SEQ ID NO: 31633
  GFR-binding peptide
  MOD_RES (1)..(3): Xaa is C or S

SEQ ID NO: 33790 - protein, 40 aa, Artificial Sequence; identical to SEQ ID NO: 31634
  GFR-binding peptide
  MOD_RES (1)..(3)..(35)..(36): Xaa is C or S

SEQ ID NO: 33791 - protein, 42 aa, Artificial Sequence; identical to SEQ ID NO: 31635
  GFR-binding peptide
  MOD_RES (2)..(36)..(37): Xaa is C or S
  MOD_RES (14)..(15)..(16)..(17)..(18): Xaa is A or G
  MOD_RES (19)..(20)..(21)..(22): Xaa is A or G or is absent

SEQ ID NO: 33792 - protein, 40 aa, Artificial Sequence; identical to SEQ ID NO: 31636
  GFR-binding peptide
  MOD_RES (34)..(35): Xaa is C or S
  MOD_RES (12)..(13)..(14)..(15)..(16): Xaa is A or G
  MOD_RES (17)..(18)..(19)..(20): Xaa is A or G or is absent

SEQ ID NO: 33793 - protein, 33 aa, Artificial Sequence; identical to SEQ ID NO: 31637
  GFR-binding peptide
  MOD_RES (1)..(3): Xaa is C or S

SEQ ID NO: 33794 - protein, 35 aa, Artificial Sequence; identical to SEQ ID NO: 31638
  GFR-binding peptide
  MOD_RES (1)..(35): Xaa is C or S
  MOD_RES (13)..(14)..(15)..(16)..(17): Xaa is A or G
  MOD_RES (18)..(19)..(20)..(21): Xaa is A or G or is absent

SEQ ID NO: 33795 - protein, 37 aa, Artificial Sequence; identical to SEQ ID NO: 31639
  GFR-binding peptide
  MOD_RES (31)..(32): Xaa is C or S

SEQ ID NO: 33796 - protein, 37 aa, Artificial Sequence; identical to SEQ ID NO: 31640
  GFR-binding peptide
  MOD_RES (32)..(33): Xaa is C or S

SEQ ID NO: 33797 - protein, 43 aa, Artificial Sequence; identical to SEQ ID NO: 31641
  GFR-binding peptide
  MOD_RES (2)..(4)..(38)..(39): Xaa is C or S
  MOD_RES (16)..(17)..(18)..(19)..(20): Xaa is A or G
  MOD_RES (21)..(22)..(23)..(24): Xaa is A or G or is absent

SEQ ID NO: 33798 - protein, 37 aa, Artificial Sequence; identical to SEQ ID NO: 31642
  GFR-binding peptide
  MOD_RES (1)..(3)..(37): Xaa is C or S
  MOD_RES (15)..(16)..(17)..(18)..(19): Xaa is A or G
  MOD_RES (20)..(21)..(22)..(23): Xaa is A or G or is absent

SEQ ID NO: 33799 - protein, 36 aa, Artificial Sequence; identical to SEQ ID NO: 31643
  GFR-binding peptide
  MOD_RES (1)..(3)..(35)..(36): Xaa is C or S

SEQ ID NO: 33800 - protein, 39 aa, Artificial Sequence; identical to SEQ ID NO: 31644
  GFR-binding peptide
  MOD_RES (2)..(4)..(39): Xaa is C or S
  MOD_RES (17)..(18)..(19)..(20)..(21): Xaa is A or G
  MOD_RES (22)..(23)..(24)..(25): Xaa is A or G or is absent

SEQ ID NO: 33801 - protein, 33 aa, Artificial Sequence; identical to SEQ ID NO: 31645
  GFR-binding peptide
  MOD_RES (33)..(33): Xaa is C or S
  MOD_RES (11)..(12)..(13)..(14)..(15): Xaa is A or G
  MOD_RES (16)..(17)..(18)..(19): Xaa is A or G or is absent

SEQ ID NO: 33802 - protein, 40 aa, Artificial Sequence; identical to SEQ ID NO: 31646
  GFR-binding peptide
  MOD_RES (1)..(3)..(36)..(37): Xaa is C or S

SEQ ID NO: 33803 - protein, 34 aa, Artificial Sequence; identical to SEQ ID NO: 31647
  GFR-binding peptide
  MOD_RES (1)..(3): Xaa is C or S

SEQ ID NO: 33804 - protein, 37 aa, Artificial Sequence; identical to SEQ ID NO: 31648
  GFR-binding peptide
  MOD_RES (31)..(32): Xaa is C or S

SEQ ID NO: 33805 - protein, 35 aa, Artificial Sequence; identical to SEQ ID NO: 31649
  GFR-binding peptide
  MOD_RES (2)..(2): Xaa is C or S
  MOD_RES (14)..(15)..(16)..(17)..(18): Xaa is A or G
  MOD_RES (19)..(20)..(21)..(22): Xaa is A or G or is absent

SEQ ID NO: 33806 - protein, 36 aa, Artificial Sequence; identical to SEQ ID NO: 31650
  GFR-binding peptide
  MOD_RES (1)..(33)..(34): Xaa is C or S

SEQ ID NO: 33807 - protein, 37 aa, Artificial Sequence; identical to SEQ ID NO: 31651
  GFR-binding peptide
  MOD_RES (1)..(3)..(37): Xaa is C or S
  MOD_RES (15)..(16)..(17)..(18)..(19): Xaa is A or G
  MOD_RES (20)..(21)..(22)..(23): Xaa is A or G or is absent

SEQ ID NO: 33808 - protein, 39 aa, Artificial Sequence; identical to SEQ ID NO: 31652
  GFR-binding peptide
  MOD_RES (2)..(36)..(37): Xaa is C or S
  MOD_RES (14)..(15)..(16)..(17)..(18): Xaa is A or G
  MOD_RES (19)..(20)..(21)..(22): Xaa is A or G or is absent

SEQ ID NO: 33809 - protein, 38 aa, Artificial Sequence; identical to SEQ ID NO: 31653
  GFR-binding peptide
  MOD_RES (2)..(4)..(38): Xaa is C or S
  MOD_RES (16)..(17)..(18)..(19)..(20): Xaa is A or G
  MOD_RES (21)..(22)..(23)..(24): Xaa is A or G or is absent

SEQ ID NO: 33810 - protein, 40 aa, Artificial Sequence; identical to SEQ ID NO: 31654
  GFR-binding peptide
  MOD_RES (2)..(36)..(37): Xaa is C or S
  MOD_RES (14)..(15)..(16)..(17)..(18): Xaa is A or G
  MOD_RES (19)..(20)..(21)..(22): Xaa is A or G or is absent

SEQ ID NO: 33811 - protein, 36 aa, Artificial Sequence; identical to SEQ ID NO: 31655
  GFR-binding peptide
  MOD_RES (1)..(3)..(35): Xaa is C or S

SEQ ID NO: 33812 - protein, 34 aa, Artificial Sequence; identical to SEQ ID NO: 31656
  GFR-binding peptide
  MOD_RES (34)..(34): Xaa is C or S
  MOD_RES (12)..(13)..(14)..(15)..(16): Xaa is A or G
  MOD_RES (17)..(18)..(19)..(20): Xaa is A or G or is absent

SEQ ID NO: 33813 - protein, 36 aa, Artificial Sequence; identical to SEQ ID NO: 31657
  GFR-binding peptide
  MOD_RES (2)..(4)..(36): Xaa is C or S

SEQ ID NO: 33814 - protein, 41 aa, Artificial Sequence; identical to SEQ ID NO: 31658
  GFR-binding peptide
  MOD_RES (1)..(3)..(37)..(38): Xaa is C or S
  MOD_RES (15)..(16)..(17)..(18)..(19): Xaa is A or G
  MOD_RES (20)..(21)..(22)..(23): Xaa is A or G or is absent

SEQ ID NO: 33815 - protein, 37 aa, Artificial Sequence; identical to SEQ ID NO: 31659
  GFR-binding peptide
  MOD_RES (1)..(35)..(36): Xaa is C or S
  MOD_RES (13)..(14)..(15)..(16)..(17): Xaa is A or G
  MOD_RES (18)..(19)..(20)..(21): Xaa is A or G or is absent

SEQ ID NO: 33816 - protein, 37 aa, Artificial Sequence; identical to SEQ ID NO: 31660
  GFR-binding peptide
  MOD_RES (1)..(3)..(35): Xaa is C or S

SEQ ID NO: 33817 - protein, 39 aa, Artificial Sequence; identical to SEQ ID NO: 31661
  GFR-binding peptide
  MOD_RES (34)..(35): Xaa is C or S
  MOD_RES (12)..(13)..(14)..(15)..(16): Xaa is A or G
  MOD_RES (17)..(18)..(19)..(20): Xaa is A or G or is absent

SEQ ID NO: 33818 - protein, 37 aa, Artificial Sequence; identical to SEQ ID NO: 31662
  GFR-binding peptide
  MOD_RES (1)..(33)..(34): Xaa is C or S

SEQ ID NO: 33819 - protein, 37 aa, Artificial Sequence; identical to SEQ ID NO: 31663
  GFR-binding peptide
  MOD_RES (1)..(3)..(37): Xaa is C or S
  MOD_RES (15)..(16)..(17)..(18)..(19): Xaa is A or G
  MOD_RES (20)..(21)..(22)..(23): Xaa is A or G or is absent

SEQ ID NO: 33820 - protein, 39 aa, Artificial Sequence; identical to SEQ ID NO: 31664
  GFR-binding peptide
  MOD_RES (1)..(34)..(35): Xaa is C or S

SEQ ID NO: 33821 - protein, 37 aa, Artificial Sequence; identical to SEQ ID NO: 31665
  GFR-binding peptide
  MOD_RES (33)..(34): Xaa is C or S
  MOD_RES (11)..(12)..(13)..(14)..(15): Xaa is A or G
  MOD_RES (16)..(17)..(18)..(19): Xaa is A or G or is absent

SEQ ID NO: 33822 - protein, 32 aa, Artificial Sequence; identical to SEQ ID NO: 31666
  GFR-binding peptide
  MOD_RES (1)..(1): Xaa is C or S

SEQ ID NO: 33823 - protein, 35 aa, Artificial Sequence; identical to SEQ ID NO: 31667
  GFR-binding peptide
  MOD_RES (1)..(35): Xaa is C or S
  MOD_RES (13)..(14)..(15)..(16)..(17): Xaa is A or G
  MOD_RES (18)..(19)..(20)..(21): Xaa is A or G or is absent

SEQ ID NO: 33824 - protein, 34 aa, Artificial Sequence; identical to SEQ ID NO: 31668
  GFR-binding peptide
  MOD_RES (1)..(1): Xaa is C or S
  MOD_RES (13)..(14)..(15)..(16)..(17): Xaa is A or G
  MOD_RES (18)..(19)..(20)..(21): Xaa is A or G or is absent

SEQ ID NO: 33825 - protein, 38 aa, Artificial Sequence; identical to SEQ ID NO: 31669
  GFR-binding peptide
  MOD_RES (2)..(4)..(36)..(37): Xaa is C or S

SEQ ID NO: 33826 - protein, 42 aa, Artificial Sequence; identical to SEQ ID NO: 31670
  GFR-binding peptide
  MOD_RES (2)..(4)..(36)..(37): Xaa is C or S

SEQ ID NO: 33827 - protein, 38 aa, Artificial Sequence; identical to SEQ ID NO: 31671
  GFR-binding peptide
  MOD_RES (33)..(34): Xaa is C or S
  MOD_RES (11)..(12)..(13)..(14)..(15): Xaa is A or G
  MOD_RES (16)..(17)..(18)..(19): Xaa is A or G or is absent

SEQ ID NO: 33828 - protein, 32 aa, Artificial Sequence; identical to SEQ ID NO: 31672
  GFR-binding peptide
  MOD_RES (11)..(12)..(13)..(14)..(15): Xaa is A or G
  MOD_RES (16)..(17)..(18)..(19): Xaa is A or G or is absent

SEQ ID NO: 33829 - protein, 36 aa, Artificial Sequence; identical to SEQ ID NO: 31673
  GFR-binding peptide
  MOD_RES (33)..(34): Xaa is C or S
  MOD_RES (11)..(12)..(13)..(14)..(15): Xaa is A or G
  MOD_RES (16)..(17)..(18)..(19): Xaa is A or G or is absent

SEQ ID NO: 33830 - protein, 44 aa, Artificial Sequence; identical to SEQ ID NO: 31674
  GFR-binding peptide
  MOD_RES (2)..(4)..(38)..(39): Xaa is C or S
  MOD_RES (16)..(17)..(18)..(19)..(20): Xaa is A or G
  MOD_RES (21)..(22)..(23)..(24): Xaa is A or G or is absent

SEQ ID NO: 33831 - protein, 37 aa, Artificial Sequence; identical to SEQ ID NO: 31675
  GFR-binding peptide
  MOD_RES (1)..(3)..(35)..(36): Xaa is C or S

SEQ ID NO: 33832 - protein, 32 aa, Artificial Sequence; identical to SEQ ID NO: 31676
  GFR-binding peptide
  MOD_RES (32)..(32): Xaa is C or S

SEQ ID NO: 33833 - protein, 40 aa, Artificial Sequence; identical to SEQ ID NO: 31677
  GFR-binding peptide
  MOD_RES (2)..(4)..(38)..(39): Xaa is C or S
  MOD_RES (16)..(17)..(18)..(19)..(20): Xaa is A or G
  MOD_RES (21)..(22)..(23)..(24): Xaa is A or G or is absent

SEQ ID NO: 33834 - protein, 38 aa, Artificial Sequence; identical to SEQ ID NO: 31678
  GFR-binding peptide
  MOD_RES (33)..(34): Xaa is C or S

SEQ ID NO: 33835 - protein, 43 aa, Artificial Sequence; identical to SEQ ID NO: 31679
  GFR-binding peptide
  MOD_RES (1)..(3)..(37)..(38): Xaa is C or S
  MOD_RES (15)..(16)..(17)..(18)..(19): Xaa is A or G
  MOD_RES (20)..(21)..(22)..(23): Xaa is A or G or is absent

SEQ ID NO: 33836 - protein, 32 aa, Artificial Sequence; identical to SEQ ID NO: 31680
  GFR-binding peptide
  MOD_RES (31)..(31): Xaa is C or S

SEQ ID NO: 33837 - protein, 37 aa, Artificial Sequence; identical to SEQ ID NO: 31681
  GFR-binding peptide
  MOD_RES (33)..(34): Xaa is C or S
  MOD_RES (11)..(12)..(13)..(14)..(15): Xaa is A or G
  MOD_RES (16)..(17)..(18)..(19): Xaa is A or G or is absent

SEQ ID NO: 33838 - protein, 37 aa, Artificial Sequence; identical to SEQ ID NO: 31682
  GFR-binding peptide
  MOD_RES (2)..(4)..(36)..(37): Xaa is C or S

SEQ ID NO: 33839 - protein, 37 aa, Artificial Sequence; identical to SEQ ID NO: 31683
  GFR-binding peptide
  MOD_RES (1)..(3)..(35)..(36): Xaa is C or S

SEQ ID NO: 33840 - protein, 37 aa, Artificial Sequence; identical to SEQ ID NO: 31684
  GFR-binding peptide
  MOD_RES (1)..(3)..(35)..(36): Xaa is C or S

SEQ ID NO: 33841 - protein, 41 aa, Artificial Sequence; identical to SEQ ID NO: 31685
  GFR-binding peptide
  MOD_RES (2)..(4)..(36)..(37): Xaa is C or S

SEQ ID NO: 33842 - protein, 39 aa, Artificial Sequence; identical to SEQ ID NO: 31686
  GFR-binding peptide
  MOD_RES (2)..(4)..(38)..(39): Xaa is C or S
  MOD_RES (16)..(17)..(18)..(19)..(20): Xaa is A or G
  MOD_RES (21)..(22)..(23)..(24): Xaa is A or G or is absent

SEQ ID NO: 33843 - protein, 35 aa, Artificial Sequence; identical to SEQ ID NO: 31687
  GFR-binding peptide
  MOD_RES (2)..(34): Xaa is C or S

SEQ ID NO: 33844 - protein, 34 aa, Artificial Sequence; identical to SEQ ID NO: 31688
  GFR-binding peptide
  MOD_RES (2)..(34): Xaa is C or S

SEQ ID NO: 33845 - protein, 35 aa, Artificial Sequence; identical to SEQ ID NO: 31689
  GFR-binding peptide
  MOD_RES (31)..(32): Xaa is C or S

SEQ ID NO: 33846 - protein, 34 aa, Artificial Sequence; identical to SEQ ID NO: 31690
  GFR-binding peptide
  MOD_RES (1)..(33)..(34): Xaa is C or S

SEQ ID NO: 33847 - protein, 40 aa, Artificial Sequence; identical to SEQ ID NO: 31691
  GFR-binding peptide
  MOD_RES (2)..(34)..(35): Xaa is C or S

SEQ ID NO: 33848 - protein, 36 aa, Artificial Sequence; identical to SEQ ID NO: 31692
  GFR-binding peptide
  MOD_RES (34)..(34): Xaa is C or S
  MOD_RES (12)..(13)..(14)..(15)..(16): Xaa is A or G
  MOD_RES (17)..(18)..(19)..(20): Xaa is A or G or is absent

SEQ ID NO: 33849 - protein, 39 aa, Artificial Sequence; identical to SEQ ID NO: 31693
  GFR-binding peptide
  MOD_RES (2)..(34)..(35): Xaa is C or S

SEQ ID NO: 33850 - protein, 37 aa, Artificial Sequence; identical to SEQ ID NO: 31694
  GFR-binding peptide
  MOD_RES (2)..(4): Xaa is C or S
  MOD_RES (16)..(17)..(18)..(19)..(20): Xaa is A or G
  MOD_RES (21)..(22)..(23)..(24): Xaa is A or G or is absent

SEQ ID NO: 33851 - protein, 38 aa, Artificial Sequence; identical to SEQ ID NO: 31695
  GFR-binding peptide
  MOD_RES (2)..(34)..(35): Xaa is C or S

SEQ ID NO: 33852 - protein, 32 aa, Artificial Sequence; identical to SEQ ID NO: 31696
  GFR-binding peptide
  MOD_RES (1)..(1): Xaa is C or S

SEQ ID NO: 33853 - protein, 39 aa, Artificial Sequence; identical to SEQ ID NO: 31697
  GFR-binding peptide
  MOD_RES (2)..(37)..(38): Xaa is C or S
  MOD_RES (15)..(16)..(17)..(18)..(19): Xaa is A or G
  MOD_RES (20)..(21)..(22)..(23): Xaa is A or G or is absent

SEQ ID NO: 33854 - protein, 37 aa, Artificial Sequence; identical to SEQ ID NO: 31698
  GFR-binding peptide
  MOD_RES (2)..(34)..(35): Xaa is C or S

SEQ ID NO: 33855 - protein, 35 aa, Artificial Sequence; identical to SEQ ID NO: 31699
  GFR-binding peptide
  MOD_RES (31)..(32): Xaa is C or S

SEQ ID NO: 33856 - protein, 34 aa, Artificial Sequence; identical to SEQ ID NO: 31700
  GFR-binding peptide
  MOD_RES (2)..(2): Xaa is C or S
  MOD_RES (13)..(14)..(15)..(16)..(17): Xaa is A or G
  MOD_RES (18)..(19)..(20)..(21): Xaa is A or G or is absent

SEQ ID NO: 33857 - protein, 34 aa, Artificial Sequence; identical to SEQ ID NO: 31701
  GFR-binding peptide
  MOD_RES (31)..(32): Xaa is C or S

SEQ ID NO: 33858 - protein, 39 aa, Artificial Sequence; identical to SEQ ID NO: 31702
  GFR-binding peptide
  MOD_RES (1)..(35)..(36): Xaa is C or S
  MOD_RES (13)..(14)..(15)..(16)..(17): Xaa is A or G
  MOD_RES (18)..(19)..(20)..(21): Xaa is A or G or is absent

SEQ ID NO: 33859 - protein, 41 aa, Artificial Sequence; identical to SEQ ID NO: 31703
  GFR-binding peptide
  MOD_RES (1)..(3)..(35)..(36): Xaa is C or S

SEQ ID NO: 33860 - protein, 37 aa, Artificial Sequence; identical to SEQ ID NO: 31704
  GFR-binding peptide
  MOD_RES (2)..(36): Xaa is C or S
  MOD_RES (14)..(15)..(16)..(17)..(18): Xaa is A or G
  MOD_RES (19)..(20)..(21)..(22): Xaa is A or G or is absent

SEQ ID NO: 33861 - protein, 35 aa, Artificial Sequence; identical to SEQ ID NO: 31705
  GFR-binding peptide
  MOD_RES (31)..(32): Xaa is C or S

SEQ ID NO: 33862 - protein, 36 aa, Artificial Sequence; identical to SEQ ID NO: 31706
  GFR-binding peptide
  MOD_RES (33)..(34): Xaa is C or S
  MOD_RES (11)..(12)..(13)..(14)..(15): Xaa is A or G
  MOD_RES (16)..(17)..(18)..(19): Xaa is A or G or is absent

SEQ ID NO: 33863 - protein, 39 aa, Artificial Sequence; identical to SEQ ID NO: 31707
  GFR-binding peptide
  MOD_RES (1)..(3)..(37)..(38): Xaa is C or S
  MOD_RES (15)..(16)..(17)..(18)..(19): Xaa is A or G
  MOD_RES (20)..(21)..(22)..(23): Xaa is A or G or is absent

SEQ ID NO: 33864 - protein, 38 aa, Artificial Sequence; identical to SEQ ID NO: 31708
  GFR-binding peptide
  MOD_RES (2)..(34)..(35): Xaa is C or S

SEQ ID NO: 33865 - protein, 39 aa, Artificial Sequence; identical to SEQ ID NO: 31709
  GFR-binding peptide
  MOD_RES (1)..(3)..(35)..(36): Xaa is C or S

SEQ ID NO: 33866 - protein, 35 aa, Artificial Sequence; identical to SEQ ID NO: 31710
  GFR-binding peptide
  MOD_RES (2)..(2): Xaa is C or S
  MOD_RES (14)..(15)..(16)..(17)..(18): Xaa is A or G
  MOD_RES (19)..(20)..(21)..(22): Xaa is A or G or is absent

SEQ ID NO: 33867 - protein, 40 aa, Artificial Sequence; identical to SEQ ID NO: 31711
  GFR-binding peptide
  MOD_RES (1)..(35)..(36): Xaa is C or S
  MOD_RES (13)..(14)..(15)..(16)..(17): Xaa is A or G
  MOD_RES (18)..(19)..(20)..(21): Xaa is A or G or is absent

SEQ ID NO: 33868 - protein, 37 aa, Artificial Sequence; identical to SEQ ID NO: 31712
  GFR-binding peptide
  MOD_RES (1)..(35): Xaa is C or S
  MOD_RES (13)..(14)..(15)..(16)..(17): Xaa is A or G
  MOD_RES (18)..(19)..(20)..(21): Xaa is A or G or is absent

SEQ ID NO: 33869 - protein, 35 aa, Artificial Sequence; identical to SEQ ID NO: 31713
  GFR-binding peptide
  MOD_RES (2)..(2): Xaa is C or S
  MOD_RES (14)..(15)..(16)..(17)..(18): Xaa is A or G
  MOD_RES (19)..(20)..(21)..(22): Xaa is A or G or is absent

SEQ ID NO: 33870 - protein, 38 aa, Artificial Sequence; identical to SEQ ID NO: 31714
  GFR-binding peptide
  MOD_RES (33)..(34): Xaa is C or S
  MOD_RES (11)..(12)..(13)..(14)..(15): Xaa is A or G
  MOD_RES (16)..(17)..(18)..(19): Xaa is A or G or is absent

SEQ ID NO: 33871 - protein, 32 aa, Artificial Sequence; identical to SEQ ID NO: 31715
  GFR-binding peptide
  MOD_RES (32)..(32): Xaa is C or S

SEQ ID NO: 33872 - protein, 38 aa, Artificial Sequence; identical to SEQ ID NO: 31716
  GFR-binding peptide
  MOD_RES (32)..(33): Xaa is C or S

SEQ ID NO: 33873 - protein, 34 aa, Artificial Sequence; identical to SEQ ID NO: 31717
  GFR-binding peptide
  MOD_RES (2)..(2): Xaa is C or S

SEQ ID NO: 33874 - protein, 40 aa, Artificial Sequence; identical to SEQ ID NO: 31718
  GFR-binding peptide
  MOD_RES (1)..(3)..(35): Xaa is C or S

SEQ ID NO: 33875 - protein, 37 aa, Artificial Sequence; identical to SEQ ID NO: 31719
  GFR-binding peptide
  MOD_RES (32)..(33): Xaa is C or S

SEQ ID NO: 33876 - protein, 37 aa, Artificial Sequence; identical to SEQ ID NO: 31720
  GFR-binding peptide
  MOD_RES (31)..(32): Xaa is C or S

SEQ ID NO: 33877 - protein, 35 aa, Artificial Sequence; identical to SEQ ID NO: 31721
  GFR-binding peptide
  MOD_RES (32)..(33): Xaa is C or S

SEQ ID NO: 33878 - protein, 40 aa, Artificial Sequence; identical to SEQ ID NO: 31722
  GFR-binding peptide
  MOD_RES (2)..(4)..(38)..(39): Xaa is C or S
  MOD_RES (16)..(17)..(18)..(19)..(20): Xaa is A or G
  MOD_RES (21)..(22)..(23)..(24): Xaa is A or G or is absent

SEQ ID NO: 33879 - protein, 36 aa, Artificial Sequence; identical to SEQ ID NO: 31723
  GFR-binding peptide
  MOD_RES (31)..(32): Xaa is C or S

SEQ ID NO: 33880 - protein, 39 aa, Artificial Sequence; identical to SEQ ID NO: 31724
  GFR-binding peptide
  MOD_RES (2)..(4)..(36)..(37): Xaa is C or S

SEQ ID NO: 33881 - protein, 37 aa, Artificial Sequence; identical to SEQ ID NO: 31725
  GFR-binding peptide
  MOD_RES (1)..(33)..(34): Xaa is C or S

SEQ ID NO: 33882 - protein, 39 aa, Artificial Sequence; identical to SEQ ID NO: 31726
  GFR-binding peptide
  MOD_RES (2)..(36)..(37): Xaa is C or S
  MOD_RES (14)..(15)..(16)..(17)..(18): Xaa is A or G
  MOD_RES (19)..(20)..(21)..(22): Xaa is A or G or is absent

SEQ ID NO: 33883 - protein, 32 aa, Artificial Sequence; identical to SEQ ID NO: 31727
  GFR-binding peptide
  MOD_RES (11)..(12)..(13)..(14)..(15): Xaa is A or G
  MOD_RES (16)..(17)..(18)..(19): Xaa is A or G or is absent

SEQ ID NO: 33884 - protein, 40 aa, Artificial Sequence; identical to SEQ ID NO: 31728
  GFR-binding peptide
  MOD_RES (2)..(4)..(38)..(39): Xaa is C or S
  MOD_RES (16)..(17)..(18)..(19)..(20): Xaa is A or G
  MOD_RES (21)..(22)..(23)..(24): Xaa is A or G or is absent

SEQ ID NO: 33885 - protein, 40 aa, Artificial Sequence; identical to SEQ ID NO: 31729
  GFR-binding peptide
  MOD_RES (2)..(36)..(37): Xaa is C or S
  MOD_RES (14)..(15)..(16)..(17)..(18): Xaa is A or G
  MOD_RES (19)..(20)..(21)..(22): Xaa is A or G or is absent

SEQ ID NO: 33886 - protein, 42 aa, Artificial Sequence; identical to SEQ ID NO: 31730
  GFR-binding peptide
  MOD_RES (2)..(4)..(38)..(39): Xaa is C or S
  MOD_RES (16)..(17)..(18)..(19)..(20): Xaa is A or G
  MOD_RES (21)..(22)..(23)..(24): Xaa is A or G or is absent

SEQ ID NO: 33887 - protein, 42 aa, Artificial Sequence; identical to SEQ ID NO: 31731
  GFR-binding peptide
  MOD_RES (2)..(4)..(36): Xaa is C or S

SEQ ID NO: 33888 - protein, 38 aa, Artificial Sequence; identical to SEQ ID NO: 31732
  GFR-binding peptide
  MOD_RES (2)..(4)..(38): Xaa is C or S
  MOD_RES (16)..(17)..(18)..(19)..(20): Xaa is A or G
  MOD_RES (21)..(22)..(23)..(24): Xaa is A or G or is absent

SEQ ID NO: 33889 - protein, 33 aa, Artificial Sequence; identical to SEQ ID NO: 31733
  GFR-binding peptide
  MOD_RES (1)..(32)..(33): Xaa is C or S

SEQ ID NO: 33890 - protein, 36 aa, Artificial Sequence; identical to SEQ ID NO: 31734
  GFR-binding peptide
  MOD_RES (1)..(35)..(36): Xaa is C or S
  MOD_RES (13)..(14)..(15)..(16)..(17): Xaa is A or G
  MOD_RES (18)..(19)..(20)..(21): Xaa is A or G or is absent

SEQ ID NO: 33891 - protein, 42 aa, Artificial Sequence; identical to SEQ ID NO: 31735
  GFR-binding peptide
  MOD_RES (2)..(4)..(38)..(39): Xaa is C or S
  MOD_RES (16)..(17)..(18)..(19)..(20): Xaa is A or G
  MOD_RES (21)..(22)..(23)..(24): Xaa is A or G or is absent

SEQ ID NO: 33892 - protein, 39 aa, Artificial Sequence; identical to SEQ ID NO: 31736
  GFR-binding peptide
  MOD_RES (1)..(35): Xaa is C or S
  MOD_RES (13)..(14)..(15)..(16)..(17): Xaa is A or G
  MOD_RES (18)..(19)..(20)..(21): Xaa is A or G or is absent

SEQ ID NO: 33893 - protein, 35 aa, Artificial Sequence; identical to SEQ ID NO: 31737
  GFR-binding peptide
  MOD_RES (2)..(4): Xaa is C or S

SEQ ID NO: 33894 - protein, 41 aa, Artificial Sequence; identical to SEQ ID NO: 31738
  GFR-binding peptide
  MOD_RES (2)..(4)..(37)..(38): Xaa is C or S

SEQ ID NO: 33895 - protein, 32 aa, Artificial Sequence; identical to SEQ ID NO: 31739
  GFR-binding peptide
  MOD_RES (1)..(1): Xaa is C or S

SEQ ID NO: 33896 - protein, 41 aa, Artificial Sequence; identical to SEQ ID NO: 31740
  GFR-binding peptide
  MOD_RES (2)..(4)..(36)..(37): Xaa is C or S

SEQ ID NO: 33897 - protein, 39 aa, Artificial Sequence; identical to SEQ ID NO: 31741
  GFR-binding peptide
  MOD_RES (2)..(4)..(35)..(36): Xaa is C or S

SEQ ID NO: 33898 - protein, 34 aa, Artificial Sequence; identical to SEQ ID NO: 31742
  GFR-binding peptide
  MOD_RES (1)..(1): Xaa is C or S
  MOD_RES (13)..(14)..(15)..(16)..(17): Xaa is A or G
  MOD_RES (18)..(19)..(20)..(21): Xaa is A or G or is absent

SEQ ID NO: 33899 - protein, 38 aa, Artificial Sequence; identical to SEQ ID NO: 31743
  GFR-binding peptide
  MOD_RES (1)..(33)..(34): Xaa is C or S

SEQ ID NO: 33900 - protein, 38 aa, Artificial Sequence; identical to SEQ ID NO: 31744
  GFR-binding peptide
  MOD_RES (2)..(36)..(37): Xaa is C or S
  MOD_RES (14)..(15)..(16)..(17)..(18): Xaa is A or G
  MOD_RES (19)..(20)..(21)..(22): Xaa is A or G or is absent

SEQ ID NO: 33901 - protein, 39 aa, Artificial Sequence; identical to SEQ ID NO: 31745
  GFR-binding peptide
  MOD_RES (1)..(3)..(37)..(38): Xaa is C or S
  MOD_RES (15)..(16)..(17)..(18)..(19): Xaa is A or G
  MOD_RES (20)..(21)..(22)..(23): Xaa is A or G or is absent

SEQ ID NO: 33902 - protein, 35 aa, Artificial Sequence; identical to SEQ ID NO: 31746
  GFR-binding peptide
  MOD_RES (31)..(32): Xaa is C or S

SEQ ID NO: 33903 - protein, 42 aa, Artificial Sequence; identical to SEQ ID NO: 31747
  GFR-binding peptide
  MOD_RES (2)..(4)..(38)..(39): Xaa is C or S
  MOD_RES (16)..(17)..(18)..(19)..(20): Xaa is A or G
  MOD_RES (21)..(22)..(23)..(24): Xaa is A or G or is absent

SEQ ID NO: 33904 - protein, 42 aa, Artificial Sequence; identical to SEQ ID NO: 31748
  GFR-binding peptide
  MOD_RES (2)..(4)..(39)..(40): Xaa is C or S
  MOD_RES (17)..(18)..(19)..(20)..(21): Xaa is A or G
  MOD_RES (22)..(23)..(24)..(25): Xaa is A or G or is absent

SEQ ID NO: 33905 - protein, 36 aa, Artificial Sequence; identical to SEQ ID NO: 31749
  GFR-binding peptide
  MOD_RES (34)..(35): Xaa is C or S
  MOD_RES (12)..(13)..(14)..(15)..(16): Xaa is A or G
  MOD_RES (17)..(18)..(19)..(20): Xaa is A or G or is absent

SEQ ID NO: 33906 - protein, 37 aa, Artificial Sequence; identical to SEQ ID NO: 31750
  GFR-binding peptide
  MOD_RES (34)..(35): Xaa is C or S
  MOD_RES (12)..(13)..(14)..(15)..(16): Xaa is A or G
  MOD_RES (17)..(18)..(19)..(20): Xaa is A or G or is absent

SEQ ID NO: 33907 - protein, 35 aa, Artificial Sequence; identical to SEQ ID NO: 31751
  GFR-binding peptide
  MOD_RES (1)..(33)..(34): Xaa is C or S

SEQ ID NO: 33908 - protein, 38 aa, Artificial Sequence; identical to SEQ ID NO: 31752
  GFR-binding peptide
  MOD_RES (2)..(36)..(37): Xaa is C or S
  MOD_RES (14)..(15)..(16)..(17)..(18): Xaa is A or G
  MOD_RES (19)..(20)..(21)..(22): Xaa is A or G or is absent

SEQ ID NO: 33909 - protein, 38 aa, Artificial Sequence; identical to SEQ ID NO: 31753
  GFR-binding peptide
  MOD_RES (32)..(33): Xaa is C or S

SEQ ID NO: 33910 - protein, 34 aa, Artificial Sequence; identical to SEQ ID NO: 31754
  GFR-binding peptide
  MOD_RES (1)..(1): Xaa is C or S
  MOD_RES (13)..(14)..(15)..(16)..(17): Xaa is A or G
  MOD_RES (18)..(19)..(20)..(21): Xaa is A or G or is absent

SEQ ID NO: 33911 - protein, 35 aa, Artificial Sequence; identical to SEQ ID NO: 31755
  GFR-binding peptide
  MOD_RES (1)..(33)..(34): Xaa is C or S

SEQ ID NO: 33912 - protein, 43 aa, Artificial Sequence; identical to SEQ ID NO: 31756
  GFR-binding peptide
  MOD_RES (1)..(3)..(37)..(38): Xaa is C or S
  MOD_RES (15)..(16)..(17)..(18)..(19): Xaa is A or G
  MOD_RES (20)..(21)..(22)..(23): Xaa is A or G or is absent

SEQ ID NO: 33913 - protein, 41 aa, Artificial Sequence; identical to SEQ ID NO: 31757
  GFR-binding peptide
  MOD_RES (1)..(3)..(37)..(38): Xaa is C or S
  MOD_RES (15)..(16)..(17)..(18)..(19): Xaa is A or G
  MOD_RES (20)..(21)..(22)..(23): Xaa is A or G or is absent

SEQ ID NO: 33914 - protein, 35 aa, Artificial Sequence; identical to SEQ ID NO: 31758
  GFR-binding peptide
  MOD_RES (2)..(35): Xaa is C or S
  MOD_RES (13)..(14)..(15)..(16)..(17): Xaa is A or G
  MOD_RES (18)..(19)..(20)..(21): Xaa is A or G or is absent

SEQ ID NO: 33915 - protein, 37 aa, Artificial Sequence; identical to SEQ ID NO: 31759
  GFR-binding peptide
  MOD_RES (1)..(33)..(34): Xaa is C or S

SEQ ID NO: 33916 - protein, 39 aa, Artificial Sequence; identical to SEQ ID NO: 31760
  GFR-binding peptide
  MOD_RES (1)..(3)..(37)..(38): Xaa is C or S
  MOD_RES (15)..(16)..(17)..(18)..(19): Xaa is A or G
  MOD_RES (20)..(21)..(22)..(23): Xaa is A or G or is absent

SEQ ID NO: 33917 - protein, 41 aa, Artificial Sequence; identical to SEQ ID NO: 31761
  GFR-binding peptide
  MOD_RES (1)..(3)..(37)..(38): Xaa is C or S
  MOD_RES (15)..(16)..(17)..(18)..(19): Xaa is A or G
  MOD_RES (20)..(21)..(22)..(23): Xaa is A or G or is absent

SEQ ID NO: 33918 - protein, 34 aa, Artificial Sequence; identical to SEQ ID NO: 31762
  GFR-binding peptide
  MOD_RES (33)..(34): Xaa is C or S

SEQ ID NO: 33919 - protein, 35 aa, Artificial Sequence; identical to SEQ ID NO: 31763
  GFR-binding peptide
  MOD_RES (1)..(35): Xaa is C or S
  MOD_RES (13)..(14)..(15)..(16)..(17): Xaa is A or G
  MOD_RES (18)..(19)..(20)..(21): Xaa is A or G or is absent

SEQ ID NO: 33920 - protein, 35 aa, Artificial Sequence; identical to SEQ ID NO: 31764
  GFR-binding peptide
  MOD_RES (1)..(33)..(34): Xaa is C or S

SEQ ID NO: 33921 - protein, 39 aa, Artificial Sequence; identical to SEQ ID NO: 31765
  GFR-binding peptide
  MOD_RES (2)..(4)..(38): Xaa is C or S
  MOD_RES (16)..(17)..(18)..(19)..(20): Xaa is A or G
  MOD_RES (21)..(22)..(23)..(24): Xaa is A or G or is absent

SEQ ID NO: 33922 - protein, 40 aa, Artificial Sequence; identical to SEQ ID NO: 31766
  GFR-binding peptide
  MOD_RES (2)..(4)..(36)..(37): Xaa is C or S

SEQ ID NO: 33923 - protein, 36 aa, Artificial Sequence; identical to SEQ ID NO: 31767
  GFR-binding peptide
  MOD_RES (1)..(3)..(35)..(36): Xaa is C or S

SEQ ID NO: 33924 - protein, 40 aa, Artificial Sequence; identical to SEQ ID NO: 31768
  GFR-binding peptide
  MOD_RES (2)..(4)..(36)..(37): Xaa is C or S

SEQ ID NO: 33925 - protein, 37 aa, Artificial Sequence; identical to SEQ ID NO: 31769
  GFR-binding peptide
  MOD_RES (1)..(33): Xaa is C or S

SEQ ID NO: 33926 - protein, 41 aa, Artificial Sequence; identical to SEQ ID NO: 31770
  GFR-binding peptide
  MOD_RES (2)..(4)..(36)..(37): Xaa is C or S

SEQ ID NO: 33927 - protein, 42 aa, Artificial Sequence; identical to SEQ ID NO: 31771
  GFR-binding peptide
  MOD_RES (1)..(3)..(37)..(38): Xaa is C or S
  MOD_RES (15)..(16)..(17)..(18)..(19): Xaa is A or G
  MOD_RES (20)..(21)..(22)..(23): Xaa is A or G or is absent

SEQ ID NO: 33928 - protein, 35 aa, Artificial Sequence; identical to SEQ ID NO: 31772
  GFR-binding peptide
  MOD_RES (1)..(35): Xaa is C or S
  MOD_RES (13)..(14)..(15)..(16)..(17): Xaa is A or G
  MOD_RES (18)..(19)..(20)..(21): Xaa is A or G or is absent

SEQ ID NO: 33929 - protein, 36 aa, Artificial Sequence; identical to SEQ ID NO: 31773
  GFR-binding peptide
  MOD_RES (2)..(34)..(35): Xaa is C or S

SEQ ID NO: 33930 - protein, 37 aa, Artificial Sequence; identical to SEQ ID NO: 31774
  GFR-binding peptide
  MOD_RES (2)..(4): Xaa is C or S
  MOD_RES (16)..(17)..(18)..(19)..(20): Xaa is A or G
  MOD_RES (21)..(22)..(23)..(24): Xaa is A or G or is absent

SEQ ID NO: 33931 - protein, 32 aa, Artificial Sequence; identical to SEQ ID NO: 31775
  GFR-binding peptide

SEQ ID NO: 33932 - protein, 38 aa, Artificial Sequence; identical to SEQ ID NO: 31776
  GFR-binding peptide
  MOD_RES (1)..(3)..(36)..(37): Xaa is C or S
  MOD_RES (14)..(15)..(16)..(17)..(18): Xaa is A or G
  MOD_RES (19)..(20)..(21)..(22): Xaa is A or G or is absent

SEQ ID NO: 33933 - protein, 38 aa, Artificial Sequence; identical to SEQ ID NO: 31777
  GFR-binding peptide
  MOD_RES (1)..(35)..(36): Xaa is C or S
  MOD_RES (13)..(14)..(15)..(16)..(17): Xaa is A or G
  MOD_RES (18)..(19)..(20)..(21): Xaa is A or G or is absent

SEQ ID NO: 33934 - protein, 40 aa, Artificial Sequence; identical to SEQ ID NO: 31778
  GFR-binding peptide
  MOD_RES (1)..(3)..(36)..(37): Xaa is C or S
  MOD_RES (14)..(15)..(16)..(17)..(18): Xaa is A or G
  MOD_RES (19)..(20)..(21)..(22): Xaa is A or G or is absent

SEQ ID NO: 33935 - protein, 35 aa, Artificial Sequence; identical to SEQ ID NO: 31779
  GFR-binding peptide
  MOD_RES (2)..(34)..(35): Xaa is C or S

SEQ ID NO: 33936 - protein, 36 aa, Artificial Sequence; identical to SEQ ID NO: 31780
  GFR-binding peptide
  MOD_RES (31)..(32): Xaa is C or S

SEQ ID NO: 33937 - protein, 40 aa, Artificial Sequence; identical to SEQ ID NO: 31781
  GFR-binding peptide
  MOD_RES (2)..(34): Xaa is C or S

SEQ ID NO: 33938 - protein, 39 aa, Artificial Sequence; identical to SEQ ID NO: 31782
  GFR-binding peptide
  MOD_RES (2)..(4)..(36)..(37): Xaa is C or S

SEQ ID NO: 33939 - protein, 35 aa, Artificial Sequence; identical to SEQ ID NO: 31783
  GFR-binding peptide
  MOD_RES (1)..(3): Xaa is C or S

SEQ ID NO: 33940 - protein, 36 aa, Artificial Sequence; identical to SEQ ID NO: 31784
  GFR-binding peptide
  MOD_RES (31)..(32): Xaa is C or S

SEQ ID NO: 33941 - protein, 37 aa, Artificial Sequence; identical to SEQ ID NO: 31785
  GFR-binding peptide
  MOD_RES (1)..(3)..(34)..(35): Xaa is C or S

SEQ ID NO: 33942 - protein, 41 aa, Artificial Sequence; identical to SEQ ID NO: 31786
  GFR-binding peptide
  MOD_RES (1)..(3)..(35)..(36): Xaa is C or S

SEQ ID NO: 33943 - protein, 36 aa, Artificial Sequence; identical to SEQ ID NO: 31787
  GFR-binding peptide
  MOD_RES (34)..(35): Xaa is C or S
  MOD_RES (12)..(13)..(14)..(15)..(16): Xaa is A or G
  MOD_RES (17)..(18)..(19)..(20): Xaa is A or G or is absent

SEQ ID NO: 33944 - protein, 36 aa, Artificial Sequence; identical to SEQ ID NO: 31788
  GFR-binding peptide
  MOD_RES (33)..(34): Xaa is C or S
  MOD_RES (11)..(12)..(13)..(14)..(15): Xaa is A or G
  MOD_RES (16)..(17)..(18)..(19): Xaa is A or G or is absent

SEQ ID NO: 33945 - protein, 36 aa, Artificial Sequence; identical to SEQ ID NO: 31789
  GFR-binding peptide
  MOD_RES (2)..(36): Xaa is C or S
  MOD_RES (14)..(15)..(16)..(17)..(18): Xaa is A or G
  MOD_RES (19)..(20)..(21)..(22): Xaa is A or G or is absent

SEQ ID NO: 33946 - protein, 32 aa, Artificial Sequence; identical to SEQ ID NO: 31790
  GFR-binding peptide
  MOD_RES (11)..(12)..(13)..(14)..(15): Xaa is A or G
  MOD_RES (16)..(17)..(18)..(19): Xaa is A or G or is absent

SEQ ID NO: 33947 - protein, 40 aa, Artificial Sequence; identical to SEQ ID NO: 31791
  GFR-binding peptide
  MOD_RES (1)..(35)..(36): Xaa is C or S
  MOD_RES (13)..(14)..(15)..(16)..(17): Xaa is A or G
  MOD_RES (18)..(19)..(20)..(21): Xaa is A or G or is absent

SEQ ID NO: 33948 - protein, 39 aa, Artificial Sequence; identical to SEQ ID NO: 31792
  GFR-binding peptide
  MOD_RES (2)..(34)..(35): Xaa is C or S

SEQ ID NO: 33949 - protein, 35 aa, Artificial Sequence; identical to SEQ ID NO: 31793
  GFR-binding peptide
  MOD_RES (1)..(3): Xaa is C or S
  MOD_RES (14)..(15)..(16)..(17)..(18): Xaa is A or G
  MOD_RES (19)..(20)..(21)..(22): Xaa is A or G or is absent

SEQ ID NO: 33950 - protein, 36 aa, Artificial Sequence; identical to SEQ ID NO: 31794
  GFR-binding peptide
  MOD_RES (31)..(32): Xaa is C or S

SEQ ID NO: 33951 - protein, 37 aa, Artificial Sequence; identical to SEQ ID NO: 31795
  GFR-binding peptide
  MOD_RES (1)..(3)..(35)..(36): Xaa is C or S

SEQ ID NO: 33952 - protein, 40 aa, Artificial Sequence; identical to SEQ ID NO: 31796
  GFR-binding peptide
  MOD_RES (1)..(3)..(37)..(38): Xaa is C or S
  MOD_RES (15)..(16)..(17)..(18)..(19): Xaa is A or G
  MOD_RES (20)..(21)..(22)..(23): Xaa is A or G or is absent

SEQ ID NO: 33953 - protein, 37 aa, Artificial Sequence; identical to SEQ ID NO: 31797
  GFR-binding peptide
  MOD_RES (2)..(4)..(37): Xaa is C or S
  MOD_RES (15)..(16)..(17)..(18)..(19): Xaa is A or G
  MOD_RES (20)..(21)..(22)..(23): Xaa is A or G or is absent

SEQ ID NO: 33954 - protein, 41 aa, Artificial Sequence; identical to SEQ ID NO: 31798
  GFR-binding peptide
  MOD_RES (2)..(4)..(36): Xaa is C or S

SEQ ID NO: 33955 - protein, 37 aa, Artificial Sequence; identical to SEQ ID NO: 31799
  GFR-binding peptide
  MOD_RES (2)..(4): Xaa is C or S
  MOD_RES (16)..(17)..(18)..(19)..(20): Xaa is A or G
  MOD_RES (21)..(22)..(23)..(24): Xaa is A or G or is absent

SEQ ID NO: 33956 - protein, 35 aa, Artificial Sequence; identical to SEQ ID NO: 31800
  GFR-binding peptide
  MOD_RES (34)..(35): Xaa is C or S
  MOD_RES (12)..(13)..(14)..(15)..(16): Xaa is A or G
  MOD_RES (17)..(18)..(19)..(20): Xaa is A or G or is absent

SEQ ID NO: 33957 - protein, 45 aa, Artificial Sequence; identical to SEQ ID NO: 31801
  GFR-binding peptide
  MOD_RES (2)..(4)..(39)..(40): Xaa is C or S
  MOD_RES (17)..(18)..(19)..(20)..(21): Xaa is A or G
  MOD_RES (22)..(23)..(24)..(25): Xaa is A or G or is absent

SEQ ID NO: 33958 - protein, 33 aa, Artificial Sequence; identical to SEQ ID NO: 31802
  GFR-binding peptide
  MOD_RES (32)..(33): Xaa is C or S

SEQ ID NO: 33959 - protein, 36 aa, Artificial Sequence; identical to SEQ ID NO: 31803
  GFR-binding peptide
  MOD_RES (2)..(4)..(36): Xaa is C or S

SEQ ID NO: 33960 - protein, 39 aa, Artificial Sequence; identical to SEQ ID NO: 31804
  GFR-binding peptide
  MOD_RES (33)..(34): Xaa is C or S
  MOD_RES (11)..(12)..(13)..(14)..(15): Xaa is A or G
  MOD_RES (16)..(17)..(18)..(19): Xaa is A or G or is absent

SEQ ID NO: 33961 - protein, 32 aa, Artificial Sequence; identical to SEQ ID NO: 31805
  GFR-binding peptide
  MOD_RES (1)..(1): Xaa is C or S

SEQ ID NO: 33962 - protein, 35 aa, Artificial Sequence; identical to SEQ ID NO: 31806
  GFR-binding peptide
  MOD_RES (33)..(34): Xaa is C or S
  MOD_RES (11)..(12)..(13)..(14)..(15): Xaa is A or G
  MOD_RES (16)..(17)..(18)..(19): Xaa is A or G or is absent

SEQ ID NO: 33963 - protein, 39 aa, Artificial Sequence; identical to SEQ ID NO: 31807
  GFR-binding peptide
  MOD_RES (1)..(35)..(36): Xaa is C or S
  MOD_RES (13)..(14)..(15)..(16)..(17): Xaa is A or G
  MOD_RES (18)..(19)..(20)..(21): Xaa is A or G or is absent

SEQ ID NO: 33964 - protein, 38 aa, Artificial Sequence; identical to SEQ ID NO: 31808
  GFR-binding peptide
  MOD_RES (33)..(34): Xaa is C or S
  MOD_RES (11)..(12)..(13)..(14)..(15): Xaa is A or G
  MOD_RES (16)..(17)..(18)..(19): Xaa is A or G or is absent

SEQ ID NO: 33965 - protein, 32 aa, Artificial Sequence; identical to SEQ ID NO: 31809
  GFR-binding peptide
  MOD_RES (11)..(12)..(13)..(14)..(15): Xaa is A or G
  MOD_RES (16)..(17)..(18)..(19): Xaa is A or G or is absent

SEQ ID NO: 33966 - protein, 36 aa, Artificial Sequence; identical to SEQ ID NO: 31810
  GFR-binding peptide
  MOD_RES (2)..(4)..(36): Xaa is C or S

SEQ ID NO: 33967 - protein, 31 aa, Artificial Sequence; identical to SEQ ID NO: 31811
  GFR-binding peptide
  MOD_RES (31)..(31): Xaa is C or S

SEQ ID NO: 33968 - protein, 41 aa, Artificial Sequence; identical to SEQ ID NO: 31812
  GFR-binding peptide
  MOD_RES (2)..(36)..(37): Xaa is C or S
  MOD_RES (14)..(15)..(16)..(17)..(18): Xaa is A or G
  MOD_RES (19)..(20)..(21)..(22): Xaa is A or G or is absent

SEQ ID NO: 33969 - protein, 34 aa, Artificial Sequence; identical to SEQ ID NO: 31813
  GFR-binding peptide
  MOD_RES (32)..(33): Xaa is C or S

SEQ ID NO: 33970 - protein, 34 aa, Artificial Sequence; identical to SEQ ID NO: 31814
  GFR-binding peptide
  MOD_RES (1)..(3): Xaa is C or S

SEQ ID NO: 33971 - protein, 34 aa, Artificial Sequence; identical to SEQ ID NO: 31815
  GFR-binding peptide
  MOD_RES (32)..(33): Xaa is C or S

SEQ ID NO: 33972 - protein, 32 aa, Artificial Sequence; identical to SEQ ID NO: 31816
  GFR-binding peptide
  MOD_RES (32)..(32): Xaa is C or S

SEQ ID NO: 33973 - protein, 41 aa, Artificial Sequence; identical to SEQ ID NO: 31817
  GFR-binding peptide
  MOD_RES (2)..(4)..(38)..(39): Xaa is C or S
  MOD_RES (16)..(17)..(18)..(19)..(20): Xaa is A or G
  MOD_RES (21)..(22)..(23)..(24): Xaa is A or G or is absent

SEQ ID NO: 33974 - protein, 40 aa, Artificial Sequence; identical to SEQ ID NO: 31818
  GFR-binding peptide
  MOD_RES (2)..(34)..(35): Xaa is C or S

SEQ ID NO: 33975 - protein, 40 aa, Artificial Sequence; identical to SEQ ID NO: 31819
  GFR-binding peptide
  MOD_RES (2)..(4)..(38): Xaa is C or S
  MOD_RES (16)..(17)..(18)..(19)..(20): Xaa is A or G
  MOD_RES (21)..(22)..(23)..(24): Xaa is A or G or is absent

SEQ ID NO: 33976 - protein, 33 aa, Artificial Sequence; identical to SEQ ID NO: 31820
  GFR-binding peptide
  MOD_RES (12)..(13)..(14)..(15)..(16): Xaa is A or G
  MOD_RES (17)..(18)..(19)..(20): Xaa is A or G or is absent

SEQ ID NO: 33977 - protein, 40 aa, Artificial Sequence; identical to SEQ ID NO: 31821
  GFR-binding peptide
  MOD_RES (2)..(34)..(35): Xaa is C or S

SEQ ID NO: 33978 - protein, 33 aa, Artificial Sequence; identical to SEQ ID NO: 31822
  GFR-binding peptide
  MOD_RES (12)..(13)..(14)..(15)..(16): Xaa is A or G
  MOD_RES (17)..(18)..(19)..(20): Xaa is A or G or is absent

SEQ ID NO: 33979 - protein, 38 aa, Artificial Sequence; identical to SEQ ID NO: 31823
  GFR-binding peptide
  MOD_RES (32)..(33): Xaa is C or S

SEQ ID NO: 33980 - protein, 36 aa, Artificial Sequence; identical to SEQ ID NO: 31824
  GFR-binding peptide
  MOD_RES (34)..(35): Xaa is C or S
  MOD_RES (12)..(13)..(14)..(15)..(16): Xaa is A or G
  MOD_RES (17)..(18)..(19)..(20): Xaa is A or G or is absent

SEQ ID NO: 33981 - protein, 36 aa, Artificial Sequence; identical to SEQ ID NO: 31825
  GFR-binding peptide
  MOD_RES (1)..(3): Xaa is C or S
  MOD_RES (15)..(16)..(17)..(18)..(19): Xaa is A or G
  MOD_RES (20)..(21)..(22)..(23): Xaa is A or G or is absent

SEQ ID NO: 33982 - protein, 37 aa, Artificial Sequence; identical to SEQ ID NO: 31826
  GFR-binding peptide
  MOD_RES (2)..(4): Xaa is C or S
  MOD_RES (16)..(17)..(18)..(19)..(20): Xaa is A or G
  MOD_RES (21)..(22)..(23)..(24): Xaa is A or G or is absent

SEQ ID NO: 33983 - protein, 42 aa, Artificial Sequence; identical to SEQ ID NO: 31827
  GFR-binding peptide
  MOD_RES (2)..(36)..(37): Xaa is C or S
  MOD_RES (14)..(15)..(16)..(17)..(18): Xaa is A or G
  MOD_RES (19)..(20)..(21)..(22): Xaa is A or G or is absent

SEQ ID NO: 33984 - protein, 38 aa, Artificial Sequence; identical to SEQ ID NO: 31828
  GFR-binding peptide
  MOD_RES (1)..(35)..(36): Xaa is C or S
  MOD_RES (13)..(14)..(15)..(16)..(17): Xaa is A or G
  MOD_RES (18)..(19)..(20)..(21): Xaa is A or G or is absent

SEQ ID NO: 33985 - protein, 38 aa, Artificial Sequence; identical to SEQ ID NO: 31829
  GFR-binding peptide
  MOD_RES (2)..(36)..(37): Xaa is C or S
  MOD_RES (14)..(15)..(16)..(17)..(18): Xaa is A or G
  MOD_RES (19)..(20)..(21)..(22): Xaa is A or G or is absent

SEQ ID NO: 33986 - protein, 34 aa, Artificial Sequence; identical to SEQ ID NO: 31830
  GFR-binding peptide
  MOD_RES (1)..(33): Xaa is C or S

SEQ ID NO: 33987 - protein, 38 aa, Artificial Sequence; identical to SEQ ID NO: 31831
  GFR-binding peptide
  MOD_RES (1)..(35)..(36): Xaa is C or S
  MOD_RES (13)..(14)..(15)..(16)..(17): Xaa is A or G
  MOD_RES (18)..(19)..(20)..(21): Xaa is A or G or is absent

SEQ ID NO: 33988 - protein, 33 aa, Artificial Sequence; identical to SEQ ID NO: 31832
  GFR-binding peptide
  MOD_RES (12)..(13)..(14)..(15)..(16): Xaa is A or G
  MOD_RES (17)..(18)..(19)..(20): Xaa is A or G or is absent

SEQ ID NO: 33989 - protein, 43 aa, Artificial Sequence; identical to SEQ ID NO: 31833
  GFR-binding peptide
  MOD_RES (2)..(4)..(39)..(40): Xaa is C or S
  MOD_RES (17)..(18)..(19)..(20)..(21): Xaa is A or G
  MOD_RES (22)..(23)..(24)..(25): Xaa is A or G or is absent

SEQ ID NO: 33990 - protein, 40 aa, Artificial Sequence; identical to SEQ ID NO: 31834
  GFR-binding peptide
  MOD_RES (1)..(3)..(35)..(36): Xaa is C or S

SEQ ID NO: 33991 - protein, 36 aa, Artificial Sequence; identical to SEQ ID NO: 31835
  GFR-binding peptide
  MOD_RES (1)..(3)..(35)..(36): Xaa is C or S

SEQ ID NO: 33992 - protein, 36 aa, Artificial Sequence; identical to SEQ ID NO: 31836
  GFR-binding peptide
  MOD_RES (1)..(3): Xaa is C or S
  MOD_RES (15)..(16)..(17)..(18)..(19): Xaa is A or G
  MOD_RES (20)..(21)..(22)..(23): Xaa is A or G or is absent

SEQ ID NO: 33993 - protein, 30 aa, Artificial Sequence; identical to SEQ ID NO: 31837
  GFR-binding peptide

SEQ ID NO: 33994 - protein, 35 aa, Artificial Sequence; identical to SEQ ID NO: 31838
  GFR-binding peptide
  MOD_RES (2)..(34)..(35): Xaa is C or S

SEQ ID NO: 33995 - protein, 38 aa, Artificial Sequence; identical to SEQ ID NO: 31839
  GFR-binding peptide
  MOD_RES (35)..(36): Xaa is C or S
  MOD_RES (13)..(14)..(15)..(16)..(17): Xaa is A or G
  MOD_RES (18)..(19)..(20)..(21): Xaa is A or G or is absent

SEQ ID NO: 33996 - protein, 34 aa, Artificial Sequence; identical to SEQ ID NO: 31840
  GFR-binding peptide
  MOD_RES (1)..(3): Xaa is C or S

SEQ ID NO: 33997 - protein, 33 aa, Artificial Sequence; identical to SEQ ID NO: 31841
  GFR-binding peptide
  MOD_RES (2)..(2): Xaa is C or S

SEQ ID NO: 33998 - protein, 34 aa, Artificial Sequence; identical to SEQ ID NO: 31842
  GFR-binding peptide
  MOD_RES (31)..(32): Xaa is C or S

SEQ ID NO: 33999 - protein, 40 aa, Artificial Sequence; identical to SEQ ID NO: 31843
  GFR-binding peptide
  MOD_RES (1)..(35)..(36): Xaa is C or S
  MOD_RES (13)..(14)..(15)..(16)..(17): Xaa is A or G
  MOD_RES (18)..(19)..(20)..(21): Xaa is A or G or is absent

SEQ ID NO: 34000 - protein, 33 aa, Artificial Sequence; identical to SEQ ID NO: 31844
  GFR-binding peptide
  MOD_RES (12)..(13)..(14)..(15)..(16): Xaa is A or G
  MOD_RES (17)..(18)..(19)..(20): Xaa is A or G or is absent

SEQ ID NO: 34001 - protein, 37 aa, Artificial Sequence; identical to SEQ ID NO: 31845
  GFR-binding peptide
  MOD_RES (2)..(4)..(36)..(37): Xaa is C or S

SEQ ID NO: 34002 - protein, 41 aa, Artificial Sequence; identical to SEQ ID NO: 31846
  GFR-binding peptide
  MOD_RES (1)..(3)..(35)..(36): Xaa is C or S

SEQ ID NO: 34003 - protein, 41 aa, Artificial Sequence; identical to SEQ ID NO: 31847
  GFR-binding peptide
  MOD_RES (1)..(3)..(35)..(36): Xaa is C or S

SEQ ID NO: 34004 - protein, 35 aa, Artificial Sequence; identical to SEQ ID NO: 31848
  GFR-binding peptide
  MOD_RES (33)..(33): Xaa is C or S
  MOD_RES (11)..(12)..(13)..(14)..(15): Xaa is A or G
  MOD_RES (16)..(17)..(18)..(19): Xaa is A or G or is absent

SEQ ID NO: 34005 - protein, 38 aa, Artificial Sequence; identical to SEQ ID NO: 31849
  GFR-binding peptide
  MOD_RES (2)..(34)..(35): Xaa is C or S

SEQ ID NO: 34006 - protein, 37 aa, Artificial Sequence; identical to SEQ ID NO: 31850
  GFR-binding peptide
  MOD_RES (1)..(35)..(36): Xaa is C or S
  MOD_RES (13)..(14)..(15)..(16)..(17): Xaa is A or G
  MOD_RES (18)..(19)..(20)..(21): Xaa is A or G or is absent

SEQ ID NO: 34007 - protein, 40 aa, Artificial Sequence; identical to SEQ ID NO: 31851
  GFR-binding peptide
  MOD_RES (2)..(4)..(38)..(39): Xaa is C or S
  MOD_RES (16)..(17)..(18)..(19)..(20): Xaa is A or G
  MOD_RES (21)..(22)..(23)..(24): Xaa is A or G or is absent

SEQ ID NO: 34008 - protein, 40 aa, Artificial Sequence; identical to SEQ ID NO: 31852
  GFR-binding peptide
  MOD_RES (2)..(4)..(35)..(36): Xaa is C or S

SEQ ID NO: 34009 - protein, 41 aa, Artificial Sequence; identical to SEQ ID NO: 31853
  GFR-binding peptide
  MOD_RES (1)..(3)..(37)..(38): Xaa is C or S
  MOD_RES (15)..(16)..(17)..(18)..(19): Xaa is A or G
  MOD_RES (20)..(21)..(22)..(23): Xaa is A or G or is absent

SEQ ID NO: 34010 - protein, 39 aa, Artificial Sequence; identical to SEQ ID NO: 31854
  GFR-binding peptide
  MOD_RES (2)..(34)..(35): Xaa is C or S

SEQ ID NO: 34011 - protein, 35 aa, Artificial Sequence; identical to SEQ ID NO: 31855
  GFR-binding peptide
  MOD_RES (2)..(34)..(35): Xaa is C or S

SEQ ID NO: 34012 - protein, 31 aa, Artificial Sequence; identical to SEQ ID NO: 31856
  GFR-binding peptide

SEQ ID NO: 34013 - protein, 35 aa, Artificial Sequence; identical to SEQ ID NO: 31857
  GFR-binding peptide
  MOD_RES (31)..(32): Xaa is C or S

SEQ ID NO: 34014 - protein, 37 aa, Artificial Sequence; identical to SEQ ID NO: 31858
  GFR-binding peptide
  MOD_RES (2)..(4)..(36)..(37): Xaa is C or S

SEQ ID NO: 34015 - protein, 41 aa, Artificial Sequence; identical to SEQ ID NO: 31859
  GFR-binding peptide
  MOD_RES (2)..(36)..(37): Xaa is C or S
  MOD_RES (14)..(15)..(16)..(17)..(18): Xaa is A or G
  MOD_RES (19)..(20)..(21)..(22): Xaa is A or G or is absent

SEQ ID NO: 34016 - protein, 36 aa, Artificial Sequence; identical to SEQ ID NO: 31860
  GFR-binding peptide
  MOD_RES (1)..(3)..(35)..(36): Xaa is C or S

SEQ ID NO: 34017 - protein, 33 aa, Artificial Sequence; identical to SEQ ID NO: 31861
  GFR-binding peptide
  MOD_RES (31)..(32): Xaa is C or S

SEQ ID NO: 34018 - protein, 43 aa, Artificial Sequence; identical to SEQ ID NO: 31862
  GFR-binding peptide
  MOD_RES (2)..(4)..(37)..(38): Xaa is C or S
  MOD_RES (15)..(16)..(17)..(18)..(19): Xaa is A or G
  MOD_RES (20)..(21)..(22)..(23): Xaa is A or G or is absent

SEQ ID NO: 34019 - protein, 34 aa, Artificial Sequence; identical to SEQ ID NO: 31863
  GFR-binding peptide
  MOD_RES (1)..(33)..(34): Xaa is C or S

SEQ ID NO: 34020 - protein, 36 aa, Artificial Sequence; identical to SEQ ID NO: 31864
  GFR-binding peptide
  MOD_RES (1)..(3)..(36): Xaa is C or S

SEQ ID NO: 34021 - protein, 31 aa, Artificial Sequence; identical to SEQ ID NO: 31865
  GFR-binding peptide
  MOD_RES (31)..(31): Xaa is C or S

SEQ ID NO: 34022 - protein, 37 aa, Artificial Sequence; identical to SEQ ID NO: 31866
  GFR-binding peptide
  MOD_RES (33)..(34): Xaa is C or S
  MOD_RES (11)..(12)..(13)..(14)..(15): Xaa is A or G
  MOD_RES (16)..(17)..(18)..(19): Xaa is A or G or is absent

SEQ ID NO: 34023 - protein, 41 aa, Artificial Sequence; identical to SEQ ID NO: 31867
  GFR-binding peptide
  MOD_RES (2)..(4)..(38)..(39): Xaa is C or S
  MOD_RES (16)..(17)..(18)..(19)..(20): Xaa is A or G
  MOD_RES (21)..(22)..(23)..(24): Xaa is A or G or is absent

SEQ ID NO: 34024 - protein, 33 aa, Artificial Sequence; identical to SEQ ID NO: 31868
  GFR-binding peptide
  MOD_RES (31)..(32): Xaa is C or S

SEQ ID NO: 34025 - protein, 36 aa, Artificial Sequence; identical to SEQ ID NO: 31869
  GFR-binding peptide
  MOD_RES (2)..(4)..(36): Xaa is C or S

SEQ ID NO: 34026 - protein, 36 aa, Artificial Sequence; identical to SEQ ID NO: 31870
  GFR-binding peptide
  MOD_RES (1)..(3)..(36): Xaa is C or S
  MOD_RES (14)..(15)..(16)..(17)..(18): Xaa is A or G
  MOD_RES (19)..(20)..(21)..(22): Xaa is A or G or is absent

SEQ ID NO: 34027 - protein, 32 aa, Artificial Sequence; identical to SEQ ID NO: 31871
  GFR-binding peptide
  MOD_RES (11)..(12)..(13)..(14)..(15): Xaa is A or G
  MOD_RES (16)..(17)..(18)..(19): Xaa is A or G or is absent

SEQ ID NO: 34028 - protein, 38 aa, Artificial Sequence; identical to SEQ ID NO: 31872
  GFR-binding peptide
  MOD_RES (2)..(4)..(38): Xaa is C or S
  MOD_RES (16)..(17)..(18)..(19)..(20): Xaa is A or G
  MOD_RES (21)..(22)..(23)..(24): Xaa is A or G or is absent

SEQ ID NO: 34029 - protein, 44 aa, Artificial Sequence; identical to SEQ ID NO: 31873
  GFR-binding peptide
  MOD_RES (2)..(4)..(38)..(39): Xaa is C or S
  MOD_RES (16)..(17)..(18)..(19)..(20): Xaa is A or G
  MOD_RES (21)..(22)..(23)..(24): Xaa is A or G or is absent

SEQ ID NO: 34030 - protein, 41 aa, Artificial Sequence; identical to SEQ ID NO: 31874
  GFR-binding peptide
  MOD_RES (1)..(35)..(36): Xaa is C or S
  MOD_RES (13)..(14)..(15)..(16)..(17): Xaa is A or G
  MOD_RES (18)..(19)..(20)..(21): Xaa is A or G or is absent

SEQ ID NO: 34031 - protein, 34 aa, Artificial Sequence; identical to SEQ ID NO: 31875
  GFR-binding peptide
  MOD_RES (34)..(34): Xaa is C or S
  MOD_RES (12)..(13)..(14)..(15)..(16): Xaa is A or G
  MOD_RES (17)..(18)..(19)..(20): Xaa is A or G or is absent

SEQ ID NO: 34032 - protein, 36 aa, Artificial Sequence; identical to SEQ ID NO: 31876
  GFR-binding peptide
  MOD_RES (1)..(33)..(34): Xaa is C or S

SEQ ID NO: 34033 - protein, 37 aa, Artificial Sequence; identical to SEQ ID NO: 31877
  GFR-binding peptide
  MOD_RES (2)..(35)..(36): Xaa is C or S
  MOD_RES (13)..(14)..(15)..(16)..(17): Xaa is A or G
  MOD_RES (18)..(19)..(20)..(21): Xaa is A or G or is absent

SEQ ID NO: 34034 - protein, 35 aa, Artificial Sequence; identical to SEQ ID NO: 31878
  GFR-binding peptide
  MOD_RES (31)..(31): Xaa is C or S

SEQ ID NO: 34035 - protein, 35 aa, Artificial Sequence; identical to SEQ ID NO: 31879
  GFR-binding peptide
  MOD_RES (33)..(34): Xaa is C or S
  MOD_RES (11)..(12)..(13)..(14)..(15): Xaa is A or G
  MOD_RES (16)..(17)..(18)..(19): Xaa is A or G or is absent

SEQ ID NO: 34036 - protein, 39 aa, Artificial Sequence; identical to SEQ ID NO: 31880
  GFR-binding peptide
  MOD_RES (34)..(35): Xaa is C or S
  MOD_RES (12)..(13)..(14)..(15)..(16): Xaa is A or G
  MOD_RES (17)..(18)..(19)..(20): Xaa is A or G or is absent

SEQ ID NO: 34037 - protein, 35 aa, Artificial Sequence; identical to SEQ ID NO: 31881
  GFR-binding peptide
  MOD_RES (2)..(4): Xaa is C or S

SEQ ID NO: 34038 - protein, 38 aa, Artificial Sequence; identical to SEQ ID NO: 31882
  GFR-binding peptide
  MOD_RES (2)..(4)..(38): Xaa is C or S
  MOD_RES (16)..(17)..(18)..(19)..(20): Xaa is A or G
  MOD_RES (21)..(22)..(23)..(24): Xaa is A or G or is absent

SEQ ID NO: 34039 - protein, 34 aa, Artificial Sequence; identical to SEQ ID NO: 31883
  GFR-binding peptide
  MOD_RES (32)..(33): Xaa is C or S

SEQ ID NO: 34040 - protein, 36 aa, Artificial Sequence; identical to SEQ ID NO: 31884
  GFR-binding peptide
  MOD_RES (1)..(35)..(36): Xaa is C or S
  MOD_RES (13)..(14)..(15)..(16)..(17): Xaa is A or G
  MOD_RES (18)..(19)..(20)..(21): Xaa is A or G or is absent

SEQ ID NO: 34041 - protein, 35 aa, Artificial Sequence; identical to SEQ ID NO: 31885
  GFR-binding peptide
  MOD_RES (1)..(33)..(34): Xaa is C or S

SEQ ID NO: 34042 - protein, 35 aa, Artificial Sequence; identical to SEQ ID NO: 31886
  GFR-binding peptide
  MOD_RES (2)..(4): Xaa is C or S

SEQ ID NO: 34043 - protein, 39 aa, Artificial Sequence; identical to SEQ ID NO: 31887
  GFR-binding peptide
  MOD_RES (1)..(3)..(37)..(38): Xaa is C or S
  MOD_RES (15)..(16)..(17)..(18)..(19): Xaa is A or G
  MOD_RES (20)..(21)..(22)..(23): Xaa is A or G or is absent

SEQ ID NO: 34044 - protein, 39 aa, Artificial Sequence; identical to SEQ ID NO: 31888
  GFR-binding peptide
  MOD_RES (2)..(36): Xaa is C or S
  MOD_RES (14)..(15)..(16)..(17)..(18): Xaa is A or G
  MOD_RES (19)..(20)..(21)..(22): Xaa is A or G or is absent

SEQ ID NO: 34045 - protein, 40 aa, Artificial Sequence; identical to SEQ ID NO: 31889
  GFR-binding peptide
  MOD_RES (1)..(3)..(35)..(36): Xaa is C or S

SEQ ID NO: 34046 - protein, 33 aa, Artificial Sequence; identical to SEQ ID NO: 31890
  GFR-binding peptide
  MOD_RES (1)..(33): Xaa is C or S

SEQ ID NO: 34047 - protein, 40 aa, Artificial Sequence; identical to SEQ ID NO: 31891
  GFR-binding peptide
  MOD_RES (1)..(35)..(36): Xaa is C or S
  MOD_RES (13)..(14)..(15)..(16)..(17): Xaa is A or G
  MOD_RES (18)..(19)..(20)..(21): Xaa is A or G or is absent

SEQ ID NO: 34048 - protein, 38 aa, Artificial Sequence; identical to SEQ ID NO: 31892
  GFR-binding peptide
  MOD_RES (2)..(4): Xaa is C or S
  MOD_RES (17)..(18)..(19)..(20)..(21): Xaa is A or G
  MOD_RES (22)..(23)..(24)..(25): Xaa is A or G or is absent

SEQ ID NO: 34049 - protein, 37 aa, Artificial Sequence; identical to SEQ ID NO: 31893
  GFR-binding peptide
  MOD_RES (1)..(3)..(35)..(36): Xaa is C or S

SEQ ID NO: 34050 - protein, 38 aa, Artificial Sequence; identical to SEQ ID NO: 31894
  GFR-binding peptide
  MOD_RES (32)..(33): Xaa is C or S

SEQ ID NO: 34051 - protein, 36 aa, Artificial Sequence; identical to SEQ ID NO: 31895
  GFR-binding peptide
  MOD_RES (2)..(4)..(36): Xaa is C or S

SEQ ID NO: 34052 - protein, 39 aa, Artificial Sequence; identical to SEQ ID NO: 31896
  GFR-binding peptide
  MOD_RES (2)..(36)..(37): Xaa is C or S
  MOD_RES (14)..(15)..(16)..(17)..(18): Xaa is A or G
  MOD_RES (19)..(20)..(21)..(22): Xaa is A or G or is absent

SEQ ID NO: 34053 - protein, 38 aa, Artificial Sequence; identical to SEQ ID NO: 31897
  GFR-binding peptide
  MOD_RES (2)..(4)..(36)..(37): Xaa is C or S

SEQ ID NO: 34054 - protein, 42 aa, Artificial Sequence; identical to SEQ ID NO: 31898
  GFR-binding peptide
  MOD_RES (2)..(4)..(38)..(39): Xaa is C or S
  MOD_RES (16)..(17)..(18)..(19)..(20): Xaa is A or G
  MOD_RES (21)..(22)..(23)..(24): Xaa is A or G or is absent

SEQ ID NO: 34055 - protein, 38 aa, Artificial Sequence; identical to SEQ ID NO: 31899
  GFR-binding peptide
  MOD_RES (1)..(33)..(34): Xaa is C or S

SEQ ID NO: 34056 - protein, 40 aa, Artificial Sequence; identical to SEQ ID NO: 31900
  GFR-binding peptide
  MOD_RES (1)..(3)..(37)..(38): Xaa is C or S
  MOD_RES (15)..(16)..(17)..(18)..(19): Xaa is A or G
  MOD_RES (20)..(21)..(22)..(23): Xaa is A or G or is absent

SEQ ID NO: 34057 - protein, 36 aa, Artificial Sequence; identical to SEQ ID NO: 31901
  GFR-binding peptide
  MOD_RES (1)..(36): Xaa is C or S
  MOD_RES (14)..(15)..(16)..(17)..(18): Xaa is A or G
  MOD_RES (19)..(20)..(21)..(22): Xaa is A or G or is absent

SEQ ID NO: 34058 - protein, 33 aa, Artificial Sequence; identical to SEQ ID NO: 31902
  GFR-binding peptide
  MOD_RES (32)..(33): Xaa is C or S

SEQ ID NO: 34059 - protein, 42 aa, Artificial Sequence; identical to SEQ ID NO: 31903
  GFR-binding peptide
  MOD_RES (2)..(4)..(37)..(38): Xaa is C or S
  MOD_RES (15)..(16)..(17)..(18)..(19): Xaa is A or G
  MOD_RES (20)..(21)..(22)..(23): Xaa is A or G or is absent

SEQ ID NO: 34060 - protein, 38 aa, Artificial Sequence; identical to SEQ ID NO: 31904
  GFR-binding peptide
  MOD_RES (2)..(4)..(38): Xaa is C or S
  MOD_RES (16)..(17)..(18)..(19)..(20): Xaa is A or G
  MOD_RES (21)..(22)..(23)..(24): Xaa is A or G or is absent

SEQ ID NO: 34061 - protein, 37 aa, Artificial Sequence; identical to SEQ ID NO: 31905
  GFR-binding peptide
  MOD_RES (2)..(4): Xaa is C or S
  MOD_RES (16)..(17)..(18)..(19)..(20): Xaa is A or G
  MOD_RES (21)..(22)..(23)..(24): Xaa is A or G or is absent

SEQ ID NO: 34062 - protein, 37 aa, Artificial Sequence; identical to SEQ ID NO: 31906
  GFR-binding peptide
  MOD_RES (1)..(3)..(35)..(36): Xaa is C or S

SEQ ID NO: 34063 - protein, 36 aa, Artificial Sequence; identical to SEQ ID NO: 31907
  GFR-binding peptide
  MOD_RES (2)..(34)..(35): Xaa is C or S

SEQ ID NO: 34064 - protein, 35 aa, Artificial Sequence; identical to SEQ ID NO: 31908
  GFR-binding peptide
  MOD_RES (32)..(33): Xaa is C or S

SEQ ID NO: 34065 - protein, 34 aa, Artificial Sequence; identical to SEQ ID NO: 31909
  GFR-binding peptide
  MOD_RES (1)..(3): Xaa is C or S

SEQ ID NO: 34066 - protein, 37 aa, Artificial Sequence; identical to SEQ ID NO: 31910
  GFR-binding peptide
  MOD_RES (1)..(3)..(37): Xaa is C or S
  MOD_RES (15)..(16)..(17)..(18)..(19): Xaa is A or G
  MOD_RES (20)..(21)..(22)..(23): Xaa is A or G or is absent

SEQ ID NO: 34067 - protein, 37 aa, Artificial Sequence; identical to SEQ ID NO: 31911
  GFR-binding peptide
  MOD_RES (1)..(3)..(37): Xaa is C or S
  MOD_RES (15)..(16)..(17)..(18)..(19): Xaa is A or G
  MOD_RES (20)..(21)..(22)..(23): Xaa is A or G or is absent

SEQ ID NO: 34068 - protein, 35 aa, Artificial Sequence; identical to SEQ ID NO: 31912
  GFR-binding peptide
  MOD_RES (31)..(32): Xaa is C or S

SEQ ID NO: 34069 - protein, 34 aa, Artificial Sequence; identical to SEQ ID NO: 31913
  GFR-binding peptide
  MOD_RES (1)..(3): Xaa is C or S

SEQ ID NO: 34070 - protein, 32 aa, Artificial Sequence; identical to SEQ ID NO: 31914
  GFR-binding peptide
  MOD_RES (32)..(32): Xaa is C or S

SEQ ID NO: 34071 - protein, 31 aa, Artificial Sequence; identical to SEQ ID NO: 31915
  GFR-binding peptide
  MOD_RES (31)..(31): Xaa is C or S

SEQ ID NO: 34072 - protein, 35 aa, Artificial Sequence; identical to SEQ ID NO: 31916
  GFR-binding peptide
  MOD_RES (2)..(2): Xaa is C or S
  MOD_RES (14)..(15)..(16)..(17)..(18): Xaa is A or G
  MOD_RES (19)..(20)..(21)..(22): Xaa is A or G or is absent

SEQ ID NO: 34073 - protein, 37 aa, Artificial Sequence; identical to SEQ ID NO: 31917
  GFR-binding peptide
  MOD_RES (1)..(35)..(36): Xaa is C or S
  MOD_RES (13)..(14)..(15)..(16)..(17): Xaa is A or G
  MOD_RES (18)..(19)..(20)..(21): Xaa is A or G or is absent

SEQ ID NO: 34074 - protein, 40 aa, Artificial Sequence; identical to SEQ ID NO: 31918
  GFR-binding peptide
  MOD_RES (2)..(36): Xaa is C or S
  MOD_RES (14)..(15)..(16)..(17)..(18): Xaa is A or G
  MOD_RES (19)..(20)..(21)..(22): Xaa is A or G or is absent

SEQ ID NO: 34075 - protein, 37 aa, Artificial Sequence; identical to SEQ ID NO: 31919
  GFR-binding peptide
  MOD_RES (33)..(34): Xaa is C or S
  MOD_RES (11)..(12)..(13)..(14)..(15): Xaa is A or G
  MOD_RES (16)..(17)..(18)..(19): Xaa is A or G or is absent

SEQ ID NO: 34076 - protein, 36 aa, Artificial Sequence; identical to SEQ ID NO: 31920
  GFR-binding peptide
  MOD_RES (32)..(33): Xaa is C or S

SEQ ID NO: 34077 - protein, 37 aa, Artificial Sequence; identical to SEQ ID NO: 31921
  GFR-binding peptide
  MOD_RES (32)..(33): Xaa is C or S

SEQ ID NO: 34078 - protein, 36 aa, Artificial Sequence; identical to SEQ ID NO: 31922
  GFR-binding peptide
  MOD_RES (31)..(32): Xaa is C or S

SEQ ID NO: 34079 - protein, 34 aa, Artificial Sequence; identical to SEQ ID NO: 31923
  GFR-binding peptide
  MOD_RES (32)..(33): Xaa is C or S

SEQ ID NO: 34080 - protein, 32 aa, Artificial Sequence; identical to SEQ ID NO: 31924
  GFR-binding peptide
  MOD_RES (1)..(1): Xaa is C or S

SEQ ID NO: 34081 - protein, 36 aa, Artificial Sequence; identical to SEQ ID NO: 31925
  GFR-binding peptide
  MOD_RES (1)..(35)..(36): Xaa is C or S
  MOD_RES (13)..(14)..(15)..(16)..(17): Xaa is A or G
  MOD_RES (18)..(19)..(20)..(21): Xaa is A or G or is absent

SEQ ID NO: 34082 - protein, 40 aa, Artificial Sequence; identical to SEQ ID NO: 31926
  GFR-binding peptide
  MOD_RES (1)..(34)..(35): Xaa is C or S
  MOD_RES (12)..(13)..(14)..(15)..(16): Xaa is A or G
  MOD_RES (17)..(18)..(19)..(20): Xaa is A or G or is absent

SEQ ID NO: 34083 - protein, 40 aa, Artificial Sequence; identical to SEQ ID NO: 31927
  GFR-binding peptide
  MOD_RES (2)..(4)..(36)..(37): Xaa is C or S

SEQ ID NO: 34084 - protein, 39 aa, Artificial Sequence; identical to SEQ ID NO: 31928
  GFR-binding peptide
  MOD_RES (2)..(36)..(37): Xaa is C or S
  MOD_RES (14)..(15)..(16)..(17)..(18): Xaa is A or G
  MOD_RES (19)..(20)..(21)..(22): Xaa is A or G or is absent

SEQ ID NO: 34085 - protein, 38 aa, Artificial Sequence; identical to SEQ ID NO: 31929
  GFR-binding peptide
  MOD_RES (1)..(33)..(34): Xaa is C or S

SEQ ID NO: 34086 - protein, 38 aa, Artificial Sequence; identical to SEQ ID NO: 31930
  GFR-binding peptide
  MOD_RES (34)..(35): Xaa is C or S
  MOD_RES (12)..(13)..(14)..(15)..(16): Xaa is A or G
  MOD_RES (17)..(18)..(19)..(20): Xaa is A or G or is absent

SEQ ID NO: 34087 - protein, 41 aa, Artificial Sequence; identical to SEQ ID NO: 31931
  GFR-binding peptide
  MOD_RES (2)..(36)..(37): Xaa is C or S
  MOD_RES (14)..(15)..(16)..(17)..(18): Xaa is A or G
  MOD_RES (19)..(20)..(21)..(22): Xaa is A or G or is absent

SEQ ID NO: 34088 - protein, 36 aa, Artificial Sequence; identical to SEQ ID NO: 31932
  GFR-binding peptide
  MOD_RES (1)..(3)..(34)..(35): Xaa is C or S

SEQ ID NO: 34089 - protein, 36 aa, Artificial Sequence; identical to SEQ ID NO: 31933
  GFR-binding peptide
  MOD_RES (1)..(3)..(35)..(36): Xaa is C or S

SEQ ID NO: 34090 - protein, 33 aa, Artificial Sequence; identical to SEQ ID NO: 31934
  GFR-binding peptide
  MOD_RES (31)..(32): Xaa is C or S

SEQ ID NO: 34091 - protein, 39 aa, Artificial Sequence; identical to SEQ ID NO: 31935
  GFR-binding peptide
  MOD_RES (34)..(34): Xaa is C or S
  MOD_RES (12)..(13)..(14)..(15)..(16): Xaa is A or G
  MOD_RES (17)..(18)..(19)..(20): Xaa is A or G or is absent

SEQ ID NO: 34092 - protein, 34 aa, Artificial Sequence; identical to SEQ ID NO: 31936
  GFR-binding peptide
  MOD_RES (32)..(33): Xaa is C or S

SEQ ID NO: 34093 - protein, 38 aa, Artificial Sequence; identical to SEQ ID NO: 31937
  GFR-binding peptide
  MOD_RES (2)..(34): Xaa is C or S

SEQ ID NO: 34094 - protein, 35 aa, Artificial Sequence; identical to SEQ ID NO: 31938
  GFR-binding peptide
  MOD_RES (2)..(4): Xaa is C or S

SEQ ID NO: 34095 - protein, 41 aa, Artificial Sequence; identical to SEQ ID NO: 31939
  GFR-binding peptide
  MOD_RES (2)..(4)..(38)..(39): Xaa is C or S
  MOD_RES (16)..(17)..(18)..(19)..(20): Xaa is A or G
  MOD_RES (21)..(22)..(23)..(24): Xaa is A or G or is absent

SEQ ID NO: 34096 - protein, 30 aa, Artificial Sequence; identical to SEQ ID NO: 31940
  GFR-binding peptide

SEQ ID NO: 34097 - protein, 38 aa, Artificial Sequence; identical to SEQ ID NO: 31941
  GFR-binding peptide
  MOD_RES (1)..(33): Xaa is C or S

SEQ ID NO: 34098 - protein, 41 aa, Artificial Sequence; identical to SEQ ID NO: 31942
  GFR-binding peptide
  MOD_RES (1)..(3)..(35)..(36): Xaa is C or S

SEQ ID NO: 34099 - protein, 42 aa, Artificial Sequence; identical to SEQ ID NO: 31943
  GFR-binding peptide
  MOD_RES (1)..(3)..(37): Xaa is C or S
  MOD_RES (15)..(16)..(17)..(18)..(19): Xaa is A or G
  MOD_RES (20)..(21)..(22)..(23): Xaa is A or G or is absent

SEQ ID NO: 34100 - protein, 36 aa, Artificial Sequence; identical to SEQ ID NO: 31944
  GFR-binding peptide
  MOD_RES (32)..(32): Xaa is C or S

SEQ ID NO: 34101 - protein, 36 aa, Artificial Sequence; identical to SEQ ID NO: 31945
  GFR-binding peptide
  MOD_RES (2)..(36): Xaa is C or S
  MOD_RES (14)..(15)..(16)..(17)..(18): Xaa is A or G
  MOD_RES (19)..(20)..(21)..(22): Xaa is A or G or is absent

SEQ ID NO: 34102 - protein, 35 aa, Artificial Sequence; identical to SEQ ID NO: 31946
  GFR-binding peptide
  MOD_RES (1)..(35): Xaa is C or S
  MOD_RES (13)..(14)..(15)..(16)..(17): Xaa is A or G
  MOD_RES (18)..(19)..(20)..(21): Xaa is A or G or is absent

SEQ ID NO: 34103 - protein, 37 aa, Artificial Sequence; identical to SEQ ID NO: 31947
  GFR-binding peptide
  MOD_RES (34)..(35): Xaa is C or S
  MOD_RES (12)..(13)..(14)..(15)..(16): Xaa is A or G
  MOD_RES (17)..(18)..(19)..(20): Xaa is A or G or is absent

SEQ ID NO: 34104 - protein, 34 aa, Artificial Sequence; identical to SEQ ID NO: 31948
  GFR-binding peptide
  MOD_RES (1)..(33)..(34): Xaa is C or S

SEQ ID NO: 34105 - protein, 40 aa, Artificial Sequence; identical to SEQ ID NO: 31949
  GFR-binding peptide
  MOD_RES (1)..(34)..(35): Xaa is C or S

SEQ ID NO: 34106 - protein, 39 aa, Artificial Sequence; identical to SEQ ID NO: 31950
  GFR-binding peptide
  MOD_RES (1)..(3)..(35)..(36): Xaa is C or S

SEQ ID NO: 34107 - protein, 34 aa, Artificial Sequence; identical to SEQ ID NO: 31951
  GFR-binding peptide
  MOD_RES (2)..(33)..(34): Xaa is C or S

SEQ ID NO: 34108 - protein, 39 aa, Artificial Sequence; identical to SEQ ID NO: 31952
  GFR-binding peptide
  MOD_RES (2)..(35)..(36): Xaa is C or S

SEQ ID NO: 34109 - protein, 38 aa, Artificial Sequence; identical to SEQ ID NO: 31953
  GFR-binding peptide
  MOD_RES (1)..(35)..(36): Xaa is C or S
  MOD_RES (13)..(14)..(15)..(16)..(17): Xaa is A or G
  MOD_RES (18)..(19)..(20)..(21): Xaa is A or G or is absent

SEQ ID NO: 34110 - protein, 41 aa, Artificial Sequence; identical to SEQ ID NO: 31954
  GFR-binding peptide
  MOD_RES (2)..(4)..(38)..(39): Xaa is C or S
  MOD_RES (16)..(17)..(18)..(19)..(20): Xaa is A or G
  MOD_RES (21)..(22)..(23)..(24): Xaa is A or G or is absent

SEQ ID NO: 34111 - protein, 35 aa, Artificial Sequence; identical to SEQ ID NO: 31955
  GFR-binding peptide
  MOD_RES (32)..(33): Xaa is C or S

SEQ ID NO: 34112 - protein, 39 aa, Artificial Sequence; identical to SEQ ID NO: 31956
  GFR-binding peptide
  MOD_RES (34)..(35): Xaa is C or S
  MOD_RES (12)..(13)..(14)..(15)..(16): Xaa is A or G
  MOD_RES (17)..(18)..(19)..(20): Xaa is A or G or is absent

SEQ ID NO: 34113 - protein, 39 aa, Artificial Sequence; identical to SEQ ID NO: 31957
  GFR-binding peptide
  MOD_RES (2)..(36)..(37): Xaa is C or S
  MOD_RES (14)..(15)..(16)..(17)..(18): Xaa is A or G
  MOD_RES (19)..(20)..(21)..(22): Xaa is A or G or is absent

SEQ ID NO: 34114 - protein, 32 aa, Artificial Sequence; identical to SEQ ID NO: 31958
  GFR-binding peptide
  MOD_RES (1)..(1): Xaa is C or S

SEQ ID NO: 34115 - protein, 39 aa, Artificial Sequence; identical to SEQ ID NO: 31959
  GFR-binding peptide
  MOD_RES (1)..(33)..(34): Xaa is C or S

SEQ ID NO: 34116 - protein, 39 aa, Artificial Sequence; identical to SEQ ID NO: 31960
  GFR-binding peptide
  MOD_RES (34)..(35): Xaa is C or S
  MOD_RES (12)..(13)..(14)..(15)..(16): Xaa is A or G
  MOD_RES (17)..(18)..(19)..(20): Xaa is A or G or is absent

SEQ ID NO: 34117 - protein, 42 aa, Artificial Sequence; identical to SEQ ID NO: 31961
  GFR-binding peptide
  MOD_RES (2)..(4)..(38)..(39): Xaa is C or S
  MOD_RES (16)..(17)..(18)..(19)..(20): Xaa is A or G
  MOD_RES (21)..(22)..(23)..(24): Xaa is A or G or is absent

SEQ ID NO: 34118 - protein, 37 aa, Artificial Sequence; identical to SEQ ID NO: 31962
  GFR-binding peptide
  MOD_RES (33)..(34): Xaa is C or S
  MOD_RES (11)..(12)..(13)..(14)..(15): Xaa is A or G
  MOD_RES (16)..(17)..(18)..(19): Xaa is A or G or is absent

SEQ ID NO: 34119 - protein, 40 aa, Artificial Sequence; identical to SEQ ID NO: 31963
  GFR-binding peptide
  MOD_RES (1)..(3)..(37)..(38): Xaa is C or S
  MOD_RES (15)..(16)..(17)..(18)..(19): Xaa is A or G
  MOD_RES (20)..(21)..(22)..(23): Xaa is A or G or is absent

SEQ ID NO: 34120 - protein, 33 aa, Artificial Sequence; identical to SEQ ID NO: 31964
  GFR-binding peptide
  MOD_RES (1)..(33): Xaa is C or S

SEQ ID NO: 34121 - protein, 39 aa, Artificial Sequence; identical to SEQ ID NO: 31965
  GFR-binding peptide
  MOD_RES (33)..(34): Xaa is C or S
  MOD_RES (11)..(12)..(13)..(14)..(15): Xaa is A or G
  MOD_RES (16)..(17)..(18)..(19): Xaa is A or G or is absent

SEQ ID NO: 34122 - protein, 37 aa, Artificial Sequence; identical to SEQ ID NO: 31966
  GFR-binding peptide
  MOD_RES (2)..(34)..(35): Xaa is C or S

SEQ ID NO: 34123 - protein, 31 aa, Artificial Sequence; identical to SEQ ID NO: 31967
  GFR-binding peptide

SEQ ID NO: 34124 - protein, 34 aa, Artificial Sequence; identical to SEQ ID NO: 31968
  GFR-binding peptide
  MOD_RES (33)..(33): Xaa is C or S
  MOD_RES (11)..(12)..(13)..(14)..(15): Xaa is A or G
  MOD_RES (16)..(17)..(18)..(19): Xaa is A or G or is absent

SEQ ID NO: 34125 - protein, 34 aa, Artificial Sequence; identical to SEQ ID NO: 31969
  GFR-binding peptide
  MOD_RES (1)..(3): Xaa is C or S

SEQ ID NO: 34126 - protein, 38 aa, Artificial Sequence; identical to SEQ ID NO: 31970
  GFR-binding peptide
  MOD_RES (1)..(33)..(34): Xaa is C or S

SEQ ID NO: 34127 - protein, 37 aa, Artificial Sequence; identical to SEQ ID NO: 31971
  GFR-binding peptide
  MOD_RES (2)..(4)..(36)..(37): Xaa is C or S

SEQ ID NO: 34128 - protein, 37 aa, Artificial Sequence; identical to SEQ ID NO: 31972
  GFR-binding peptide
  MOD_RES (2)..(4): Xaa is C or S
  MOD_RES (16)..(17)..(18)..(19)..(20): Xaa is A or G
  MOD_RES (21)..(22)..(23)..(24): Xaa is A or G or is absent

SEQ ID NO: 34129 - protein, 36 aa, Artificial Sequence; identical to SEQ ID NO: 31973
  GFR-binding peptide
  MOD_RES (2)..(36): Xaa is C or S
  MOD_RES (14)..(15)..(16)..(17)..(18): Xaa is A or G
  MOD_RES (19)..(20)..(21)..(22): Xaa is A or G or is absent

SEQ ID NO: 34130 - protein, 38 aa, Artificial Sequence; identical to SEQ ID NO: 31974
  GFR-binding peptide
  MOD_RES (1)..(3)..(37)..(38): Xaa is C or S
  MOD_RES (15)..(16)..(17)..(18)..(19): Xaa is A or G
  MOD_RES (20)..(21)..(22)..(23): Xaa is A or G or is absent

SEQ ID NO: 34131 - protein, 33 aa, Artificial Sequence; identical to SEQ ID NO: 31975
  GFR-binding peptide
  MOD_RES (12)..(13)..(14)..(15)..(16): Xaa is A or G
  MOD_RES (17)..(18)..(19)..(20): Xaa is A or G or is absent

SEQ ID NO: 34132 - protein, 41 aa, Artificial Sequence; identical to SEQ ID NO: 31976
  GFR-binding peptide
  MOD_RES (1)..(3)..(35)..(36): Xaa is C or S

SEQ ID NO: 34133 - protein, 39 aa, Artificial Sequence; identical to SEQ ID NO: 31977
  GFR-binding peptide
  MOD_RES (33)..(34): Xaa is C or S
  MOD_RES (11)..(12)..(13)..(14)..(15): Xaa is A or G
  MOD_RES (16)..(17)..(18)..(19): Xaa is A or G or is absent

SEQ ID NO: 34134 - protein, 41 aa, Artificial Sequence; identical to SEQ ID NO: 31978
  GFR-binding peptide
  MOD_RES (2)..(36)..(37): Xaa is C or S
  MOD_RES (14)..(15)..(16)..(17)..(18): Xaa is A or G
  MOD_RES (19)..(20)..(21)..(22): Xaa is A or G or is absent

SEQ ID NO: 34135 - protein, 37 aa, Artificial Sequence; identical to SEQ ID NO: 31979
  GFR-binding peptide
  MOD_RES (2)..(33)..(34): Xaa is C or S

SEQ ID NO: 34136 - protein, 36 aa, Artificial Sequence; identical to SEQ ID NO: 31980
  GFR-binding peptide
  MOD_RES (1)..(3)..(35)..(36): Xaa is C or S

SEQ ID NO: 34137 - protein, 37 aa, Artificial Sequence; identical to SEQ ID NO: 31981
  GFR-binding peptide
  MOD_RES (1)..(32)..(33): Xaa is C or S

SEQ ID NO: 34138 - protein, 37 aa, Artificial Sequence; identical to SEQ ID NO: 31982
  GFR-binding peptide
  MOD_RES (34)..(35): Xaa is C or S
  MOD_RES (12)..(13)..(14)..(15)..(16): Xaa is A or G
  MOD_RES (17)..(18)..(19)..(20): Xaa is A or G or is absent

SEQ ID NO: 34139 - protein, 37 aa, Artificial Sequence; identical to SEQ ID NO: 31983
  GFR-binding peptide
  MOD_RES (1)..(3)..(35)..(36): Xaa is C or S

SEQ ID NO: 34140 - protein, 37 aa, Artificial Sequence; identical to SEQ ID NO: 31984
  GFR-binding peptide
  MOD_RES (2)..(36)..(37): Xaa is C or S
  MOD_RES (14)..(15)..(16)..(17)..(18): Xaa is A or G
  MOD_RES (19)..(20)..(21)..(22): Xaa is A or G or is absent

SEQ ID NO: 34141 - protein, 38 aa, Artificial Sequence; identical to SEQ ID NO: 31985
  GFR-binding peptide
  MOD_RES (2)..(35)..(36): Xaa is C or S
  MOD_RES (13)..(14)..(15)..(16)..(17): Xaa is A or G
  MOD_RES (18)..(19)..(20)..(21): Xaa is A or G or is absent

SEQ ID NO: 34142 - protein, 32 aa, Artificial Sequence; identical to SEQ ID NO: 31986
  GFR-binding peptide
  MOD_RES (1)..(1): Xaa is C or S

SEQ ID NO: 34143 - protein, 40 aa, Artificial Sequence; identical to SEQ ID NO: 31987
  GFR-binding peptide
  MOD_RES (34)..(35): Xaa is C or S
  MOD_RES (12)..(13)..(14)..(15)..(16): Xaa is A or G
  MOD_RES (17)..(18)..(19)..(20): Xaa is A or G or is absent

SEQ ID NO: 34144 - protein, 38 aa, Artificial Sequence; identical to SEQ ID NO: 31988
  GFR-binding peptide
  MOD_RES (32)..(33): Xaa is C or S

SEQ ID NO: 34145 - protein, 34 aa, Artificial Sequence; identical to SEQ ID NO: 31989
  GFR-binding peptide
  MOD_RES (1)..(33)..(34): Xaa is C or S

SEQ ID NO: 34146 - protein, 35 aa, Artificial Sequence; identical to SEQ ID NO: 31990
  GFR-binding peptide
  MOD_RES (1)..(33)..(34): Xaa is C or S

SEQ ID NO: 34147 - protein, 42 aa, Artificial Sequence; identical to SEQ ID NO: 31991
  GFR-binding peptide
  MOD_RES (2)..(4)..(36)..(37): Xaa is C or S

SEQ ID NO: 34148 - protein, 35 aa, Artificial Sequence; identical to SEQ ID NO: 31992
  GFR-binding peptide
  MOD_RES (2)..(4): Xaa is C or S

SEQ ID NO: 34149 - protein, 36 aa, Artificial Sequence; identical to SEQ ID NO: 31993
  GFR-binding peptide
  MOD_RES (1)..(3)..(35)..(36): Xaa is C or S

SEQ ID NO: 34150 - protein, 32 aa, Artificial Sequence; identical to SEQ ID NO: 31994
  GFR-binding peptide
  MOD_RES (1)..(32): Xaa is C or S

SEQ ID NO: 34151 - protein, 34 aa, Artificial Sequence; identical to SEQ ID NO: 31995
  GFR-binding peptide
  MOD_RES (32)..(32): Xaa is C or S

SEQ ID NO: 34152 - protein, 37 aa, Artificial Sequence; identical to SEQ ID NO: 31996
  GFR-binding peptide
  MOD_RES (2)..(34)..(35): Xaa is C or S

SEQ ID NO: 34153 - protein, 37 aa, Artificial Sequence; identical to SEQ ID NO: 31997
  GFR-binding peptide
  MOD_RES (31)..(32): Xaa is C or S

SEQ ID NO: 34154 - protein, 40 aa, Artificial Sequence; identical to SEQ ID NO: 31998
  GFR-binding peptide
  MOD_RES (1)..(3)..(37)..(38): Xaa is C or S
  MOD_RES (15)..(16)..(17)..(18)..(19): Xaa is A or G
  MOD_RES (20)..(21)..(22)..(23): Xaa is A or G or is absent

SEQ ID NO: 34155 - protein, 34 aa, Artificial Sequence; identical to SEQ ID NO: 31999
  GFR-binding peptide
  MOD_RES (34)..(34): Xaa is C or S
  MOD_RES (12)..(13)..(14)..(15)..(16): Xaa is A or G
  MOD_RES (17)..(18)..(19)..(20): Xaa is A or G or is absent

SEQ ID NO: 34156 - protein, 32 aa, Artificial Sequence; identical to SEQ ID NO: 32000
  GFR-binding peptide
  MOD_RES (31)..(32): Xaa is C or S

SEQ ID NO: 34157 - protein, 36 aa, Artificial Sequence; identical to SEQ ID NO: 32001
  GFR-binding peptide
  MOD_RES (32)..(33): Xaa is C or S

SEQ ID NO: 34158 - protein, 37 aa, Artificial Sequence; identical to SEQ ID NO: 32002
  GFR-binding peptide
  MOD_RES (1)..(35)..(36): Xaa is C or S
  MOD_RES (13)..(14)..(15)..(16)..(17): Xaa is A or G
  MOD_RES (18)..(19)..(20)..(21): Xaa is A or G or is absent

SEQ ID NO: 34159 - protein, 44 aa, Artificial Sequence; identical to SEQ ID NO: 32003
  GFR-binding peptide
  MOD_RES (2)..(4)..(38): Xaa is C or S
  MOD_RES (16)..(17)..(18)..(19)..(20): Xaa is A or G
  MOD_RES (21)..(22)..(23)..(24): Xaa is A or G or is absent

SEQ ID NO: 34160 - protein, 33 aa, Artificial Sequence; identical to SEQ ID NO: 32004
  GFR-binding peptide
  MOD_RES (32)..(32): Xaa is C or S

SEQ ID NO: 34161 - protein, 36 aa, Artificial Sequence; identical to SEQ ID NO: 32005
  GFR-binding peptide
  MOD_RES (1)..(35)..(36): Xaa is C or S
  MOD_RES (13)..(14)..(15)..(16)..(17): Xaa is A or G
  MOD_RES (18)..(19)..(20)..(21): Xaa is A or G or is absent

SEQ ID NO: 34162 - protein, 44 aa, Artificial Sequence; identical to SEQ ID NO: 32006
  GFR-binding peptide
  MOD_RES (2)..(4)..(38)..(39): Xaa is C or S
  MOD_RES (16)..(17)..(18)..(19)..(20): Xaa is A or G
  MOD_RES (21)..(22)..(23)..(24): Xaa is A or G or is absent

SEQ ID NO: 34163 - protein, 38 aa, Artificial Sequence; identical to SEQ ID NO: 32007
  GFR-binding peptide
  MOD_RES (1)..(3)..(37)..(38): Xaa is C or S
  MOD_RES (15)..(16)..(17)..(18)..(19): Xaa is A or G
  MOD_RES (20)..(21)..(22)..(23): Xaa is A or G or is absent

SEQ ID NO: 34164 - protein, 38 aa, Artificial Sequence; identical to SEQ ID NO: 32008
  GFR-binding peptide
  MOD_RES (32)..(33): Xaa is C or S

SEQ ID NO: 34165 - protein, 36 aa, Artificial Sequence; identical to SEQ ID NO: 32009
  GFR-binding peptide
  MOD_RES (2)..(34)..(35): Xaa is C or S

SEQ ID NO: 34166 - protein, 38 aa, Artificial Sequence; identical to SEQ ID NO: 32010
  GFR-binding peptide
  MOD_RES (2)..(36)..(37): Xaa is C or S
  MOD_RES (14)..(15)..(16)..(17)..(18): Xaa is A or G
  MOD_RES (19)..(20)..(21)..(22): Xaa is A or G or is absent

SEQ ID NO: 34167 - protein, 41 aa, Artificial Sequence; identical to SEQ ID NO: 32011
  GFR-binding peptide
  MOD_RES (1)..(35)..(36): Xaa is C or S
  MOD_RES (13)..(14)..(15)..(16)..(17): Xaa is A or G
  MOD_RES (18)..(19)..(20)..(21): Xaa is A or G or is absent

SEQ ID NO: 34168 - protein, 35 aa, Artificial Sequence; identical to SEQ ID NO: 32012
  GFR-binding peptide
  MOD_RES (1)..(35): Xaa is C or S
  MOD_RES (13)..(14)..(15)..(16)..(17): Xaa is A or G
  MOD_RES (18)..(19)..(20)..(21): Xaa is A or G or is absent

SEQ ID NO: 34169 - protein, 31 aa, Artificial Sequence; identical to SEQ ID NO: 32013
  GFR-binding peptide
  MOD_RES (31)..(31): Xaa is C or S

SEQ ID NO: 34170 - protein, 35 aa, Artificial Sequence; identical to SEQ ID NO: 32014
  GFR-binding peptide
  MOD_RES (31)..(32): Xaa is C or S

SEQ ID NO: 34171 - protein, 43 aa, Artificial Sequence; identical to SEQ ID NO: 32015
  GFR-binding peptide
  MOD_RES (1)..(3)..(37)..(38): Xaa is C or S
  MOD_RES (15)..(16)..(17)..(18)..(19): Xaa is A or G
  MOD_RES (20)..(21)..(22)..(23): Xaa is A or G or is absent

SEQ ID NO: 34172 - protein, 37 aa, Artificial Sequence; identical to SEQ ID NO: 32016
  GFR-binding peptide
  MOD_RES (34)..(35): Xaa is C or S
  MOD_RES (12)..(13)..(14)..(15)..(16): Xaa is A or G
  MOD_RES (17)..(18)..(19)..(20): Xaa is A or G or is absent

SEQ ID NO: 34173 - protein, 33 aa, Artificial Sequence; identical to SEQ ID NO: 32017
  GFR-binding peptide
  MOD_RES (31)..(32): Xaa is C or S

SEQ ID NO: 34174 - protein, 42 aa, Artificial Sequence; identical to SEQ ID NO: 32018
  GFR-binding peptide
  MOD_RES (1)..(3)..(37)..(38): Xaa is C or S
  MOD_RES (15)..(16)..(17)..(18)..(19): Xaa is A or G
  MOD_RES (20)..(21)..(22)..(23): Xaa is A or G or is absent

SEQ ID NO: 34175 - protein, 38 aa, Artificial Sequence; identical to SEQ ID NO: 32019
  GFR-binding peptide
  MOD_RES (2)..(37)..(38): Xaa is C or S
  MOD_RES (15)..(16)..(17)..(18)..(19): Xaa is A or G
  MOD_RES (20)..(21)..(22)..(23): Xaa is A or G or is absent

SEQ ID NO: 34176 - protein, 35 aa, Artificial Sequence; identical to SEQ ID NO: 32020
  GFR-binding peptide
  MOD_RES (1)..(33)..(34): Xaa is C or S

SEQ ID NO: 34177 - protein, 39 aa, Artificial Sequence; identical to SEQ ID NO: 32021
  GFR-binding peptide
  MOD_RES (1)..(35)..(36): Xaa is C or S
  MOD_RES (13)..(14)..(15)..(16)..(17): Xaa is A or G
  MOD_RES (18)..(19)..(20)..(21): Xaa is A or G or is absent

SEQ ID NO: 34178 - protein, 33 aa, Artificial Sequence; identical to SEQ ID NO: 32022
  GFR-binding peptide
  MOD_RES (32)..(33): Xaa is C or S

SEQ ID NO: 34179 - protein, 34 aa, Artificial Sequence; identical to SEQ ID NO: 32023
  GFR-binding peptide
  MOD_RES (1)..(33)..(34): Xaa is C or S

SEQ ID NO: 34180 - protein, 39 aa, Artificial Sequence; identical to SEQ ID NO: 32024
  GFR-binding peptide
  MOD_RES (2)..(4)..(36)..(37): Xaa is C or S

SEQ ID NO: 34181 - protein, 36 aa, Artificial Sequence; identical to SEQ ID NO: 32025
  GFR-binding peptide
  MOD_RES (2)..(34)..(35): Xaa is C or S

SEQ ID NO: 34182 - protein, 41 aa, Artificial Sequence; identical to SEQ ID NO: 32026
  GFR-binding peptide
  MOD_RES (2)..(36)..(37): Xaa is C or S
  MOD_RES (14)..(15)..(16)..(17)..(18): Xaa is A or G
  MOD_RES (19)..(20)..(21)..(22): Xaa is A or G or is absent

SEQ ID NO: 34183 - protein, 39 aa, Artificial Sequence; identical to SEQ ID NO: 32027
  GFR-binding peptide
  MOD_RES (33)..(34): Xaa is C or S
  MOD_RES (11)..(12)..(13)..(14)..(15): Xaa is A or G
  MOD_RES (16)..(17)..(18)..(19): Xaa is A or G or is absent

SEQ ID NO: 34184 - protein, 39 aa, Artificial Sequence; identical to SEQ ID NO: 32028
  GFR-binding peptide
  MOD_RES (2)..(34)..(35): Xaa is C or S

SEQ ID NO: 34185 - protein, 36 aa, Artificial Sequence; identical to SEQ ID NO: 32029
  GFR-binding peptide
  MOD_RES (1)..(35)..(36): Xaa is C or S
  MOD_RES (13)..(14)..(15)..(16)..(17): Xaa is A or G
  MOD_RES (18)..(19)..(20)..(21): Xaa is A or G or is absent

SEQ ID NO: 34186 - protein, 37 aa, Artificial Sequence; identical to SEQ ID NO: 32030
  GFR-binding peptide
  MOD_RES (2)..(34)..(35): Xaa is C or S

SEQ ID NO: 34187 - protein, 36 aa, Artificial Sequence; identical to SEQ ID NO: 32031
  GFR-binding peptide
  MOD_RES (2)..(36): Xaa is C or S
  MOD_RES (14)..(15)..(16)..(17)..(18): Xaa is A or G
  MOD_RES (19)..(20)..(21)..(22): Xaa is A or G or is absent

SEQ ID NO: 34188 - protein, 36 aa, Artificial Sequence; identical to SEQ ID NO: 32032
  GFR-binding peptide
  MOD_RES (1)..(3)..(35)..(36): Xaa is C or S

SEQ ID NO: 34189 - protein, 37 aa, Artificial Sequence; identical to SEQ ID NO: 32033
  GFR-binding peptide
  MOD_RES (34)..(35): Xaa is C or S
  MOD_RES (12)..(13)..(14)..(15)..(16): Xaa is A or G
  MOD_RES (17)..(18)..(19)..(20): Xaa is A or G or is absent

SEQ ID NO: 34190 - protein, 36 aa, Artificial Sequence; identical to SEQ ID NO: 32034
  GFR-binding peptide
  MOD_RES (2)..(4)..(36): Xaa is C or S

SEQ ID NO: 34191 - protein, 37 aa, Artificial Sequence; identical to SEQ ID NO: 32035
  GFR-binding peptide
  MOD_RES (32)..(33): Xaa is C or S

SEQ ID NO: 34192 - protein, 37 aa, Artificial Sequence; identical to SEQ ID NO: 32036
  GFR-binding peptide
  MOD_RES (2)..(34)..(35): Xaa is C or S

SEQ ID NO: 34193 - protein, 41 aa, Artificial Sequence; identical to SEQ ID NO: 32037
  GFR-binding peptide
  MOD_RES (1)..(35): Xaa is C or S
  MOD_RES (13)..(14)..(15)..(16)..(17): Xaa is A or G
  MOD_RES (18)..(19)..(20)..(21): Xaa is A or G or is absent

SEQ ID NO: 34194 - protein, 39 aa, Artificial Sequence; identical to SEQ ID NO: 32038
  GFR-binding peptide
  MOD_RES (2)..(4)..(36)..(37): Xaa is C or S

SEQ ID NO: 34195 - protein, 39 aa, Artificial Sequence; identical to SEQ ID NO: 32039
  GFR-binding peptide
  MOD_RES (1)..(33)..(34): Xaa is C or S

SEQ ID NO: 34196 - protein, 42 aa, Artificial Sequence; identical to SEQ ID NO: 32040
  GFR-binding peptide
  MOD_RES (1)..(3)..(36)..(37): Xaa is C or S

SEQ ID NO: 34197 - protein, 39 aa, Artificial Sequence; identical to SEQ ID NO: 32041
  GFR-binding peptide
  MOD_RES (1)..(3)..(35)..(36): Xaa is C or S

SEQ ID NO: 34198 - protein, 35 aa, Artificial Sequence; identical to SEQ ID NO: 32042
  GFR-binding peptide
  MOD_RES (34)..(35): Xaa is C or S
  MOD_RES (12)..(13)..(14)..(15)..(16): Xaa is A or G
  MOD_RES (17)..(18)..(19)..(20): Xaa is A or G or is absent

SEQ ID NO: 34199 - protein, 40 aa, Artificial Sequence; identical to SEQ ID NO: 32043
  GFR-binding peptide
  MOD_RES (2)..(34)..(35): Xaa is C or S

SEQ ID NO: 34200 - protein, 35 aa, Artificial Sequence; identical to SEQ ID NO: 32044
  GFR-binding peptide
  MOD_RES (1)..(3)..(35): Xaa is C or S

SEQ ID NO: 34201 - protein, 38 aa, Artificial Sequence; identical to SEQ ID NO: 32045
  GFR-binding peptide
  MOD_RES (1)..(35)..(36): Xaa is C or S
  MOD_RES (13)..(14)..(15)..(16)..(17): Xaa is A or G
  MOD_RES (18)..(19)..(20)..(21): Xaa is A or G or is absent

SEQ ID NO: 34202 - protein, 43 aa, Artificial Sequence; identical to SEQ ID NO: 32046
  GFR-binding peptide
  MOD_RES (2)..(4)..(38)..(39): Xaa is C or S
  MOD_RES (16)..(17)..(18)..(19)..(20): Xaa is A or G
  MOD_RES (21)..(22)..(23)..(24): Xaa is A or G or is absent

SEQ ID NO: 34203 - protein, 41 aa, Artificial Sequence; identical to SEQ ID NO: 32047
  GFR-binding peptide
  MOD_RES (1)..(35)..(36): Xaa is C or S
  MOD_RES (13)..(14)..(15)..(16)..(17): Xaa is A or G
  MOD_RES (18)..(19)..(20)..(21): Xaa is A or G or is absent

SEQ ID NO: 34204 - protein, 39 aa, Artificial Sequence; identical to SEQ ID NO: 32048
  GFR-binding peptide
  MOD_RES (2)..(34)..(35): Xaa is C or S

SEQ ID NO: 34205 - protein, 37 aa, Artificial Sequence; identical to SEQ ID NO: 32049
  GFR-binding peptide
  MOD_RES (2)..(36)..(37): Xaa is C or S
  MOD_RES (14)..(15)..(16)..(17)..(18): Xaa is A or G
  MOD_RES (19)..(20)..(21)..(22): Xaa is A or G or is absent

SEQ ID NO: 34206 - protein, 34 aa, Artificial Sequence; identical to SEQ ID NO: 32050
  GFR-binding peptide
  MOD_RES (1)..(34): Xaa is C or S
  MOD_RES (12)..(13)..(14)..(15)..(16): Xaa is A or G
  MOD_RES (17)..(18)..(19)..(20): Xaa is A or G or is absent

SEQ ID NO: 34207 - protein, 37 aa, Artificial Sequence; identical to SEQ ID NO: 32051
  GFR-binding peptide
  MOD_RES (1)..(33)..(34): Xaa is C or S

SEQ ID NO: 34208 - protein, 34 aa, Artificial Sequence; identical to SEQ ID NO: 32052
  GFR-binding peptide
  MOD_RES (1)..(33)..(34): Xaa is C or S

SEQ ID NO: 34209 - protein, 38 aa, Artificial Sequence; identical to SEQ ID NO: 32053
  GFR-binding peptide
  MOD_RES (2)..(35)..(36): Xaa is C or S

SEQ ID NO: 34210 - protein, 40 aa, Artificial Sequence; identical to SEQ ID NO: 32054
  GFR-binding peptide
  MOD_RES (1)..(35)..(36): Xaa is C or S
  MOD_RES (13)..(14)..(15)..(16)..(17): Xaa is A or G
  MOD_RES (18)..(19)..(20)..(21): Xaa is A or G or is absent

SEQ ID NO: 34211 - protein, 39 aa, Artificial Sequence; identical to SEQ ID NO: 32055
  GFR-binding peptide
  MOD_RES (33)..(33): Xaa is C or S
  MOD_RES (11)..(12)..(13)..(14)..(15): Xaa is A or G
  MOD_RES (16)..(17)..(18)..(19): Xaa is A or G or is absent

SEQ ID NO: 34212 - protein, 39 aa, Artificial Sequence; identical to SEQ ID NO: 32056
  GFR-binding peptide
  MOD_RES (1)..(35)..(36): Xaa is C or S
  MOD_RES (13)..(14)..(15)..(16)..(17): Xaa is A or G
  MOD_RES (18)..(19)..(20)..(21): Xaa is A or G or is absent

SEQ ID NO: 34213 - protein, 36 aa, Artificial Sequence; identical to SEQ ID NO: 32057
  GFR-binding peptide
  MOD_RES (1)..(35)..(36): Xaa is C or S
  MOD_RES (13)..(14)..(15)..(16)..(17): Xaa is A or G
  MOD_RES (18)..(19)..(20)..(21): Xaa is A or G or is absent

SEQ ID NO: 34214 - protein, 38 aa, Artificial Sequence; identical to SEQ ID NO: 32058
  GFR-binding peptide
  MOD_RES (1)..(3)..(35)..(36): Xaa is C or S

SEQ ID NO: 34215 - protein, 37 aa, Artificial Sequence; identical to SEQ ID NO: 32059
  GFR-binding peptide
  MOD_RES (2)..(36)..(37): Xaa is C or S
  MOD_RES (14)..(15)..(16)..(17)..(18): Xaa is A or G
  MOD_RES (19)..(20)..(21)..(22): Xaa is A or G or is absent

SEQ ID NO: 34216 - protein, 38 aa, Artificial Sequence; identical to SEQ ID NO: 32060
  GFR-binding peptide
  MOD_RES (34)..(34): Xaa is C or S
  MOD_RES (12)..(13)..(14)..(15)..(16): Xaa is A or G
  MOD_RES (17)..(18)..(19)..(20): Xaa is A or G or is absent

SEQ ID NO: 34217 - protein, 43 aa, Artificial Sequence; identical to SEQ ID NO: 32061
  GFR-binding peptide
  MOD_RES (2)..(4)..(38)..(39): Xaa is C or S
  MOD_RES (16)..(17)..(18)..(19)..(20): Xaa is A or G
  MOD_RES (21)..(22)..(23)..(24): Xaa is A or G or is absent

SEQ ID NO: 34218 - protein, 34 aa, Artificial Sequence; identical to SEQ ID NO: 32062
  GFR-binding peptide
  MOD_RES (31)..(32): Xaa is C or S

SEQ ID NO: 34219 - protein, 31 aa, Artificial Sequence; identical to SEQ ID NO: 32063
  GFR-binding peptide

SEQ ID NO: 34220 - protein, 38 aa, Artificial Sequence; identical to SEQ ID NO: 32064
  GFR-binding peptide
  MOD_RES (1)..(35)..(36): Xaa is C or S
  MOD_RES (13)..(14)..(15)..(16)..(17): Xaa is A or G
  MOD_RES (18)..(19)..(20)..(21): Xaa is A or G or is absent

SEQ ID NO: 34221 - protein, 33 aa, Artificial Sequence; identical to SEQ ID NO: 32065
  GFR-binding peptide
  MOD_RES (33)..(33): Xaa is C or S
  MOD_RES (11)..(12)..(13)..(14)..(15): Xaa is A or G
  MOD_RES (16)..(17)..(18)..(19): Xaa is A or G or is absent

SEQ ID NO: 34222 - protein, 37 aa, Artificial Sequence; identical to SEQ ID NO: 32066
  GFR-binding peptide
  MOD_RES (34)..(35): Xaa is C or S
  MOD_RES (12)..(13)..(14)..(15)..(16): Xaa is A or G
  MOD_RES (17)..(18)..(19)..(20): Xaa is A or G or is absent

SEQ ID NO: 34223 - protein, 37 aa, Artificial Sequence; identical to SEQ ID NO: 32067
  GFR-binding peptide
  MOD_RES (1)..(35)..(36): Xaa is C or S
  MOD_RES (13)..(14)..(15)..(16)..(17): Xaa is A or G
  MOD_RES (18)..(19)..(20)..(21): Xaa is A or G or is absent

SEQ ID NO: 34224 - protein, 34 aa, Artificial Sequence; identical to SEQ ID NO: 32068
  GFR-binding peptide
  MOD_RES (2)..(34): Xaa is C or S

SEQ ID NO: 34225 - protein, 33 aa, Artificial Sequence; identical to SEQ ID NO: 32069
  GFR-binding peptide
  MOD_RES (1)..(33): Xaa is C or S

SEQ ID NO: 34226 - protein, 35 aa, Artificial Sequence; identical to SEQ ID NO: 32070
  GFR-binding peptide
  MOD_RES (32)..(32): Xaa is C or S

SEQ ID NO: 34227 - protein, 40 aa, Artificial Sequence; identical to SEQ ID NO: 32071
  GFR-binding peptide
  MOD_RES (2)..(4)..(36)..(37): Xaa is C or S

SEQ ID NO: 34228 - protein, 42 aa, Artificial Sequence; identical to SEQ ID NO: 32072
  GFR-binding peptide
  MOD_RES (1)..(3)..(36)..(37): Xaa is C or S
  MOD_RES (14)..(15)..(16)..(17)..(18): Xaa is A or G
  MOD_RES (19)..(20)..(21)..(22): Xaa is A or G or is absent

SEQ ID NO: 34229 - protein, 41 aa, Artificial Sequence; identical to SEQ ID NO: 32073
  GFR-binding peptide
  MOD_RES (1)..(3)..(37)..(38): Xaa is C or S
  MOD_RES (15)..(16)..(17)..(18)..(19): Xaa is A or G
  MOD_RES (20)..(21)..(22)..(23): Xaa is A or G or is absent

SEQ ID NO: 34230 - protein, 40 aa, Artificial Sequence; identical to SEQ ID NO: 32074
  GFR-binding peptide
  MOD_RES (35)..(36): Xaa is C or S
  MOD_RES (13)..(14)..(15)..(16)..(17): Xaa is A or G
  MOD_RES (18)..(19)..(20)..(21): Xaa is A or G or is absent

SEQ ID NO: 34231 - protein, 37 aa, Artificial Sequence; identical to SEQ ID NO: 32075
  GFR-binding peptide
  MOD_RES (33)..(34): Xaa is C or S
  MOD_RES (11)..(12)..(13)..(14)..(15): Xaa is A or G
  MOD_RES (16)..(17)..(18)..(19): Xaa is A or G or is absent

SEQ ID NO: 34232 - protein, 35 aa, Artificial Sequence; identical to SEQ ID NO: 32076
  GFR-binding peptide
  MOD_RES (1)..(35): Xaa is C or S
  MOD_RES (13)..(14)..(15)..(16)..(17): Xaa is A or G
  MOD_RES (18)..(19)..(20)..(21): Xaa is A or G or is absent

SEQ ID NO: 34233 - protein, 36 aa, Artificial Sequence; identical to SEQ ID NO: 32077
  GFR-binding peptide
  MOD_RES (32)..(33): Xaa is C or S

SEQ ID NO: 34234 - protein, 41 aa, Artificial Sequence; identical to SEQ ID NO: 32078
  GFR-binding peptide
  MOD_RES (2)..(4)..(39)..(40): Xaa is C or S
  MOD_RES (17)..(18)..(19)..(20)..(21): Xaa is A or G
  MOD_RES (22)..(23)..(24)..(25): Xaa is A or G or is absent

SEQ ID NO: 34235 - protein, 44 aa, Artificial Sequence; identical to SEQ ID NO: 32079
  GFR-binding peptide
  MOD_RES (2)..(4)..(38)..(39): Xaa is C or S
  MOD_RES (16)..(17)..(18)..(19)..(20): Xaa is A or G
  MOD_RES (21)..(22)..(23)..(24): Xaa is A or G or is absent

SEQ ID NO: 34236 - protein, 41 aa, Artificial Sequence; identical to SEQ ID NO: 32080
  GFR-binding peptide
  MOD_RES (1)..(3)..(37)..(38): Xaa is C or S
  MOD_RES (15)..(16)..(17)..(18)..(19): Xaa is A or G
  MOD_RES (20)..(21)..(22)..(23): Xaa is A or G or is absent

SEQ ID NO: 34237 - protein, 39 aa, Artificial Sequence; identical to SEQ ID NO: 32081
  GFR-binding peptide
  MOD_RES (1)..(3)..(37)..(38): Xaa is C or S
  MOD_RES (15)..(16)..(17)..(18)..(19): Xaa is A or G
  MOD_RES (20)..(21)..(22)..(23): Xaa is A or G or is absent

SEQ ID NO: 34238 - protein, 36 aa, Artificial Sequence; identical to SEQ ID NO: 32082
  GFR-binding peptide
  MOD_RES (2)..(4)..(36): Xaa is C or S

SEQ ID NO: 34239 - protein, 42 aa, Artificial Sequence; identical to SEQ ID NO: 32083
  GFR-binding peptide
  MOD_RES (2)..(4)..(36)..(37): Xaa is C or S

SEQ ID NO: 34240 - protein, 42 aa, Artificial Sequence; identical to SEQ ID NO: 32084
  GFR-binding peptide
  MOD_RES (2)..(36): Xaa is C or S
  MOD_RES (14)..(15)..(16)..(17)..(18): Xaa is A or G
  MOD_RES (19)..(20)..(21)..(22): Xaa is A or G or is absent

SEQ ID NO: 34241 - protein, 35 aa, Artificial Sequence; identical to SEQ ID NO: 32085
  GFR-binding peptide
  MOD_RES (1)..(3)..(35): Xaa is C or S

SEQ ID NO: 34242 - protein, 36 aa, Artificial Sequence; identical to SEQ ID NO: 32086
  GFR-binding peptide
  MOD_RES (2)..(35)..(36): Xaa is C or S

SEQ ID NO: 34243 - protein, 36 aa, Artificial Sequence; identical to SEQ ID NO: 32087
  GFR-binding peptide
  MOD_RES (1)..(34)..(35): Xaa is C or S
  MOD_RES (12)..(13)..(14)..(15)..(16): Xaa is A or G
  MOD_RES (17)..(18)..(19)..(20): Xaa is A or G or is absent

SEQ ID NO: 34244 - protein, 36 aa, Artificial Sequence; identical to SEQ ID NO: 32088
  GFR-binding peptide
  MOD_RES (2)..(36): Xaa is C or S
  MOD_RES (14)..(15)..(16)..(17)..(18): Xaa is A or G
  MOD_RES (19)..(20)..(21)..(22): Xaa is A or G or is absent

SEQ ID NO: 34245 - protein, 40 aa, Artificial Sequence; identical to SEQ ID NO: 32089
  GFR-binding peptide
  MOD_RES (2)..(4)..(38)..(39): Xaa is C or S
  MOD_RES (16)..(17)..(18)..(19)..(20): Xaa is A or G
  MOD_RES (21)..(22)..(23)..(24): Xaa is A or G or is absent

SEQ ID NO: 34246 - protein, 35 aa, Artificial Sequence; identical to SEQ ID NO: 32090
  GFR-binding peptide
  MOD_RES (33)..(34): Xaa is C or S
  MOD_RES (11)..(12)..(13)..(14)..(15): Xaa is A or G
  MOD_RES (16)..(17)..(18)..(19): Xaa is A or G or is absent

SEQ ID NO: 34247 - protein, 40 aa, Artificial Sequence; identical to SEQ ID NO: 32091
  GFR-binding peptide
  MOD_RES (2)..(36)..(37): Xaa is C or S
  MOD_RES (14)..(15)..(16)..(17)..(18): Xaa is A or G
  MOD_RES (19)..(20)..(21)..(22): Xaa is A or G or is absent

SEQ ID NO: 34248 - protein, 39 aa, Artificial Sequence; identical to SEQ ID NO: 32092
  GFR-binding peptide
  MOD_RES (2)..(36)..(37): Xaa is C or S
  MOD_RES (14)..(15)..(16)..(17)..(18): Xaa is A or G
  MOD_RES (19)..(20)..(21)..(22): Xaa is A or G or is absent

SEQ ID NO: 34249 - protein, 37 aa, Artificial Sequence; identical to SEQ ID NO: 32093
  GFR-binding peptide
  MOD_RES (1)..(33)..(34): Xaa is C or S

SEQ ID NO: 34250 - protein, 37 aa, Artificial Sequence; identical to SEQ ID NO: 32094
  GFR-binding peptide
  MOD_RES (1)..(33)..(34): Xaa is C or S

SEQ ID NO: 34251 - protein, 34 aa, Artificial Sequence; identical to SEQ ID NO: 32095
  GFR-binding peptide
  MOD_RES (1)..(1): Xaa is C or S
  MOD_RES (13)..(14)..(15)..(16)..(17): Xaa is A or G
  MOD_RES (18)..(19)..(20)..(21): Xaa is A or G or is absent

SEQ ID NO: 34252 - protein, 40 aa, Artificial Sequence; identical to SEQ ID NO: 32096
  GFR-binding peptide
  MOD_RES (34)..(35): Xaa is C or S
  MOD_RES (12)..(13)..(14)..(15)..(16): Xaa is A or G
  MOD_RES (17)..(18)..(19)..(20): Xaa is A or G or is absent

SEQ ID NO: 34253 - protein, 32 aa, Artificial Sequence; identical to SEQ ID NO: 32097
  GFR-binding peptide
  MOD_RES (1)..(1): Xaa is C or S

SEQ ID NO: 34254 - protein, 33 aa, Artificial Sequence; identical to SEQ ID NO: 32098
  GFR-binding peptide
  MOD_RES (2)..(2): Xaa is C or S

SEQ ID NO: 34255 - protein, 40 aa, Artificial Sequence; identical to SEQ ID NO: 32099
  GFR-binding peptide
  MOD_RES (1)..(35): Xaa is C or S
  MOD_RES (13)..(14)..(15)..(16)..(17): Xaa is A or G
  MOD_RES (18)..(19)..(20)..(21): Xaa is A or G or is absent

SEQ ID NO: 34256 - protein, 37 aa, Artificial Sequence; identical to SEQ ID NO: 32100
  GFR-binding peptide
  MOD_RES (2)..(4): Xaa is C or S
  MOD_RES (16)..(17)..(18)..(19)..(20): Xaa is A or G
  MOD_RES (21)..(22)..(23)..(24): Xaa is A or G or is absent

SEQ ID NO: 34257 - protein, 42 aa, Artificial Sequence; identical to SEQ ID NO: 32101
  GFR-binding peptide
  MOD_RES (2)..(36)..(37): Xaa is C or S
  MOD_RES (14)..(15)..(16)..(17)..(18): Xaa is A or G
  MOD_RES (19)..(20)..(21)..(22): Xaa is A or G or is absent

SEQ ID NO: 34258 - protein, 31 aa, Artificial Sequence; identical to SEQ ID NO: 32102
  GFR-binding peptide
  MOD_RES (31)..(31): Xaa is C or S

SEQ ID NO: 34259 - protein, 39 aa, Artificial Sequence; identical to SEQ ID NO: 32103
  GFR-binding peptide
  MOD_RES (2)..(4)..(38)..(39): Xaa is C or S
  MOD_RES (16)..(17)..(18)..(19)..(20): Xaa is A or G
  MOD_RES (21)..(22)..(23)..(24): Xaa is A or G or is absent

SEQ ID NO: 34260 - protein, 44 aa, Artificial Sequence; identical to SEQ ID NO: 32104
  GFR-binding peptide
  MOD_RES (2)..(4)..(38)..(39): Xaa is C or S
  MOD_RES (16)..(17)..(18)..(19)..(20): Xaa is A or G
  MOD_RES (21)..(22)..(23)..(24): Xaa is A or G or is absent

SEQ ID NO: 34261 - protein, 36 aa, Artificial Sequence; identical to SEQ ID NO: 32105
  GFR-binding peptide
  MOD_RES (1)..(35): Xaa is C or S
  MOD_RES (13)..(14)..(15)..(16)..(17): Xaa is A or G
  MOD_RES (18)..(19)..(20)..(21): Xaa is A or G or is absent

SEQ ID NO: 34262 - protein, 37 aa, Artificial Sequence; identical to SEQ ID NO: 32106
  GFR-binding peptide
  MOD_RES (2)..(4): Xaa is C or S
  MOD_RES (16)..(17)..(18)..(19)..(20): Xaa is A or G
  MOD_RES (21)..(22)..(23)..(24): Xaa is A or G or is absent

SEQ ID NO: 34263 - protein, 39 aa, Artificial Sequence; identical to SEQ ID NO: 32107
  GFR-binding peptide
  MOD_RES (2)..(34)..(35): Xaa is C or S

SEQ ID NO: 34264 - protein, 37 aa, Artificial Sequence; identical to SEQ ID NO: 32108
  GFR-binding peptide
  MOD_RES (1)..(3)..(37): Xaa is C or S
  MOD_RES (15)..(16)..(17)..(18)..(19): Xaa is A or G
  MOD_RES (20)..(21)..(22)..(23): Xaa is A or G or is absent

SEQ ID NO: 34265 - protein, 44 aa, Artificial Sequence; identical to SEQ ID NO: 32109
  GFR-binding peptide
  MOD_RES (2)..(4)..(38)..(39): Xaa is C or S
  MOD_RES (16)..(17)..(18)..(19)..(20): Xaa is A or G
  MOD_RES (21)..(22)..(23)..(24): Xaa is A or G or is absent

SEQ ID NO: 34266 - protein, 33 aa, Artificial Sequence; identical to SEQ ID NO: 32110
  GFR-binding peptide
  MOD_RES (2)..(2): Xaa is C or S

SEQ ID NO: 34267 - protein, 37 aa, Artificial Sequence; identical to SEQ ID NO: 32111
  GFR-binding peptide
  MOD_RES (1)..(3): Xaa is C or S
  MOD_RES (16)..(17)..(18)..(19)..(20): Xaa is A or G
  MOD_RES (21)..(22)..(23)..(24): Xaa is A or G or is absent

SEQ ID NO: 34268 - protein, 37 aa, Artificial Sequence; identical to SEQ ID NO: 32112
  GFR-binding peptide
  MOD_RES (33)..(34): Xaa is C or S
  MOD_RES (11)..(12)..(13)..(14)..(15): Xaa is A or G
  MOD_RES (16)..(17)..(18)..(19): Xaa is A or G or is absent

SEQ ID NO: 34269 - protein, 40 aa, Artificial Sequence; identical to SEQ ID NO: 32113
  GFR-binding peptide
  MOD_RES (34)..(35): Xaa is C or S
  MOD_RES (12)..(13)..(14)..(15)..(16): Xaa is A or G
  MOD_RES (17)..(18)..(19)..(20): Xaa is A or G or is absent

SEQ ID NO: 34270 - protein, 38 aa, Artificial Sequence; identical to SEQ ID NO: 32114
  GFR-binding peptide
  MOD_RES (1)..(3)..(37): Xaa is C or S
  MOD_RES (15)..(16)..(17)..(18)..(19): Xaa is A or G
  MOD_RES (20)..(21)..(22)..(23): Xaa is A or G or is absent

SEQ ID NO: 34271 - protein, 35 aa, Artificial Sequence; identical to SEQ ID NO: 32115
  GFR-binding peptide
  MOD_RES (32)..(33): Xaa is C or S

SEQ ID NO: 34272 - protein, 38 aa, Artificial Sequence; identical to SEQ ID NO: 32116
  GFR-binding peptide
  MOD_RES (1)..(3)..(35): Xaa is C or S

SEQ ID NO: 34273 - protein, 33 aa, Artificial Sequence; identical to SEQ ID NO: 32117
  GFR-binding peptide
  MOD_RES (32)..(33): Xaa is C or S

SEQ ID NO: 34274 - protein, 38 aa, Artificial Sequence; identical to SEQ ID NO: 32118
  GFR-binding peptide
  MOD_RES (32)..(33): Xaa is C or S

SEQ ID NO: 34275 - protein, 40 aa, Artificial Sequence; identical to SEQ ID NO: 32119
  GFR-binding peptide
  MOD_RES (1)..(35)..(36): Xaa is C or S
  MOD_RES (13)..(14)..(15)..(16)..(17): Xaa is A or G
  MOD_RES (18)..(19)..(20)..(21): Xaa is A or G or is absent

SEQ ID NO: 34276 - protein, 39 aa, Artificial Sequence; identical to SEQ ID NO: 32120
  GFR-binding peptide
  MOD_RES (1)..(3)..(35)..(36): Xaa is C or S

SEQ ID NO: 34277 - protein, 31 aa, Artificial Sequence; identical to SEQ ID NO: 32121
  GFR-binding peptide
  MOD_RES (31)..(31): Xaa is C or S

SEQ ID NO: 34278 - protein, 39 aa, Artificial Sequence; identical to SEQ ID NO: 32122
  GFR-binding peptide
  MOD_RES (2)..(4)..(37)..(38): Xaa is C or S
  MOD_RES (15)..(16)..(17)..(18)..(19): Xaa is A or G
  MOD_RES (20)..(21)..(22)..(23): Xaa is A or G or is absent

SEQ ID NO: 34279 - protein, 38 aa, Artificial Sequence; identical to SEQ ID NO: 32123
  GFR-binding peptide
  MOD_RES (34)..(35): Xaa is C or S
  MOD_RES (12)..(13)..(14)..(15)..(16): Xaa is A or G
  MOD_RES (17)..(18)..(19)..(20): Xaa is A or G or is absent

SEQ ID NO: 34280 - protein, 38 aa, Artificial Sequence; identical to SEQ ID NO: 32124
  GFR-binding peptide
  MOD_RES (1)..(33)..(34): Xaa is C or S

SEQ ID NO: 34281 - protein, 37 aa, Artificial Sequence; identical to SEQ ID NO: 32125
  GFR-binding peptide
  MOD_RES (31)..(32): Xaa is C or S

SEQ ID NO: 34282 - protein, 34 aa, Artificial Sequence; identical to SEQ ID NO: 32126
  GFR-binding peptide
  MOD_RES (1)..(1): Xaa is C or S
  MOD_RES (13)..(14)..(15)..(16)..(17): Xaa is A or G
  MOD_RES (18)..(19)..(20)..(21): Xaa is A or G or is absent

SEQ ID NO: 34283 - protein, 38 aa, Artificial Sequence; identical to SEQ ID NO: 32127
  GFR-binding peptide
  MOD_RES (33)..(34): Xaa is C or S
  MOD_RES (11)..(12)..(13)..(14)..(15): Xaa is A or G
  MOD_RES (16)..(17)..(18)..(19): Xaa is A or G or is absent

SEQ ID NO: 34284 - protein, 38 aa, Artificial Sequence; identical to SEQ ID NO: 32128
  GFR-binding peptide
  MOD_RES (2)..(4)..(37)..(38): Xaa is C or S

SEQ ID NO: 34285 - protein, 37 aa, Artificial Sequence; identical to SEQ ID NO: 32129
  GFR-binding peptide
  MOD_RES (2)..(34)..(35): Xaa is C or S

SEQ ID NO: 34286 - protein, 40 aa, Artificial Sequence; identical to SEQ ID NO: 32130
  GFR-binding peptide
  MOD_RES (2)..(36)..(37): Xaa is C or S
  MOD_RES (14)..(15)..(16)..(17)..(18): Xaa is A or G
  MOD_RES (19)..(20)..(21)..(22): Xaa is A or G or is absent

SEQ ID NO: 34287 - protein, 30 aa, Artificial Sequence; identical to SEQ ID NO: 32131
  GFR-binding peptide

SEQ ID NO: 34288 - protein, 41 aa, Artificial Sequence; identical to SEQ ID NO: 32132
  GFR-binding peptide
  MOD_RES (1)..(3)..(36)..(37): Xaa is C or S
  MOD_RES (14)..(15)..(16)..(17)..(18): Xaa is A or G
  MOD_RES (19)..(20)..(21)..(22): Xaa is A or G or is absent

SEQ ID NO: 34289 - protein, 31 aa, Artificial Sequence; identical to SEQ ID NO: 32133
  GFR-binding peptide
  MOD_RES (31)..(31): Xaa is C or S

SEQ ID NO: 34290 - protein, 35 aa, Artificial Sequence; identical to SEQ ID NO: 32134
  GFR-binding peptide
  MOD_RES (33)..(34): Xaa is C or S
  MOD_RES (11)..(12)..(13)..(14)..(15): Xaa is A or G
  MOD_RES (16)..(17)..(18)..(19): Xaa is A or G or is absent

SEQ ID NO: 34291 - protein, 38 aa, Artificial Sequence; identical to SEQ ID NO: 32135
  GFR-binding peptide
  MOD_RES (1)..(3)..(37)..(38): Xaa is C or S
  MOD_RES (15)..(16)..(17)..(18)..(19): Xaa is A or G
  MOD_RES (20)..(21)..(22)..(23): Xaa is A or G or is absent

SEQ ID NO: 34292 - protein, 39 aa, Artificial Sequence; identical to SEQ ID NO: 32136
  GFR-binding peptide
  MOD_RES (2)..(33)..(34): Xaa is C or S

SEQ ID NO: 34293 - protein, 35 aa, Artificial Sequence; identical to SEQ ID NO: 32137
  GFR-binding peptide
  MOD_RES (1)..(3)..(35): Xaa is C or S

SEQ ID NO: 34294 - protein, 37 aa, Artificial Sequence; identical to SEQ ID NO: 32138
  GFR-binding peptide
  MOD_RES (1)..(35)..(36): Xaa is C or S
  MOD_RES (13)..(14)..(15)..(16)..(17): Xaa is A or G
  MOD_RES (18)..(19)..(20)..(21): Xaa is A or G or is absent

SEQ ID NO: 34295 - protein, 33 aa, Artificial Sequence; identical to SEQ ID NO: 32139
  GFR-binding peptide
  MOD_RES (33)..(33): Xaa is C or S
  MOD_RES (11)..(12)..(13)..(14)..(15): Xaa is A or G
  MOD_RES (16)..(17)..(18)..(19): Xaa is A or G or is absent

SEQ ID NO: 34296 - protein, 34 aa, Artificial Sequence; identical to SEQ ID NO: 32140
  GFR-binding peptide
  MOD_RES (31)..(32): Xaa is C or S

SEQ ID NO: 34297 - protein, 34 aa, Artificial Sequence; identical to SEQ ID NO: 32141
  GFR-binding peptide
  MOD_RES (31)..(31): Xaa is C or S

SEQ ID NO: 34298 - protein, 40 aa, Artificial Sequence; identical to SEQ ID NO: 32142
  GFR-binding peptide
  MOD_RES (34)..(35): Xaa is C or S
  MOD_RES (12)..(13)..(14)..(15)..(16): Xaa is A or G
  MOD_RES (17)..(18)..(19)..(20): Xaa is A or G or is absent

SEQ ID NO: 34299 - protein, 38 aa, Artificial Sequence; identical to SEQ ID NO: 32143
  GFR-binding peptide
  MOD_RES (2)..(4)..(38): Xaa is C or S
  MOD_RES (16)..(17)..(18)..(19)..(20): Xaa is A or G
  MOD_RES (21)..(22)..(23)..(24): Xaa is A or G or is absent

SEQ ID NO: 34300 - protein, 35 aa, Artificial Sequence; identical to SEQ ID NO: 32144
  GFR-binding peptide
  MOD_RES (34)..(34): Xaa is C or S
  MOD_RES (12)..(13)..(14)..(15)..(16): Xaa is A or G
  MOD_RES (17)..(18)..(19)..(20): Xaa is A or G or is absent

SEQ ID NO: 34301 - protein, 36 aa, Artificial Sequence; identical to SEQ ID NO: 32145
  GFR-binding peptide
  MOD_RES (1)..(33)..(34): Xaa is C or S

SEQ ID NO: 34302 - protein, 35 aa, Artificial Sequence; identical to SEQ ID NO: 32146
  GFR-binding peptide
  MOD_RES (33)..(34): Xaa is C or S
  MOD_RES (11)..(12)..(13)..(14)..(15): Xaa is A or G
  MOD_RES (16)..(17)..(18)..(19): Xaa is A or G or is absent

SEQ ID NO: 34303 - protein, 32 aa, Artificial Sequence; identical to SEQ ID NO: 32147
  GFR-binding peptide
  MOD_RES (11)..(12)..(13)..(14)..(15): Xaa is A or G
  MOD_RES (16)..(17)..(18)..(19): Xaa is A or G or is absent

SEQ ID NO: 34304 - protein, 36 aa, Artificial Sequence; identical to SEQ ID NO: 32148
  GFR-binding peptide
  MOD_RES (32)..(33): Xaa is C or S

SEQ ID NO: 34305 - protein, 36 aa, Artificial Sequence; identical to SEQ ID NO: 32149
  GFR-binding peptide
  MOD_RES (1)..(33)..(34): Xaa is C or S

SEQ ID NO: 34306 - protein, 36 aa, Artificial Sequence; identical to SEQ ID NO: 32150
  GFR-binding peptide
  MOD_RES (34)..(35): Xaa is C or S
  MOD_RES (12)..(13)..(14)..(15)..(16): Xaa is A or G
  MOD_RES (17)..(18)..(19)..(20): Xaa is A or G or is absent

SEQ ID NO: 34307 - protein, 40 aa, Artificial Sequence; identical to SEQ ID NO: 32151
  GFR-binding peptide
  MOD_RES (34)..(35): Xaa is C or S
  MOD_RES (12)..(13)..(14)..(15)..(16): Xaa is A or G
  MOD_RES (17)..(18)..(19)..(20): Xaa is A or G or is absent

SEQ ID NO: 34308 - protein, 37 aa, Artificial Sequence; identical to SEQ ID NO: 32152
  GFR-binding peptide
  MOD_RES (31)..(31): Xaa is C or S

SEQ ID NO: 34309 - protein, 38 aa, Artificial Sequence; identical to SEQ ID NO: 32153
  GFR-binding peptide
  MOD_RES (1)..(33)..(34): Xaa is C or S

SEQ ID NO: 34310 - protein, 41 aa, Artificial Sequence; identical to SEQ ID NO: 32154
  GFR-binding peptide
  MOD_RES (1)..(35)..(36): Xaa is C or S
  MOD_RES (13)..(14)..(15)..(16)..(17): Xaa is A or G
  MOD_RES (18)..(19)..(20)..(21): Xaa is A or G or is absent

SEQ ID NO: 34311 - protein, 42 aa, Artificial Sequence; identical to SEQ ID NO: 32155
  GFR-binding peptide
  MOD_RES (1)..(3)..(37)..(38): Xaa is C or S
  MOD_RES (15)..(16)..(17)..(18)..(19): Xaa is A or G
  MOD_RES (20)..(21)..(22)..(23): Xaa is A or G or is absent

SEQ ID NO: 34312 - protein, 34 aa, Artificial Sequence; identical to SEQ ID NO: 32156
  GFR-binding peptide
  MOD_RES (33)..(34): Xaa is C or S
  MOD_RES (11)..(12)..(13)..(14)..(15): Xaa is A or G
  MOD_RES (16)..(17)..(18)..(19): Xaa is A or G or is absent

SEQ ID NO: 34313 - protein, 39 aa, Artificial Sequence; identical to SEQ ID NO: 32157
  GFR-binding peptide
  MOD_RES (33)..(34): Xaa is C or S
  MOD_RES (11)..(12)..(13)..(14)..(15): Xaa is A or G
  MOD_RES (16)..(17)..(18)..(19): Xaa is A or G or is absent

SEQ ID NO: 34314 - protein, 38 aa, Artificial Sequence; identical to SEQ ID NO: 32158
  GFR-binding peptide
  MOD_RES (2)..(4)..(36)..(37): Xaa is C or S

SEQ ID NO: 34315 - protein, 41 aa, Artificial Sequence; identical to SEQ ID NO: 32159
  GFR-binding peptide
  MOD_RES (2)..(37)..(38): Xaa is C or S
  MOD_RES (15)..(16)..(17)..(18)..(19): Xaa is A or G
  MOD_RES (20)..(21)..(22)..(23): Xaa is A or G or is absent

SEQ ID NO: 34316 - protein, 41 aa, Artificial Sequence; identical to SEQ ID NO: 32160
  GFR-binding peptide
  MOD_RES (2)..(4)..(36)..(37): Xaa is C or S

SEQ ID NO: 34317 - protein, 39 aa, Artificial Sequence; identical to SEQ ID NO: 32161
  GFR-binding peptide
  MOD_RES (1)..(35)..(36): Xaa is C or S
  MOD_RES (13)..(14)..(15)..(16)..(17): Xaa is A or G
  MOD_RES (18)..(19)..(20)..(21): Xaa is A or G or is absent

SEQ ID NO: 34318 - protein, 41 aa, Artificial Sequence; identical to SEQ ID NO: 32162
  GFR-binding peptide
  MOD_RES (1)..(35)..(36): Xaa is C or S
  MOD_RES (13)..(14)..(15)..(16)..(17): Xaa is A or G
  MOD_RES (18)..(19)..(20)..(21): Xaa is A or G or is absent

SEQ ID NO: 34319 - protein, 35 aa, Artificial Sequence; identical to SEQ ID NO: 32163
  GFR-binding peptide
  MOD_RES (2)..(34)..(35): Xaa is C or S

SEQ ID NO: 34320 - protein, 33 aa, Artificial Sequence; identical to SEQ ID NO: 32164
  GFR-binding peptide
  MOD_RES (1)..(1): Xaa is C or S

SEQ ID NO: 34321 - protein, 40 aa, Artificial Sequence; identical to SEQ ID NO: 32165
  GFR-binding peptide
  MOD_RES (2)..(4)..(38)..(39): Xaa is C or S
  MOD_RES (16)..(17)..(18)..(19)..(20): Xaa is A or G
  MOD_RES (21)..(22)..(23)..(24): Xaa is A or G or is absent

SEQ ID NO: 34322 - protein, 36 aa, Artificial Sequence; identical to SEQ ID NO: 32166
  GFR-binding peptide
  MOD_RES (31)..(32): Xaa is C or S

SEQ ID NO: 34323 - protein, 34 aa, Artificial Sequence; identical to SEQ ID NO: 32167
  GFR-binding peptide
  MOD_RES (1)..(34): Xaa is C or S

SEQ ID NO: 34324 - protein, 39 aa, Artificial Sequence; identical to SEQ ID NO: 32168
  GFR-binding peptide
  MOD_RES (1)..(33)..(34): Xaa is C or S

SEQ ID NO: 34325 - protein, 33 aa, Artificial Sequence; identical to SEQ ID NO: 32169
  GFR-binding peptide
  MOD_RES (2)..(2): Xaa is C or S

SEQ ID NO: 34326 - protein, 34 aa, Artificial Sequence; identical to SEQ ID NO: 32170
  GFR-binding peptide
  MOD_RES (2)..(34): Xaa is C or S

SEQ ID NO: 34327 - protein, 38 aa, Artificial Sequence; identical to SEQ ID NO: 32171
  GFR-binding peptide
  MOD_RES (1)..(34)..(35): Xaa is C or S
  MOD_RES (12)..(13)..(14)..(15)..(16): Xaa is A or G
  MOD_RES (17)..(18)..(19)..(20): Xaa is A or G or is absent

SEQ ID NO: 34328 - protein, 41 aa, Artificial Sequence; identical to SEQ ID NO: 32172
  GFR-binding peptide
  MOD_RES (1)..(35)..(36): Xaa is C or S
  MOD_RES (13)..(14)..(15)..(16)..(17): Xaa is A or G
  MOD_RES (18)..(19)..(20)..(21): Xaa is A or G or is absent

SEQ ID NO: 34329 - protein, 35 aa, Artificial Sequence; identical to SEQ ID NO: 32173
  GFR-binding peptide
  MOD_RES (2)..(34)..(35): Xaa is C or S

SEQ ID NO: 34330 - protein, 41 aa, Artificial Sequence; identical to SEQ ID NO: 32174
  GFR-binding peptide
  MOD_RES (2)..(4)..(38)..(39): Xaa is C or S
  MOD_RES (16)..(17)..(18)..(19)..(20): Xaa is A or G
  MOD_RES (21)..(22)..(23)..(24): Xaa is A or G or is absent

SEQ ID NO: 34331 - protein, 39 aa, Artificial Sequence; identical to SEQ ID NO: 32175
  GFR-binding peptide
  MOD_RES (33)..(34): Xaa is C or S
  MOD_RES (11)..(12)..(13)..(14)..(15): Xaa is A or G
  MOD_RES (16)..(17)..(18)..(19): Xaa is A or G or is absent

SEQ ID NO: 34332 - protein, 37 aa, Artificial Sequence; identical to SEQ ID NO: 32176
  GFR-binding peptide
  MOD_RES (1)..(33)..(34): Xaa is C or S

SEQ ID NO: 34333 - protein, 40 aa, Artificial Sequence; identical to SEQ ID NO: 32177
  GFR-binding peptide
  MOD_RES (2)..(34)..(35): Xaa is C or S

SEQ ID NO: 34334 - protein, 34 aa, Artificial Sequence; identical to SEQ ID NO: 32178
  GFR-binding peptide
  MOD_RES (32)..(33): Xaa is C or S

SEQ ID NO: 34335 - protein, 40 aa, Artificial Sequence; identical to SEQ ID NO: 32179
  GFR-binding peptide
  MOD_RES (2)..(36)..(37): Xaa is C or S
  MOD_RES (14)..(15)..(16)..(17)..(18): Xaa is A or G
  MOD_RES (19)..(20)..(21)..(22): Xaa is A or G or is absent

SEQ ID NO: 34336 - protein, 37 aa, Artificial Sequence; identical to SEQ ID NO: 32180
  GFR-binding peptide
  MOD_RES (32)..(32): Xaa is C or S

SEQ ID NO: 34337 - protein, 36 aa, Artificial Sequence; identical to SEQ ID NO: 32181
  GFR-binding peptide
  MOD_RES (33)..(33): Xaa is C or S
  MOD_RES (11)..(12)..(13)..(14)..(15): Xaa is A or G
  MOD_RES (16)..(17)..(18)..(19): Xaa is A or G or is absent

SEQ ID NO: 34338 - protein, 40 aa, Artificial Sequence; identical to SEQ ID NO: 32182
  GFR-binding peptide
  MOD_RES (2)..(36)..(37): Xaa is C or S
  MOD_RES (14)..(15)..(16)..(17)..(18): Xaa is A or G
  MOD_RES (19)..(20)..(21)..(22): Xaa is A or G or is absent

SEQ ID NO: 34339 - protein, 40 aa, Artificial Sequence; identical to SEQ ID NO: 32183
  GFR-binding peptide
  MOD_RES (1)..(35)..(36): Xaa is C or S
  MOD_RES (13)..(14)..(15)..(16)..(17): Xaa is A or G
  MOD_RES (18)..(19)..(20)..(21): Xaa is A or G or is absent

SEQ ID NO: 34340 - protein, 38 aa, Artificial Sequence; identical to SEQ ID NO: 32184
  GFR-binding peptide
  MOD_RES (2)..(34)..(35): Xaa is C or S

SEQ ID NO: 34341 - protein, 31 aa, Artificial Sequence; identical to SEQ ID NO: 32185
  GFR-binding peptide

SEQ ID NO: 34342 - protein, 39 aa, Artificial Sequence; identical to SEQ ID NO: 32186
  GFR-binding peptide
  MOD_RES (1)..(33)..(34): Xaa is C or S

SEQ ID NO: 34343 - protein, 38 aa, Artificial Sequence; identical to SEQ ID NO: 32187
  GFR-binding peptide
  MOD_RES (2)..(4)..(38): Xaa is C or S
  MOD_RES (16)..(17)..(18)..(19)..(20): Xaa is A or G
  MOD_RES (21)..(22)..(23)..(24): Xaa is A or G or is absent

SEQ ID NO: 34344 - protein, 39 aa, Artificial Sequence; identical to SEQ ID NO: 32188
  GFR-binding peptide
  MOD_RES (2)..(4)..(36)..(37): Xaa is C or S

SEQ ID NO: 34345 - protein, 37 aa, Artificial Sequence; identical to SEQ ID NO: 32189
  GFR-binding peptide
  MOD_RES (2)..(37): Xaa is C or S
  MOD_RES (15)..(16)..(17)..(18)..(19): Xaa is A or G
  MOD_RES (20)..(21)..(22)..(23): Xaa is A or G or is absent

SEQ ID NO: 34346 - protein, 41 aa, Artificial Sequence; identical to SEQ ID NO: 32190
  GFR-binding peptide
  MOD_RES (2)..(36)..(37): Xaa is C or S
  MOD_RES (14)..(15)..(16)..(17)..(18): Xaa is A or G
  MOD_RES (19)..(20)..(21)..(22): Xaa is A or G or is absent

SEQ ID NO: 34347 - protein, 42 aa, Artificial Sequence; identical to SEQ ID NO: 32191
  GFR-binding peptide
  MOD_RES (1)..(3)..(37)..(38): Xaa is C or S
  MOD_RES (15)..(16)..(17)..(18)..(19): Xaa is A or G
  MOD_RES (20)..(21)..(22)..(23): Xaa is A or G or is absent

SEQ ID NO: 34348 - protein, 31 aa, Artificial Sequence; identical to SEQ ID NO: 32192
  GFR-binding peptide
  MOD_RES (31)..(31): Xaa is C or S

SEQ ID NO: 34349 - protein, 36 aa, Artificial Sequence; identical to SEQ ID NO: 32193
  GFR-binding peptide
  MOD_RES (33)..(34): Xaa is C or S
  MOD_RES (11)..(12)..(13)..(14)..(15): Xaa is A or G
  MOD_RES (16)..(17)..(18)..(19): Xaa is A or G or is absent

SEQ ID NO: 34350 - protein, 41 aa, Artificial Sequence; identical to SEQ ID NO: 32194
  GFR-binding peptide
  MOD_RES (1)..(35)..(36): Xaa is C or S
  MOD_RES (13)..(14)..(15)..(16)..(17): Xaa is A or G
  MOD_RES (18)..(19)..(20)..(21): Xaa is A or G or is absent

SEQ ID NO: 34351 - protein, 39 aa, Artificial Sequence; identical to SEQ ID NO: 32195
  GFR-binding peptide
  MOD_RES (2)..(4)..(38)..(39): Xaa is C or S
  MOD_RES (16)..(17)..(18)..(19)..(20): Xaa is A or G
  MOD_RES (21)..(22)..(23)..(24): Xaa is A or G or is absent

SEQ ID NO: 34352 - protein, 41 aa, Artificial Sequence; identical to SEQ ID NO: 32196
  GFR-binding peptide
  MOD_RES (1)..(35)..(36): Xaa is C or S
  MOD_RES (13)..(14)..(15)..(16)..(17): Xaa is A or G
  MOD_RES (18)..(19)..(20)..(21): Xaa is A or G or is absent

SEQ ID NO: 34353 - protein, 33 aa, Artificial Sequence; identical to SEQ ID NO: 32197
  GFR-binding peptide
  MOD_RES (31)..(32): Xaa is C or S

SEQ ID NO: 34354 - protein, 30 aa, Artificial Sequence; identical to SEQ ID NO: 32198
  GFR-binding peptide

SEQ ID NO: 34355 - protein, 33 aa, Artificial Sequence; identical to SEQ ID NO: 32199
  GFR-binding peptide
  MOD_RES (33)..(33): Xaa is C or S
  MOD_RES (11)..(12)..(13)..(14)..(15): Xaa is A or G
  MOD_RES (16)..(17)..(18)..(19): Xaa is A or G or is absent

SEQ ID NO: 34356 - protein, 34 aa, Artificial Sequence; identical to SEQ ID NO: 32200
  GFR-binding peptide
  MOD_RES (1)..(1): Xaa is C or S
  MOD_RES (13)..(14)..(15)..(16)..(17): Xaa is A or G
  MOD_RES (18)..(19)..(20)..(21): Xaa is A or G or is absent

SEQ ID NO: 34357 - protein, 42 aa, Artificial Sequence; identical to SEQ ID NO: 32201
  GFR-binding peptide
  MOD_RES (2)..(36)..(37): Xaa is C or S
  MOD_RES (14)..(15)..(16)..(17)..(18): Xaa is A or G
  MOD_RES (19)..(20)..(21)..(22): Xaa is A or G or is absent

SEQ ID NO: 34358 - protein, 40 aa, Artificial Sequence; identical to SEQ ID NO: 32202
  GFR-binding peptide
  MOD_RES (2)..(37)..(38): Xaa is C or S
  MOD_RES (15)..(16)..(17)..(18)..(19): Xaa is A or G
  MOD_RES (20)..(21)..(22)..(23): Xaa is A or G or is absent

SEQ ID NO: 34359 - protein, 36 aa, Artificial Sequence; identical to SEQ ID NO: 32203
  GFR-binding peptide
  MOD_RES (31)..(32): Xaa is C or S

SEQ ID NO: 34360 - protein, 32 aa, Artificial Sequence; identical to SEQ ID NO: 32204
  GFR-binding peptide
  MOD_RES (31)..(32): Xaa is C or S

SEQ ID NO: 34361 - protein, 36 aa, Artificial Sequence; identical to SEQ ID NO: 32205
  GFR-binding peptide
  MOD_RES (1)..(32)..(33): Xaa is C or S

SEQ ID NO: 34362 - protein, 35 aa, Artificial Sequence; identical to SEQ ID NO: 32206
  GFR-binding peptide
  MOD_RES (1)..(33)..(34): Xaa is C or S

SEQ ID NO: 34363 - protein, 36 aa, Artificial Sequence; identical to SEQ ID NO: 32207
  GFR-binding peptide
  MOD_RES (33)..(34): Xaa is C or S
  MOD_RES (11)..(12)..(13)..(14)..(15): Xaa is A or G
  MOD_RES (16)..(17)..(18)..(19): Xaa is A or G or is absent

SEQ ID NO: 34364 - protein, 31 aa, Artificial Sequence; identical to SEQ ID NO: 32208
  GFR-binding peptide
  MOD_RES (31)..(31): Xaa is C or S

SEQ ID NO: 34365 - protein, 38 aa, Artificial Sequence; identical to SEQ ID NO: 32209
  GFR-binding peptide
  MOD_RES (1)..(3)..(37)..(38): Xaa is C or S
  MOD_RES (15)..(16)..(17)..(18)..(19): Xaa is A or G
  MOD_RES (20)..(21)..(22)..(23): Xaa is A or G or is absent

SEQ ID NO: 34366 - protein, 33 aa, Artificial Sequence; identical to SEQ ID NO: 32210
  GFR-binding peptide
  MOD_RES (32)..(33): Xaa is C or S

SEQ ID NO: 34367 - protein, 33 aa, Artificial Sequence; identical to SEQ ID NO: 32211
  GFR-binding peptide
  MOD_RES (1)..(33): Xaa is C or S

SEQ ID NO: 34368 - protein, 34 aa, Artificial Sequence; identical to SEQ ID NO: 32212
  GFR-binding peptide
  MOD_RES (34)..(34): Xaa is C or S
  MOD_RES (12)..(13)..(14)..(15)..(16): Xaa is A or G
  MOD_RES (17)..(18)..(19)..(20): Xaa is A or G or is absent

SEQ ID NO: 34369 - protein, 40 aa, Artificial Sequence; identical to SEQ ID NO: 32213
  GFR-binding peptide
  MOD_RES (2)..(4)..(38)..(39): Xaa is C or S
  MOD_RES (16)..(17)..(18)..(19)..(20): Xaa is A or G
  MOD_RES (21)..(22)..(23)..(24): Xaa is A or G or is absent

SEQ ID NO: 34370 - protein, 40 aa, Artificial Sequence; identical to SEQ ID NO: 32214
  GFR-binding peptide
  MOD_RES (2)..(4)..(36)..(37): Xaa is C or S

SEQ ID NO: 34371 - protein, 34 aa, Artificial Sequence; identical to SEQ ID NO: 32215
  GFR-binding peptide
  MOD_RES (31)..(32): Xaa is C or S

SEQ ID NO: 34372 - protein, 42 aa, Artificial Sequence; identical to SEQ ID NO: 32216
  GFR-binding peptide
  MOD_RES (2)..(36)..(37): Xaa is C or S
  MOD_RES (14)..(15)..(16)..(17)..(18): Xaa is A or G
  MOD_RES (19)..(20)..(21)..(22): Xaa is A or G or is absent

SEQ ID NO: 34373 - protein, 38 aa, Artificial Sequence; identical to SEQ ID NO: 32217
  GFR-binding peptide
  MOD_RES (1)..(3)..(37)..(38): Xaa is C or S
  MOD_RES (15)..(16)..(17)..(18)..(19): Xaa is A or G
  MOD_RES (20)..(21)..(22)..(23): Xaa is A or G or is absent

SEQ ID NO: 34374 - protein, 36 aa, Artificial Sequence; identical to SEQ ID NO: 32218
  GFR-binding peptide
  MOD_RES (1)..(33)..(34): Xaa is C or S

SEQ ID NO: 34375 - protein, 39 aa, Artificial Sequence; identical to SEQ ID NO: 32219
  GFR-binding peptide
  MOD_RES (1)..(3)..(37)..(38): Xaa is C or S
  MOD_RES (15)..(16)..(17)..(18)..(19): Xaa is A or G
  MOD_RES (20)..(21)..(22)..(23): Xaa is A or G or is absent

SEQ ID NO: 34376 - protein, 35 aa, Artificial Sequence; identical to SEQ ID NO: 32220
  GFR-binding peptide
  MOD_RES (2)..(4): Xaa is C or S

SEQ ID NO: 34377 - protein, 38 aa, Artificial Sequence; identical to SEQ ID NO: 32221
  GFR-binding peptide
  MOD_RES (1)..(3)..(35)..(36): Xaa is C or S

SEQ ID NO: 34378 - protein, 37 aa, Artificial Sequence; identical to SEQ ID NO: 32222
  GFR-binding peptide
  MOD_RES (31)..(32): Xaa is C or S

SEQ ID NO: 34379 - protein, 38 aa, Artificial Sequence; identical to SEQ ID NO: 32223
  GFR-binding peptide
  MOD_RES (2)..(4)..(36)..(37): Xaa is C or S

SEQ ID NO: 34380 - protein, 39 aa, Artificial Sequence; identical to SEQ ID NO: 32224
  GFR-binding peptide
  MOD_RES (33)..(34): Xaa is C or S
  MOD_RES (11)..(12)..(13)..(14)..(15): Xaa is A or G
  MOD_RES (16)..(17)..(18)..(19): Xaa is A or G or is absent

SEQ ID NO: 34381 - protein, 38 aa, Artificial Sequence; identical to SEQ ID NO: 32225
  GFR-binding peptide
  MOD_RES (2)..(4)..(36)..(37): Xaa is C or S

SEQ ID NO: 34382 - protein, 39 aa, Artificial Sequence; identical to SEQ ID NO: 32226
  GFR-binding peptide
  MOD_RES (2)..(4)..(36): Xaa is C or S

SEQ ID NO: 34383 - protein, 40 aa, Artificial Sequence; identical to SEQ ID NO: 32227
  GFR-binding peptide
  MOD_RES (2)..(36)..(37): Xaa is C or S
  MOD_RES (14)..(15)..(16)..(17)..(18): Xaa is A or G
  MOD_RES (19)..(20)..(21)..(22): Xaa is A or G or is absent

SEQ ID NO: 34384 - protein, 38 aa, Artificial Sequence; identical to SEQ ID NO: 32228
  GFR-binding peptide
  MOD_RES (33)..(34): Xaa is C or S
  MOD_RES (11)..(12)..(13)..(14)..(15): Xaa is A or G
  MOD_RES (16)..(17)..(18)..(19): Xaa is A or G or is absent

SEQ ID NO: 34385 - protein, 35 aa, Artificial Sequence; identical to SEQ ID NO: 32229
  GFR-binding peptide
  MOD_RES (2)..(2): Xaa is C or S
  MOD_RES (14)..(15)..(16)..(17)..(18): Xaa is A or G
  MOD_RES (19)..(20)..(21)..(22): Xaa is A or G or is absent

SEQ ID NO: 34386 - protein, 41 aa, Artificial Sequence; identical to SEQ ID NO: 32230
  GFR-binding peptide
  MOD_RES (2)..(35)..(36): Xaa is C or S
  MOD_RES (13)..(14)..(15)..(16)..(17): Xaa is A or G
  MOD_RES (18)..(19)..(20)..(21): Xaa is A or G or is absent

SEQ ID NO: 34387 - protein, 43 aa, Artificial Sequence; identical to SEQ ID NO: 32231
  GFR-binding peptide
  MOD_RES (2)..(4)..(38)..(39): Xaa is C or S
  MOD_RES (16)..(17)..(18)..(19)..(20): Xaa is A or G
  MOD_RES (21)..(22)..(23)..(24): Xaa is A or G or is absent

SEQ ID NO: 34388 - protein, 34 aa, Artificial Sequence; identical to SEQ ID NO: 32232
  GFR-binding peptide
  MOD_RES (33)..(34): Xaa is C or S
  MOD_RES (11)..(12)..(13)..(14)..(15): Xaa is A or G
  MOD_RES (16)..(17)..(18)..(19): Xaa is A or G or is absent

SEQ ID NO: 34389 - protein, 42 aa, Artificial Sequence; identical to SEQ ID NO: 32233
  GFR-binding peptide
  MOD_RES (2)..(36)..(37): Xaa is C or S
  MOD_RES (14)..(15)..(16)..(17)..(18): Xaa is A or G
  MOD_RES (19)..(20)..(21)..(22): Xaa is A or G or is absent

SEQ ID NO: 34390 - protein, 39 aa, Artificial Sequence; identical to SEQ ID NO: 32234
  GFR-binding peptide
  MOD_RES (2)..(34)..(35): Xaa is C or S

SEQ ID NO: 34391 - protein, 39 aa, Artificial Sequence; identical to SEQ ID NO: 32235
  GFR-binding peptide
  MOD_RES (34)..(35): Xaa is C or S
  MOD_RES (12)..(13)..(14)..(15)..(16): Xaa is A or G
  MOD_RES (17)..(18)..(19)..(20): Xaa is A or G or is absent

SEQ ID NO: 34392 - protein, 39 aa, Artificial Sequence; identical to SEQ ID NO: 32236
  GFR-binding peptide
  MOD_RES (1)..(33)..(34): Xaa is C or S

SEQ ID NO: 34393 - protein, 38 aa, Artificial Sequence; identical to SEQ ID NO: 32237
  GFR-binding peptide
  MOD_RES (1)..(35)..(36): Xaa is C or S
  MOD_RES (13)..(14)..(15)..(16)..(17): Xaa is A or G
  MOD_RES (18)..(19)..(20)..(21): Xaa is A or G or is absent

SEQ ID NO: 34394 - protein, 40 aa, Artificial Sequence; identical to SEQ ID NO: 32238
  GFR-binding peptide
  MOD_RES (1)..(35)..(36): Xaa is C or S
  MOD_RES (13)..(14)..(15)..(16)..(17): Xaa is A or G
  MOD_RES (18)..(19)..(20)..(21): Xaa is A or G or is absent

SEQ ID NO: 34395 - protein, 40 aa, Artificial Sequence; identical to SEQ ID NO: 32239
  GFR-binding peptide
  MOD_RES (2)..(4)..(37)..(38): Xaa is C or S

SEQ ID NO: 34396 - protein, 36 aa, Artificial Sequence; identical to SEQ ID NO: 32240
  GFR-binding peptide
  MOD_RES (1)..(35)..(36): Xaa is C or S
  MOD_RES (13)..(14)..(15)..(16)..(17): Xaa is A or G
  MOD_RES (18)..(19)..(20)..(21): Xaa is A or G or is absent

SEQ ID NO: 34397 - protein, 38 aa, Artificial Sequence; identical to SEQ ID NO: 32241
  GFR-binding peptide
  MOD_RES (1)..(3)..(37)..(38): Xaa is C or S
  MOD_RES (15)..(16)..(17)..(18)..(19): Xaa is A or G
  MOD_RES (20)..(21)..(22)..(23): Xaa is A or G or is absent

SEQ ID NO: 34398 - protein, 37 aa, Artificial Sequence; identical to SEQ ID NO: 32242
  GFR-binding peptide
  MOD_RES (32)..(33): Xaa is C or S

SEQ ID NO: 34399 - protein, 40 aa, Artificial Sequence; identical to SEQ ID NO: 32243
  GFR-binding peptide
  MOD_RES (2)..(35)..(36): Xaa is C or S
  MOD_RES (13)..(14)..(15)..(16)..(17): Xaa is A or G
  MOD_RES (18)..(19)..(20)..(21): Xaa is A or G or is absent

SEQ ID NO: 34400 - protein, 37 aa, Artificial Sequence; identical to SEQ ID NO: 32244
  GFR-binding peptide
  MOD_RES (31)..(32): Xaa is C or S

SEQ ID NO: 34401 - protein, 35 aa, Artificial Sequence; identical to SEQ ID NO: 32245
  GFR-binding peptide
  MOD_RES (1)..(35): Xaa is C or S
  MOD_RES (13)..(14)..(15)..(16)..(17): Xaa is A or G
  MOD_RES (18)..(19)..(20)..(21): Xaa is A or G or is absent

SEQ ID NO: 34402 - protein, 42 aa, Artificial Sequence; identical to SEQ ID NO: 32246
  GFR-binding peptide
  MOD_RES (2)..(4)..(38)..(39): Xaa is C or S
  MOD_RES (16)..(17)..(18)..(19)..(20): Xaa is A or G
  MOD_RES (21)..(22)..(23)..(24): Xaa is A or G or is absent

SEQ ID NO: 34403 - protein, 36 aa, Artificial Sequence; identical to SEQ ID NO: 32247
  GFR-binding peptide
  MOD_RES (34)..(35): Xaa is C or S
  MOD_RES (12)..(13)..(14)..(15)..(16): Xaa is A or G
  MOD_RES (17)..(18)..(19)..(20): Xaa is A or G or is absent

SEQ ID NO: 34404 - protein, 34 aa, Artificial Sequence; identical to SEQ ID NO: 32248
  GFR-binding peptide
  MOD_RES (31)..(32): Xaa is C or S

SEQ ID NO: 34405 - protein, 31 aa, Artificial Sequence; identical to SEQ ID NO: 32249
  GFR-binding peptide

SEQ ID NO: 34406 - protein, 33 aa, Artificial Sequence; identical to SEQ ID NO: 32250
  GFR-binding peptide
  MOD_RES (32)..(33): Xaa is C or S

SEQ ID NO: 34407 - protein, 37 aa, Artificial Sequence; identical to SEQ ID NO: 32251
  GFR-binding peptide
  MOD_RES (2)..(4)..(36)..(37): Xaa is C or S

SEQ ID NO: 34408 - protein, 32 aa, Artificial Sequence; identical to SEQ ID NO: 32252
  GFR-binding peptide
  MOD_RES (31)..(32): Xaa is C or S

SEQ ID NO: 34409 - protein, 35 aa, Artificial Sequence; identical to SEQ ID NO: 32253
  GFR-binding peptide
  MOD_RES (2)..(4)..(35): Xaa is C or S

SEQ ID NO: 34410 - protein, 34 aa, Artificial Sequence; identical to SEQ ID NO: 32254
  GFR-binding peptide
  MOD_RES (34)..(34): Xaa is C or S
  MOD_RES (12)..(13)..(14)..(15)..(16): Xaa is A or G
  MOD_RES (17)..(18)..(19)..(20): Xaa is A or G or is absent

SEQ ID NO: 34411 - protein, 38 aa, Artificial Sequence; identical to SEQ ID NO: 32255
  GFR-binding peptide
  MOD_RES (1)..(34)..(35): Xaa is C or S

SEQ ID NO: 34412 - protein, 33 aa, Artificial Sequence; identical to SEQ ID NO: 32256
  GFR-binding peptide
  MOD_RES (31)..(31): Xaa is C or S

SEQ ID NO: 34413 - protein, 38 aa, Artificial Sequence; identical to SEQ ID NO: 32257
  GFR-binding peptide
  MOD_RES (2)..(36)..(37): Xaa is C or S
  MOD_RES (14)..(15)..(16)..(17)..(18): Xaa is A or G
  MOD_RES (19)..(20)..(21)..(22): Xaa is A or G or is absent

SEQ ID NO: 34414 - protein, 44 aa, Artificial Sequence; identical to SEQ ID NO: 32258
  GFR-binding peptide
  MOD_RES (2)..(4)..(39)..(40): Xaa is C or S
  MOD_RES (17)..(18)..(19)..(20)..(21): Xaa is A or G
  MOD_RES (22)..(23)..(24)..(25): Xaa is A or G or is absent

SEQ ID NO: 34415 - protein, 35 aa, Artificial Sequence; identical to SEQ ID NO: 32259
  GFR-binding peptide
  MOD_RES (1)..(3)..(35): Xaa is C or S

SEQ ID NO: 34416 - protein, 39 aa, Artificial Sequence; identical to SEQ ID NO: 32260
  GFR-binding peptide
  MOD_RES (2)..(34)..(35): Xaa is C or S

SEQ ID NO: 34417 - protein, 42 aa, Artificial Sequence; identical to SEQ ID NO: 32261
  GFR-binding peptide
  MOD_RES (2)..(4)..(36)..(37): Xaa is C or S

SEQ ID NO: 34418 - protein, 42 aa, Artificial Sequence; identical to SEQ ID NO: 32262
  GFR-binding peptide
  MOD_RES (2)..(36)..(37): Xaa is C or S
  MOD_RES (14)..(15)..(16)..(17)..(18): Xaa is A or G
  MOD_RES (19)..(20)..(21)..(22): Xaa is A or G or is absent

SEQ ID NO: 34419 - protein, 32 aa, Artificial Sequence; identical to SEQ ID NO: 32263
  GFR-binding peptide
  MOD_RES (31)..(32): Xaa is C or S

SEQ ID NO: 34420 - protein, 39 aa, Artificial Sequence; identical to SEQ ID NO: 32264
  GFR-binding peptide
  MOD_RES (1)..(36)..(37): Xaa is C or S
  MOD_RES (14)..(15)..(16)..(17)..(18): Xaa is A or G
  MOD_RES (19)..(20)..(21)..(22): Xaa is A or G or is absent

SEQ ID NO: 34421 - protein, 36 aa, Artificial Sequence; identical to SEQ ID NO: 32265
  GFR-binding peptide
  MOD_RES (1)..(3): Xaa is C or S
  MOD_RES (15)..(16)..(17)..(18)..(19): Xaa is A or G
  MOD_RES (20)..(21)..(22)..(23): Xaa is A or G or is absent

SEQ ID NO: 34422 - protein, 35 aa, Artificial Sequence; identical to SEQ ID NO: 32266
  GFR-binding peptide
  MOD_RES (1)..(33): Xaa is C or S

SEQ ID NO: 34423 - protein, 34 aa, Artificial Sequence; identical to SEQ ID NO: 32267
  GFR-binding peptide
  MOD_RES (34)..(34): Xaa is C or S
  MOD_RES (12)..(13)..(14)..(15)..(16): Xaa is A or G
  MOD_RES (17)..(18)..(19)..(20): Xaa is A or G or is absent

SEQ ID NO: 34424 - protein, 38 aa, Artificial Sequence; identical to SEQ ID NO: 32268
  GFR-binding peptide
  MOD_RES (2)..(36)..(37): Xaa is C or S
  MOD_RES (14)..(15)..(16)..(17)..(18): Xaa is A or G
  MOD_RES (19)..(20)..(21)..(22): Xaa is A or G or is absent

SEQ ID NO: 34425 - protein, 34 aa, Artificial Sequence; identical to SEQ ID NO: 32269
  GFR-binding peptide
  MOD_RES (34)..(34): Xaa is C or S
  MOD_RES (12)..(13)..(14)..(15)..(16): Xaa is A or G
  MOD_RES (17)..(18)..(19)..(20): Xaa is A or G or is absent

SEQ ID NO: 34426 - protein, 40 aa, Artificial Sequence; identical to SEQ ID NO: 32270
  GFR-binding peptide
  MOD_RES (2)..(34)..(35): Xaa is C or S

SEQ ID NO: 34427 - protein, 40 aa, Artificial Sequence; identical to SEQ ID NO: 32271
  GFR-binding peptide
  MOD_RES (34)..(35): Xaa is C or S
  MOD_RES (12)..(13)..(14)..(15)..(16): Xaa is A or G
  MOD_RES (17)..(18)..(19)..(20): Xaa is A or G or is absent

SEQ ID NO: 34428 - protein, 39 aa, Artificial Sequence; identical to SEQ ID NO: 32272
  GFR-binding peptide
  MOD_RES (1)..(35)..(36): Xaa is C or S
  MOD_RES (13)..(14)..(15)..(16)..(17): Xaa is A or G
  MOD_RES (18)..(19)..(20)..(21): Xaa is A or G or is absent

SEQ ID NO: 34429 - protein, 41 aa, Artificial Sequence; identical to SEQ ID NO: 32273
  GFR-binding peptide
  MOD_RES (2)..(4)..(37)..(38): Xaa is C or S
  MOD_RES (15)..(16)..(17)..(18)..(19): Xaa is A or G
  MOD_RES (20)..(21)..(22)..(23): Xaa is A or G or is absent

SEQ ID NO: 34430 - protein, 35 aa, Artificial Sequence; identical to SEQ ID NO: 32274
  GFR-binding peptide
  MOD_RES (33)..(34): Xaa is C or S
  MOD_RES (11)..(12)..(13)..(14)..(15): Xaa is A or G
  MOD_RES (16)..(17)..(18)..(19): Xaa is A or G or is absent

SEQ ID NO: 34431 - protein, 31 aa, Artificial Sequence; identical to SEQ ID NO: 32275
  GFR-binding peptide

SEQ ID NO: 34432 - protein, 39 aa, Artificial Sequence; identical to SEQ ID NO: 32276
  GFR-binding peptide
  MOD_RES (33)..(34): Xaa is C or S
  MOD_RES (11)..(12)..(13)..(14)..(15): Xaa is A or G
  MOD_RES (16)..(17)..(18)..(19): Xaa is A or G or is absent

SEQ ID NO: 34433 - protein, 42 aa, Artificial Sequence; identical to SEQ ID NO: 32277
  GFR-binding peptide
  MOD_RES (1)..(3)..(37)..(38): Xaa is C or S
  MOD_RES (15)..(16)..(17)..(18)..(19): Xaa is A or G
  MOD_RES (20)..(21)..(22)..(23): Xaa is A or G or is absent

SEQ ID NO: 34434 - protein, 34 aa, Artificial Sequence; identical to SEQ ID NO: 32278
  GFR-binding peptide
  MOD_RES (33)..(34): Xaa is C or S
  MOD_RES (11)..(12)..(13)..(14)..(15): Xaa is A or G
  MOD_RES (16)..(17)..(18)..(19): Xaa is A or G or is absent

SEQ ID NO: 34435 - protein, 36 aa, Artificial Sequence; identical to SEQ ID NO: 32279
  GFR-binding peptide
  MOD_RES (1)..(3): Xaa is C or S
  MOD_RES (15)..(16)..(17)..(18)..(19): Xaa is A or G
  MOD_RES (20)..(21)..(22)..(23): Xaa is A or G or is absent

SEQ ID NO: 34436 - protein, 39 aa, Artificial Sequence; identical to SEQ ID NO: 32280
  GFR-binding peptide
  MOD_RES (1)..(3)..(36)..(37): Xaa is C or S
  MOD_RES (14)..(15)..(16)..(17)..(18): Xaa is A or G
  MOD_RES (19)..(20)..(21)..(22): Xaa is A or G or is absent

SEQ ID NO: 34437 - protein, 38 aa, Artificial Sequence; identical to SEQ ID NO: 32281
  GFR-binding peptide
  MOD_RES (1)..(3)..(34)..(35): Xaa is C or S

SEQ ID NO: 34438 - protein, 37 aa, Artificial Sequence; identical to SEQ ID NO: 32282
  GFR-binding peptide
  MOD_RES (2)..(36)..(37): Xaa is C or S
  MOD_RES (14)..(15)..(16)..(17)..(18): Xaa is A or G
  MOD_RES (19)..(20)..(21)..(22): Xaa is A or G or is absent

SEQ ID NO: 34439 - protein, 36 aa, Artificial Sequence; identical to SEQ ID NO: 32283
  GFR-binding peptide
  MOD_RES (33)..(34): Xaa is C or S
  MOD_RES (11)..(12)..(13)..(14)..(15): Xaa is A or G
  MOD_RES (16)..(17)..(18)..(19): Xaa is A or G or is absent

SEQ ID NO: 34440 - protein, 37 aa, Artificial Sequence; identical to SEQ ID NO: 32284
  GFR-binding peptide
  MOD_RES (2)..(4)..(36)..(37): Xaa is C or S

SEQ ID NO: 34441 - protein, 38 aa, Artificial Sequence; identical to SEQ ID NO: 32285
  GFR-binding peptide
  MOD_RES (1)..(32)..(33): Xaa is C or S

SEQ ID NO: 34442 - protein, 34 aa, Artificial Sequence; identical to SEQ ID NO: 32286
  GFR-binding peptide
  MOD_RES (2)..(34): Xaa is C or S

SEQ ID NO: 34443 - protein, 39 aa, Artificial Sequence; identical to SEQ ID NO: 32287
  GFR-binding peptide
  MOD_RES (33)..(34): Xaa is C or S
  MOD_RES (11)..(12)..(13)..(14)..(15): Xaa is A or G
  MOD_RES (16)..(17)..(18)..(19): Xaa is A or G or is absent

SEQ ID NO: 34444 - protein, 39 aa, Artificial Sequence; identical to SEQ ID NO: 32288
  GFR-binding peptide
  MOD_RES (2)..(36)..(37): Xaa is C or S
  MOD_RES (14)..(15)..(16)..(17)..(18): Xaa is A or G
  MOD_RES (19)..(20)..(21)..(22): Xaa is A or G or is absent

SEQ ID NO: 34445 - protein, 30 aa, Artificial Sequence; identical to SEQ ID NO: 32289
  GFR-binding peptide

SEQ ID NO: 34446 - protein, 35 aa, Artificial Sequence; identical to SEQ ID NO: 32290
  GFR-binding peptide
  MOD_RES (2)..(2): Xaa is C or S
  MOD_RES (14)..(15)..(16)..(17)..(18): Xaa is A or G
  MOD_RES (19)..(20)..(21)..(22): Xaa is A or G or is absent

SEQ ID NO: 34447 - protein, 39 aa, Artificial Sequence; identical to SEQ ID NO: 32291
  GFR-binding peptide
  MOD_RES (1)..(33): Xaa is C or S

SEQ ID NO: 34448 - protein, 32 aa, Artificial Sequence; identical to SEQ ID NO: 32292
  GFR-binding peptide
  MOD_RES (32)..(32): Xaa is C or S

SEQ ID NO: 34449 - protein, 36 aa, Artificial Sequence; identical to SEQ ID NO: 32293
  GFR-binding peptide
  MOD_RES (2)..(34): Xaa is C or S

SEQ ID NO: 34450 - protein, 33 aa, Artificial Sequence; identical to SEQ ID NO: 32294
  GFR-binding peptide
  MOD_RES (12)..(13)..(14)..(15)..(16): Xaa is A or G
  MOD_RES (17)..(18)..(19)..(20): Xaa is A or G or is absent

SEQ ID NO: 34451 - protein, 33 aa, Artificial Sequence; identical to SEQ ID NO: 32295
  GFR-binding peptide
  MOD_RES (31)..(32): Xaa is C or S

SEQ ID NO: 34452 - protein, 37 aa, Artificial Sequence; identical to SEQ ID NO: 32296
  GFR-binding peptide
  MOD_RES (1)..(3)..(36)..(37): Xaa is C or S

SEQ ID NO: 34453 - protein, 38 aa, Artificial Sequence; identical to SEQ ID NO: 32297
  GFR-binding peptide
  MOD_RES (2)..(4)..(37)..(38): Xaa is C or S
  MOD_RES (15)..(16)..(17)..(18)..(19): Xaa is A or G
  MOD_RES (20)..(21)..(22)..(23): Xaa is A or G or is absent

SEQ ID NO: 34454 - protein, 35 aa, Artificial Sequence; identical to SEQ ID NO: 32298
  GFR-binding peptide
  MOD_RES (34)..(35): Xaa is C or S
  MOD_RES (12)..(13)..(14)..(15)..(16): Xaa is A or G
  MOD_RES (17)..(18)..(19)..(20): Xaa is A or G or is absent

SEQ ID NO: 34455 - protein, 38 aa, Artificial Sequence; identical to SEQ ID NO: 32299
  GFR-binding peptide
  MOD_RES (33)..(34): Xaa is C or S
  MOD_RES (11)..(12)..(13)..(14)..(15): Xaa is A or G
  MOD_RES (16)..(17)..(18)..(19): Xaa is A or G or is absent

SEQ ID NO: 34456 - protein, 37 aa, Artificial Sequence; identical to SEQ ID NO: 32300
  GFR-binding peptide
  MOD_RES (1)..(3)..(36)..(37): Xaa is C or S
  MOD_RES (14)..(15)..(16)..(17)..(18): Xaa is A or G
  MOD_RES (19)..(20)..(21)..(22): Xaa is A or G or is absent

SEQ ID NO: 34457 - protein, 39 aa, Artificial Sequence; identical to SEQ ID NO: 32301
  GFR-binding peptide
  MOD_RES (6)..(7)..(39): Xaa is C or S

SEQ ID NO: 34458 - protein, 43 aa, Artificial Sequence; identical to SEQ ID NO: 32302
  GFR-binding peptide
  MOD_RES (6)..(7)..(41)..(43): Xaa is C or S
  MOD_RES (21)..(22)..(23)..(24)..(25): Xaa is A or G
  MOD_RES (26)..(27)..(28)..(29): Xaa is A or G or is absent

SEQ ID NO: 34459 - protein, 40 aa, Artificial Sequence; identical to SEQ ID NO: 32303
  GFR-binding peptide
  MOD_RES (6)..(7): Xaa is C or S
  MOD_RES (21)..(22)..(23)..(24)..(25): Xaa is A or G
  MOD_RES (26)..(27)..(28)..(29): Xaa is A or G or is absent

SEQ ID NO: 34460 - protein, 37 aa, Artificial Sequence; identical to SEQ ID NO: 32304
  GFR-binding peptide
  MOD_RES (5)..(6): Xaa is C or S

SEQ ID NO: 34461 - protein, 40 aa, Artificial Sequence; identical to SEQ ID NO: 32305
  GFR-binding peptide
  MOD_RES (3)..(4)..(38)..(40): Xaa is C or S
  MOD_RES (18)..(19)..(20)..(21)..(22): Xaa is A or G
  MOD_RES (23)..(24)..(25)..(26): Xaa is A or G or is absent

SEQ ID NO: 34462 - protein, 32 aa, Artificial Sequence; identical to SEQ ID NO: 32306
  GFR-binding peptide
  MOD_RES (31)..(31): Xaa is C or S

SEQ ID NO: 34463 - protein, 35 aa, Artificial Sequence; identical to SEQ ID NO: 32307
  GFR-binding peptide
  MOD_RES (3)..(4): Xaa is C or S

SEQ ID NO: 34464 - protein, 42 aa, Artificial Sequence; identical to SEQ ID NO: 32308
  GFR-binding peptide
  MOD_RES (5)..(6)..(40)..(42): Xaa is C or S
  MOD_RES (20)..(21)..(22)..(23)..(24): Xaa is A or G
  MOD_RES (25)..(26)..(27)..(28): Xaa is A or G or is absent

SEQ ID NO: 34465 - protein, 39 aa, Artificial Sequence; identical to SEQ ID NO: 32309
  GFR-binding peptide
  MOD_RES (3)..(4)..(36)..(38): Xaa is C or S

SEQ ID NO: 34466 - protein, 41 aa, Artificial Sequence; identical to SEQ ID NO: 32310
  GFR-binding peptide
  MOD_RES (4)..(5)..(39)..(41): Xaa is C or S
  MOD_RES (19)..(20)..(21)..(22)..(23): Xaa is A or G
  MOD_RES (24)..(25)..(26)..(27): Xaa is A or G or is absent

SEQ ID NO: 34467 - protein, 35 aa, Artificial Sequence; identical to SEQ ID NO: 32311
  GFR-binding peptide
  MOD_RES (2)..(3)..(35): Xaa is C or S

SEQ ID NO: 34468 - protein, 35 aa, Artificial Sequence; identical to SEQ ID NO: 32312
  GFR-binding peptide
  MOD_RES (1)..(2): Xaa is C or S
  MOD_RES (16)..(17)..(18)..(19)..(20): Xaa is A or G
  MOD_RES (21)..(22)..(23)..(24): Xaa is A or G or is absent

SEQ ID NO: 34469 - protein, 40 aa, Artificial Sequence; identical to SEQ ID NO: 32313
  GFR-binding peptide
  MOD_RES (5)..(6)..(38)..(40): Xaa is C or S

SEQ ID NO: 34470 - protein, 37 aa, Artificial Sequence; identical to SEQ ID NO: 32314
  GFR-binding peptide
  MOD_RES (4)..(36): Xaa is C or S

SEQ ID NO: 34471 - protein, 40 aa, Artificial Sequence; identical to SEQ ID NO: 32315
  GFR-binding peptide
  MOD_RES (7)..(7): Xaa is C or S
  MOD_RES (21)..(22)..(23)..(24)..(25): Xaa is A or G
  MOD_RES (26)..(27)..(28)..(29): Xaa is A or G or is absent

SEQ ID NO: 34472 - protein, 37 aa, Artificial Sequence; identical to SEQ ID NO: 32316
  GFR-binding peptide
  MOD_RES (3)..(4): Xaa is C or S
  MOD_RES (18)..(19)..(20)..(21)..(22): Xaa is A or G
  MOD_RES (23)..(24)..(25)..(26): Xaa is A or G or is absent

SEQ ID NO: 34473 - protein, 34 aa, Artificial Sequence; identical to SEQ ID NO: 32317
  GFR-binding peptide
  MOD_RES (1)..(33): Xaa is C or S

SEQ ID NO: 34474 - protein, 41 aa, Artificial Sequence; identical to SEQ ID NO: 32318
  GFR-binding peptide
  MOD_RES (4)..(5)..(39)..(41): Xaa is C or S
  MOD_RES (19)..(20)..(21)..(22)..(23): Xaa is A or G
  MOD_RES (24)..(25)..(26)..(27): Xaa is A or G or is absent

SEQ ID NO: 34475 - protein, 40 aa, Artificial Sequence; identical to SEQ ID NO: 32319
  GFR-binding peptide
  MOD_RES (5)..(6)..(40): Xaa is C or S
  MOD_RES (20)..(21)..(22)..(23)..(24): Xaa is A or G
  MOD_RES (25)..(26)..(27)..(28): Xaa is A or G or is absent

SEQ ID NO: 34476 - protein, 35 aa, Artificial Sequence; identical to SEQ ID NO: 32320
  GFR-binding peptide
  MOD_RES (3)..(4): Xaa is C or S

SEQ ID NO: 34477 - protein, 36 aa, Artificial Sequence; identical to SEQ ID NO: 32321
  GFR-binding peptide
  MOD_RES (5)..(6): Xaa is C or S

SEQ ID NO: 34478 - protein, 39 aa, Artificial Sequence; identical to SEQ ID NO: 32322
  GFR-binding peptide
  MOD_RES (1)..(2)..(36)..(38): Xaa is C or S
  MOD_RES (16)..(17)..(18)..(19)..(20): Xaa is A or G
  MOD_RES (21)..(22)..(23)..(24): Xaa is A or G or is absent

SEQ ID NO: 34479 - protein, 35 aa, Artificial Sequence; identical to SEQ ID NO: 32323
  GFR-binding peptide
  MOD_RES (2)..(3): Xaa is C or S
  MOD_RES (17)..(18)..(19)..(20)..(21): Xaa is A or G
  MOD_RES (22)..(23)..(24)..(25): Xaa is A or G or is absent

SEQ ID NO: 34480 - protein, 39 aa, Artificial Sequence; identical to SEQ ID NO: 32324
  GFR-binding peptide
  MOD_RES (2)..(3)..(36)..(38): Xaa is C or S

SEQ ID NO: 34481 - protein, 39 aa, Artificial Sequence; identical to SEQ ID NO: 32325
  GFR-binding peptide
  MOD_RES (3)..(37)..(39): Xaa is C or S
  MOD_RES (17)..(18)..(19)..(20)..(21): Xaa is A or G
  MOD_RES (22)..(23)..(24)..(25): Xaa is A or G or is absent

SEQ ID NO: 34482 - protein, 36 aa, Artificial Sequence; identical to SEQ ID NO: 32326
  GFR-binding peptide
  MOD_RES (4)..(5): Xaa is C or S

SEQ ID NO: 34483 - protein, 37 aa, Artificial Sequence; identical to SEQ ID NO: 32327
  GFR-binding peptide
  MOD_RES (4)..(5): Xaa is C or S
  MOD_RES (19)..(20)..(21)..(22)..(23): Xaa is A or G
  MOD_RES (24)..(25)..(26)..(27): Xaa is A or G or is absent

SEQ ID NO: 34484 - protein, 36 aa, Artificial Sequence; identical to SEQ ID NO: 32328
  GFR-binding peptide
  MOD_RES (2)..(3)..(35): Xaa is C or S

SEQ ID NO: 34485 - protein, 42 aa, Artificial Sequence; identical to SEQ ID NO: 32329
  GFR-binding peptide
  MOD_RES (5)..(6)..(39)..(41): Xaa is C or S

SEQ ID NO: 34486 - protein, 33 aa, Artificial Sequence; identical to SEQ ID NO: 32330
  GFR-binding peptide
  MOD_RES (1)..(2): Xaa is C or S

SEQ ID NO: 34487 - protein, 35 aa, Artificial Sequence; identical to SEQ ID NO: 32331
  GFR-binding peptide
  MOD_RES (1)..(33)..(35): Xaa is C or S

SEQ ID NO: 34488 - protein, 39 aa, Artificial Sequence; identical to SEQ ID NO: 32332
  GFR-binding peptide
  MOD_RES (3)..(4)..(36)..(38): Xaa is C or S

SEQ ID NO: 34489 - protein, 35 aa, Artificial Sequence; identical to SEQ ID NO: 32333
  GFR-binding peptide
  MOD_RES (1)..(2)..(35): Xaa is C or S

SEQ ID NO: 34490 - protein, 38 aa, Artificial Sequence; identical to SEQ ID NO: 32334
  GFR-binding peptide
  MOD_RES (5)..(6)..(37): Xaa is C or S

SEQ ID NO: 34491 - protein, 43 aa, Artificial Sequence; identical to SEQ ID NO: 32335
  GFR-binding peptide
  MOD_RES (5)..(6)..(40)..(42): Xaa is C or S
  MOD_RES (20)..(21)..(22)..(23)..(24): Xaa is A or G
  MOD_RES (25)..(26)..(27)..(28): Xaa is A or G or is absent

SEQ ID NO: 34492 - protein, 43 aa, Artificial Sequence; identical to SEQ ID NO: 32336
  GFR-binding peptide
  MOD_RES (6)..(7)..(41)..(43): Xaa is C or S
  MOD_RES (21)..(22)..(23)..(24)..(25): Xaa is A or G
  MOD_RES (26)..(27)..(28)..(29): Xaa is A or G or is absent

SEQ ID NO: 34493 - protein, 36 aa, Artificial Sequence; identical to SEQ ID NO: 32337
  GFR-binding peptide
  MOD_RES (34)..(36): Xaa is C or S
  MOD_RES (14)..(15)..(16)..(17)..(18): Xaa is A or G
  MOD_RES (19)..(20)..(21)..(22): Xaa is A or G or is absent

SEQ ID NO: 34494 - protein, 40 aa, Artificial Sequence; identical to SEQ ID NO: 32338
  GFR-binding peptide
  MOD_RES (4)..(38)..(40): Xaa is C or S
  MOD_RES (18)..(19)..(20)..(21)..(22): Xaa is A or G
  MOD_RES (23)..(24)..(25)..(26): Xaa is A or G or is absent

SEQ ID NO: 34495 - protein, 44 aa, Artificial Sequence; identical to SEQ ID NO: 32339
  GFR-binding peptide
  MOD_RES (6)..(7)..(41)..(43): Xaa is C or S
  MOD_RES (21)..(22)..(23)..(24)..(25): Xaa is A or G
  MOD_RES (26)..(27)..(28)..(29): Xaa is A or G or is absent

SEQ ID NO: 34496 - protein, 44 aa, Artificial Sequence; identical to SEQ ID NO: 32340
  GFR-binding peptide
  MOD_RES (6)..(7)..(41)..(43): Xaa is C or S
  MOD_RES (21)..(22)..(23)..(24)..(25): Xaa is A or G
  MOD_RES (26)..(27)..(28)..(29): Xaa is A or G or is absent

SEQ ID NO: 34497 - protein, 39 aa, Artificial Sequence; identical to SEQ ID NO: 32341
  GFR-binding peptide
  MOD_RES (6)..(7)..(39): Xaa is C or S

SEQ ID NO: 34498 - protein, 43 aa, Artificial Sequence; identical to SEQ ID NO: 32342
  GFR-binding peptide
  MOD_RES (6)..(7)..(41)..(43): Xaa is C or S
  MOD_RES (21)..(22)..(23)..(24)..(25): Xaa is A or G
  MOD_RES (26)..(27)..(28)..(29): Xaa is A or G or is absent

SEQ ID NO: 34499 - protein, 34 aa, Artificial Sequence; identical to SEQ ID NO: 32343
  GFR-binding peptide
  MOD_RES (2)..(3): Xaa is C or S

SEQ ID NO: 34500 - protein, 37 aa, Artificial Sequence; identical to SEQ ID NO: 32344
  GFR-binding peptide
  MOD_RES (2)..(34)..(36): Xaa is C or S

SEQ ID NO: 34501 - protein, 35 aa, Artificial Sequence; identical to SEQ ID NO: 32345
  GFR-binding peptide
  MOD_RES (35)..(35): Xaa is C or S
  MOD_RES (14)..(15)..(16)..(17)..(18): Xaa is A or G
  MOD_RES (19)..(20)..(21)..(22): Xaa is A or G or is absent

SEQ ID NO: 34502 - protein, 39 aa, Artificial Sequence; identical to SEQ ID NO: 32346
  GFR-binding peptide
  MOD_RES (3)..(4)..(36)..(38): Xaa is C or S

SEQ ID NO: 34503 - protein, 37 aa, Artificial Sequence; identical to SEQ ID NO: 32347
  GFR-binding peptide
  MOD_RES (2)..(3)..(36): Xaa is C or S

SEQ ID NO: 34504 - protein, 42 aa, Artificial Sequence; identical to SEQ ID NO: 32348
  GFR-binding peptide
  MOD_RES (4)..(5)..(39)..(41): Xaa is C or S
  MOD_RES (19)..(20)..(21)..(22)..(23): Xaa is A or G
  MOD_RES (24)..(25)..(26)..(27): Xaa is A or G or is absent

SEQ ID NO: 34505 - protein, 34 aa, Artificial Sequence; identical to SEQ ID NO: 32349
  GFR-binding peptide
  MOD_RES (1)..(32)..(34): Xaa is C or S

SEQ ID NO: 34506 - protein, 42 aa, Artificial Sequence; identical to SEQ ID NO: 32350
  GFR-binding peptide
  MOD_RES (4)..(5)..(39)..(41): Xaa is C or S
  MOD_RES (19)..(20)..(21)..(22)..(23): Xaa is A or G
  MOD_RES (24)..(25)..(26)..(27): Xaa is A or G or is absent

SEQ ID NO: 34507 - protein, 36 aa, Artificial Sequence; identical to SEQ ID NO: 32351
  GFR-binding peptide
  MOD_RES (1)..(33)..(35): Xaa is C or S

SEQ ID NO: 34508 - protein, 37 aa, Artificial Sequence; identical to SEQ ID NO: 32352
  GFR-binding peptide
  MOD_RES (6)..(7): Xaa is C or S

SEQ ID NO: 34509 - protein, 40 aa, Artificial Sequence; identical to SEQ ID NO: 32353
  GFR-binding peptide
  MOD_RES (3)..(4)..(38)..(40): Xaa is C or S
  MOD_RES (18)..(19)..(20)..(21)..(22): Xaa is A or G
  MOD_RES (23)..(24)..(25)..(26): Xaa is A or G or is absent

SEQ ID NO: 34510 - protein, 40 aa, Artificial Sequence; identical to SEQ ID NO: 32354
  GFR-binding peptide
  MOD_RES (6)..(7)..(39): Xaa is C or S

SEQ ID NO: 34511 - protein, 40 aa, Artificial Sequence; identical to SEQ ID NO: 32355
  GFR-binding peptide
  MOD_RES (4)..(5)..(39): Xaa is C or S
  MOD_RES (19)..(20)..(21)..(22)..(23): Xaa is A or G
  MOD_RES (24)..(25)..(26)..(27): Xaa is A or G or is absent

SEQ ID NO: 34512 - protein, 35 aa, Artificial Sequence; identical to SEQ ID NO: 32356
  GFR-binding peptide
  MOD_RES (1)..(2): Xaa is C or S
  MOD_RES (16)..(17)..(18)..(19)..(20): Xaa is A or G
  MOD_RES (21)..(22)..(23)..(24): Xaa is A or G or is absent

SEQ ID NO: 34513 - protein, 39 aa, Artificial Sequence; identical to SEQ ID NO: 32357
  GFR-binding peptide
  MOD_RES (5)..(6): Xaa is C or S
  MOD_RES (20)..(21)..(22)..(23)..(24): Xaa is A or G
  MOD_RES (25)..(26)..(27)..(28): Xaa is A or G or is absent

SEQ ID NO: 34514 - protein, 35 aa, Artificial Sequence; identical to SEQ ID NO: 32358
  GFR-binding peptide
  MOD_RES (1)..(33)..(35): Xaa is C or S

SEQ ID NO: 34515 - protein, 35 aa, Artificial Sequence; identical to SEQ ID NO: 32359
  GFR-binding peptide
  MOD_RES (34)..(34): Xaa is C or S
  MOD_RES (14)..(15)..(16)..(17)..(18): Xaa is A or G
  MOD_RES (19)..(20)..(21)..(22): Xaa is A or G or is absent

SEQ ID NO: 34516 - protein, 36 aa, Artificial Sequence; identical to SEQ ID NO: 32360
  GFR-binding peptide
  MOD_RES (5)..(6): Xaa is C or S

SEQ ID NO: 34517 - protein, 38 aa, Artificial Sequence; identical to SEQ ID NO: 32361
  GFR-binding peptide
  MOD_RES (3)..(4)..(36)..(38): Xaa is C or S

SEQ ID NO: 34518 - protein, 42 aa, Artificial Sequence; identical to SEQ ID NO: 32362
  GFR-binding peptide
  MOD_RES (4)..(5)..(39)..(41): Xaa is C or S
  MOD_RES (19)..(20)..(21)..(22)..(23): Xaa is A or G
  MOD_RES (24)..(25)..(26)..(27): Xaa is A or G or is absent

SEQ ID NO: 34519 - protein, 41 aa, Artificial Sequence; identical to SEQ ID NO: 32363
  GFR-binding peptide
  MOD_RES (3)..(4)..(39)..(41): Xaa is C or S
  MOD_RES (18)..(19)..(20)..(21)..(22): Xaa is A or G
  MOD_RES (23)..(24)..(25)..(26): Xaa is A or G or is absent

SEQ ID NO: 34520 - protein, 39 aa, Artificial Sequence; identical to SEQ ID NO: 32364
  GFR-binding peptide
  MOD_RES (4)..(5)..(38): Xaa is C or S
  MOD_RES (19)..(20)..(21)..(22)..(23): Xaa is A or G
  MOD_RES (24)..(25)..(26)..(27): Xaa is A or G or is absent

SEQ ID NO: 34521 - protein, 39 aa, Artificial Sequence; identical to SEQ ID NO: 32365
  GFR-binding peptide
  MOD_RES (6)..(38): Xaa is C or S

SEQ ID NO: 34522 - protein, 42 aa, Artificial Sequence; identical to SEQ ID NO: 32366
  GFR-binding peptide
  MOD_RES (5)..(6)..(41): Xaa is C or S
  MOD_RES (20)..(21)..(22)..(23)..(24): Xaa is A or G
  MOD_RES (25)..(26)..(27)..(28): Xaa is A or G or is absent

SEQ ID NO: 34523 - protein, 40 aa, Artificial Sequence; identical to SEQ ID NO: 32367
  GFR-binding peptide
  MOD_RES (6)..(7)..(39): Xaa is C or S

SEQ ID NO: 34524 - protein, 38 aa, Artificial Sequence; identical to SEQ ID NO: 32368
  GFR-binding peptide
  MOD_RES (3)..(4)..(38): Xaa is C or S
  MOD_RES (18)..(19)..(20)..(21)..(22): Xaa is A or G
  MOD_RES (23)..(24)..(25)..(26): Xaa is A or G or is absent

SEQ ID NO: 34525 - protein, 34 aa, Artificial Sequence; identical to SEQ ID NO: 32369
  GFR-binding peptide
  MOD_RES (14)..(15)..(16)..(17)..(18): Xaa is A or G
  MOD_RES (19)..(20)..(21)..(22): Xaa is A or G or is absent

SEQ ID NO: 34526 - protein, 32 aa, Artificial Sequence; identical to SEQ ID NO: 32370
  GFR-binding peptide
  MOD_RES (1)..(1): Xaa is C or S

SEQ ID NO: 34527 - protein, 37 aa, Artificial Sequence; identical to SEQ ID NO: 32371
  GFR-binding peptide
  MOD_RES (3)..(4)..(36): Xaa is C or S

SEQ ID NO: 34528 - protein, 36 aa, Artificial Sequence; identical to SEQ ID NO: 32372
  GFR-binding peptide
  MOD_RES (3)..(4): Xaa is C or S
  MOD_RES (18)..(19)..(20)..(21)..(22): Xaa is A or G
  MOD_RES (23)..(24)..(25)..(26): Xaa is A or G or is absent

SEQ ID NO: 34529 - protein, 41 aa, Artificial Sequence; identical to SEQ ID NO: 32373
  GFR-binding peptide
  MOD_RES (4)..(5)..(39)..(41): Xaa is C or S
  MOD_RES (19)..(20)..(21)..(22)..(23): Xaa is A or G
  MOD_RES (24)..(25)..(26)..(27): Xaa is A or G or is absent

SEQ ID NO: 34530 - protein, 40 aa, Artificial Sequence; identical to SEQ ID NO: 32374
  GFR-binding peptide
  MOD_RES (5)..(6)..(38)..(40): Xaa is C or S

SEQ ID NO: 34531 - protein, 36 aa, Artificial Sequence; identical to SEQ ID NO: 32375
  GFR-binding peptide
  MOD_RES (34)..(36): Xaa is C or S
  MOD_RES (14)..(15)..(16)..(17)..(18): Xaa is A or G
  MOD_RES (19)..(20)..(21)..(22): Xaa is A or G or is absent

SEQ ID NO: 34532 - protein, 34 aa, Artificial Sequence; identical to SEQ ID NO: 32376
  GFR-binding peptide
  MOD_RES (1)..(33): Xaa is C or S

SEQ ID NO: 34533 - protein, 37 aa, Artificial Sequence; identical to SEQ ID NO: 32377
  GFR-binding peptide
  MOD_RES (5)..(6): Xaa is C or S

SEQ ID NO: 34534 - protein, 35 aa, Artificial Sequence; identical to SEQ ID NO: 32378
  GFR-binding peptide
  MOD_RES (32)..(34): Xaa is C or S

SEQ ID NO: 34535 - protein, 41 aa, Artificial Sequence; identical to SEQ ID NO: 32379
  GFR-binding peptide
  MOD_RES (5)..(6)..(38)..(40): Xaa is C or S

SEQ ID NO: 34536 - protein, 34 aa, Artificial Sequence; identical to SEQ ID NO: 32380
  GFR-binding peptide
  MOD_RES (3)..(4): Xaa is C or S

SEQ ID NO: 34537 - protein, 41 aa, Artificial Sequence; identical to SEQ ID NO: 32381
  GFR-binding peptide
  MOD_RES (7)..(39)..(41): Xaa is C or S

SEQ ID NO: 34538 - protein, 35 aa, Artificial Sequence; identical to SEQ ID NO: 32382
  GFR-binding peptide
  MOD_RES (4)..(5): Xaa is C or S

SEQ ID NO: 34539 - protein, 41 aa, Artificial Sequence; identical to SEQ ID NO: 32383
  GFR-binding peptide
  MOD_RES (6)..(7)..(39)..(41): Xaa is C or S

SEQ ID NO: 34540 - protein, 38 aa, Artificial Sequence; identical to SEQ ID NO: 32384
  GFR-binding peptide
  MOD_RES (2)..(3)..(37): Xaa is C or S
  MOD_RES (17)..(18)..(19)..(20)..(21): Xaa is A or G
  MOD_RES (22)..(23)..(24)..(25): Xaa is A or G or is absent

SEQ ID NO: 34541 - protein, 38 aa, Artificial Sequence; identical to SEQ ID NO: 32385
  GFR-binding peptide
  MOD_RES (1)..(2)..(36)..(38): Xaa is C or S
  MOD_RES (16)..(17)..(18)..(19)..(20): Xaa is A or G
  MOD_RES (21)..(22)..(23)..(24): Xaa is A or G or is absent

SEQ ID NO: 34542 - protein, 38 aa, Artificial Sequence; identical to SEQ ID NO: 32386
  GFR-binding peptide
  MOD_RES (5)..(6)..(38): Xaa is C or S

SEQ ID NO: 34543 - protein, 37 aa, Artificial Sequence; identical to SEQ ID NO: 32387
  GFR-binding peptide
  MOD_RES (3)..(4)..(37): Xaa is C or S
  MOD_RES (18)..(19)..(20)..(21)..(22): Xaa is A or G
  MOD_RES (23)..(24)..(25)..(26): Xaa is A or G or is absent

SEQ ID NO: 34544 - protein, 35 aa, Artificial Sequence; identical to SEQ ID NO: 32388
  GFR-binding peptide
  MOD_RES (4)..(5): Xaa is C or S

SEQ ID NO: 34545 - protein, 41 aa, Artificial Sequence; identical to SEQ ID NO: 32389
  GFR-binding peptide
  MOD_RES (4)..(38)..(40): Xaa is C or S
  MOD_RES (18)..(19)..(20)..(21)..(22): Xaa is A or G
  MOD_RES (23)..(24)..(25)..(26): Xaa is A or G or is absent

SEQ ID NO: 34546 - protein, 39 aa, Artificial Sequence; identical to SEQ ID NO: 32390
  GFR-binding peptide
  MOD_RES (6)..(7): Xaa is C or S

SEQ ID NO: 34547 - protein, 31 aa, Artificial Sequence; identical to SEQ ID NO: 32391
  GFR-binding peptide

SEQ ID NO: 34548 - protein, 32 aa, Artificial Sequence; identical to SEQ ID NO: 32392
  GFR-binding peptide
  MOD_RES (14)..(15)..(16)..(17)..(18): Xaa is A or G
  MOD_RES (19)..(20)..(21)..(22): Xaa is A or G or is absent

SEQ ID NO: 34549 - protein, 43 aa, Artificial Sequence; identical to SEQ ID NO: 32393
  GFR-binding peptide
  MOD_RES (5)..(6)..(40)..(42): Xaa is C or S
  MOD_RES (20)..(21)..(22)..(23)..(24): Xaa is A or G
  MOD_RES (25)..(26)..(27)..(28): Xaa is A or G or is absent

SEQ ID NO: 34550 - protein, 42 aa, Artificial Sequence; identical to SEQ ID NO: 32394
  GFR-binding peptide
  MOD_RES (6)..(7)..(41): Xaa is C or S
  MOD_RES (21)..(22)..(23)..(24)..(25): Xaa is A or G
  MOD_RES (26)..(27)..(28)..(29): Xaa is A or G or is absent

SEQ ID NO: 34551 - protein, 32 aa, Artificial Sequence; identical to SEQ ID NO: 32395
  GFR-binding peptide
  MOD_RES (14)..(15)..(16)..(17)..(18): Xaa is A or G
  MOD_RES (19)..(20)..(21)..(22): Xaa is A or G or is absent

SEQ ID NO: 34552 - protein, 38 aa, Artificial Sequence; identical to SEQ ID NO: 32396
  GFR-binding peptide
  MOD_RES (3)..(4)..(36)..(38): Xaa is C or S

SEQ ID NO: 34553 - protein, 33 aa, Artificial Sequence; identical to SEQ ID NO: 32397
  GFR-binding peptide
  MOD_RES (1)..(1): Xaa is C or S
  MOD_RES (15)..(16)..(17)..(18)..(19): Xaa is A or G
  MOD_RES (20)..(21)..(22)..(23): Xaa is A or G or is absent

SEQ ID NO: 34554 - protein, 39 aa, Artificial Sequence; identical to SEQ ID NO: 32398
  GFR-binding peptide
  MOD_RES (1)..(2)..(36)..(38): Xaa is C or S
  MOD_RES (16)..(17)..(18)..(19)..(20): Xaa is A or G
  MOD_RES (21)..(22)..(23)..(24): Xaa is A or G or is absent

SEQ ID NO: 34555 - protein, 34 aa, Artificial Sequence; identical to SEQ ID NO: 32399
  GFR-binding peptide
  MOD_RES (1)..(33): Xaa is C or S

SEQ ID NO: 34556 - protein, 35 aa, Artificial Sequence; identical to SEQ ID NO: 32400
  GFR-binding peptide
  MOD_RES (1)..(2)..(34): Xaa is C or S

SEQ ID NO: 34557 - protein, 31 aa, Artificial Sequence; identical to SEQ ID NO: 32401
  GFR-binding peptide

SEQ ID NO: 34558 - protein, 38 aa, Artificial Sequence; identical to SEQ ID NO: 32402
  GFR-binding peptide
  MOD_RES (2)..(3)..(35)..(37): Xaa is C or S

SEQ ID NO: 34559 - protein, 40 aa, Artificial Sequence; identical to SEQ ID NO: 32403
  GFR-binding peptide
  MOD_RES (4)..(5)..(37)..(39): Xaa is C or S

SEQ ID NO: 34560 - protein, 37 aa, Artificial Sequence; identical to SEQ ID NO: 32404
  GFR-binding peptide
  MOD_RES (34)..(36): Xaa is C or S
  MOD_RES (14)..(15)..(16)..(17)..(18): Xaa is A or G
  MOD_RES (19)..(20)..(21)..(22): Xaa is A or G or is absent

SEQ ID NO: 34561 - protein, 40 aa, Artificial Sequence; identical to SEQ ID NO: 32405
  GFR-binding peptide
  MOD_RES (6)..(7)..(39): Xaa is C or S

SEQ ID NO: 34562 - protein, 36 aa, Artificial Sequence; identical to SEQ ID NO: 32406
  GFR-binding peptide
  MOD_RES (2)..(3)..(35): Xaa is C or S

SEQ ID NO: 34563 - protein, 34 aa, Artificial Sequence; identical to SEQ ID NO: 32407
  GFR-binding peptide
  MOD_RES (32)..(34): Xaa is C or S

SEQ ID NO: 34564 - protein, 37 aa, Artificial Sequence; identical to SEQ ID NO: 32408
  GFR-binding peptide
  MOD_RES (6)..(7): Xaa is C or S

SEQ ID NO: 34565 - protein, 39 aa, Artificial Sequence; identical to SEQ ID NO: 32409
  GFR-binding peptide
  MOD_RES (5)..(6)..(38): Xaa is C or S

SEQ ID NO: 34566 - protein, 32 aa, Artificial Sequence; identical to SEQ ID NO: 32410
  GFR-binding peptide
  MOD_RES (1)..(1): Xaa is C or S

SEQ ID NO: 34567 - protein, 35 aa, Artificial Sequence; identical to SEQ ID NO: 32411
  GFR-binding peptide
  MOD_RES (1)..(33)..(35): Xaa is C or S

SEQ ID NO: 34568 - protein, 36 aa, Artificial Sequence; identical to SEQ ID NO: 32412
  GFR-binding peptide
  MOD_RES (4)..(5): Xaa is C or S

SEQ ID NO: 34569 - protein, 40 aa, Artificial Sequence; identical to SEQ ID NO: 32413
  GFR-binding peptide
  MOD_RES (4)..(5)..(39): Xaa is C or S
  MOD_RES (19)..(20)..(21)..(22)..(23): Xaa is A or G
  MOD_RES (24)..(25)..(26)..(27): Xaa is A or G or is absent

SEQ ID NO: 34570 - protein, 35 aa, Artificial Sequence; identical to SEQ ID NO: 32414
  GFR-binding peptide
  MOD_RES (3)..(4)..(35): Xaa is C or S

SEQ ID NO: 34571 - protein, 36 aa, Artificial Sequence; identical to SEQ ID NO: 32415
  GFR-binding peptide
  MOD_RES (6)..(6): Xaa is C or S

SEQ ID NO: 34572 - protein, 39 aa, Artificial Sequence; identical to SEQ ID NO: 32416
  GFR-binding peptide
  MOD_RES (6)..(7)..(39): Xaa is C or S

SEQ ID NO: 34573 - protein, 40 aa, Artificial Sequence; identical to SEQ ID NO: 32417
  GFR-binding peptide
  MOD_RES (6)..(7)..(38)..(40): Xaa is C or S

SEQ ID NO: 34574 - protein, 38 aa, Artificial Sequence; identical to SEQ ID NO: 32418
  GFR-binding peptide
  MOD_RES (4)..(5)..(37): Xaa is C or S

SEQ ID NO: 34575 - protein, 36 aa, Artificial Sequence; identical to SEQ ID NO: 32419
  GFR-binding peptide
  MOD_RES (3)..(4)..(36): Xaa is C or S

SEQ ID NO: 34576 - protein, 36 aa, Artificial Sequence; identical to SEQ ID NO: 32420
  GFR-binding peptide
  MOD_RES (2)..(3): Xaa is C or S
  MOD_RES (17)..(18)..(19)..(20)..(21): Xaa is A or G
  MOD_RES (22)..(23)..(24)..(25): Xaa is A or G or is absent

SEQ ID NO: 34577 - protein, 36 aa, Artificial Sequence; identical to SEQ ID NO: 32421
  GFR-binding peptide
  MOD_RES (3)..(4)..(35): Xaa is C or S

SEQ ID NO: 34578 - protein, 40 aa, Artificial Sequence; identical to SEQ ID NO: 32422
  GFR-binding peptide
  MOD_RES (6)..(7): Xaa is C or S
  MOD_RES (21)..(22)..(23)..(24)..(25): Xaa is A or G
  MOD_RES (26)..(27)..(28)..(29): Xaa is A or G or is absent

SEQ ID NO: 34579 - protein, 32 aa, Artificial Sequence; identical to SEQ ID NO: 32423
  GFR-binding peptide
  MOD_RES (1)..(2): Xaa is C or S

SEQ ID NO: 34580 - protein, 35 aa, Artificial Sequence; identical to SEQ ID NO: 32424
  GFR-binding peptide
  MOD_RES (1)..(35): Xaa is C or S
  MOD_RES (15)..(16)..(17)..(18)..(19): Xaa is A or G
  MOD_RES (20)..(21)..(22)..(23): Xaa is A or G or is absent

SEQ ID NO: 34581 - protein, 44 aa, Artificial Sequence; identical to SEQ ID NO: 32425
  GFR-binding peptide
  MOD_RES (6)..(7)..(41)..(43): Xaa is C or S
  MOD_RES (21)..(22)..(23)..(24)..(25): Xaa is A or G
  MOD_RES (26)..(27)..(28)..(29): Xaa is A or G or is absent

SEQ ID NO: 34582 - protein, 39 aa, Artificial Sequence; identical to SEQ ID NO: 32426
  GFR-binding peptide
  MOD_RES (6)..(7): Xaa is C or S
  MOD_RES (21)..(22)..(23)..(24)..(25): Xaa is A or G
  MOD_RES (26)..(27)..(28)..(29): Xaa is A or G or is absent

SEQ ID NO: 34583 - protein, 34 aa, Artificial Sequence; identical to SEQ ID NO: 32427
  GFR-binding peptide
  MOD_RES (34)..(34): Xaa is C or S
  MOD_RES (14)..(15)..(16)..(17)..(18): Xaa is A or G
  MOD_RES (19)..(20)..(21)..(22): Xaa is A or G or is absent

SEQ ID NO: 34584 - protein, 38 aa, Artificial Sequence; identical to SEQ ID NO: 32428
  GFR-binding peptide
  MOD_RES (5)..(6): Xaa is C or S
  MOD_RES (20)..(21)..(22)..(23)..(24): Xaa is A or G
  MOD_RES (25)..(26)..(27)..(28): Xaa is A or G or is absent

SEQ ID NO: 34585 - protein, 38 aa, Artificial Sequence; identical to SEQ ID NO: 32429
  GFR-binding peptide
  MOD_RES (4)..(5): Xaa is C or S
  MOD_RES (19)..(20)..(21)..(22)..(23): Xaa is A or G
  MOD_RES (24)..(25)..(26)..(27): Xaa is A or G or is absent

SEQ ID NO: 34586 - protein, 36 aa, Artificial Sequence; identical to SEQ ID NO: 32430
  GFR-binding peptide
  MOD_RES (33)..(35): Xaa is C or S
  MOD_RES (14)..(15)..(16)..(17)..(18): Xaa is A or G
  MOD_RES (19)..(20)..(21)..(22): Xaa is A or G or is absent

SEQ ID NO: 34587 - protein, 33 aa, Artificial Sequence; identical to SEQ ID NO: 32431
  GFR-binding peptide
  MOD_RES (1)..(2): Xaa is C or S

SEQ ID NO: 34588 - protein, 35 aa, Artificial Sequence; identical to SEQ ID NO: 32432
  GFR-binding peptide
  MOD_RES (1)..(33)..(35): Xaa is C or S

SEQ ID NO: 34589 - protein, 37 aa, Artificial Sequence; identical to SEQ ID NO: 32433
  GFR-binding peptide
  MOD_RES (3)..(4)..(36): Xaa is C or S

SEQ ID NO: 34590 - protein, 37 aa, Artificial Sequence; identical to SEQ ID NO: 32434
  GFR-binding peptide
  MOD_RES (1)..(2)..(37): Xaa is C or S
  MOD_RES (16)..(17)..(18)..(19)..(20): Xaa is A or G
  MOD_RES (21)..(22)..(23)..(24): Xaa is A or G or is absent

SEQ ID NO: 34591 - protein, 33 aa, Artificial Sequence; identical to SEQ ID NO: 32435
  GFR-binding peptide
  MOD_RES (1)..(1): Xaa is C or S
  MOD_RES (15)..(16)..(17)..(18)..(19): Xaa is A or G
  MOD_RES (20)..(21)..(22)..(23): Xaa is A or G or is absent

SEQ ID NO: 34592 - protein, 39 aa, Artificial Sequence; identical to SEQ ID NO: 32436
  GFR-binding peptide
  MOD_RES (5)..(6)..(37)..(39): Xaa is C or S

SEQ ID NO: 34593 - protein, 34 aa, Artificial Sequence; identical to SEQ ID NO: 32437
  GFR-binding peptide
  MOD_RES (3)..(4): Xaa is C or S

SEQ ID NO: 34594 - protein, 37 aa, Artificial Sequence; identical to SEQ ID NO: 32438
  GFR-binding peptide
  MOD_RES (1)..(35)..(37): Xaa is C or S
  MOD_RES (15)..(16)..(17)..(18)..(19): Xaa is A or G
  MOD_RES (20)..(21)..(22)..(23): Xaa is A or G or is absent

SEQ ID NO: 34595 - protein, 42 aa, Artificial Sequence; identical to SEQ ID NO: 32439
  GFR-binding peptide
  MOD_RES (6)..(7)..(39)..(41): Xaa is C or S

SEQ ID NO: 34596 - protein, 35 aa, Artificial Sequence; identical to SEQ ID NO: 32440
  GFR-binding peptide
  MOD_RES (1)..(1): Xaa is C or S
  MOD_RES (15)..(16)..(17)..(18)..(19): Xaa is A or G
  MOD_RES (20)..(21)..(22)..(23): Xaa is A or G or is absent

SEQ ID NO: 34597 - protein, 36 aa, Artificial Sequence; identical to SEQ ID NO: 32441
  GFR-binding peptide
  MOD_RES (2)..(3)..(35): Xaa is C or S

SEQ ID NO: 34598 - protein, 38 aa, Artificial Sequence; identical to SEQ ID NO: 32442
  GFR-binding peptide
  MOD_RES (6)..(7): Xaa is C or S

SEQ ID NO: 34599 - protein, 38 aa, Artificial Sequence; identical to SEQ ID NO: 32443
  GFR-binding peptide
  MOD_RES (1)..(2)..(36)..(38): Xaa is C or S
  MOD_RES (16)..(17)..(18)..(19)..(20): Xaa is A or G
  MOD_RES (21)..(22)..(23)..(24): Xaa is A or G or is absent

SEQ ID NO: 34600 - protein, 36 aa, Artificial Sequence; identical to SEQ ID NO: 32444
  GFR-binding peptide
  MOD_RES (1)..(2)..(36): Xaa is C or S
  MOD_RES (16)..(17)..(18)..(19)..(20): Xaa is A or G
  MOD_RES (21)..(22)..(23)..(24): Xaa is A or G or is absent

SEQ ID NO: 34601 - protein, 36 aa, Artificial Sequence; identical to SEQ ID NO: 32445
  GFR-binding peptide
  MOD_RES (5)..(6): Xaa is C or S

SEQ ID NO: 34602 - protein, 43 aa, Artificial Sequence; identical to SEQ ID NO: 32446
  GFR-binding peptide
  MOD_RES (6)..(7)..(41)..(43): Xaa is C or S
  MOD_RES (21)..(22)..(23)..(24)..(25): Xaa is A or G
  MOD_RES (26)..(27)..(28)..(29): Xaa is A or G or is absent

SEQ ID NO: 34603 - protein, 37 aa, Artificial Sequence; identical to SEQ ID NO: 32447
  GFR-binding peptide
  MOD_RES (4)..(5): Xaa is C or S
  MOD_RES (19)..(20)..(21)..(22)..(23): Xaa is A or G
  MOD_RES (24)..(25)..(26)..(27): Xaa is A or G or is absent

SEQ ID NO: 34604 - protein, 35 aa, Artificial Sequence; identical to SEQ ID NO: 32448
  GFR-binding peptide
  MOD_RES (1)..(2): Xaa is C or S
  MOD_RES (16)..(17)..(18)..(19)..(20): Xaa is A or G
  MOD_RES (21)..(22)..(23)..(24): Xaa is A or G or is absent

SEQ ID NO: 34605 - protein, 31 aa, Artificial Sequence; identical to SEQ ID NO: 32449
  GFR-binding peptide

SEQ ID NO: 34606 - protein, 41 aa, Artificial Sequence; identical to SEQ ID NO: 32450
  GFR-binding peptide
  MOD_RES (3)..(4)..(38)..(40): Xaa is C or S
  MOD_RES (18)..(19)..(20)..(21)..(22): Xaa is A or G
  MOD_RES (23)..(24)..(25)..(26): Xaa is A or G or is absent

SEQ ID NO: 34607 - protein, 40 aa, Artificial Sequence; identical to SEQ ID NO: 32451
  GFR-binding peptide
  MOD_RES (5)..(6)..(38)..(40): Xaa is C or S

SEQ ID NO: 34608 - protein, 37 aa, Artificial Sequence; identical to SEQ ID NO: 32452
  GFR-binding peptide
  MOD_RES (4)..(5)..(37): Xaa is C or S

SEQ ID NO: 34609 - protein, 37 aa, Artificial Sequence; identical to SEQ ID NO: 32453
  GFR-binding peptide
  MOD_RES (6)..(7): Xaa is C or S

SEQ ID NO: 34610 - protein, 34 aa, Artificial Sequence; identical to SEQ ID NO: 32454
  GFR-binding peptide
  MOD_RES (2)..(3)..(34): Xaa is C or S

SEQ ID NO: 34611 - protein, 36 aa, Artificial Sequence; identical to SEQ ID NO: 32455
  GFR-binding peptide
  MOD_RES (2)..(3): Xaa is C or S
  MOD_RES (17)..(18)..(19)..(20)..(21): Xaa is A or G
  MOD_RES (22)..(23)..(24)..(25): Xaa is A or G or is absent

SEQ ID NO: 34612 - protein, 31 aa, Artificial Sequence; identical to SEQ ID NO: 32456
  GFR-binding peptide
  MOD_RES (1)..(1): Xaa is C or S

SEQ ID NO: 34613 - protein, 41 aa, Artificial Sequence; identical to SEQ ID NO: 32457
  GFR-binding peptide
  MOD_RES (6)..(7)..(40): Xaa is C or S

SEQ ID NO: 34614 - protein, 37 aa, Artificial Sequence; identical to SEQ ID NO: 32458
  GFR-binding peptide
  MOD_RES (2)..(3): Xaa is C or S
  MOD_RES (17)..(18)..(19)..(20)..(21): Xaa is A or G
  MOD_RES (22)..(23)..(24)..(25): Xaa is A or G or is absent

SEQ ID NO: 34615 - protein, 37 aa, Artificial Sequence; identical to SEQ ID NO: 32459
  GFR-binding peptide
  MOD_RES (1)..(2)..(36): Xaa is C or S
  MOD_RES (16)..(17)..(18)..(19)..(20): Xaa is A or G
  MOD_RES (21)..(22)..(23)..(24): Xaa is A or G or is absent

SEQ ID NO: 34616 - protein, 32 aa, Artificial Sequence; identical to SEQ ID NO: 32460
  GFR-binding peptide
  MOD_RES (1)..(2): Xaa is C or S

SEQ ID NO: 34617 - protein, 34 aa, Artificial Sequence; identical to SEQ ID NO: 32461
  GFR-binding peptide
  MOD_RES (1)..(2): Xaa is C or S
  MOD_RES (16)..(17)..(18)..(19)..(20): Xaa is A or G
  MOD_RES (21)..(22)..(23)..(24): Xaa is A or G or is absent

SEQ ID NO: 34618 - protein, 38 aa, Artificial Sequence; identical to SEQ ID NO: 32462
  GFR-binding peptide
  MOD_RES (2)..(3)..(36)..(38): Xaa is C or S

SEQ ID NO: 34619 - protein, 36 aa, Artificial Sequence; identical to SEQ ID NO: 32463
  GFR-binding peptide
  MOD_RES (2)..(3)..(35): Xaa is C or S

SEQ ID NO: 34620 - protein, 34 aa, Artificial Sequence; identical to SEQ ID NO: 32464
  GFR-binding peptide
  MOD_RES (3)..(4): Xaa is C or S

SEQ ID NO: 34621 - protein, 43 aa, Artificial Sequence; identical to SEQ ID NO: 32465
  GFR-binding peptide
  MOD_RES (5)..(6)..(40)..(42): Xaa is C or S
  MOD_RES (20)..(21)..(22)..(23)..(24): Xaa is A or G
  MOD_RES (25)..(26)..(27)..(28): Xaa is A or G or is absent

SEQ ID NO: 34622 - protein, 32 aa, Artificial Sequence; identical to SEQ ID NO: 32466
  GFR-binding peptide
  MOD_RES (1)..(2): Xaa is C or S

SEQ ID NO: 34623 - protein, 36 aa, Artificial Sequence; identical to SEQ ID NO: 32467
  GFR-binding peptide
  MOD_RES (1)..(2)..(34)..(36): Xaa is C or S

SEQ ID NO: 34624 - protein, 37 aa, Artificial Sequence; identical to SEQ ID NO: 32468
  GFR-binding peptide
  MOD_RES (4)..(4): Xaa is C or S
  MOD_RES (18)..(19)..(20)..(21)..(22): Xaa is A or G
  MOD_RES (23)..(24)..(25)..(26): Xaa is A or G or is absent

SEQ ID NO: 34625 - protein, 38 aa, Artificial Sequence; identical to SEQ ID NO: 32469
  GFR-binding peptide
  MOD_RES (5)..(6)..(38): Xaa is C or S

SEQ ID NO: 34626 - protein, 38 aa, Artificial Sequence; identical to SEQ ID NO: 32470
  GFR-binding peptide
  MOD_RES (3)..(4)..(38): Xaa is C or S
  MOD_RES (18)..(19)..(20)..(21)..(22): Xaa is A or G
  MOD_RES (23)..(24)..(25)..(26): Xaa is A or G or is absent

SEQ ID NO: 34627 - protein, 37 aa, Artificial Sequence; identical to SEQ ID NO: 32471
  GFR-binding peptide
  MOD_RES (2)..(3)..(35)..(37): Xaa is C or S

SEQ ID NO: 34628 - protein, 38 aa, Artificial Sequence; identical to SEQ ID NO: 32472
  GFR-binding peptide
  MOD_RES (5)..(6): Xaa is C or S
  MOD_RES (20)..(21)..(22)..(23)..(24): Xaa is A or G
  MOD_RES (25)..(26)..(27)..(28): Xaa is A or G or is absent

SEQ ID NO: 34629 - protein, 35 aa, Artificial Sequence; identical to SEQ ID NO: 32473
  GFR-binding peptide
  MOD_RES (1)..(2): Xaa is C or S
  MOD_RES (16)..(17)..(18)..(19)..(20): Xaa is A or G
  MOD_RES (21)..(22)..(23)..(24): Xaa is A or G or is absent

SEQ ID NO: 34630 - protein, 33 aa, Artificial Sequence; identical to SEQ ID NO: 32474
  GFR-binding peptide
  MOD_RES (14)..(15)..(16)..(17)..(18): Xaa is A or G
  MOD_RES (19)..(20)..(21)..(22): Xaa is A or G or is absent

SEQ ID NO: 34631 - protein, 34 aa, Artificial Sequence; identical to SEQ ID NO: 32475
  GFR-binding peptide
  MOD_RES (3)..(4): Xaa is C or S

SEQ ID NO: 34632 - protein, 36 aa, Artificial Sequence; identical to SEQ ID NO: 32476
  GFR-binding peptide
  MOD_RES (3)..(4): Xaa is C or S
  MOD_RES (18)..(19)..(20)..(21)..(22): Xaa is A or G
  MOD_RES (23)..(24)..(25)..(26): Xaa is A or G or is absent

SEQ ID NO: 34633 - protein, 40 aa, Artificial Sequence; identical to SEQ ID NO: 32477
  GFR-binding peptide
  MOD_RES (5)..(37)..(39): Xaa is C or S

SEQ ID NO: 34634 - protein, 39 aa, Artificial Sequence; identical to SEQ ID NO: 32478
  GFR-binding peptide
  MOD_RES (4)..(5)..(37)..(39): Xaa is C or S

SEQ ID NO: 34635 - protein, 42 aa, Artificial Sequence; identical to SEQ ID NO: 32479
  GFR-binding peptide
  MOD_RES (4)..(5)..(40)..(42): Xaa is C or S
  MOD_RES (19)..(20)..(21)..(22)..(23): Xaa is A or G
  MOD_RES (24)..(25)..(26)..(27): Xaa is A or G or is absent

SEQ ID NO: 34636 - protein, 39 aa, Artificial Sequence; identical to SEQ ID NO: 32480
  GFR-binding peptide
  MOD_RES (5)..(6): Xaa is C or S
  MOD_RES (20)..(21)..(22)..(23)..(24): Xaa is A or G
  MOD_RES (25)..(26)..(27)..(28): Xaa is A or G or is absent

SEQ ID NO: 34637 - protein, 34 aa, Artificial Sequence; identical to SEQ ID NO: 32481
  GFR-binding peptide
  MOD_RES (1)..(2): Xaa is C or S
  MOD_RES (16)..(17)..(18)..(19)..(20): Xaa is A or G
  MOD_RES (21)..(22)..(23)..(24): Xaa is A or G or is absent

SEQ ID NO: 34638 - protein, 37 aa, Artificial Sequence; identical to SEQ ID NO: 32482
  GFR-binding peptide
  MOD_RES (3)..(4): Xaa is C or S
  MOD_RES (18)..(19)..(20)..(21)..(22): Xaa is A or G
  MOD_RES (23)..(24)..(25)..(26): Xaa is A or G or is absent

SEQ ID NO: 34639 - protein, 34 aa, Artificial Sequence; identical to SEQ ID NO: 32483
  GFR-binding peptide
  MOD_RES (2)..(3): Xaa is C or S

SEQ ID NO: 34640 - protein, 38 aa, Artificial Sequence; identical to SEQ ID NO: 32484
  GFR-binding peptide
  MOD_RES (2)..(3)..(35)..(37): Xaa is C or S

SEQ ID NO: 34641 - protein, 33 aa, Artificial Sequence; identical to SEQ ID NO: 32485
  GFR-binding peptide
  MOD_RES (2)..(3): Xaa is C or S

SEQ ID NO: 34642 - protein, 38 aa, Artificial Sequence; identical to SEQ ID NO: 32486
  GFR-binding peptide
  MOD_RES (1)..(35)..(37): Xaa is C or S
  MOD_RES (15)..(16)..(17)..(18)..(19): Xaa is A or G
  MOD_RES (20)..(21)..(22)..(23): Xaa is A or G or is absent

SEQ ID NO: 34643 - protein, 33 aa, Artificial Sequence; identical to SEQ ID NO: 32487
  GFR-binding peptide
  MOD_RES (32)..(32): Xaa is C or S

SEQ ID NO: 34644 - protein, 37 aa, Artificial Sequence; identical to SEQ ID NO: 32488
  GFR-binding peptide
  MOD_RES (2)..(3)..(37): Xaa is C or S
  MOD_RES (17)..(18)..(19)..(20)..(21): Xaa is A or G
  MOD_RES (22)..(23)..(24)..(25): Xaa is A or G or is absent

SEQ ID NO: 34645 - protein, 39 aa, Artificial Sequence; identical to SEQ ID NO: 32489
  GFR-binding peptide
  MOD_RES (1)..(2)..(36)..(38): Xaa is C or S
  MOD_RES (16)..(17)..(18)..(19)..(20): Xaa is A or G
  MOD_RES (21)..(22)..(23)..(24): Xaa is A or G or is absent

SEQ ID NO: 34646 - protein, 41 aa, Artificial Sequence; identical to SEQ ID NO: 32490
  GFR-binding peptide
  MOD_RES (3)..(4)..(38)..(40): Xaa is C or S
  MOD_RES (18)..(19)..(20)..(21)..(22): Xaa is A or G
  MOD_RES (23)..(24)..(25)..(26): Xaa is A or G or is absent

SEQ ID NO: 34647 - protein, 40 aa, Artificial Sequence; identical to SEQ ID NO: 32491
  GFR-binding peptide
  MOD_RES (2)..(3)..(38)..(40): Xaa is C or S
  MOD_RES (17)..(18)..(19)..(20)..(21): Xaa is A or G
  MOD_RES (22)..(23)..(24)..(25): Xaa is A or G or is absent

SEQ ID NO: 34648 - protein, 39 aa, Artificial Sequence; identical to SEQ ID NO: 32492
  GFR-binding peptide
  MOD_RES (4)..(5)..(37)..(39): Xaa is C or S

SEQ ID NO: 34649 - protein, 33 aa, Artificial Sequence; identical to SEQ ID NO: 32493
  GFR-binding peptide
  MOD_RES (32)..(32): Xaa is C or S

SEQ ID NO: 34650 - protein, 35 aa, Artificial Sequence; identical to SEQ ID NO: 32494
  GFR-binding peptide
  MOD_RES (34)..(34): Xaa is C or S
  MOD_RES (14)..(15)..(16)..(17)..(18): Xaa is A or G
  MOD_RES (19)..(20)..(21)..(22): Xaa is A or G or is absent

SEQ ID NO: 34651 - protein, 33 aa, Artificial Sequence; identical to SEQ ID NO: 32495
  GFR-binding peptide
  MOD_RES (32)..(32): Xaa is C or S

SEQ ID NO: 34652 - protein, 39 aa, Artificial Sequence; identical to SEQ ID NO: 32496
  GFR-binding peptide
  MOD_RES (2)..(3)..(37)..(39): Xaa is C or S
  MOD_RES (17)..(18)..(19)..(20)..(21): Xaa is A or G
  MOD_RES (22)..(23)..(24)..(25): Xaa is A or G or is absent

SEQ ID NO: 34653 - protein, 37 aa, Artificial Sequence; identical to SEQ ID NO: 32497
  GFR-binding peptide
  MOD_RES (2)..(3)..(37): Xaa is C or S
  MOD_RES (17)..(18)..(19)..(20)..(21): Xaa is A or G
  MOD_RES (22)..(23)..(24)..(25): Xaa is A or G or is absent

SEQ ID NO: 34654 - protein, 33 aa, Artificial Sequence; identical to SEQ ID NO: 32498
  GFR-binding peptide
  MOD_RES (1)..(33): Xaa is C or S

SEQ ID NO: 34655 - protein, 36 aa, Artificial Sequence; identical to SEQ ID NO: 32499
  GFR-binding peptide
  MOD_RES (1)..(2)..(36): Xaa is C or S
  MOD_RES (16)..(17)..(18)..(19)..(20): Xaa is A or G
  MOD_RES (21)..(22)..(23)..(24): Xaa is A or G or is absent

SEQ ID NO: 34656 - protein, 35 aa, Artificial Sequence; identical to SEQ ID NO: 32500
  GFR-binding peptide
  MOD_RES (2)..(3): Xaa is C or S

SEQ ID NO: 34657 - protein, 42 aa, Artificial Sequence; identical to SEQ ID NO: 32501
  GFR-binding peptide
  MOD_RES (6)..(7)..(42): Xaa is C or S
  MOD_RES (21)..(22)..(23)..(24)..(25): Xaa is A or G
  MOD_RES (26)..(27)..(28)..(29): Xaa is A or G or is absent

SEQ ID NO: 34658 - protein, 39 aa, Artificial Sequence; identical to SEQ ID NO: 32502
  GFR-binding peptide
  MOD_RES (4)..(5)..(37)..(39): Xaa is C or S

SEQ ID NO: 34659 - protein, 33 aa, Artificial Sequence; identical to SEQ ID NO: 32503
  GFR-binding peptide
  MOD_RES (14)..(15)..(16)..(17)..(18): Xaa is A or G
  MOD_RES (19)..(20)..(21)..(22): Xaa is A or G or is absent

SEQ ID NO: 34660 - protein, 38 aa, Artificial Sequence; identical to SEQ ID NO: 32504
  GFR-binding peptide
  MOD_RES (5)..(6): Xaa is C or S
  MOD_RES (20)..(21)..(22)..(23)..(24): Xaa is A or G
  MOD_RES (25)..(26)..(27)..(28): Xaa is A or G or is absent

SEQ ID NO: 34661 - protein, 37 aa, Artificial Sequence; identical to SEQ ID NO: 32505
  GFR-binding peptide
  MOD_RES (1)..(2)..(36): Xaa is C or S
  MOD_RES (16)..(17)..(18)..(19)..(20): Xaa is A or G
  MOD_RES (21)..(22)..(23)..(24): Xaa is A or G or is absent

SEQ ID NO: 34662 - protein, 38 aa, Artificial Sequence; identical to SEQ ID NO: 32506
  GFR-binding peptide
  MOD_RES (4)..(5): Xaa is C or S
  MOD_RES (19)..(20)..(21)..(22)..(23): Xaa is A or G
  MOD_RES (24)..(25)..(26)..(27): Xaa is A or G or is absent

SEQ ID NO: 34663 - protein, 33 aa, Artificial Sequence; identical to SEQ ID NO: 32507
  GFR-binding peptide
  MOD_RES (32)..(32): Xaa is C or S

SEQ ID NO: 34664 - protein, 35 aa, Artificial Sequence; identical to SEQ ID NO: 32508
  GFR-binding peptide
  MOD_RES (3)..(4): Xaa is C or S

SEQ ID NO: 34665 - protein, 35 aa, Artificial Sequence; identical to SEQ ID NO: 32509
  GFR-binding peptide
  MOD_RES (1)..(2)..(33)..(35): Xaa is C or S

SEQ ID NO: 34666 - protein, 42 aa, Artificial Sequence; identical to SEQ ID NO: 32510
  GFR-binding peptide
  MOD_RES (6)..(7)..(39)..(41): Xaa is C or S

SEQ ID NO: 34667 - protein, 35 aa, Artificial Sequence; identical to SEQ ID NO: 32511
  GFR-binding peptide
  MOD_RES (2)..(3): Xaa is C or S
  MOD_RES (17)..(18)..(19)..(20)..(21): Xaa is A or G
  MOD_RES (22)..(23)..(24)..(25): Xaa is A or G or is absent

SEQ ID NO: 34668 - protein, 39 aa, Artificial Sequence; identical to SEQ ID NO: 32512
  GFR-binding peptide
  MOD_RES (2)..(3)..(37)..(39): Xaa is C or S
  MOD_RES (17)..(18)..(19)..(20)..(21): Xaa is A or G
  MOD_RES (22)..(23)..(24)..(25): Xaa is A or G or is absent

SEQ ID NO: 34669 - protein, 33 aa, Artificial Sequence; identical to SEQ ID NO: 32513
  GFR-binding peptide
  MOD_RES (1)..(2): Xaa is C or S

SEQ ID NO: 34670 - protein, 38 aa, Artificial Sequence; identical to SEQ ID NO: 32514
  GFR-binding peptide
  MOD_RES (4)..(5): Xaa is C or S
  MOD_RES (19)..(20)..(21)..(22)..(23): Xaa is A or G
  MOD_RES (24)..(25)..(26)..(27): Xaa is A or G or is absent

SEQ ID NO: 34671 - protein, 35 aa, Artificial Sequence; identical to SEQ ID NO: 32515
  GFR-binding peptide
  MOD_RES (1)..(33)..(35): Xaa is C or S

SEQ ID NO: 34672 - protein, 40 aa, Artificial Sequence; identical to SEQ ID NO: 32516
  GFR-binding peptide
  MOD_RES (4)..(5)..(37)..(39): Xaa is C or S

SEQ ID NO: 34673 - protein, 41 aa, Artificial Sequence; identical to SEQ ID NO: 32517
  GFR-binding peptide
  MOD_RES (6)..(7)..(39)..(41): Xaa is C or S

SEQ ID NO: 34674 - protein, 32 aa, Artificial Sequence; identical to SEQ ID NO: 32518
  GFR-binding peptide
  MOD_RES (1)..(2): Xaa is C or S

SEQ ID NO: 34675 - protein, 43 aa, Artificial Sequence; identical to SEQ ID NO: 32519
  GFR-binding peptide
  MOD_RES (6)..(7)..(41)..(43): Xaa is C or S
  MOD_RES (21)..(22)..(23)..(24)..(25): Xaa is A or G
  MOD_RES (26)..(27)..(28)..(29): Xaa is A or G or is absent

SEQ ID NO: 34676 - protein, 38 aa, Artificial Sequence; identical to SEQ ID NO: 32520
  GFR-binding peptide
  MOD_RES (3)..(4)..(36)..(38): Xaa is C or S

SEQ ID NO: 34677 - protein, 38 aa, Artificial Sequence; identical to SEQ ID NO: 32521
  GFR-binding peptide
  MOD_RES (6)..(7): Xaa is C or S

SEQ ID NO: 34678 - protein, 44 aa, Artificial Sequence; identical to SEQ ID NO: 32522
  GFR-binding peptide
  MOD_RES (6)..(7)..(41)..(43): Xaa is C or S
  MOD_RES (21)..(22)..(23)..(24)..(25): Xaa is A or G
  MOD_RES (26)..(27)..(28)..(29): Xaa is A or G or is absent

SEQ ID NO: 34679 - protein, 41 aa, Artificial Sequence; identical to SEQ ID NO: 32523
  GFR-binding peptide
  MOD_RES (5)..(6)..(38)..(40): Xaa is C or S

SEQ ID NO: 34680 - protein, 36 aa, Artificial Sequence; identical to SEQ ID NO: 32524
  GFR-binding peptide
  MOD_RES (33)..(35): Xaa is C or S

SEQ ID NO: 34681 - protein, 41 aa, Artificial Sequence; identical to SEQ ID NO: 32525
  GFR-binding peptide
  MOD_RES (6)..(7)..(39)..(41): Xaa is C or S

SEQ ID NO: 34682 - protein, 33 aa, Artificial Sequence; identical to SEQ ID NO: 32526
  GFR-binding peptide
  MOD_RES (1)..(1): Xaa is C or S
  MOD_RES (15)..(16)..(17)..(18)..(19): Xaa is A or G
  MOD_RES (20)..(21)..(22)..(23): Xaa is A or G or is absent

SEQ ID NO: 34683 - protein, 35 aa, Artificial Sequence; identical to SEQ ID NO: 32527
  GFR-binding peptide
  MOD_RES (2)..(3)..(34): Xaa is C or S

SEQ ID NO: 34684 - protein, 34 aa, Artificial Sequence; identical to SEQ ID NO: 32528
  GFR-binding peptide
  MOD_RES (1)..(2)..(34): Xaa is C or S

SEQ ID NO: 34685 - protein, 35 aa, Artificial Sequence; identical to SEQ ID NO: 32529
  GFR-binding peptide
  MOD_RES (3)..(4): Xaa is C or S

SEQ ID NO: 34686 - protein, 43 aa, Artificial Sequence; identical to SEQ ID NO: 32530
  GFR-binding peptide
  MOD_RES (6)..(7)..(42): Xaa is C or S
  MOD_RES (21)..(22)..(23)..(24)..(25): Xaa is A or G
  MOD_RES (26)..(27)..(28)..(29): Xaa is A or G or is absent

SEQ ID NO: 34687 - protein, 43 aa, Artificial Sequence; identical to SEQ ID NO: 32531
  GFR-binding peptide
  MOD_RES (5)..(6)..(40)..(42): Xaa is C or S
  MOD_RES (20)..(21)..(22)..(23)..(24): Xaa is A or G
  MOD_RES (25)..(26)..(27)..(28): Xaa is A or G or is absent

SEQ ID NO: 34688 - protein, 40 aa, Artificial Sequence; identical to SEQ ID NO: 32532
  GFR-binding peptide
  MOD_RES (5)..(6)..(38)..(40): Xaa is C or S

SEQ ID NO: 34689 - protein, 36 aa, Artificial Sequence; identical to SEQ ID NO: 32533
  GFR-binding peptide
  MOD_RES (34)..(36): Xaa is C or S
  MOD_RES (14)..(15)..(16)..(17)..(18): Xaa is A or G
  MOD_RES (19)..(20)..(21)..(22): Xaa is A or G or is absent

SEQ ID NO: 34690 - protein, 33 aa, Artificial Sequence; identical to SEQ ID NO: 32534
  GFR-binding peptide
  MOD_RES (1)..(1): Xaa is C or S

SEQ ID NO: 34691 - protein, 38 aa, Artificial Sequence; identical to SEQ ID NO: 32535
  GFR-binding peptide
  MOD_RES (6)..(6): Xaa is C or S
  MOD_RES (20)..(21)..(22)..(23)..(24): Xaa is A or G
  MOD_RES (25)..(26)..(27)..(28): Xaa is A or G or is absent

SEQ ID NO: 34692 - protein, 44 aa, Artificial Sequence; identical to SEQ ID NO: 32536
  GFR-binding peptide
  MOD_RES (6)..(7)..(42)..(44): Xaa is C or S
  MOD_RES (21)..(22)..(23)..(24)..(25): Xaa is A or G
  MOD_RES (26)..(27)..(28)..(29): Xaa is A or G or is absent

SEQ ID NO: 34693 - protein, 38 aa, Artificial Sequence; identical to SEQ ID NO: 32537
  GFR-binding peptide
  MOD_RES (4)..(5)..(37): Xaa is C or S

SEQ ID NO: 34694 - protein, 39 aa, Artificial Sequence; identical to SEQ ID NO: 32538
  GFR-binding peptide
  MOD_RES (4)..(5): Xaa is C or S
  MOD_RES (19)..(20)..(21)..(22)..(23): Xaa is A or G
  MOD_RES (24)..(25)..(26)..(27): Xaa is A or G or is absent

SEQ ID NO: 34695 - protein, 41 aa, Artificial Sequence; identical to SEQ ID NO: 32539
  GFR-binding peptide
  MOD_RES (6)..(7)..(41): Xaa is C or S
  MOD_RES (21)..(22)..(23)..(24)..(25): Xaa is A or G
  MOD_RES (26)..(27)..(28)..(29): Xaa is A or G or is absent

SEQ ID NO: 34696 - protein, 41 aa, Artificial Sequence; identical to SEQ ID NO: 32540
  GFR-binding peptide
  MOD_RES (6)..(7)..(41): Xaa is C or S
  MOD_RES (21)..(22)..(23)..(24)..(25): Xaa is A or G
  MOD_RES (26)..(27)..(28)..(29): Xaa is A or G or is absent

SEQ ID NO: 34697 - protein, 33 aa, Artificial Sequence; identical to SEQ ID NO: 32541
  GFR-binding peptide
  MOD_RES (1)..(33): Xaa is C or S

SEQ ID NO: 34698 - protein, 34 aa, Artificial Sequence; identical to SEQ ID NO: 32542
  GFR-binding peptide
  MOD_RES (34)..(34): Xaa is C or S
  MOD_RES (14)..(15)..(16)..(17)..(18): Xaa is A or G
  MOD_RES (19)..(20)..(21)..(22): Xaa is A or G or is absent

SEQ ID NO: 34699 - protein, 33 aa, Artificial Sequence; identical to SEQ ID NO: 32543
  GFR-binding peptide
  MOD_RES (33)..(33): Xaa is C or S
  MOD_RES (14)..(15)..(16)..(17)..(18): Xaa is A or G
  MOD_RES (19)..(20)..(21)..(22): Xaa is A or G or is absent

SEQ ID NO: 34700 - protein, 35 aa, Artificial Sequence; identical to SEQ ID NO: 32544
  GFR-binding peptide
  MOD_RES (32)..(34): Xaa is C or S

SEQ ID NO: 34701 - protein, 39 aa, Artificial Sequence; identical to SEQ ID NO: 32545
  GFR-binding peptide
  MOD_RES (3)..(4)..(37)..(39): Xaa is C or S

SEQ ID NO: 34702 - protein, 34 aa, Artificial Sequence; identical to SEQ ID NO: 32546
  GFR-binding peptide
  MOD_RES (2)..(3): Xaa is C or S

SEQ ID NO: 34703 - protein, 32 aa, Artificial Sequence; identical to SEQ ID NO: 32547
  GFR-binding peptide
  MOD_RES (1)..(1): Xaa is C or S

SEQ ID NO: 34704 - protein, 39 aa, Artificial Sequence; identical to SEQ ID NO: 32548
  GFR-binding peptide
  MOD_RES (4)..(5)..(37)..(39): Xaa is C or S

SEQ ID NO: 34705 - protein, 38 aa, Artificial Sequence; identical to SEQ ID NO: 32549
  GFR-binding peptide
  MOD_RES (5)..(6): Xaa is C or S
  MOD_RES (20)..(21)..(22)..(23)..(24): Xaa is A or G
  MOD_RES (25)..(26)..(27)..(28): Xaa is A or G or is absent

SEQ ID NO: 34706 - protein, 42 aa, Artificial Sequence; identical to SEQ ID NO: 32550
  GFR-binding peptide
  MOD_RES (5)..(6)..(40)..(42): Xaa is C or S
  MOD_RES (20)..(21)..(22)..(23)..(24): Xaa is A or G
  MOD_RES (25)..(26)..(27)..(28): Xaa is A or G or is absent

SEQ ID NO: 34707 - protein, 36 aa, Artificial Sequence; identical to SEQ ID NO: 32551
  GFR-binding peptide
  MOD_RES (3)..(4)..(36): Xaa is C or S

SEQ ID NO: 34708 - protein, 41 aa, Artificial Sequence; identical to SEQ ID NO: 32552
  GFR-binding peptide
  MOD_RES (5)..(6)..(40): Xaa is C or S
  MOD_RES (20)..(21)..(22)..(23)..(24): Xaa is A or G
  MOD_RES (25)..(26)..(27)..(28): Xaa is A or G or is absent

SEQ ID NO: 34709 - protein, 41 aa, Artificial Sequence; identical to SEQ ID NO: 32553
  GFR-binding peptide
  MOD_RES (5)..(6)..(41): Xaa is C or S
  MOD_RES (20)..(21)..(22)..(23)..(24): Xaa is A or G
  MOD_RES (25)..(26)..(27)..(28): Xaa is A or G or is absent

SEQ ID NO: 34710 - protein, 34 aa, Artificial Sequence; identical to SEQ ID NO: 32554
  GFR-binding peptide
  MOD_RES (1)..(2): Xaa is C or S
  MOD_RES (16)..(17)..(18)..(19)..(20): Xaa is A or G
  MOD_RES (21)..(22)..(23)..(24): Xaa is A or G or is absent

SEQ ID NO: 34711 - protein, 36 aa, Artificial Sequence; identical to SEQ ID NO: 32555
  GFR-binding peptide
  MOD_RES (1)..(35): Xaa is C or S
  MOD_RES (15)..(16)..(17)..(18)..(19): Xaa is A or G
  MOD_RES (20)..(21)..(22)..(23): Xaa is A or G or is absent

SEQ ID NO: 34712 - protein, 37 aa, Artificial Sequence; identical to SEQ ID NO: 32556
  GFR-binding peptide
  MOD_RES (4)..(5): Xaa is C or S
  MOD_RES (19)..(20)..(21)..(22)..(23): Xaa is A or G
  MOD_RES (24)..(25)..(26)..(27): Xaa is A or G or is absent

SEQ ID NO: 34713 - protein, 32 aa, Artificial Sequence; identical to SEQ ID NO: 32557
  GFR-binding peptide
  MOD_RES (1)..(2): Xaa is C or S

SEQ ID NO: 34714 - protein, 38 aa, Artificial Sequence; identical to SEQ ID NO: 32558
  GFR-binding peptide
  MOD_RES (2)..(3)..(35)..(37): Xaa is C or S

SEQ ID NO: 34715 - protein, 37 aa, Artificial Sequence; identical to SEQ ID NO: 32559
  GFR-binding peptide
  MOD_RES (1)..(2)..(36): Xaa is C or S
  MOD_RES (16)..(17)..(18)..(19)..(20): Xaa is A or G
  MOD_RES (21)..(22)..(23)..(24): Xaa is A or G or is absent

SEQ ID NO: 34716 - protein, 36 aa, Artificial Sequence; identical to SEQ ID NO: 32560
  GFR-binding peptide
  MOD_RES (4)..(5): Xaa is C or S

SEQ ID NO: 34717 - protein, 31 aa, Artificial Sequence; identical to SEQ ID NO: 32561
  GFR-binding peptide
  MOD_RES (31)..(31): Xaa is C or S

SEQ ID NO: 34718 - protein, 34 aa, Artificial Sequence; identical to SEQ ID NO: 32562
  GFR-binding peptide
  MOD_RES (31)..(33): Xaa is C or S

SEQ ID NO: 34719 - protein, 40 aa, Artificial Sequence; identical to SEQ ID NO: 32563
  GFR-binding peptide
  MOD_RES (3)..(4)..(38)..(40): Xaa is C or S
  MOD_RES (18)..(19)..(20)..(21)..(22): Xaa is A or G
  MOD_RES (23)..(24)..(25)..(26): Xaa is A or G or is absent

SEQ ID NO: 34720 - protein, 39 aa, Artificial Sequence; identical to SEQ ID NO: 32564
  GFR-binding peptide
  MOD_RES (6)..(7)..(39): Xaa is C or S

SEQ ID NO: 34721 - protein, 35 aa, Artificial Sequence; identical to SEQ ID NO: 32565
  GFR-binding peptide
  MOD_RES (2)..(3): Xaa is C or S
  MOD_RES (17)..(18)..(19)..(20)..(21): Xaa is A or G
  MOD_RES (22)..(23)..(24)..(25): Xaa is A or G or is absent

SEQ ID NO: 34722 - protein, 42 aa, Artificial Sequence; identical to SEQ ID NO: 32566
  GFR-binding peptide
  MOD_RES (6)..(7)..(39)..(41): Xaa is C or S

SEQ ID NO: 34723 - protein, 41 aa, Artificial Sequence; identical to SEQ ID NO: 32567
  GFR-binding peptide
  MOD_RES (5)..(6)..(38)..(40): Xaa is C or S

SEQ ID NO: 34724 - protein, 39 aa, Artificial Sequence; identical to SEQ ID NO: 32568
  GFR-binding peptide
  MOD_RES (1)..(2)..(36)..(38): Xaa is C or S
  MOD_RES (16)..(17)..(18)..(19)..(20): Xaa is A or G
  MOD_RES (21)..(22)..(23)..(24): Xaa is A or G or is absent

SEQ ID NO: 34725 - protein, 42 aa, Artificial Sequence; identical to SEQ ID NO: 32569
  GFR-binding peptide
  MOD_RES (6)..(7)..(41): Xaa is C or S
  MOD_RES (21)..(22)..(23)..(24)..(25): Xaa is A or G
  MOD_RES (26)..(27)..(28)..(29): Xaa is A or G or is absent

SEQ ID NO: 34726 - protein, 37 aa, Artificial Sequence; identical to SEQ ID NO: 32570
  GFR-binding peptide
  MOD_RES (1)..(2)..(36): Xaa is C or S
  MOD_RES (16)..(17)..(18)..(19)..(20): Xaa is A or G
  MOD_RES (21)..(22)..(23)..(24): Xaa is A or G or is absent

SEQ ID NO: 34727 - protein, 39 aa, Artificial Sequence; identical to SEQ ID NO: 32571
  GFR-binding peptide
  MOD_RES (3)..(4)..(38): Xaa is C or S
  MOD_RES (18)..(19)..(20)..(21)..(22): Xaa is A or G
  MOD_RES (23)..(24)..(25)..(26): Xaa is A or G or is absent

SEQ ID NO: 34728 - protein, 37 aa, Artificial Sequence; identical to SEQ ID NO: 32572
  GFR-binding peptide
  MOD_RES (4)..(5)..(37): Xaa is C or S

SEQ ID NO: 34729 - protein, 41 aa, Artificial Sequence; identical to SEQ ID NO: 32573
  GFR-binding peptide
  MOD_RES (5)..(6)..(38)..(40): Xaa is C or S

SEQ ID NO: 34730 - protein, 39 aa, Artificial Sequence; identical to SEQ ID NO: 32574
  GFR-binding peptide
  MOD_RES (5)..(6): Xaa is C or S
  MOD_RES (20)..(21)..(22)..(23)..(24): Xaa is A or G
  MOD_RES (25)..(26)..(27)..(28): Xaa is A or G or is absent

SEQ ID NO: 34731 - protein, 36 aa, Artificial Sequence; identical to SEQ ID NO: 32575
  GFR-binding peptide
  MOD_RES (34)..(36): Xaa is C or S
  MOD_RES (14)..(15)..(16)..(17)..(18): Xaa is A or G
  MOD_RES (19)..(20)..(21)..(22): Xaa is A or G or is absent

SEQ ID NO: 34732 - protein, 37 aa, Artificial Sequence; identical to SEQ ID NO: 32576
  GFR-binding peptide
  MOD_RES (2)..(3)..(35)..(37): Xaa is C or S

SEQ ID NO: 34733 - protein, 33 aa, Artificial Sequence; identical to SEQ ID NO: 32577
  GFR-binding peptide
  MOD_RES (1)..(32): Xaa is C or S

SEQ ID NO: 34734 - protein, 36 aa, Artificial Sequence; identical to SEQ ID NO: 32578
  GFR-binding peptide
  MOD_RES (1)..(2)..(35): Xaa is C or S
  MOD_RES (16)..(17)..(18)..(19)..(20): Xaa is A or G
  MOD_RES (21)..(22)..(23)..(24): Xaa is A or G or is absent

SEQ ID NO: 34735 - protein, 34 aa, Artificial Sequence; identical to SEQ ID NO: 32579
  GFR-binding peptide
  MOD_RES (34)..(34): Xaa is C or S
  MOD_RES (14)..(15)..(16)..(17)..(18): Xaa is A or G
  MOD_RES (19)..(20)..(21)..(22): Xaa is A or G or is absent

SEQ ID NO: 34736 - protein, 35 aa, Artificial Sequence; identical to SEQ ID NO: 32580
  GFR-binding peptide
  MOD_RES (1)..(2)..(34): Xaa is C or S

SEQ ID NO: 34737 - protein, 41 aa, Artificial Sequence; identical to SEQ ID NO: 32581
  GFR-binding peptide
  MOD_RES (3)..(4)..(38)..(40): Xaa is C or S
  MOD_RES (18)..(19)..(20)..(21)..(22): Xaa is A or G
  MOD_RES (23)..(24)..(25)..(26): Xaa is A or G or is absent

SEQ ID NO: 34738 - protein, 43 aa, Artificial Sequence; identical to SEQ ID NO: 32582
  GFR-binding peptide
  MOD_RES (6)..(7)..(41)..(43): Xaa is C or S
  MOD_RES (21)..(22)..(23)..(24)..(25): Xaa is A or G
  MOD_RES (26)..(27)..(28)..(29): Xaa is A or G or is absent

SEQ ID NO: 34739 - protein, 36 aa, Artificial Sequence; identical to SEQ ID NO: 32583
  GFR-binding peptide
  MOD_RES (4)..(36): Xaa is C or S

SEQ ID NO: 34740 - protein, 35 aa, Artificial Sequence; identical to SEQ ID NO: 32584
  GFR-binding peptide
  MOD_RES (2)..(3): Xaa is C or S
  MOD_RES (17)..(18)..(19)..(20)..(21): Xaa is A or G
  MOD_RES (22)..(23)..(24)..(25): Xaa is A or G or is absent

SEQ ID NO: 34741 - protein, 36 aa, Artificial Sequence; identical to SEQ ID NO: 32585
  GFR-binding peptide
  MOD_RES (1)..(35): Xaa is C or S
  MOD_RES (15)..(16)..(17)..(18)..(19): Xaa is A or G
  MOD_RES (20)..(21)..(22)..(23): Xaa is A or G or is absent

SEQ ID NO: 34742 - protein, 35 aa, Artificial Sequence; identical to SEQ ID NO: 32586
  GFR-binding peptide
  MOD_RES (1)..(2)..(35): Xaa is C or S
  MOD_RES (16)..(17)..(18)..(19)..(20): Xaa is A or G
  MOD_RES (21)..(22)..(23)..(24): Xaa is A or G or is absent

SEQ ID NO: 34743 - protein, 32 aa, Artificial Sequence; identical to SEQ ID NO: 32587
  GFR-binding peptide
  MOD_RES (14)..(15)..(16)..(17)..(18): Xaa is A or G
  MOD_RES (19)..(20)..(21)..(22): Xaa is A or G or is absent

SEQ ID NO: 34744 - protein, 32 aa, Artificial Sequence; identical to SEQ ID NO: 32588
  GFR-binding peptide
  MOD_RES (1)..(2): Xaa is C or S

SEQ ID NO: 34745 - protein, 40 aa, Artificial Sequence; identical to SEQ ID NO: 32589
  GFR-binding peptide
  MOD_RES (4)..(5)..(40): Xaa is C or S
  MOD_RES (19)..(20)..(21)..(22)..(23): Xaa is A or G
  MOD_RES (24)..(25)..(26)..(27): Xaa is A or G or is absent

SEQ ID NO: 34746 - protein, 32 aa, Artificial Sequence; identical to SEQ ID NO: 32590
  GFR-binding peptide
  MOD_RES (14)..(15)..(16)..(17)..(18): Xaa is A or G
  MOD_RES (19)..(20)..(21)..(22): Xaa is A or G or is absent

SEQ ID NO: 34747 - protein, 36 aa, Artificial Sequence; identical to SEQ ID NO: 32591
  GFR-binding peptide
  MOD_RES (1)..(33)..(35): Xaa is C or S

SEQ ID NO: 34748 - protein, 38 aa, Artificial Sequence; identical to SEQ ID NO: 32592
  GFR-binding peptide
  MOD_RES (4)..(5): Xaa is C or S
  MOD_RES (19)..(20)..(21)..(22)..(23): Xaa is A or G
  MOD_RES (24)..(25)..(26)..(27): Xaa is A or G or is absent

SEQ ID NO: 34749 - protein, 42 aa, Artificial Sequence; identical to SEQ ID NO: 32593
  GFR-binding peptide
  MOD_RES (5)..(6)..(40)..(42): Xaa is C or S
  MOD_RES (20)..(21)..(22)..(23)..(24): Xaa is A or G
  MOD_RES (25)..(26)..(27)..(28): Xaa is A or G or is absent

SEQ ID NO: 34750 - protein, 39 aa, Artificial Sequence; identical to SEQ ID NO: 32594
  GFR-binding peptide
  MOD_RES (5)..(6)..(39): Xaa is C or S
  MOD_RES (20)..(21)..(22)..(23)..(24): Xaa is A or G
  MOD_RES (25)..(26)..(27)..(28): Xaa is A or G or is absent

SEQ ID NO: 34751 - protein, 43 aa, Artificial Sequence; identical to SEQ ID NO: 32595
  GFR-binding peptide
  MOD_RES (6)..(7)..(41)..(43): Xaa is C or S
  MOD_RES (21)..(22)..(23)..(24)..(25): Xaa is A or G
  MOD_RES (26)..(27)..(28)..(29): Xaa is A or G or is absent

SEQ ID NO: 34752 - protein, 43 aa, Artificial Sequence; identical to SEQ ID NO: 32596
  GFR-binding peptide
  MOD_RES (5)..(6)..(40)..(42): Xaa is C or S
  MOD_RES (20)..(21)..(22)..(23)..(24): Xaa is A or G
  MOD_RES (25)..(26)..(27)..(28): Xaa is A or G or is absent

SEQ ID NO: 34753 - protein, 42 aa, Artificial Sequence; identical to SEQ ID NO: 32597
  GFR-binding peptide
  MOD_RES (6)..(7)..(39)..(41): Xaa is C or S

SEQ ID NO: 34754 - protein, 35 aa, Artificial Sequence; identical to SEQ ID NO: 32598
  GFR-binding peptide
  MOD_RES (1)..(2): Xaa is C or S
  MOD_RES (16)..(17)..(18)..(19)..(20): Xaa is A or G
  MOD_RES (21)..(22)..(23)..(24): Xaa is A or G or is absent

SEQ ID NO: 34755 - protein, 37 aa, Artificial Sequence; identical to SEQ ID NO: 32599
  GFR-binding peptide
  MOD_RES (1)..(35)..(37): Xaa is C or S
  MOD_RES (15)..(16)..(17)..(18)..(19): Xaa is A or G
  MOD_RES (20)..(21)..(22)..(23): Xaa is A or G or is absent

SEQ ID NO: 34756 - protein, 33 aa, Artificial Sequence; identical to SEQ ID NO: 32600
  GFR-binding peptide
  MOD_RES (1)..(1): Xaa is C or S
  MOD_RES (15)..(16)..(17)..(18)..(19): Xaa is A or G
  MOD_RES (20)..(21)..(22)..(23): Xaa is A or G or is absent

SEQ ID NO: 34757 - protein, 37 aa, Artificial Sequence; identical to SEQ ID NO: 32601
  GFR-binding peptide
  MOD_RES (6)..(7): Xaa is C or S

SEQ ID NO: 34758 - protein, 41 aa, Artificial Sequence; identical to SEQ ID NO: 32602
  GFR-binding peptide
  MOD_RES (6)..(40): Xaa is C or S
  MOD_RES (20)..(21)..(22)..(23)..(24): Xaa is A or G
  MOD_RES (25)..(26)..(27)..(28): Xaa is A or G or is absent

SEQ ID NO: 34759 - protein, 37 aa, Artificial Sequence; identical to SEQ ID NO: 32603
  GFR-binding peptide
  MOD_RES (1)..(34)..(36): Xaa is C or S

SEQ ID NO: 34760 - protein, 40 aa, Artificial Sequence; identical to SEQ ID NO: 32604
  GFR-binding peptide
  MOD_RES (3)..(4)..(38)..(40): Xaa is C or S
  MOD_RES (18)..(19)..(20)..(21)..(22): Xaa is A or G
  MOD_RES (23)..(24)..(25)..(26): Xaa is A or G or is absent

SEQ ID NO: 34761 - protein, 38 aa, Artificial Sequence; identical to SEQ ID NO: 32605
  GFR-binding peptide
  MOD_RES (4)..(5)..(37): Xaa is C or S

SEQ ID NO: 34762 - protein, 33 aa, Artificial Sequence; identical to SEQ ID NO: 32606
  GFR-binding peptide
  MOD_RES (2)..(3): Xaa is C or S

SEQ ID NO: 34763 - protein, 36 aa, Artificial Sequence; identical to SEQ ID NO: 32607
  GFR-binding peptide
  MOD_RES (3)..(4): Xaa is C or S
  MOD_RES (18)..(19)..(20)..(21)..(22): Xaa is A or G
  MOD_RES (23)..(24)..(25)..(26): Xaa is A or G or is absent

SEQ ID NO: 34764 - protein, 39 aa, Artificial Sequence; identical to SEQ ID NO: 32608
  GFR-binding peptide
  MOD_RES (3)..(4)..(38): Xaa is C or S
  MOD_RES (18)..(19)..(20)..(21)..(22): Xaa is A or G
  MOD_RES (23)..(24)..(25)..(26): Xaa is A or G or is absent

SEQ ID NO: 34765 - protein, 38 aa, Artificial Sequence; identical to SEQ ID NO: 32609
  GFR-binding peptide
  MOD_RES (4)..(38): Xaa is C or S
  MOD_RES (18)..(19)..(20)..(21)..(22): Xaa is A or G
  MOD_RES (23)..(24)..(25)..(26): Xaa is A or G or is absent

SEQ ID NO: 34766 - protein, 38 aa, Artificial Sequence; identical to SEQ ID NO: 32610
  GFR-binding peptide
  MOD_RES (3)..(35)..(37): Xaa is C or S

SEQ ID NO: 34767 - protein, 42 aa, Artificial Sequence; identical to SEQ ID NO: 32611
  GFR-binding peptide
  MOD_RES (6)..(7)..(41): Xaa is C or S
  MOD_RES (21)..(22)..(23)..(24)..(25): Xaa is A or G
  MOD_RES (26)..(27)..(28)..(29): Xaa is A or G or is absent

SEQ ID NO: 34768 - protein, 41 aa, Artificial Sequence; identical to SEQ ID NO: 32612
  GFR-binding peptide
  MOD_RES (5)..(39)..(41): Xaa is C or S
  MOD_RES (19)..(20)..(21)..(22)..(23): Xaa is A or G
  MOD_RES (24)..(25)..(26)..(27): Xaa is A or G or is absent

SEQ ID NO: 34769 - protein, 40 aa, Artificial Sequence; identical to SEQ ID NO: 32613
  GFR-binding peptide
  MOD_RES (6)..(7)..(39): Xaa is C or S

SEQ ID NO: 34770 - protein, 37 aa, Artificial Sequence; identical to SEQ ID NO: 32614
  GFR-binding peptide
  MOD_RES (2)..(3)..(34)..(36): Xaa is C or S

SEQ ID NO: 34771 - protein, 39 aa, Artificial Sequence; identical to SEQ ID NO: 32615
  GFR-binding peptide
  MOD_RES (3)..(4)..(36)..(38): Xaa is C or S

SEQ ID NO: 34772 - protein, 40 aa, Artificial Sequence; identical to SEQ ID NO: 32616
  GFR-binding peptide
  MOD_RES (1)..(2)..(37)..(39): Xaa is C or S
  MOD_RES (16)..(17)..(18)..(19)..(20): Xaa is A or G
  MOD_RES (21)..(22)..(23)..(24): Xaa is A or G or is absent

SEQ ID NO: 34773 - protein, 43 aa, Artificial Sequence; identical to SEQ ID NO: 32617
  GFR-binding peptide
  MOD_RES (6)..(40)..(42): Xaa is C or S
  MOD_RES (20)..(21)..(22)..(23)..(24): Xaa is A or G
  MOD_RES (25)..(26)..(27)..(28): Xaa is A or G or is absent

SEQ ID NO: 34774 - protein, 33 aa, Artificial Sequence; identical to SEQ ID NO: 32618
  GFR-binding peptide
  MOD_RES (1)..(33): Xaa is C or S

SEQ ID NO: 34775 - protein, 33 aa, Artificial Sequence; identical to SEQ ID NO: 32619
  GFR-binding peptide
  MOD_RES (1)..(1): Xaa is C or S
  MOD_RES (15)..(16)..(17)..(18)..(19): Xaa is A or G
  MOD_RES (20)..(21)..(22)..(23): Xaa is A or G or is absent

SEQ ID NO: 34776 - protein, 36 aa, Artificial Sequence; identical to SEQ ID NO: 32620
  GFR-binding peptide
  MOD_RES (2)..(3)..(35): Xaa is C or S

SEQ ID NO: 34777 - protein, 38 aa, Artificial Sequence; identical to SEQ ID NO: 32621
  GFR-binding peptide
  MOD_RES (3)..(37): Xaa is C or S
  MOD_RES (17)..(18)..(19)..(20)..(21): Xaa is A or G
  MOD_RES (22)..(23)..(24)..(25): Xaa is A or G or is absent

SEQ ID NO: 34778 - protein, 37 aa, Artificial Sequence; identical to SEQ ID NO: 32622
  GFR-binding peptide
  MOD_RES (4)..(5): Xaa is C or S

SEQ ID NO: 34779 - protein, 33 aa, Artificial Sequence; identical to SEQ ID NO: 32623
  GFR-binding peptide
  MOD_RES (1)..(1): Xaa is C or S
  MOD_RES (15)..(16)..(17)..(18)..(19): Xaa is A or G
  MOD_RES (20)..(21)..(22)..(23): Xaa is A or G or is absent

SEQ ID NO: 34780 - protein, 34 aa, Artificial Sequence; identical to SEQ ID NO: 32624
  GFR-binding peptide
  MOD_RES (1)..(1): Xaa is C or S
  MOD_RES (15)..(16)..(17)..(18)..(19): Xaa is A or G
  MOD_RES (20)..(21)..(22)..(23): Xaa is A or G or is absent

SEQ ID NO: 34781 - protein, 38 aa, Artificial Sequence; identical to SEQ ID NO: 32625
  GFR-binding peptide
  MOD_RES (2)..(3)..(37): Xaa is C or S
  MOD_RES (17)..(18)..(19)..(20)..(21): Xaa is A or G
  MOD_RES (22)..(23)..(24)..(25): Xaa is A or G or is absent

SEQ ID NO: 34782 - protein, 41 aa, Artificial Sequence; identical to SEQ ID NO: 32626
  GFR-binding peptide
  MOD_RES (5)..(6)..(40): Xaa is C or S
  MOD_RES (20)..(21)..(22)..(23)..(24): Xaa is A or G
  MOD_RES (25)..(26)..(27)..(28): Xaa is A or G or is absent

SEQ ID NO: 34783 - protein, 37 aa, Artificial Sequence; identical to SEQ ID NO: 32627
  GFR-binding peptide
  MOD_RES (3)..(4): Xaa is C or S
  MOD_RES (18)..(19)..(20)..(21)..(22): Xaa is A or G
  MOD_RES (23)..(24)..(25)..(26): Xaa is A or G or is absent

SEQ ID NO: 34784 - protein, 37 aa, Artificial Sequence; identical to SEQ ID NO: 32628
  GFR-binding peptide
  MOD_RES (2)..(3)..(37): Xaa is C or S
  MOD_RES (17)..(18)..(19)..(20)..(21): Xaa is A or G
  MOD_RES (22)..(23)..(24)..(25): Xaa is A or G or is absent

SEQ ID NO: 34785 - protein, 38 aa, Artificial Sequence; identical to SEQ ID NO: 32629
  GFR-binding peptide
  MOD_RES (5)..(6)..(38): Xaa is C or S

SEQ ID NO: 34786 - protein, 38 aa, Artificial Sequence; identical to SEQ ID NO: 32630
  GFR-binding peptide
  MOD_RES (1)..(35)..(37): Xaa is C or S
  MOD_RES (15)..(16)..(17)..(18)..(19): Xaa is A or G
  MOD_RES (20)..(21)..(22)..(23): Xaa is A or G or is absent

SEQ ID NO: 34787 - protein, 42 aa, Artificial Sequence; identical to SEQ ID NO: 32631
  GFR-binding peptide
  MOD_RES (5)..(6)..(40)..(42): Xaa is C or S
  MOD_RES (20)..(21)..(22)..(23)..(24): Xaa is A or G
  MOD_RES (25)..(26)..(27)..(28): Xaa is A or G or is absent

SEQ ID NO: 34788 - protein, 36 aa, Artificial Sequence; identical to SEQ ID NO: 32632
  GFR-binding peptide
  MOD_RES (1)..(35): Xaa is C or S
  MOD_RES (15)..(16)..(17)..(18)..(19): Xaa is A or G
  MOD_RES (20)..(21)..(22)..(23): Xaa is A or G or is absent

SEQ ID NO: 34789 - protein, 30 aa, Artificial Sequence; identical to SEQ ID NO: 32633
  GFR-binding peptide

SEQ ID NO: 34790 - protein, 36 aa, Artificial Sequence; identical to SEQ ID NO: 32634
  GFR-binding peptide
  MOD_RES (1)..(2)..(33)..(35): Xaa is C or S

SEQ ID NO: 34791 - protein, 37 aa, Artificial Sequence; identical to SEQ ID NO: 32635
  GFR-binding peptide
  MOD_RES (3)..(4)..(37): Xaa is C or S

SEQ ID NO: 34792 - protein, 38 aa, Artificial Sequence; identical to SEQ ID NO: 32636
  GFR-binding peptide
  MOD_RES (2)..(3)..(35)..(37): Xaa is C or S

SEQ ID NO: 34793 - protein, 33 aa, Artificial Sequence; identical to SEQ ID NO: 32637
  GFR-binding peptide
  MOD_RES (1)..(33): Xaa is C or S

SEQ ID NO: 34794 - protein, 37 aa, Artificial Sequence; identical to SEQ ID NO: 32638
  GFR-binding peptide
  MOD_RES (5)..(5): Xaa is C or S
  MOD_RES (19)..(20)..(21)..(22)..(23): Xaa is A or G
  MOD_RES (24)..(25)..(26)..(27): Xaa is A or G or is absent

SEQ ID NO: 34795 - protein, 35 aa, Artificial Sequence; identical to SEQ ID NO: 32639
  GFR-binding peptide
  MOD_RES (2)..(3)..(35): Xaa is C or S

SEQ ID NO: 34796 - protein, 43 aa, Artificial Sequence; identical to SEQ ID NO: 32640
  GFR-binding peptide
  MOD_RES (5)..(6)..(41)..(43): Xaa is C or S
  MOD_RES (20)..(21)..(22)..(23)..(24): Xaa is A or G
  MOD_RES (25)..(26)..(27)..(28): Xaa is A or G or is absent

SEQ ID NO: 34797 - protein, 34 aa, Artificial Sequence; identical to SEQ ID NO: 32641
  GFR-binding peptide
  MOD_RES (1)..(1): Xaa is C or S
  MOD_RES (15)..(16)..(17)..(18)..(19): Xaa is A or G
  MOD_RES (20)..(21)..(22)..(23): Xaa is A or G or is absent

SEQ ID NO: 34798 - protein, 37 aa, Artificial Sequence; identical to SEQ ID NO: 32642
  GFR-binding peptide
  MOD_RES (5)..(6): Xaa is C or S

SEQ ID NO: 34799 - protein, 39 aa, Artificial Sequence; identical to SEQ ID NO: 32643
  GFR-binding peptide
  MOD_RES (1)..(2)..(37)..(39): Xaa is C or S
  MOD_RES (16)..(17)..(18)..(19)..(20): Xaa is A or G
  MOD_RES (21)..(22)..(23)..(24): Xaa is A or G or is absent

SEQ ID NO: 34800 - protein, 35 aa, Artificial Sequence; identical to SEQ ID NO: 32644
  GFR-binding peptide
  MOD_RES (1)..(34): Xaa is C or S

SEQ ID NO: 34801 - protein, 38 aa, Artificial Sequence; identical to SEQ ID NO: 32645
  GFR-binding peptide
  MOD_RES (2)..(3)..(37): Xaa is C or S
  MOD_RES (17)..(18)..(19)..(20)..(21): Xaa is A or G
  MOD_RES (22)..(23)..(24)..(25): Xaa is A or G or is absent

SEQ ID NO: 34802 - protein, 43 aa, Artificial Sequence; identical to SEQ ID NO: 32646
  GFR-binding peptide
  MOD_RES (6)..(7)..(40)..(42): Xaa is C or S

SEQ ID NO: 34803 - protein, 36 aa, Artificial Sequence; identical to SEQ ID NO: 32647
  GFR-binding peptide
  MOD_RES (2)..(3)..(36): Xaa is C or S

SEQ ID NO: 34804 - protein, 41 aa, Artificial Sequence; identical to SEQ ID NO: 32648
  GFR-binding peptide
  MOD_RES (6)..(7): Xaa is C or S
  MOD_RES (21)..(22)..(23)..(24)..(25): Xaa is A or G
  MOD_RES (26)..(27)..(28)..(29): Xaa is A or G or is absent

SEQ ID NO: 34805 - protein, 39 aa, Artificial Sequence; identical to SEQ ID NO: 32649
  GFR-binding peptide
  MOD_RES (1)..(2)..(36)..(38): Xaa is C or S
  MOD_RES (16)..(17)..(18)..(19)..(20): Xaa is A or G
  MOD_RES (21)..(22)..(23)..(24): Xaa is A or G or is absent

SEQ ID NO: 34806 - protein, 39 aa, Artificial Sequence; identical to SEQ ID NO: 32650
  GFR-binding peptide
  MOD_RES (2)..(3)..(37)..(39): Xaa is C or S
  MOD_RES (17)..(18)..(19)..(20)..(21): Xaa is A or G
  MOD_RES (22)..(23)..(24)..(25): Xaa is A or G or is absent

SEQ ID NO: 34807 - protein, 33 aa, Artificial Sequence; identical to SEQ ID NO: 32651
  GFR-binding peptide
  MOD_RES (2)..(3): Xaa is C or S

SEQ ID NO: 34808 - protein, 34 aa, Artificial Sequence; identical to SEQ ID NO: 32652
  GFR-binding peptide
  MOD_RES (1)..(33): Xaa is C or S

SEQ ID NO: 34809 - protein, 36 aa, Artificial Sequence; identical to SEQ ID NO: 32653
  GFR-binding peptide
  MOD_RES (3)..(4)..(36): Xaa is C or S

SEQ ID NO: 34810 - protein, 38 aa, Artificial Sequence; identical to SEQ ID NO: 32654
  GFR-binding peptide
  MOD_RES (4)..(5): Xaa is C or S
  MOD_RES (19)..(20)..(21)..(22)..(23): Xaa is A or G
  MOD_RES (24)..(25)..(26)..(27): Xaa is A or G or is absent

SEQ ID NO: 34811 - protein, 41 aa, Artificial Sequence; identical to SEQ ID NO: 32655
  GFR-binding peptide
  MOD_RES (5)..(6)..(39)..(41): Xaa is C or S

SEQ ID NO: 34812 - protein, 40 aa, Artificial Sequence; identical to SEQ ID NO: 32656
  GFR-binding peptide
  MOD_RES (4)..(5)..(37)..(39): Xaa is C or S

SEQ ID NO: 34813 - protein, 35 aa, Artificial Sequence; identical to SEQ ID NO: 32657
  GFR-binding peptide
  MOD_RES (1)..(2)..(34): Xaa is C or S

SEQ ID NO: 34814 - protein, 41 aa, Artificial Sequence; identical to SEQ ID NO: 32658
  GFR-binding peptide
  MOD_RES (5)..(6)..(40): Xaa is C or S
  MOD_RES (20)..(21)..(22)..(23)..(24): Xaa is A or G
  MOD_RES (25)..(26)..(27)..(28): Xaa is A or G or is absent

SEQ ID NO: 34815 - protein, 38 aa, Artificial Sequence; identical to SEQ ID NO: 32659
  GFR-binding peptide
  MOD_RES (3)..(4)..(36)..(38): Xaa is C or S

SEQ ID NO: 34816 - protein, 34 aa, Artificial Sequence; identical to SEQ ID NO: 32660
  GFR-binding peptide
  MOD_RES (1)..(2): Xaa is C or S
  MOD_RES (16)..(17)..(18)..(19)..(20): Xaa is A or G
  MOD_RES (21)..(22)..(23)..(24): Xaa is A or G or is absent

SEQ ID NO: 34817 - protein, 40 aa, Artificial Sequence; identical to SEQ ID NO: 32661
  GFR-binding peptide
  MOD_RES (6)..(7): Xaa is C or S
  MOD_RES (21)..(22)..(23)..(24)..(25): Xaa is A or G
  MOD_RES (26)..(27)..(28)..(29): Xaa is A or G or is absent

SEQ ID NO: 34818 - protein, 40 aa, Artificial Sequence; identical to SEQ ID NO: 32662
  GFR-binding peptide
  MOD_RES (3)..(4)..(38)..(40): Xaa is C or S
  MOD_RES (18)..(19)..(20)..(21)..(22): Xaa is A or G
  MOD_RES (23)..(24)..(25)..(26): Xaa is A or G or is absent

SEQ ID NO: 34819 - protein, 40 aa, Artificial Sequence; identical to SEQ ID NO: 32663
  GFR-binding peptide
  MOD_RES (5)..(6)..(39): Xaa is C or S

SEQ ID NO: 34820 - protein, 36 aa, Artificial Sequence; identical to SEQ ID NO: 32664
  GFR-binding peptide
  MOD_RES (3)..(4): Xaa is C or S

SEQ ID NO: 34821 - protein, 39 aa, Artificial Sequence; identical to SEQ ID NO: 32665
  GFR-binding peptide
  MOD_RES (1)..(2)..(36)..(38): Xaa is C or S
  MOD_RES (16)..(17)..(18)..(19)..(20): Xaa is A or G
  MOD_RES (21)..(22)..(23)..(24): Xaa is A or G or is absent

SEQ ID NO: 34822 - protein, 39 aa, Artificial Sequence; identical to SEQ ID NO: 32666
  GFR-binding peptide
  MOD_RES (5)..(37)..(39): Xaa is C or S

SEQ ID NO: 34823 - protein, 38 aa, Artificial Sequence; identical to SEQ ID NO: 32667
  GFR-binding peptide
  MOD_RES (4)..(5): Xaa is C or S
  MOD_RES (19)..(20)..(21)..(22)..(23): Xaa is A or G
  MOD_RES (24)..(25)..(26)..(27): Xaa is A or G or is absent

SEQ ID NO: 34824 - protein, 36 aa, Artificial Sequence; identical to SEQ ID NO: 32668
  GFR-binding peptide
  MOD_RES (2)..(3): Xaa is C or S
  MOD_RES (17)..(18)..(19)..(20)..(21): Xaa is A or G
  MOD_RES (22)..(23)..(24)..(25): Xaa is A or G or is absent

SEQ ID NO: 34825 - protein, 34 aa, Artificial Sequence; identical to SEQ ID NO: 32669
  GFR-binding peptide
  MOD_RES (1)..(2): Xaa is C or S
  MOD_RES (16)..(17)..(18)..(19)..(20): Xaa is A or G
  MOD_RES (21)..(22)..(23)..(24): Xaa is A or G or is absent

SEQ ID NO: 34826 - protein, 33 aa, Artificial Sequence; identical to SEQ ID NO: 32670
  GFR-binding peptide
  MOD_RES (2)..(3): Xaa is C or S

SEQ ID NO: 34827 - protein, 38 aa, Artificial Sequence; identical to SEQ ID NO: 32671
  GFR-binding peptide
  MOD_RES (1)..(36)..(38): Xaa is C or S
  MOD_RES (15)..(16)..(17)..(18)..(19): Xaa is A or G
  MOD_RES (20)..(21)..(22)..(23): Xaa is A or G or is absent

SEQ ID NO: 34828 - protein, 35 aa, Artificial Sequence; identical to SEQ ID NO: 32672
  GFR-binding peptide
  MOD_RES (34)..(34): Xaa is C or S
  MOD_RES (14)..(15)..(16)..(17)..(18): Xaa is A or G
  MOD_RES (19)..(20)..(21)..(22): Xaa is A or G or is absent

SEQ ID NO: 34829 - protein, 32 aa, Artificial Sequence; identical to SEQ ID NO: 32673
  GFR-binding peptide
  MOD_RES (1)..(1): Xaa is C or S

SEQ ID NO: 34830 - protein, 34 aa, Artificial Sequence; identical to SEQ ID NO: 32674
  GFR-binding peptide
  MOD_RES (1)..(33): Xaa is C or S

SEQ ID NO: 34831 - protein, 40 aa, Artificial Sequence; identical to SEQ ID NO: 32675
  GFR-binding peptide
  MOD_RES (3)..(4)..(37)..(39): Xaa is C or S
  MOD_RES (18)..(19)..(20)..(21)..(22): Xaa is A or G
  MOD_RES (23)..(24)..(25)..(26): Xaa is A or G or is absent

SEQ ID NO: 34832 - protein, 37 aa, Artificial Sequence; identical to SEQ ID NO: 32676
  GFR-binding peptide
  MOD_RES (1)..(2)..(36): Xaa is C or S
  MOD_RES (16)..(17)..(18)..(19)..(20): Xaa is A or G
  MOD_RES (21)..(22)..(23)..(24): Xaa is A or G or is absent

SEQ ID NO: 34833 - protein, 35 aa, Artificial Sequence; identical to SEQ ID NO: 32677
  GFR-binding peptide
  MOD_RES (1)..(2): Xaa is C or S
  MOD_RES (16)..(17)..(18)..(19)..(20): Xaa is A or G
  MOD_RES (21)..(22)..(23)..(24): Xaa is A or G or is absent

SEQ ID NO: 34834 - protein, 34 aa, Artificial Sequence; identical to SEQ ID NO: 32678
  GFR-binding peptide
  MOD_RES (1)..(2)..(34): Xaa is C or S

SEQ ID NO: 34835 - protein, 38 aa, Artificial Sequence; identical to SEQ ID NO: 32679
  GFR-binding peptide
  MOD_RES (6)..(7): Xaa is C or S

SEQ ID NO: 34836 - protein, 38 aa, Artificial Sequence; identical to SEQ ID NO: 32680
  GFR-binding peptide
  MOD_RES (1)..(2)..(36)..(38): Xaa is C or S
  MOD_RES (16)..(17)..(18)..(19)..(20): Xaa is A or G
  MOD_RES (21)..(22)..(23)..(24): Xaa is A or G or is absent

SEQ ID NO: 34837 - protein, 34 aa, Artificial Sequence; identical to SEQ ID NO: 32681
  GFR-binding peptide
  MOD_RES (1)..(2): Xaa is C or S
  MOD_RES (16)..(17)..(18)..(19)..(20): Xaa is A or G
  MOD_RES (21)..(22)..(23)..(24): Xaa is A or G or is absent

SEQ ID NO: 34838 - protein, 34 aa, Artificial Sequence; identical to SEQ ID NO: 32682
  GFR-binding peptide
  MOD_RES (1)..(2): Xaa is C or S
  MOD_RES (16)..(17)..(18)..(19)..(20): Xaa is A or G
  MOD_RES (21)..(22)..(23)..(24): Xaa is A or G or is absent

SEQ ID NO: 34839 - protein, 36 aa, Artificial Sequence; identical to SEQ ID NO: 32683
  GFR-binding peptide
  MOD_RES (35)..(35): Xaa is C or S
  MOD_RES (14)..(15)..(16)..(17)..(18): Xaa is A or G
  MOD_RES (19)..(20)..(21)..(22): Xaa is A or G or is absent

SEQ ID NO: 34840 - protein, 38 aa, Artificial Sequence; identical to SEQ ID NO: 32684
  GFR-binding peptide
  MOD_RES (4)..(5)..(37): Xaa is C or S

SEQ ID NO: 34841 - protein, 36 aa, Artificial Sequence; identical to SEQ ID NO: 32685
  GFR-binding peptide
  MOD_RES (1)..(35): Xaa is C or S
  MOD_RES (15)..(16)..(17)..(18)..(19): Xaa is A or G
  MOD_RES (20)..(21)..(22)..(23): Xaa is A or G or is absent

SEQ ID NO: 34842 - protein, 43 aa, Artificial Sequence; identical to SEQ ID NO: 32686
  GFR-binding peptide
  MOD_RES (7)..(41)..(43): Xaa is C or S
  MOD_RES (21)..(22)..(23)..(24)..(25): Xaa is A or G
  MOD_RES (26)..(27)..(28)..(29): Xaa is A or G or is absent

SEQ ID NO: 34843 - protein, 36 aa, Artificial Sequence; identical to SEQ ID NO: 32687
  GFR-binding peptide
  MOD_RES (1)..(2): Xaa is C or S
  MOD_RES (16)..(17)..(18)..(19)..(20): Xaa is A or G
  MOD_RES (21)..(22)..(23)..(24): Xaa is A or G or is absent

SEQ ID NO: 34844 - protein, 32 aa, Artificial Sequence; identical to SEQ ID NO: 32688
  GFR-binding peptide
  MOD_RES (32)..(32): Xaa is C or S

SEQ ID NO: 34845 - protein, 40 aa, Artificial Sequence; identical to SEQ ID NO: 32689
  GFR-binding peptide
  MOD_RES (2)..(3)..(37)..(39): Xaa is C or S
  MOD_RES (17)..(18)..(19)..(20)..(21): Xaa is A or G
  MOD_RES (22)..(23)..(24)..(25): Xaa is A or G or is absent

SEQ ID NO: 34846 - protein, 39 aa, Artificial Sequence; identical to SEQ ID NO: 32690
  GFR-binding peptide
  MOD_RES (6)..(7): Xaa is C or S
  MOD_RES (21)..(22)..(23)..(24)..(25): Xaa is A or G
  MOD_RES (26)..(27)..(28)..(29): Xaa is A or G or is absent

SEQ ID NO: 34847 - protein, 39 aa, Artificial Sequence; identical to SEQ ID NO: 32691
  GFR-binding peptide
  MOD_RES (4)..(5)..(39): Xaa is C or S
  MOD_RES (19)..(20)..(21)..(22)..(23): Xaa is A or G
  MOD_RES (24)..(25)..(26)..(27): Xaa is A or G or is absent

SEQ ID NO: 34848 - protein, 38 aa, Artificial Sequence; identical to SEQ ID NO: 32692
  GFR-binding peptide
  MOD_RES (4)..(5): Xaa is C or S
  MOD_RES (19)..(20)..(21)..(22)..(23): Xaa is A or G
  MOD_RES (24)..(25)..(26)..(27): Xaa is A or G or is absent

SEQ ID NO: 34849 - protein, 38 aa, Artificial Sequence; identical to SEQ ID NO: 32693
  GFR-binding peptide
  MOD_RES (3)..(4)..(35)..(37): Xaa is C or S

SEQ ID NO: 34850 - protein, 36 aa, Artificial Sequence; identical to SEQ ID NO: 32694
  GFR-binding peptide
  MOD_RES (3)..(4): Xaa is C or S
  MOD_RES (18)..(19)..(20)..(21)..(22): Xaa is A or G
  MOD_RES (23)..(24)..(25)..(26): Xaa is A or G or is absent

SEQ ID NO: 34851 - protein, 34 aa, Artificial Sequence; identical to SEQ ID NO: 32695
  GFR-binding peptide
  MOD_RES (32)..(34): Xaa is C or S

SEQ ID NO: 34852 - protein, 39 aa, Artificial Sequence; identical to SEQ ID NO: 32696
  GFR-binding peptide
  MOD_RES (4)..(5)..(39): Xaa is C or S
  MOD_RES (19)..(20)..(21)..(22)..(23): Xaa is A or G
  MOD_RES (24)..(25)..(26)..(27): Xaa is A or G or is absent

SEQ ID NO: 34853 - protein, 40 aa, Artificial Sequence; identical to SEQ ID NO: 32697
  GFR-binding peptide
  MOD_RES (5)..(6)..(38)..(40): Xaa is C or S

SEQ ID NO: 34854 - protein, 34 aa, Artificial Sequence; identical to SEQ ID NO: 32698
  GFR-binding peptide
  MOD_RES (1)..(2)..(34): Xaa is C or S

SEQ ID NO: 34855 - protein, 33 aa, Artificial Sequence; identical to SEQ ID NO: 32699
  GFR-binding peptide
  MOD_RES (14)..(15)..(16)..(17)..(18): Xaa is A or G
  MOD_RES (19)..(20)..(21)..(22): Xaa is A or G or is absent

SEQ ID NO: 34856 - protein, 40 aa, Artificial Sequence; identical to SEQ ID NO: 32700
  GFR-binding peptide
  MOD_RES (2)..(3)..(37)..(39): Xaa is C or S
  MOD_RES (17)..(18)..(19)..(20)..(21): Xaa is A or G
  MOD_RES (22)..(23)..(24)..(25): Xaa is A or G or is absent

SEQ ID NO: 34857 - protein, 36 aa, Artificial Sequence; identical to SEQ ID NO: 32701
  GFR-binding peptide
  MOD_RES (34)..(36): Xaa is C or S
  MOD_RES (14)..(15)..(16)..(17)..(18): Xaa is A or G
  MOD_RES (19)..(20)..(21)..(22): Xaa is A or G or is absent

SEQ ID NO: 34858 - protein, 39 aa, Artificial Sequence; identical to SEQ ID NO: 32702
  GFR-binding peptide
  MOD_RES (4)..(5)..(39): Xaa is C or S
  MOD_RES (19)..(20)..(21)..(22)..(23): Xaa is A or G
  MOD_RES (24)..(25)..(26)..(27): Xaa is A or G or is absent

SEQ ID NO: 34859 - protein, 37 aa, Artificial Sequence; identical to SEQ ID NO: 32703
  GFR-binding peptide
  MOD_RES (1)..(2)..(34)..(36): Xaa is C or S

SEQ ID NO: 34860 - protein, 39 aa, Artificial Sequence; identical to SEQ ID NO: 32704
  GFR-binding peptide
  MOD_RES (5)..(6): Xaa is C or S
  MOD_RES (20)..(21)..(22)..(23)..(24): Xaa is A or G
  MOD_RES (25)..(26)..(27)..(28): Xaa is A or G or is absent

SEQ ID NO: 34861 - protein, 37 aa, Artificial Sequence; identical to SEQ ID NO: 32705
  GFR-binding peptide
  MOD_RES (1)..(2)..(34)..(36): Xaa is C or S

SEQ ID NO: 34862 - protein, 37 aa, Artificial Sequence; identical to SEQ ID NO: 32706
  GFR-binding peptide
  MOD_RES (3)..(4)..(36): Xaa is C or S

SEQ ID NO: 34863 - protein, 36 aa, Artificial Sequence; identical to SEQ ID NO: 32707
  GFR-binding peptide
  MOD_RES (2)..(3): Xaa is C or S
  MOD_RES (17)..(18)..(19)..(20)..(21): Xaa is A or G
  MOD_RES (22)..(23)..(24)..(25): Xaa is A or G or is absent

SEQ ID NO: 34864 - protein, 38 aa, Artificial Sequence; identical to SEQ ID NO: 32708
  GFR-binding peptide
  MOD_RES (3)..(4)..(36)..(38): Xaa is C or S

SEQ ID NO: 34865 - protein, 36 aa, Artificial Sequence; identical to SEQ ID NO: 32709
  GFR-binding peptide
  MOD_RES (4)..(5): Xaa is C or S

SEQ ID NO: 34866 - protein, 38 aa, Artificial Sequence; identical to SEQ ID NO: 32710
  GFR-binding peptide
  MOD_RES (2)..(3)..(38): Xaa is C or S
  MOD_RES (17)..(18)..(19)..(20)..(21): Xaa is A or G
  MOD_RES (22)..(23)..(24)..(25): Xaa is A or G or is absent

SEQ ID NO: 34867 - protein, 35 aa, Artificial Sequence; identical to SEQ ID NO: 32711
  GFR-binding peptide
  MOD_RES (1)..(2)..(34): Xaa is C or S

SEQ ID NO: 34868 - protein, 41 aa, Artificial Sequence; identical to SEQ ID NO: 32712
  GFR-binding peptide
  MOD_RES (3)..(4)..(38)..(40): Xaa is C or S
  MOD_RES (18)..(19)..(20)..(21)..(22): Xaa is A or G
  MOD_RES (23)..(24)..(25)..(26): Xaa is A or G or is absent

SEQ ID NO: 34869 - protein, 42 aa, Artificial Sequence; identical to SEQ ID NO: 32713
  GFR-binding peptide
  MOD_RES (5)..(39)..(41): Xaa is C or S
  MOD_RES (19)..(20)..(21)..(22)..(23): Xaa is A or G
  MOD_RES (24)..(25)..(26)..(27): Xaa is A or G or is absent

SEQ ID NO: 34870 - protein, 38 aa, Artificial Sequence; identical to SEQ ID NO: 32714
  GFR-binding peptide
  MOD_RES (3)..(4)..(36)..(38): Xaa is C or S

SEQ ID NO: 34871 - protein, 38 aa, Artificial Sequence; identical to SEQ ID NO: 32715
  GFR-binding peptide
  MOD_RES (7)..(7): Xaa is C or S

SEQ ID NO: 34872 - protein, 37 aa, Artificial Sequence; identical to SEQ ID NO: 32716
  GFR-binding peptide
  MOD_RES (1)..(35)..(37): Xaa is C or S
  MOD_RES (15)..(16)..(17)..(18)..(19): Xaa is A or G
  MOD_RES (20)..(21)..(22)..(23): Xaa is A or G or is absent

SEQ ID NO: 34873 - protein, 34 aa, Artificial Sequence; identical to SEQ ID NO: 32717
  GFR-binding peptide
  MOD_RES (32)..(34): Xaa is C or S

SEQ ID NO: 34874 - protein, 40 aa, Artificial Sequence; identical to SEQ ID NO: 32718
  GFR-binding peptide
  MOD_RES (5)..(6)..(38)..(40): Xaa is C or S

SEQ ID NO: 34875 - protein, 42 aa, Artificial Sequence; identical to SEQ ID NO: 32719
  GFR-binding peptide
  MOD_RES (6)..(7)..(41): Xaa is C or S
  MOD_RES (21)..(22)..(23)..(24)..(25): Xaa is A or G
  MOD_RES (26)..(27)..(28)..(29): Xaa is A or G or is absent

SEQ ID NO: 34876 - protein, 40 aa, Artificial Sequence; identical to SEQ ID NO: 32720
  GFR-binding peptide
  MOD_RES (6)..(7): Xaa is C or S
  MOD_RES (21)..(22)..(23)..(24)..(25): Xaa is A or G
  MOD_RES (26)..(27)..(28)..(29): Xaa is A or G or is absent

SEQ ID NO: 34877 - protein, 33 aa, Artificial Sequence; identical to SEQ ID NO: 32721
  GFR-binding peptide
  MOD_RES (31)..(33): Xaa is C or S

SEQ ID NO: 34878 - protein, 35 aa, Artificial Sequence; identical to SEQ ID NO: 32722
  GFR-binding peptide
  MOD_RES (1)..(35): Xaa is C or S
  MOD_RES (15)..(16)..(17)..(18)..(19): Xaa is A or G
  MOD_RES (20)..(21)..(22)..(23): Xaa is A or G or is absent

SEQ ID NO: 34879 - protein, 37 aa, Artificial Sequence; identical to SEQ ID NO: 32723
  GFR-binding peptide
  MOD_RES (6)..(7): Xaa is C or S

SEQ ID NO: 34880 - protein, 37 aa, Artificial Sequence; identical to SEQ ID NO: 32724
  GFR-binding peptide
  MOD_RES (5)..(6): Xaa is C or S

SEQ ID NO: 34881 - protein, 43 aa, Artificial Sequence; identical to SEQ ID NO: 32725
  GFR-binding peptide
  MOD_RES (5)..(6)..(40)..(42): Xaa is C or S
  MOD_RES (20)..(21)..(22)..(23)..(24): Xaa is A or G
  MOD_RES (25)..(26)..(27)..(28): Xaa is A or G or is absent

SEQ ID NO: 34882 - protein, 37 aa, Artificial Sequence; identical to SEQ ID NO: 32726
  GFR-binding peptide
  MOD_RES (1)..(35)..(37): Xaa is C or S
  MOD_RES (15)..(16)..(17)..(18)..(19): Xaa is A or G
  MOD_RES (20)..(21)..(22)..(23): Xaa is A or G or is absent

SEQ ID NO: 34883 - protein, 36 aa, Artificial Sequence; identical to SEQ ID NO: 32727
  GFR-binding peptide
  MOD_RES (1)..(2)..(34)..(36): Xaa is C or S

SEQ ID NO: 34884 - protein, 39 aa, Artificial Sequence; identical to SEQ ID NO: 32728
  GFR-binding peptide
  MOD_RES (1)..(36)..(38): Xaa is C or S
  MOD_RES (15)..(16)..(17)..(18)..(19): Xaa is A or G
  MOD_RES (20)..(21)..(22)..(23): Xaa is A or G or is absent

SEQ ID NO: 34885 - protein, 33 aa, Artificial Sequence; identical to SEQ ID NO: 32729
  GFR-binding peptide
  MOD_RES (1)..(1): Xaa is C or S
  MOD_RES (15)..(16)..(17)..(18)..(19): Xaa is A or G
  MOD_RES (20)..(21)..(22)..(23): Xaa is A or G or is absent

SEQ ID NO: 34886 - protein, 40 aa, Artificial Sequence; identical to SEQ ID NO: 32730
  GFR-binding peptide
  MOD_RES (4)..(5)..(38)..(40): Xaa is C or S

SEQ ID NO: 34887 - protein, 37 aa, Artificial Sequence; identical to SEQ ID NO: 32731
  GFR-binding peptide
  MOD_RES (6)..(7): Xaa is C or S

SEQ ID NO: 34888 - protein, 35 aa, Artificial Sequence; identical to SEQ ID NO: 32732
  GFR-binding peptide
  MOD_RES (34)..(34): Xaa is C or S
  MOD_RES (14)..(15)..(16)..(17)..(18): Xaa is A or G
  MOD_RES (19)..(20)..(21)..(22): Xaa is A or G or is absent

SEQ ID NO: 34889 - protein, 36 aa, Artificial Sequence; identical to SEQ ID NO: 32733
  GFR-binding peptide
  MOD_RES (3)..(4)..(36): Xaa is C or S

SEQ ID NO: 34890 - protein, 37 aa, Artificial Sequence; identical to SEQ ID NO: 32734
  GFR-binding peptide
  MOD_RES (1)..(35)..(37): Xaa is C or S
  MOD_RES (15)..(16)..(17)..(18)..(19): Xaa is A or G
  MOD_RES (20)..(21)..(22)..(23): Xaa is A or G or is absent

SEQ ID NO: 34891 - protein, 39 aa, Artificial Sequence; identical to SEQ ID NO: 32735
  GFR-binding peptide
  MOD_RES (3)..(4)..(38): Xaa is C or S
  MOD_RES (18)..(19)..(20)..(21)..(22): Xaa is A or G
  MOD_RES (23)..(24)..(25)..(26): Xaa is A or G or is absent

SEQ ID NO: 34892 - protein, 38 aa, Artificial Sequence; identical to SEQ ID NO: 32736
  GFR-binding peptide
  MOD_RES (1)..(35)..(37): Xaa is C or S
  MOD_RES (15)..(16)..(17)..(18)..(19): Xaa is A or G
  MOD_RES (20)..(21)..(22)..(23): Xaa is A or G or is absent

SEQ ID NO: 34893 - protein, 40 aa, Artificial Sequence; identical to SEQ ID NO: 32737
  GFR-binding peptide
  MOD_RES (4)..(5)..(39): Xaa is C or S
  MOD_RES (19)..(20)..(21)..(22)..(23): Xaa is A or G
  MOD_RES (24)..(25)..(26)..(27): Xaa is A or G or is absent

SEQ ID NO: 34894 - protein, 36 aa, Artificial Sequence; identical to SEQ ID NO: 32738
  GFR-binding peptide
  MOD_RES (2)..(34)..(36): Xaa is C or S

SEQ ID NO: 34895 - protein, 34 aa, Artificial Sequence; identical to SEQ ID NO: 32739
  GFR-binding peptide
  MOD_RES (1)..(1): Xaa is C or S
  MOD_RES (15)..(16)..(17)..(18)..(19): Xaa is A or G
  MOD_RES (20)..(21)..(22)..(23): Xaa is A or G or is absent

SEQ ID NO: 34896 - protein, 36 aa, Artificial Sequence; identical to SEQ ID NO: 32740
  GFR-binding peptide
  MOD_RES (1)..(33)..(35): Xaa is C or S

SEQ ID NO: 34897 - protein, 41 aa, Artificial Sequence; identical to SEQ ID NO: 32741
  GFR-binding peptide
  MOD_RES (4)..(5)..(39)..(41): Xaa is C or S
  MOD_RES (19)..(20)..(21)..(22)..(23): Xaa is A or G
  MOD_RES (24)..(25)..(26)..(27): Xaa is A or G or is absent

SEQ ID NO: 34898 - protein, 37 aa, Artificial Sequence; identical to SEQ ID NO: 32742
  GFR-binding peptide
  MOD_RES (2)..(3)..(37): Xaa is C or S
  MOD_RES (17)..(18)..(19)..(20)..(21): Xaa is A or G
  MOD_RES (22)..(23)..(24)..(25): Xaa is A or G or is absent

SEQ ID NO: 34899 - protein, 37 aa, Artificial Sequence; identical to SEQ ID NO: 32743
  GFR-binding peptide
  MOD_RES (3)..(35)..(37): Xaa is C or S

SEQ ID NO: 34900 - protein, 39 aa, Artificial Sequence; identical to SEQ ID NO: 32744
  GFR-binding peptide
  MOD_RES (5)..(6): Xaa is C or S
  MOD_RES (20)..(21)..(22)..(23)..(24): Xaa is A or G
  MOD_RES (25)..(26)..(27)..(28): Xaa is A or G or is absent

SEQ ID NO: 34901 - protein, 37 aa, Artificial Sequence; identical to SEQ ID NO: 32745
  GFR-binding peptide
  MOD_RES (4)..(5)..(37): Xaa is C or S

SEQ ID NO: 34902 - protein, 37 aa, Artificial Sequence; identical to SEQ ID NO: 32746
  GFR-binding peptide
  MOD_RES (1)..(35)..(37): Xaa is C or S
  MOD_RES (15)..(16)..(17)..(18)..(19): Xaa is A or G
  MOD_RES (20)..(21)..(22)..(23): Xaa is A or G or is absent

SEQ ID NO: 34903 - protein, 39 aa, Artificial Sequence; identical to SEQ ID NO: 32747
  GFR-binding peptide
  MOD_RES (5)..(6)..(39): Xaa is C or S

SEQ ID NO: 34904 - protein, 37 aa, Artificial Sequence; identical to SEQ ID NO: 32748
  GFR-binding peptide
  MOD_RES (4)..(5): Xaa is C or S
  MOD_RES (19)..(20)..(21)..(22)..(23): Xaa is A or G
  MOD_RES (24)..(25)..(26)..(27): Xaa is A or G or is absent

SEQ ID NO: 34905 - protein, 35 aa, Artificial Sequence; identical to SEQ ID NO: 32749
  GFR-binding peptide
  MOD_RES (1)..(35): Xaa is C or S
  MOD_RES (15)..(16)..(17)..(18)..(19): Xaa is A or G
  MOD_RES (20)..(21)..(22)..(23): Xaa is A or G or is absent

SEQ ID NO: 34906 - protein, 34 aa, Artificial Sequence; identical to SEQ ID NO: 32750
  GFR-binding peptide
  MOD_RES (34)..(34): Xaa is C or S
  MOD_RES (14)..(15)..(16)..(17)..(18): Xaa is A or G
  MOD_RES (19)..(20)..(21)..(22): Xaa is A or G or is absent

SEQ ID NO: 34907 - protein, 38 aa, Artificial Sequence; identical to SEQ ID NO: 32751
  GFR-binding peptide
  MOD_RES (2)..(3)..(35)..(37): Xaa is C or S

SEQ ID NO: 34908 - protein, 38 aa, Artificial Sequence; identical to SEQ ID NO: 32752
  GFR-binding peptide
  MOD_RES (5)..(6): Xaa is C or S
  MOD_RES (20)..(21)..(22)..(23)..(24): Xaa is A or G
  MOD_RES (25)..(26)..(27)..(28): Xaa is A or G or is absent

SEQ ID NO: 34909 - protein, 32 aa, Artificial Sequence; identical to SEQ ID NO: 32753
  GFR-binding peptide
  MOD_RES (14)..(15)..(16)..(17)..(18): Xaa is A or G
  MOD_RES (19)..(20)..(21)..(22): Xaa is A or G or is absent

SEQ ID NO: 34910 - protein, 36 aa, Artificial Sequence; identical to SEQ ID NO: 32754
  GFR-binding peptide
  MOD_RES (3)..(4): Xaa is C or S
  MOD_RES (18)..(19)..(20)..(21)..(22): Xaa is A or G
  MOD_RES (23)..(24)..(25)..(26): Xaa is A or G or is absent

SEQ ID NO: 34911 - protein, 44 aa, Artificial Sequence; identical to SEQ ID NO: 32755
  GFR-binding peptide
  MOD_RES (6)..(7)..(41)..(43): Xaa is C or S
  MOD_RES (21)..(22)..(23)..(24)..(25): Xaa is A or G
  MOD_RES (26)..(27)..(28)..(29): Xaa is A or G or is absent

SEQ ID NO: 34912 - protein, 32 aa, Artificial Sequence; identical to SEQ ID NO: 32756
  GFR-binding peptide
  MOD_RES (1)..(1): Xaa is C or S

SEQ ID NO: 34913 - protein, 40 aa, Artificial Sequence; identical to SEQ ID NO: 32757
  GFR-binding peptide
  MOD_RES (2)..(3)..(37)..(39): Xaa is C or S
  MOD_RES (17)..(18)..(19)..(20)..(21): Xaa is A or G
  MOD_RES (22)..(23)..(24)..(25): Xaa is A or G or is absent

SEQ ID NO: 34914 - protein, 38 aa, Artificial Sequence; identical to SEQ ID NO: 32758
  GFR-binding peptide
  MOD_RES (5)..(6): Xaa is C or S

SEQ ID NO: 34915 - protein, 43 aa, Artificial Sequence; identical to SEQ ID NO: 32759
  GFR-binding peptide
  MOD_RES (6)..(7)..(41)..(43): Xaa is C or S
  MOD_RES (21)..(22)..(23)..(24)..(25): Xaa is A or G
  MOD_RES (26)..(27)..(28)..(29): Xaa is A or G or is absent

SEQ ID NO: 34916 - protein, 32 aa, Artificial Sequence; identical to SEQ ID NO: 32760
  GFR-binding peptide
  MOD_RES (2)..(2): Xaa is C or S

SEQ ID NO: 34917 - protein, 37 aa, Artificial Sequence; identical to SEQ ID NO: 32761
  GFR-binding peptide
  MOD_RES (4)..(5): Xaa is C or S
  MOD_RES (19)..(20)..(21)..(22)..(23): Xaa is A or G
  MOD_RES (24)..(25)..(26)..(27): Xaa is A or G or is absent

SEQ ID NO: 34918 - protein, 37 aa, Artificial Sequence; identical to SEQ ID NO: 32762
  GFR-binding peptide
  MOD_RES (1)..(2)..(34)..(36): Xaa is C or S

SEQ ID NO: 34919 - protein, 37 aa, Artificial Sequence; identical to SEQ ID NO: 32763
  GFR-binding peptide
  MOD_RES (2)..(3)..(35)..(37): Xaa is C or S

SEQ ID NO: 34920 - protein, 37 aa, Artificial Sequence; identical to SEQ ID NO: 32764
  GFR-binding peptide
  MOD_RES (2)..(3)..(35)..(37): Xaa is C or S

SEQ ID NO: 34921 - protein, 41 aa, Artificial Sequence; identical to SEQ ID NO: 32765
  GFR-binding peptide
  MOD_RES (5)..(6)..(38)..(40): Xaa is C or S

SEQ ID NO: 34922 - protein, 39 aa, Artificial Sequence; identical to SEQ ID NO: 32766
  GFR-binding peptide
  MOD_RES (1)..(2)..(36)..(38): Xaa is C or S
  MOD_RES (16)..(17)..(18)..(19)..(20): Xaa is A or G
  MOD_RES (21)..(22)..(23)..(24): Xaa is A or G or is absent

SEQ ID NO: 34923 - protein, 35 aa, Artificial Sequence; identical to SEQ ID NO: 32767
  GFR-binding peptide
  MOD_RES (2)..(34): Xaa is C or S

SEQ ID NO: 34924 - protein, 34 aa, Artificial Sequence; identical to SEQ ID NO: 32768
  GFR-binding peptide
  MOD_RES (1)..(33): Xaa is C or S

SEQ ID NO: 34925 - protein, 35 aa, Artificial Sequence; identical to SEQ ID NO: 32769
  GFR-binding peptide
  MOD_RES (4)..(5): Xaa is C or S

SEQ ID NO: 34926 - protein, 34 aa, Artificial Sequence; identical to SEQ ID NO: 32770
  GFR-binding peptide
  MOD_RES (1)..(2)..(34): Xaa is C or S

SEQ ID NO: 34927 - protein, 40 aa, Artificial Sequence; identical to SEQ ID NO: 32771
  GFR-binding peptide
  MOD_RES (6)..(7)..(39): Xaa is C or S

SEQ ID NO: 34928 - protein, 36 aa, Artificial Sequence; identical to SEQ ID NO: 32772
  GFR-binding peptide
  MOD_RES (3)..(3): Xaa is C or S
  MOD_RES (17)..(18)..(19)..(20)..(21): Xaa is A or G
  MOD_RES (22)..(23)..(24)..(25): Xaa is A or G or is absent

SEQ ID NO: 34929 - protein, 39 aa, Artificial Sequence; identical to SEQ ID NO: 32773
  GFR-binding peptide
  MOD_RES (5)..(6)..(38): Xaa is C or S

SEQ ID NO: 34930 - protein, 37 aa, Artificial Sequence; identical to SEQ ID NO: 32774
  GFR-binding peptide
  MOD_RES (34)..(36): Xaa is C or S
  MOD_RES (14)..(15)..(16)..(17)..(18): Xaa is A or G
  MOD_RES (19)..(20)..(21)..(22): Xaa is A or G or is absent

SEQ ID NO: 34931 - protein, 38 aa, Artificial Sequence; identical to SEQ ID NO: 32775
  GFR-binding peptide
  MOD_RES (4)..(5)..(37): Xaa is C or S

SEQ ID NO: 34932 - protein, 32 aa, Artificial Sequence; identical to SEQ ID NO: 32776
  GFR-binding peptide
  MOD_RES (32)..(32): Xaa is C or S

SEQ ID NO: 34933 - protein, 39 aa, Artificial Sequence; identical to SEQ ID NO: 32777
  GFR-binding peptide
  MOD_RES (2)..(3)..(38): Xaa is C or S
  MOD_RES (17)..(18)..(19)..(20)..(21): Xaa is A or G
  MOD_RES (22)..(23)..(24)..(25): Xaa is A or G or is absent

SEQ ID NO: 34934 - protein, 35 aa, Artificial Sequence; identical to SEQ ID NO: 32778
  GFR-binding peptide
  MOD_RES (4)..(5): Xaa is C or S

SEQ ID NO: 34935 - protein, 34 aa, Artificial Sequence; identical to SEQ ID NO: 32779
  GFR-binding peptide
  MOD_RES (33)..(33): Xaa is C or S
  MOD_RES (14)..(15)..(16)..(17)..(18): Xaa is A or G
  MOD_RES (19)..(20)..(21)..(22): Xaa is A or G or is absent

SEQ ID NO: 34936 - protein, 34 aa, Artificial Sequence; identical to SEQ ID NO: 32780
  GFR-binding peptide
  MOD_RES (3)..(4): Xaa is C or S

SEQ ID NO: 34937 - protein, 39 aa, Artificial Sequence; identical to SEQ ID NO: 32781
  GFR-binding peptide
  MOD_RES (4)..(5)..(39): Xaa is C or S
  MOD_RES (19)..(20)..(21)..(22)..(23): Xaa is A or G
  MOD_RES (24)..(25)..(26)..(27): Xaa is A or G or is absent

SEQ ID NO: 34938 - protein, 41 aa, Artificial Sequence; identical to SEQ ID NO: 32782
  GFR-binding peptide
  MOD_RES (6)..(7)..(39)..(41): Xaa is C or S

SEQ ID NO: 34939 - protein, 37 aa, Artificial Sequence; identical to SEQ ID NO: 32783
  GFR-binding peptide
  MOD_RES (2)..(36): Xaa is C or S
  MOD_RES (16)..(17)..(18)..(19)..(20): Xaa is A or G
  MOD_RES (21)..(22)..(23)..(24): Xaa is A or G or is absent

SEQ ID NO: 34940 - protein, 35 aa, Artificial Sequence; identical to SEQ ID NO: 32784
  GFR-binding peptide
  MOD_RES (4)..(5): Xaa is C or S

SEQ ID NO: 34941 - protein, 36 aa, Artificial Sequence; identical to SEQ ID NO: 32785
  GFR-binding peptide
  MOD_RES (3)..(4): Xaa is C or S
  MOD_RES (18)..(19)..(20)..(21)..(22): Xaa is A or G
  MOD_RES (23)..(24)..(25)..(26): Xaa is A or G or is absent

SEQ ID NO: 34942 - protein, 39 aa, Artificial Sequence; identical to SEQ ID NO: 32786
  GFR-binding peptide
  MOD_RES (2)..(3)..(37)..(39): Xaa is C or S
  MOD_RES (17)..(18)..(19)..(20)..(21): Xaa is A or G
  MOD_RES (22)..(23)..(24)..(25): Xaa is A or G or is absent

SEQ ID NO: 34943 - protein, 38 aa, Artificial Sequence; identical to SEQ ID NO: 32787
  GFR-binding peptide
  MOD_RES (4)..(5)..(37): Xaa is C or S

SEQ ID NO: 34944 - protein, 39 aa, Artificial Sequence; identical to SEQ ID NO: 32788
  GFR-binding peptide
  MOD_RES (4)..(5)..(37)..(39): Xaa is C or S

SEQ ID NO: 34945 - protein, 35 aa, Artificial Sequence; identical to SEQ ID NO: 32789
  GFR-binding peptide
  MOD_RES (34)..(34): Xaa is C or S
  MOD_RES (14)..(15)..(16)..(17)..(18): Xaa is A or G
  MOD_RES (19)..(20)..(21)..(22): Xaa is A or G or is absent

SEQ ID NO: 34946 - protein, 40 aa, Artificial Sequence; identical to SEQ ID NO: 32790
  GFR-binding peptide
  MOD_RES (5)..(6)..(40): Xaa is C or S
  MOD_RES (20)..(21)..(22)..(23)..(24): Xaa is A or G
  MOD_RES (25)..(26)..(27)..(28): Xaa is A or G or is absent

SEQ ID NO: 34947 - protein, 37 aa, Artificial Sequence; identical to SEQ ID NO: 32791
  GFR-binding peptide
  MOD_RES (3)..(37): Xaa is C or S
  MOD_RES (17)..(18)..(19)..(20)..(21): Xaa is A or G
  MOD_RES (22)..(23)..(24)..(25): Xaa is A or G or is absent

SEQ ID NO: 34948 - protein, 35 aa, Artificial Sequence; identical to SEQ ID NO: 32792
  GFR-binding peptide
  MOD_RES (34)..(34): Xaa is C or S
  MOD_RES (14)..(15)..(16)..(17)..(18): Xaa is A or G
  MOD_RES (19)..(20)..(21)..(22): Xaa is A or G or is absent

SEQ ID NO: 34949 - protein, 38 aa, Artificial Sequence; identical to SEQ ID NO: 32793
  GFR-binding peptide
  MOD_RES (5)..(6): Xaa is C or S
  MOD_RES (20)..(21)..(22)..(23)..(24): Xaa is A or G
  MOD_RES (25)..(26)..(27)..(28): Xaa is A or G or is absent

SEQ ID NO: 34950 - protein, 32 aa, Artificial Sequence; identical to SEQ ID NO: 32794
  GFR-binding peptide
  MOD_RES (1)..(1): Xaa is C or S

SEQ ID NO: 34951 - protein, 38 aa, Artificial Sequence; identical to SEQ ID NO: 32795
  GFR-binding peptide
  MOD_RES (6)..(7): Xaa is C or S

SEQ ID NO: 34952 - protein, 34 aa, Artificial Sequence; identical to SEQ ID NO: 32796
  GFR-binding peptide
  MOD_RES (33)..(33): Xaa is C or S

SEQ ID NO: 34953 - protein, 40 aa, Artificial Sequence; identical to SEQ ID NO: 32797
  GFR-binding peptide
  MOD_RES (6)..(38)..(40): Xaa is C or S

SEQ ID NO: 34954 - protein, 37 aa, Artificial Sequence; identical to SEQ ID NO: 32798
  GFR-binding peptide
  MOD_RES (5)..(6): Xaa is C or S

SEQ ID NO: 34955 - protein, 37 aa, Artificial Sequence; identical to SEQ ID NO: 32799
  GFR-binding peptide
  MOD_RES (6)..(7): Xaa is C or S

SEQ ID NO: 34956 - protein, 35 aa, Artificial Sequence; identical to SEQ ID NO: 32800
  GFR-binding peptide
  MOD_RES (3)..(4): Xaa is C or S

SEQ ID NO: 34957 - protein, 40 aa, Artificial Sequence; identical to SEQ ID NO: 32801
  GFR-binding peptide
  MOD_RES (2)..(3)..(37)..(39): Xaa is C or S
  MOD_RES (17)..(18)..(19)..(20)..(21): Xaa is A or G
  MOD_RES (22)..(23)..(24)..(25): Xaa is A or G or is absent

SEQ ID NO: 34958 - protein, 36 aa, Artificial Sequence; identical to SEQ ID NO: 32802
  GFR-binding peptide
  MOD_RES (5)..(6): Xaa is C or S

SEQ ID NO: 34959 - protein, 39 aa, Artificial Sequence; identical to SEQ ID NO: 32803
  GFR-binding peptide
  MOD_RES (3)..(4)..(38): Xaa is C or S
  MOD_RES (18)..(19)..(20)..(21)..(22): Xaa is A or G
  MOD_RES (23)..(24)..(25)..(26): Xaa is A or G or is absent

SEQ ID NO: 34960 - protein, 32 aa, Artificial Sequence; identical to SEQ ID NO: 32804
  GFR-binding peptide
  MOD_RES (14)..(15)..(16)..(17)..(18): Xaa is A or G
  MOD_RES (19)..(20)..(21)..(22): Xaa is A or G or is absent

SEQ ID NO: 34961 - protein, 40 aa, Artificial Sequence; identical to SEQ ID NO: 32805
  GFR-binding peptide
  MOD_RES (2)..(3)..(37)..(39): Xaa is C or S
  MOD_RES (17)..(18)..(19)..(20)..(21): Xaa is A or G
  MOD_RES (22)..(23)..(24)..(25): Xaa is A or G or is absent

SEQ ID NO: 34962 - protein, 40 aa, Artificial Sequence; identical to SEQ ID NO: 32806
  GFR-binding peptide
  MOD_RES (4)..(5)..(39): Xaa is C or S
  MOD_RES (19)..(20)..(21)..(22)..(23): Xaa is A or G
  MOD_RES (24)..(25)..(26)..(27): Xaa is A or G or is absent

SEQ ID NO: 34963 - protein, 42 aa, Artificial Sequence; identical to SEQ ID NO: 32807
  GFR-binding peptide
  MOD_RES (4)..(5)..(39)..(41): Xaa is C or S
  MOD_RES (19)..(20)..(21)..(22)..(23): Xaa is A or G
  MOD_RES (24)..(25)..(26)..(27): Xaa is A or G or is absent

SEQ ID NO: 34964 - protein, 42 aa, Artificial Sequence; identical to SEQ ID NO: 32808
  GFR-binding peptide
  MOD_RES (7)..(39)..(41): Xaa is C or S

SEQ ID NO: 34965 - protein, 38 aa, Artificial Sequence; identical to SEQ ID NO: 32809
  GFR-binding peptide
  MOD_RES (1)..(35)..(37): Xaa is C or S
  MOD_RES (15)..(16)..(17)..(18)..(19): Xaa is A or G
  MOD_RES (20)..(21)..(22)..(23): Xaa is A or G or is absent

SEQ ID NO: 34966 - protein, 33 aa, Artificial Sequence; identical to SEQ ID NO: 32810
  GFR-binding peptide
  MOD_RES (1)..(2)..(33): Xaa is C or S

SEQ ID NO: 34967 - protein, 36 aa, Artificial Sequence; identical to SEQ ID NO: 32811
  GFR-binding peptide
  MOD_RES (1)..(2)..(36): Xaa is C or S
  MOD_RES (16)..(17)..(18)..(19)..(20): Xaa is A or G
  MOD_RES (21)..(22)..(23)..(24): Xaa is A or G or is absent

SEQ ID NO: 34968 - protein, 42 aa, Artificial Sequence; identical to SEQ ID NO: 32812
  GFR-binding peptide
  MOD_RES (4)..(5)..(39)..(41): Xaa is C or S
  MOD_RES (19)..(20)..(21)..(22)..(23): Xaa is A or G
  MOD_RES (24)..(25)..(26)..(27): Xaa is A or G or is absent

SEQ ID NO: 34969 - protein, 39 aa, Artificial Sequence; identical to SEQ ID NO: 32813
  GFR-binding peptide
  MOD_RES (5)..(39): Xaa is C or S
  MOD_RES (19)..(20)..(21)..(22)..(23): Xaa is A or G
  MOD_RES (24)..(25)..(26)..(27): Xaa is A or G or is absent

SEQ ID NO: 34970 - protein, 35 aa, Artificial Sequence; identical to SEQ ID NO: 32814
  GFR-binding peptide
  MOD_RES (32)..(34): Xaa is C or S

SEQ ID NO: 34971 - protein, 41 aa, Artificial Sequence; identical to SEQ ID NO: 32815
  GFR-binding peptide
  MOD_RES (4)..(5)..(38)..(40): Xaa is C or S

SEQ ID NO: 34972 - protein, 32 aa, Artificial Sequence; identical to SEQ ID NO: 32816
  GFR-binding peptide
  MOD_RES (32)..(32): Xaa is C or S

SEQ ID NO: 34973 - protein, 41 aa, Artificial Sequence; identical to SEQ ID NO: 32817
  GFR-binding peptide
  MOD_RES (5)..(6)..(38)..(40): Xaa is C or S

SEQ ID NO: 34974 - protein, 39 aa, Artificial Sequence; identical to SEQ ID NO: 32818
  GFR-binding peptide
  MOD_RES (4)..(5)..(36)..(38): Xaa is C or S

SEQ ID NO: 34975 - protein, 34 aa, Artificial Sequence; identical to SEQ ID NO: 32819
  GFR-binding peptide
  MOD_RES (34)..(34): Xaa is C or S
  MOD_RES (14)..(15)..(16)..(17)..(18): Xaa is A or G
  MOD_RES (19)..(20)..(21)..(22): Xaa is A or G or is absent

SEQ ID NO: 34976 - protein, 38 aa, Artificial Sequence; identical to SEQ ID NO: 32820
  GFR-binding peptide
  MOD_RES (5)..(6)..(38): Xaa is C or S

SEQ ID NO: 34977 - protein, 38 aa, Artificial Sequence; identical to SEQ ID NO: 32821
  GFR-binding peptide
  MOD_RES (2)..(3)..(37): Xaa is C or S
  MOD_RES (17)..(18)..(19)..(20)..(21): Xaa is A or G
  MOD_RES (22)..(23)..(24)..(25): Xaa is A or G or is absent

SEQ ID NO: 34978 - protein, 39 aa, Artificial Sequence; identical to SEQ ID NO: 32822
  GFR-binding peptide
  MOD_RES (2)..(3)..(37)..(39): Xaa is C or S
  MOD_RES (17)..(18)..(19)..(20)..(21): Xaa is A or G
  MOD_RES (22)..(23)..(24)..(25): Xaa is A or G or is absent

SEQ ID NO: 34979 - protein, 35 aa, Artificial Sequence; identical to SEQ ID NO: 32823
  GFR-binding peptide
  MOD_RES (4)..(5): Xaa is C or S

SEQ ID NO: 34980 - protein, 42 aa, Artificial Sequence; identical to SEQ ID NO: 32824
  GFR-binding peptide
  MOD_RES (4)..(5)..(39)..(41): Xaa is C or S
  MOD_RES (19)..(20)..(21)..(22)..(23): Xaa is A or G
  MOD_RES (24)..(25)..(26)..(27): Xaa is A or G or is absent

SEQ ID NO: 34981 - protein, 42 aa, Artificial Sequence; identical to SEQ ID NO: 32825
  GFR-binding peptide
  MOD_RES (3)..(4)..(39)..(41): Xaa is C or S
  MOD_RES (18)..(19)..(20)..(21)..(22): Xaa is A or G
  MOD_RES (23)..(24)..(25)..(26): Xaa is A or G or is absent

SEQ ID NO: 34982 - protein, 36 aa, Artificial Sequence; identical to SEQ ID NO: 32826
  GFR-binding peptide
  MOD_RES (2)..(3): Xaa is C or S
  MOD_RES (17)..(18)..(19)..(20)..(21): Xaa is A or G
  MOD_RES (22)..(23)..(24)..(25): Xaa is A or G or is absent

SEQ ID NO: 34983 - protein, 37 aa, Artificial Sequence; identical to SEQ ID NO: 32827
  GFR-binding peptide
  MOD_RES (3)..(4): Xaa is C or S
  MOD_RES (18)..(19)..(20)..(21)..(22): Xaa is A or G
  MOD_RES (23)..(24)..(25)..(26): Xaa is A or G or is absent

SEQ ID NO: 34984 - protein, 35 aa, Artificial Sequence; identical to SEQ ID NO: 32828
  GFR-binding peptide
  MOD_RES (2)..(3)..(35): Xaa is C or S

SEQ ID NO: 34985 - protein, 38 aa, Artificial Sequence; identical to SEQ ID NO: 32829
  GFR-binding peptide
  MOD_RES (2)..(3)..(37): Xaa is C or S
  MOD_RES (17)..(18)..(19)..(20)..(21): Xaa is A or G
  MOD_RES (22)..(23)..(24)..(25): Xaa is A or G or is absent

SEQ ID NO: 34986 - protein, 34 aa, Artificial Sequence; identical to SEQ ID NO: 32830
  GFR-binding peptide
  MOD_RES (34)..(34): Xaa is C or S
  MOD_RES (14)..(15)..(16)..(17)..(18): Xaa is A or G
  MOD_RES (19)..(20)..(21)..(22): Xaa is A or G or is absent

SEQ ID NO: 34987 - protein, 35 aa, Artificial Sequence; identical to SEQ ID NO: 32831
  GFR-binding peptide
  MOD_RES (2)..(3)..(35): Xaa is C or S

SEQ ID NO: 34988 - protein, 43 aa, Artificial Sequence; identical to SEQ ID NO: 32832
  GFR-binding peptide
  MOD_RES (6)..(7)..(41)..(43): Xaa is C or S
  MOD_RES (21)..(22)..(23)..(24)..(25): Xaa is A or G
  MOD_RES (26)..(27)..(28)..(29): Xaa is A or G or is absent

SEQ ID NO: 34989 - protein, 41 aa, Artificial Sequence; identical to SEQ ID NO: 32833
  GFR-binding peptide
  MOD_RES (4)..(5)..(39)..(41): Xaa is C or S
  MOD_RES (19)..(20)..(21)..(22)..(23): Xaa is A or G
  MOD_RES (24)..(25)..(26)..(27): Xaa is A or G or is absent

SEQ ID NO: 34990 - protein, 35 aa, Artificial Sequence; identical to SEQ ID NO: 32834
  GFR-binding peptide
  MOD_RES (1)..(34): Xaa is C or S
  MOD_RES (15)..(16)..(17)..(18)..(19): Xaa is A or G
  MOD_RES (20)..(21)..(22)..(23): Xaa is A or G or is absent

SEQ ID NO: 34991 - protein, 37 aa, Artificial Sequence; identical to SEQ ID NO: 32835
  GFR-binding peptide
  MOD_RES (4)..(5)..(37): Xaa is C or S

SEQ ID NO: 34992 - protein, 39 aa, Artificial Sequence; identical to SEQ ID NO: 32836
  GFR-binding peptide
  MOD_RES (2)..(3)..(37)..(39): Xaa is C or S
  MOD_RES (17)..(18)..(19)..(20)..(21): Xaa is A or G
  MOD_RES (22)..(23)..(24)..(25): Xaa is A or G or is absent

SEQ ID NO: 34993 - protein, 41 aa, Artificial Sequence; identical to SEQ ID NO: 32837
  GFR-binding peptide
  MOD_RES (4)..(5)..(39)..(41): Xaa is C or S
  MOD_RES (19)..(20)..(21)..(22)..(23): Xaa is A or G
  MOD_RES (24)..(25)..(26)..(27): Xaa is A or G or is absent

SEQ ID NO: 34994 - protein, 34 aa, Artificial Sequence; identical to SEQ ID NO: 32838
  GFR-binding peptide
  MOD_RES (1)..(2): Xaa is C or S

SEQ ID NO: 34995 - protein, 35 aa, Artificial Sequence; identical to SEQ ID NO: 32839
  GFR-binding peptide
  MOD_RES (1)..(35): Xaa is C or S
  MOD_RES (15)..(16)..(17)..(18)..(19): Xaa is A or G
  MOD_RES (20)..(21)..(22)..(23): Xaa is A or G or is absent

SEQ ID NO: 34996 - protein, 35 aa, Artificial Sequence; identical to SEQ ID NO: 32840
  GFR-binding peptide
  MOD_RES (2)..(3)..(35): Xaa is C or S

SEQ ID NO: 34997 - protein, 39 aa, Artificial Sequence; identical to SEQ ID NO: 32841
  GFR-binding peptide
  MOD_RES (2)..(36)..(38): Xaa is C or S
  MOD_RES (16)..(17)..(18)..(19)..(20): Xaa is A or G
  MOD_RES (21)..(22)..(23)..(24): Xaa is A or G or is absent

SEQ ID NO: 34998 - protein, 40 aa, Artificial Sequence; identical to SEQ ID NO: 32842
  GFR-binding peptide
  MOD_RES (4)..(5)..(37)..(39): Xaa is C or S

SEQ ID NO: 34999 - protein, 36 aa, Artificial Sequence; identical to SEQ ID NO: 32843
  GFR-binding peptide
  MOD_RES (1)..(2)..(34)..(36): Xaa is C or S

SEQ ID NO: 35000 - protein, 40 aa, Artificial Sequence; identical to SEQ ID NO: 32844
  GFR-binding peptide
  MOD_RES (4)..(5)..(37)..(39): Xaa is C or S

SEQ ID NO: 35001 - protein, 37 aa, Artificial Sequence; identical to SEQ ID NO: 32845
  GFR-binding peptide
  MOD_RES (5)..(37): Xaa is C or S

SEQ ID NO: 35002 - protein, 41 aa, Artificial Sequence; identical to SEQ ID NO: 32846
  GFR-binding peptide
  MOD_RES (5)..(6)..(38)..(40): Xaa is C or S

SEQ ID NO: 35003 - protein, 42 aa, Artificial Sequence; identical to SEQ ID NO: 32847
  GFR-binding peptide
  MOD_RES (5)..(6)..(40)..(42): Xaa is C or S
  MOD_RES (20)..(21)..(22)..(23)..(24): Xaa is A or G
  MOD_RES (25)..(26)..(27)..(28): Xaa is A or G or is absent

SEQ ID NO: 35004 - protein, 35 aa, Artificial Sequence; identical to SEQ ID NO: 32848
  GFR-binding peptide
  MOD_RES (1)..(35): Xaa is C or S
  MOD_RES (15)..(16)..(17)..(18)..(19): Xaa is A or G
  MOD_RES (20)..(21)..(22)..(23): Xaa is A or G or is absent

SEQ ID NO: 35005 - protein, 36 aa, Artificial Sequence; identical to SEQ ID NO: 32849
  GFR-binding peptide
  MOD_RES (2)..(3)..(35): Xaa is C or S

SEQ ID NO: 35006 - protein, 37 aa, Artificial Sequence; identical to SEQ ID NO: 32850
  GFR-binding peptide
  MOD_RES (34)..(36): Xaa is C or S
  MOD_RES (14)..(15)..(16)..(17)..(18): Xaa is A or G
  MOD_RES (19)..(20)..(21)..(22): Xaa is A or G or is absent

SEQ ID NO: 35007 - protein, 32 aa, Artificial Sequence; identical to SEQ ID NO: 32851
  GFR-binding peptide

SEQ ID NO: 35008 - protein, 38 aa, Artificial Sequence; identical to SEQ ID NO: 32852
  GFR-binding peptide
  MOD_RES (2)..(3)..(36)..(38): Xaa is C or S
  MOD_RES (17)..(18)..(19)..(20)..(21): Xaa is A or G
  MOD_RES (22)..(23)..(24)..(25): Xaa is A or G or is absent

SEQ ID NO: 35009 - protein, 38 aa, Artificial Sequence; identical to SEQ ID NO: 32853
  GFR-binding peptide
  MOD_RES (3)..(4)..(38): Xaa is C or S
  MOD_RES (18)..(19)..(20)..(21)..(22): Xaa is A or G
  MOD_RES (23)..(24)..(25)..(26): Xaa is A or G or is absent

SEQ ID NO: 35010 - protein, 40 aa, Artificial Sequence; identical to SEQ ID NO: 32854
  GFR-binding peptide
  MOD_RES (4)..(5)..(38)..(40): Xaa is C or S
  MOD_RES (19)..(20)..(21)..(22)..(23): Xaa is A or G
  MOD_RES (24)..(25)..(26)..(27): Xaa is A or G or is absent

SEQ ID NO: 35011 - protein, 35 aa, Artificial Sequence; identical to SEQ ID NO: 32855
  GFR-binding peptide
  MOD_RES (1)..(2)..(34): Xaa is C or S

SEQ ID NO: 35012 - protein, 36 aa, Artificial Sequence; identical to SEQ ID NO: 32856
  GFR-binding peptide
  MOD_RES (5)..(6): Xaa is C or S

SEQ ID NO: 35013 - protein, 40 aa, Artificial Sequence; identical to SEQ ID NO: 32857
  GFR-binding peptide
  MOD_RES (7)..(39): Xaa is C or S

SEQ ID NO: 35014 - protein, 39 aa, Artificial Sequence; identical to SEQ ID NO: 32858
  GFR-binding peptide
  MOD_RES (3)..(4)..(36)..(38): Xaa is C or S

SEQ ID NO: 35015 - protein, 35 aa, Artificial Sequence; identical to SEQ ID NO: 32859
  GFR-binding peptide
  MOD_RES (33)..(35): Xaa is C or S

SEQ ID NO: 35016 - protein, 36 aa, Artificial Sequence; identical to SEQ ID NO: 32860
  GFR-binding peptide
  MOD_RES (5)..(6): Xaa is C or S

SEQ ID NO: 35017 - protein, 37 aa, Artificial Sequence; identical to SEQ ID NO: 32861
  GFR-binding peptide
  MOD_RES (3)..(4)..(35)..(37): Xaa is C or S

SEQ ID NO: 35018 - protein, 41 aa, Artificial Sequence; identical to SEQ ID NO: 32862
  GFR-binding peptide
  MOD_RES (6)..(7)..(39)..(41): Xaa is C or S

SEQ ID NO: 35019 - protein, 36 aa, Artificial Sequence; identical to SEQ ID NO: 32863
  GFR-binding peptide
  MOD_RES (2)..(3): Xaa is C or S
  MOD_RES (17)..(18)..(19)..(20)..(21): Xaa is A or G
  MOD_RES (22)..(23)..(24)..(25): Xaa is A or G or is absent

SEQ ID NO: 35020 - protein, 36 aa, Artificial Sequence; identical to SEQ ID NO: 32864
  GFR-binding peptide
  MOD_RES (3)..(4): Xaa is C or S
  MOD_RES (18)..(19)..(20)..(21)..(22): Xaa is A or G
  MOD_RES (23)..(24)..(25)..(26): Xaa is A or G or is absent

SEQ ID NO: 35021 - protein, 36 aa, Artificial Sequence; identical to SEQ ID NO: 32865
  GFR-binding peptide
  MOD_RES (1)..(35): Xaa is C or S
  MOD_RES (15)..(16)..(17)..(18)..(19): Xaa is A or G
  MOD_RES (20)..(21)..(22)..(23): Xaa is A or G or is absent

SEQ ID NO: 35022 - protein, 32 aa, Artificial Sequence; identical to SEQ ID NO: 32866
  GFR-binding peptide
  MOD_RES (14)..(15)..(16)..(17)..(18): Xaa is A or G
  MOD_RES (19)..(20)..(21)..(22): Xaa is A or G or is absent

SEQ ID NO: 35023 - protein, 40 aa, Artificial Sequence; identical to SEQ ID NO: 32867
  GFR-binding peptide
  MOD_RES (5)..(6)..(40): Xaa is C or S
  MOD_RES (20)..(21)..(22)..(23)..(24): Xaa is A or G
  MOD_RES (25)..(26)..(27)..(28): Xaa is A or G or is absent

SEQ ID NO: 35024 - protein, 39 aa, Artificial Sequence; identical to SEQ ID NO: 32868
  GFR-binding peptide
  MOD_RES (5)..(6)..(38): Xaa is C or S

SEQ ID NO: 35025 - protein, 35 aa, Artificial Sequence; identical to SEQ ID NO: 32869
  GFR-binding peptide
  MOD_RES (33)..(35): Xaa is C or S
  MOD_RES (14)..(15)..(16)..(17)..(18): Xaa is A or G
  MOD_RES (19)..(20)..(21)..(22): Xaa is A or G or is absent

SEQ ID NO: 35026 - protein, 36 aa, Artificial Sequence; identical to SEQ ID NO: 32870
  GFR-binding peptide
  MOD_RES (5)..(6): Xaa is C or S

SEQ ID NO: 35027 - protein, 37 aa, Artificial Sequence; identical to SEQ ID NO: 32871
  GFR-binding peptide
  MOD_RES (2)..(3)..(35)..(37): Xaa is C or S

SEQ ID NO: 35028 - protein, 40 aa, Artificial Sequence; identical to SEQ ID NO: 32872
  GFR-binding peptide
  MOD_RES (3)..(4)..(38)..(40): Xaa is C or S
  MOD_RES (18)..(19)..(20)..(21)..(22): Xaa is A or G
  MOD_RES (23)..(24)..(25)..(26): Xaa is A or G or is absent

SEQ ID NO: 35029 - protein, 37 aa, Artificial Sequence; identical to SEQ ID NO: 32873
  GFR-binding peptide
  MOD_RES (1)..(34)..(36): Xaa is C or S
  MOD_RES (15)..(16)..(17)..(18)..(19): Xaa is A or G
  MOD_RES (20)..(21)..(22)..(23): Xaa is A or G or is absent

SEQ ID NO: 35030 - protein, 41 aa, Artificial Sequence; identical to SEQ ID NO: 32874
  GFR-binding peptide
  MOD_RES (6)..(38)..(40): Xaa is C or S

SEQ ID NO: 35031 - protein, 37 aa, Artificial Sequence; identical to SEQ ID NO: 32875
  GFR-binding peptide
  MOD_RES (34)..(36): Xaa is C or S
  MOD_RES (14)..(15)..(16)..(17)..(18): Xaa is A or G
  MOD_RES (19)..(20)..(21)..(22): Xaa is A or G or is absent

SEQ ID NO: 35032 - protein, 35 aa, Artificial Sequence; identical to SEQ ID NO: 32876
  GFR-binding peptide
  MOD_RES (1)..(2): Xaa is C or S
  MOD_RES (16)..(17)..(18)..(19)..(20): Xaa is A or G
  MOD_RES (21)..(22)..(23)..(24): Xaa is A or G or is absent

SEQ ID NO: 35033 - protein, 45 aa, Artificial Sequence; identical to SEQ ID NO: 32877
  GFR-binding peptide
  MOD_RES (6)..(7)..(42)..(44): Xaa is C or S
  MOD_RES (21)..(22)..(23)..(24)..(25): Xaa is A or G
  MOD_RES (26)..(27)..(28)..(29): Xaa is A or G or is absent

SEQ ID NO: 35034 - protein, 33 aa, Artificial Sequence; identical to SEQ ID NO: 32878
  GFR-binding peptide
  MOD_RES (1)..(2): Xaa is C or S

SEQ ID NO: 35035 - protein, 36 aa, Artificial Sequence; identical to SEQ ID NO: 32879
  GFR-binding peptide
  MOD_RES (1)..(33)..(35): Xaa is C or S

SEQ ID NO: 35036 - protein, 39 aa, Artificial Sequence; identical to SEQ ID NO: 32880
  GFR-binding peptide
  MOD_RES (6)..(7): Xaa is C or S
  MOD_RES (21)..(22)..(23)..(24)..(25): Xaa is A or G
  MOD_RES (26)..(27)..(28)..(29): Xaa is A or G or is absent

SEQ ID NO: 35037 - protein, 32 aa, Artificial Sequence; identical to SEQ ID NO: 32881
  GFR-binding peptide
  MOD_RES (32)..(32): Xaa is C or S

SEQ ID NO: 35038 - protein, 35 aa, Artificial Sequence; identical to SEQ ID NO: 32882
  GFR-binding peptide
  MOD_RES (2)..(3): Xaa is C or S
  MOD_RES (17)..(18)..(19)..(20)..(21): Xaa is A or G
  MOD_RES (22)..(23)..(24)..(25): Xaa is A or G or is absent

SEQ ID NO: 35039 - protein, 39 aa, Artificial Sequence; identical to SEQ ID NO: 32883
  GFR-binding peptide
  MOD_RES (4)..(5)..(39): Xaa is C or S
  MOD_RES (19)..(20)..(21)..(22)..(23): Xaa is A or G
  MOD_RES (24)..(25)..(26)..(27): Xaa is A or G or is absent

SEQ ID NO: 35040 - protein, 38 aa, Artificial Sequence; identical to SEQ ID NO: 32884
  GFR-binding peptide
  MOD_RES (5)..(6): Xaa is C or S
  MOD_RES (20)..(21)..(22)..(23)..(24): Xaa is A or G
  MOD_RES (25)..(26)..(27)..(28): Xaa is A or G or is absent

SEQ ID NO: 35041 - protein, 32 aa, Artificial Sequence; identical to SEQ ID NO: 32885
  GFR-binding peptide
  MOD_RES (14)..(15)..(16)..(17)..(18): Xaa is A or G
  MOD_RES (19)..(20)..(21)..(22): Xaa is A or G or is absent

SEQ ID NO: 35042 - protein, 36 aa, Artificial Sequence; identical to SEQ ID NO: 32886
  GFR-binding peptide
  MOD_RES (1)..(33)..(35): Xaa is C or S

SEQ ID NO: 35043 - protein, 31 aa, Artificial Sequence; identical to SEQ ID NO: 32887
  GFR-binding peptide
  MOD_RES (1)..(1): Xaa is C or S

SEQ ID NO: 35044 - protein, 41 aa, Artificial Sequence; identical to SEQ ID NO: 32888
  GFR-binding peptide
  MOD_RES (5)..(6)..(40): Xaa is C or S
  MOD_RES (20)..(21)..(22)..(23)..(24): Xaa is A or G
  MOD_RES (25)..(26)..(27)..(28): Xaa is A or G or is absent

SEQ ID NO: 35045 - protein, 34 aa, Artificial Sequence; identical to SEQ ID NO: 32889
  GFR-binding peptide
  MOD_RES (2)..(3): Xaa is C or S

SEQ ID NO: 35046 - protein, 34 aa, Artificial Sequence; identical to SEQ ID NO: 32890
  GFR-binding peptide
  MOD_RES (32)..(34): Xaa is C or S

SEQ ID NO: 35047 - protein, 34 aa, Artificial Sequence; identical to SEQ ID NO: 32891
  GFR-binding peptide
  MOD_RES (2)..(3): Xaa is C or S

SEQ ID NO: 35048 - protein, 41 aa, Artificial Sequence; identical to SEQ ID NO: 32892
  GFR-binding peptide
  MOD_RES (3)..(4)..(38)..(40): Xaa is C or S
  MOD_RES (18)..(19)..(20)..(21)..(22): Xaa is A or G
  MOD_RES (23)..(24)..(25)..(26): Xaa is A or G or is absent

SEQ ID NO: 35049 - protein, 40 aa, Artificial Sequence; identical to SEQ ID NO: 32893
  GFR-binding peptide
  MOD_RES (6)..(7)..(39): Xaa is C or S

SEQ ID NO: 35050 - protein, 40 aa, Artificial Sequence; identical to SEQ ID NO: 32894
  GFR-binding peptide
  MOD_RES (3)..(37)..(39): Xaa is C or S
  MOD_RES (17)..(18)..(19)..(20)..(21): Xaa is A or G
  MOD_RES (22)..(23)..(24)..(25): Xaa is A or G or is absent

SEQ ID NO: 35051 - protein, 33 aa, Artificial Sequence; identical to SEQ ID NO: 32895
  GFR-binding peptide
  MOD_RES (14)..(15)..(16)..(17)..(18): Xaa is A or G
  MOD_RES (19)..(20)..(21)..(22): Xaa is A or G or is absent

SEQ ID NO: 35052 - protein, 40 aa, Artificial Sequence; identical to SEQ ID NO: 32896
  GFR-binding peptide
  MOD_RES (6)..(7)..(39): Xaa is C or S

SEQ ID NO: 35053 - protein, 33 aa, Artificial Sequence; identical to SEQ ID NO: 32897
  GFR-binding peptide
  MOD_RES (14)..(15)..(16)..(17)..(18): Xaa is A or G
  MOD_RES (19)..(20)..(21)..(22): Xaa is A or G or is absent

SEQ ID NO: 35054 - protein, 38 aa, Artificial Sequence; identical to SEQ ID NO: 32898
  GFR-binding peptide
  MOD_RES (6)..(7): Xaa is C or S

SEQ ID NO: 35055 - protein, 36 aa, Artificial Sequence; identical to SEQ ID NO: 32899
  GFR-binding peptide
  MOD_RES (2)..(3): Xaa is C or S
  MOD_RES (17)..(18)..(19)..(20)..(21): Xaa is A or G
  MOD_RES (22)..(23)..(24)..(25): Xaa is A or G or is absent

SEQ ID NO: 35056 - protein, 36 aa, Artificial Sequence; identical to SEQ ID NO: 32900
  GFR-binding peptide
  MOD_RES (34)..(36): Xaa is C or S
  MOD_RES (14)..(15)..(16)..(17)..(18): Xaa is A or G
  MOD_RES (19)..(20)..(21)..(22): Xaa is A or G or is absent

SEQ ID NO: 35057 - protein, 37 aa, Artificial Sequence; identical to SEQ ID NO: 32901
  GFR-binding peptide
  MOD_RES (34)..(36): Xaa is C or S
  MOD_RES (14)..(15)..(16)..(17)..(18): Xaa is A or G
  MOD_RES (19)..(20)..(21)..(22): Xaa is A or G or is absent

SEQ ID NO: 35058 - protein, 42 aa, Artificial Sequence; identical to SEQ ID NO: 32902
  GFR-binding peptide
  MOD_RES (6)..(7)..(41): Xaa is C or S
  MOD_RES (21)..(22)..(23)..(24)..(25): Xaa is A or G
  MOD_RES (26)..(27)..(28)..(29): Xaa is A or G or is absent

SEQ ID NO: 35059 - protein, 38 aa, Artificial Sequence; identical to SEQ ID NO: 32903
  GFR-binding peptide
  MOD_RES (3)..(4)..(38): Xaa is C or S
  MOD_RES (18)..(19)..(20)..(21)..(22): Xaa is A or G
  MOD_RES (23)..(24)..(25)..(26): Xaa is A or G or is absent

SEQ ID NO: 35060 - protein, 38 aa, Artificial Sequence; identical to SEQ ID NO: 32904
  GFR-binding peptide
  MOD_RES (2)..(3)..(37): Xaa is C or S
  MOD_RES (17)..(18)..(19)..(20)..(21): Xaa is A or G
  MOD_RES (22)..(23)..(24)..(25): Xaa is A or G or is absent

SEQ ID NO: 35061 - protein, 34 aa, Artificial Sequence; identical to SEQ ID NO: 32905
  GFR-binding peptide
  MOD_RES (2)..(34): Xaa is C or S

SEQ ID NO: 35062 - protein, 38 aa, Artificial Sequence; identical to SEQ ID NO: 32906
  GFR-binding peptide
  MOD_RES (3)..(4)..(38): Xaa is C or S
  MOD_RES (18)..(19)..(20)..(21)..(22): Xaa is A or G
  MOD_RES (23)..(24)..(25)..(26): Xaa is A or G or is absent

SEQ ID NO: 35063 - protein, 33 aa, Artificial Sequence; identical to SEQ ID NO: 32907
  GFR-binding peptide
  MOD_RES (14)..(15)..(16)..(17)..(18): Xaa is A or G
  MOD_RES (19)..(20)..(21)..(22): Xaa is A or G or is absent

SEQ ID NO: 35064 - protein, 43 aa, Artificial Sequence; identical to SEQ ID NO: 32908
  GFR-binding peptide
  MOD_RES (4)..(5)..(40)..(42): Xaa is C or S
  MOD_RES (19)..(20)..(21)..(22)..(23): Xaa is A or G
  MOD_RES (24)..(25)..(26)..(27): Xaa is A or G or is absent

SEQ ID NO: 35065 - protein, 40 aa, Artificial Sequence; identical to SEQ ID NO: 32909
  GFR-binding peptide
  MOD_RES (5)..(6)..(38)..(40): Xaa is C or S

SEQ ID NO: 35066 - protein, 36 aa, Artificial Sequence; identical to SEQ ID NO: 32910
  GFR-binding peptide
  MOD_RES (1)..(2)..(34)..(36): Xaa is C or S

SEQ ID NO: 35067 - protein, 36 aa, Artificial Sequence; identical to SEQ ID NO: 32911
  GFR-binding peptide
  MOD_RES (34)..(36): Xaa is C or S
  MOD_RES (14)..(15)..(16)..(17)..(18): Xaa is A or G
  MOD_RES (19)..(20)..(21)..(22): Xaa is A or G or is absent

SEQ ID NO: 35068 - protein, 30 aa, Artificial Sequence; identical to SEQ ID NO: 32912
  GFR-binding peptide

SEQ ID NO: 35069 - protein, 35 aa, Artificial Sequence; identical to SEQ ID NO: 32913
  GFR-binding peptide
  MOD_RES (1)..(2)..(34): Xaa is C or S

SEQ ID NO: 35070 - protein, 38 aa, Artificial Sequence; identical to SEQ ID NO: 32914
  GFR-binding peptide
  MOD_RES (3)..(4): Xaa is C or S
  MOD_RES (18)..(19)..(20)..(21)..(22): Xaa is A or G
  MOD_RES (23)..(24)..(25)..(26): Xaa is A or G or is absent

SEQ ID NO: 35071 - protein, 34 aa, Artificial Sequence; identical to SEQ ID NO: 32915
  GFR-binding peptide
  MOD_RES (32)..(34): Xaa is C or S

SEQ ID NO: 35072 - protein, 33 aa, Artificial Sequence; identical to SEQ ID NO: 32916
  GFR-binding peptide
  MOD_RES (32)..(32): Xaa is C or S

SEQ ID NO: 35073 - protein, 34 aa, Artificial Sequence; identical to SEQ ID NO: 32917
  GFR-binding peptide
  MOD_RES (3)..(4): Xaa is C or S

SEQ ID NO: 35074 - protein, 40 aa, Artificial Sequence; identical to SEQ ID NO: 32918
  GFR-binding peptide
  MOD_RES (5)..(6)..(40): Xaa is C or S
  MOD_RES (20)..(21)..(22)..(23)..(24): Xaa is A or G
  MOD_RES (25)..(26)..(27)..(28): Xaa is A or G or is absent

SEQ ID NO: 35075 - protein, 33 aa, Artificial Sequence; identical to SEQ ID NO: 32919
  GFR-binding peptide
  MOD_RES (14)..(15)..(16)..(17)..(18): Xaa is A or G
  MOD_RES (19)..(20)..(21)..(22): Xaa is A or G or is absent

SEQ ID NO: 35076 - protein, 37 aa, Artificial Sequence; identical to SEQ ID NO: 32920
  GFR-binding peptide
  MOD_RES (1)..(2)..(34)..(36): Xaa is C or S

SEQ ID NO: 35077 - protein, 41 aa, Artificial Sequence; identical to SEQ ID NO: 32921
  GFR-binding peptide
  MOD_RES (6)..(7)..(39)..(41): Xaa is C or S

SEQ ID NO: 35078 - protein, 41 aa, Artificial Sequence; identical to SEQ ID NO: 32922
  GFR-binding peptide
  MOD_RES (6)..(7)..(39)..(41): Xaa is C or S

SEQ ID NO: 35079 - protein, 35 aa, Artificial Sequence; identical to SEQ ID NO: 32923
  GFR-binding peptide
  MOD_RES (3)..(3): Xaa is C or S
  MOD_RES (17)..(18)..(19)..(20)..(21): Xaa is A or G
  MOD_RES (22)..(23)..(24)..(25): Xaa is A or G or is absent

SEQ ID NO: 35080 - protein, 38 aa, Artificial Sequence; identical to SEQ ID NO: 32924
  GFR-binding peptide
  MOD_RES (4)..(5)..(37): Xaa is C or S

SEQ ID NO: 35081 - protein, 37 aa, Artificial Sequence; identical to SEQ ID NO: 32925
  GFR-binding peptide
  MOD_RES (2)..(3)..(37): Xaa is C or S
  MOD_RES (17)..(18)..(19)..(20)..(21): Xaa is A or G
  MOD_RES (22)..(23)..(24)..(25): Xaa is A or G or is absent

SEQ ID NO: 35082 - protein, 40 aa, Artificial Sequence; identical to SEQ ID NO: 32926
  GFR-binding peptide
  MOD_RES (2)..(3)..(37)..(39): Xaa is C or S
  MOD_RES (17)..(18)..(19)..(20)..(21): Xaa is A or G
  MOD_RES (22)..(23)..(24)..(25): Xaa is A or G or is absent

SEQ ID NO: 35083 - protein, 40 aa, Artificial Sequence; identical to SEQ ID NO: 32927
  GFR-binding peptide
  MOD_RES (5)..(6)..(37)..(39): Xaa is C or S

SEQ ID NO: 35084 - protein, 41 aa, Artificial Sequence; identical to SEQ ID NO: 32928
  GFR-binding peptide
  MOD_RES (4)..(5)..(39)..(41): Xaa is C or S
  MOD_RES (19)..(20)..(21)..(22)..(23): Xaa is A or G
  MOD_RES (24)..(25)..(26)..(27): Xaa is A or G or is absent

SEQ ID NO: 35085 - protein, 35 aa, Artificial Sequence; identical to SEQ ID NO: 32929
  GFR-binding peptide
  MOD_RES (1)..(2)..(34): Xaa is C or S

SEQ ID NO: 35086 - protein, 31 aa, Artificial Sequence; identical to SEQ ID NO: 32930
  GFR-binding peptide

SEQ ID NO: 35087 - protein, 35 aa, Artificial Sequence; identical to SEQ ID NO: 32931
  GFR-binding peptide
  MOD_RES (4)..(5): Xaa is C or S

SEQ ID NO: 35088 - protein, 37 aa, Artificial Sequence; identical to SEQ ID NO: 32932
  GFR-binding peptide
  MOD_RES (1)..(2)..(34)..(36): Xaa is C or S

SEQ ID NO: 35089 - protein, 41 aa, Artificial Sequence; identical to SEQ ID NO: 32933
  GFR-binding peptide
  MOD_RES (5)..(6)..(40): Xaa is C or S
  MOD_RES (20)..(21)..(22)..(23)..(24): Xaa is A or G
  MOD_RES (25)..(26)..(27)..(28): Xaa is A or G or is absent

SEQ ID NO: 35090 - protein, 36 aa, Artificial Sequence; identical to SEQ ID NO: 32934
  GFR-binding peptide
  MOD_RES (1)..(2)..(34)..(36): Xaa is C or S

SEQ ID NO: 35091 - protein, 33 aa, Artificial Sequence; identical to SEQ ID NO: 32935
  GFR-binding peptide
  MOD_RES (2)..(3): Xaa is C or S

SEQ ID NO: 35092 - protein, 43 aa, Artificial Sequence; identical to SEQ ID NO: 32936
  GFR-binding peptide
  MOD_RES (6)..(7)..(40)..(42): Xaa is C or S
  MOD_RES (21)..(22)..(23)..(24)..(25): Xaa is A or G
  MOD_RES (26)..(27)..(28)..(29): Xaa is A or G or is absent

SEQ ID NO: 35093 - protein, 36 aa, Artificial Sequence; identical to SEQ ID NO: 32937
  GFR-binding peptide
  MOD_RES (1)..(34)..(36): Xaa is C or S

SEQ ID NO: 35094 - protein, 31 aa, Artificial Sequence; identical to SEQ ID NO: 32938
  GFR-binding peptide
  MOD_RES (1)..(1): Xaa is C or S

SEQ ID NO: 35095 - protein, 37 aa, Artificial Sequence; identical to SEQ ID NO: 32939
  GFR-binding peptide
  MOD_RES (4)..(5): Xaa is C or S
  MOD_RES (19)..(20)..(21)..(22)..(23): Xaa is A or G
  MOD_RES (24)..(25)..(26)..(27): Xaa is A or G or is absent

SEQ ID NO: 35096 - protein, 41 aa, Artificial Sequence; identical to SEQ ID NO: 32940
  GFR-binding peptide
  MOD_RES (3)..(4)..(38)..(40): Xaa is C or S
  MOD_RES (18)..(19)..(20)..(21)..(22): Xaa is A or G
  MOD_RES (23)..(24)..(25)..(26): Xaa is A or G or is absent

SEQ ID NO: 35097 - protein, 33 aa, Artificial Sequence; identical to SEQ ID NO: 32941
  GFR-binding peptide
  MOD_RES (2)..(3): Xaa is C or S

SEQ ID NO: 35098 - protein, 36 aa, Artificial Sequence; identical to SEQ ID NO: 32942
  GFR-binding peptide
  MOD_RES (1)..(33)..(35): Xaa is C or S

SEQ ID NO: 35099 - protein, 36 aa, Artificial Sequence; identical to SEQ ID NO: 32943
  GFR-binding peptide
  MOD_RES (1)..(34)..(36): Xaa is C or S
  MOD_RES (15)..(16)..(17)..(18)..(19): Xaa is A or G
  MOD_RES (20)..(21)..(22)..(23): Xaa is A or G or is absent

SEQ ID NO: 35100 - protein, 32 aa, Artificial Sequence; identical to SEQ ID NO: 32944
  GFR-binding peptide
  MOD_RES (14)..(15)..(16)..(17)..(18): Xaa is A or G
  MOD_RES (19)..(20)..(21)..(22): Xaa is A or G or is absent

SEQ ID NO: 35101 - protein, 38 aa, Artificial Sequence; identical to SEQ ID NO: 32945
  GFR-binding peptide
  MOD_RES (1)..(35)..(37): Xaa is C or S
  MOD_RES (15)..(16)..(17)..(18)..(19): Xaa is A or G
  MOD_RES (20)..(21)..(22)..(23): Xaa is A or G or is absent

SEQ ID NO: 35102 - protein, 44 aa, Artificial Sequence; identical to SEQ ID NO: 32946
  GFR-binding peptide
  MOD_RES (6)..(7)..(41)..(43): Xaa is C or S
  MOD_RES (21)..(22)..(23)..(24)..(25): Xaa is A or G
  MOD_RES (26)..(27)..(28)..(29): Xaa is A or G or is absent

SEQ ID NO: 35103 - protein, 41 aa, Artificial Sequence; identical to SEQ ID NO: 32947
  GFR-binding peptide
  MOD_RES (6)..(7)..(41): Xaa is C or S
  MOD_RES (21)..(22)..(23)..(24)..(25): Xaa is A or G
  MOD_RES (26)..(27)..(28)..(29): Xaa is A or G or is absent

SEQ ID NO: 35104 - protein, 34 aa, Artificial Sequence; identical to SEQ ID NO: 32948
  GFR-binding peptide
  MOD_RES (1)..(1): Xaa is C or S
  MOD_RES (15)..(16)..(17)..(18)..(19): Xaa is A or G
  MOD_RES (20)..(21)..(22)..(23): Xaa is A or G or is absent

SEQ ID NO: 35105 - protein, 36 aa, Artificial Sequence; identical to SEQ ID NO: 32949
  GFR-binding peptide
  MOD_RES (3)..(4)..(36): Xaa is C or S

SEQ ID NO: 35106 - protein, 37 aa, Artificial Sequence; identical to SEQ ID NO: 32950
  GFR-binding peptide
  MOD_RES (2)..(3)..(36): Xaa is C or S
  MOD_RES (17)..(18)..(19)..(20)..(21): Xaa is A or G
  MOD_RES (22)..(23)..(24)..(25): Xaa is A or G or is absent

SEQ ID NO: 35107 - protein, 35 aa, Artificial Sequence; identical to SEQ ID NO: 32951
  GFR-binding peptide
  MOD_RES (5)..(5): Xaa is C or S

SEQ ID NO: 35108 - protein, 35 aa, Artificial Sequence; identical to SEQ ID NO: 32952
  GFR-binding peptide
  MOD_RES (2)..(3): Xaa is C or S
  MOD_RES (17)..(18)..(19)..(20)..(21): Xaa is A or G
  MOD_RES (22)..(23)..(24)..(25): Xaa is A or G or is absent

SEQ ID NO: 35109 - protein, 39 aa, Artificial Sequence; identical to SEQ ID NO: 32953
  GFR-binding peptide
  MOD_RES (5)..(6): Xaa is C or S
  MOD_RES (20)..(21)..(22)..(23)..(24): Xaa is A or G
  MOD_RES (25)..(26)..(27)..(28): Xaa is A or G or is absent

SEQ ID NO: 35110 - protein, 35 aa, Artificial Sequence; identical to SEQ ID NO: 32954
  GFR-binding peptide
  MOD_RES (32)..(34): Xaa is C or S

SEQ ID NO: 35111 - protein, 38 aa, Artificial Sequence; identical to SEQ ID NO: 32955
  GFR-binding peptide
  MOD_RES (1)..(35)..(37): Xaa is C or S
  MOD_RES (15)..(16)..(17)..(18)..(19): Xaa is A or G
  MOD_RES (20)..(21)..(22)..(23): Xaa is A or G or is absent

SEQ ID NO: 35112 - protein, 36 aa, Artificial Sequence; identical to SEQ ID NO: 32956
  GFR-binding peptide
  MOD_RES (1)..(2)..(36): Xaa is C or S
  MOD_RES (16)..(17)..(18)..(19)..(20): Xaa is A or G
  MOD_RES (21)..(22)..(23)..(24): Xaa is A or G or is absent

SEQ ID NO: 35113 - protein, 35 aa, Artificial Sequence; identical to SEQ ID NO: 32957
  GFR-binding peptide
  MOD_RES (2)..(3)..(35): Xaa is C or S

SEQ ID NO: 35114 - protein, 35 aa, Artificial Sequence; identical to SEQ ID NO: 32958
  GFR-binding peptide
  MOD_RES (32)..(34): Xaa is C or S

SEQ ID NO: 35115 - protein, 39 aa, Artificial Sequence; identical to SEQ ID NO: 32959
  GFR-binding peptide
  MOD_RES (2)..(3)..(37)..(39): Xaa is C or S
  MOD_RES (17)..(18)..(19)..(20)..(21): Xaa is A or G
  MOD_RES (22)..(23)..(24)..(25): Xaa is A or G or is absent

SEQ ID NO: 35116 - protein, 39 aa, Artificial Sequence; identical to SEQ ID NO: 32960
  GFR-binding peptide
  MOD_RES (4)..(38): Xaa is C or S
  MOD_RES (18)..(19)..(20)..(21)..(22): Xaa is A or G
  MOD_RES (23)..(24)..(25)..(26): Xaa is A or G or is absent

SEQ ID NO: 35117 - protein, 40 aa, Artificial Sequence; identical to SEQ ID NO: 32961
  GFR-binding peptide
  MOD_RES (5)..(6)..(38)..(40): Xaa is C or S

SEQ ID NO: 35118 - protein, 33 aa, Artificial Sequence; identical to SEQ ID NO: 32962
  GFR-binding peptide
  MOD_RES (1)..(33): Xaa is C or S

SEQ ID NO: 35119 - protein, 40 aa, Artificial Sequence; identical to SEQ ID NO: 32963
  GFR-binding peptide
  MOD_RES (5)..(6)..(40): Xaa is C or S
  MOD_RES (20)..(21)..(22)..(23)..(24): Xaa is A or G
  MOD_RES (25)..(26)..(27)..(28): Xaa is A or G or is absent

SEQ ID NO: 35120 - protein, 38 aa, Artificial Sequence; identical to SEQ ID NO: 32964
  GFR-binding peptide
  MOD_RES (35)..(37): Xaa is C or S
  MOD_RES (14)..(15)..(16)..(17)..(18): Xaa is A or G
  MOD_RES (19)..(20)..(21)..(22): Xaa is A or G or is absent

SEQ ID NO: 35121 - protein, 37 aa, Artificial Sequence; identical to SEQ ID NO: 32965
  GFR-binding peptide
  MOD_RES (2)..(3)..(35)..(37): Xaa is C or S

SEQ ID NO: 35122 - protein, 38 aa, Artificial Sequence; identical to SEQ ID NO: 32966
  GFR-binding peptide
  MOD_RES (6)..(7): Xaa is C or S

SEQ ID NO: 35123 - protein, 36 aa, Artificial Sequence; identical to SEQ ID NO: 32967
  GFR-binding peptide
  MOD_RES (1)..(33)..(35): Xaa is C or S

SEQ ID NO: 35124 - protein, 39 aa, Artificial Sequence; identical to SEQ ID NO: 32968
  GFR-binding peptide
  MOD_RES (3)..(4)..(38): Xaa is C or S
  MOD_RES (18)..(19)..(20)..(21)..(22): Xaa is A or G
  MOD_RES (23)..(24)..(25)..(26): Xaa is A or G or is absent

SEQ ID NO: 35125 - protein, 38 aa, Artificial Sequence; identical to SEQ ID NO: 32969
  GFR-binding peptide
  MOD_RES (2)..(3)..(35)..(37): Xaa is C or S

SEQ ID NO: 35126 - protein, 42 aa, Artificial Sequence; identical to SEQ ID NO: 32970
  GFR-binding peptide
  MOD_RES (4)..(5)..(39)..(41): Xaa is C or S
  MOD_RES (19)..(20)..(21)..(22)..(23): Xaa is A or G
  MOD_RES (24)..(25)..(26)..(27): Xaa is A or G or is absent

SEQ ID NO: 35127 - protein, 40 aa, Artificial Sequence; identical to SEQ ID NO: 32971
  GFR-binding peptide
  MOD_RES (3)..(4)..(38)..(40): Xaa is C or S
  MOD_RES (18)..(19)..(20)..(21)..(22): Xaa is A or G
  MOD_RES (23)..(24)..(25)..(26): Xaa is A or G or is absent

SEQ ID NO: 35128 - protein, 36 aa, Artificial Sequence; identical to SEQ ID NO: 32972
  GFR-binding peptide
  MOD_RES (1)..(36): Xaa is C or S
  MOD_RES (15)..(16)..(17)..(18)..(19): Xaa is A or G
  MOD_RES (20)..(21)..(22)..(23): Xaa is A or G or is absent

SEQ ID NO: 35129 - protein, 33 aa, Artificial Sequence; identical to SEQ ID NO: 32973
  GFR-binding peptide
  MOD_RES (1)..(2): Xaa is C or S

SEQ ID NO: 35130 - protein, 42 aa, Artificial Sequence; identical to SEQ ID NO: 32974
  GFR-binding peptide
  MOD_RES (5)..(6)..(39)..(41): Xaa is C or S
  MOD_RES (20)..(21)..(22)..(23)..(24): Xaa is A or G
  MOD_RES (25)..(26)..(27)..(28): Xaa is A or G or is absent

SEQ ID NO: 35131 - protein, 38 aa, Artificial Sequence; identical to SEQ ID NO: 32975
  GFR-binding peptide
  MOD_RES (1)..(35)..(37): Xaa is C or S
  MOD_RES (15)..(16)..(17)..(18)..(19): Xaa is A or G
  MOD_RES (20)..(21)..(22)..(23): Xaa is A or G or is absent

SEQ ID NO: 35132 - protein, 37 aa, Artificial Sequence; identical to SEQ ID NO: 32976
  GFR-binding peptide
  MOD_RES (34)..(36): Xaa is C or S
  MOD_RES (14)..(15)..(16)..(17)..(18): Xaa is A or G
  MOD_RES (19)..(20)..(21)..(22): Xaa is A or G or is absent

SEQ ID NO: 35133 - protein, 37 aa, Artificial Sequence; identical to SEQ ID NO: 32977
  GFR-binding peptide
  MOD_RES (2)..(3)..(35)..(37): Xaa is C or S

SEQ ID NO: 35134 - protein, 35 aa, Artificial Sequence; identical to SEQ ID NO: 32978
  GFR-binding peptide
  MOD_RES (3)..(4): Xaa is C or S

SEQ ID NO: 35135 - protein, 34 aa, Artificial Sequence; identical to SEQ ID NO: 32979
  GFR-binding peptide
  MOD_RES (32)..(34): Xaa is C or S

SEQ ID NO: 35136 - protein, 37 aa, Artificial Sequence; identical to SEQ ID NO: 32980
  GFR-binding peptide
  MOD_RES (1)..(35)..(37): Xaa is C or S
  MOD_RES (15)..(16)..(17)..(18)..(19): Xaa is A or G
  MOD_RES (20)..(21)..(22)..(23): Xaa is A or G or is absent

SEQ ID NO: 35137 - protein, 37 aa, Artificial Sequence; identical to SEQ ID NO: 32981
  GFR-binding peptide
  MOD_RES (1)..(35)..(37): Xaa is C or S
  MOD_RES (15)..(16)..(17)..(18)..(19): Xaa is A or G
  MOD_RES (20)..(21)..(22)..(23): Xaa is A or G or is absent

SEQ ID NO: 35138 - protein, 35 aa, Artificial Sequence; identical to SEQ ID NO: 32982
  GFR-binding peptide
  MOD_RES (4)..(5): Xaa is C or S

SEQ ID NO: 35139 - protein, 34 aa, Artificial Sequence; identical to SEQ ID NO: 32983
  GFR-binding peptide
  MOD_RES (32)..(34): Xaa is C or S

SEQ ID NO: 35140 - protein, 32 aa, Artificial Sequence; identical to SEQ ID NO: 32984
  GFR-binding peptide
  MOD_RES (1)..(1): Xaa is C or S

SEQ ID NO: 35141 - protein, 31 aa, Artificial Sequence; identical to SEQ ID NO: 32985
  GFR-binding peptide
  MOD_RES (1)..(1): Xaa is C or S

SEQ ID NO: 35142 - protein, 35 aa, Artificial Sequence; identical to SEQ ID NO: 32986
  GFR-binding peptide
  MOD_RES (34)..(34): Xaa is C or S
  MOD_RES (14)..(15)..(16)..(17)..(18): Xaa is A or G
  MOD_RES (19)..(20)..(21)..(22): Xaa is A or G or is absent

SEQ ID NO: 35143 - protein, 37 aa, Artificial Sequence; identical to SEQ ID NO: 32987
  GFR-binding peptide
  MOD_RES (2)..(3)..(37): Xaa is C or S
  MOD_RES (17)..(18)..(19)..(20)..(21): Xaa is A or G
  MOD_RES (22)..(23)..(24)..(25): Xaa is A or G or is absent

SEQ ID NO: 35144 - protein, 40 aa, Artificial Sequence; identical to SEQ ID NO: 32988
  GFR-binding peptide
  MOD_RES (5)..(39): Xaa is C or S
  MOD_RES (19)..(20)..(21)..(22)..(23): Xaa is A or G
  MOD_RES (24)..(25)..(26)..(27): Xaa is A or G or is absent

SEQ ID NO: 35145 - protein, 37 aa, Artificial Sequence; identical to SEQ ID NO: 32989
  GFR-binding peptide
  MOD_RES (4)..(5): Xaa is C or S
  MOD_RES (19)..(20)..(21)..(22)..(23): Xaa is A or G
  MOD_RES (24)..(25)..(26)..(27): Xaa is A or G or is absent

SEQ ID NO: 35146 - protein, 36 aa, Artificial Sequence; identical to SEQ ID NO: 32990
  GFR-binding peptide
  MOD_RES (4)..(5): Xaa is C or S

SEQ ID NO: 35147 - protein, 37 aa, Artificial Sequence; identical to SEQ ID NO: 32991
  GFR-binding peptide
  MOD_RES (5)..(6): Xaa is C or S

SEQ ID NO: 35148 - protein, 36 aa, Artificial Sequence; identical to SEQ ID NO: 32992
  GFR-binding peptide
  MOD_RES (5)..(6): Xaa is C or S

SEQ ID NO: 35149 - protein, 34 aa, Artificial Sequence; identical to SEQ ID NO: 32993
  GFR-binding peptide
  MOD_RES (2)..(3): Xaa is C or S

SEQ ID NO: 35150 - protein, 32 aa, Artificial Sequence; identical to SEQ ID NO: 32994
  GFR-binding peptide
  MOD_RES (32)..(32): Xaa is C or S

SEQ ID NO: 35151 - protein, 36 aa, Artificial Sequence; identical to SEQ ID NO: 32995
  GFR-binding peptide
  MOD_RES (1)..(2)..(36): Xaa is C or S
  MOD_RES (16)..(17)..(18)..(19)..(20): Xaa is A or G
  MOD_RES (21)..(22)..(23)..(24): Xaa is A or G or is absent

SEQ ID NO: 35152 - protein, 40 aa, Artificial Sequence; identical to SEQ ID NO: 32996
  GFR-binding peptide
  MOD_RES (6)..(7)..(40): Xaa is C or S
  MOD_RES (21)..(22)..(23)..(24)..(25): Xaa is A or G
  MOD_RES (26)..(27)..(28)..(29): Xaa is A or G or is absent

SEQ ID NO: 35153 - protein, 40 aa, Artificial Sequence; identical to SEQ ID NO: 32997
  GFR-binding peptide
  MOD_RES (4)..(5)..(37)..(39): Xaa is C or S

SEQ ID NO: 35154 - protein, 39 aa, Artificial Sequence; identical to SEQ ID NO: 32998
  GFR-binding peptide
  MOD_RES (3)..(4)..(38): Xaa is C or S
  MOD_RES (18)..(19)..(20)..(21)..(22): Xaa is A or G
  MOD_RES (23)..(24)..(25)..(26): Xaa is A or G or is absent

SEQ ID NO: 35155 - protein, 38 aa, Artificial Sequence; identical to SEQ ID NO: 32999
  GFR-binding peptide
  MOD_RES (5)..(6)..(38): Xaa is C or S

SEQ ID NO: 35156 - protein, 38 aa, Artificial Sequence; identical to SEQ ID NO: 33000
  GFR-binding peptide
  MOD_RES (4)..(5): Xaa is C or S
  MOD_RES (19)..(20)..(21)..(22)..(23): Xaa is A or G
  MOD_RES (24)..(25)..(26)..(27): Xaa is A or G or is absent

SEQ ID NO: 35157 - protein, 41 aa, Artificial Sequence; identical to SEQ ID NO: 33001
  GFR-binding peptide
  MOD_RES (5)..(6)..(40): Xaa is C or S
  MOD_RES (20)..(21)..(22)..(23)..(24): Xaa is A or G
  MOD_RES (25)..(26)..(27)..(28): Xaa is A or G or is absent

SEQ ID NO: 35158 - protein, 36 aa, Artificial Sequence; identical to SEQ ID NO: 33002
  GFR-binding peptide
  MOD_RES (2)..(3)..(34)..(36): Xaa is C or S

SEQ ID NO: 35159 - protein, 36 aa, Artificial Sequence; identical to SEQ ID NO: 33003
  GFR-binding peptide
  MOD_RES (1)..(2)..(34)..(36): Xaa is C or S

SEQ ID NO: 35160 - protein, 33 aa, Artificial Sequence; identical to SEQ ID NO: 33004
  GFR-binding peptide
  MOD_RES (2)..(3): Xaa is C or S

SEQ ID NO: 35161 - protein, 39 aa, Artificial Sequence; identical to SEQ ID NO: 33005
  GFR-binding peptide
  MOD_RES (6)..(6): Xaa is C or S
  MOD_RES (20)..(21)..(22)..(23)..(24): Xaa is A or G
  MOD_RES (25)..(26)..(27)..(28): Xaa is A or G or is absent

SEQ ID NO: 35162 - protein, 34 aa, Artificial Sequence; identical to SEQ ID NO: 33006
  GFR-binding peptide
  MOD_RES (2)..(3): Xaa is C or S

SEQ ID NO: 35163 - protein, 38 aa, Artificial Sequence; identical to SEQ ID NO: 33007
  GFR-binding peptide
  MOD_RES (5)..(37): Xaa is C or S

SEQ ID NO: 35164 - protein, 35 aa, Artificial Sequence; identical to SEQ ID NO: 33008
  GFR-binding peptide
  MOD_RES (32)..(34): Xaa is C or S

SEQ ID NO: 35165 - protein, 41 aa, Artificial Sequence; identical to SEQ ID NO: 33009
  GFR-binding peptide
  MOD_RES (3)..(4)..(38)..(40): Xaa is C or S
  MOD_RES (18)..(19)..(20)..(21)..(22): Xaa is A or G
  MOD_RES (23)..(24)..(25)..(26): Xaa is A or G or is absent

SEQ ID NO: 35166 - protein, 30 aa, Artificial Sequence; identical to SEQ ID NO: 33010
  GFR-binding peptide

SEQ ID NO: 35167 - protein, 38 aa, Artificial Sequence; identical to SEQ ID NO: 33011
  GFR-binding peptide
  MOD_RES (6)..(38): Xaa is C or S

SEQ ID NO: 35168 - protein, 41 aa, Artificial Sequence; identical to SEQ ID NO: 33012
  GFR-binding peptide
  MOD_RES (6)..(7)..(39)..(41): Xaa is C or S

SEQ ID NO: 35169 - protein, 42 aa, Artificial Sequence; identical to SEQ ID NO: 33013
  GFR-binding peptide
  MOD_RES (6)..(40)..(42): Xaa is C or S
  MOD_RES (20)..(21)..(22)..(23)..(24): Xaa is A or G
  MOD_RES (25)..(26)..(27)..(28): Xaa is A or G or is absent

SEQ ID NO: 35170 - protein, 36 aa, Artificial Sequence; identical to SEQ ID NO: 33014
  GFR-binding peptide
  MOD_RES (5)..(5): Xaa is C or S

SEQ ID NO: 35171 - protein, 36 aa, Artificial Sequence; identical to SEQ ID NO: 33015
  GFR-binding peptide
  MOD_RES (1)..(35): Xaa is C or S
  MOD_RES (15)..(16)..(17)..(18)..(19): Xaa is A or G
  MOD_RES (20)..(21)..(22)..(23): Xaa is A or G or is absent

SEQ ID NO: 35172 - protein, 35 aa, Artificial Sequence; identical to SEQ ID NO: 33016
  GFR-binding peptide
  MOD_RES (1)..(35): Xaa is C or S
  MOD_RES (15)..(16)..(17)..(18)..(19): Xaa is A or G
  MOD_RES (20)..(21)..(22)..(23): Xaa is A or G or is absent

SEQ ID NO: 35173 - protein, 37 aa, Artificial Sequence; identical to SEQ ID NO: 33017
  GFR-binding peptide
  MOD_RES (3)..(4): Xaa is C or S
  MOD_RES (18)..(19)..(20)..(21)..(22): Xaa is A or G
  MOD_RES (23)..(24)..(25)..(26): Xaa is A or G or is absent

SEQ ID NO: 35174 - protein, 34 aa, Artificial Sequence; identical to SEQ ID NO: 33018
  GFR-binding peptide
  MOD_RES (1)..(2)..(34): Xaa is C or S

SEQ ID NO: 35175 - protein, 40 aa, Artificial Sequence; identical to SEQ ID NO: 33019
  GFR-binding peptide
  MOD_RES (6)..(7)..(40): Xaa is C or S

SEQ ID NO: 35176 - protein, 39 aa, Artificial Sequence; identical to SEQ ID NO: 33020
  GFR-binding peptide
  MOD_RES (4)..(5)..(37)..(39): Xaa is C or S

SEQ ID NO: 35177 - protein, 34 aa, Artificial Sequence; identical to SEQ ID NO: 33021
  GFR-binding peptide
  MOD_RES (1)..(2)..(33): Xaa is C or S

SEQ ID NO: 35178 - protein, 39 aa, Artificial Sequence; identical to SEQ ID NO: 33022
  GFR-binding peptide
  MOD_RES (4)..(5)..(38): Xaa is C or S

SEQ ID NO: 35179 - protein, 38 aa, Artificial Sequence; identical to SEQ ID NO: 33023
  GFR-binding peptide
  MOD_RES (3)..(4)..(38): Xaa is C or S
  MOD_RES (18)..(19)..(20)..(21)..(22): Xaa is A or G
  MOD_RES (23)..(24)..(25)..(26): Xaa is A or G or is absent

SEQ ID NO: 35180 - protein, 41 aa, Artificial Sequence; identical to SEQ ID NO: 33024
  GFR-binding peptide
  MOD_RES (3)..(4)..(38)..(40): Xaa is C or S
  MOD_RES (18)..(19)..(20)..(21)..(22): Xaa is A or G
  MOD_RES (23)..(24)..(25)..(26): Xaa is A or G or is absent

SEQ ID NO: 35181 - protein, 35 aa, Artificial Sequence; identical to SEQ ID NO: 33025
  GFR-binding peptide
  MOD_RES (3)..(4): Xaa is C or S

SEQ ID NO: 35182 - protein, 39 aa, Artificial Sequence; identical to SEQ ID NO: 33026
  GFR-binding peptide
  MOD_RES (5)..(6): Xaa is C or S
  MOD_RES (20)..(21)..(22)..(23)..(24): Xaa is A or G
  MOD_RES (25)..(26)..(27)..(28): Xaa is A or G or is absent

SEQ ID NO: 35183 - protein, 39 aa, Artificial Sequence; identical to SEQ ID NO: 33027
  GFR-binding peptide
  MOD_RES (3)..(4)..(38): Xaa is C or S
  MOD_RES (18)..(19)..(20)..(21)..(22): Xaa is A or G
  MOD_RES (23)..(24)..(25)..(26): Xaa is A or G or is absent

SEQ ID NO: 35184 - protein, 32 aa, Artificial Sequence; identical to SEQ ID NO: 33028
  GFR-binding peptide
  MOD_RES (32)..(32): Xaa is C or S

SEQ ID NO: 35185 - protein, 39 aa, Artificial Sequence; identical to SEQ ID NO: 33029
  GFR-binding peptide
  MOD_RES (6)..(7)..(39): Xaa is C or S

SEQ ID NO: 35186 - protein, 39 aa, Artificial Sequence; identical to SEQ ID NO: 33030
  GFR-binding peptide
  MOD_RES (5)..(6): Xaa is C or S
  MOD_RES (20)..(21)..(22)..(23)..(24): Xaa is A or G
  MOD_RES (25)..(26)..(27)..(28): Xaa is A or G or is absent

SEQ ID NO: 35187 - protein, 42 aa, Artificial Sequence; identical to SEQ ID NO: 33031
  GFR-binding peptide
  MOD_RES (4)..(5)..(39)..(41): Xaa is C or S
  MOD_RES (19)..(20)..(21)..(22)..(23): Xaa is A or G
  MOD_RES (24)..(25)..(26)..(27): Xaa is A or G or is absent

SEQ ID NO: 35188 - protein, 37 aa, Artificial Sequence; identical to SEQ ID NO: 33032
  GFR-binding peptide
  MOD_RES (4)..(5): Xaa is C or S
  MOD_RES (19)..(20)..(21)..(22)..(23): Xaa is A or G
  MOD_RES (24)..(25)..(26)..(27): Xaa is A or G or is absent

SEQ ID NO: 35189 - protein, 40 aa, Artificial Sequence; identical to SEQ ID NO: 33033
  GFR-binding peptide
  MOD_RES (3)..(4)..(38)..(40): Xaa is C or S
  MOD_RES (18)..(19)..(20)..(21)..(22): Xaa is A or G
  MOD_RES (23)..(24)..(25)..(26): Xaa is A or G or is absent

SEQ ID NO: 35190 - protein, 33 aa, Artificial Sequence; identical to SEQ ID NO: 33034
  GFR-binding peptide
  MOD_RES (1)..(33): Xaa is C or S

SEQ ID NO: 35191 - protein, 39 aa, Artificial Sequence; identical to SEQ ID NO: 33035
  GFR-binding peptide
  MOD_RES (6)..(7): Xaa is C or S
  MOD_RES (21)..(22)..(23)..(24)..(25): Xaa is A or G
  MOD_RES (26)..(27)..(28)..(29): Xaa is A or G or is absent

SEQ ID NO: 35192 - protein, 37 aa, Artificial Sequence; identical to SEQ ID NO: 33036
  GFR-binding peptide
  MOD_RES (3)..(4)..(36): Xaa is C or S

SEQ ID NO: 35193 - protein, 31 aa, Artificial Sequence; identical to SEQ ID NO: 33037
  GFR-binding peptide

SEQ ID NO: 35194 - protein, 34 aa, Artificial Sequence; identical to SEQ ID NO: 33038
  GFR-binding peptide
  MOD_RES (2)..(2): Xaa is C or S
  MOD_RES (16)..(17)..(18)..(19)..(20): Xaa is A or G
  MOD_RES (21)..(22)..(23)..(24): Xaa is A or G or is absent

SEQ ID NO: 35195 - protein, 34 aa, Artificial Sequence; identical to SEQ ID NO: 33039
  GFR-binding peptide
  MOD_RES (32)..(34): Xaa is C or S

SEQ ID NO: 35196 - protein, 38 aa, Artificial Sequence; identical to SEQ ID NO: 33040
  GFR-binding peptide
  MOD_RES (5)..(6)..(38): Xaa is C or S

SEQ ID NO: 35197 - protein, 37 aa, Artificial Sequence; identical to SEQ ID NO: 33041
  GFR-binding peptide
  MOD_RES (1)..(2)..(34)..(36): Xaa is C or S

SEQ ID NO: 35198 - protein, 37 aa, Artificial Sequence; identical to SEQ ID NO: 33042
  GFR-binding peptide
  MOD_RES (34)..(36): Xaa is C or S
  MOD_RES (14)..(15)..(16)..(17)..(18): Xaa is A or G
  MOD_RES (19)..(20)..(21)..(22): Xaa is A or G or is absent

SEQ ID NO: 35199 - protein, 36 aa, Artificial Sequence; identical to SEQ ID NO: 33043
  GFR-binding peptide
  MOD_RES (1)..(35): Xaa is C or S
  MOD_RES (15)..(16)..(17)..(18)..(19): Xaa is A or G
  MOD_RES (20)..(21)..(22)..(23): Xaa is A or G or is absent

SEQ ID NO: 35200 - protein, 38 aa, Artificial Sequence; identical to SEQ ID NO: 33044
  GFR-binding peptide
  MOD_RES (1)..(2)..(36)..(38): Xaa is C or S
  MOD_RES (16)..(17)..(18)..(19)..(20): Xaa is A or G
  MOD_RES (21)..(22)..(23)..(24): Xaa is A or G or is absent

SEQ ID NO: 35201 - protein, 33 aa, Artificial Sequence; identical to SEQ ID NO: 33045
  GFR-binding peptide
  MOD_RES (14)..(15)..(16)..(17)..(18): Xaa is A or G
  MOD_RES (19)..(20)..(21)..(22): Xaa is A or G or is absent

SEQ ID NO: 35202 - protein, 41 aa, Artificial Sequence; identical to SEQ ID NO: 33046
  GFR-binding peptide
  MOD_RES (6)..(7)..(39)..(41): Xaa is C or S

SEQ ID NO: 35203 - protein, 39 aa, Artificial Sequence; identical to SEQ ID NO: 33047
  GFR-binding peptide
  MOD_RES (6)..(7): Xaa is C or S
  MOD_RES (21)..(22)..(23)..(24)..(25): Xaa is A or G
  MOD_RES (26)..(27)..(28)..(29): Xaa is A or G or is absent

SEQ ID NO: 35204 - protein, 41 aa, Artificial Sequence; identical to SEQ ID NO: 33048
  GFR-binding peptide
  MOD_RES (5)..(6)..(40): Xaa is C or S
  MOD_RES (20)..(21)..(22)..(23)..(24): Xaa is A or G
  MOD_RES (25)..(26)..(27)..(28): Xaa is A or G or is absent

SEQ ID NO: 35205 - protein, 37 aa, Artificial Sequence; identical to SEQ ID NO: 33049
  GFR-binding peptide
  MOD_RES (4)..(5)..(36): Xaa is C or S

SEQ ID NO: 35206 - protein, 36 aa, Artificial Sequence; identical to SEQ ID NO: 33050
  GFR-binding peptide
  MOD_RES (1)..(2)..(34)..(36): Xaa is C or S

SEQ ID NO: 35207 - protein, 37 aa, Artificial Sequence; identical to SEQ ID NO: 33051
  GFR-binding peptide
  MOD_RES (5)..(6)..(37): Xaa is C or S

SEQ ID NO: 35208 - protein, 37 aa, Artificial Sequence; identical to SEQ ID NO: 33052
  GFR-binding peptide
  MOD_RES (3)..(4): Xaa is C or S
  MOD_RES (18)..(19)..(20)..(21)..(22): Xaa is A or G
  MOD_RES (23)..(24)..(25)..(26): Xaa is A or G or is absent

SEQ ID NO: 35209 - protein, 37 aa, Artificial Sequence; identical to SEQ ID NO: 33053
  GFR-binding peptide
  MOD_RES (2)..(3)..(35)..(37): Xaa is C or S

SEQ ID NO: 35210 - protein, 37 aa, Artificial Sequence; identical to SEQ ID NO: 33054
  GFR-binding peptide
  MOD_RES (1)..(2)..(36): Xaa is C or S
  MOD_RES (16)..(17)..(18)..(19)..(20): Xaa is A or G
  MOD_RES (21)..(22)..(23)..(24): Xaa is A or G or is absent

SEQ ID NO: 35211 - protein, 38 aa, Artificial Sequence; identical to SEQ ID NO: 33055
  GFR-binding peptide
  MOD_RES (3)..(4)..(37): Xaa is C or S
  MOD_RES (18)..(19)..(20)..(21)..(22): Xaa is A or G
  MOD_RES (23)..(24)..(25)..(26): Xaa is A or G or is absent

SEQ ID NO: 35212 - protein, 32 aa, Artificial Sequence; identical to SEQ ID NO: 33056
  GFR-binding peptide
  MOD_RES (32)..(32): Xaa is C or S

SEQ ID NO: 35213 - protein, 40 aa, Artificial Sequence; identical to SEQ ID NO: 33057
  GFR-binding peptide
  MOD_RES (6)..(7): Xaa is C or S
  MOD_RES (21)..(22)..(23)..(24)..(25): Xaa is A or G
  MOD_RES (26)..(27)..(28)..(29): Xaa is A or G or is absent

SEQ ID NO: 35214 - protein, 38 aa, Artificial Sequence; identical to SEQ ID NO: 33058
  GFR-binding peptide
  MOD_RES (6)..(7): Xaa is C or S

SEQ ID NO: 35215 - protein, 34 aa, Artificial Sequence; identical to SEQ ID NO: 33059
  GFR-binding peptide
  MOD_RES (1)..(2)..(34): Xaa is C or S

SEQ ID NO: 35216 - protein, 42 aa, Artificial Sequence; identical to SEQ ID NO: 33060
  GFR-binding peptide
  MOD_RES (6)..(7)..(39)..(41): Xaa is C or S

SEQ ID NO: 35217 - protein, 35 aa, Artificial Sequence; identical to SEQ ID NO: 33061
  GFR-binding peptide
  MOD_RES (32)..(34): Xaa is C or S

SEQ ID NO: 35218 - protein, 32 aa, Artificial Sequence; identical to SEQ ID NO: 33062
  GFR-binding peptide
  MOD_RES (1)..(32): Xaa is C or S

SEQ ID NO: 35219 - protein, 34 aa, Artificial Sequence; identical to SEQ ID NO: 33063
  GFR-binding peptide
  MOD_RES (3)..(3): Xaa is C or S

SEQ ID NO: 35220 - protein, 37 aa, Artificial Sequence; identical to SEQ ID NO: 33064
  GFR-binding peptide
  MOD_RES (3)..(4)..(36): Xaa is C or S

SEQ ID NO: 35221 - protein, 37 aa, Artificial Sequence; identical to SEQ ID NO: 33065
  GFR-binding peptide
  MOD_RES (6)..(7): Xaa is C or S

SEQ ID NO: 35222 - protein, 40 aa, Artificial Sequence; identical to SEQ ID NO: 33066
  GFR-binding peptide
  MOD_RES (3)..(4)..(38)..(40): Xaa is C or S
  MOD_RES (18)..(19)..(20)..(21)..(22): Xaa is A or G
  MOD_RES (23)..(24)..(25)..(26): Xaa is A or G or is absent

SEQ ID NO: 35223 - protein, 34 aa, Artificial Sequence; identical to SEQ ID NO: 33067
  GFR-binding peptide
  MOD_RES (1)..(1): Xaa is C or S
  MOD_RES (15)..(16)..(17)..(18)..(19): Xaa is A or G
  MOD_RES (20)..(21)..(22)..(23): Xaa is A or G or is absent

SEQ ID NO: 35224 - protein, 32 aa, Artificial Sequence; identical to SEQ ID NO: 33068
  GFR-binding peptide
  MOD_RES (1)..(2): Xaa is C or S

SEQ ID NO: 35225 - protein, 36 aa, Artificial Sequence; identical to SEQ ID NO: 33069
  GFR-binding peptide
  MOD_RES (4)..(5): Xaa is C or S

SEQ ID NO: 35226 - protein, 37 aa, Artificial Sequence; identical to SEQ ID NO: 33070
  GFR-binding peptide
  MOD_RES (2)..(3)..(37): Xaa is C or S
  MOD_RES (17)..(18)..(19)..(20)..(21): Xaa is A or G
  MOD_RES (22)..(23)..(24)..(25): Xaa is A or G or is absent

SEQ ID NO: 35227 - protein, 44 aa, Artificial Sequence; identical to SEQ ID NO: 33071
  GFR-binding peptide
  MOD_RES (7)..(41)..(43): Xaa is C or S
  MOD_RES (21)..(22)..(23)..(24)..(25): Xaa is A or G
  MOD_RES (26)..(27)..(28)..(29): Xaa is A or G or is absent

SEQ ID NO: 35228 - protein, 33 aa, Artificial Sequence; identical to SEQ ID NO: 33072
  GFR-binding peptide
  MOD_RES (2)..(2): Xaa is C or S

SEQ ID NO: 35229 - protein, 36 aa, Artificial Sequence; identical to SEQ ID NO: 33073
  GFR-binding peptide
  MOD_RES (1)..(2)..(36): Xaa is C or S
  MOD_RES (16)..(17)..(18)..(19)..(20): Xaa is A or G
  MOD_RES (21)..(22)..(23)..(24): Xaa is A or G or is absent

SEQ ID NO: 35230 - protein, 44 aa, Artificial Sequence; identical to SEQ ID NO: 33074
  GFR-binding peptide
  MOD_RES (6)..(7)..(41)..(43): Xaa is C or S
  MOD_RES (21)..(22)..(23)..(24)..(25): Xaa is A or G
  MOD_RES (26)..(27)..(28)..(29): Xaa is A or G or is absent

SEQ ID NO: 35231 - protein, 38 aa, Artificial Sequence; identical to SEQ ID NO: 33075
  GFR-binding peptide
  MOD_RES (1)..(2)..(36)..(38): Xaa is C or S
  MOD_RES (16)..(17)..(18)..(19)..(20): Xaa is A or G
  MOD_RES (21)..(22)..(23)..(24): Xaa is A or G or is absent

SEQ ID NO: 35232 - protein, 38 aa, Artificial Sequence; identical to SEQ ID NO: 33076
  GFR-binding peptide
  MOD_RES (6)..(7): Xaa is C or S

SEQ ID NO: 35233 - protein, 36 aa, Artificial Sequence; identical to SEQ ID NO: 33077
  GFR-binding peptide
  MOD_RES (2)..(3)..(35): Xaa is C or S

SEQ ID NO: 35234 - protein, 38 aa, Artificial Sequence; identical to SEQ ID NO: 33078
  GFR-binding peptide
  MOD_RES (2)..(3)..(37): Xaa is C or S
  MOD_RES (17)..(18)..(19)..(20)..(21): Xaa is A or G
  MOD_RES (22)..(23)..(24)..(25): Xaa is A or G or is absent

SEQ ID NO: 35235 - protein, 41 aa, Artificial Sequence; identical to SEQ ID NO: 33079
  GFR-binding peptide
  MOD_RES (6)..(7)..(41): Xaa is C or S
  MOD_RES (21)..(22)..(23)..(24)..(25): Xaa is A or G
  MOD_RES (26)..(27)..(28)..(29): Xaa is A or G or is absent

SEQ ID NO: 35236 - protein, 35 aa, Artificial Sequence; identical to SEQ ID NO: 33080
  GFR-binding peptide
  MOD_RES (1)..(35): Xaa is C or S
  MOD_RES (15)..(16)..(17)..(18)..(19): Xaa is A or G
  MOD_RES (20)..(21)..(22)..(23): Xaa is A or G or is absent

SEQ ID NO: 35237 - protein, 31 aa, Artificial Sequence; identical to SEQ ID NO: 33081
  GFR-binding peptide
  MOD_RES (1)..(1): Xaa is C or S

SEQ ID NO: 35238 - protein, 35 aa, Artificial Sequence; identical to SEQ ID NO: 33082
  GFR-binding peptide
  MOD_RES (4)..(5): Xaa is C or S

SEQ ID NO: 35239 - protein, 43 aa, Artificial Sequence; identical to SEQ ID NO: 33083
  GFR-binding peptide
  MOD_RES (6)..(7)..(41)..(43): Xaa is C or S
  MOD_RES (21)..(22)..(23)..(24)..(25): Xaa is A or G
  MOD_RES (26)..(27)..(28)..(29): Xaa is A or G or is absent

SEQ ID NO: 35240 - protein, 37 aa, Artificial Sequence; identical to SEQ ID NO: 33084
  GFR-binding peptide
  MOD_RES (3)..(4): Xaa is C or S
  MOD_RES (18)..(19)..(20)..(21)..(22): Xaa is A or G
  MOD_RES (23)..(24)..(25)..(26): Xaa is A or G or is absent

SEQ ID NO: 35241 - protein, 33 aa, Artificial Sequence; identical to SEQ ID NO: 33085
  GFR-binding peptide
  MOD_RES (2)..(3): Xaa is C or S

SEQ ID NO: 35242 - protein, 42 aa, Artificial Sequence; identical to SEQ ID NO: 33086
  GFR-binding peptide
  MOD_RES (5)..(6)..(40)..(42): Xaa is C or S
  MOD_RES (20)..(21)..(22)..(23)..(24): Xaa is A or G
  MOD_RES (25)..(26)..(27)..(28): Xaa is A or G or is absent

SEQ ID NO: 35243 - protein, 38 aa, Artificial Sequence; identical to SEQ ID NO: 33087
  GFR-binding peptide
  MOD_RES (1)..(2)..(37): Xaa is C or S
  MOD_RES (16)..(17)..(18)..(19)..(20): Xaa is A or G
  MOD_RES (21)..(22)..(23)..(24): Xaa is A or G or is absent

SEQ ID NO: 35244 - protein, 35 aa, Artificial Sequence; identical to SEQ ID NO: 33088
  GFR-binding peptide
  MOD_RES (2)..(3)..(35): Xaa is C or S

SEQ ID NO: 35245 - protein, 39 aa, Artificial Sequence; identical to SEQ ID NO: 33089
  GFR-binding peptide
  MOD_RES (4)..(5)..(39): Xaa is C or S
  MOD_RES (19)..(20)..(21)..(22)..(23): Xaa is A or G
  MOD_RES (24)..(25)..(26)..(27): Xaa is A or G or is absent

SEQ ID NO: 35246 - protein, 33 aa, Artificial Sequence; identical to SEQ ID NO: 33090
  GFR-binding peptide
  MOD_RES (1)..(2): Xaa is C or S

SEQ ID NO: 35247 - protein, 34 aa, Artificial Sequence; identical to SEQ ID NO: 33091
  GFR-binding peptide
  MOD_RES (1)..(2)..(34): Xaa is C or S

SEQ ID NO: 35248 - protein, 39 aa, Artificial Sequence; identical to SEQ ID NO: 33092
  GFR-binding peptide
  MOD_RES (3)..(4)..(36)..(38): Xaa is C or S

SEQ ID NO: 35249 - protein, 36 aa, Artificial Sequence; identical to SEQ ID NO: 33093
  GFR-binding peptide
  MOD_RES (2)..(3)..(35): Xaa is C or S

SEQ ID NO: 35250 - protein, 41 aa, Artificial Sequence; identical to SEQ ID NO: 33094
  GFR-binding peptide
  MOD_RES (5)..(6)..(40): Xaa is C or S
  MOD_RES (20)..(21)..(22)..(23)..(24): Xaa is A or G
  MOD_RES (25)..(26)..(27)..(28): Xaa is A or G or is absent

SEQ ID NO: 35251 - protein, 39 aa, Artificial Sequence; identical to SEQ ID NO: 33095
  GFR-binding peptide
  MOD_RES (6)..(7): Xaa is C or S
  MOD_RES (21)..(22)..(23)..(24)..(25): Xaa is A or G
  MOD_RES (26)..(27)..(28)..(29): Xaa is A or G or is absent

SEQ ID NO: 35252 - protein, 39 aa, Artificial Sequence; identical to SEQ ID NO: 33096
  GFR-binding peptide
  MOD_RES (5)..(6)..(38): Xaa is C or S

SEQ ID NO: 35253 - protein, 36 aa, Artificial Sequence; identical to SEQ ID NO: 33097
  GFR-binding peptide
  MOD_RES (1)..(2)..(36): Xaa is C or S
  MOD_RES (16)..(17)..(18)..(19)..(20): Xaa is A or G
  MOD_RES (21)..(22)..(23)..(24): Xaa is A or G or is absent

SEQ ID NO: 35254 - protein, 37 aa, Artificial Sequence; identical to SEQ ID NO: 33098
  GFR-binding peptide
  MOD_RES (3)..(4)..(36): Xaa is C or S

SEQ ID NO: 35255 - protein, 36 aa, Artificial Sequence; identical to SEQ ID NO: 33099
  GFR-binding peptide
  MOD_RES (1)..(35): Xaa is C or S
  MOD_RES (15)..(16)..(17)..(18)..(19): Xaa is A or G
  MOD_RES (20)..(21)..(22)..(23): Xaa is A or G or is absent

SEQ ID NO: 35256 - protein, 36 aa, Artificial Sequence; identical to SEQ ID NO: 33100
  GFR-binding peptide
  MOD_RES (1)..(2)..(34)..(36): Xaa is C or S

SEQ ID NO: 35257 - protein, 37 aa, Artificial Sequence; identical to SEQ ID NO: 33101
  GFR-binding peptide
  MOD_RES (3)..(4): Xaa is C or S
  MOD_RES (18)..(19)..(20)..(21)..(22): Xaa is A or G
  MOD_RES (23)..(24)..(25)..(26): Xaa is A or G or is absent

SEQ ID NO: 35258 - protein, 36 aa, Artificial Sequence; identical to SEQ ID NO: 33102
  GFR-binding peptide
  MOD_RES (1)..(33)..(35): Xaa is C or S

SEQ ID NO: 35259 - protein, 37 aa, Artificial Sequence; identical to SEQ ID NO: 33103
  GFR-binding peptide
  MOD_RES (5)..(6): Xaa is C or S

SEQ ID NO: 35260 - protein, 37 aa, Artificial Sequence; identical to SEQ ID NO: 33104
  GFR-binding peptide
  MOD_RES (3)..(4)..(36): Xaa is C or S

SEQ ID NO: 35261 - protein, 41 aa, Artificial Sequence; identical to SEQ ID NO: 33105
  GFR-binding peptide
  MOD_RES (7)..(41): Xaa is C or S
  MOD_RES (21)..(22)..(23)..(24)..(25): Xaa is A or G
  MOD_RES (26)..(27)..(28)..(29): Xaa is A or G or is absent

SEQ ID NO: 35262 - protein, 39 aa, Artificial Sequence; identical to SEQ ID NO: 33106
  GFR-binding peptide
  MOD_RES (3)..(4)..(36)..(38): Xaa is C or S

SEQ ID NO: 35263 - protein, 39 aa, Artificial Sequence; identical to SEQ ID NO: 33107
  GFR-binding peptide
  MOD_RES (6)..(7)..(39): Xaa is C or S

SEQ ID NO: 35264 - protein, 42 aa, Artificial Sequence; identical to SEQ ID NO: 33108
  GFR-binding peptide
  MOD_RES (6)..(7)..(40)..(42): Xaa is C or S

SEQ ID NO: 35265 - protein, 39 aa, Artificial Sequence; identical to SEQ ID NO: 33109
  GFR-binding peptide
  MOD_RES (4)..(5)..(37)..(39): Xaa is C or S

SEQ ID NO: 35266 - protein, 35 aa, Artificial Sequence; identical to SEQ ID NO: 33110
  GFR-binding peptide
  MOD_RES (1)..(2): Xaa is C or S
  MOD_RES (16)..(17)..(18)..(19)..(20): Xaa is A or G
  MOD_RES (21)..(22)..(23)..(24): Xaa is A or G or is absent

SEQ ID NO: 35267 - protein, 40 aa, Artificial Sequence; identical to SEQ ID NO: 33111
  GFR-binding peptide
  MOD_RES (6)..(7)..(39): Xaa is C or S

SEQ ID NO: 35268 - protein, 38 aa, Artificial Sequence; identical to SEQ ID NO: 33112
  GFR-binding peptide
  MOD_RES (3)..(4)..(38): Xaa is C or S
  MOD_RES (18)..(19)..(20)..(21)..(22): Xaa is A or G
  MOD_RES (23)..(24)..(25)..(26): Xaa is A or G or is absent

SEQ ID NO: 35269 - protein, 43 aa, Artificial Sequence; identical to SEQ ID NO: 33113
  GFR-binding peptide
  MOD_RES (5)..(6)..(40)..(42): Xaa is C or S
  MOD_RES (20)..(21)..(22)..(23)..(24): Xaa is A or G
  MOD_RES (25)..(26)..(27)..(28): Xaa is A or G or is absent

SEQ ID NO: 35270 - protein, 41 aa, Artificial Sequence; identical to SEQ ID NO: 33114
  GFR-binding peptide
  MOD_RES (6)..(7)..(41): Xaa is C or S
  MOD_RES (21)..(22)..(23)..(24)..(25): Xaa is A or G
  MOD_RES (26)..(27)..(28)..(29): Xaa is A or G or is absent

SEQ ID NO: 35271 - protein, 39 aa, Artificial Sequence; identical to SEQ ID NO: 33115
  GFR-binding peptide
  MOD_RES (5)..(6)..(38): Xaa is C or S

SEQ ID NO: 35272 - protein, 37 aa, Artificial Sequence; identical to SEQ ID NO: 33116
  GFR-binding peptide
  MOD_RES (1)..(2)..(36): Xaa is C or S
  MOD_RES (16)..(17)..(18)..(19)..(20): Xaa is A or G
  MOD_RES (21)..(22)..(23)..(24): Xaa is A or G or is absent

SEQ ID NO: 35273 - protein, 34 aa, Artificial Sequence; identical to SEQ ID NO: 33117
  GFR-binding peptide
  MOD_RES (1)..(34): Xaa is C or S
  MOD_RES (15)..(16)..(17)..(18)..(19): Xaa is A or G
  MOD_RES (20)..(21)..(22)..(23): Xaa is A or G or is absent

SEQ ID NO: 35274 - protein, 37 aa, Artificial Sequence; identical to SEQ ID NO: 33118
  GFR-binding peptide
  MOD_RES (4)..(5)..(37): Xaa is C or S

SEQ ID NO: 35275 - protein, 34 aa, Artificial Sequence; identical to SEQ ID NO: 33119
  GFR-binding peptide
  MOD_RES (1)..(2)..(34): Xaa is C or S

SEQ ID NO: 35276 - protein, 38 aa, Artificial Sequence; identical to SEQ ID NO: 33120
  GFR-binding peptide
  MOD_RES (3)..(4)..(37): Xaa is C or S

SEQ ID NO: 35277 - protein, 40 aa, Artificial Sequence; identical to SEQ ID NO: 33121
  GFR-binding peptide
  MOD_RES (5)..(6)..(40): Xaa is C or S
  MOD_RES (20)..(21)..(22)..(23)..(24): Xaa is A or G
  MOD_RES (25)..(26)..(27)..(28): Xaa is A or G or is absent

SEQ ID NO: 35278 - protein, 39 aa, Artificial Sequence; identical to SEQ ID NO: 33122
  GFR-binding peptide
  MOD_RES (7)..(7): Xaa is C or S
  MOD_RES (21)..(22)..(23)..(24)..(25): Xaa is A or G
  MOD_RES (26)..(27)..(28)..(29): Xaa is A or G or is absent

SEQ ID NO: 35279 - protein, 39 aa, Artificial Sequence; identical to SEQ ID NO: 33123
  GFR-binding peptide
  MOD_RES (4)..(5)..(39): Xaa is C or S
  MOD_RES (19)..(20)..(21)..(22)..(23): Xaa is A or G
  MOD_RES (24)..(25)..(26)..(27): Xaa is A or G or is absent

SEQ ID NO: 35280 - protein, 36 aa, Artificial Sequence; identical to SEQ ID NO: 33124
  GFR-binding peptide
  MOD_RES (1)..(2)..(36): Xaa is C or S
  MOD_RES (16)..(17)..(18)..(19)..(20): Xaa is A or G
  MOD_RES (21)..(22)..(23)..(24): Xaa is A or G or is absent

SEQ ID NO: 35281 - protein, 38 aa, Artificial Sequence; identical to SEQ ID NO: 33125
  GFR-binding peptide
  MOD_RES (3)..(4)..(36)..(38): Xaa is C or S

SEQ ID NO: 35282 - protein, 37 aa, Artificial Sequence; identical to SEQ ID NO: 33126
  GFR-binding peptide
  MOD_RES (1)..(2)..(36): Xaa is C or S
  MOD_RES (16)..(17)..(18)..(19)..(20): Xaa is A or G
  MOD_RES (21)..(22)..(23)..(24): Xaa is A or G or is absent

SEQ ID NO: 35283 - protein, 38 aa, Artificial Sequence; identical to SEQ ID NO: 33127
  GFR-binding peptide
  MOD_RES (5)..(5): Xaa is C or S
  MOD_RES (19)..(20)..(21)..(22)..(23): Xaa is A or G
  MOD_RES (24)..(25)..(26)..(27): Xaa is A or G or is absent

SEQ ID NO: 35284 - protein, 43 aa, Artificial Sequence; identical to SEQ ID NO: 33128
  GFR-binding peptide
  MOD_RES (5)..(6)..(40)..(42): Xaa is C or S
  MOD_RES (20)..(21)..(22)..(23)..(24): Xaa is A or G
  MOD_RES (25)..(26)..(27)..(28): Xaa is A or G or is absent

SEQ ID NO: 35285 - protein, 31 aa, Artificial Sequence; identical to SEQ ID NO: 33129
  GFR-binding peptide

SEQ ID NO: 35286 - protein, 38 aa, Artificial Sequence; identical to SEQ ID NO: 33130
  GFR-binding peptide
  MOD_RES (3)..(4)..(38): Xaa is C or S
  MOD_RES (18)..(19)..(20)..(21)..(22): Xaa is A or G
  MOD_RES (23)..(24)..(25)..(26): Xaa is A or G or is absent

SEQ ID NO: 35287 - protein, 33 aa, Artificial Sequence; identical to SEQ ID NO: 33131
  GFR-binding peptide
  MOD_RES (1)..(1): Xaa is C or S
  MOD_RES (15)..(16)..(17)..(18)..(19): Xaa is A or G
  MOD_RES (20)..(21)..(22)..(23): Xaa is A or G or is absent

SEQ ID NO: 35288 - protein, 37 aa, Artificial Sequence; identical to SEQ ID NO: 33132
  GFR-binding peptide
  MOD_RES (3)..(4): Xaa is C or S
  MOD_RES (18)..(19)..(20)..(21)..(22): Xaa is A or G
  MOD_RES (23)..(24)..(25)..(26): Xaa is A or G or is absent

SEQ ID NO: 35289 - protein, 37 aa, Artificial Sequence; identical to SEQ ID NO: 33133
  GFR-binding peptide
  MOD_RES (2)..(3)..(37): Xaa is C or S
  MOD_RES (17)..(18)..(19)..(20)..(21): Xaa is A or G
  MOD_RES (22)..(23)..(24)..(25): Xaa is A or G or is absent

SEQ ID NO: 35290 - protein, 33 aa, Artificial Sequence; identical to SEQ ID NO: 33134
  GFR-binding peptide
  MOD_RES (1)..(33): Xaa is C or S

SEQ ID NO: 35291 - protein, 35 aa, Artificial Sequence; identical to SEQ ID NO: 33135
  GFR-binding peptide
  MOD_RES (4)..(4): Xaa is C or S

SEQ ID NO: 35292 - protein, 40 aa, Artificial Sequence; identical to SEQ ID NO: 33136
  GFR-binding peptide
  MOD_RES (4)..(5)..(37)..(39): Xaa is C or S

SEQ ID NO: 35293 - protein, 42 aa, Artificial Sequence; identical to SEQ ID NO: 33137
  GFR-binding peptide
  MOD_RES (6)..(7)..(40)..(42): Xaa is C or S
  MOD_RES (21)..(22)..(23)..(24)..(25): Xaa is A or G
  MOD_RES (26)..(27)..(28)..(29): Xaa is A or G or is absent

SEQ ID NO: 35294 - protein, 41 aa, Artificial Sequence; identical to SEQ ID NO: 33138
  GFR-binding peptide
  MOD_RES (4)..(5)..(39)..(41): Xaa is C or S
  MOD_RES (19)..(20)..(21)..(22)..(23): Xaa is A or G
  MOD_RES (24)..(25)..(26)..(27): Xaa is A or G or is absent

SEQ ID NO: 35295 - protein, 40 aa, Artificial Sequence; identical to SEQ ID NO: 33139
  GFR-binding peptide
  MOD_RES (5)..(6): Xaa is C or S
  MOD_RES (20)..(21)..(22)..(23)..(24): Xaa is A or G
  MOD_RES (25)..(26)..(27)..(28): Xaa is A or G or is absent

SEQ ID NO: 35296 - protein, 37 aa, Artificial Sequence; identical to SEQ ID NO: 33140
  GFR-binding peptide
  MOD_RES (4)..(5): Xaa is C or S
  MOD_RES (19)..(20)..(21)..(22)..(23): Xaa is A or G
  MOD_RES (24)..(25)..(26)..(27): Xaa is A or G or is absent

SEQ ID NO: 35297 - protein, 35 aa, Artificial Sequence; identical to SEQ ID NO: 33141
  GFR-binding peptide
  MOD_RES (1)..(35): Xaa is C or S
  MOD_RES (15)..(16)..(17)..(18)..(19): Xaa is A or G
  MOD_RES (20)..(21)..(22)..(23): Xaa is A or G or is absent

SEQ ID NO: 35298 - protein, 36 aa, Artificial Sequence; identical to SEQ ID NO: 33142
  GFR-binding peptide
  MOD_RES (4)..(5): Xaa is C or S

SEQ ID NO: 35299 - protein, 41 aa, Artificial Sequence; identical to SEQ ID NO: 33143
  GFR-binding peptide
  MOD_RES (2)..(3)..(38)..(40): Xaa is C or S
  MOD_RES (17)..(18)..(19)..(20)..(21): Xaa is A or G
  MOD_RES (22)..(23)..(24)..(25): Xaa is A or G or is absent

SEQ ID NO: 35300 - protein, 44 aa, Artificial Sequence; identical to SEQ ID NO: 33144
  GFR-binding peptide
  MOD_RES (6)..(7)..(41)..(43): Xaa is C or S
  MOD_RES (21)..(22)..(23)..(24)..(25): Xaa is A or G
  MOD_RES (26)..(27)..(28)..(29): Xaa is A or G or is absent

SEQ ID NO: 35301 - protein, 41 aa, Artificial Sequence; identical to SEQ ID NO: 33145
  GFR-binding peptide
  MOD_RES (4)..(5)..(39)..(41): Xaa is C or S
  MOD_RES (19)..(20)..(21)..(22)..(23): Xaa is A or G
  MOD_RES (24)..(25)..(26)..(27): Xaa is A or G or is absent

SEQ ID NO: 35302 - protein, 39 aa, Artificial Sequence; identical to SEQ ID NO: 33146
  GFR-binding peptide
  MOD_RES (2)..(3)..(37)..(39): Xaa is C or S
  MOD_RES (17)..(18)..(19)..(20)..(21): Xaa is A or G
  MOD_RES (22)..(23)..(24)..(25): Xaa is A or G or is absent

SEQ ID NO: 35303 - protein, 42 aa, Artificial Sequence; identical to SEQ ID NO: 33147
  GFR-binding peptide
  MOD_RES (6)..(7)..(39)..(41): Xaa is C or S

SEQ ID NO: 35304 - protein, 42 aa, Artificial Sequence; identical to SEQ ID NO: 33148
  GFR-binding peptide
  MOD_RES (7)..(41): Xaa is C or S
  MOD_RES (21)..(22)..(23)..(24)..(25): Xaa is A or G
  MOD_RES (26)..(27)..(28)..(29): Xaa is A or G or is absent

SEQ ID NO: 35305 - protein, 35 aa, Artificial Sequence; identical to SEQ ID NO: 33149
  GFR-binding peptide
  MOD_RES (1)..(33)..(35): Xaa is C or S

SEQ ID NO: 35306 - protein, 36 aa, Artificial Sequence; identical to SEQ ID NO: 33150
  GFR-binding peptide
  MOD_RES (1)..(2)..(35): Xaa is C or S

SEQ ID NO: 35307 - protein, 36 aa, Artificial Sequence; identical to SEQ ID NO: 33151
  GFR-binding peptide
  MOD_RES (2)..(3)..(36): Xaa is C or S
  MOD_RES (17)..(18)..(19)..(20)..(21): Xaa is A or G
  MOD_RES (22)..(23)..(24)..(25): Xaa is A or G or is absent

SEQ ID NO: 35308 - protein, 36 aa, Artificial Sequence; identical to SEQ ID NO: 33152
  GFR-binding peptide
  MOD_RES (1)..(35): Xaa is C or S
  MOD_RES (15)..(16)..(17)..(18)..(19): Xaa is A or G
  MOD_RES (20)..(21)..(22)..(23): Xaa is A or G or is absent

SEQ ID NO: 35309 - protein, 40 aa, Artificial Sequence; identical to SEQ ID NO: 33153
  GFR-binding peptide
  MOD_RES (2)..(3)..(37)..(39): Xaa is C or S
  MOD_RES (17)..(18)..(19)..(20)..(21): Xaa is A or G
  MOD_RES (22)..(23)..(24)..(25): Xaa is A or G or is absent

SEQ ID NO: 35310 - protein, 35 aa, Artificial Sequence; identical to SEQ ID NO: 33154
  GFR-binding peptide
  MOD_RES (2)..(3): Xaa is C or S
  MOD_RES (17)..(18)..(19)..(20)..(21): Xaa is A or G
  MOD_RES (22)..(23)..(24)..(25): Xaa is A or G or is absent

SEQ ID NO: 35311 - protein, 40 aa, Artificial Sequence; identical to SEQ ID NO: 33155
  GFR-binding peptide
  MOD_RES (4)..(5)..(39): Xaa is C or S
  MOD_RES (19)..(20)..(21)..(22)..(23): Xaa is A or G
  MOD_RES (24)..(25)..(26)..(27): Xaa is A or G or is absent

SEQ ID NO: 35312 - protein, 39 aa, Artificial Sequence; identical to SEQ ID NO: 33156
  GFR-binding peptide
  MOD_RES (3)..(4)..(38): Xaa is C or S
  MOD_RES (18)..(19)..(20)..(21)..(22): Xaa is A or G
  MOD_RES (23)..(24)..(25)..(26): Xaa is A or G or is absent

SEQ ID NO: 35313 - protein, 37 aa, Artificial Sequence; identical to SEQ ID NO: 33157
  GFR-binding peptide
  MOD_RES (4)..(5)..(37): Xaa is C or S

SEQ ID NO: 35314 - protein, 37 aa, Artificial Sequence; identical to SEQ ID NO: 33158
  GFR-binding peptide
  MOD_RES (4)..(5)..(37): Xaa is C or S

SEQ ID NO: 35315 - protein, 34 aa, Artificial Sequence; identical to SEQ ID NO: 33159
  GFR-binding peptide
  MOD_RES (34)..(34): Xaa is C or S
  MOD_RES (14)..(15)..(16)..(17)..(18): Xaa is A or G
  MOD_RES (19)..(20)..(21)..(22): Xaa is A or G or is absent

SEQ ID NO: 35316 - protein, 40 aa, Artificial Sequence; identical to SEQ ID NO: 33160
  GFR-binding peptide
  MOD_RES (6)..(7): Xaa is C or S
  MOD_RES (21)..(22)..(23)..(24)..(25): Xaa is A or G
  MOD_RES (26)..(27)..(28)..(29): Xaa is A or G or is absent

SEQ ID NO: 35317 - protein, 32 aa, Artificial Sequence; identical to SEQ ID NO: 33161
  GFR-binding peptide
  MOD_RES (32)..(32): Xaa is C or S

SEQ ID NO: 35318 - protein, 33 aa, Artificial Sequence; identical to SEQ ID NO: 33162
  GFR-binding peptide
  MOD_RES (32)..(32): Xaa is C or S

SEQ ID NO: 35319 - protein, 40 aa, Artificial Sequence; identical to SEQ ID NO: 33163
  GFR-binding peptide
  MOD_RES (6)..(40): Xaa is C or S
  MOD_RES (20)..(21)..(22)..(23)..(24): Xaa is A or G
  MOD_RES (25)..(26)..(27)..(28): Xaa is A or G or is absent

SEQ ID NO: 35320 - protein, 37 aa, Artificial Sequence; identical to SEQ ID NO: 33164
  GFR-binding peptide
  MOD_RES (34)..(36): Xaa is C or S
  MOD_RES (14)..(15)..(16)..(17)..(18): Xaa is A or G
  MOD_RES (19)..(20)..(21)..(22): Xaa is A or G or is absent

SEQ ID NO: 35321 - protein, 42 aa, Artificial Sequence; identical to SEQ ID NO: 33165
  GFR-binding peptide
  MOD_RES (6)..(7)..(41): Xaa is C or S
  MOD_RES (21)..(22)..(23)..(24)..(25): Xaa is A or G
  MOD_RES (26)..(27)..(28)..(29): Xaa is A or G or is absent

SEQ ID NO: 35322 - protein, 31 aa, Artificial Sequence; identical to SEQ ID NO: 33166
  GFR-binding peptide
  MOD_RES (1)..(1): Xaa is C or S

SEQ ID NO: 35323 - protein, 39 aa, Artificial Sequence; identical to SEQ ID NO: 33167
  GFR-binding peptide
  MOD_RES (1)..(2)..(36)..(38): Xaa is C or S
  MOD_RES (16)..(17)..(18)..(19)..(20): Xaa is A or G
  MOD_RES (21)..(22)..(23)..(24): Xaa is A or G or is absent

SEQ ID NO: 35324 - protein, 44 aa, Artificial Sequence; identical to SEQ ID NO: 33168
  GFR-binding peptide
  MOD_RES (6)..(7)..(41)..(43): Xaa is C or S
  MOD_RES (21)..(22)..(23)..(24)..(25): Xaa is A or G
  MOD_RES (26)..(27)..(28)..(29): Xaa is A or G or is absent

SEQ ID NO: 35325 - protein, 36 aa, Artificial Sequence; identical to SEQ ID NO: 33169
  GFR-binding peptide
  MOD_RES (2)..(36): Xaa is C or S
  MOD_RES (16)..(17)..(18)..(19)..(20): Xaa is A or G
  MOD_RES (21)..(22)..(23)..(24): Xaa is A or G or is absent

SEQ ID NO: 35326 - protein, 37 aa, Artificial Sequence; identical to SEQ ID NO: 33170
  GFR-binding peptide
  MOD_RES (34)..(36): Xaa is C or S
  MOD_RES (14)..(15)..(16)..(17)..(18): Xaa is A or G
  MOD_RES (19)..(20)..(21)..(22): Xaa is A or G or is absent

SEQ ID NO: 35327 - protein, 39 aa, Artificial Sequence; identical to SEQ ID NO: 33171
  GFR-binding peptide
  MOD_RES (5)..(6)..(38): Xaa is C or S

SEQ ID NO: 35328 - protein, 37 aa, Artificial Sequence; identical to SEQ ID NO: 33172
  GFR-binding peptide
  MOD_RES (1)..(35)..(37): Xaa is C or S
  MOD_RES (15)..(16)..(17)..(18)..(19): Xaa is A or G
  MOD_RES (20)..(21)..(22)..(23): Xaa is A or G or is absent

SEQ ID NO: 35329 - protein, 44 aa, Artificial Sequence; identical to SEQ ID NO: 33173
  GFR-binding peptide
  MOD_RES (6)..(7)..(41)..(43): Xaa is C or S
  MOD_RES (21)..(22)..(23)..(24)..(25): Xaa is A or G
  MOD_RES (26)..(27)..(28)..(29): Xaa is A or G or is absent

SEQ ID NO: 35330 - protein, 33 aa, Artificial Sequence; identical to SEQ ID NO: 33174
  GFR-binding peptide
  MOD_RES (32)..(32): Xaa is C or S

SEQ ID NO: 35331 - protein, 37 aa, Artificial Sequence; identical to SEQ ID NO: 33175
  GFR-binding peptide
  MOD_RES (35)..(37): Xaa is C or S
  MOD_RES (14)..(15)..(16)..(17)..(18): Xaa is A or G
  MOD_RES (19)..(20)..(21)..(22): Xaa is A or G or is absent

SEQ ID NO: 35332 - protein, 37 aa, Artificial Sequence; identical to SEQ ID NO: 33176
  GFR-binding peptide
  MOD_RES (4)..(5): Xaa is C or S
  MOD_RES (19)..(20)..(21)..(22)..(23): Xaa is A or G
  MOD_RES (24)..(25)..(26)..(27): Xaa is A or G or is absent

SEQ ID NO: 35333 - protein, 40 aa, Artificial Sequence; identical to SEQ ID NO: 33177
  GFR-binding peptide
  MOD_RES (6)..(7): Xaa is C or S
  MOD_RES (21)..(22)..(23)..(24)..(25): Xaa is A or G
  MOD_RES (26)..(27)..(28)..(29): Xaa is A or G or is absent

SEQ ID NO: 35334 - protein, 38 aa, Artificial Sequence; identical to SEQ ID NO: 33178
  GFR-binding peptide
  MOD_RES (2)..(36)..(38): Xaa is C or S
  MOD_RES (16)..(17)..(18)..(19)..(20): Xaa is A or G
  MOD_RES (21)..(22)..(23)..(24): Xaa is A or G or is absent

SEQ ID NO: 35335 - protein, 35 aa, Artificial Sequence; identical to SEQ ID NO: 33179
  GFR-binding peptide
  MOD_RES (3)..(4): Xaa is C or S

SEQ ID NO: 35336 - protein, 38 aa, Artificial Sequence; identical to SEQ ID NO: 33180
  GFR-binding peptide
  MOD_RES (4)..(36)..(38): Xaa is C or S

SEQ ID NO: 35337 - protein, 33 aa, Artificial Sequence; identical to SEQ ID NO: 33181
  GFR-binding peptide
  MOD_RES (1)..(2): Xaa is C or S

SEQ ID NO: 35338 - protein, 38 aa, Artificial Sequence; identical to SEQ ID NO: 33182
  GFR-binding peptide
  MOD_RES (6)..(7): Xaa is C or S

SEQ ID NO: 35339 - protein, 40 aa, Artificial Sequence; identical to SEQ ID NO: 33183
  GFR-binding peptide
  MOD_RES (5)..(6)..(40): Xaa is C or S
  MOD_RES (20)..(21)..(22)..(23)..(24): Xaa is A or G
  MOD_RES (25)..(26)..(27)..(28): Xaa is A or G or is absent

SEQ ID NO: 35340 - protein, 39 aa, Artificial Sequence; identical to SEQ ID NO: 33184
  GFR-binding peptide
  MOD_RES (4)..(5)..(37)..(39): Xaa is C or S

SEQ ID NO: 35341 - protein, 31 aa, Artificial Sequence; identical to SEQ ID NO: 33185
  GFR-binding peptide
  MOD_RES (1)..(1): Xaa is C or S

SEQ ID NO: 35342 - protein, 39 aa, Artificial Sequence; identical to SEQ ID NO: 33186
  GFR-binding peptide
  MOD_RES (2)..(3)..(36)..(38): Xaa is C or S
  MOD_RES (17)..(18)..(19)..(20)..(21): Xaa is A or G
  MOD_RES (22)..(23)..(24)..(25): Xaa is A or G or is absent

SEQ ID NO: 35343 - protein, 38 aa, Artificial Sequence; identical to SEQ ID NO: 33187
  GFR-binding peptide
  MOD_RES (4)..(5): Xaa is C or S
  MOD_RES (19)..(20)..(21)..(22)..(23): Xaa is A or G
  MOD_RES (24)..(25)..(26)..(27): Xaa is A or G or is absent

SEQ ID NO: 35344 - protein, 38 aa, Artificial Sequence; identical to SEQ ID NO: 33188
  GFR-binding peptide
  MOD_RES (5)..(6)..(38): Xaa is C or S

SEQ ID NO: 35345 - protein, 34 aa, Artificial Sequence; identical to SEQ ID NO: 33189
  GFR-binding peptide
  MOD_RES (34)..(34): Xaa is C or S
  MOD_RES (14)..(15)..(16)..(17)..(18): Xaa is A or G
  MOD_RES (19)..(20)..(21)..(22): Xaa is A or G or is absent

SEQ ID NO: 35346 - protein, 38 aa, Artificial Sequence; identical to SEQ ID NO: 33190
  GFR-binding peptide
  MOD_RES (5)..(6): Xaa is C or S
  MOD_RES (20)..(21)..(22)..(23)..(24): Xaa is A or G
  MOD_RES (25)..(26)..(27)..(28): Xaa is A or G or is absent

SEQ ID NO: 35347 - protein, 38 aa, Artificial Sequence; identical to SEQ ID NO: 33191
  GFR-binding peptide
  MOD_RES (1)..(2)..(35)..(37): Xaa is C or S

SEQ ID NO: 35348 - protein, 37 aa, Artificial Sequence; identical to SEQ ID NO: 33192
  GFR-binding peptide
  MOD_RES (3)..(4)..(36): Xaa is C or S

SEQ ID NO: 35349 - protein, 40 aa, Artificial Sequence; identical to SEQ ID NO: 33193
  GFR-binding peptide
  MOD_RES (4)..(5)..(39): Xaa is C or S
  MOD_RES (19)..(20)..(21)..(22)..(23): Xaa is A or G
  MOD_RES (24)..(25)..(26)..(27): Xaa is A or G or is absent

SEQ ID NO: 35350 - protein, 30 aa, Artificial Sequence; identical to SEQ ID NO: 33194
  GFR-binding peptide

SEQ ID NO: 35351 - protein, 41 aa, Artificial Sequence; identical to SEQ ID NO: 33195
  GFR-binding peptide
  MOD_RES (5)..(6)..(39)..(41): Xaa is C or S
  MOD_RES (20)..(21)..(22)..(23)..(24): Xaa is A or G
  MOD_RES (25)..(26)..(27)..(28): Xaa is A or G or is absent

SEQ ID NO: 35352 - protein, 31 aa, Artificial Sequence; identical to SEQ ID NO: 33196
  GFR-binding peptide
  MOD_RES (1)..(1): Xaa is C or S

SEQ ID NO: 35353 - protein, 35 aa, Artificial Sequence; identical to SEQ ID NO: 33197
  GFR-binding peptide
  MOD_RES (2)..(3): Xaa is C or S
  MOD_RES (17)..(18)..(19)..(20)..(21): Xaa is A or G
  MOD_RES (22)..(23)..(24)..(25): Xaa is A or G or is absent

SEQ ID NO: 35354 - protein, 38 aa, Artificial Sequence; identical to SEQ ID NO: 33198
  GFR-binding peptide
  MOD_RES (1)..(2)..(36)..(38): Xaa is C or S
  MOD_RES (16)..(17)..(18)..(19)..(20): Xaa is A or G
  MOD_RES (21)..(22)..(23)..(24): Xaa is A or G or is absent

SEQ ID NO: 35355 - protein, 39 aa, Artificial Sequence; identical to SEQ ID NO: 33199
  GFR-binding peptide
  MOD_RES (6)..(7)..(38): Xaa is C or S

SEQ ID NO: 35356 - protein, 35 aa, Artificial Sequence; identical to SEQ ID NO: 33200
  GFR-binding peptide
  MOD_RES (1)..(33)..(35): Xaa is C or S

SEQ ID NO: 35357 - protein, 37 aa, Artificial Sequence; identical to SEQ ID NO: 33201
  GFR-binding peptide
  MOD_RES (2)..(3)..(37): Xaa is C or S
  MOD_RES (17)..(18)..(19)..(20)..(21): Xaa is A or G
  MOD_RES (22)..(23)..(24)..(25): Xaa is A or G or is absent

SEQ ID NO: 35358 - protein, 33 aa, Artificial Sequence; identical to SEQ ID NO: 33202
  GFR-binding peptide
  MOD_RES (1)..(1): Xaa is C or S
  MOD_RES (15)..(16)..(17)..(18)..(19): Xaa is A or G
  MOD_RES (20)..(21)..(22)..(23): Xaa is A or G or is absent

SEQ ID NO: 35359 - protein, 34 aa, Artificial Sequence; identical to SEQ ID NO: 33203
  GFR-binding peptide
  MOD_RES (3)..(4): Xaa is C or S

SEQ ID NO: 35360 - protein, 34 aa, Artificial Sequence; identical to SEQ ID NO: 33204
  GFR-binding peptide
  MOD_RES (4)..(4): Xaa is C or S

SEQ ID NO: 35361 - protein, 40 aa, Artificial Sequence; identical to SEQ ID NO: 33205
  GFR-binding peptide
  MOD_RES (6)..(7): Xaa is C or S
  MOD_RES (21)..(22)..(23)..(24)..(25): Xaa is A or G
  MOD_RES (26)..(27)..(28)..(29): Xaa is A or G or is absent

SEQ ID NO: 35362 - protein, 38 aa, Artificial Sequence; identical to SEQ ID NO: 33206
  GFR-binding peptide
  MOD_RES (1)..(35)..(37): Xaa is C or S
  MOD_RES (15)..(16)..(17)..(18)..(19): Xaa is A or G
  MOD_RES (20)..(21)..(22)..(23): Xaa is A or G or is absent

SEQ ID NO: 35363 - protein, 35 aa, Artificial Sequence; identical to SEQ ID NO: 33207
  GFR-binding peptide
  MOD_RES (2)..(2): Xaa is C or S
  MOD_RES (16)..(17)..(18)..(19)..(20): Xaa is A or G
  MOD_RES (21)..(22)..(23)..(24): Xaa is A or G or is absent

SEQ ID NO: 35364 - protein, 36 aa, Artificial Sequence; identical to SEQ ID NO: 33208
  GFR-binding peptide
  MOD_RES (3)..(4)..(36): Xaa is C or S

SEQ ID NO: 35365 - protein, 35 aa, Artificial Sequence; identical to SEQ ID NO: 33209
  GFR-binding peptide
  MOD_RES (2)..(3): Xaa is C or S
  MOD_RES (17)..(18)..(19)..(20)..(21): Xaa is A or G
  MOD_RES (22)..(23)..(24)..(25): Xaa is A or G or is absent

SEQ ID NO: 35366 - protein, 32 aa, Artificial Sequence; identical to SEQ ID NO: 33210
  GFR-binding peptide
  MOD_RES (14)..(15)..(16)..(17)..(18): Xaa is A or G
  MOD_RES (19)..(20)..(21)..(22): Xaa is A or G or is absent

SEQ ID NO: 35367 - protein, 36 aa, Artificial Sequence; identical to SEQ ID NO: 33211
  GFR-binding peptide
  MOD_RES (4)..(5): Xaa is C or S

SEQ ID NO: 35368 - protein, 36 aa, Artificial Sequence; identical to SEQ ID NO: 33212
  GFR-binding peptide
  MOD_RES (3)..(4)..(36): Xaa is C or S

SEQ ID NO: 35369 - protein, 36 aa, Artificial Sequence; identical to SEQ ID NO: 33213
  GFR-binding peptide
  MOD_RES (2)..(3): Xaa is C or S
  MOD_RES (17)..(18)..(19)..(20)..(21): Xaa is A or G
  MOD_RES (22)..(23)..(24)..(25): Xaa is A or G or is absent

SEQ ID NO: 35370 - protein, 40 aa, Artificial Sequence; identical to SEQ ID NO: 33214
  GFR-binding peptide
  MOD_RES (6)..(7): Xaa is C or S
  MOD_RES (21)..(22)..(23)..(24)..(25): Xaa is A or G
  MOD_RES (26)..(27)..(28)..(29): Xaa is A or G or is absent

SEQ ID NO: 35371 - protein, 37 aa, Artificial Sequence; identical to SEQ ID NO: 33215
  GFR-binding peptide
  MOD_RES (7)..(7): Xaa is C or S

SEQ ID NO: 35372 - protein, 38 aa, Artificial Sequence; identical to SEQ ID NO: 33216
  GFR-binding peptide
  MOD_RES (5)..(6)..(38): Xaa is C or S

SEQ ID NO: 35373 - protein, 41 aa, Artificial Sequence; identical to SEQ ID NO: 33217
  GFR-binding peptide
  MOD_RES (6)..(7)..(41): Xaa is C or S
  MOD_RES (21)..(22)..(23)..(24)..(25): Xaa is A or G
  MOD_RES (26)..(27)..(28)..(29): Xaa is A or G or is absent

SEQ ID NO: 35374 - protein, 42 aa, Artificial Sequence; identical to SEQ ID NO: 33218
  GFR-binding peptide
  MOD_RES (5)..(6)..(40)..(42): Xaa is C or S
  MOD_RES (20)..(21)..(22)..(23)..(24): Xaa is A or G
  MOD_RES (25)..(26)..(27)..(28): Xaa is A or G or is absent

SEQ ID NO: 35375 - protein, 34 aa, Artificial Sequence; identical to SEQ ID NO: 33219
  GFR-binding peptide
  MOD_RES (1)..(2): Xaa is C or S
  MOD_RES (16)..(17)..(18)..(19)..(20): Xaa is A or G
  MOD_RES (21)..(22)..(23)..(24): Xaa is A or G or is absent

SEQ ID NO: 35376 - protein, 39 aa, Artificial Sequence; identical to SEQ ID NO: 33220
  GFR-binding peptide
  MOD_RES (6)..(7): Xaa is C or S
  MOD_RES (21)..(22)..(23)..(24)..(25): Xaa is A or G
  MOD_RES (26)..(27)..(28)..(29): Xaa is A or G or is absent

SEQ ID NO: 35377 - protein, 38 aa, Artificial Sequence; identical to SEQ ID NO: 33221
  GFR-binding peptide
  MOD_RES (2)..(3)..(35)..(37): Xaa is C or S

SEQ ID NO: 35378 - protein, 41 aa, Artificial Sequence; identical to SEQ ID NO: 33222
  GFR-binding peptide
  MOD_RES (4)..(5)..(40): Xaa is C or S
  MOD_RES (19)..(20)..(21)..(22)..(23): Xaa is A or G
  MOD_RES (24)..(25)..(26)..(27): Xaa is A or G or is absent

SEQ ID NO: 35379 - protein, 41 aa, Artificial Sequence; identical to SEQ ID NO: 33223
  GFR-binding peptide
  MOD_RES (5)..(6)..(38)..(40): Xaa is C or S

SEQ ID NO: 35380 - protein, 39 aa, Artificial Sequence; identical to SEQ ID NO: 33224
  GFR-binding peptide
  MOD_RES (4)..(5)..(39): Xaa is C or S
  MOD_RES (19)..(20)..(21)..(22)..(23): Xaa is A or G
  MOD_RES (24)..(25)..(26)..(27): Xaa is A or G or is absent

SEQ ID NO: 35381 - protein, 41 aa, Artificial Sequence; identical to SEQ ID NO: 33225
  GFR-binding peptide
  MOD_RES (6)..(7)..(41): Xaa is C or S
  MOD_RES (21)..(22)..(23)..(24)..(25): Xaa is A or G
  MOD_RES (26)..(27)..(28)..(29): Xaa is A or G or is absent

SEQ ID NO: 35382 - protein, 35 aa, Artificial Sequence; identical to SEQ ID NO: 33226
  GFR-binding peptide
  MOD_RES (1)..(2)..(34): Xaa is C or S

SEQ ID NO: 35383 - protein, 33 aa, Artificial Sequence; identical to SEQ ID NO: 33227
  GFR-binding peptide
  MOD_RES (33)..(33): Xaa is C or S

SEQ ID NO: 35384 - protein, 40 aa, Artificial Sequence; identical to SEQ ID NO: 33228
  GFR-binding peptide
  MOD_RES (2)..(3)..(37)..(39): Xaa is C or S
  MOD_RES (17)..(18)..(19)..(20)..(21): Xaa is A or G
  MOD_RES (22)..(23)..(24)..(25): Xaa is A or G or is absent

SEQ ID NO: 35385 - protein, 34 aa, Artificial Sequence; identical to SEQ ID NO: 33229
  GFR-binding peptide
  MOD_RES (1)..(34): Xaa is C or S

SEQ ID NO: 35386 - protein, 39 aa, Artificial Sequence; identical to SEQ ID NO: 33230
  GFR-binding peptide
  MOD_RES (6)..(7)..(39): Xaa is C or S

SEQ ID NO: 35387 - protein, 33 aa, Artificial Sequence; identical to SEQ ID NO: 33231
  GFR-binding peptide
  MOD_RES (32)..(32): Xaa is C or S

SEQ ID NO: 35388 - protein, 34 aa, Artificial Sequence; identical to SEQ ID NO: 33232
  GFR-binding peptide
  MOD_RES (1)..(33): Xaa is C or S

SEQ ID NO: 35389 - protein, 38 aa, Artificial Sequence; identical to SEQ ID NO: 33233
  GFR-binding peptide
  MOD_RES (4)..(5)..(38): Xaa is C or S
  MOD_RES (19)..(20)..(21)..(22)..(23): Xaa is A or G
  MOD_RES (24)..(25)..(26)..(27): Xaa is A or G or is absent

SEQ ID NO: 35390 - protein, 41 aa, Artificial Sequence; identical to SEQ ID NO: 33234
  GFR-binding peptide
  MOD_RES (6)..(7)..(41): Xaa is C or S
  MOD_RES (21)..(22)..(23)..(24)..(25): Xaa is A or G
  MOD_RES (26)..(27)..(28)..(29): Xaa is A or G or is absent

SEQ ID NO: 35391 - protein, 41 aa, Artificial Sequence; identical to SEQ ID NO: 33235
  GFR-binding peptide
  MOD_RES (3)..(4)..(38)..(40): Xaa is C or S
  MOD_RES (18)..(19)..(20)..(21)..(22): Xaa is A or G
  MOD_RES (23)..(24)..(25)..(26): Xaa is A or G or is absent

SEQ ID NO: 35392 - protein, 39 aa, Artificial Sequence; identical to SEQ ID NO: 33236
  GFR-binding peptide
  MOD_RES (6)..(7): Xaa is C or S
  MOD_RES (21)..(22)..(23)..(24)..(25): Xaa is A or G
  MOD_RES (26)..(27)..(28)..(29): Xaa is A or G or is absent

SEQ ID NO: 35393 - protein, 37 aa, Artificial Sequence; identical to SEQ ID NO: 33237
  GFR-binding peptide
  MOD_RES (4)..(5)..(37): Xaa is C or S

SEQ ID NO: 35394 - protein, 40 aa, Artificial Sequence; identical to SEQ ID NO: 33238
  GFR-binding peptide
  MOD_RES (6)..(7)..(39): Xaa is C or S

SEQ ID NO: 35395 - protein, 34 aa, Artificial Sequence; identical to SEQ ID NO: 33239
  GFR-binding peptide
  MOD_RES (2)..(3): Xaa is C or S

SEQ ID NO: 35396 - protein, 40 aa, Artificial Sequence; identical to SEQ ID NO: 33240
  GFR-binding peptide
  MOD_RES (4)..(5)..(39): Xaa is C or S
  MOD_RES (19)..(20)..(21)..(22)..(23): Xaa is A or G
  MOD_RES (24)..(25)..(26)..(27): Xaa is A or G or is absent

SEQ ID NO: 35397 - protein, 37 aa, Artificial Sequence; identical to SEQ ID NO: 33241
  GFR-binding peptide
  MOD_RES (6)..(6): Xaa is C or S

SEQ ID NO: 35398 - protein, 36 aa, Artificial Sequence; identical to SEQ ID NO: 33242
  GFR-binding peptide
  MOD_RES (4)..(4): Xaa is C or S
  MOD_RES (18)..(19)..(20)..(21)..(22): Xaa is A or G
  MOD_RES (23)..(24)..(25)..(26): Xaa is A or G or is absent

SEQ ID NO: 35399 - protein, 40 aa, Artificial Sequence; identical to SEQ ID NO: 33243
  GFR-binding peptide
  MOD_RES (4)..(5)..(39): Xaa is C or S
  MOD_RES (19)..(20)..(21)..(22)..(23): Xaa is A or G
  MOD_RES (24)..(25)..(26)..(27): Xaa is A or G or is absent

SEQ ID NO: 35400 - protein, 40 aa, Artificial Sequence; identical to SEQ ID NO: 33244
  GFR-binding peptide
  MOD_RES (5)..(6)..(40): Xaa is C or S
  MOD_RES (20)..(21)..(22)..(23)..(24): Xaa is A or G
  MOD_RES (25)..(26)..(27)..(28): Xaa is A or G or is absent

SEQ ID NO: 35401 - protein, 38 aa, Artificial Sequence; identical to SEQ ID NO: 33245
  GFR-binding peptide
  MOD_RES (4)..(5)..(37): Xaa is C or S

SEQ ID NO: 35402 - protein, 31 aa, Artificial Sequence; identical to SEQ ID NO: 33246
  GFR-binding peptide

SEQ ID NO: 35403 - protein, 39 aa, Artificial Sequence; identical to SEQ ID NO: 33247
  GFR-binding peptide
  MOD_RES (6)..(7)..(39): Xaa is C or S

SEQ ID NO: 35404 - protein, 38 aa, Artificial Sequence; identical to SEQ ID NO: 33248
  GFR-binding peptide
  MOD_RES (1)..(35)..(37): Xaa is C or S
  MOD_RES (15)..(16)..(17)..(18)..(19): Xaa is A or G
  MOD_RES (20)..(21)..(22)..(23): Xaa is A or G or is absent

SEQ ID NO: 35405 - protein, 39 aa, Artificial Sequence; identical to SEQ ID NO: 33249
  GFR-binding peptide
  MOD_RES (3)..(4)..(36)..(38): Xaa is C or S

SEQ ID NO: 35406 - protein, 37 aa, Artificial Sequence; identical to SEQ ID NO: 33250
  GFR-binding peptide
  MOD_RES (1)..(36): Xaa is C or S
  MOD_RES (15)..(16)..(17)..(18)..(19): Xaa is A or G
  MOD_RES (20)..(21)..(22)..(23): Xaa is A or G or is absent

SEQ ID NO: 35407 - protein, 41 aa, Artificial Sequence; identical to SEQ ID NO: 33251
  GFR-binding peptide
  MOD_RES (5)..(6)..(40): Xaa is C or S
  MOD_RES (20)..(21)..(22)..(23)..(24): Xaa is A or G
  MOD_RES (25)..(26)..(27)..(28): Xaa is A or G or is absent

SEQ ID NO: 35408 - protein, 42 aa, Artificial Sequence; identical to SEQ ID NO: 33252
  GFR-binding peptide
  MOD_RES (5)..(6)..(40)..(42): Xaa is C or S
  MOD_RES (20)..(21)..(22)..(23)..(24): Xaa is A or G
  MOD_RES (25)..(26)..(27)..(28): Xaa is A or G or is absent

SEQ ID NO: 35409 - protein, 36 aa, Artificial Sequence; identical to SEQ ID NO: 33253
  GFR-binding peptide
  MOD_RES (3)..(4): Xaa is C or S
  MOD_RES (18)..(19)..(20)..(21)..(22): Xaa is A or G
  MOD_RES (23)..(24)..(25)..(26): Xaa is A or G or is absent

SEQ ID NO: 35410 - protein, 41 aa, Artificial Sequence; identical to SEQ ID NO: 33254
  GFR-binding peptide
  MOD_RES (6)..(7)..(41): Xaa is C or S
  MOD_RES (21)..(22)..(23)..(24)..(25): Xaa is A or G
  MOD_RES (26)..(27)..(28)..(29): Xaa is A or G or is absent

SEQ ID NO: 35411 - protein, 39 aa, Artificial Sequence; identical to SEQ ID NO: 33255
  GFR-binding peptide
  MOD_RES (1)..(2)..(36)..(38): Xaa is C or S
  MOD_RES (16)..(17)..(18)..(19)..(20): Xaa is A or G
  MOD_RES (21)..(22)..(23)..(24): Xaa is A or G or is absent

SEQ ID NO: 35412 - protein, 41 aa, Artificial Sequence; identical to SEQ ID NO: 33256
  GFR-binding peptide
  MOD_RES (6)..(7)..(41): Xaa is C or S
  MOD_RES (21)..(22)..(23)..(24)..(25): Xaa is A or G
  MOD_RES (26)..(27)..(28)..(29): Xaa is A or G or is absent

SEQ ID NO: 35413 - protein, 30 aa, Artificial Sequence; identical to SEQ ID NO: 33257
  GFR-binding peptide

SEQ ID NO: 35414 - protein, 33 aa, Artificial Sequence; identical to SEQ ID NO: 33258
  GFR-binding peptide
  MOD_RES (1)..(1): Xaa is C or S
  MOD_RES (15)..(16)..(17)..(18)..(19): Xaa is A or G
  MOD_RES (20)..(21)..(22)..(23): Xaa is A or G or is absent

SEQ ID NO: 35415 - protein, 34 aa, Artificial Sequence; identical to SEQ ID NO: 33259
  GFR-binding peptide
  MOD_RES (34)..(34): Xaa is C or S
  MOD_RES (14)..(15)..(16)..(17)..(18): Xaa is A or G
  MOD_RES (19)..(20)..(21)..(22): Xaa is A or G or is absent

SEQ ID NO: 35416 - protein, 42 aa, Artificial Sequence; identical to SEQ ID NO: 33260
  GFR-binding peptide
  MOD_RES (6)..(7)..(41): Xaa is C or S
  MOD_RES (21)..(22)..(23)..(24)..(25): Xaa is A or G
  MOD_RES (26)..(27)..(28)..(29): Xaa is A or G or is absent

SEQ ID NO: 35417 - protein, 40 aa, Artificial Sequence; identical to SEQ ID NO: 33261
  GFR-binding peptide
  MOD_RES (3)..(4)..(39): Xaa is C or S
  MOD_RES (18)..(19)..(20)..(21)..(22): Xaa is A or G
  MOD_RES (23)..(24)..(25)..(26): Xaa is A or G or is absent

SEQ ID NO: 35418 - protein, 36 aa, Artificial Sequence; identical to SEQ ID NO: 33262
  GFR-binding peptide
  MOD_RES (5)..(6): Xaa is C or S

SEQ ID NO: 35419 - protein, 32 aa, Artificial Sequence; identical to SEQ ID NO: 33263
  GFR-binding peptide
  MOD_RES (1)..(2): Xaa is C or S

SEQ ID NO: 35420 - protein, 36 aa, Artificial Sequence; identical to SEQ ID NO: 33264
  GFR-binding peptide
  MOD_RES (4)..(5)..(36): Xaa is C or S

SEQ ID NO: 35421 - protein, 35 aa, Artificial Sequence; identical to SEQ ID NO: 33265
  GFR-binding peptide
  MOD_RES (2)..(3)..(35): Xaa is C or S

SEQ ID NO: 35422 - protein, 36 aa, Artificial Sequence; identical to SEQ ID NO: 33266
  GFR-binding peptide
  MOD_RES (3)..(4): Xaa is C or S
  MOD_RES (18)..(19)..(20)..(21)..(22): Xaa is A or G
  MOD_RES (23)..(24)..(25)..(26): Xaa is A or G or is absent

SEQ ID NO: 35423 - protein, 31 aa, Artificial Sequence; identical to SEQ ID NO: 33267
  GFR-binding peptide
  MOD_RES (1)..(1): Xaa is C or S

SEQ ID NO: 35424 - protein, 38 aa, Artificial Sequence; identical to SEQ ID NO: 33268
  GFR-binding peptide
  MOD_RES (1)..(2)..(36)..(38): Xaa is C or S
  MOD_RES (16)..(17)..(18)..(19)..(20): Xaa is A or G
  MOD_RES (21)..(22)..(23)..(24): Xaa is A or G or is absent

SEQ ID NO: 35425 - protein, 33 aa, Artificial Sequence; identical to SEQ ID NO: 33269
  GFR-binding peptide
  MOD_RES (1)..(33): Xaa is C or S

SEQ ID NO: 35426 - protein, 34 aa, Artificial Sequence; identical to SEQ ID NO: 33270
  GFR-binding peptide
  MOD_RES (1)..(1): Xaa is C or S
  MOD_RES (15)..(16)..(17)..(18)..(19): Xaa is A or G
  MOD_RES (20)..(21)..(22)..(23): Xaa is A or G or is absent

SEQ ID NO: 35427 - protein, 40 aa, Artificial Sequence; identical to SEQ ID NO: 33271
  GFR-binding peptide
  MOD_RES (2)..(3)..(37)..(39): Xaa is C or S
  MOD_RES (17)..(18)..(19)..(20)..(21): Xaa is A or G
  MOD_RES (22)..(23)..(24)..(25): Xaa is A or G or is absent

SEQ ID NO: 35428 - protein, 40 aa, Artificial Sequence; identical to SEQ ID NO: 33272
  GFR-binding peptide
  MOD_RES (4)..(5)..(37)..(39): Xaa is C or S

SEQ ID NO: 35429 - protein, 34 aa, Artificial Sequence; identical to SEQ ID NO: 33273
  GFR-binding peptide
  MOD_RES (3)..(4): Xaa is C or S

SEQ ID NO: 35430 - protein, 42 aa, Artificial Sequence; identical to SEQ ID NO: 33274
  GFR-binding peptide
  MOD_RES (6)..(7)..(41): Xaa is C or S
  MOD_RES (21)..(22)..(23)..(24)..(25): Xaa is A or G
  MOD_RES (26)..(27)..(28)..(29): Xaa is A or G or is absent

SEQ ID NO: 35431 - protein, 38 aa, Artificial Sequence; identical to SEQ ID NO: 33275
  GFR-binding peptide
  MOD_RES (1)..(2)..(36)..(38): Xaa is C or S
  MOD_RES (16)..(17)..(18)..(19)..(20): Xaa is A or G
  MOD_RES (21)..(22)..(23)..(24): Xaa is A or G or is absent

SEQ ID NO: 35432 - protein, 36 aa, Artificial Sequence; identical to SEQ ID NO: 33276
  GFR-binding peptide
  MOD_RES (3)..(4)..(36): Xaa is C or S

SEQ ID NO: 35433 - protein, 39 aa, Artificial Sequence; identical to SEQ ID NO: 33277
  GFR-binding peptide
  MOD_RES (2)..(3)..(37)..(39): Xaa is C or S
  MOD_RES (17)..(18)..(19)..(20)..(21): Xaa is A or G
  MOD_RES (22)..(23)..(24)..(25): Xaa is A or G or is absent

SEQ ID NO: 35434 - protein, 35 aa, Artificial Sequence; identical to SEQ ID NO: 33278
  GFR-binding peptide
  MOD_RES (32)..(34): Xaa is C or S

SEQ ID NO: 35435 - protein, 38 aa, Artificial Sequence; identical to SEQ ID NO: 33279
  GFR-binding peptide
  MOD_RES (3)..(4)..(36)..(38): Xaa is C or S

SEQ ID NO: 35436 - protein, 37 aa, Artificial Sequence; identical to SEQ ID NO: 33280
  GFR-binding peptide
  MOD_RES (6)..(7): Xaa is C or S

SEQ ID NO: 35437 - protein, 38 aa, Artificial Sequence; identical to SEQ ID NO: 33281
  GFR-binding peptide
  MOD_RES (2)..(3)..(35)..(37): Xaa is C or S

SEQ ID NO: 35438 - protein, 39 aa, Artificial Sequence; identical to SEQ ID NO: 33282
  GFR-binding peptide
  MOD_RES (6)..(7): Xaa is C or S
  MOD_RES (21)..(22)..(23)..(24)..(25): Xaa is A or G
  MOD_RES (26)..(27)..(28)..(29): Xaa is A or G or is absent

SEQ ID NO: 35439 - protein, 39 aa, Artificial Sequence; identical to SEQ ID NO: 33283
  GFR-binding peptide
  MOD_RES (4)..(36)..(38): Xaa is C or S

SEQ ID NO: 35440 - protein, 40 aa, Artificial Sequence; identical to SEQ ID NO: 33284
  GFR-binding peptide
  MOD_RES (4)..(5)..(39): Xaa is C or S
  MOD_RES (19)..(20)..(21)..(22)..(23): Xaa is A or G
  MOD_RES (24)..(25)..(26)..(27): Xaa is A or G or is absent

SEQ ID NO: 35441 - protein, 38 aa, Artificial Sequence; identical to SEQ ID NO: 33285
  GFR-binding peptide
  MOD_RES (5)..(6): Xaa is C or S
  MOD_RES (20)..(21)..(22)..(23)..(24): Xaa is A or G
  MOD_RES (25)..(26)..(27)..(28): Xaa is A or G or is absent

SEQ ID NO: 35442 - protein, 35 aa, Artificial Sequence; identical to SEQ ID NO: 33286
  GFR-binding peptide
  MOD_RES (34)..(34): Xaa is C or S
  MOD_RES (14)..(15)..(16)..(17)..(18): Xaa is A or G
  MOD_RES (19)..(20)..(21)..(22): Xaa is A or G or is absent

SEQ ID NO: 35443 - protein, 41 aa, Artificial Sequence; identical to SEQ ID NO: 33287
  GFR-binding peptide
  MOD_RES (6)..(7)..(40): Xaa is C or S
  MOD_RES (21)..(22)..(23)..(24)..(25): Xaa is A or G
  MOD_RES (26)..(27)..(28)..(29): Xaa is A or G or is absent

SEQ ID NO: 35444 - protein, 43 aa, Artificial Sequence; identical to SEQ ID NO: 33288
  GFR-binding peptide
  MOD_RES (5)..(6)..(40)..(42): Xaa is C or S
  MOD_RES (20)..(21)..(22)..(23)..(24): Xaa is A or G
  MOD_RES (25)..(26)..(27)..(28): Xaa is A or G or is absent

SEQ ID NO: 35445 - protein, 34 aa, Artificial Sequence; identical to SEQ ID NO: 33289
  GFR-binding peptide
  MOD_RES (1)..(2): Xaa is C or S
  MOD_RES (16)..(17)..(18)..(19)..(20): Xaa is A or G
  MOD_RES (21)..(22)..(23)..(24): Xaa is A or G or is absent

SEQ ID NO: 35446 - protein, 42 aa, Artificial Sequence; identical to SEQ ID NO: 33290
  GFR-binding peptide
  MOD_RES (6)..(7)..(41): Xaa is C or S
  MOD_RES (21)..(22)..(23)..(24)..(25): Xaa is A or G
  MOD_RES (26)..(27)..(28)..(29): Xaa is A or G or is absent

SEQ ID NO: 35447 - protein, 39 aa, Artificial Sequence; identical to SEQ ID NO: 33291
  GFR-binding peptide
  MOD_RES (5)..(6)..(38): Xaa is C or S

SEQ ID NO: 35448 - protein, 39 aa, Artificial Sequence; identical to SEQ ID NO: 33292
  GFR-binding peptide
  MOD_RES (5)..(6): Xaa is C or S
  MOD_RES (20)..(21)..(22)..(23)..(24): Xaa is A or G
  MOD_RES (25)..(26)..(27)..(28): Xaa is A or G or is absent

SEQ ID NO: 35449 - protein, 39 aa, Artificial Sequence; identical to SEQ ID NO: 33293
  GFR-binding peptide
  MOD_RES (6)..(7)..(39): Xaa is C or S

SEQ ID NO: 35450 - protein, 38 aa, Artificial Sequence; identical to SEQ ID NO: 33294
  GFR-binding peptide
  MOD_RES (3)..(4)..(38): Xaa is C or S
  MOD_RES (18)..(19)..(20)..(21)..(22): Xaa is A or G
  MOD_RES (23)..(24)..(25)..(26): Xaa is A or G or is absent

SEQ ID NO: 35451 - protein, 40 aa, Artificial Sequence; identical to SEQ ID NO: 33295
  GFR-binding peptide
  MOD_RES (5)..(6)..(40): Xaa is C or S
  MOD_RES (20)..(21)..(22)..(23)..(24): Xaa is A or G
  MOD_RES (25)..(26)..(27)..(28): Xaa is A or G or is absent

SEQ ID NO: 35452 - protein, 40 aa, Artificial Sequence; identical to SEQ ID NO: 33296
  GFR-binding peptide
  MOD_RES (3)..(4)..(37)..(39): Xaa is C or S

SEQ ID NO: 35453 - protein, 36 aa, Artificial Sequence; identical to SEQ ID NO: 33297
  GFR-binding peptide
  MOD_RES (1)..(2)..(36): Xaa is C or S
  MOD_RES (16)..(17)..(18)..(19)..(20): Xaa is A or G
  MOD_RES (21)..(22)..(23)..(24): Xaa is A or G or is absent

SEQ ID NO: 35454 - protein, 38 aa, Artificial Sequence; identical to SEQ ID NO: 33298
  GFR-binding peptide
  MOD_RES (1)..(2)..(36)..(38): Xaa is C or S
  MOD_RES (16)..(17)..(18)..(19)..(20): Xaa is A or G
  MOD_RES (21)..(22)..(23)..(24): Xaa is A or G or is absent

SEQ ID NO: 35455 - protein, 37 aa, Artificial Sequence; identical to SEQ ID NO: 33299
  GFR-binding peptide
  MOD_RES (5)..(6): Xaa is C or S

SEQ ID NO: 35456 - protein, 40 aa, Artificial Sequence; identical to SEQ ID NO: 33300
  GFR-binding peptide
  MOD_RES (5)..(6)..(39): Xaa is C or S
  MOD_RES (20)..(21)..(22)..(23)..(24): Xaa is A or G
  MOD_RES (25)..(26)..(27)..(28): Xaa is A or G or is absent

SEQ ID NO: 35457 - protein, 37 aa, Artificial Sequence; identical to SEQ ID NO: 33301
  GFR-binding peptide
  MOD_RES (6)..(7): Xaa is C or S

SEQ ID NO: 35458 - protein, 35 aa, Artificial Sequence; identical to SEQ ID NO: 33302
  GFR-binding peptide
  MOD_RES (1)..(35): Xaa is C or S
  MOD_RES (15)..(16)..(17)..(18)..(19): Xaa is A or G
  MOD_RES (20)..(21)..(22)..(23): Xaa is A or G or is absent

SEQ ID NO: 35459 - protein, 42 aa, Artificial Sequence; identical to SEQ ID NO: 33303
  GFR-binding peptide
  MOD_RES (4)..(5)..(39)..(41): Xaa is C or S
  MOD_RES (19)..(20)..(21)..(22)..(23): Xaa is A or G
  MOD_RES (24)..(25)..(26)..(27): Xaa is A or G or is absent

SEQ ID NO: 35460 - protein, 36 aa, Artificial Sequence; identical to SEQ ID NO: 33304
  GFR-binding peptide
  MOD_RES (2)..(3): Xaa is C or S
  MOD_RES (17)..(18)..(19)..(20)..(21): Xaa is A or G
  MOD_RES (22)..(23)..(24)..(25): Xaa is A or G or is absent

SEQ ID NO: 35461 - protein, 34 aa, Artificial Sequence; identical to SEQ ID NO: 33305
  GFR-binding peptide
  MOD_RES (3)..(4): Xaa is C or S

SEQ ID NO: 35462 - protein, 33 aa, Artificial Sequence; identical to SEQ ID NO: 33306
  GFR-binding peptide
  MOD_RES (1)..(2): Xaa is C or S

SEQ ID NO: 35463 - protein, 37 aa, Artificial Sequence; identical to SEQ ID NO: 33307
  GFR-binding peptide
  MOD_RES (1)..(2)..(34)..(36): Xaa is C or S

SEQ ID NO: 35464 - protein, 32 aa, Artificial Sequence; identical to SEQ ID NO: 33308
  GFR-binding peptide
  MOD_RES (1)..(2): Xaa is C or S

SEQ ID NO: 35465 - protein, 35 aa, Artificial Sequence; identical to SEQ ID NO: 33309
  GFR-binding peptide
  MOD_RES (1)..(32)..(34): Xaa is C or S

SEQ ID NO: 35466 - protein, 34 aa, Artificial Sequence; identical to SEQ ID NO: 33310
  GFR-binding peptide
  MOD_RES (1)..(1): Xaa is C or S
  MOD_RES (15)..(16)..(17)..(18)..(19): Xaa is A or G
  MOD_RES (20)..(21)..(22)..(23): Xaa is A or G or is absent

SEQ ID NO: 35467 - protein, 38 aa, Artificial Sequence; identical to SEQ ID NO: 33311
  GFR-binding peptide
  MOD_RES (4)..(5)..(38): Xaa is C or S

SEQ ID NO: 35468 - protein, 33 aa, Artificial Sequence; identical to SEQ ID NO: 33312
  GFR-binding peptide
  MOD_RES (3)..(3): Xaa is C or S

SEQ ID NO: 35469 - protein, 38 aa, Artificial Sequence; identical to SEQ ID NO: 33313
  GFR-binding peptide
  MOD_RES (2)..(3)..(37): Xaa is C or S
  MOD_RES (17)..(18)..(19)..(20)..(21): Xaa is A or G
  MOD_RES (22)..(23)..(24)..(25): Xaa is A or G or is absent

SEQ ID NO: 35470 - protein, 44 aa, Artificial Sequence; identical to SEQ ID NO: 33314
  GFR-binding peptide
  MOD_RES (5)..(6)..(41)..(43): Xaa is C or S
  MOD_RES (20)..(21)..(22)..(23)..(24): Xaa is A or G
  MOD_RES (25)..(26)..(27)..(28): Xaa is A or G or is absent

SEQ ID NO: 35471 - protein, 35 aa, Artificial Sequence; identical to SEQ ID NO: 33315
  GFR-binding peptide
  MOD_RES (1)..(33)..(35): Xaa is C or S

SEQ ID NO: 35472 - protein, 39 aa, Artificial Sequence; identical to SEQ ID NO: 33316
  GFR-binding peptide
  MOD_RES (5)..(6)..(38): Xaa is C or S

SEQ ID NO: 35473 - protein, 42 aa, Artificial Sequence; identical to SEQ ID NO: 33317
  GFR-binding peptide
  MOD_RES (6)..(7)..(39)..(41): Xaa is C or S

SEQ ID NO: 35474 - protein, 42 aa, Artificial Sequence; identical to SEQ ID NO: 33318
  GFR-binding peptide
  MOD_RES (6)..(7)..(41): Xaa is C or S
  MOD_RES (21)..(22)..(23)..(24)..(25): Xaa is A or G
  MOD_RES (26)..(27)..(28)..(29): Xaa is A or G or is absent

SEQ ID NO: 35475 - protein, 39 aa, Artificial Sequence; identical to SEQ ID NO: 33319
  GFR-binding peptide
  MOD_RES (3)..(4)..(39): Xaa is C or S
  MOD_RES (18)..(19)..(20)..(21)..(22): Xaa is A or G
  MOD_RES (23)..(24)..(25)..(26): Xaa is A or G or is absent

SEQ ID NO: 35476 - protein, 36 aa, Artificial Sequence; identical to SEQ ID NO: 33320
  GFR-binding peptide
  MOD_RES (34)..(36): Xaa is C or S
  MOD_RES (14)..(15)..(16)..(17)..(18): Xaa is A or G
  MOD_RES (19)..(20)..(21)..(22): Xaa is A or G or is absent

SEQ ID NO: 35477 - protein, 35 aa, Artificial Sequence; identical to SEQ ID NO: 33321
  GFR-binding peptide
  MOD_RES (3)..(35): Xaa is C or S

SEQ ID NO: 35478 - protein, 34 aa, Artificial Sequence; identical to SEQ ID NO: 33322
  GFR-binding peptide
  MOD_RES (1)..(1): Xaa is C or S
  MOD_RES (15)..(16)..(17)..(18)..(19): Xaa is A or G
  MOD_RES (20)..(21)..(22)..(23): Xaa is A or G or is absent

SEQ ID NO: 35479 - protein, 38 aa, Artificial Sequence; identical to SEQ ID NO: 33323
  GFR-binding peptide
  MOD_RES (2)..(3)..(37): Xaa is C or S
  MOD_RES (17)..(18)..(19)..(20)..(21): Xaa is A or G
  MOD_RES (22)..(23)..(24)..(25): Xaa is A or G or is absent

SEQ ID NO: 35480 - protein, 34 aa, Artificial Sequence; identical to SEQ ID NO: 33324
  GFR-binding peptide
  MOD_RES (1)..(1): Xaa is C or S
  MOD_RES (15)..(16)..(17)..(18)..(19): Xaa is A or G
  MOD_RES (20)..(21)..(22)..(23): Xaa is A or G or is absent

SEQ ID NO: 35481 - protein, 40 aa, Artificial Sequence; identical to SEQ ID NO: 33325
  GFR-binding peptide
  MOD_RES (6)..(7): Xaa is C or S
  MOD_RES (21)..(22)..(23)..(24)..(25): Xaa is A or G
  MOD_RES (26)..(27)..(28)..(29): Xaa is A or G or is absent

SEQ ID NO: 35482 - protein, 39 aa, Artificial Sequence; identical to SEQ ID NO: 33326
  GFR-binding peptide
  MOD_RES (4)..(5)..(39): Xaa is C or S
  MOD_RES (19)..(20)..(21)..(22)..(23): Xaa is A or G
  MOD_RES (24)..(25)..(26)..(27): Xaa is A or G or is absent

SEQ ID NO: 35483 - protein, 41 aa, Artificial Sequence; identical to SEQ ID NO: 33327
  GFR-binding peptide
  MOD_RES (4)..(5)..(38)..(40): Xaa is C or S
  MOD_RES (19)..(20)..(21)..(22)..(23): Xaa is A or G
  MOD_RES (24)..(25)..(26)..(27): Xaa is A or G or is absent

SEQ ID NO: 35484 - protein, 35 aa, Artificial Sequence; identical to SEQ ID NO: 33328
  GFR-binding peptide
  MOD_RES (2)..(3): Xaa is C or S
  MOD_RES (17)..(18)..(19)..(20)..(21): Xaa is A or G
  MOD_RES (22)..(23)..(24)..(25): Xaa is A or G or is absent

SEQ ID NO: 35485 - protein, 31 aa, Artificial Sequence; identical to SEQ ID NO: 33329
  GFR-binding peptide

SEQ ID NO: 35486 - protein, 39 aa, Artificial Sequence; identical to SEQ ID NO: 33330
  GFR-binding peptide
  MOD_RES (6)..(7): Xaa is C or S
  MOD_RES (21)..(22)..(23)..(24)..(25): Xaa is A or G
  MOD_RES (26)..(27)..(28)..(29): Xaa is A or G or is absent

SEQ ID NO: 35487 - protein, 42 aa, Artificial Sequence; identical to SEQ ID NO: 33331
  GFR-binding peptide
  MOD_RES (5)..(6)..(40)..(42): Xaa is C or S
  MOD_RES (20)..(21)..(22)..(23)..(24): Xaa is A or G
  MOD_RES (25)..(26)..(27)..(28): Xaa is A or G or is absent

SEQ ID NO: 35488 - protein, 34 aa, Artificial Sequence; identical to SEQ ID NO: 33332
  GFR-binding peptide
  MOD_RES (1)..(2): Xaa is C or S
  MOD_RES (16)..(17)..(18)..(19)..(20): Xaa is A or G
  MOD_RES (21)..(22)..(23)..(24): Xaa is A or G or is absent

SEQ ID NO: 35489 - protein, 36 aa, Artificial Sequence; identical to SEQ ID NO: 33333
  GFR-binding peptide
  MOD_RES (34)..(36): Xaa is C or S
  MOD_RES (14)..(15)..(16)..(17)..(18): Xaa is A or G
  MOD_RES (19)..(20)..(21)..(22): Xaa is A or G or is absent

SEQ ID NO: 35490 - protein, 39 aa, Artificial Sequence; identical to SEQ ID NO: 33334
  GFR-binding peptide
  MOD_RES (3)..(4)..(37)..(39): Xaa is C or S
  MOD_RES (18)..(19)..(20)..(21)..(22): Xaa is A or G
  MOD_RES (23)..(24)..(25)..(26): Xaa is A or G or is absent

SEQ ID NO: 35491 - protein, 38 aa, Artificial Sequence; identical to SEQ ID NO: 33335
  GFR-binding peptide
  MOD_RES (4)..(5)..(36)..(38): Xaa is C or S

SEQ ID NO: 35492 - protein, 37 aa, Artificial Sequence; identical to SEQ ID NO: 33336
  GFR-binding peptide
  MOD_RES (1)..(2)..(36): Xaa is C or S
  MOD_RES (16)..(17)..(18)..(19)..(20): Xaa is A or G
  MOD_RES (21)..(22)..(23)..(24): Xaa is A or G or is absent

SEQ ID NO: 35493 - protein, 36 aa, Artificial Sequence; identical to SEQ ID NO: 33337
  GFR-binding peptide
  MOD_RES (3)..(4): Xaa is C or S
  MOD_RES (18)..(19)..(20)..(21)..(22): Xaa is A or G
  MOD_RES (23)..(24)..(25)..(26): Xaa is A or G or is absent

SEQ ID NO: 35494 - protein, 37 aa, Artificial Sequence; identical to SEQ ID NO: 33338
  GFR-binding peptide
  MOD_RES (1)..(2)..(34)..(36): Xaa is C or S

SEQ ID NO: 35495 - protein, 38 aa, Artificial Sequence; identical to SEQ ID NO: 33339
  GFR-binding peptide
  MOD_RES (6)..(7)..(38): Xaa is C or S

SEQ ID NO: 35496 - protein, 34 aa, Artificial Sequence; identical to SEQ ID NO: 33340
  GFR-binding peptide
  MOD_RES (1)..(33): Xaa is C or S

SEQ ID NO: 35497 - protein, 39 aa, Artificial Sequence; identical to SEQ ID NO: 33341
  GFR-binding peptide
  MOD_RES (6)..(7): Xaa is C or S
  MOD_RES (21)..(22)..(23)..(24)..(25): Xaa is A or G
  MOD_RES (26)..(27)..(28)..(29): Xaa is A or G or is absent

SEQ ID NO: 35498 - protein, 39 aa, Artificial Sequence; identical to SEQ ID NO: 33342
  GFR-binding peptide
  MOD_RES (3)..(4)..(38): Xaa is C or S
  MOD_RES (18)..(19)..(20)..(21)..(22): Xaa is A or G
  MOD_RES (23)..(24)..(25)..(26): Xaa is A or G or is absent

SEQ ID NO: 35499 - protein, 30 aa, Artificial Sequence; identical to SEQ ID NO: 33343
  GFR-binding peptide

SEQ ID NO: 35500 - protein, 35 aa, Artificial Sequence; identical to SEQ ID NO: 33344
  GFR-binding peptide
  MOD_RES (34)..(34): Xaa is C or S
  MOD_RES (14)..(15)..(16)..(17)..(18): Xaa is A or G
  MOD_RES (19)..(20)..(21)..(22): Xaa is A or G or is absent

SEQ ID NO: 35501 - protein, 39 aa, Artificial Sequence; identical to SEQ ID NO: 33345
  GFR-binding peptide
  MOD_RES (7)..(39): Xaa is C or S

SEQ ID NO: 35502 - protein, 32 aa, Artificial Sequence; identical to SEQ ID NO: 33346
  GFR-binding peptide
  MOD_RES (1)..(1): Xaa is C or S

SEQ ID NO: 35503 - protein, 36 aa, Artificial Sequence; identical to SEQ ID NO: 33347
  GFR-binding peptide
  MOD_RES (3)..(35): Xaa is C or S

SEQ ID NO: 35504 - protein, 33 aa, Artificial Sequence; identical to SEQ ID NO: 33348
  GFR-binding peptide
  MOD_RES (14)..(15)..(16)..(17)..(18): Xaa is A or G
  MOD_RES (19)..(20)..(21)..(22): Xaa is A or G or is absent

SEQ ID NO: 35505 - protein, 33 aa, Artificial Sequence; identical to SEQ ID NO: 33349
  GFR-binding peptide
  MOD_RES (2)..(3): Xaa is C or S

SEQ ID NO: 35506 - protein, 37 aa, Artificial Sequence; identical to SEQ ID NO: 33350
  GFR-binding peptide
  MOD_RES (1)..(2)..(35)..(37): Xaa is C or S

SEQ ID NO: 35507 - protein, 38 aa, Artificial Sequence; identical to SEQ ID NO: 33351
  GFR-binding peptide
  MOD_RES (1)..(2)..(35)..(37): Xaa is C or S
  MOD_RES (16)..(17)..(18)..(19)..(20): Xaa is A or G
  MOD_RES (21)..(22)..(23)..(24): Xaa is A or G or is absent

SEQ ID NO: 35508 - protein, 35 aa, Artificial Sequence; identical to SEQ ID NO: 33352
  GFR-binding peptide
  MOD_RES (1)..(2): Xaa is C or S
  MOD_RES (16)..(17)..(18)..(19)..(20): Xaa is A or G
  MOD_RES (21)..(22)..(23)..(24): Xaa is A or G or is absent

SEQ ID NO: 35509 - protein, 38 aa, Artificial Sequence; identical to SEQ ID NO: 33353
  GFR-binding peptide
  MOD_RES (5)..(6): Xaa is C or S
  MOD_RES (20)..(21)..(22)..(23)..(24): Xaa is A or G
  MOD_RES (25)..(26)..(27)..(28): Xaa is A or G or is absent

SEQ ID NO: 35510 - protein, 37 aa, Artificial Sequence; identical to SEQ ID NO: 33354
  GFR-binding peptide
  MOD_RES (1)..(2)..(35)..(37): Xaa is C or S
  MOD_RES (16)..(17)..(18)..(19)..(20): Xaa is A or G
  MOD_RES (21)..(22)..(23)..(24): Xaa is A or G or is absent

SEQ ID NO: 35511 - protein, 38 aa, Artificial Sequence; identical to SEQ ID NO: 2269
  GFR-binding peptide
  MOD_RES (32)..(33): Xaa is C or S

SEQ ID NO: 35512 - protein, 42 aa, Artificial Sequence; identical to SEQ ID NO: 11638
  GFR-binding peptide
  MOD_RES (2)..(4)..(37)..(38): Xaa is C or S
  MOD_RES (15)..(16)..(17)..(18)..(19): Xaa is A or G
  MOD_RES (20)..(21)..(22)..(23): Xaa is A or G or is absent

SEQ ID NO: 35513 - protein, 38 aa, Artificial Sequence; identical to SEQ ID NO: 4227
  GFR-binding peptide
  MOD_RES (1)..(34)..(35): Xaa is C or S
  MOD_RES (12)..(13)..(14)..(15)..(16): Xaa is A or G
  MOD_RES (17)..(18)..(19)..(20): Xaa is A or G or is absent

SEQ ID NO: 35514 - protein, 36 aa, Artificial Sequence; identical to SEQ ID NO: 9780
  GFR-binding peptide
  MOD_RES (2)..(4)..(36): Xaa is C or S

SEQ ID NO: 35515 - protein, 42 aa, Artificial Sequence; identical to SEQ ID NO: 11640
  GFR-binding peptide
  MOD_RES (2)..(36)..(37): Xaa is C or S
  MOD_RES (14)..(15)..(16)..(17)..(18): Xaa is A or G
  MOD_RES (19)..(20)..(21)..(22): Xaa is A or G or is absent

SEQ ID NO: 35516 - protein, 40 aa, Artificial Sequence; identical to SEQ ID NO: 11642
  GFR-binding peptide
  MOD_RES (2)..(4)..(37)..(38): Xaa is C or S
  MOD_RES (15)..(16)..(17)..(18)..(19): Xaa is A or G
  MOD_RES (20)..(21)..(22)..(23): Xaa is A or G or is absent

SEQ ID NO: 35517 - protein, 39 aa, Artificial Sequence; identical to SEQ ID NO: 4229
  GFR-binding peptide
  MOD_RES (1)..(33)..(34): Xaa is C or S

SEQ ID NO: 35518 - protein, 33 aa, Artificial Sequence; identical to SEQ ID NO: 2277
  GFR-binding peptide
  MOD_RES (2)..(2): Xaa is C or S

SEQ ID NO: 35519 - protein, 39 aa, Artificial Sequence; identical to SEQ ID NO: 11644
  GFR-binding peptide
  MOD_RES (33)..(34): Xaa is C or S
  MOD_RES (11)..(12)..(13)..(14)..(15): Xaa is A or G
  MOD_RES (16)..(17)..(18)..(19): Xaa is A or G or is absent

SEQ ID NO: 35520 - protein, 37 aa, Artificial Sequence; identical to SEQ ID NO: 4230
  GFR-binding peptide
  MOD_RES (2)..(4)..(35)..(36): Xaa is C or S

SEQ ID NO: 35521 - protein, 35 aa, Artificial Sequence; identical to SEQ ID NO: 9784
  GFR-binding peptide
  MOD_RES (1)..(33)..(34): Xaa is C or S

SEQ ID NO: 35522 - protein, 34 aa, Artificial Sequence; identical to SEQ ID NO: 9785
  GFR-binding peptide
  MOD_RES (2)..(34): Xaa is C or S

SEQ ID NO: 35523 - protein, 35 aa, Artificial Sequence; identical to SEQ ID NO: 11647
  GFR-binding peptide
  MOD_RES (2)..(2): Xaa is C or S
  MOD_RES (14)..(15)..(16)..(17)..(18): Xaa is A or G
  MOD_RES (19)..(20)..(21)..(22): Xaa is A or G or is absent

SEQ ID NO: 35524 - protein, 34 aa, Artificial Sequence; identical to SEQ ID NO: 11648
  GFR-binding peptide
  MOD_RES (1)..(32)..(33): Xaa is C or S

SEQ ID NO: 35525 - protein, 35 aa, Artificial Sequence; identical to SEQ ID NO: 11649
  GFR-binding peptide
  MOD_RES (1)..(3): Xaa is C or S
  MOD_RES (14)..(15)..(16)..(17)..(18): Xaa is A or G
  MOD_RES (19)..(20)..(21)..(22): Xaa is A or G or is absent

SEQ ID NO: 35526 - protein, 34 aa, Artificial Sequence
  GFR-binding peptide
  MOD_RES (1)..(34): Xaa is C or S
  MOD_RES (12)..(13)..(14)..(15)..(16): Xaa is A or G
  MOD_RES (17)..(18)..(19)..(20): Xaa is A or G or is absent
XSKVIMNSLQEXXXXXXXXXYYLITLPELDQSVX

SEQ ID NO: 35527 - protein, 40 aa, Artificial Sequence; identical to SEQ ID NO: 9786
  GFR-binding peptide
  MOD_RES (2)..(34)..(35): Xaa is C or S

SEQ ID NO: 35528 - protein, 39 aa, Artificial Sequence; identical to SEQ ID NO: 9788
  GFR-binding peptide
  MOD_RES (1)..(3)..(37)..(38): Xaa is C or S
  MOD_RES (15)..(16)..(17)..(18)..(19): Xaa is A or G
  MOD_RES (20)..(21)..(22)..(23): Xaa is A or G or is absent

SEQ ID NO: 35529 - protein, 39 aa, Artificial Sequence; identical to SEQ ID NO: 11650
  GFR-binding peptide
  MOD_RES (2)..(33)..(34): Xaa is C or S

SEQ ID NO: 35530 - protein, 42 aa, Artificial Sequence; identical to SEQ ID NO: 4234
  GFR-binding peptide
  MOD_RES (2)..(4)..(37)..(38): Xaa is C or S
  MOD_RES (15)..(16)..(17)..(18)..(19): Xaa is A or G
  MOD_RES (20)..(21)..(22)..(23): Xaa is A or G or is absent

SEQ ID NO: 35531 - protein, 36 aa, Artificial Sequence; identical to SEQ ID NO: 11652
  GFR-binding peptide
  MOD_RES (31)..(31): Xaa is C or S

SEQ ID NO: 35532 - protein, 35 aa, Artificial Sequence; identical to SEQ ID NO: 11653
  GFR-binding peptide
  MOD_RES (2)..(35): Xaa is C or S
  MOD_RES (13)..(14)..(15)..(16)..(17): Xaa is A or G
  MOD_RES (18)..(19)..(20)..(21): Xaa is A or G or is absent

SEQ ID NO: 35533 - protein, 35 aa, Artificial Sequence; identical to SEQ ID NO: 9789
  GFR-binding peptide
  MOD_RES (1)..(33)..(34): Xaa is C or S

SEQ ID NO: 35534 - protein, 36 aa, Artificial Sequence; identical to SEQ ID NO: 9790
  GFR-binding peptide
  MOD_RES (1)..(35)..(36): Xaa is C or S
  MOD_RES (13)..(14)..(15)..(16)..(17): Xaa is A or G
  MOD_RES (18)..(19)..(20)..(21): Xaa is A or G or is absent

SEQ ID NO: 35535 - protein, 41 aa, Artificial Sequence; identical to SEQ ID NO: 9791
  GFR-binding peptide
  MOD_RES (1)..(3)..(37)..(38): Xaa is C or S
  MOD_RES (15)..(16)..(17)..(18)..(19): Xaa is A or G
  MOD_RES (20)..(21)..(22)..(23): Xaa is A or G or is absent

SEQ ID NO: 35536 - protein, 41 aa, Artificial Sequence; identical to SEQ ID NO: 11655
  GFR-binding peptide
  MOD_RES (2)..(4)..(37)..(38): Xaa is C or S
  MOD_RES (15)..(16)..(17)..(18)..(19): Xaa is A or G
  MOD_RES (20)..(21)..(22)..(23): Xaa is A or G or is absent

SEQ ID NO: 35537 - protein, 35 aa, Artificial Sequence; identical to SEQ ID NO: 2288
  GFR-binding peptide
  MOD_RES (31)..(32): Xaa is C or S

SEQ ID NO: 35538 - protein, 42 aa, Artificial Sequence; identical to SEQ ID NO: 9793
  GFR-binding peptide
  MOD_RES (1)..(3)..(36)..(37): Xaa is C or S
  MOD_RES (14)..(15)..(16)..(17)..(18): Xaa is A or G
  MOD_RES (19)..(20)..(21)..(22): Xaa is A or G or is absent

SEQ ID NO: 35539 - protein, 42 aa, Artificial Sequence; identical to SEQ ID NO: 2293
  GFR-binding peptide
  MOD_RES (2)..(4)..(36)..(37): Xaa is C or S

SEQ ID NO: 35540 - protein, 35 aa, Artificial Sequence; identical to SEQ ID NO: 11657
  GFR-binding peptide
  MOD_RES (1)..(3)..(35): Xaa is C or S

SEQ ID NO: 35541 - protein, 34 aa, Artificial Sequence; identical to SEQ ID NO: 11658
  GFR-binding peptide
  MOD_RES (32)..(33): Xaa is C or S

SEQ ID NO: 35542 - protein, 35 aa, Artificial Sequence; identical to SEQ ID NO: 9796
  GFR-binding peptide
  MOD_RES (1)..(33)..(34): Xaa is C or S

SEQ ID NO: 35543 - protein, 33 aa, Artificial Sequence; identical to SEQ ID NO: 11659
  GFR-binding peptide
  MOD_RES (31)..(32): Xaa is C or S

SEQ ID NO: 35544 - protein, 35 aa, Artificial Sequence; identical to SEQ ID NO: 9797
  GFR-binding peptide
  MOD_RES (2)..(34)..(35): Xaa is C or S

SEQ ID NO: 35545 - protein, 34 aa, Artificial Sequence; identical to SEQ ID NO: 11660
  GFR-binding peptide
  MOD_RES (1)..(32)..(33): Xaa is C or S

SEQ ID NO: 35546 - protein, 33 aa, Artificial Sequence; identical to SEQ ID NO: 9800
  GFR-binding peptide
  MOD_RES (12)..(13)..(14)..(15)..(16): Xaa is A or G
  MOD_RES (17)..(18)..(19)..(20): Xaa is A or G or is absent

SEQ ID NO: 35547 - protein, 39 aa, Artificial Sequence; identical to SEQ ID NO: 2299
  GFR-binding peptide
  MOD_RES (1)..(3)..(35)..(36): Xaa is C or S

SEQ ID NO: 35548 - protein, 35 aa, Artificial Sequence; identical to SEQ ID NO: 4251
  GFR-binding peptide
  MOD_RES (2)..(4)..(35): Xaa is C or S

SEQ ID NO: 35549 - protein, 39 aa, Artificial Sequence; identical to SEQ ID NO: 9803
  GFR-binding peptide
  MOD_RES (1)..(3)..(34)..(35): Xaa is C or S

SEQ ID NO: 35550 - protein, 39 aa, Artificial Sequence; identical to SEQ ID NO: 9805
  GFR-binding peptide
  MOD_RES (1)..(3)..(37): Xaa is C or S
  MOD_RES (15)..(16)..(17)..(18)..(19): Xaa is A or G
  MOD_RES (20)..(21)..(22)..(23): Xaa is A or G or is absent

SEQ ID NO: 35551 - protein, 40 aa, Artificial Sequence; identical to SEQ ID NO: 11662
  GFR-binding peptide
  MOD_RES (1)..(35)..(36): Xaa is C or S
  MOD_RES (13)..(14)..(15)..(16)..(17): Xaa is A or G
  MOD_RES (18)..(19)..(20)..(21): Xaa is A or G or is absent

SEQ ID NO: 35552 - protein, 32 aa, Artificial Sequence; identical to SEQ ID NO: 11663
  GFR-binding peptide
  MOD_RES (1)..(1): Xaa is C or S

SEQ ID NO: 35553 - protein, 37 aa, Artificial Sequence; identical to SEQ ID NO: 9807
  GFR-binding peptide
  MOD_RES (1)..(34)..(35): Xaa is C or S
  MOD_RES (12)..(13)..(14)..(15)..(16): Xaa is A or G
  MOD_RES (17)..(18)..(19)..(20): Xaa is A or G or is absent

SEQ ID NO: 35554 - protein, 36 aa, Artificial Sequence; identical to SEQ ID NO: 9808
  GFR-binding peptide
  MOD_RES (2)..(36): Xaa is C or S
  MOD_RES (14)..(15)..(16)..(17)..(18): Xaa is A or G
  MOD_RES (19)..(20)..(21)..(22): Xaa is A or G or is absent

SEQ ID NO: 35555 - protein, 39 aa, Artificial Sequence; identical to SEQ ID NO: 11664
  GFR-binding peptide
  MOD_RES (2)..(4)..(36)..(37): Xaa is C or S

SEQ ID NO: 35556 - protein, 36 aa, Artificial Sequence
  GFR-binding peptide
  MOD_RES (1)..(32)..(33): Xaa is C or S
XSKVIMNSLQEIKPTKGIYYLITLPELDQSVXXPSA

SEQ ID NO: 35557 - protein, 37 aa, Artificial Sequence; identical to SEQ ID NO: 9809
  GFR-binding peptide
  MOD_RES (32)..(33): Xaa is C or S

SEQ ID NO: 35558 - protein, 38 aa, Artificial Sequence; identical to SEQ ID NO: 11665
  GFR-binding peptide
  MOD_RES (2)..(34)..(35): Xaa is C or S

SEQ ID NO: 35559 - protein, 33 aa, Artificial Sequence; identical to SEQ ID NO: 9811
  GFR-binding peptide
  MOD_RES (2)..(2): Xaa is C or S

SEQ ID NO: 35560 - protein, 33 aa, Artificial Sequence; identical to SEQ ID NO: 11666
  GFR-binding peptide
  MOD_RES (33)..(33): Xaa is C or S
  MOD_RES (11)..(12)..(13)..(14)..(15): Xaa is A or G
  MOD_RES (16)..(17)..(18)..(19): Xaa is A or G or is absent

SEQ ID NO: 35561 - protein, 41 aa, Artificial Sequence; identical to SEQ ID NO: 4256
  GFR-binding peptide
  MOD_RES (2)..(4)..(36)..(37): Xaa is C or S

SEQ ID NO: 35562 - protein, 36 aa, Artificial Sequence; identical to SEQ ID NO: 9813
  GFR-binding peptide
  MOD_RES (33)..(34): Xaa is C or S
  MOD_RES (11)..(12)..(13)..(14)..(15): Xaa is A or G
  MOD_RES (16)..(17)..(18)..(19): Xaa is A or G or is absent

SEQ ID NO: 35563 - protein, 38 aa, Artificial Sequence; identical to SEQ ID NO: 11668
  GFR-binding peptide
  MOD_RES (1)..(35)..(36): Xaa is C or S
  MOD_RES (13)..(14)..(15)..(16)..(17): Xaa is A or G
  MOD_RES (18)..(19)..(20)..(21): Xaa is A or G or is absent

SEQ ID NO: 35564 - protein, 37 aa, Artificial Sequence; identical to SEQ ID NO: 11669
  GFR-binding peptide
  MOD_RES (2)..(4)..(36)..(37): Xaa is C or S

SEQ ID NO: 35565 - protein, 35 aa, Artificial Sequence; identical to SEQ ID NO: 9814
  GFR-binding peptide
  MOD_RES (31)..(32): Xaa is C or S

SEQ ID NO: 35566 - protein, 36 aa, Artificial Sequence; identical to SEQ ID NO: 11670
  GFR-binding peptide
  MOD_RES (1)..(3)..(34)..(35): Xaa is C or S

SEQ ID NO: 35567 - protein, 41 aa, Artificial Sequence; identical to SEQ ID NO: 9815
  GFR-binding peptide
  MOD_RES (1)..(3)..(36)..(37): Xaa is C or S
  MOD_RES (14)..(15)..(16)..(17)..(18): Xaa is A or G
  MOD_RES (19)..(20)..(21)..(22): Xaa is A or G or is absent

SEQ ID NO: 35568 - protein, 43 aa, Artificial Sequence; identical to SEQ ID NO: 11671
  GFR-binding peptide
  MOD_RES (2)..(4)..(38)..(39): Xaa is C or S
  MOD_RES (16)..(17)..(18)..(19)..(20): Xaa is A or G
  MOD_RES (21)..(22)..(23)..(24): Xaa is A or G or is absent

SEQ ID NO: 35569 - protein, 37 aa, Artificial Sequence; identical to SEQ ID NO: 11672
  GFR-binding peptide
  MOD_RES (32)..(32): Xaa is C or S

SEQ ID NO: 35570 - protein, 39 aa, Artificial Sequence; identical to SEQ ID NO: 9817
  GFR-binding peptide
  MOD_RES (1)..(3)..(36)..(37): Xaa is C or S
  MOD_RES (14)..(15)..(16)..(17)..(18): Xaa is A or G
  MOD_RES (19)..(20)..(21)..(22): Xaa is A or G or is absent

SEQ ID NO: 35571 - protein, 32 aa, Artificial Sequence; identical to SEQ ID NO: 11673
  GFR-binding peptide
  MOD_RES (32)..(32): Xaa is C or S

SEQ ID NO: 35572 - protein, 33 aa, Artificial Sequence; identical to SEQ ID NO: 9818
  GFR-binding peptide
  MOD_RES (2)..(2): Xaa is C or S

SEQ ID NO: 35573 - protein, 37 aa, Artificial Sequence; identical to SEQ ID NO: 9819
  GFR-binding peptide
  MOD_RES (1)..(33)..(34): Xaa is C or S

SEQ ID NO: 35574 - protein, 36 aa, Artificial Sequence; identical to SEQ ID NO: 11674
  GFR-binding peptide
  MOD_RES (1)..(3)..(35)..(36): Xaa is C or S

SEQ ID NO: 35575 - protein, 33 aa, Artificial Sequence; identical to SEQ ID NO: 11675
  GFR-binding peptide
  MOD_RES (1)..(33): Xaa is C or S

SEQ ID NO: 35576 - protein, 35 aa, Artificial Sequence; identical to SEQ ID NO: 11676
  GFR-binding peptide
  MOD_RES (34)..(35): Xaa is C or S
  MOD_RES (12)..(13)..(14)..(15)..(16): Xaa is A or G
  MOD_RES (17)..(18)..(19)..(20): Xaa is A or G or is absent

SEQ ID NO: 35577 - protein, 35 aa, Artificial Sequence; identical to SEQ ID NO: 11677
  GFR-binding peptide
  MOD_RES (1)..(33)..(34): Xaa is C or S

SEQ ID NO: 35578 - protein, 39 aa, Artificial Sequence; identical to SEQ ID NO: 11679
  GFR-binding peptide
  MOD_RES (2)..(4)..(37)..(38): Xaa is C or S
  MOD_RES (15)..(16)..(17)..(18)..(19): Xaa is A or G
  MOD_RES (20)..(21)..(22)..(23): Xaa is A or G or is absent

SEQ ID NO: 35579 - protein, 37 aa, Artificial Sequence
  GFR-binding peptide
  MOD_RES (31)..(32): Xaa is C or S
SKVIMNSLQEIKPTKGIYYLITLPELDQSVXXPSASA

SEQ ID NO: 35580 - protein, 37 aa, Artificial Sequence; identical to SEQ ID NO: 11680
  GFR-binding peptide
  MOD_RES (2)..(4)..(37): Xaa is C or S
  MOD_RES (15)..(16)..(17)..(18)..(19): Xaa is A or G
  MOD_RES (20)..(21)..(22)..(23): Xaa is A or G or is absent

SEQ ID NO: 35581 - protein, 40 aa, Artificial Sequence; identical to SEQ ID NO: 11682
  GFR-binding peptide
  MOD_RES (2)..(4)..(36)..(37): Xaa is C or S

SEQ ID NO: 35582 - protein, 37 aa, Artificial Sequence; identical to SEQ ID NO: 11683
  GFR-binding peptide
  MOD_RES (1)..(34)..(35): Xaa is C or S
  MOD_RES (12)..(13)..(14)..(15)..(16): Xaa is A or G
  MOD_RES (17)..(18)..(19)..(20): Xaa is A or G or is absent

SEQ ID NO: 35583 - protein, 32 aa, Artificial Sequence; identical to SEQ ID NO: 2327
  GFR-binding peptide
  MOD_RES (31)..(32): Xaa is C or S

SEQ ID NO: 35584 - protein, 36 aa, Artificial Sequence; identical to SEQ ID NO: 11684
  GFR-binding peptide
  MOD_RES (1)..(3)..(35)..(36): Xaa is C or S

SEQ ID NO: 35585 - protein, 36 aa, Artificial Sequence; identical to SEQ ID NO: 11685
  GFR-binding peptide
  MOD_RES (2)..(35)..(36): Xaa is C or S
  MOD_RES (13)..(14)..(15)..(16)..(17): Xaa is A or G
  MOD_RES (18)..(19)..(20)..(21): Xaa is A or G or is absent

SEQ ID NO: 35586 - protein, 35 aa, Artificial Sequence; identical to SEQ ID NO: 11686
  GFR-binding peptide
  MOD_RES (33)..(34): Xaa is C or S
  MOD_RES (11)..(12)..(13)..(14)..(15): Xaa is A or G
  MOD_RES (16)..(17)..(18)..(19): Xaa is A or G or is absent

SEQ ID NO: 35587 - protein, 36 aa, Artificial Sequence; identical to SEQ ID NO: 9823
  GFR-binding peptide
  MOD_RES (1)..(3): Xaa is C or S
  MOD_RES (15)..(16)..(17)..(18)..(19): Xaa is A or G
  MOD_RES (20)..(21)..(22)..(23): Xaa is A or G or is absent

SEQ ID NO: 35588 - protein, 38 aa, Artificial Sequence; identical to SEQ ID NO: 11687
  GFR-binding peptide
  MOD_RES (2)..(34)..(35): Xaa is C or S

SEQ ID NO: 35589 - protein, 39 aa, Artificial Sequence; identical to SEQ ID NO: 11688
  GFR-binding peptide
  MOD_RES (2)..(33)..(34): Xaa is C or S

SEQ ID NO: 35590 - protein, 41 aa, Artificial Sequence; identical to SEQ ID NO: 11689
  GFR-binding peptide
  MOD_RES (2)..(4)..(38)..(39): Xaa is C or S
  MOD_RES (16)..(17)..(18)..(19)..(20): Xaa is A or G
  MOD_RES (21)..(22)..(23)..(24): Xaa is A or G or is absent

SEQ ID NO: 35591 - protein, 34 aa, Artificial Sequence; identical to SEQ ID NO: 11691
  GFR-binding peptide
  MOD_RES (2)..(34): Xaa is C or S

SEQ ID NO: 35592 - protein, 38 aa, Artificial Sequence; identical to SEQ ID NO: 9824
  GFR-binding peptide
  MOD_RES (2)..(4)..(38): Xaa is C or S
  MOD_RES (16)..(17)..(18)..(19)..(20): Xaa is A or G
  MOD_RES (21)..(22)..(23)..(24): Xaa is A or G or is absent

SEQ ID NO: 35593 - protein, 40 aa, Artificial Sequence; identical to SEQ ID NO: 9825
  GFR-binding peptide
  MOD_RES (1)..(3)..(34)..(35): Xaa is C or S

SEQ ID NO: 35594 - protein, 36 aa, Artificial Sequence; identical to SEQ ID NO: 11693
  GFR-binding peptide
  MOD_RES (2)..(33)..(34): Xaa is C or S

SEQ ID NO: 35595 - protein, 35 aa, Artificial Sequence; identical to SEQ ID NO: 9827
  GFR-binding peptide
  MOD_RES (2)..(4): Xaa is C or S

SEQ ID NO: 35596 - protein, 40 aa, Artificial Sequence
  GFR-binding peptide
  MOD_RES (1)..(3)..(34)..(35): Xaa is C or S
XKXSKVIMNSLQEIKPTKGIYYLITLPELDQSVXXPSASA

SEQ ID NO: 35597 - protein, 36 aa, Artificial Sequence; identical to SEQ ID NO: 11694
  GFR-binding peptide
  MOD_RES (1)..(33)..(34): Xaa is C or S

SEQ ID NO: 35598 - protein, 34 aa, Artificial Sequence; identical to SEQ ID NO: 9829
  GFR-binding peptide
  MOD_RES (1)..(1): Xaa is C or S
  MOD_RES (13)..(14)..(15)..(16)..(17): Xaa is A or G
  MOD_RES (18)..(19)..(20)..(21): Xaa is A or G or is absent

SEQ ID NO: 35599 - protein, 38 aa, Artificial Sequence; identical to SEQ ID NO: 9830
  GFR-binding peptide
  MOD_RES (33)..(34): Xaa is C or S
  MOD_RES (11)..(12)..(13)..(14)..(15): Xaa is A or G
  MOD_RES (16)..(17)..(18)..(19): Xaa is A or G or is absent

SEQ ID NO: 35600 - protein, 34 aa, Artificial Sequence; identical to SEQ ID NO: 4277
  GFR-binding peptide
  MOD_RES (1)..(1): Xaa is C or S
  MOD_RES (13)..(14)..(15)..(16)..(17): Xaa is A or G
  MOD_RES (18)..(19)..(20)..(21): Xaa is A or G or is absent

SEQ ID NO: 35601 - protein, 31 aa, Artificial Sequence; identical to SEQ ID NO: 11698
  GFR-binding peptide
  MOD_RES (31)..(31): Xaa is C or S

SEQ ID NO: 35602 - protein, 31 aa, Artificial Sequence; identical to SEQ ID NO: 9831
  GFR-binding peptide

SEQ ID NO: 35603 - protein, 36 aa, Artificial Sequence; identical to SEQ ID NO: 11699
  GFR-binding peptide
  MOD_RES (2)..(33)..(34): Xaa is C or S

SEQ ID NO: 35604 - protein, 40 aa, Artificial Sequence; identical to SEQ ID NO: 9832
  GFR-binding peptide
  MOD_RES (2)..(36)..(37): Xaa is C or S
  MOD_RES (14)..(15)..(16)..(17)..(18): Xaa is A or G
  MOD_RES (19)..(20)..(21)..(22): Xaa is A or G or is absent

SEQ ID NO: 35605 - protein, 40 aa, Artificial Sequence; identical to SEQ ID NO: 11701
  GFR-binding peptide
  MOD_RES (2)..(4)..(36)..(37): Xaa is C or S

SEQ ID NO: 35606 - protein, 32 aa, Artificial Sequence; identical to SEQ ID NO: 9834
  GFR-binding peptide
  MOD_RES (1)..(1): Xaa is C or S

SEQ ID NO: 35607 - protein, 37 aa, Artificial Sequence; identical to SEQ ID NO: 11702
  GFR-binding peptide
  MOD_RES (1)..(35)..(36): Xaa is C or S
  MOD_RES (13)..(14)..(15)..(16)..(17): Xaa is A or G
  MOD_RES (18)..(19)..(20)..(21): Xaa is A or G or is absent

SEQ ID NO: 35608 - protein, 41 aa, Artificial Sequence; identical to SEQ ID NO: 9835
  GFR-binding peptide
  MOD_RES (2)..(4)..(38)..(39): Xaa is C or S
  MOD_RES (16)..(17)..(18)..(19)..(20): Xaa is A or G
  MOD_RES (21)..(22)..(23)..(24): Xaa is A or G or is absent

SEQ ID NO: 35609 - protein, 39 aa, Artificial Sequence; identical to SEQ ID NO: 11703
  GFR-binding peptide
  MOD_RES (1)..(3)..(37)..(38): Xaa is C or S
  MOD_RES (15)..(16)..(17)..(18)..(19): Xaa is A or G
  MOD_RES (20)..(21)..(22)..(23): Xaa is A or G or is absent

SEQ ID NO: 35610 - protein, 33 aa, Artificial Sequence
  GFR-binding peptide
  MOD_RES (1)..(1): Xaa is C or S
  MOD_RES (12)..(13)..(14)..(15)..(16): Xaa is A or G
  MOD_RES (17)..(18)..(19)..(20): Xaa is A or G or is absent
XSKVIMNSLQEXXXXXXXXXYYLITLPELDQSV

SEQ ID NO: 35611 - protein, 40 aa, Artificial Sequence; identical to SEQ ID NO: 11704
  GFR-binding peptide
  MOD_RES (1)..(3)..(34)..(35): Xaa is C or S

SEQ ID NO: 35612 - protein, 35 aa, Artificial Sequence; identical to SEQ ID NO: 9836
  GFR-binding peptide
  MOD_RES (31)..(32): Xaa is C or S

SEQ ID NO: 35613 - protein, 42 aa, Artificial Sequence; identical to SEQ ID NO: 9838
  GFR-binding peptide
  MOD_RES (2)..(4)..(37)..(38): Xaa is C or S
  MOD_RES (15)..(16)..(17)..(18)..(19): Xaa is A or G
  MOD_RES (20)..(21)..(22)..(23): Xaa is A or G or is absent

SEQ ID NO: 35614 - protein, 36 aa, Artificial Sequence; identical to SEQ ID NO: 9839
  GFR-binding peptide
  MOD_RES (1)..(3)..(36): Xaa is C or S
  MOD_RES (14)..(15)..(16)..(17)..(18): Xaa is A or G
  MOD_RES (19)..(20)..(21)..(22): Xaa is A or G or is absent

SEQ ID NO: 35615 - protein, 35 aa, Artificial Sequence; identical to SEQ ID NO: 11705
  GFR-binding peptide
  MOD_RES (1)..(3)..(35): Xaa is C or S

SEQ ID NO: 35616 - protein, 37 aa, Artificial Sequence; identical to SEQ ID NO: 9841
  GFR-binding peptide
  MOD_RES (1)..(3)..(37): Xaa is C or S
  MOD_RES (15)..(16)..(17)..(18)..(19): Xaa is A or G
  MOD_RES (20)..(21)..(22)..(23): Xaa is A or G or is absent

SEQ ID NO: 35617 - protein, 33 aa, Artificial Sequence; identical to SEQ ID NO: 11706
  GFR-binding peptide
  MOD_RES (1)..(32)..(33): Xaa is C or S

SEQ ID NO: 35618 - protein, 37 aa, Artificial Sequence; identical to SEQ ID NO: 11708
  GFR-binding peptide
  MOD_RES (2)..(34)..(35): Xaa is C or S

SEQ ID NO: 35619 - protein, 35 aa, Artificial Sequence; identical to SEQ ID NO: 11709
  GFR-binding peptide
  MOD_RES (2)..(34)..(35): Xaa is C or S

SEQ ID NO: 35620 - protein, 36 aa, Artificial Sequence; identical to SEQ ID NO: 9842
  GFR-binding peptide
  MOD_RES (1)..(33)..(34): Xaa is C or S

SEQ ID NO: 35621 - protein, 35 aa, Artificial Sequence
  GFR-binding peptide
  MOD_RES (2)..(33)..(34): Xaa is C or S
KXSKVIMNSLQEIKPTKGIYYLITLPELDQSVXXP

SEQ ID NO: 35622 - protein, 37 aa, Artificial Sequence; identical to SEQ ID NO: 9843
  GFR-binding peptide
  MOD_RES (2)..(36)..(37): Xaa is C or S
  MOD_RES (14)..(15)..(16)..(17)..(18): Xaa is A or G
  MOD_RES (19)..(20)..(21)..(22): Xaa is A or G or is absent

SEQ ID NO: 35623 - protein, 42 aa, Artificial Sequence; identical to SEQ ID NO: 11710
  GFR-binding peptide
  MOD_RES (2)..(4)..(36)..(37): Xaa is C or S

SEQ ID NO: 35624 - protein, 38 aa, Artificial Sequence; identical to SEQ ID NO: 2351
  GFR-binding peptide
  MOD_RES (1)..(3)..(35)..(36): Xaa is C or S

SEQ ID NO: 35625 - protein, 39 aa, Artificial Sequence; identical to SEQ ID NO: 9847
  GFR-binding peptide
  MOD_RES (2)..(4)..(38): Xaa is C or S
  MOD_RES (16)..(17)..(18)..(19)..(20): Xaa is A or G
  MOD_RES (21)..(22)..(23)..(24): Xaa is A or G or is absent

SEQ ID NO: 35626 - protein, 34 aa, Artificial Sequence; identical to SEQ ID NO: 11711
  GFR-binding peptide
  MOD_RES (1)..(1): Xaa is C or S
  MOD_RES (13)..(14)..(15)..(16)..(17): Xaa is A or G
  MOD_RES (18)..(19)..(20)..(21): Xaa is A or G or is absent

SEQ ID NO: 35627 - protein, 34 aa, Artificial Sequence; identical to SEQ ID NO: 2356
  GFR-binding peptide
  MOD_RES (1)..(34): Xaa is C or S
  MOD_RES (12)..(13)..(14)..(15)..(16): Xaa is A or G
  MOD_RES (17)..(18)..(19)..(20): Xaa is A or G or is absent

SEQ ID NO: 35628 - protein, 40 aa, Artificial Sequence; identical to SEQ ID NO: 11713
  GFR-binding peptide
  MOD_RES (2)..(4)..(35)..(36): Xaa is C or S

SEQ ID NO: 35629 - protein, 40 aa, Artificial Sequence; identical to SEQ ID NO: 11714
  GFR-binding peptide
  MOD_RES (1)..(3)..(37)..(38): Xaa is C or S
  MOD_RES (15)..(16)..(17)..(18)..(19): Xaa is A or G
  MOD_RES (20)..(21)..(22)..(23): Xaa is A or G or is absent

SEQ ID NO: 35630 - protein, 37 aa, Artificial Sequence; identical to SEQ ID NO: 11715
  GFR-binding peptide
  MOD_RES (34)..(35): Xaa is C or S
  MOD_RES (12)..(13)..(14)..(15)..(16): Xaa is A or G
  MOD_RES (17)..(18)..(19)..(20): Xaa is A or G or is absent

SEQ ID NO: 35631 - protein, 43 aa, Artificial Sequence; identical to SEQ ID NO: 2357
  GFR-binding peptide
  MOD_RES (2)..(4)..(38)..(39): Xaa is C or S
  MOD_RES (16)..(17)..(18)..(19)..(20): Xaa is A or G
  MOD_RES (21)..(22)..(23)..(24): Xaa is A or G or is absent

SEQ ID NO: 35632 - protein, 37 aa, Artificial Sequence; identical to SEQ ID NO: 9850
  GFR-binding peptide
  MOD_RES (2)..(4): Xaa is C or S
  MOD_RES (16)..(17)..(18)..(19)..(20): Xaa is A or G
  MOD_RES (21)..(22)..(23)..(24): Xaa is A or G or is absent

SEQ ID NO: 35633 - protein, 33 aa, Artificial Sequence; identical to SEQ ID NO: 2358
  GFR-binding peptide
  MOD_RES (33)..(33): Xaa is C or S
  MOD_RES (11)..(12)..(13)..(14)..(15): Xaa is A or G
  MOD_RES (16)..(17)..(18)..(19): Xaa is A or G or is absent

SEQ ID NO: 35634 - protein, 38 aa, Artificial Sequence; identical to SEQ ID NO: 2359
  GFR-binding peptide
  MOD_RES (1)..(34)..(35): Xaa is C or S
  MOD_RES (12)..(13)..(14)..(15)..(16): Xaa is A or G
  MOD_RES (17)..(18)..(19)..(20): Xaa is A or G or is absent

SEQ ID NO: 35635 - protein, 41 aa, Artificial Sequence; identical to SEQ ID NO: 9853
  GFR-binding peptide
  MOD_RES (2)..(4)..(36)..(37): Xaa is C or S

SEQ ID NO: 35636 - protein, 39 aa, Artificial Sequence; identical to SEQ ID NO: 11716
  GFR-binding peptide
  MOD_RES (2)..(4)..(36)..(37): Xaa is C or S

SEQ ID NO: 35637 - protein, 37 aa, Artificial Sequence; identical to SEQ ID NO: 2360
  GFR-binding peptide
  MOD_RES (1)..(3)..(37): Xaa is C or S
  MOD_RES (15)..(16)..(17)..(18)..(19): Xaa is A or G
  MOD_RES (20)..(21)..(22)..(23): Xaa is A or G or is absent

SEQ ID NO: 35638 - protein, 35 aa, Artificial Sequence; identical to SEQ ID NO: 11717
  GFR-binding peptide
  MOD_RES (34)..(35): Xaa is C or S
  MOD_RES (12)..(13)..(14)..(15)..(16): Xaa is A or G
  MOD_RES (17)..(18)..(19)..(20): Xaa is A or G or is absent

SEQ ID NO: 35639 - protein, 38 aa, Artificial Sequence; identical to SEQ ID NO: 9855
  GFR-binding peptide
  MOD_RES (2)..(33)..(34): Xaa is C or S

SEQ ID NO: 35640 - protein, 36 aa, Artificial Sequence; identical to SEQ ID NO: 11718
  GFR-binding peptide
  MOD_RES (1)..(3)..(36): Xaa is C or S
  MOD_RES (14)..(15)..(16)..(17)..(18): Xaa is A or G
  MOD_RES (19)..(20)..(21)..(22): Xaa is A or G or is absent

SEQ ID NO: 35641 - protein, 39 aa, Artificial Sequence; identical to SEQ ID NO: 2363
  GFR-binding peptide
  MOD_RES (33)..(34): Xaa is C or S
  MOD_RES (11)..(12)..(13)..(14)..(15): Xaa is A or G
  MOD_RES (16)..(17)..(18)..(19): Xaa is A or G or is absent

SEQ ID NO: 35642 - protein, 40 aa, Artificial Sequence; identical to SEQ ID NO: 9858
  GFR-binding peptide
  MOD_RES (1)..(35)..(36): Xaa is C or S
  MOD_RES (13)..(14)..(15)..(16)..(17): Xaa is A or G
  MOD_RES (18)..(19)..(20)..(21): Xaa is A or G or is absent

SEQ ID NO: 35643 - protein, 38 aa, Artificial Sequence; identical to SEQ ID NO: 4294
  GFR-binding peptide
  MOD_RES (33)..(34): Xaa is C or S
  MOD_RES (11)..(12)..(13)..(14)..(15): Xaa is A or G
  MOD_RES (16)..(17)..(18)..(19): Xaa is A or G or is absent

SEQ ID NO: 35644 - protein, 33 aa, Artificial Sequence; identical to SEQ ID NO: 4295
  GFR-binding peptide
  MOD_RES (2)..(33): Xaa is C or S

SEQ ID NO: 35645 - protein, 32 aa, Artificial Sequence; identical to SEQ ID NO: 9860
  GFR-binding peptide
  MOD_RES (31)..(32): Xaa is C or S

SEQ ID NO: 35646 - protein, 39 aa, Artificial Sequence; identical to SEQ ID NO: 11721
  GFR-binding peptide
  MOD_RES (2)..(36)..(37): Xaa is C or S
  MOD_RES (14)..(15)..(16)..(17)..(18): Xaa is A or G
  MOD_RES (19)..(20)..(21)..(22): Xaa is A or G or is absent

SEQ ID NO: 35647 - protein, 40 aa, Artificial Sequence; identical to SEQ ID NO: 9862
  GFR-binding peptide
  MOD_RES (2)..(4)..(35)..(36): Xaa is C or S

SEQ ID NO: 35648 - protein, 39 aa, Artificial Sequence; identical to SEQ ID NO: 4297
  GFR-binding peptide
  MOD_RES (2)..(4)..(38)..(39): Xaa is C or S
  MOD_RES (16)..(17)..(18)..(19)..(20): Xaa is A or G
  MOD_RES (21)..(22)..(23)..(24): Xaa is A or G or is absent

SEQ ID NO: 35649 - protein, 41 aa, Artificial Sequence; identical to SEQ ID NO: 11723
  GFR-binding peptide
  MOD_RES (1)..(3)..(36)..(37): Xaa is C or S
  MOD_RES (14)..(15)..(16)..(17)..(18): Xaa is A or G
  MOD_RES (19)..(20)..(21)..(22): Xaa is A or G or is absent

SEQ ID NO: 35650 - protein, 33 aa, Artificial Sequence; identical to SEQ ID NO: 4298
  GFR-binding peptide
  MOD_RES (2)..(33): Xaa is C or S

SEQ ID NO: 35651 - protein, 37 aa, Artificial Sequence; identical to SEQ ID NO: 4299
  GFR-binding peptide
  MOD_RES (2)..(36)..(37): Xaa is C or S
  MOD_RES (14)..(15)..(16)..(17)..(18): Xaa is A or G
  MOD_RES (19)..(20)..(21)..(22): Xaa is A or G or is absent

SEQ ID NO: 35652 - protein, 42 aa, Artificial Sequence; identical to SEQ ID NO: 9864
  GFR-binding peptide
  MOD_RES (2)..(4)..(38): Xaa is C or S
  MOD_RES (16)..(17)..(18)..(19)..(20): Xaa is A or G
  MOD_RES (21)..(22)..(23)..(24): Xaa is A or G or is absent

SEQ ID NO: 35653 - protein, 36 aa, Artificial Sequence; identical to SEQ ID NO: 9865
  GFR-binding peptide
  MOD_RES (1)..(34)..(35): Xaa is C or S
  MOD_RES (12)..(13)..(14)..(15)..(16): Xaa is A or G
  MOD_RES (17)..(18)..(19)..(20): Xaa is A or G or is absent

SEQ ID NO: 35654 - protein, 32 aa, Artificial Sequence; identical to SEQ ID NO: 9866
  GFR-binding peptide
  MOD_RES (32)..(32): Xaa is C or S

SEQ ID NO: 35655 - protein, 39 aa, Artificial Sequence; identical to SEQ ID NO: 9867
  GFR-binding peptide
  MOD_RES (1)..(3)..(35)..(36): Xaa is C or S

SEQ ID NO: 35656 - protein, 39 aa, Artificial Sequence; identical to SEQ ID NO: 11728
  GFR-binding peptide
  MOD_RES (2)..(34)..(35): Xaa is C or S

SEQ ID NO: 35657 - protein, 33 aa, Artificial Sequence; identical to SEQ ID NO: 11729
  GFR-binding peptide
  MOD_RES (12)..(13)..(14)..(15)..(16): Xaa is A or G
  MOD_RES (17)..(18)..(19)..(20): Xaa is A or G or is absent

SEQ ID NO: 35658 - protein, 40 aa, Artificial Sequence; identical to SEQ ID NO: 4305
  GFR-binding peptide
  MOD_RES (2)..(4)..(36)..(37): Xaa is C or S

SEQ ID NO: 35659 - protein, 36 aa, Artificial Sequence; identical to SEQ ID NO: 11732
  GFR-binding peptide
  MOD_RES (1)..(3)..(35)..(36): Xaa is C or S

SEQ ID NO: 35660 - protein, 37 aa, Artificial Sequence; identical to SEQ ID NO: 11733
  GFR-binding peptide
  MOD_RES (1)..(3)..(37): Xaa is C or S
  MOD_RES (15)..(16)..(17)..(18)..(19): Xaa is A or G
  MOD_RES (20)..(21)..(22)..(23): Xaa is A or G or is absent

SEQ ID NO: 35661 - protein, 32 aa, Artificial Sequence; identical to SEQ ID NO: 4308
  GFR-binding peptide
  MOD_RES (31)..(32): Xaa is C or S

SEQ ID NO: 35662 - protein, 38 aa, Artificial Sequence; identical to SEQ ID NO: 9871
  GFR-binding peptide
  MOD_RES (1)..(35): Xaa is C or S
  MOD_RES (13)..(14)..(15)..(16)..(17): Xaa is A or G
  MOD_RES (18)..(19)..(20)..(21): Xaa is A or G or is absent

SEQ ID NO: 35663 - protein, 37 aa, Artificial Sequence; identical to SEQ ID NO: 11736
  GFR-binding peptide
  MOD_RES (33)..(34): Xaa is C or S
  MOD_RES (11)..(12)..(13)..(14)..(15): Xaa is A or G
  MOD_RES (16)..(17)..(18)..(19): Xaa is A or G or is absent

SEQ ID NO: 35664 - protein, 41 aa, Artificial Sequence; identical to SEQ ID NO: 11737
  GFR-binding peptide
  MOD_RES (2)..(4)..(38)..(39): Xaa is C or S
  MOD_RES (16)..(17)..(18)..(19)..(20): Xaa is A or G
  MOD_RES (21)..(22)..(23)..(24): Xaa is A or G or is absent

SEQ ID NO: 35665 - protein, 32 aa, Artificial Sequence; identical to SEQ ID NO: 4313
  GFR-binding peptide
  MOD_RES (1)..(1): Xaa is C or S

SEQ ID NO: 35666 - protein, 43 aa, Artificial Sequence; identical to SEQ ID NO: 9872
  GFR-binding peptide
  MOD_RES (2)..(4)..(37)..(38): Xaa is C or S
  MOD_RES (15)..(16)..(17)..(18)..(19): Xaa is A or G
  MOD_RES (20)..(21)..(22)..(23): Xaa is A or G or is absent

SEQ ID NO: 35667 - protein, 31 aa, Artificial Sequence; identical to SEQ ID NO: 9874
  GFR-binding peptide
  MOD_RES (31)..(31): Xaa is C or S

SEQ ID NO: 35668 - protein, 37 aa, Artificial Sequence; identical to SEQ ID NO: 11740
  GFR-binding peptide
  MOD_RES (1)..(34)..(35): Xaa is C or S
  MOD_RES (12)..(13)..(14)..(15)..(16): Xaa is A or G
  MOD_RES (17)..(18)..(19)..(20): Xaa is A or G or is absent

SEQ ID NO: 35669 - protein, 31 aa, Artificial Sequence; identical to SEQ ID NO: 9875
  GFR-binding peptide
  MOD_RES (31)..(31): Xaa is C or S

SEQ ID NO: 35670 - protein, 41 aa, Artificial Sequence; identical to SEQ ID NO: 9876
  GFR-binding peptide
  MOD_RES (1)..(3)..(37)..(38): Xaa is C or S
  MOD_RES (15)..(16)..(17)..(18)..(19): Xaa is A or G
  MOD_RES (20)..(21)..(22)..(23): Xaa is A or G or is absent

SEQ ID NO: 35671 - protein, 36 aa, Artificial Sequence; identical to SEQ ID NO: 11741
  GFR-binding peptide
  MOD_RES (2)..(33)..(34): Xaa is C or S

SEQ ID NO: 35672 - protein, 35 aa, Artificial Sequence; identical to SEQ ID NO: 2390
  GFR-binding peptide
  MOD_RES (1)..(32)..(33): Xaa is C or S

SEQ ID NO: 35673 - protein, 32 aa, Artificial Sequence; identical to SEQ ID NO: 9879
  GFR-binding peptide
  MOD_RES (31)..(32): Xaa is C or S

SEQ ID NO: 35674 - protein, 41 aa, Artificial Sequence; identical to SEQ ID NO: 2394
  GFR-binding peptide
  MOD_RES (2)..(36)..(37): Xaa is C or S
  MOD_RES (14)..(15)..(16)..(17)..(18): Xaa is A or G
  MOD_RES (19)..(20)..(21)..(22): Xaa is A or G or is absent

SEQ ID NO: 35675 - protein, 38 aa, Artificial Sequence; identical to SEQ ID NO: 9881
  GFR-binding peptide
  MOD_RES (2)..(4)..(37)..(38): Xaa is C or S
  MOD_RES (15)..(16)..(17)..(18)..(19): Xaa is A or G
  MOD_RES (20)..(21)..(22)..(23): Xaa is A or G or is absent

SEQ ID NO: 35676 - protein, 39 aa, Artificial Sequence; identical to SEQ ID NO: 9882
  GFR-binding peptide
  MOD_RES (33)..(33): Xaa is C or S
  MOD_RES (11)..(12)..(13)..(14)..(15): Xaa is A or G
  MOD_RES (16)..(17)..(18)..(19): Xaa is A or G or is absent

SEQ ID NO: 35677 - protein, 39 aa, Artificial Sequence; identical to SEQ ID NO: 9883
  GFR-binding peptide
  MOD_RES (1)..(3)..(36)..(37): Xaa is C or S
  MOD_RES (14)..(15)..(16)..(17)..(18): Xaa is A or G
  MOD_RES (19)..(20)..(21)..(22): Xaa is A or G or is absent

SEQ ID NO: 35678 - protein, 35 aa, Artificial Sequence; identical to SEQ ID NO: 9884
  GFR-binding peptide
  MOD_RES (33)..(34): Xaa is C or S
  MOD_RES (11)..(12)..(13)..(14)..(15): Xaa is A or G
  MOD_RES (16)..(17)..(18)..(19): Xaa is A or G or is absent

SEQ ID NO: 35679 - protein, 37 aa, Artificial Sequence; identical to SEQ ID NO: 9885
  GFR-binding peptide
  MOD_RES (34)..(35): Xaa is C or S
  MOD_RES (12)..(13)..(14)..(15)..(16): Xaa is A or G
  MOD_RES (17)..(18)..(19)..(20): Xaa is A or G or is absent

SEQ ID NO: 35680 - protein, 34 aa, Artificial Sequence; identical to SEQ ID NO: 9886
  GFR-binding peptide
  MOD_RES (31)..(31): Xaa is C or S

SEQ ID NO: 35681 - protein, 44 aa, Artificial Sequence; identical to SEQ ID NO: 11742
  GFR-binding peptide
  MOD_RES (2)..(4)..(38)..(39): Xaa is C or S
  MOD_RES (16)..(17)..(18)..(19)..(20): Xaa is A or G
  MOD_RES (21)..(22)..(23)..(24): Xaa is A or G or is absent

SEQ ID NO: 35682 - protein, 44 aa, Artificial Sequence; identical to SEQ ID NO: 9887
  GFR-binding peptide
  MOD_RES (2)..(4)..(38)..(39): Xaa is C or S
  MOD_RES (16)..(17)..(18)..(19)..(20): Xaa is A or G
  MOD_RES (21)..(22)..(23)..(24): Xaa is A or G or is absent

SEQ ID NO: 35683 - protein, 36 aa, Artificial Sequence; identical to SEQ ID NO: 2398
  GFR-binding peptide
  MOD_RES (1)..(34)..(35): Xaa is C or S
  MOD_RES (12)..(13)..(14)..(15)..(16): Xaa is A or G
  MOD_RES (17)..(18)..(19)..(20): Xaa is A or G or is absent

SEQ ID NO: 35684 - protein, 39 aa, Artificial Sequence; identical to SEQ ID NO: 9890
  GFR-binding peptide
  MOD_RES (34)..(35): Xaa is C or S
  MOD_RES (12)..(13)..(14)..(15)..(16): Xaa is A or G
  MOD_RES (17)..(18)..(19)..(20): Xaa is A or G or is absent

SEQ ID NO: 35685 - protein, 42 aa, Artificial Sequence; identical to SEQ ID NO: 9891
  GFR-binding peptide
  MOD_RES (1)..(3)..(37): Xaa is C or S
  MOD_RES (15)..(16)..(17)..(18)..(19): Xaa is A or G
  MOD_RES (20)..(21)..(22)..(23): Xaa is A or G or is absent

SEQ ID NO: 35686 - protein, 33 aa, Artificial Sequence; identical to SEQ ID NO: 11744
  GFR-binding peptide
  MOD_RES (2)..(2): Xaa is C or S

SEQ ID NO: 35687 - protein, 39 aa, Artificial Sequence; identical to SEQ ID NO: 9892
  GFR-binding peptide
  MOD_RES (2)..(4)..(37)..(38): Xaa is C or S
  MOD_RES (15)..(16)..(17)..(18)..(19): Xaa is A or G
  MOD_RES (20)..(21)..(22)..(23): Xaa is A or G or is absent

SEQ ID NO: 35688 - protein, 41 aa, Artificial Sequence; identical to SEQ ID NO: 9893
  GFR-binding peptide
  MOD_RES (1)..(3)..(37)..(38): Xaa is C or S
  MOD_RES (15)..(16)..(17)..(18)..(19): Xaa is A or G
  MOD_RES (20)..(21)..(22)..(23): Xaa is A or G or is absent

SEQ ID NO: 35689 - protein, 37 aa, Artificial Sequence; identical to SEQ ID NO: 9894
  GFR-binding peptide
  MOD_RES (2)..(4)..(37): Xaa is C or S
  MOD_RES (15)..(16)..(17)..(18)..(19): Xaa is A or G
  MOD_RES (20)..(21)..(22)..(23): Xaa is A or G or is absent

SEQ ID NO: 35690 - protein, 38 aa, Artificial Sequence; identical to SEQ ID NO: 11745
  GFR-binding peptide
  MOD_RES (2)..(4)..(38): Xaa is C or S
  MOD_RES (16)..(17)..(18)..(19)..(20): Xaa is A or G
  MOD_RES (21)..(22)..(23)..(24): Xaa is A or G or is absent

SEQ ID NO: 35691 - protein, 39 aa, Artificial Sequence; identical to SEQ ID NO: 9896
  GFR-binding peptide
  MOD_RES (1)..(35)..(36): Xaa is C or S
  MOD_RES (13)..(14)..(15)..(16)..(17): Xaa is A or G
  MOD_RES (18)..(19)..(20)..(21): Xaa is A or G or is absent

SEQ ID NO: 35692 - protein, 38 aa, Artificial Sequence; identical to SEQ ID NO: 11746
  GFR-binding peptide
  MOD_RES (1)..(35)..(36): Xaa is C or S
  MOD_RES (13)..(14)..(15)..(16)..(17): Xaa is A or G
  MOD_RES (18)..(19)..(20)..(21): Xaa is A or G or is absent

SEQ ID NO: 35693 - protein, 38 aa, Artificial Sequence; identical to SEQ ID NO: 4329
  GFR-binding peptide
  MOD_RES (1)..(33)..(34): Xaa is C or S

SEQ ID NO: 35694 - protein, 35 aa, Artificial Sequence; identical to SEQ ID NO: 4331
  GFR-binding peptide
  MOD_RES (34)..(35): Xaa is C or S
  MOD_RES (12)..(13)..(14)..(15)..(16): Xaa is A or G
  MOD_RES (17)..(18)..(19)..(20): Xaa is A or G or is absent

SEQ ID NO: 35695 - protein, 36 aa, Artificial Sequence; identical to SEQ ID NO: 9897
  GFR-binding peptide
  MOD_RES (33)..(34): Xaa is C or S
  MOD_RES (11)..(12)..(13)..(14)..(15): Xaa is A or G
  MOD_RES (16)..(17)..(18)..(19): Xaa is A or G or is absent

SEQ ID NO: 35696 - protein, 38 aa, Artificial Sequence; identical to SEQ ID NO: 11750
  GFR-binding peptide
  MOD_RES (33)..(34): Xaa is C or S
  MOD_RES (11)..(12)..(13)..(14)..(15): Xaa is A or G
  MOD_RES (16)..(17)..(18)..(19): Xaa is A or G or is absent

SEQ ID NO: 35697 - protein, 38 aa, Artificial Sequence; identical to SEQ ID NO: 9898
  GFR-binding peptide
  MOD_RES (1)..(3)..(37)..(38): Xaa is C or S
  MOD_RES (15)..(16)..(17)..(18)..(19): Xaa is A or G
  MOD_RES (20)..(21)..(22)..(23): Xaa is A or G or is absent

SEQ ID NO: 35698 - protein, 39 aa, Artificial Sequence; identical to SEQ ID NO: 9899
  GFR-binding peptide
  MOD_RES (2)..(34): Xaa is C or S

SEQ ID NO: 35699 - protein, 33 aa, Artificial Sequence; identical to SEQ ID NO: 4335
  GFR-binding peptide
  MOD_RES (1)..(1): Xaa is C or S
  MOD_RES (12)..(13)..(14)..(15)..(16): Xaa is A or G
  MOD_RES (17)..(18)..(19)..(20): Xaa is A or G or is absent

SEQ ID NO: 35700 - protein, 37 aa, Artificial Sequence; identical to SEQ ID NO: 11752
  GFR-binding peptide
  MOD_RES (2)..(34)..(35): Xaa is C or S

SEQ ID NO: 35701 - protein, 39 aa, Artificial Sequence; identical to SEQ ID NO: 2406
  GFR-binding peptide
  MOD_RES (2)..(4)..(38)..(39): Xaa is C or S
  MOD_RES (16)..(17)..(18)..(19)..(20): Xaa is A or G
  MOD_RES (21)..(22)..(23)..(24): Xaa is A or G or is absent

SEQ ID NO: 35702 - protein, 34 aa, Artificial Sequence; identical to SEQ ID NO: 4338
  GFR-binding peptide
  MOD_RES (1)..(34): Xaa is C or S
  MOD_RES (12)..(13)..(14)..(15)..(16): Xaa is A or G
  MOD_RES (17)..(18)..(19)..(20): Xaa is A or G or is absent

SEQ ID NO: 35703 - protein, 40 aa, Artificial Sequence; identical to SEQ ID NO: 11755
  GFR-binding peptide
  MOD_RES (2)..(35)..(36): Xaa is C or S
  MOD_RES (13)..(14)..(15)..(16)..(17): Xaa is A or G
  MOD_RES (18)..(19)..(20)..(21): Xaa is A or G or is absent

SEQ ID NO: 35704 - protein, 37 aa, Artificial Sequence; identical to SEQ ID NO: 9901
  GFR-binding peptide
  MOD_RES (33)..(34): Xaa is C or S
  MOD_RES (11)..(12)..(13)..(14)..(15): Xaa is A or G
  MOD_RES (16)..(17)..(18)..(19): Xaa is A or G or is absent

SEQ ID NO: 35705 - protein, 38 aa, Artificial Sequence; identical to SEQ ID NO: 2407
  GFR-binding peptide
  MOD_RES (33)..(34): Xaa is C or S
  MOD_RES (11)..(12)..(13)..(14)..(15): Xaa is A or G
  MOD_RES (16)..(17)..(18)..(19): Xaa is A or G or is absent

SEQ ID NO: 35706 - protein, 41 aa, Artificial Sequence; identical to SEQ ID NO: 9904
  GFR-binding peptide
  MOD_RES (2)..(35)..(36): Xaa is C or S
  MOD_RES (13)..(14)..(15)..(16)..(17): Xaa is A or G
  MOD_RES (18)..(19)..(20)..(21): Xaa is A or G or is absent

SEQ ID NO: 35707 - protein, 35 aa, Artificial Sequence; identical to SEQ ID NO: 9907
  GFR-binding peptide
  MOD_RES (1)..(3)..(34)..(35): Xaa is C or S

SEQ ID NO: 35708 - protein, 38 aa, Artificial Sequence; identical to SEQ ID NO: 9908
  GFR-binding peptide
  MOD_RES (2)..(4)..(36)..(37): Xaa is C or S

SEQ ID NO: 35709 - protein, 37 aa, Artificial Sequence; identical to SEQ ID NO: 11756
  GFR-binding peptide
  MOD_RES (1)..(35)..(36): Xaa is C or S
  MOD_RES (13)..(14)..(15)..(16)..(17): Xaa is A or G
  MOD_RES (18)..(19)..(20)..(21): Xaa is A or G or is absent

SEQ ID NO: 35710 - protein, 42 aa, Artificial Sequence; identical to SEQ ID NO: 11757
  GFR-binding peptide
  MOD_RES (1)..(3)..(36)..(37): Xaa is C or S
  MOD_RES (14)..(15)..(16)..(17)..(18): Xaa is A or G
  MOD_RES (19)..(20)..(21)..(22): Xaa is A or G or is absent

SEQ ID NO: 35711 - protein, 35 aa, Artificial Sequence; identical to SEQ ID NO: 9909
  GFR-binding peptide
  MOD_RES (1)..(3): Xaa is C or S
  MOD_RES (14)..(15)..(16)..(17)..(18): Xaa is A or G
  MOD_RES (19)..(20)..(21)..(22): Xaa is A or G or is absent

SEQ ID NO: 35712 - protein, 43 aa, Artificial Sequence; identical to SEQ ID NO: 11758
  GFR-binding peptide
  MOD_RES (2)..(4)..(37)..(38): Xaa is C or S
  MOD_RES (15)..(16)..(17)..(18)..(19): Xaa is A or G
  MOD_RES (20)..(21)..(22)..(23): Xaa is A or G or is absent

SEQ ID NO: 35713 - protein, 34 aa, Artificial Sequence; identical to SEQ ID NO: 9910
  GFR-binding peptide
  MOD_RES (32)..(33): Xaa is C or S

SEQ ID NO: 35714 - protein, 40 aa, Artificial Sequence; identical to SEQ ID NO: 9911
  GFR-binding peptide
  MOD_RES (2)..(34)..(35): Xaa is C or S

SEQ ID NO: 35715 - protein, 38 aa, Artificial Sequence; identical to SEQ ID NO: 11760
  GFR-binding peptide
  MOD_RES (2)..(36)..(37): Xaa is C or S
  MOD_RES (14)..(15)..(16)..(17)..(18): Xaa is A or G
  MOD_RES (19)..(20)..(21)..(22): Xaa is A or G or is absent

SEQ ID NO: 35716 - protein, 38 aa, Artificial Sequence; identical to SEQ ID NO: 9912
  GFR-binding peptide
  MOD_RES (2)..(4)..(37)..(38): Xaa is C or S
  MOD_RES (15)..(16)..(17)..(18)..(19): Xaa is A or G
  MOD_RES (20)..(21)..(22)..(23): Xaa is A or G or is absent

SEQ ID NO: 35717 - protein, 36 aa, Artificial Sequence; identical to SEQ ID NO: 2418
  GFR-binding peptide
  MOD_RES (1)..(32)..(33): Xaa is C or S

SEQ ID NO: 35718 - protein, 32 aa, Artificial Sequence; identical to SEQ ID NO: 11761
  GFR-binding peptide
  MOD_RES (31)..(32): Xaa is C or S

SEQ ID NO: 35719 - protein, 33 aa, Artificial Sequence; identical to SEQ ID NO: 4350
  GFR-binding peptide
  MOD_RES (33)..(33): Xaa is C or S
  MOD_RES (11)..(12)..(13)..(14)..(15): Xaa is A or G
  MOD_RES (16)..(17)..(18)..(19): Xaa is A or G or is absent

SEQ ID NO: 35720 - protein, 36 aa, Artificial Sequence; identical to SEQ ID NO: 11764
  GFR-binding peptide
  MOD_RES (2)..(34)..(35): Xaa is C or S

SEQ ID NO: 35721 - protein, 34 aa, Artificial Sequence; identical to SEQ ID NO: 4351
  GFR-binding peptide
  MOD_RES (1)..(32)..(33): Xaa is C or S

SEQ ID NO: 35722 - protein, 34 aa, Artificial Sequence; identical to SEQ ID NO: 9914
  GFR-binding peptide
  MOD_RES (1)..(3): Xaa is C or S

SEQ ID NO: 35723 - protein, 37 aa, Artificial Sequence; identical to SEQ ID NO: 11766
  GFR-binding peptide
  MOD_RES (1)..(35)..(36): Xaa is C or S
  MOD_RES (13)..(14)..(15)..(16)..(17): Xaa is A or G
  MOD_RES (18)..(19)..(20)..(21): Xaa is A or G or is absent

SEQ ID NO: 35724 - protein, 34 aa, Artificial Sequence; identical to SEQ ID NO: 11767
  GFR-binding peptide
  MOD_RES (1)..(3): Xaa is C or S

SEQ ID NO: 35725 - protein, 41 aa, Artificial Sequence; identical to SEQ ID NO: 9916
  GFR-binding peptide
  MOD_RES (1)..(35): Xaa is C or S
  MOD_RES (13)..(14)..(15)..(16)..(17): Xaa is A or G
  MOD_RES (18)..(19)..(20)..(21): Xaa is A or G or is absent

SEQ ID NO: 35726 - protein, 39 aa, Artificial Sequence; identical to SEQ ID NO: 11768
  GFR-binding peptide
  MOD_RES (1)..(3)..(36)..(37): Xaa is C or S
  MOD_RES (14)..(15)..(16)..(17)..(18): Xaa is A or G
  MOD_RES (19)..(20)..(21)..(22): Xaa is A or G or is absent

SEQ ID NO: 35727 - protein, 37 aa, Artificial Sequence; identical to SEQ ID NO: 11769
  GFR-binding peptide
  MOD_RES (31)..(32): Xaa is C or S

SEQ ID NO: 35728 - protein, 36 aa, Artificial Sequence; identical to SEQ ID NO: 11770
  GFR-binding peptide
  MOD_RES (1)..(3): Xaa is C or S
  MOD_RES (15)..(16)..(17)..(18)..(19): Xaa is A or G
  MOD_RES (20)..(21)..(22)..(23): Xaa is A or G or is absent

SEQ ID NO: 35729 - protein, 33 aa, Artificial Sequence; identical to SEQ ID NO: 11772
  GFR-binding peptide
  MOD_RES (31)..(32): Xaa is C or S

SEQ ID NO: 35730 - protein, 41 aa, Artificial Sequence; identical to SEQ ID NO: 11773
  GFR-binding peptide
  MOD_RES (2)..(36)..(37): Xaa is C or S
  MOD_RES (14)..(15)..(16)..(17)..(18): Xaa is A or G
  MOD_RES (19)..(20)..(21)..(22): Xaa is A or G or is absent

SEQ ID NO: 35731 - protein, 35 aa, Artificial Sequence; identical to SEQ ID NO: 2426
  GFR-binding peptide
  MOD_RES (2)..(2): Xaa is C or S
  MOD_RES (14)..(15)..(16)..(17)..(18): Xaa is A or G
  MOD_RES (19)..(20)..(21)..(22): Xaa is A or G or is absent

SEQ ID NO: 35732 - protein, 30 aa, Artificial Sequence; identical to SEQ ID NO: 9919
  GFR-binding peptide

SEQ ID NO: 35733 - protein, 40 aa, Artificial Sequence; identical to SEQ ID NO: 9920
  GFR-binding peptide
  MOD_RES (34)..(35): Xaa is C or S
  MOD_RES (12)..(13)..(14)..(15)..(16): Xaa is A or G
  MOD_RES (17)..(18)..(19)..(20): Xaa is A or G or is absent

SEQ ID NO: 35734 - protein, 37 aa, Artificial Sequence; identical to SEQ ID NO: 4357
  GFR-binding peptide
  MOD_RES (2)..(4): Xaa is C or S
  MOD_RES (16)..(17)..(18)..(19)..(20): Xaa is A or G
  MOD_RES (21)..(22)..(23)..(24): Xaa is A or G or is absent

SEQ ID NO: 35735 - protein, 38 aa, Artificial Sequence; identical to SEQ ID NO: 11776
  GFR-binding peptide
  MOD_RES (2)..(4)..(35)..(36): Xaa is C or S

SEQ ID NO: 35736 - protein, 37 aa, Artificial Sequence; identical to SEQ ID NO: 9921
  GFR-binding peptide
  MOD_RES (1)..(3)..(34)..(35): Xaa is C or S

SEQ ID NO: 35737 - protein, 42 aa, Artificial Sequence; identical to SEQ ID NO: 4359
  GFR-binding peptide
  MOD_RES (2)..(4)..(38)..(39): Xaa is C or S
  MOD_RES (16)..(17)..(18)..(19)..(20): Xaa is A or G
  MOD_RES (21)..(22)..(23)..(24): Xaa is A or G or is absent

SEQ ID NO: 35738 - protein, 42 aa, Artificial Sequence; identical to SEQ ID NO: 4360
  GFR-binding peptide
  MOD_RES (2)..(36)..(37): Xaa is C or S
  MOD_RES (14)..(15)..(16)..(17)..(18): Xaa is A or G
  MOD_RES (19)..(20)..(21)..(22): Xaa is A or G or is absent

SEQ ID NO: 35739 - protein, 40 aa, Artificial Sequence
  GFR-binding peptide
  MOD_RES (2)..(4)..(37)..(38): Xaa is C or S
  MOD_RES (15)..(16)..(17)..(18)..(19): Xaa is A or G
  MOD_RES (20)..(21)..(22)..(23): Xaa is A or G or is absent
SXKXSKVIMNSLQEXXXXXXXXXYYLITLPELDQSVXXPS

SEQ ID NO: 35740 - protein, 40 aa, Artificial Sequence; identical to SEQ ID NO: 11779
  GFR-binding peptide
  MOD_RES (34)..(35): Xaa is C or S
  MOD_RES (12)..(13)..(14)..(15)..(16): Xaa is A or G
  MOD_RES (17)..(18)..(19)..(20): Xaa is A or G or is absent

SEQ ID NO: 35741 - protein, 32 aa, Artificial Sequence; identical to SEQ ID NO: 9922
  GFR-binding peptide
  MOD_RES (11)..(12)..(13)..(14)..(15): Xaa is A or G
  MOD_RES (16)..(17)..(18)..(19): Xaa is A or G or is absent

SEQ ID NO: 35742 - protein, 38 aa, Artificial Sequence; identical to SEQ ID NO: 9923
  GFR-binding peptide
  MOD_RES (1)..(35)..(36): Xaa is C or S
  MOD_RES (13)..(14)..(15)..(16)..(17): Xaa is A or G
  MOD_RES (18)..(19)..(20)..(21): Xaa is A or G or is absent

SEQ ID NO: 35743 - protein, 39 aa, Artificial Sequence
  GFR-binding peptide
  MOD_RES (2)..(35)..(36): Xaa is C or S
  MOD_RES (13)..(14)..(15)..(16)..(17): Xaa is A or G
  MOD_RES (18)..(19)..(20)..(21): Xaa is A or G or is absent
KXSKVIMNSLQEXXXXXXXXXYYLITLPELDQSVXXPSA

SEQ ID NO: 35744 - protein, 38 aa, Artificial Sequence; identical to SEQ ID NO: 9924
  GFR-binding peptide
  MOD_RES (2)..(4)..(36)..(37): Xaa is C or S

SEQ ID NO: 35745 - protein, 37 aa, Artificial Sequence; identical to SEQ ID NO: 9925
  GFR-binding peptide
  MOD_RES (1)..(3)..(37): Xaa is C or S
  MOD_RES (15)..(16)..(17)..(18)..(19): Xaa is A or G
  MOD_RES (20)..(21)..(22)..(23): Xaa is A or G or is absent

SEQ ID NO: 35746 - protein, 38 aa, Artificial Sequence; identical to SEQ ID NO: 11781
  GFR-binding peptide
  MOD_RES (34)..(35): Xaa is C or S
  MOD_RES (12)..(13)..(14)..(15)..(16): Xaa is A or G
  MOD_RES (17)..(18)..(19)..(20): Xaa is A or G or is absent

SEQ ID NO: 35747 - protein, 38 aa, Artificial Sequence; identical to SEQ ID NO: 9926
  GFR-binding peptide
  MOD_RES (33)..(34): Xaa is C or S
  MOD_RES (11)..(12)..(13)..(14)..(15): Xaa is A or G
  MOD_RES (16)..(17)..(18)..(19): Xaa is A or G or is absent

SEQ ID NO: 35748 - protein, 36 aa, Artificial Sequence
  GFR-binding peptide
  MOD_RES (1)..(34)..(35): Xaa is C or S
  MOD_RES (12)..(13)..(14)..(15)..(16): Xaa is A or G
  MOD_RES (17)..(18)..(19)..(20): Xaa is A or G or is absent
XSKVIMNSLQEXXXXXXXXXYYLITLPELDQSVXXP

SEQ ID NO: 35749 - protein, 32 aa, Artificial Sequence; identical to SEQ ID NO: 11782
  GFR-binding peptide
  MOD_RES (11)..(12)..(13)..(14)..(15): Xaa is A or G
  MOD_RES (16)..(17)..(18)..(19): Xaa is A or G or is absent

SEQ ID NO: 35750 - protein, 31 aa, Artificial Sequence; identical to SEQ ID NO: 9927
  GFR-binding peptide
  MOD_RES (31)..(31): Xaa is C or S

SEQ ID NO: 35751 - protein, 34 aa, Artificial Sequence; identical to SEQ ID NO: 11783
  GFR-binding peptide
  MOD_RES (31)..(32): Xaa is C or S

SEQ ID NO: 35752 - protein, 36 aa, Artificial Sequence; identical to SEQ ID NO: 9928
  GFR-binding peptide
  MOD_RES (2)..(36): Xaa is C or S
  MOD_RES (14)..(15)..(16)..(17)..(18): Xaa is A or G
  MOD_RES (19)..(20)..(21)..(22): Xaa is A or G or is absent

SEQ ID NO: 35753 - protein, 39 aa, Artificial Sequence; identical to SEQ ID NO: 9929
  GFR-binding peptide
  MOD_RES (33)..(34): Xaa is C or S
  MOD_RES (11)..(12)..(13)..(14)..(15): Xaa is A or G
  MOD_RES (16)..(17)..(18)..(19): Xaa is A or G or is absent

SEQ ID NO: 35754 - protein, 36 aa, Artificial Sequence; identical to SEQ ID NO: 11785
  GFR-binding peptide
  MOD_RES (1)..(3)..(36): Xaa is C or S
  MOD_RES (14)..(15)..(16)..(17)..(18): Xaa is A or G
  MOD_RES (19)..(20)..(21)..(22): Xaa is A or G or is absent

SEQ ID NO: 35755 - protein, 32 aa, Artificial Sequence; identical to SEQ ID NO: 11786
  GFR-binding peptide
  MOD_RES (1)..(32): Xaa is C or S

SEQ ID NO: 35756 - protein, 39 aa, Artificial Sequence; identical to SEQ ID NO: 11787
  GFR-binding peptide
  MOD_RES (1)..(35)..(36): Xaa is C or S
  MOD_RES (13)..(14)..(15)..(16)..(17): Xaa is A or G
  MOD_RES (18)..(19)..(20)..(21): Xaa is A or G or is absent

SEQ ID NO: 35757 - protein, 36 aa, Artificial Sequence; identical to SEQ ID NO: 9931
  GFR-binding peptide
  MOD_RES (2)..(36): Xaa is C or S
  MOD_RES (14)..(15)..(16)..(17)..(18): Xaa is A or G
  MOD_RES (19)..(20)..(21)..(22): Xaa is A or G or is absent

SEQ ID NO: 35758 - protein, 32 aa, Artificial Sequence; identical to SEQ ID NO: 9932
  GFR-binding peptide
  MOD_RES (1)..(32): Xaa is C or S

SEQ ID NO: 35759 - protein, 36 aa, Artificial Sequence; identical to SEQ ID NO: 11788
  GFR-binding peptide
  MOD_RES (31)..(32): Xaa is C or S

SEQ ID NO: 35760 - protein, 37 aa, Artificial Sequence; identical to SEQ ID NO: 11789
  GFR-binding peptide
  MOD_RES (2)..(34)..(35): Xaa is C or S

SEQ ID NO: 35761 - protein, 33 aa, Artificial Sequence; identical to SEQ ID NO: 2439
  GFR-binding peptide
  MOD_RES (31)..(32): Xaa is C or S

SEQ ID NO: 35762 - protein, 37 aa, Artificial Sequence; identical to SEQ ID NO: 9935
  GFR-binding peptide
  MOD_RES (31)..(32): Xaa is C or S

SEQ ID NO: 35763 - protein, 34 aa, Artificial Sequence
  GFR-binding peptide
  MOD_RES (2)..(2): Xaa is C or S
  MOD_RES (13)..(14)..(15)..(16)..(17): Xaa is A or G
  MOD_RES (18)..(19)..(20)..(21): Xaa is A or G or is absent
KXSKVIMNSLQEXXXXXXXXXYYLITLPELDQSV

SEQ ID NO: 35764 - protein, 36 aa, Artificial Sequence; identical to SEQ ID NO: 9936
  GFR-binding peptide
  MOD_RES (32)..(33): Xaa is C or S

SEQ ID NO: 35765 - protein, 40 aa, Artificial Sequence; identical to SEQ ID NO: 9937
  GFR-binding peptide
  MOD_RES (2)..(4)..(35)..(36): Xaa is C or S

SEQ ID NO: 35766 - protein, 41 aa, Artificial Sequence; identical to SEQ ID NO: 11791
  GFR-binding peptide
  MOD_RES (1)..(3)..(37)..(38): Xaa is C or S
  MOD_RES (15)..(16)..(17)..(18)..(19): Xaa is A or G
  MOD_RES (20)..(21)..(22)..(23): Xaa is A or G or is absent

SEQ ID NO: 35767 - protein, 37 aa, Artificial Sequence; identical to SEQ ID NO: 9938
  GFR-binding peptide
  MOD_RES (1)..(3)..(37): Xaa is C or S
  MOD_RES (15)..(16)..(17)..(18)..(19): Xaa is A or G
  MOD_RES (20)..(21)..(22)..(23): Xaa is A or G or is absent

SEQ ID NO: 35768 - protein, 34 aa, Artificial Sequence; identical to SEQ ID NO: 11792
  GFR-binding peptide
  MOD_RES (1)..(3): Xaa is C or S

SEQ ID NO: 35769 - protein, 38 aa, Artificial Sequence; identical to SEQ ID NO: 9939
  GFR-binding peptide
  MOD_RES (33)..(34): Xaa is C or S
  MOD_RES (11)..(12)..(13)..(14)..(15): Xaa is A or G
  MOD_RES (16)..(17)..(18)..(19): Xaa is A or G or is absent

SEQ ID NO: 35770 - protein, 37 aa, Artificial Sequence; identical to SEQ ID NO: 11793
  GFR-binding peptide
  MOD_RES (31)..(32): Xaa is C or S

SEQ ID NO: 35771 - protein, 31 aa, Artificial Sequence; identical to SEQ ID NO: 9940
  GFR-binding peptide
  MOD_RES (1)..(1): Xaa is C or S

SEQ ID NO: 35772 - protein, 37 aa, Artificial Sequence; identical to SEQ ID NO: 11795
  GFR-binding peptide
  MOD_RES (1)..(3)..(36)..(37): Xaa is C or S
  MOD_RES (14)..(15)..(16)..(17)..(18): Xaa is A or G
  MOD_RES (19)..(20)..(21)..(22): Xaa is A or G or is absent

SEQ ID NO: 35773 - protein, 32 aa, Artificial Sequence; identical to SEQ ID NO: 9941
  GFR-binding peptide
  MOD_RES (11)..(12)..(13)..(14)..(15): Xaa is A or G
  MOD_RES (16)..(17)..(18)..(19): Xaa is A or G or is absent

SEQ ID NO: 35774 - protein, 34 aa, Artificial Sequence; identical to SEQ ID NO: 9942
  GFR-binding peptide
  MOD_RES (1)..(3): Xaa is C or S

SEQ ID NO: 35775 - protein, 40 aa, Artificial Sequence; identical to SEQ ID NO: 11796
  GFR-binding peptide
  MOD_RES (2)..(4)..(38)..(39): Xaa is C or S
  MOD_RES (16)..(17)..(18)..(19)..(20): Xaa is A or G
  MOD_RES (21)..(22)..(23)..(24): Xaa is A or G or is absent

SEQ ID NO: 35776 - protein, 35 aa, Artificial Sequence; identical to SEQ ID NO: 11797
  GFR-binding peptide
  MOD_RES (31)..(31): Xaa is C or S

SEQ ID NO: 35777 - protein, 41 aa, Artificial Sequence; identical to SEQ ID NO: 9943
  GFR-binding peptide
  MOD_RES (2)..(36)..(37): Xaa is C or S
  MOD_RES (14)..(15)..(16)..(17)..(18): Xaa is A or G
  MOD_RES (19)..(20)..(21)..(22): Xaa is A or G or is absent

SEQ ID NO: 35778 - protein, 40 aa, Artificial Sequence; identical to SEQ ID NO: 9944
  GFR-binding peptide
  MOD_RES (34)..(35): Xaa is C or S
  MOD_RES (12)..(13)..(14)..(15)..(16): Xaa is A or G
  MOD_RES (17)..(18)..(19)..(20): Xaa is A or G or is absent

SEQ ID NO: 35779 - protein, 34 aa, Artificial Sequence; identical to SEQ ID NO: 9945
  GFR-binding peptide
  MOD_RES (2)..(2): Xaa is C or S
  MOD_RES (13)..(14)..(15)..(16)..(17): Xaa is A or G
  MOD_RES (18)..(19)..(20)..(21): Xaa is A or G or is absent

SEQ ID NO: 35780 - protein, 34 aa, Artificial Sequence; identical to SEQ ID NO: 9946
  GFR-binding peptide
  MOD_RES (34)..(34): Xaa is C or S
  MOD_RES (12)..(13)..(14)..(15)..(16): Xaa is A or G
  MOD_RES (17)..(18)..(19)..(20): Xaa is A or G or is absent

SEQ ID NO: 35781 - protein, 35 aa, Artificial Sequence; identical to SEQ ID NO: 11800
  GFR-binding peptide
  MOD_RES (2)..(4): Xaa is C or S

SEQ ID NO: 35782 - protein, 39 aa, Artificial Sequence; identical to SEQ ID NO: 9947
  GFR-binding peptide
  MOD_RES (1)..(3)..(37)..(38): Xaa is C or S
  MOD_RES (15)..(16)..(17)..(18)..(19): Xaa is A or G
  MOD_RES (20)..(21)..(22)..(23): Xaa is A or G or is absent

SEQ ID NO: 35783 - protein, 34 aa, Artificial Sequence; identical to SEQ ID NO: 9948
  GFR-binding peptide
  MOD_RES (1)..(1): Xaa is C or S
  MOD_RES (13)..(14)..(15)..(16)..(17): Xaa is A or G
  MOD_RES (18)..(19)..(20)..(21): Xaa is A or G or is absent

SEQ ID NO: 35784 - protein, 44 aa, Artificial Sequence; identical to SEQ ID NO: 11802
  GFR-binding peptide
  MOD_RES (2)..(4)..(38)..(39): Xaa is C or S
  MOD_RES (16)..(17)..(18)..(19)..(20): Xaa is A or G
  MOD_RES (21)..(22)..(23)..(24): Xaa is A or G or is absent

SEQ ID NO: 35785 - protein, 31 aa, Artificial Sequence; identical to SEQ ID NO: 2448
  GFR-binding peptide
  MOD_RES (31)..(31): Xaa is C or S

SEQ ID NO: 35786 - protein, 34 aa, Artificial Sequence; identical to SEQ ID NO: 9950
  GFR-binding peptide
  MOD_RES (32)..(33): Xaa is C or S

SEQ ID NO: 35787 - protein, 34 aa, Artificial Sequence; identical to SEQ ID NO: 11803
  GFR-binding peptide
  MOD_RES (32)..(33): Xaa is C or S

SEQ ID NO: 35788 - protein, 40 aa, Artificial Sequence; identical to SEQ ID NO: 4376
  GFR-binding peptide
  MOD_RES (2)..(34)..(35): Xaa is C or S

SEQ ID NO: 35789 - protein, 38 aa, Artificial Sequence; identical to SEQ ID NO: 11805
  GFR-binding peptide
  MOD_RES (34)..(35): Xaa is C or S
  MOD_RES (12)..(13)..(14)..(15)..(16): Xaa is A or G
  MOD_RES (17)..(18)..(19)..(20): Xaa is A or G or is absent

SEQ ID NO: 35790 - protein, 39 aa, Artificial Sequence; identical to SEQ ID NO: 9951
  GFR-binding peptide
  MOD_RES (34)..(35): Xaa is C or S
  MOD_RES (12)..(13)..(14)..(15)..(16): Xaa is A or G
  MOD_RES (17)..(18)..(19)..(20): Xaa is A or G or is absent

SEQ ID NO: 35791 - protein, 43 aa, Artificial Sequence; identical to SEQ ID NO: 11806
  GFR-binding peptide
  MOD_RES (2)..(4)..(38)..(39): Xaa is C or S
  MOD_RES (16)..(17)..(18)..(19)..(20): Xaa is A or G
  MOD_RES (21)..(22)..(23)..(24): Xaa is A or G or is absent

SEQ ID NO: 35792 - protein, 37 aa, Artificial Sequence; identical to SEQ ID NO: 11808
  GFR-binding peptide
  MOD_RES (34)..(35): Xaa is C or S
  MOD_RES (12)..(13)..(14)..(15)..(16): Xaa is A or G
  MOD_RES (17)..(18)..(19)..(20): Xaa is A or G or is absent

SEQ ID NO: 35793 - protein, 41 aa, Artificial Sequence; identical to SEQ ID NO: 9952
  GFR-binding peptide
  MOD_RES (2)..(4)..(36)..(37): Xaa is C or S

SEQ ID NO: 35794 - protein, 36 aa, Artificial Sequence; identical to SEQ ID NO: 11810
  GFR-binding peptide
  MOD_RES (1)..(35)..(36): Xaa is C or S
  MOD_RES (13)..(14)..(15)..(16)..(17): Xaa is A or G
  MOD_RES (18)..(19)..(20)..(21): Xaa is A or G or is absent

SEQ ID NO: 35795 - protein, 40 aa, Artificial Sequence; identical to SEQ ID NO: 2454
  GFR-binding peptide
  MOD_RES (2)..(4)..(36)..(37): Xaa is C or S

SEQ ID NO: 35796 - protein, 36 aa, Artificial Sequence; identical to SEQ ID NO: 11811
  GFR-binding peptide
  MOD_RES (2)..(4)..(36): Xaa is C or S

SEQ ID NO: 35797 - protein, 36 aa, Artificial Sequence; identical to SEQ ID NO: 4386
  GFR-binding peptide
  MOD_RES (2)..(4): Xaa is C or S
  MOD_RES (15)..(16)..(17)..(18)..(19): Xaa is A or G
  MOD_RES (20)..(21)..(22)..(23): Xaa is A or G or is absent

SEQ ID NO: 35798 - protein, 34 aa, Artificial Sequence; identical to SEQ ID NO: 11814
  GFR-binding peptide
  MOD_RES (1)..(34): Xaa is C or S
  MOD_RES (12)..(13)..(14)..(15)..(16): Xaa is A or G
  MOD_RES (17)..(18)..(19)..(20): Xaa is A or G or is absent

SEQ ID NO: 35799 - protein, 42 aa, Artificial Sequence; identical to SEQ ID NO: 9955
  GFR-binding peptide
  MOD_RES (2)..(4)..(37)..(38): Xaa is C or S
  MOD_RES (15)..(16)..(17)..(18)..(19): Xaa is A or G
  MOD_RES (20)..(21)..(22)..(23): Xaa is A or G or is absent

SEQ ID NO: 35800 - protein, 44 aa, Artificial Sequence; identical to SEQ ID NO: 11815
  GFR-binding peptide
  MOD_RES (2)..(4)..(38): Xaa is C or S
  MOD_RES (16)..(17)..(18)..(19)..(20): Xaa is A or G
  MOD_RES (21)..(22)..(23)..(24): Xaa is A or G or is absent

SEQ ID NO: 35801 - protein, 39 aa, Artificial Sequence; identical to SEQ ID NO: 11816
  GFR-binding peptide
  MOD_RES (2)..(33)..(34): Xaa is C or S

SEQ ID NO: 35802 - protein, 33 aa, Artificial Sequence; identical to SEQ ID NO: 9957
  GFR-binding peptide
  MOD_RES (1)..(33): Xaa is C or S

SEQ ID NO: 35803 - protein, 40 aa, Artificial Sequence; identical to SEQ ID NO: 9958
  GFR-binding peptide
  MOD_RES (1)..(35)..(36): Xaa is C or S
  MOD_RES (13)..(14)..(15)..(16)..(17): Xaa is A or G
  MOD_RES (18)..(19)..(20)..(21): Xaa is A or G or is absent

SEQ ID NO: 35804 - protein, 35 aa, Artificial Sequence; identical to SEQ ID NO: 9959
  GFR-binding peptide
  MOD_RES (1)..(33)..(34): Xaa is C or S

SEQ ID NO: 35805 - protein, 37 aa, Artificial Sequence; identical to SEQ ID NO: 9960
  GFR-binding peptide
  MOD_RES (32)..(33): Xaa is C or S

SEQ ID NO: 35806 - protein, 42 aa, Artificial Sequence; identical to SEQ ID NO: 4388
  GFR-binding peptide
  MOD_RES (2)..(4)..(38)..(39): Xaa is C or S
  MOD_RES (16)..(17)..(18)..(19)..(20): Xaa is A or G
  MOD_RES (21)..(22)..(23)..(24): Xaa is A or G or is absent

SEQ ID NO: 35807 - protein, 37 aa, Artificial Sequence; identical to SEQ ID NO: 11818
  GFR-binding peptide
  MOD_RES (2)..(33)..(34): Xaa is C or S

SEQ ID NO: 35808 - protein, 36 aa, Artificial Sequence; identical to SEQ ID NO: 11819
  GFR-binding peptide
  MOD_RES (34)..(35): Xaa is C or S
  MOD_RES (12)..(13)..(14)..(15)..(16): Xaa is A or G
  MOD_RES (17)..(18)..(19)..(20): Xaa is A or G or is absent

SEQ ID NO: 35809 - protein, 33 aa, Artificial Sequence; identical to SEQ ID NO: 2458
  GFR-binding peptide
  MOD_RES (33)..(33): Xaa is C or S
  MOD_RES (11)..(12)..(13)..(14)..(15): Xaa is A or G
  MOD_RES (16)..(17)..(18)..(19): Xaa is A or G or is absent

SEQ ID NO: 35810 - protein, 38 aa, Artificial Sequence; identical to SEQ ID NO: 9962
  GFR-binding peptide
  MOD_RES (2)..(4)..(37)..(38): Xaa is C or S
  MOD_RES (15)..(16)..(17)..(18)..(19): Xaa is A or G
  MOD_RES (20)..(21)..(22)..(23): Xaa is A or G or is absent

SEQ ID NO: 35811 - protein, 38 aa, Artificial Sequence; identical to SEQ ID NO: 9963
  GFR-binding peptide
  MOD_RES (1)..(33)..(34): Xaa is C or S

SEQ ID NO: 35812 - protein, 40 aa, Artificial Sequence; identical to SEQ ID NO: 11823
  GFR-binding peptide
  MOD_RES (2)..(36)..(37): Xaa is C or S
  MOD_RES (14)..(15)..(16)..(17)..(18): Xaa is A or G
  MOD_RES (19)..(20)..(21)..(22): Xaa is A or G or is absent

SEQ ID NO: 35813 - protein, 37 aa, Artificial Sequence; identical to SEQ ID NO: 9965
  GFR-binding peptide
  MOD_RES (1)..(3)..(34)..(35): Xaa is C or S

SEQ ID NO: 35814 - protein, 35 aa, Artificial Sequence; identical to SEQ ID NO: 9966
  GFR-binding peptide
  MOD_RES (1)..(32)..(33): Xaa is C or S

SEQ ID NO: 35815 - protein, 40 aa, Artificial Sequence; identical to SEQ ID NO: 9967
  GFR-binding peptide
  MOD_RES (2)..(4)..(38)..(39): Xaa is C or S
  MOD_RES (16)..(17)..(18)..(19)..(20): Xaa is A or G
  MOD_RES (21)..(22)..(23)..(24): Xaa is A or G or is absent

SEQ ID NO: 35816 - protein, 38 aa, Artificial Sequence; identical to SEQ ID NO: 11824
  GFR-binding peptide
  MOD_RES (2)..(35)..(36): Xaa is C or S
  MOD_RES (13)..(14)..(15)..(16)..(17): Xaa is A or G
  MOD_RES (18)..(19)..(20)..(21): Xaa is A or G or is absent

SEQ ID NO: 35817 - protein, 40 aa, Artificial Sequence; identical to SEQ ID NO: 9969
  GFR-binding peptide
  MOD_RES (2)..(4)..(38)..(39): Xaa is C or S
  MOD_RES (16)..(17)..(18)..(19)..(20): Xaa is A or G
  MOD_RES (21)..(22)..(23)..(24): Xaa is A or G or is absent

SEQ ID NO: 35818 - protein, 34 aa, Artificial Sequence; identical to SEQ ID NO: 9970
  GFR-binding peptide
  MOD_RES (31)..(32): Xaa is C or S

SEQ ID NO: 35819 - protein, 35 aa, Artificial Sequence; identical to SEQ ID NO: 11826
  GFR-binding peptide
  MOD_RES (34)..(35): Xaa is C or S
  MOD_RES (12)..(13)..(14)..(15)..(16): Xaa is A or G
  MOD_RES (17)..(18)..(19)..(20): Xaa is A or G or is absent

SEQ ID NO: 35820 - protein, 35 aa, Artificial Sequence; identical to SEQ ID NO: 11827
  GFR-binding peptide
  MOD_RES (32)..(33): Xaa is C or S

SEQ ID NO: 35821 - protein, 36 aa, Artificial Sequence; identical to SEQ ID NO: 11828
  GFR-binding peptide
  MOD_RES (31)..(32): Xaa is C or S

SEQ ID NO: 35822 - protein, 32 aa, Artificial Sequence; identical to SEQ ID NO: 2470
  GFR-binding peptide
  MOD_RES (11)..(12)..(13)..(14)..(15): Xaa is A or G
  MOD_RES (16)..(17)..(18)..(19): Xaa is A or G or is absent

SEQ ID NO: 35823 - protein, 40 aa, Artificial Sequence; identical to SEQ ID NO: 9973
  GFR-binding peptide
  MOD_RES (1)..(35)..(36): Xaa is C or S
  MOD_RES (13)..(14)..(15)..(16)..(17): Xaa is A or G
  MOD_RES (18)..(19)..(20)..(21): Xaa is A or G or is absent

SEQ ID NO: 35824 - protein, 38 aa, Artificial Sequence; identical to SEQ ID NO: 11830
  GFR-binding peptide
  MOD_RES (32)..(33): Xaa is C or S

SEQ ID NO: 35825 - protein, 39 aa, Artificial Sequence; identical to SEQ ID NO: 2476
  GFR-binding peptide
  MOD_RES (2)..(36)..(37): Xaa is C or S
  MOD_RES (14)..(15)..(16)..(17)..(18): Xaa is A or G
  MOD_RES (19)..(20)..(21)..(22): Xaa is A or G or is absent

SEQ ID NO: 35826 - protein, 35 aa, Artificial Sequence; identical to SEQ ID NO: 9976
  GFR-binding peptide
  MOD_RES (33)..(34): Xaa is C or S
  MOD_RES (11)..(12)..(13)..(14)..(15): Xaa is A or G
  MOD_RES (16)..(17)..(18)..(19): Xaa is A or G or is absent

SEQ ID NO: 35827 - protein, 34 aa, Artificial Sequence; identical to SEQ ID NO: 9977
  GFR-binding peptide
  MOD_RES (1)..(33)..(34): Xaa is C or S

SEQ ID NO: 35828 - protein, 34 aa, Artificial Sequence; identical to SEQ ID NO: 9978
  GFR-binding peptide
  MOD_RES (1)..(34): Xaa is C or S
  MOD_RES (12)..(13)..(14)..(15)..(16): Xaa is A or G
  MOD_RES (17)..(18)..(19)..(20): Xaa is A or G or is absent

SEQ ID NO: 35829 - protein, 40 aa, Artificial Sequence; identical to SEQ ID NO: 4406
  GFR-binding peptide
  MOD_RES (2)..(4)..(36)..(37): Xaa is C or S

SEQ ID NO: 35830 - protein, 34 aa, Artificial Sequence; identical to SEQ ID NO: 4409
  GFR-binding peptide
  MOD_RES (2)..(34): Xaa is C or S

SEQ ID NO: 35831 - protein, 41 aa, Artificial Sequence; identical to SEQ ID NO: 11833
  GFR-binding peptide
  MOD_RES (2)..(36)..(37): Xaa is C or S
  MOD_RES (14)..(15)..(16)..(17)..(18): Xaa is A or G
  MOD_RES (19)..(20)..(21)..(22): Xaa is A or G or is absent

SEQ ID NO: 35832 - protein, 39 aa, Artificial Sequence; identical to SEQ ID NO: 9980
  GFR-binding peptide
  MOD_RES (2)..(4)..(35)..(36): Xaa is C or S

SEQ ID NO: 35833 - protein, 34 aa, Artificial Sequence; identical to SEQ ID NO: 9981
  GFR-binding peptide
  MOD_RES (1)..(3): Xaa is C or S

SEQ ID NO: 35834 - protein, 31 aa, Artificial Sequence; identical to SEQ ID NO: 9982
  GFR-binding peptide
  MOD_RES (1)..(1): Xaa is C or S

SEQ ID NO: 35835 - protein, 32 aa, Artificial Sequence; identical to SEQ ID NO: 11834
  GFR-binding peptide
  MOD_RES (1)..(1): Xaa is C or S

SEQ ID NO: 35836 - protein, 35 aa, Artificial Sequence; identical to SEQ ID NO: 4414
  GFR-binding peptide
  MOD_RES (1)..(3)..(34)..(35): Xaa is C or S

SEQ ID NO: 35837 - protein, 32 aa, Artificial Sequence; identical to SEQ ID NO: 11837
  GFR-binding peptide
  MOD_RES (32)..(32): Xaa is C or S

SEQ ID NO: 35838 - protein, 34 aa, Artificial Sequence; identical to SEQ ID NO: 9986
  GFR-binding peptide
  MOD_RES (32)..(32): Xaa is C or S

SEQ ID NO: 35839 - protein, 39 aa, Artificial Sequence; identical to SEQ ID NO: 2487
  GFR-binding peptide
  MOD_RES (2)..(4)..(35)..(36): Xaa is C or S

SEQ ID NO: 35840 - protein, 38 aa, Artificial Sequence; identical to SEQ ID NO: 11838
  GFR-binding peptide
  MOD_RES (33)..(34): Xaa is C or S
  MOD_RES (11)..(12)..(13)..(14)..(15): Xaa is A or G
  MOD_RES (16)..(17)..(18)..(19): Xaa is A or G or is absent

SEQ ID NO: 35841 - protein, 37 aa, Artificial Sequence; identical to SEQ ID NO: 9989
  GFR-binding peptide
  MOD_RES (1)..(34)..(35): Xaa is C or S
  MOD_RES (12)..(13)..(14)..(15)..(16): Xaa is A or G
  MOD_RES (17)..(18)..(19)..(20): Xaa is A or G or is absent

SEQ ID NO: 35842 - protein, 39 aa, Artificial Sequence; identical to SEQ ID NO: 11839
  GFR-binding peptide
  MOD_RES (2)..(4)..(36)..(37): Xaa is C or S

SEQ ID NO: 35843 - protein, 38 aa, Artificial Sequence
  GFR-binding peptide
  MOD_RES (1)..(32)..(33): Xaa is C or S
XSKVIMNSLQEIKPTKGIYYLITLPELDQSVXXPSASA

SEQ ID NO: 35844 - protein, 39 aa, Artificial Sequence; identical to SEQ ID NO: 2489
  GFR-binding peptide
  MOD_RES (34)..(35): Xaa is C or S
  MOD_RES (12)..(13)..(14)..(15)..(16): Xaa is A or G
  MOD_RES (17)..(18)..(19)..(20): Xaa is A or G or is absent

SEQ ID NO: 35845 - protein, 33 aa, Artificial Sequence; identical to SEQ ID NO: 4417
  GFR-binding peptide
  MOD_RES (31)..(32): Xaa is C or S

SEQ ID NO: 35846 - protein, 36 aa, Artificial Sequence; identical to SEQ ID NO: 4418
  GFR-binding peptide
  MOD_RES (2)..(35)..(36): Xaa is C or S
  MOD_RES (13)..(14)..(15)..(16)..(17): Xaa is A or G
  MOD_RES (18)..(19)..(20)..(21): Xaa is A or G or is absent

SEQ ID NO: 35847 - protein, 34 aa, Artificial Sequence; identical to SEQ ID NO: 9992
  GFR-binding peptide
  MOD_RES (2)..(33)..(34): Xaa is C or S

SEQ ID NO: 35848 - protein, 38 aa, Artificial Sequence; identical to SEQ ID NO: 11843
  GFR-binding peptide
  MOD_RES (2)..(4)..(36)..(37): Xaa is C or S

SEQ ID NO: 35849 - protein, 40 aa, Artificial Sequence; identical to SEQ ID NO: 9993
  GFR-binding peptide
  MOD_RES (34)..(34): Xaa is C or S
  MOD_RES (12)..(13)..(14)..(15)..(16): Xaa is A or G
  MOD_RES (17)..(18)..(19)..(20): Xaa is A or G or is absent

SEQ ID NO: 35850 - protein, 42 aa, Artificial Sequence; identical to SEQ ID NO: 11846
  GFR-binding peptide
  MOD_RES (2)..(36)..(37): Xaa is C or S
  MOD_RES (14)..(15)..(16)..(17)..(18): Xaa is A or G
  MOD_RES (19)..(20)..(21)..(22): Xaa is A or G or is absent

SEQ ID NO: 35851 - protein, 39 aa, Artificial Sequence; identical to SEQ ID NO: 9995
  GFR-binding peptide
  MOD_RES (34)..(35): Xaa is C or S
  MOD_RES (12)..(13)..(14)..(15)..(16): Xaa is A or G
  MOD_RES (17)..(18)..(19)..(20): Xaa is A or G or is absent

SEQ ID NO: 35852 - protein, 35 aa, Artificial Sequence; identical to SEQ ID NO: 9996
  GFR-binding peptide
  MOD_RES (1)..(35): Xaa is C or S
  MOD_RES (13)..(14)..(15)..(16)..(17): Xaa is A or G
  MOD_RES (18)..(19)..(20)..(21): Xaa is A or G or is absent

SEQ ID NO: 35853 - protein, 43 aa, Artificial Sequence; identical to SEQ ID NO: 11847
  GFR-binding peptide
  MOD_RES (1)..(3)..(37)..(38): Xaa is C or S
  MOD_RES (15)..(16)..(17)..(18)..(19): Xaa is A or G
  MOD_RES (20)..(21)..(22)..(23): Xaa is A or G or is absent

SEQ ID NO: 35854 - protein, 34 aa, Artificial Sequence; identical to SEQ ID NO: 11848
  GFR-binding peptide
  MOD_RES (1)..(3): Xaa is C or S

SEQ ID NO: 35855 - protein, 34 aa, Artificial Sequence; identical to SEQ ID NO: 11849
  GFR-binding peptide
  MOD_RES (1)..(32)..(33): Xaa is C or S

SEQ ID NO: 35856 - protein, 36 aa, Artificial Sequence; identical to SEQ ID NO: 9997
  GFR-binding peptide
  MOD_RES (31)..(31): Xaa is C or S

SEQ ID NO: 35857 - protein, 36 aa, Artificial Sequence; identical to SEQ ID NO: 11852
  GFR-binding peptide
  MOD_RES (1)..(3)..(34)..(35): Xaa is C or S

SEQ ID NO: 35858 - protein, 38 aa, Artificial Sequence; identical to SEQ ID NO: 4428
  GFR-binding peptide
  MOD_RES (2)..(33)..(34): Xaa is C or S

SEQ ID NO: 35859 - protein, 36 aa, Artificial Sequence; identical to SEQ ID NO: 4429
  GFR-binding peptide
  MOD_RES (1)..(34)..(35): Xaa is C or S
  MOD_RES (12)..(13)..(14)..(15)..(16): Xaa is A or G
  MOD_RES (17)..(18)..(19)..(20): Xaa is A or G or is absent

SEQ ID NO: 35860 - protein, 42 aa, Artificial Sequence; identical to SEQ ID NO: 11855
  GFR-binding peptide
  MOD_RES (2)..(4)..(36)..(37): Xaa is C or S

SEQ ID NO: 35861 - protein, 41 aa, Artificial Sequence; identical to SEQ ID NO: 10000
  GFR-binding peptide
  MOD_RES (2)..(4)..(36)..(37): Xaa is C or S

SEQ ID NO: 35862 - protein, 39 aa, Artificial Sequence; identical to SEQ ID NO: 10002
  GFR-binding peptide
  MOD_RES (2)..(4)..(38)..(39): Xaa is C or S
  MOD_RES (16)..(17)..(18)..(19)..(20): Xaa is A or G
  MOD_RES (21)..(22)..(23)..(24): Xaa is A or G or is absent

SEQ ID NO: 35863 - protein, 33 aa, Artificial Sequence; identical to SEQ ID NO: 11856
  GFR-binding peptide
  MOD_RES (33)..(33): Xaa is C or S
  MOD_RES (11)..(12)..(13)..(14)..(15): Xaa is A or G
  MOD_RES (16)..(17)..(18)..(19): Xaa is A or G or is absent

SEQ ID NO: 35864 - protein, 37 aa, Artificial Sequence; identical to SEQ ID NO: 10003
  GFR-binding peptide
  MOD_RES (2)..(35)..(36): Xaa is C or S
  MOD_RES (13)..(14)..(15)..(16)..(17): Xaa is A or G
  MOD_RES (18)..(19)..(20)..(21): Xaa is A or G or is absent

SEQ ID NO: 35865 - protein, 36 aa, Artificial Sequence; identical to SEQ ID NO: 11857
  GFR-binding peptide
  MOD_RES (1)..(35)..(36): Xaa is C or S
  MOD_RES (13)..(14)..(15)..(16)..(17): Xaa is A or G
  MOD_RES (18)..(19)..(20)..(21): Xaa is A or G or is absent

SEQ ID NO: 35866 - protein, 36 aa, Artificial Sequence; identical to SEQ ID NO: 4430
  GFR-binding peptide
  MOD_RES (33)..(34): Xaa is C or S
  MOD_RES (11)..(12)..(13)..(14)..(15): Xaa is A or G
  MOD_RES (16)..(17)..(18)..(19): Xaa is A or G or is absent

SEQ ID NO: 35867 - protein, 34 aa, Artificial Sequence; identical to SEQ ID NO: 4432
  GFR-binding peptide
  MOD_RES (2)..(2): Xaa is C or S
  MOD_RES (13)..(14)..(15)..(16)..(17): Xaa is A or G
  MOD_RES (18)..(19)..(20)..(21): Xaa is A or G or is absent

SEQ ID NO: 35868 - protein, 37 aa, Artificial Sequence; identical to SEQ ID NO: 11860
  GFR-binding peptide
  MOD_RES (31)..(31): Xaa is C or S

SEQ ID NO: 35869 - protein, 38 aa, Artificial Sequence; identical to SEQ ID NO: 10004
  GFR-binding peptide
  MOD_RES (1)..(32)..(33): Xaa is C or S

SEQ ID NO: 35870 - protein, 34 aa, Artificial Sequence; identical to SEQ ID NO: 10005
  GFR-binding peptide
  MOD_RES (1)..(33)..(34): Xaa is C or S

SEQ ID NO: 35871 - protein, 38 aa, Artificial Sequence; identical to SEQ ID NO: 11861
  GFR-binding peptide
  MOD_RES (2)..(4)..(36)..(37): Xaa is C or S

SEQ ID NO: 35872 - protein, 30 aa, Artificial Sequence; identical to SEQ ID NO: 10007
  GFR-binding peptide

SEQ ID NO: 35873 - protein, 38 aa, Artificial Sequence; identical to SEQ ID NO: 11862
  GFR-binding peptide
  MOD_RES (32)..(33): Xaa is C or S

SEQ ID NO: 35874 - protein, 33 aa, Artificial Sequence; identical to SEQ ID NO: 4435
  GFR-binding peptide
  MOD_RES (1)..(32)..(33): Xaa is C or S

SEQ ID NO: 35875 - protein, 31 aa, Artificial Sequence; identical to SEQ ID NO: 11864
  GFR-binding peptide

SEQ ID NO: 35876 - protein, 35 aa, Artificial Sequence; identical to SEQ ID NO: 11865
  GFR-binding peptide
  MOD_RES (33)..(34): Xaa is C or S
  MOD_RES (11)..(12)..(13)..(14)..(15): Xaa is A or G
  MOD_RES (16)..(17)..(18)..(19): Xaa is A or G or is absent

SEQ ID NO: 35877 - protein, 37 aa, Artificial Sequence; identical to SEQ ID NO: 10008
  GFR-binding peptide
  MOD_RES (1)..(3)..(36)..(37): Xaa is C or S
  MOD_RES (14)..(15)..(16)..(17)..(18): Xaa is A or G
  MOD_RES (19)..(20)..(21)..(22): Xaa is A or G or is absent

SEQ ID NO: 35878 - protein, 36 aa, Artificial Sequence; identical to SEQ ID NO: 11866
  GFR-binding peptide
  MOD_RES (1)..(33)..(34): Xaa is C or S

SEQ ID NO: 35879 - protein, 40 aa, Artificial Sequence; identical to SEQ ID NO: 11867
  GFR-binding peptide
  MOD_RES (2)..(4)..(38)..(39): Xaa is C or S
  MOD_RES (16)..(17)..(18)..(19)..(20): Xaa is A or G
  MOD_RES (21)..(22)..(23)..(24): Xaa is A or G or is absent

SEQ ID NO: 35880 - protein, 35 aa, Artificial Sequence; identical to SEQ ID NO: 11868
  GFR-binding peptide
  MOD_RES (33)..(34): Xaa is C or S
  MOD_RES (11)..(12)..(13)..(14)..(15): Xaa is A or G
  MOD_RES (16)..(17)..(18)..(19): Xaa is A or G or is absent

SEQ ID NO: 35881 - protein, 34 aa, Artificial Sequence; identical to SEQ ID NO: 11869
  GFR-binding peptide
  MOD_RES (34)..(34): Xaa is C or S
  MOD_RES (12)..(13)..(14)..(15)..(16): Xaa is A or G
  MOD_RES (17)..(18)..(19)..(20): Xaa is A or G or is absent

SEQ ID NO: 35882 - protein, 35 aa, Artificial Sequence; identical to SEQ ID NO: 11870
  GFR-binding peptide
  MOD_RES (33)..(34): Xaa is C or S
  MOD_RES (11)..(12)..(13)..(14)..(15): Xaa is A or G
  MOD_RES (16)..(17)..(18)..(19): Xaa is A or G or is absent

SEQ ID NO: 35883 - protein, 36 aa, Artificial Sequence; identical to SEQ ID NO: 10011
  GFR-binding peptide
  MOD_RES (34)..(34): Xaa is C or S
  MOD_RES (12)..(13)..(14)..(15)..(16): Xaa is A or G
  MOD_RES (17)..(18)..(19)..(20): Xaa is A or G or is absent

SEQ ID NO: 35884 - protein, 39 aa, Artificial Sequence; identical to SEQ ID NO: 10012
  GFR-binding peptide
  MOD_RES (2)..(34)..(35): Xaa is C or S

SEQ ID NO: 35885 - protein, 42 aa, Artificial Sequence
  GFR-binding peptide
  MOD_RES (1)..(3)..(36)..(37): Xaa is C or S
  MOD_RES (14)..(15)..(16)..(17)..(18): Xaa is A or G
  MOD_RES (19)..(20)..(21)..(22): Xaa is A or G or is absent
XKXSKVIMNSLQEXXXXXXXXXYYLITLPELDQSVXXPSASA

SEQ ID NO: 35886 - protein, 35 aa, Artificial Sequence; identical to SEQ ID NO: 10014
  GFR-binding peptide
  MOD_RES (34)..(35): Xaa is C or S
  MOD_RES (12)..(13)..(14)..(15)..(16): Xaa is A or G
  MOD_RES (17)..(18)..(19)..(20): Xaa is A or G or is absent

SEQ ID NO: 35887 - protein, 41 aa, Artificial Sequence; identical to SEQ ID NO: 11873
  GFR-binding peptide
  MOD_RES (1)..(3)..(36)..(37): Xaa is C or S
  MOD_RES (14)..(15)..(16)..(17)..(18): Xaa is A or G
  MOD_RES (19)..(20)..(21)..(22): Xaa is A or G or is absent

SEQ ID NO: 35888 - protein, 35 aa, Artificial Sequence; identical to SEQ ID NO: 10015
  GFR-binding peptide
  MOD_RES (31)..(32): Xaa is C or S

SEQ ID NO: 35889 - protein, 36 aa, Artificial Sequence; identical to SEQ ID NO: 11875
  GFR-binding peptide
  MOD_RES (1)..(3)..(35): Xaa is C or S

SEQ ID NO: 35890 - protein, 35 aa, Artificial Sequence; identical to SEQ ID NO: 10016
  GFR-binding peptide
  MOD_RES (1)..(33)..(34): Xaa is C or S

SEQ ID NO: 35891 - protein, 33 aa, Artificial Sequence; identical to SEQ ID NO: 11877
  GFR-binding peptide
  MOD_RES (1)..(1): Xaa is C or S
  MOD_RES (12)..(13)..(14)..(15)..(16): Xaa is A or G
  MOD_RES (17)..(18)..(19)..(20): Xaa is A or G or is absent

SEQ ID NO: 35892 - protein, 36 aa, Artificial Sequence; identical to SEQ ID NO: 10017
  GFR-binding peptide
  MOD_RES (2)..(34)..(35): Xaa is C or S

SEQ ID NO: 35893 - protein, 36 aa, Artificial Sequence; identical to SEQ ID NO: 10018
  GFR-binding peptide
  MOD_RES (2)..(34)..(35): Xaa is C or S

SEQ ID NO: 35894 - protein, 36 aa, Artificial Sequence; identical to SEQ ID NO: 11878
  GFR-binding peptide
  MOD_RES (34)..(35): Xaa is C or S
  MOD_RES (12)..(13)..(14)..(15)..(16): Xaa is A or G
  MOD_RES (17)..(18)..(19)..(20): Xaa is A or G or is absent

SEQ ID NO: 35895 - protein, 34 aa, Artificial Sequence; identical to SEQ ID NO: 10019
  GFR-binding peptide
  MOD_RES (1)..(3): Xaa is C or S

SEQ ID NO: 35896 - protein, 32 aa, Artificial Sequence; identical to SEQ ID NO: 10020
  GFR-binding peptide
  MOD_RES (11)..(12)..(13)..(14)..(15): Xaa is A or G
  MOD_RES (16)..(17)..(18)..(19): Xaa is A or G or is absent

SEQ ID NO: 35897 - protein, 32 aa, Artificial Sequence; identical to SEQ ID NO: 4453
  GFR-binding peptide
  MOD_RES (11)..(12)..(13)..(14)..(15): Xaa is A or G
  MOD_RES (16)..(17)..(18)..(19): Xaa is A or G or is absent

SEQ ID NO: 35898 - protein, 34 aa, Artificial Sequence; identical to SEQ ID NO: 10022
  GFR-binding peptide
  MOD_RES (31)..(32): Xaa is C or S

SEQ ID NO: 35899 - protein, 43 aa, Artificial Sequence; identical to SEQ ID NO: 4454
  GFR-binding peptide
  MOD_RES (2)..(4)..(37)..(38): Xaa is C or S
  MOD_RES (15)..(16)..(17)..(18)..(19): Xaa is A or G
  MOD_RES (20)..(21)..(22)..(23): Xaa is A or G or is absent

SEQ ID NO: 35900 - protein, 31 aa, Artificial Sequence; identical to SEQ ID NO: 11882
  GFR-binding peptide
  MOD_RES (31)..(31): Xaa is C or S

SEQ ID NO: 35901 - protein, 39 aa, Artificial Sequence; identical to SEQ ID NO: 10024
  GFR-binding peptide
  MOD_RES (1)..(3)..(35)..(36): Xaa is C or S

SEQ ID NO: 35902 - protein, 38 aa, Artificial Sequence; identical to SEQ ID NO: 11883
  GFR-binding peptide
  MOD_RES (34)..(35): Xaa is C or S
  MOD_RES (12)..(13)..(14)..(15)..(16): Xaa is A or G
  MOD_RES (17)..(18)..(19)..(20): Xaa is A or G or is absent

SEQ ID NO: 35903 - protein, 35 aa, Artificial Sequence
  GFR-binding peptide
  MOD_RES (1)..(32)..(33): Xaa is C or S
XSKVIMNSLQEIKPTKGIYYLITLPELDQSVXXPS

SEQ ID NO: 35904 - protein, 36 aa, Artificial Sequence; identical to SEQ ID NO: 4459
  GFR-binding peptide
  MOD_RES (2)..(4): Xaa is C or S
  MOD_RES (15)..(16)..(17)..(18)..(19): Xaa is A or G
  MOD_RES (20)..(21)..(22)..(23): Xaa is A or G or is absent

SEQ ID NO: 35905 - protein, 37 aa, Artificial Sequence; identical to SEQ ID NO: 11887
  GFR-binding peptide
  MOD_RES (2)..(4)..(35)..(36): Xaa is C or S

SEQ ID NO: 35906 - protein, 37 aa, Artificial Sequence; identical to SEQ ID NO: 11888
  GFR-binding peptide
  MOD_RES (2)..(34)..(35): Xaa is C or S

SEQ ID NO: 35907 - protein, 35 aa, Artificial Sequence; identical to SEQ ID NO: 10025
  GFR-binding peptide
  MOD_RES (1)..(33)..(34): Xaa is C or S

SEQ ID NO: 35908 - protein, 35 aa, Artificial Sequence; identical to SEQ ID NO: 10026
  GFR-binding peptide
  MOD_RES (1)..(33)..(34): Xaa is C or S

SEQ ID NO: 35909 - protein, 34 aa, Artificial Sequence; identical to SEQ ID NO: 10028
  GFR-binding peptide
  MOD_RES (2)..(34): Xaa is C or S

SEQ ID NO: 35910 - protein, 32 aa, Artificial Sequence; identical to SEQ ID NO: 10029
  GFR-binding peptide
  MOD_RES (1)..(1): Xaa is C or S

SEQ ID NO: 35911 - protein, 37 aa, Artificial Sequence; identical to SEQ ID NO: 11890
  GFR-binding peptide
  MOD_RES (33)..(34): Xaa is C or S
  MOD_RES (11)..(12)..(13)..(14)..(15): Xaa is A or G
  MOD_RES (16)..(17)..(18)..(19): Xaa is A or G or is absent

SEQ ID NO: 35912 - protein, 33 aa, Artificial Sequence; identical to SEQ ID NO: 10030
  GFR-binding peptide
  MOD_RES (1)..(1): Xaa is C or S
  MOD_RES (12)..(13)..(14)..(15)..(16): Xaa is A or G
  MOD_RES (17)..(18)..(19)..(20): Xaa is A or G or is absent

SEQ ID NO: 35913 - protein, 36 aa, Artificial Sequence; identical to SEQ ID NO: 11891
  GFR-binding peptide
  MOD_RES (1)..(3)..(35)..(36): Xaa is C or S

SEQ ID NO: 35914 - protein, 36 aa, Artificial Sequence; identical to SEQ ID NO: 11892
  GFR-binding peptide
  MOD_RES (34)..(34): Xaa is C or S
  MOD_RES (12)..(13)..(14)..(15)..(16): Xaa is A or G
  MOD_RES (17)..(18)..(19)..(20): Xaa is A or G or is absent

SEQ ID NO: 35915 - protein, 37 aa, Artificial Sequence; identical to SEQ ID NO: 11893
  GFR-binding peptide
  MOD_RES (2)..(34)..(35): Xaa is C or S

SEQ ID NO: 35916 - protein, 34 aa, Artificial Sequence; identical to SEQ ID NO: 4461
  GFR-binding peptide
  MOD_RES (1)..(3)..(34): Xaa is C or S

SEQ ID NO: 35917 - protein, 32 aa, Artificial Sequence; identical to SEQ ID NO: 10032
  GFR-binding peptide
  MOD_RES (2)..(2): Xaa is C or S

SEQ ID NO: 35918 - protein, 38 aa, Artificial Sequence; identical to SEQ ID NO: 11895
  GFR-binding peptide
  MOD_RES (1)..(3)..(36)..(37): Xaa is C or S
  MOD_RES (14)..(15)..(16)..(17)..(18): Xaa is A or G
  MOD_RES (19)..(20)..(21)..(22): Xaa is A or G or is absent

SEQ ID NO: 35919 - protein, 36 aa, Artificial Sequence; identical to SEQ ID NO: 10033
  GFR-binding peptide
  MOD_RES (2)..(4)..(36): Xaa is C or S

SEQ ID NO: 35920 - protein, 37 aa, Artificial Sequence; identical to SEQ ID NO: 11896
  GFR-binding peptide
  MOD_RES (2)..(4): Xaa is C or S
  MOD_RES (16)..(17)..(18)..(19)..(20): Xaa is A or G
  MOD_RES (21)..(22)..(23)..(24): Xaa is A or G or is absent

SEQ ID NO: 35921 - protein, 38 aa, Artificial Sequence; identical to SEQ ID NO: 11898
  GFR-binding peptide
  MOD_RES (1)..(32)..(33): Xaa is C or S

SEQ ID NO: 35922 - protein, 42 aa, Artificial Sequence; identical to SEQ ID NO: 10034
  GFR-binding peptide
  MOD_RES (2)..(36)..(37): Xaa is C or S
  MOD_RES (14)..(15)..(16)..(17)..(18): Xaa is A or G
  MOD_RES (19)..(20)..(21)..(22): Xaa is A or G or is absent

SEQ ID NO: 35923 - protein, 41 aa, Artificial Sequence; identical to SEQ ID NO: 11899
  GFR-binding peptide
  MOD_RES (2)..(4)..(37)..(38): Xaa is C or S
  MOD_RES (15)..(16)..(17)..(18)..(19): Xaa is A or G
  MOD_RES (20)..(21)..(22)..(23): Xaa is A or G or is absent

SEQ ID NO: 35924 - protein, 40 aa, Artificial Sequence; identical to SEQ ID NO: 10035
  GFR-binding peptide
  MOD_RES (1)..(3)..(37): Xaa is C or S
  MOD_RES (15)..(16)..(17)..(18)..(19): Xaa is A or G
  MOD_RES (20)..(21)..(22)..(23): Xaa is A or G or is absent

SEQ ID NO: 35925 - protein, 43 aa, Artificial Sequence; identical to SEQ ID NO: 10036
  GFR-binding peptide
  MOD_RES (2)..(4)..(37)..(38): Xaa is C or S
  MOD_RES (15)..(16)..(17)..(18)..(19): Xaa is A or G
  MOD_RES (20)..(21)..(22)..(23): Xaa is A or G or is absent

SEQ ID NO: 35926 - protein, 37 aa, Artificial Sequence; identical to SEQ ID NO: 2539
  GFR-binding peptide
  MOD_RES (2)..(33)..(34): Xaa is C or S

SEQ ID NO: 35927 - protein, 32 aa, Artificial Sequence; identical to SEQ ID NO: 10038
  GFR-binding peptide
  MOD_RES (31)..(32): Xaa is C or S

SEQ ID NO: 35928 - protein, 31 aa, Artificial Sequence; identical to SEQ ID NO: 11901
  GFR-binding peptide
  MOD_RES (31)..(31): Xaa is C or S

SEQ ID NO: 35929 - protein, 35 aa, Artificial Sequence; identical to SEQ ID NO: 11903
  GFR-binding peptide
  MOD_RES (2)..(4)..(35): Xaa is C or S

SEQ ID NO: 35930 - protein, 38 aa, Artificial Sequence; identical to SEQ ID NO: 11904
  GFR-binding peptide
  MOD_RES (32)..(33): Xaa is C or S

SEQ ID NO: 35931 - protein, 41 aa, Artificial Sequence; identical to SEQ ID NO: 2544
  GFR-binding peptide
  MOD_RES (2)..(4)..(36)..(37): Xaa is C or S

SEQ ID NO: 35932 - protein, 36 aa, Artificial Sequence; identical to SEQ ID NO: 10042
  GFR-binding peptide
  MOD_RES (2)..(4): Xaa is C or S
  MOD_RES (15)..(16)..(17)..(18)..(19): Xaa is A or G
  MOD_RES (20)..(21)..(22)..(23): Xaa is A or G or is absent

SEQ ID NO: 35933 - protein, 38 aa, Artificial Sequence; identical to SEQ ID NO: 4470
  GFR-binding peptide
  MOD_RES (2)..(35)..(36): Xaa is C or S
  MOD_RES (13)..(14)..(15)..(16)..(17): Xaa is A or G
  MOD_RES (18)..(19)..(20)..(21): Xaa is A or G or is absent

SEQ ID NO: 35934 - protein, 39 aa, Artificial Sequence
  GFR-binding peptide
  MOD_RES (2)..(33)..(34): Xaa is C or S
KXSKVIMNSLQEIKPTKGIYYLITLPELDQSVXXPSASA

SEQ ID NO: 35935 - protein, 43 aa, Artificial Sequence; identical to SEQ ID NO: 11907
  GFR-binding peptide
  MOD_RES (1)..(3)..(37)..(38): Xaa is C or S
  MOD_RES (15)..(16)..(17)..(18)..(19): Xaa is A or G
  MOD_RES (20)..(21)..(22)..(23): Xaa is A or G or is absent

SEQ ID NO: 35936 - protein, 31 aa, Artificial Sequence; identical to SEQ ID NO: 10044
  GFR-binding peptide
  MOD_RES (31)..(31): Xaa is C or S

SEQ ID NO: 35937 - protein, 36 aa, Artificial Sequence; identical to SEQ ID NO: 11908
  GFR-binding peptide
  MOD_RES (1)..(33)..(34): Xaa is C or S

SEQ ID NO: 35938 - protein, 38 aa, Artificial Sequence; identical to SEQ ID NO: 10046
  GFR-binding peptide
  MOD_RES (1)..(3)..(37)..(38): Xaa is C or S
  MOD_RES (15)..(16)..(17)..(18)..(19): Xaa is A or G
  MOD_RES (20)..(21)..(22)..(23): Xaa is A or G or is absent

SEQ ID NO: 35939 - protein, 35 aa, Artificial Sequence; identical to SEQ ID NO: 10047
  GFR-binding peptide
  MOD_RES (1)..(33)..(34): Xaa is C or S

SEQ ID NO: 35940 - protein, 39 aa, Artificial Sequence; identical to SEQ ID NO: 10048
  GFR-binding peptide
  MOD_RES (1)..(3)..(35): Xaa is C or S

SEQ ID NO: 35941 - protein, 41 aa, Artificial Sequence; identical to SEQ ID NO: 10049
  GFR-binding peptide
  MOD_RES (2)..(4)..(36): Xaa is C or S

SEQ ID NO: 35942 - protein, 36 aa, Artificial Sequence; identical to SEQ ID NO: 10050
  GFR-binding peptide
  MOD_RES (2)..(34)..(35): Xaa is C or S

SEQ ID NO: 35943 - protein, 41 aa, Artificial Sequence; identical to SEQ ID NO: 2551
  GFR-binding peptide
  MOD_RES (2)..(4)..(38)..(39): Xaa is C or S
  MOD_RES (16)..(17)..(18)..(19)..(20): Xaa is A or G
  MOD_RES (21)..(22)..(23)..(24): Xaa is A or G or is absent

SEQ ID NO: 35944 - protein, 41 aa, Artificial Sequence; identical to SEQ ID NO: 11909
  GFR-binding peptide
  MOD_RES (2)..(35)..(36): Xaa is C or S
  MOD_RES (13)..(14)..(15)..(16)..(17): Xaa is A or G
  MOD_RES (18)..(19)..(20)..(21): Xaa is A or G or is absent

SEQ ID NO: 35945 - protein, 36 aa, Artificial Sequence; identical to SEQ ID NO: 10052
  GFR-binding peptide
  MOD_RES (31)..(32): Xaa is C or S

SEQ ID NO: 35946 - protein, 37 aa, Artificial Sequence; identical to SEQ ID NO: 11910
  GFR-binding peptide
  MOD_RES (33)..(34): Xaa is C or S
  MOD_RES (11)..(12)..(13)..(14)..(15): Xaa is A or G
  MOD_RES (16)..(17)..(18)..(19): Xaa is A or G or is absent

SEQ ID NO: 35947 - protein, 37 aa, Artificial Sequence; identical to SEQ ID NO: 10053
  GFR-binding peptide
  MOD_RES (1)..(3)..(37): Xaa is C or S
  MOD_RES (15)..(16)..(17)..(18)..(19): Xaa is A or G
  MOD_RES (20)..(21)..(22)..(23): Xaa is A or G or is absent

SEQ ID NO: 35948 - protein, 36 aa, Artificial Sequence; identical to SEQ ID NO: 2554
  GFR-binding peptide
  MOD_RES (32)..(33): Xaa is C or S

SEQ ID NO: 35949 - protein, 39 aa, Artificial Sequence; identical to SEQ ID NO: 11912
  GFR-binding peptide
  MOD_RES (34)..(35): Xaa is C or S
  MOD_RES (12)..(13)..(14)..(15)..(16): Xaa is A or G
  MOD_RES (17)..(18)..(19)..(20): Xaa is A or G or is absent

SEQ ID NO: 35950 - protein, 38 aa, Artificial Sequence; identical to SEQ ID NO: 11913
  GFR-binding peptide
  MOD_RES (1)..(3)..(35)..(36): Xaa is C or S

SEQ ID NO: 35951 - protein, 35 aa, Artificial Sequence; identical to SEQ ID NO: 11914
  GFR-binding peptide
  MOD_RES (2)..(33)..(34): Xaa is C or S

SEQ ID NO: 35952 - protein, 34 aa, Artificial Sequence; identical to SEQ ID NO: 2558
  GFR-binding peptide
  MOD_RES (2)..(4): Xaa is C or S

SEQ ID NO: 35953 - protein, 39 aa, Artificial Sequence; identical to SEQ ID NO: 4483
  GFR-binding peptide
  MOD_RES (1)..(34)..(35): Xaa is C or S
  MOD_RES (12)..(13)..(14)..(15)..(16): Xaa is A or G
  MOD_RES (17)..(18)..(19)..(20): Xaa is A or G or is absent

SEQ ID NO: 35954 - protein, 36 aa, Artificial Sequence; identical to SEQ ID NO: 11916
  GFR-binding peptide
  MOD_RES (2)..(4)..(36): Xaa is C or S

SEQ ID NO: 35955 - protein, 35 aa, Artificial Sequence; identical to SEQ ID NO: 11918
  GFR-binding peptide
  MOD_RES (1)..(33)..(34): Xaa is C or S

SEQ ID NO: 35956 - protein, 36 aa, Artificial Sequence; identical to SEQ ID NO: 11919
  GFR-binding peptide
  MOD_RES (2)..(4): Xaa is C or S
  MOD_RES (15)..(16)..(17)..(18)..(19): Xaa is A or G
  MOD_RES (20)..(21)..(22)..(23): Xaa is A or G or is absent

SEQ ID NO: 35957 - protein, 33 aa, Artificial Sequence; identical to SEQ ID NO: 11920
  GFR-binding peptide
  MOD_RES (12)..(13)..(14)..(15)..(16): Xaa is A or G
  MOD_RES (17)..(18)..(19)..(20): Xaa is A or G or is absent

SEQ ID NO: 35958 - protein, 38 aa, Artificial Sequence
  GFR-binding peptide
  MOD_RES (1)..(3)..(36)..(37): Xaa is C or S
  MOD_RES (14)..(15)..(16)..(17)..(18): Xaa is A or G
  MOD_RES (19)..(20)..(21)..(22): Xaa is A or G or is absent
XKXSKVIMNSLQEXXXXXXXXXYYLITLPELDQSVXXP

SEQ ID NO: 35959 - protein, 40 aa, Artificial Sequence; identical to SEQ ID NO: 2563
  GFR-binding peptide
  MOD_RES (1)..(3)..(35)..(36): Xaa is C or S

SEQ ID NO: 35960 - protein, 39 aa, Artificial Sequence; identical to SEQ ID NO: 11921
  GFR-binding peptide
  MOD_RES (2)..(4)..(38): Xaa is C or S
  MOD_RES (16)..(17)..(18)..(19)..(20): Xaa is A or G
  MOD_RES (21)..(22)..(23)..(24): Xaa is A or G or is absent

SEQ ID NO: 35961 - protein, 34 aa, Artificial Sequence; identical to SEQ ID NO: 11924
  GFR-binding peptide
  MOD_RES (34)..(34): Xaa is C or S
  MOD_RES (12)..(13)..(14)..(15)..(16): Xaa is A or G
  MOD_RES (17)..(18)..(19)..(20): Xaa is A or G or is absent

SEQ ID NO: 35962 - protein, 37 aa, Artificial Sequence; identical to SEQ ID NO: 10058
  GFR-binding peptide
  MOD_RES (34)..(35): Xaa is C or S
  MOD_RES (12)..(13)..(14)..(15)..(16): Xaa is A or G
  MOD_RES (17)..(18)..(19)..(20): Xaa is A or G or is absent

SEQ ID NO: 35963 - protein, 36 aa, Artificial Sequence; identical to SEQ ID NO: 10059
  GFR-binding peptide
  MOD_RES (1)..(3): Xaa is C or S
  MOD_RES (15)..(16)..(17)..(18)..(19): Xaa is A or G
  MOD_RES (20)..(21)..(22)..(23): Xaa is A or G or is absent

SEQ ID NO: 35964 - protein, 33 aa, Artificial Sequence; identical to SEQ ID NO: 11926
  GFR-binding peptide
  MOD_RES (32)..(33): Xaa is C or S

SEQ ID NO: 35965 - protein, 35 aa, Artificial Sequence; identical to SEQ ID NO: 2569
  GFR-binding peptide
  MOD_RES (1)..(33)..(34): Xaa is C or S

SEQ ID NO: 35966 - protein, 35 aa, Artificial Sequence; identical to SEQ ID NO: 11927
  GFR-binding peptide
  MOD_RES (1)..(34)..(35): Xaa is C or S
  MOD_RES (12)..(13)..(14)..(15)..(16): Xaa is A or G
  MOD_RES (17)..(18)..(19)..(20): Xaa is A or G or is absent

SEQ ID NO: 35967 - protein, 39 aa, Artificial Sequence; identical to SEQ ID NO: 10061
  GFR-binding peptide
  MOD_RES (2)..(4)..(38)..(39): Xaa is C or S
  MOD_RES (16)..(17)..(18)..(19)..(20): Xaa is A or G
  MOD_RES (21)..(22)..(23)..(24): Xaa is A or G or is absent

SEQ ID NO: 35968 - protein, 40 aa, Artificial Sequence; identical to SEQ ID NO: 10063
  GFR-binding peptide
  MOD_RES (1)..(3)..(35): Xaa is C or S

SEQ ID NO: 35969 - protein, 35 aa, Artificial Sequence; identical to SEQ ID NO: 10064
  GFR-binding peptide
  MOD_RES (2)..(33)..(34): Xaa is C or S

SEQ ID NO: 35970 - protein, 37 aa, Artificial Sequence; identical to SEQ ID NO: 11929
  GFR-binding peptide
  MOD_RES (33)..(34): Xaa is C or S
  MOD_RES (11)..(12)..(13)..(14)..(15): Xaa is A or G
  MOD_RES (16)..(17)..(18)..(19): Xaa is A or G or is absent

SEQ ID NO: 35971 - protein, 35 aa, Artificial Sequence; identical to SEQ ID NO: 11930
  GFR-binding peptide
  MOD_RES (1)..(3): Xaa is C or S
  MOD_RES (14)..(15)..(16)..(17)..(18): Xaa is A or G
  MOD_RES (19)..(20)..(21)..(22): Xaa is A or G or is absent

SEQ ID NO: 35972 - protein, 31 aa, Artificial Sequence; identical to SEQ ID NO: 10065
  GFR-binding peptide
  MOD_RES (1)..(1): Xaa is C or S

SEQ ID NO: 35973 - protein, 36 aa, Artificial Sequence; identical to SEQ ID NO: 11932
  GFR-binding peptide
  MOD_RES (2)..(33)..(34): Xaa is C or S

SEQ ID NO: 35974 - protein, 36 aa, Artificial Sequence; identical to SEQ ID NO: 11934
  GFR-binding peptide
  MOD_RES (32)..(33): Xaa is C or S

SEQ ID NO: 35975 - protein, 42 aa, Artificial Sequence; identical to SEQ ID NO: 10066
  GFR-binding peptide
  MOD_RES (2)..(4)..(36)..(37): Xaa is C or S

SEQ ID NO: 35976 - protein, 37 aa, Artificial Sequence; identical to SEQ ID NO: 10067
  GFR-binding peptide
  MOD_RES (2)..(36)..(37): Xaa is C or S
  MOD_RES (14)..(15)..(16)..(17)..(18): Xaa is A or G
  MOD_RES (19)..(20)..(21)..(22): Xaa is A or G or is absent

SEQ ID NO: 35977 - protein, 42 aa, Artificial Sequence; identical to SEQ ID NO: 10068
  GFR-binding peptide
  MOD_RES (1)..(3)..(36)..(37): Xaa is C or S
  MOD_RES (14)..(15)..(16)..(17)..(18): Xaa is A or G
  MOD_RES (19)..(20)..(21)..(22): Xaa is A or G or is absent

SEQ ID NO: 35978 - protein, 38 aa, Artificial Sequence; identical to SEQ ID NO: 11936
  GFR-binding peptide
  MOD_RES (2)..(36)..(37): Xaa is C or S
  MOD_RES (14)..(15)..(16)..(17)..(18): Xaa is A or G
  MOD_RES (19)..(20)..(21)..(22): Xaa is A or G or is absent

SEQ ID NO: 35979 - protein, 36 aa, Artificial Sequence; identical to SEQ ID NO: 10069
  GFR-binding peptide
  MOD_RES (2)..(4)..(35)..(36): Xaa is C or S

SEQ ID NO: 35980 - protein, 37 aa, Artificial Sequence; identical to SEQ ID NO: 4499
  GFR-binding peptide
  MOD_RES (2)..(34)..(35): Xaa is C or S

SEQ ID NO: 35981 - protein, 39 aa, Artificial Sequence
  GFR-binding peptide
  MOD_RES (1)..(34)..(35): Xaa is C or S
  MOD_RES (12)..(13)..(14)..(15)..(16): Xaa is A or G
  MOD_RES (17)..(18)..(19)..(20): Xaa is A or G or is absent
XSKVIMNSLQEXXXXXXXXXYYLITLPELDQSVXXPSAS

SEQ ID NO: 35982 - protein, 38 aa, Artificial Sequence; identical to SEQ ID NO: 10070
  GFR-binding peptide
  MOD_RES (2)..(34)..(35): Xaa is C or S

SEQ ID NO: 35983 - protein, 38 aa, Artificial Sequence; identical to SEQ ID NO: 2579
  GFR-binding peptide
  MOD_RES (1)..(3)..(36)..(37): Xaa is C or S
  MOD_RES (14)..(15)..(16)..(17)..(18): Xaa is A or G
  MOD_RES (19)..(20)..(21)..(22): Xaa is A or G or is absent

SEQ ID NO: 35984 - protein, 33 aa, Artificial Sequence; identical to SEQ ID NO: 10072
  GFR-binding peptide
  MOD_RES (1)..(3): Xaa is C or S

SEQ ID NO: 35985 - protein, 38 aa, Artificial Sequence; identical to SEQ ID NO: 10073
  GFR-binding peptide
  MOD_RES (34)..(35): Xaa is C or S
  MOD_RES (12)..(13)..(14)..(15)..(16): Xaa is A or G
  MOD_RES (17)..(18)..(19)..(20): Xaa is A or G or is absent

SEQ ID NO: 35986 - protein, 34 aa, Artificial Sequence; identical to SEQ ID NO: 4501
  GFR-binding peptide
  MOD_RES (2)..(2): Xaa is C or S
  MOD_RES (13)..(14)..(15)..(16)..(17): Xaa is A or G
  MOD_RES (18)..(19)..(20)..(21): Xaa is A or G or is absent

SEQ ID NO: 35987 - protein, 39 aa, Artificial Sequence; identical to SEQ ID NO: 10074
  GFR-binding peptide
  MOD_RES (2)..(4)..(38)..(39): Xaa is C or S
  MOD_RES (16)..(17)..(18)..(19)..(20): Xaa is A or G
  MOD_RES (21)..(22)..(23)..(24): Xaa is A or G or is absent

SEQ ID NO: 35988 - protein, 34 aa, Artificial Sequence; identical to SEQ ID NO: 11940
  GFR-binding peptide
  MOD_RES (33)..(34): Xaa is C or S
  MOD_RES (11)..(12)..(13)..(14)..(15): Xaa is A or G
  MOD_RES (16)..(17)..(18)..(19): Xaa is A or G or is absent

SEQ ID NO: 35989 - protein, 36 aa, Artificial Sequence; identical to SEQ ID NO: 10075
  GFR-binding peptide
  MOD_RES (31)..(32): Xaa is C or S

SEQ ID NO: 35990 - protein, 32 aa, Artificial Sequence; identical to SEQ ID NO: 11941
  GFR-binding peptide
  MOD_RES (11)..(12)..(13)..(14)..(15): Xaa is A or G
  MOD_RES (16)..(17)..(18)..(19): Xaa is A or G or is absent

SEQ ID NO: 35991 - protein, 34 aa, Artificial Sequence; identical to SEQ ID NO: 11942
  GFR-binding peptide
  MOD_RES (1)..(33)..(34): Xaa is C or S

SEQ ID NO: 35992 - protein, 35 aa, Artificial Sequence; identical to SEQ ID NO: 10077
  GFR-binding peptide
  MOD_RES (32)..(33): Xaa is C or S

SEQ ID NO: 35993 - protein, 41 aa, Artificial Sequence; identical to SEQ ID NO: 11943
  GFR-binding peptide
  MOD_RES (2)..(4)..(36)..(37): Xaa is C or S

SEQ ID NO: 35994 - protein, 33 aa, Artificial Sequence; identical to SEQ ID NO: 10080
  GFR-binding peptide
  MOD_RES (31)..(32): Xaa is C or S

SEQ ID NO: 35995 - protein, 42 aa, Artificial Sequence; identical to SEQ ID NO: 11945
  GFR-binding peptide
  MOD_RES (1)..(3)..(36)..(37): Xaa is C or S
  MOD_RES (14)..(15)..(16)..(17)..(18): Xaa is A or G
  MOD_RES (19)..(20)..(21)..(22): Xaa is A or G or is absent

SEQ ID NO: 35996 - protein, 37 aa, Artificial Sequence; identical to SEQ ID NO: 11946
  GFR-binding peptide
  MOD_RES (2)..(4)..(36)..(37): Xaa is C or S

SEQ ID NO: 35997 - protein, 34 aa, Artificial Sequence; identical to SEQ ID NO: 10083
  GFR-binding peptide
  MOD_RES (31)..(32): Xaa is C or S

SEQ ID NO: 35998 - protein, 38 aa, Artificial Sequence; identical to SEQ ID NO: 10084
  GFR-binding peptide
  MOD_RES (1)..(32)..(33): Xaa is C or S

SEQ ID NO: 35999 - protein, 36 aa, Artificial Sequence; identical to SEQ ID NO: 11948
  GFR-binding peptide
  MOD_RES (32)..(33): Xaa is C or S

SEQ ID NO: 36000 - protein, 42 aa, Artificial Sequence; identical to SEQ ID NO: 11949
  GFR-binding peptide
  MOD_RES (2)..(4)..(37)..(38): Xaa is C or S
  MOD_RES (15)..(16)..(17)..(18)..(19): Xaa is A or G
  MOD_RES (20)..(21)..(22)..(23): Xaa is A or G or is absent

SEQ ID NO: 36001 - protein, 37 aa, Artificial Sequence; identical to SEQ ID NO: 10087
  GFR-binding peptide
  MOD_RES (31)..(32): Xaa is C or S

SEQ ID NO: 36002 - protein, 41 aa, Artificial Sequence; identical to SEQ ID NO: 11950
  GFR-binding peptide
  MOD_RES (1)..(3)..(37)..(38): Xaa is C or S
  MOD_RES (15)..(16)..(17)..(18)..(19): Xaa is A or G
  MOD_RES (20)..(21)..(22)..(23): Xaa is A or G or is absent

SEQ ID NO: 36003 - protein, 35 aa, Artificial Sequence; identical to SEQ ID NO: 4513
  GFR-binding peptide
  MOD_RES (34)..(35): Xaa is C or S
  MOD_RES (12)..(13)..(14)..(15)..(16): Xaa is A or G
  MOD_RES (17)..(18)..(19)..(20): Xaa is A or G or is absent

SEQ ID NO: 36004 - protein, 38 aa, Artificial Sequence; identical to SEQ ID NO: 11952
  GFR-binding peptide
  MOD_RES (32)..(33): Xaa is C or S

SEQ ID NO: 36005 - protein, 39 aa, Artificial Sequence; identical to SEQ ID NO: 4514
  GFR-binding peptide
  MOD_RES (2)..(36)..(37): Xaa is C or S
  MOD_RES (14)..(15)..(16)..(17)..(18): Xaa is A or G
  MOD_RES (19)..(20)..(21)..(22): Xaa is A or G or is absent

SEQ ID NO: 36006 - protein, 32 aa, Artificial Sequence; identical to SEQ ID NO: 11954
  GFR-binding peptide
  MOD_RES (32)..(32): Xaa is C or S

SEQ ID NO: 36007 - protein, 39 aa, Artificial Sequence; identical to SEQ ID NO: 11955
  GFR-binding peptide
  MOD_RES (1)..(35)..(36): Xaa is C or S
  MOD_RES (13)..(14)..(15)..(16)..(17): Xaa is A or G
  MOD_RES (18)..(19)..(20)..(21): Xaa is A or G or is absent

SEQ ID NO: 36008 - protein, 38 aa, Artificial Sequence; identical to SEQ ID NO: 11956
  GFR-binding peptide
  MOD_RES (2)..(4)..(36): Xaa is C or S

SEQ ID NO: 36009 - protein, 41 aa, Artificial Sequence; identical to SEQ ID NO: 11957
  GFR-binding peptide
  MOD_RES (1)..(35)..(36): Xaa is C or S
  MOD_RES (13)..(14)..(15)..(16)..(17): Xaa is A or G
  MOD_RES (18)..(19)..(20)..(21): Xaa is A or G or is absent

SEQ ID NO: 36010 - protein, 42 aa, Artificial Sequence; identical to SEQ ID NO: 11958
  GFR-binding peptide
  MOD_RES (2)..(4)..(38): Xaa is C or S
  MOD_RES (16)..(17)..(18)..(19)..(20): Xaa is A or G
  MOD_RES (21)..(22)..(23)..(24): Xaa is A or G or is absent

SEQ ID NO: 36011 - protein, 40 aa, Artificial Sequence; identical to SEQ ID NO: 11959
  GFR-binding peptide
  MOD_RES (1)..(34)..(35): Xaa is C or S
  MOD_RES (12)..(13)..(14)..(15)..(16): Xaa is A or G
  MOD_RES (17)..(18)..(19)..(20): Xaa is A or G or is absent

SEQ ID NO: 36012 - protein, 39 aa, Artificial Sequence; identical to SEQ ID NO: 11960
  GFR-binding peptide
  MOD_RES (1)..(3)..(37): Xaa is C or S
  MOD_RES (15)..(16)..(17)..(18)..(19): Xaa is A or G
  MOD_RES (20)..(21)..(22)..(23): Xaa is A or G or is absent

SEQ ID NO: 36013 - protein, 42 aa, Artificial Sequence; identical to SEQ ID NO: 11964
  GFR-binding peptide
  MOD_RES (1)..(3)..(36)..(37): Xaa is C or S
  MOD_RES (14)..(15)..(16)..(17)..(18): Xaa is A or G
  MOD_RES (19)..(20)..(21)..(22): Xaa is A or G or is absent

SEQ ID NO: 36014 - protein, 35 aa, Artificial Sequence; identical to SEQ ID NO: 4523
  GFR-binding peptide
  MOD_RES (33)..(34): Xaa is C or S
  MOD_RES (11)..(12)..(13)..(14)..(15): Xaa is A or G
  MOD_RES (16)..(17)..(18)..(19): Xaa is A or G or is absent

SEQ ID NO: 36015 - protein, 37 aa, Artificial Sequence; identical to SEQ ID NO: 10090
  GFR-binding peptide
  MOD_RES (2)..(4)..(36)..(37): Xaa is C or S

SEQ ID NO: 36016 - protein, 38 aa, Artificial Sequence; identical to SEQ ID NO: 10091
  GFR-binding peptide
  MOD_RES (2)..(35)..(36): Xaa is C or S
  MOD_RES (13)..(14)..(15)..(16)..(17): Xaa is A or G
  MOD_RES (18)..(19)..(20)..(21): Xaa is A or G or is absent

SEQ ID NO: 36017 - protein, 38 aa, Artificial Sequence; identical to SEQ ID NO: 11966
  GFR-binding peptide
  MOD_RES (1)..(35)..(36): Xaa is C or S
  MOD_RES (13)..(14)..(15)..(16)..(17): Xaa is A or G
  MOD_RES (18)..(19)..(20)..(21): Xaa is A or G or is absent

SEQ ID NO: 36018 - protein, 38 aa, Artificial Sequence; identical to SEQ ID NO: 10092
  GFR-binding peptide
  MOD_RES (1)..(33)..(34): Xaa is C or S

SEQ ID NO: 36019 - protein, 33 aa, Artificial Sequence; identical to SEQ ID NO: 10095
  GFR-binding peptide
  MOD_RES (31)..(32): Xaa is C or S

SEQ ID NO: 36020 - protein, 40 aa, Artificial Sequence; identical to SEQ ID NO: 11967
  GFR-binding peptide
  MOD_RES (1)..(3)..(34)..(35): Xaa is C or S

SEQ ID NO: 36021 - protein, 38 aa, Artificial Sequence; identical to SEQ ID NO: 10096
  GFR-binding peptide
  MOD_RES (1)..(34)..(35): Xaa is C or S
  MOD_RES (12)..(13)..(14)..(15)..(16): Xaa is A or G
  MOD_RES (17)..(18)..(19)..(20): Xaa is A or G or is absent

SEQ ID NO: 36022 - protein, 38 aa, Artificial Sequence; identical to SEQ ID NO: 10097
  GFR-binding peptide
  MOD_RES (1)..(3)..(34)..(35): Xaa is C or S

SEQ ID NO: 36023 - protein, 36 aa, Artificial Sequence; identical to SEQ ID NO: 10098
  GFR-binding peptide
  MOD_RES (33)..(34): Xaa is C or S
  MOD_RES (11)..(12)..(13)..(14)..(15): Xaa is A or G
  MOD_RES (16)..(17)..(18)..(19): Xaa is A or G or is absent

SEQ ID NO: 36024 - protein, 33 aa, Artificial Sequence; identical to SEQ ID NO: 2612
  GFR-binding peptide
  MOD_RES (1)..(1): Xaa is C or S
  MOD_RES (12)..(13)..(14)..(15)..(16): Xaa is A or G
  MOD_RES (17)..(18)..(19)..(20): Xaa is A or G or is absent

SEQ ID NO: 36025 - protein, 35 aa, Artificial Sequence; identical to SEQ ID NO: 2614
  GFR-binding peptide
  MOD_RES (33)..(34): Xaa is C or S
  MOD_RES (11)..(12)..(13)..(14)..(15): Xaa is A or G
  MOD_RES (16)..(17)..(18)..(19): Xaa is A or G or is absent

SEQ ID NO: 36026 - protein, 33 aa, Artificial Sequence; identical to SEQ ID NO: 11970
  GFR-binding peptide
  MOD_RES (2)..(33): Xaa is C or S

SEQ ID NO: 36027 - protein, 34 aa, Artificial Sequence; identical to SEQ ID NO: 10101
  GFR-binding peptide
  MOD_RES (1)..(3): Xaa is C or S

SEQ ID NO: 36028 - protein, 37 aa, Artificial Sequence; identical to SEQ ID NO: 11972
  GFR-binding peptide
  MOD_RES (34)..(35): Xaa is C or S
  MOD_RES (12)..(13)..(14)..(15)..(16): Xaa is A or G
  MOD_RES (17)..(18)..(19)..(20): Xaa is A or G or is absent

SEQ ID NO: 36029 - protein, 36 aa, Artificial Sequence; identical to SEQ ID NO: 11973
  GFR-binding peptide
  MOD_RES (1)..(3)..(35): Xaa is C or S

SEQ ID NO: 36030 - protein, 36 aa, Artificial Sequence; identical to SEQ ID NO: 4534
  GFR-binding peptide
  MOD_RES (32)..(33): Xaa is C or S

SEQ ID NO: 36031 - protein, 35 aa, Artificial Sequence; identical to SEQ ID NO: 10103
  GFR-binding peptide
  MOD_RES (2)..(4)..(35): Xaa is C or S

SEQ ID NO: 36032 - protein, 39 aa, Artificial Sequence; identical to SEQ ID NO: 11975
  GFR-binding peptide
  MOD_RES (2)..(36)..(37): Xaa is C or S
  MOD_RES (14)..(15)..(16)..(17)..(18): Xaa is A or G
  MOD_RES (19)..(20)..(21)..(22): Xaa is A or G or is absent

SEQ ID NO: 36033 - protein, 39 aa, Artificial Sequence; identical to SEQ ID NO: 10104
  GFR-binding peptide
  MOD_RES (2)..(4)..(37)..(38): Xaa is C or S
  MOD_RES (15)..(16)..(17)..(18)..(19): Xaa is A or G
  MOD_RES (20)..(21)..(22)..(23): Xaa is A or G or is absent

SEQ ID NO: 36034 - protein, 38 aa, Artificial Sequence
  GFR-binding peptide
  MOD_RES (33)..(34): Xaa is C or S
  MOD_RES (11)..(12)..(13)..(14)..(15): Xaa is A or G
  MOD_RES (16)..(17)..(18)..(19): Xaa is A or G or is absent
SKVIMNSLQEXXXXXXXXXYYLITLPELDQSVXXPSAS

SEQ ID NO: 36035 - protein, 38 aa, Artificial Sequence; identical to SEQ ID NO: 11976
  GFR-binding peptide
  MOD_RES (1)..(3)..(35)..(36): Xaa is C or S

SEQ ID NO: 36036 - protein, 34 aa, Artificial Sequence; identical to SEQ ID NO: 4538
  GFR-binding peptide
  MOD_RES (2)..(33)..(34): Xaa is C or S

SEQ ID NO: 36037 - protein, 40 aa, Artificial Sequence; identical to SEQ ID NO: 10105
  GFR-binding peptide
  MOD_RES (1)..(3)..(36)..(37): Xaa is C or S
  MOD_RES (14)..(15)..(16)..(17)..(18): Xaa is A or G
  MOD_RES (19)..(20)..(21)..(22): Xaa is A or G or is absent

SEQ ID NO: 36038 - protein, 36 aa, Artificial Sequence; identical to SEQ ID NO: 10106
  GFR-binding peptide
  MOD_RES (1)..(32)..(33): Xaa is C or S

SEQ ID NO: 36039 - protein, 34 aa, Artificial Sequence; identical to SEQ ID NO: 2621
  GFR-binding peptide
  MOD_RES (31)..(32): Xaa is C or S

SEQ ID NO: 36040 - protein, 32 aa, Artificial Sequence; identical to SEQ ID NO: 11979
  GFR-binding peptide
  MOD_RES (31)..(32): Xaa is C or S

SEQ ID NO: 36041 - protein, 40 aa, Artificial Sequence; identical to SEQ ID NO: 10109
  GFR-binding peptide
  MOD_RES (1)..(3)..(35)..(36): Xaa is C or S

SEQ ID NO: 36042 - protein, 40 aa, Artificial Sequence; identical to SEQ ID NO: 10112
  GFR-binding peptide
  MOD_RES (2)..(4)..(36)..(37): Xaa is C or S

SEQ ID NO: 36043 - protein, 36 aa, Artificial Sequence; identical to SEQ ID NO: 10113
  GFR-binding peptide
  MOD_RES (34)..(35): Xaa is C or S
  MOD_RES (12)..(13)..(14)..(15)..(16): Xaa is A or G
  MOD_RES (17)..(18)..(19)..(20): Xaa is A or G or is absent

SEQ ID NO: 36044 - protein, 38 aa, Artificial Sequence; identical to SEQ ID NO: 11982
  GFR-binding peptide
  MOD_RES (2)..(4)..(35)..(36): Xaa is C or S

SEQ ID NO: 36045 - protein, 38 aa, Artificial Sequence; identical to SEQ ID NO: 11983
  GFR-binding peptide
  MOD_RES (32)..(33): Xaa is C or S

SEQ ID NO: 36046 - protein, 35 aa, Artificial Sequence; identical to SEQ ID NO: 11984
  GFR-binding peptide
  MOD_RES (2)..(33)..(34): Xaa is C or S

SEQ ID NO: 36047 - protein, 31 aa, Artificial Sequence; identical to SEQ ID NO: 2628
  GFR-binding peptide
  MOD_RES (31)..(31): Xaa is C or S

SEQ ID NO: 36048 - protein, 40 aa, Artificial Sequence; identical to SEQ ID NO: 4553
  GFR-binding peptide
  MOD_RES (34)..(35): Xaa is C or S
  MOD_RES (12)..(13)..(14)..(15)..(16): Xaa is A or G
  MOD_RES (17)..(18)..(19)..(20): Xaa is A or G or is absent

SEQ ID NO: 36049 - protein, 39 aa, Artificial Sequence; identical to SEQ ID NO: 11987
  GFR-binding peptide
  MOD_RES (1)..(3)..(36)..(37): Xaa is C or S
  MOD_RES (14)..(15)..(16)..(17)..(18): Xaa is A or G
  MOD_RES (19)..(20)..(21)..(22): Xaa is A or G or is absent

SEQ ID NO: 36050 - protein, 37 aa, Artificial Sequence; identical to SEQ ID NO: 11988
  GFR-binding peptide
  MOD_RES (2)..(33)..(34): Xaa is C or S

SEQ ID NO: 36051 - protein, 37 aa, Artificial Sequence; identical to SEQ ID NO: 11990
  GFR-binding peptide
  MOD_RES (32)..(32): Xaa is C or S

SEQ ID NO: 36052 - protein, 35 aa, Artificial Sequence; identical to SEQ ID NO: 10118
  GFR-binding peptide
  MOD_RES (33)..(34): Xaa is C or S
  MOD_RES (11)..(12)..(13)..(14)..(15): Xaa is A or G
  MOD_RES (16)..(17)..(18)..(19): Xaa is A or G or is absent

SEQ ID NO: 36053 - protein, 36 aa, Artificial Sequence; identical to SEQ ID NO: 4556
  GFR-binding peptide
  MOD_RES (1)..(33)..(34): Xaa is C or S

SEQ ID NO: 36054 - protein, 40 aa, Artificial Sequence; identical to SEQ ID NO: 10120
  GFR-binding peptide
  MOD_RES (1)..(3)..(34)..(35): Xaa is C or S

SEQ ID NO: 36055 - protein, 35 aa, Artificial Sequence; identical to SEQ ID NO: 4558
  GFR-binding peptide
  MOD_RES (2)..(2): Xaa is C or S
  MOD_RES (14)..(15)..(16)..(17)..(18): Xaa is A or G
  MOD_RES (19)..(20)..(21)..(22): Xaa is A or G or is absent

SEQ ID NO: 36056 - protein, 35 aa, Artificial Sequence; identical to SEQ ID NO: 11993
  GFR-binding peptide
  MOD_RES (31)..(32): Xaa is C or S

SEQ ID NO: 36057 - protein, 39 aa, Artificial Sequence; identical to SEQ ID NO: 2637
  GFR-binding peptide
  MOD_RES (2)..(4)..(37)..(38): Xaa is C or S
  MOD_RES (15)..(16)..(17)..(18)..(19): Xaa is A or G
  MOD_RES (20)..(21)..(22)..(23): Xaa is A or G or is absent

SEQ ID NO: 36058 - protein, 32 aa, Artificial Sequence; identical to SEQ ID NO: 11994
  GFR-binding peptide
  MOD_RES (31)..(32): Xaa is C or S

SEQ ID NO: 36059 - protein, 35 aa, Artificial Sequence; identical to SEQ ID NO: 10124
  GFR-binding peptide
  MOD_RES (1)..(3)..(35): Xaa is C or S

SEQ ID NO: 36060 - protein, 41 aa, Artificial Sequence; identical to SEQ ID NO: 11995
  GFR-binding peptide
  MOD_RES (2)..(4)..(36)..(37): Xaa is C or S

SEQ ID NO: 36061 - protein, 37 aa, Artificial Sequence; identical to SEQ ID NO: 11996
  GFR-binding peptide
  MOD_RES (34)..(35): Xaa is C or S
  MOD_RES (12)..(13)..(14)..(15)..(16): Xaa is A or G
  MOD_RES (17)..(18)..(19)..(20): Xaa is A or G or is absent

SEQ ID NO: 36062 - protein, 35 aa, Artificial Sequence; identical to SEQ ID NO: 11997
  GFR-binding peptide
  MOD_RES (2)..(4)..(35): Xaa is C or S

SEQ ID NO: 36063 - protein, 38 aa, Artificial Sequence; identical to SEQ ID NO: 10125
  GFR-binding peptide
  MOD_RES (2)..(4)..(38): Xaa is C or S
  MOD_RES (16)..(17)..(18)..(19)..(20): Xaa is A or G
  MOD_RES (21)..(22)..(23)..(24): Xaa is A or G or is absent

SEQ ID NO: 36064 - protein, 37 aa, Artificial Sequence; identical to SEQ ID NO: 10126
  GFR-binding peptide
  MOD_RES (2)..(4): Xaa is C or S
  MOD_RES (16)..(17)..(18)..(19)..(20): Xaa is A or G
  MOD_RES (21)..(22)..(23)..(24): Xaa is A or G or is absent

SEQ ID NO: 36065 - protein, 37 aa, Artificial Sequence; identical to SEQ ID NO: 2642
  GFR-binding peptide
  MOD_RES (31)..(32): Xaa is C or S

SEQ ID NO: 36066 - protein, 36 aa, Artificial Sequence; identical to SEQ ID NO: 11998
  GFR-binding peptide
  MOD_RES (1)..(33)..(34): Xaa is C or S

SEQ ID NO: 36067 - protein, 38 aa, Artificial Sequence; identical to SEQ ID NO: 4566
  GFR-binding peptide
  MOD_RES (1)..(3)..(36)..(37): Xaa is C or S
  MOD_RES (14)..(15)..(16)..(17)..(18): Xaa is A or G
  MOD_RES (19)..(20)..(21)..(22): Xaa is A or G or is absent

SEQ ID NO: 36068 - protein, 36 aa, Artificial Sequence; identical to SEQ ID NO: 10128
  GFR-binding peptide
  MOD_RES (1)..(3)..(35): Xaa is C or S

SEQ ID NO: 36069 - protein, 40 aa, Artificial Sequence; identical to SEQ ID NO: 12000
  GFR-binding peptide
  MOD_RES (2)..(34)..(35): Xaa is C or S

SEQ ID NO: 36070 - protein, 35 aa, Artificial Sequence; identical to SEQ ID NO: 12001
  GFR-binding peptide
  MOD_RES (2)..(2): Xaa is C or S
  MOD_RES (14)..(15)..(16)..(17)..(18): Xaa is A or G
  MOD_RES (19)..(20)..(21)..(22): Xaa is A or G or is absent

SEQ ID NO: 36071 - protein, 32 aa, Artificial Sequence; identical to SEQ ID NO: 12002
  GFR-binding peptide
  MOD_RES (11)..(12)..(13)..(14)..(15): Xaa is A or G
  MOD_RES (16)..(17)..(18)..(19): Xaa is A or G or is absent

SEQ ID NO: 36072 - protein, 39 aa, Artificial Sequence; identical to SEQ ID NO: 10131
  GFR-binding peptide
  MOD_RES (33)..(34): Xaa is C or S
  MOD_RES (11)..(12)..(13)..(14)..(15): Xaa is A or G
  MOD_RES (16)..(17)..(18)..(19): Xaa is A or G or is absent

SEQ ID NO: 36073 - protein, 39 aa, Artificial Sequence; identical to SEQ ID NO: 4570
  GFR-binding peptide
  MOD_RES (1)..(3)..(35)..(36): Xaa is C or S

SEQ ID NO: 36074 - protein, 40 aa, Artificial Sequence; identical to SEQ ID NO: 12004
  GFR-binding peptide
  MOD_RES (2)..(34)..(35): Xaa is C or S

SEQ ID NO: 36075 - protein, 33 aa, Artificial Sequence; identical to SEQ ID NO: 12005
  GFR-binding peptide
  MOD_RES (32)..(33): Xaa is C or S

SEQ ID NO: 36076 - protein, 38 aa, Artificial Sequence; identical to SEQ ID NO: 10133
  GFR-binding peptide
  MOD_RES (33)..(34): Xaa is C or S
  MOD_RES (11)..(12)..(13)..(14)..(15): Xaa is A or G
  MOD_RES (16)..(17)..(18)..(19): Xaa is A or G or is absent

SEQ ID NO: 36077 - protein, 41 aa, Artificial Sequence
  GFR-binding peptide
  MOD_RES (2)..(4)..(37)..(38): Xaa is C or S
  MOD_RES (15)..(16)..(17)..(18)..(19): Xaa is A or G
  MOD_RES (20)..(21)..(22)..(23): Xaa is A or G or is absent
SXKXSKVIMNSLQEXXXXXXXXXYYLITLPELDQSVXXPSA

SEQ ID NO: 36078 - protein, 33 aa, Artificial Sequence; identical to SEQ ID NO: 10134
  GFR-binding peptide
  MOD_RES (33)..(33): Xaa is C or S
  MOD_RES (11)..(12)..(13)..(14)..(15): Xaa is A or G
  MOD_RES (16)..(17)..(18)..(19): Xaa is A or G or is absent

SEQ ID NO: 36079 - protein, 36 aa, Artificial Sequence; identical to SEQ ID NO: 10135
  GFR-binding peptide
  MOD_RES (2)..(34)..(35): Xaa is C or S

SEQ ID NO: 36080 - protein, 37 aa, Artificial Sequence; identical to SEQ ID NO: 10136
  GFR-binding peptide
  MOD_RES (2)..(4): Xaa is C or S
  MOD_RES (16)..(17)..(18)..(19)..(20): Xaa is A or G
  MOD_RES (21)..(22)..(23)..(24): Xaa is A or G or is absent

SEQ ID NO: 36081 - protein, 38 aa, Artificial Sequence; identical to SEQ ID NO: 2658
  GFR-binding peptide
  MOD_RES (1)..(3)..(37)..(38): Xaa is C or S
  MOD_RES (15)..(16)..(17)..(18)..(19): Xaa is A or G
  MOD_RES (20)..(21)..(22)..(23): Xaa is A or G or is absent

SEQ ID NO: 36082 - protein, 38 aa, Artificial Sequence; identical to SEQ ID NO: 10139
  GFR-binding peptide
  MOD_RES (2)..(36)..(37): Xaa is C or S
  MOD_RES (14)..(15)..(16)..(17)..(18): Xaa is A or G
  MOD_RES (19)..(20)..(21)..(22): Xaa is A or G or is absent

SEQ ID NO: 36083 - protein, 40 aa, Artificial Sequence; identical to SEQ ID NO: 10140
  GFR-binding peptide
  MOD_RES (1)..(3)..(36)..(37): Xaa is C or S
  MOD_RES (14)..(15)..(16)..(17)..(18): Xaa is A or G
  MOD_RES (19)..(20)..(21)..(22): Xaa is A or G or is absent

SEQ ID NO: 36084 - protein, 35 aa, Artificial Sequence; identical to SEQ ID NO: 2659
  GFR-binding peptide
  MOD_RES (2)..(4)..(35): Xaa is C or S

SEQ ID NO: 36085 - protein, 35 aa, Artificial Sequence; identical to SEQ ID NO: 12008
  GFR-binding peptide
  MOD_RES (1)..(35): Xaa is C or S
  MOD_RES (13)..(14)..(15)..(16)..(17): Xaa is A or G
  MOD_RES (18)..(19)..(20)..(21): Xaa is A or G or is absent

SEQ ID NO: 36086 - protein, 39 aa, Artificial Sequence; identical to SEQ ID NO: 12009
  GFR-binding peptide
  MOD_RES (2)..(33)..(34): Xaa is C or S

SEQ ID NO: 36087 - protein, 41 aa, Artificial Sequence; identical to SEQ ID NO: 12010
  GFR-binding peptide
  MOD_RES (2)..(36)..(37): Xaa is C or S
  MOD_RES (14)..(15)..(16)..(17)..(18): Xaa is A or G
  MOD_RES (19)..(20)..(21)..(22): Xaa is A or G or is absent

SEQ ID NO: 36088 - protein, 37 aa, Artificial Sequence; identical to SEQ ID NO: 2663
  GFR-binding peptide
  MOD_RES (33)..(34): Xaa is C or S
  MOD_RES (11)..(12)..(13)..(14)..(15): Xaa is A or G
  MOD_RES (16)..(17)..(18)..(19): Xaa is A or G or is absent

SEQ ID NO: 36089 - protein, 37 aa, Artificial Sequence; identical to SEQ ID NO: 10145
  GFR-binding peptide
  MOD_RES (31)..(32): Xaa is C or S

SEQ ID NO: 36090 - protein, 36 aa, Artificial Sequence; identical to SEQ ID NO: 2664
  GFR-binding peptide
  MOD_RES (2)..(36): Xaa is C or S
  MOD_RES (14)..(15)..(16)..(17)..(18): Xaa is A or G
  MOD_RES (19)..(20)..(21)..(22): Xaa is A or G or is absent

SEQ ID NO: 36091 - protein, 35 aa, Artificial Sequence; identical to SEQ ID NO: 12012
  GFR-binding peptide
  MOD_RES (1)..(35): Xaa is C or S
  MOD_RES (13)..(14)..(15)..(16)..(17): Xaa is A or G
  MOD_RES (18)..(19)..(20)..(21): Xaa is A or G or is absent

SEQ ID NO: 36092 - protein, 35 aa, Artificial Sequence; identical to SEQ ID NO: 10147
  GFR-binding peptide
  MOD_RES (2)..(4)..(35): Xaa is C or S

SEQ ID NO: 36093 - protein, 35 aa, Artificial Sequence; identical to SEQ ID NO: 10148
  GFR-binding peptide
  MOD_RES (31)..(32): Xaa is C or S

SEQ ID NO: 36094 - protein, 40 aa, Artificial Sequence; identical to SEQ ID NO: 10149
  GFR-binding peptide
  MOD_RES (2)..(36)..(37): Xaa is C or S
  MOD_RES (14)..(15)..(16)..(17)..(18): Xaa is A or G
  MOD_RES (19)..(20)..(21)..(22): Xaa is A or G or is absent

SEQ ID NO: 36095 - protein, 35 aa, Artificial Sequence; identical to SEQ ID NO: 10150
  GFR-binding peptide
  MOD_RES (1)..(35): Xaa is C or S
  MOD_RES (13)..(14)..(15)..(16)..(17): Xaa is A or G
  MOD_RES (18)..(19)..(20)..(21): Xaa is A or G or is absent

SEQ ID NO: 36096 - protein, 35 aa, Artificial Sequence; identical to SEQ ID NO: 4588
  GFR-binding peptide
  MOD_RES (2)..(35): Xaa is C or S
  MOD_RES (13)..(14)..(15)..(16)..(17): Xaa is A or G
  MOD_RES (18)..(19)..(20)..(21): Xaa is A or G or is absent

SEQ ID NO: 36097 - protein, 42 aa, Artificial Sequence; identical to SEQ ID NO: 10152
  GFR-binding peptide
  MOD_RES (2)..(4)..(38)..(39): Xaa is C or S
  MOD_RES (16)..(17)..(18)..(19)..(20): Xaa is A or G
  MOD_RES (21)..(22)..(23)..(24): Xaa is A or G or is absent

SEQ ID NO: 36098 - protein, 41 aa, Artificial Sequence; identical to SEQ ID NO: 10153
  GFR-binding peptide
  MOD_RES (1)..(35)..(36): Xaa is C or S
  MOD_RES (13)..(14)..(15)..(16)..(17): Xaa is A or G
  MOD_RES (18)..(19)..(20)..(21): Xaa is A or G or is absent

SEQ ID NO: 36099 - protein, 39 aa, Artificial Sequence; identical to SEQ ID NO: 12015
  GFR-binding peptide
  MOD_RES (1)..(3)..(37)..(38): Xaa is C or S
  MOD_RES (15)..(16)..(17)..(18)..(19): Xaa is A or G
  MOD_RES (20)..(21)..(22)..(23): Xaa is A or G or is absent

SEQ ID NO: 36100 - protein, 39 aa, Artificial Sequence; identical to SEQ ID NO: 12016
  GFR-binding peptide
  MOD_RES (33)..(34): Xaa is C or S
  MOD_RES (11)..(12)..(13)..(14)..(15): Xaa is A or G
  MOD_RES (16)..(17)..(18)..(19): Xaa is A or G or is absent

SEQ ID NO: 36101 - protein, 35 aa, Artificial Sequence; identical to SEQ ID NO: 12017
  GFR-binding peptide
  MOD_RES (32)..(33): Xaa is C or S

SEQ ID NO: 36102 - protein, 35 aa, Artificial Sequence; identical to SEQ ID NO: 10154
  GFR-binding peptide
  MOD_RES (1)..(35): Xaa is C or S
  MOD_RES (13)..(14)..(15)..(16)..(17): Xaa is A or G
  MOD_RES (18)..(19)..(20)..(21): Xaa is A or G or is absent

SEQ ID NO: 36103 - protein, 36 aa, Artificial Sequence; identical to SEQ ID NO: 10156
  GFR-binding peptide
  MOD_RES (33)..(33): Xaa is C or S
  MOD_RES (11)..(12)..(13)..(14)..(15): Xaa is A or G
  MOD_RES (16)..(17)..(18)..(19): Xaa is A or G or is absent

SEQ ID NO: 36104 - protein, 42 aa, Artificial Sequence; identical to SEQ ID NO: 12018
  GFR-binding peptide
  MOD_RES (2)..(36)..(37): Xaa is C or S
  MOD_RES (14)..(15)..(16)..(17)..(18): Xaa is A or G
  MOD_RES (19)..(20)..(21)..(22): Xaa is A or G or is absent

SEQ ID NO: 36105 - protein, 36 aa, Artificial Sequence; identical to SEQ ID NO: 12019
  GFR-binding peptide
  MOD_RES (2)..(4)..(36): Xaa is C or S

SEQ ID NO: 36106 - protein, 37 aa, Artificial Sequence; identical to SEQ ID NO: 4589
  GFR-binding peptide
  MOD_RES (1)..(35)..(36): Xaa is C or S
  MOD_RES (13)..(14)..(15)..(16)..(17): Xaa is A or G
  MOD_RES (18)..(19)..(20)..(21): Xaa is A or G or is absent

SEQ ID NO: 36107 - protein, 38 aa, Artificial Sequence; identical to SEQ ID NO: 10158
  GFR-binding peptide
  MOD_RES (1)..(3)..(34)..(35): Xaa is C or S

SEQ ID NO: 36108 - protein, 33 aa, Artificial Sequence; identical to SEQ ID NO: 10160
  GFR-binding peptide
  MOD_RES (31)..(32): Xaa is C or S

SEQ ID NO: 36109 - protein, 38 aa, Artificial Sequence; identical to SEQ ID NO: 10161
  GFR-binding peptide
  MOD_RES (34)..(35): Xaa is C or S
  MOD_RES (12)..(13)..(14)..(15)..(16): Xaa is A or G
  MOD_RES (17)..(18)..(19)..(20): Xaa is A or G or is absent

SEQ ID NO: 36110 - protein, 34 aa, Artificial Sequence; identical to SEQ ID NO: 10163
  GFR-binding peptide
  MOD_RES (1)..(3)..(34): Xaa is C or S

SEQ ID NO: 36111 - protein, 39 aa, Artificial Sequence; identical to SEQ ID NO: 10164
  GFR-binding peptide
  MOD_RES (2)..(4)..(36)..(37): Xaa is C or S

SEQ ID NO: 36112 - protein, 39 aa, Artificial Sequence; identical to SEQ ID NO: 10166
  GFR-binding peptide
  MOD_RES (2)..(36)..(37): Xaa is C or S
  MOD_RES (14)..(15)..(16)..(17)..(18): Xaa is A or G
  MOD_RES (19)..(20)..(21)..(22): Xaa is A or G or is absent

SEQ ID NO: 36113 - protein, 38 aa, Artificial Sequence; identical to SEQ ID NO: 10168
  GFR-binding peptide
  MOD_RES (32)..(33): Xaa is C or S

SEQ ID NO: 36114 - protein, 34 aa, Artificial Sequence; identical to SEQ ID NO: 4601
  GFR-binding peptide
  MOD_RES (1)..(3)..(34): Xaa is C or S

SEQ ID NO: 36115 - protein, 35 aa, Artificial Sequence; identical to SEQ ID NO: 12029
  GFR-binding peptide
  MOD_RES (32)..(32): Xaa is C or S

SEQ ID NO: 36116 - protein, 39 aa, Artificial Sequence; identical to SEQ ID NO: 12030
  GFR-binding peptide
  MOD_RES (1)..(3)..(36)..(37): Xaa is C or S
  MOD_RES (14)..(15)..(16)..(17)..(18): Xaa is A or G
  MOD_RES (19)..(20)..(21)..(22): Xaa is A or G or is absent

SEQ ID NO: 36117 - protein, 36 aa, Artificial Sequence; identical to SEQ ID NO: 12032
  GFR-binding peptide
  MOD_RES (1)..(32)..(33): Xaa is C or S

SEQ ID NO: 36118 - protein, 33 aa, Artificial Sequence; identical to SEQ ID NO: 12033
  GFR-binding peptide
  MOD_RES (1)..(33): Xaa is C or S

SEQ ID NO: 36119 - protein, 31 aa, Artificial Sequence; identical to SEQ ID NO: 10169
  GFR-binding peptide

SEQ ID NO: 36120 - protein, 41 aa, Artificial Sequence; identical to SEQ ID NO: 10170
  GFR-binding peptide
  MOD_RES (2)..(4)..(36)..(37): Xaa is C or S

SEQ ID NO: 36121 - protein, 35 aa, Artificial Sequence; identical to SEQ ID NO: 10171
  GFR-binding peptide
  MOD_RES (32)..(33): Xaa is C or S

SEQ ID NO: 36122 - protein, 39 aa, Artificial Sequence; identical to SEQ ID NO: 4606
  GFR-binding peptide
  MOD_RES (2)..(34)..(35): Xaa is C or S

SEQ ID NO: 36123 - protein, 41 aa, Artificial Sequence; identical to SEQ ID NO: 12035
  GFR-binding peptide
  MOD_RES (2)..(35)..(36): Xaa is C or S
  MOD_RES (13)..(14)..(15)..(16)..(17): Xaa is A or G
  MOD_RES (18)..(19)..(20)..(21): Xaa is A or G or is absent

SEQ ID NO: 36124 - protein, 31 aa, Artificial Sequence; identical to SEQ ID NO: 10173
  GFR-binding peptide
  MOD_RES (31)..(31): Xaa is C or S

SEQ ID NO: 36125 - protein, 37 aa, Artificial Sequence; identical to SEQ ID NO: 12036
  GFR-binding peptide
  MOD_RES (2)..(4)..(37): Xaa is C or S
  MOD_RES (15)..(16)..(17)..(18)..(19): Xaa is A or G
  MOD_RES (20)..(21)..(22)..(23): Xaa is A or G or is absent

SEQ ID NO: 36126 - protein, 38 aa, Artificial Sequence; identical to SEQ ID NO: 10175
  GFR-binding peptide
  MOD_RES (33)..(34): Xaa is C or S
  MOD_RES (11)..(12)..(13)..(14)..(15): Xaa is A or G
  MOD_RES (16)..(17)..(18)..(19): Xaa is A or G or is absent

SEQ ID NO: 36127 - protein, 39 aa, Artificial Sequence; identical to SEQ ID NO: 10176
  GFR-binding peptide
  MOD_RES (33)..(34): Xaa is C or S
  MOD_RES (11)..(12)..(13)..(14)..(15): Xaa is A or G
  MOD_RES (16)..(17)..(18)..(19): Xaa is A or G or is absent

SEQ ID NO: 36128 - protein, 42 aa, Artificial Sequence; identical to SEQ ID NO: 10177
  GFR-binding peptide
  MOD_RES (1)..(3)..(37)..(38): Xaa is C or S
  MOD_RES (15)..(16)..(17)..(18)..(19): Xaa is A or G
  MOD_RES (20)..(21)..(22)..(23): Xaa is A or G or is absent

SEQ ID NO: 36129 - protein, 34 aa, Artificial Sequence; identical to SEQ ID NO: 10178
  GFR-binding peptide
  MOD_RES (1)..(3)..(34): Xaa is C or S

SEQ ID NO: 36130 - protein, 36 aa, Artificial Sequence; identical to SEQ ID NO: 10179
  GFR-binding peptide
  MOD_RES (33)..(34): Xaa is C or S
  MOD_RES (11)..(12)..(13)..(14)..(15): Xaa is A or G
  MOD_RES (16)..(17)..(18)..(19): Xaa is A or G or is absent

SEQ ID NO: 36131 - protein, 33 aa, Artificial Sequence; identical to SEQ ID NO: 12037
  GFR-binding peptide
  MOD_RES (33)..(33): Xaa is C or S
  MOD_RES (11)..(12)..(13)..(14)..(15): Xaa is A or G
  MOD_RES (16)..(17)..(18)..(19): Xaa is A or G or is absent

SEQ ID NO: 36132 - protein, 38 aa, Artificial Sequence; identical to SEQ ID NO: 10180
  GFR-binding peptide
  MOD_RES (34)..(35): Xaa is C or S
  MOD_RES (12)..(13)..(14)..(15)..(16): Xaa is A or G
  MOD_RES (17)..(18)..(19)..(20): Xaa is A or G or is absent

SEQ ID NO: 36133 - protein, 36 aa, Artificial Sequence; identical to SEQ ID NO: 12039
  GFR-binding peptide
  MOD_RES (2)..(34): Xaa is C or S

SEQ ID NO: 36134 - protein, 40 aa, Artificial Sequence; identical to SEQ ID NO: 10181
  GFR-binding peptide
  MOD_RES (2)..(4)..(38)..(39): Xaa is C or S
  MOD_RES (16)..(17)..(18)..(19)..(20): Xaa is A or G
  MOD_RES (21)..(22)..(23)..(24): Xaa is A or G or is absent

SEQ ID NO: 36135 - protein, 37 aa, Artificial Sequence; identical to SEQ ID NO: 12040
  GFR-binding peptide
  MOD_RES (1)..(3)..(34)..(35): Xaa is C or S

SEQ ID NO: 36136 - protein, 39 aa, Artificial Sequence; identical to SEQ ID NO: 12041
  GFR-binding peptide
  MOD_RES (1)..(3)..(35): Xaa is C or S

SEQ ID NO: 36137 - protein, 39 aa, Artificial Sequence; identical to SEQ ID NO: 10184
  GFR-binding peptide
  MOD_RES (1)..(35)..(36): Xaa is C or S
  MOD_RES (13)..(14)..(15)..(16)..(17): Xaa is A or G
  MOD_RES (18)..(19)..(20)..(21): Xaa is A or G or is absent

SEQ ID NO: 36138 - protein, 34 aa, Artificial Sequence; identical to SEQ ID NO: 12042
  GFR-binding peptide
  MOD_RES (31)..(32): Xaa is C or S

SEQ ID NO: 36139 - protein, 41 aa, Artificial Sequence; identical to SEQ ID NO: 10185
  GFR-binding peptide
  MOD_RES (2)..(4)..(36)..(37): Xaa is C or S

SEQ ID NO: 36140 - protein, 35 aa, Artificial Sequence; identical to SEQ ID NO: 10186
  GFR-binding peptide
  MOD_RES (1)..(32)..(33): Xaa is C or S

SEQ ID NO: 36141 - protein, 32 aa, Artificial Sequence; identical to SEQ ID NO: 12043
  GFR-binding peptide
  MOD_RES (11)..(12)..(13)..(14)..(15): Xaa is A or G
  MOD_RES (16)..(17)..(18)..(19): Xaa is A or G or is absent

SEQ ID NO: 36142 - protein, 30 aa, Artificial Sequence; identical to SEQ ID NO: 2703
  GFR-binding peptide

SEQ ID NO: 36143 - protein, 39 aa, Artificial Sequence; identical to SEQ ID NO: 10189
  GFR-binding peptide
  MOD_RES (34)..(35): Xaa is C or S
  MOD_RES (12)..(13)..(14)..(15)..(16): Xaa is A or G
  MOD_RES (17)..(18)..(19)..(20): Xaa is A or G or is absent

SEQ ID NO: 36144 - protein, 35 aa, Artificial Sequence; identical to SEQ ID NO: 12046
  GFR-binding peptide
  MOD_RES (2)..(4): Xaa is C or S

SEQ ID NO: 36145 - protein, 33 aa, Artificial Sequence; identical to SEQ ID NO: 4627
  GFR-binding peptide
  MOD_RES (1)..(3): Xaa is C or S

SEQ ID NO: 36146 - protein, 37 aa, Artificial Sequence; identical to SEQ ID NO: 12048
  GFR-binding peptide
  MOD_RES (33)..(34): Xaa is C or S
  MOD_RES (11)..(12)..(13)..(14)..(15): Xaa is A or G
  MOD_RES (16)..(17)..(18)..(19): Xaa is A or G or is absent

SEQ ID NO: 36147 - protein, 41 aa, Artificial Sequence; identical to SEQ ID NO: 10190
  GFR-binding peptide
  MOD_RES (1)..(35)..(36): Xaa is C or S
  MOD_RES (13)..(14)..(15)..(16)..(17): Xaa is A or G
  MOD_RES (18)..(19)..(20)..(21): Xaa is A or G or is absent

SEQ ID NO: 36148 - protein, 38 aa, Artificial Sequence
  GFR-binding peptide
  MOD_RES (1)..(34)..(35): Xaa is C or S
  MOD_RES (12)..(13)..(14)..(15)..(16): Xaa is A or G
  MOD_RES (17)..(18)..(19)..(20): Xaa is A or G or is absent
XSKVIMNSLQEXXXXXXXXXYYLITLPELDQSVXXPSA

SEQ ID NO: 36149 - protein, 42 aa, Artificial Sequence; identical to SEQ ID NO: 12049
  GFR-binding peptide
  MOD_RES (2)..(36)..(37): Xaa is C or S
  MOD_RES (14)..(15)..(16)..(17)..(18): Xaa is A or G
  MOD_RES (19)..(20)..(21)..(22): Xaa is A or G or is absent

SEQ ID NO: 36150 - protein, 39 aa, Artificial Sequence; identical to SEQ ID NO: 4630
  GFR-binding peptide
  MOD_RES (1)..(34)..(35): Xaa is C or S
  MOD_RES (12)..(13)..(14)..(15)..(16): Xaa is A or G
  MOD_RES (17)..(18)..(19)..(20): Xaa is A or G or is absent

SEQ ID NO: 36151 - protein, 33 aa, Artificial Sequence; identical to SEQ ID NO: 12052
  GFR-binding peptide
  MOD_RES (1)..(32)..(33): Xaa is C or S

SEQ ID NO: 36152 - protein, 37 aa, Artificial Sequence; identical to SEQ ID NO: 10192
  GFR-binding peptide
  MOD_RES (34)..(35): Xaa is C or S
  MOD_RES (12)..(13)..(14)..(15)..(16): Xaa is A or G
  MOD_RES (17)..(18)..(19)..(20): Xaa is A or G or is absent

SEQ ID NO: 36153 - protein, 33 aa, Artificial Sequence; identical to SEQ ID NO: 12053
  GFR-binding peptide
  MOD_RES (31)..(32): Xaa is C or S

SEQ ID NO: 36154 - protein, 42 aa, Artificial Sequence; identical to SEQ ID NO: 4632
  GFR-binding peptide
  MOD_RES (1)..(3)..(37)..(38): Xaa is C or S
  MOD_RES (15)..(16)..(17)..(18)..(19): Xaa is A or G
  MOD_RES (20)..(21)..(22)..(23): Xaa is A or G or is absent

SEQ ID NO: 36155 - protein, 42 aa, Artificial Sequence; identical to SEQ ID NO: 12055
  GFR-binding peptide
  MOD_RES (2)..(36)..(37): Xaa is C or S
  MOD_RES (14)..(15)..(16)..(17)..(18): Xaa is A or G
  MOD_RES (19)..(20)..(21)..(22): Xaa is A or G or is absent

SEQ ID NO: 36156 - protein, 41 aa, Artificial Sequence; identical to SEQ ID NO: 10194
  GFR-binding peptide
  MOD_RES (2)..(4)..(35)..(36): Xaa is C or S

SEQ ID NO: 36157 - protein, 36 aa, Artificial Sequence; identical to SEQ ID NO: 10196
  GFR-binding peptide
  MOD_RES (1)..(3)..(35)..(36): Xaa is C or S

SEQ ID NO: 36158 - protein, 38 aa, Artificial Sequence; identical to SEQ ID NO: 12057
  GFR-binding peptide
  MOD_RES (2)..(35)..(36): Xaa is C or S
  MOD_RES (13)..(14)..(15)..(16)..(17): Xaa is A or G
  MOD_RES (18)..(19)..(20)..(21): Xaa is A or G or is absent

SEQ ID NO: 36159 - protein, 40 aa, Artificial Sequence; identical to SEQ ID NO: 12058
  GFR-binding peptide
  MOD_RES (1)..(3)..(35): Xaa is C or S

SEQ ID NO: 36160 - protein, 38 aa, Artificial Sequence; identical to SEQ ID NO: 12059
  GFR-binding peptide
  MOD_RES (1)..(33)..(34): Xaa is C or S

SEQ ID NO: 36161 - protein, 34 aa, Artificial Sequence; identical to SEQ ID NO: 10198
  GFR-binding peptide
  MOD_RES (31)..(31): Xaa is C or S

SEQ ID NO: 36162 - protein, 35 aa, Artificial Sequence; identical to SEQ ID NO: 10199
  GFR-binding peptide
  MOD_RES (34)..(35): Xaa is C or S
  MOD_RES (12)..(13)..(14)..(15)..(16): Xaa is A or G
  MOD_RES (17)..(18)..(19)..(20): Xaa is A or G or is absent

SEQ ID NO: 36163 - protein, 37 aa, Artificial Sequence; identical to SEQ ID NO: 10200
  GFR-binding peptide
  MOD_RES (34)..(34): Xaa is C or S
  MOD_RES (12)..(13)..(14)..(15)..(16): Xaa is A or G
  MOD_RES (17)..(18)..(19)..(20): Xaa is A or G or is absent

SEQ ID NO: 36164 - protein, 37 aa, Artificial Sequence; identical to SEQ ID NO: 12061
  GFR-binding peptide
  MOD_RES (1)..(3)..(36)..(37): Xaa is C or S
  MOD_RES (14)..(15)..(16)..(17)..(18): Xaa is A or G
  MOD_RES (19)..(20)..(21)..(22): Xaa is A or G or is absent

SEQ ID NO: 36165 - protein, 36 aa, Artificial Sequence; identical to SEQ ID NO: 12062
  GFR-binding peptide
  MOD_RES (32)..(33): Xaa is C or S

SEQ ID NO: 36166 - protein, 37 aa, Artificial Sequence; identical to SEQ ID NO: 10201
  GFR-binding peptide
  MOD_RES (31)..(31): Xaa is C or S

SEQ ID NO: 36167 - protein, 32 aa, Artificial Sequence; identical to SEQ ID NO: 10203
  GFR-binding peptide
  MOD_RES (32)..(32): Xaa is C or S

SEQ ID NO: 36168 - protein, 38 aa, Artificial Sequence; identical to SEQ ID NO: 12063
  GFR-binding peptide
  MOD_RES (34)..(35): Xaa is C or S
  MOD_RES (12)..(13)..(14)..(15)..(16): Xaa is A or G
  MOD_RES (17)..(18)..(19)..(20): Xaa is A or G or is absent

SEQ ID NO: 36169 - protein, 34 aa, Artificial Sequence; identical to SEQ ID NO: 12064
  GFR-binding peptide
  MOD_RES (1)..(32)..(33): Xaa is C or S

SEQ ID NO: 36170 - protein, 40 aa, Artificial Sequence; identical to SEQ ID NO: 12065
  GFR-binding peptide
  MOD_RES (34)..(34): Xaa is C or S
  MOD_RES (12)..(13)..(14)..(15)..(16): Xaa is A or G
  MOD_RES (17)..(18)..(19)..(20): Xaa is A or G or is absent

SEQ ID NO: 36171 - protein, 38 aa, Artificial Sequence; identical to SEQ ID NO: 12066
  GFR-binding peptide
  MOD_RES (2)..(34)..(35): Xaa is C or S

SEQ ID NO: 36172 - protein, 38 aa, Artificial Sequence; identical to SEQ ID NO: 4641
  GFR-binding peptide
  MOD_RES (1)..(3)..(34)..(35): Xaa is C or S

SEQ ID NO: 36173 - protein, 41 aa, Artificial Sequence; identical to SEQ ID NO: 10204
  GFR-binding peptide
  MOD_RES (2)..(35)..(36): Xaa is C or S
  MOD_RES (13)..(14)..(15)..(16)..(17): Xaa is A or G
  MOD_RES (18)..(19)..(20)..(21): Xaa is A or G or is absent

SEQ ID NO: 36174 - protein, 34 aa, Artificial Sequence; identical to SEQ ID NO: 12068
  GFR-binding peptide
  MOD_RES (2)..(2): Xaa is C or S
  MOD_RES (13)..(14)..(15)..(16)..(17): Xaa is A or G
  MOD_RES (18)..(19)..(20)..(21): Xaa is A or G or is absent

SEQ ID NO: 36175 - protein, 39 aa, Artificial Sequence; identical to SEQ ID NO: 12069
  GFR-binding peptide
  MOD_RES (1)..(34)..(35): Xaa is C or S
  MOD_RES (12)..(13)..(14)..(15)..(16): Xaa is A or G
  MOD_RES (17)..(18)..(19)..(20): Xaa is A or G or is absent

SEQ ID NO: 36176 - protein, 39 aa, Artificial Sequence; identical to SEQ ID NO: 12070
  GFR-binding peptide
  MOD_RES (1)..(3)..(34)..(35): Xaa is C or S

SEQ ID NO: 36177 - protein, 39 aa, Artificial Sequence; identical to SEQ ID NO: 4643
  GFR-binding peptide
  MOD_RES (2)..(35)..(36): Xaa is C or S
  MOD_RES (13)..(14)..(15)..(16)..(17): Xaa is A or G
  MOD_RES (18)..(19)..(20)..(21): Xaa is A or G or is absent

SEQ ID NO: 36178 - protein, 33 aa, Artificial Sequence; identical to SEQ ID NO: 12072
  GFR-binding peptide
  MOD_RES (2)..(33): Xaa is C or S

SEQ ID NO: 36179 - protein, 38 aa, Artificial Sequence; identical to SEQ ID NO: 12073
  GFR-binding peptide
  MOD_RES (2)..(36)..(37): Xaa is C or S
  MOD_RES (14)..(15)..(16)..(17)..(18): Xaa is A or G
  MOD_RES (19)..(20)..(21)..(22): Xaa is A or G or is absent

SEQ ID NO: 36180 - protein, 34 aa, Artificial Sequence; identical to SEQ ID NO: 10206
  GFR-binding peptide
  MOD_RES (33)..(34): Xaa is C or S
  MOD_RES (11)..(12)..(13)..(14)..(15): Xaa is A or G
  MOD_RES (16)..(17)..(18)..(19): Xaa is A or G or is absent

SEQ ID NO: 36181 - protein, 30 aa, Artificial Sequence; identical to SEQ ID NO: 12075
  GFR-binding peptide

SEQ ID NO: 36182 - protein, 39 aa, Artificial Sequence; identical to SEQ ID NO: 12076
  GFR-binding peptide
  MOD_RES (1)..(3)..(34)..(35): Xaa is C or S

SEQ ID NO: 36183 - protein, 34 aa, Artificial Sequence; identical to SEQ ID NO: 10208
  GFR-binding peptide
  MOD_RES (1)..(33): Xaa is C or S

SEQ ID NO: 36184 - protein, 34 aa, Artificial Sequence; identical to SEQ ID NO: 12077
  GFR-binding peptide
  MOD_RES (1)..(1): Xaa is C or S
  MOD_RES (13)..(14)..(15)..(16)..(17): Xaa is A or G
  MOD_RES (18)..(19)..(20)..(21): Xaa is A or G or is absent

SEQ ID NO: 36185 - protein, 41 aa, Artificial Sequence; identical to SEQ ID NO: 12078
  GFR-binding peptide
  MOD_RES (2)..(4)..(36)..(37): Xaa is C or S

SEQ ID NO: 36186 - protein, 42 aa, Artificial Sequence; identical to SEQ ID NO: 10209
  GFR-binding peptide
  MOD_RES (2)..(36)..(37): Xaa is C or S
  MOD_RES (14)..(15)..(16)..(17)..(18): Xaa is A or G
  MOD_RES (19)..(20)..(21)..(22): Xaa is A or G or is absent

SEQ ID NO: 36187 - protein, 40 aa, Artificial Sequence; identical to SEQ ID NO: 12080
  GFR-binding peptide
  MOD_RES (34)..(35): Xaa is C or S
  MOD_RES (12)..(13)..(14)..(15)..(16): Xaa is A or G
  MOD_RES (17)..(18)..(19)..(20): Xaa is A or G or is absent

SEQ ID NO: 36188 - protein, 42 aa, Artificial Sequence; identical to SEQ ID NO: 10210
  GFR-binding peptide
  MOD_RES (2)..(36)..(37): Xaa is C or S
  MOD_RES (14)..(15)..(16)..(17)..(18): Xaa is A or G
  MOD_RES (19)..(20)..(21)..(22): Xaa is A or G or is absent

SEQ ID NO: 36189 - protein, 36 aa, Artificial Sequence; identical to SEQ ID NO: 10211
  GFR-binding peptide
  MOD_RES (1)..(33)..(34): Xaa is C or S

SEQ ID NO: 36190 - protein, 33 aa, Artificial Sequence; identical to SEQ ID NO: 10212
  GFR-binding peptide
  MOD_RES (31)..(32): Xaa is C or S

SEQ ID NO: 36191 - protein, 36 aa, Artificial Sequence; identical to SEQ ID NO: 12081
  GFR-binding peptide
  MOD_RES (34)..(35): Xaa is C or S
  MOD_RES (12)..(13)..(14)..(15)..(16): Xaa is A or G
  MOD_RES (17)..(18)..(19)..(20): Xaa is A or G or is absent

SEQ ID NO: 36192 - protein, 38 aa, Artificial Sequence; identical to SEQ ID NO: 4649
  GFR-binding peptide
  MOD_RES (1)..(3)..(34)..(35): Xaa is C or S

SEQ ID NO: 36193 - protein, 36 aa, Artificial Sequence; identical to SEQ ID NO: 12083
  GFR-binding peptide
  MOD_RES (1)..(3)..(35)..(36): Xaa is C or S

SEQ ID NO: 36194 - protein, 36 aa, Artificial Sequence; identical to SEQ ID NO: 12084
  GFR-binding peptide
  MOD_RES (31)..(32): Xaa is C or S

SEQ ID NO: 36195 - protein, 35 aa, Artificial Sequence; identical to SEQ ID NO: 4652
  GFR-binding peptide
  MOD_RES (33)..(34): Xaa is C or S
  MOD_RES (11)..(12)..(13)..(14)..(15): Xaa is A or G
  MOD_RES (16)..(17)..(18)..(19): Xaa is A or G or is absent

SEQ ID NO: 36196 - protein, 37 aa, Artificial Sequence; identical to SEQ ID NO: 10213
  GFR-binding peptide
  MOD_RES (1)..(32)..(33): Xaa is C or S

SEQ ID NO: 36197 - protein, 36 aa, Artificial Sequence; identical to SEQ ID NO: 12086
  GFR-binding peptide
  MOD_RES (31)..(32): Xaa is C or S

SEQ ID NO: 36198 - protein, 37 aa, Artificial Sequence; identical to SEQ ID NO: 12087
  GFR-binding peptide
  MOD_RES (2)..(4): Xaa is C or S
  MOD_RES (16)..(17)..(18)..(19)..(20): Xaa is A or G
  MOD_RES (21)..(22)..(23)..(24): Xaa is A or G or is absent

SEQ ID NO: 36199 - protein, 38 aa, Artificial Sequence; identical to SEQ ID NO: 10221
  GFR-binding peptide
  MOD_RES (1)..(3)..(37)..(38): Xaa is C or S
  MOD_RES (15)..(16)..(17)..(18)..(19): Xaa is A or G
  MOD_RES (20)..(21)..(22)..(23): Xaa is A or G or is absent

SEQ ID NO: 36200 - protein, 34 aa, Artificial Sequence; identical to SEQ ID NO: 12088
  GFR-binding peptide
  MOD_RES (2)..(34): Xaa is C or S

SEQ ID NO: 36201 - protein, 34 aa, Artificial Sequence; identical to SEQ ID NO: 4658
  GFR-binding peptide
  MOD_RES (34)..(34): Xaa is C or S
  MOD_RES (12)..(13)..(14)..(15)..(16): Xaa is A or G
  MOD_RES (17)..(18)..(19)..(20): Xaa is A or G or is absent

SEQ ID NO: 36202 - protein, 32 aa, Artificial Sequence; identical to SEQ ID NO: 10224
  GFR-binding peptide
  MOD_RES (11)..(12)..(13)..(14)..(15): Xaa is A or G
  MOD_RES (16)..(17)..(18)..(19): Xaa is A or G or is absent

SEQ ID NO: 36203 - protein, 34 aa, Artificial Sequence; identical to SEQ ID NO: 12090
  GFR-binding peptide
  MOD_RES (2)..(34): Xaa is C or S

SEQ ID NO: 36204 - protein, 36 aa, Artificial Sequence; identical to SEQ ID NO: 12091
  GFR-binding peptide
  MOD_RES (1)..(32)..(33): Xaa is C or S

SEQ ID NO: 36205 - protein, 31 aa, Artificial Sequence; identical to SEQ ID NO: 4662
  GFR-binding peptide

SEQ ID NO: 36206 - protein, 41 aa, Artificial Sequence; identical to SEQ ID NO: 12093
  GFR-binding peptide
  MOD_RES (1)..(35)..(36): Xaa is C or S
  MOD_RES (13)..(14)..(15)..(16)..(17): Xaa is A or G
  MOD_RES (18)..(19)..(20)..(21): Xaa is A or G or is absent

SEQ ID NO: 36207 - protein, 40 aa, Artificial Sequence; identical to SEQ ID NO: 12095
  GFR-binding peptide
  MOD_RES (2)..(4)..(38)..(39): Xaa is C or S
  MOD_RES (16)..(17)..(18)..(19)..(20): Xaa is A or G
  MOD_RES (21)..(22)..(23)..(24): Xaa is A or G or is absent

SEQ ID NO: 36208 - protein, 35 aa, Artificial Sequence; identical to SEQ ID NO: 12096
  GFR-binding peptide
  MOD_RES (2)..(4)..(35): Xaa is C or S

SEQ ID NO: 36209 - protein, 39 aa, Artificial Sequence; identical to SEQ ID NO: 12098
  GFR-binding peptide
  MOD_RES (1)..(3)..(36)..(37): Xaa is C or S
  MOD_RES (14)..(15)..(16)..(17)..(18): Xaa is A or G
  MOD_RES (19)..(20)..(21)..(22): Xaa is A or G or is absent

SEQ ID NO: 36210 - protein, 34 aa, Artificial Sequence; identical to SEQ ID NO: 10225
  GFR-binding peptide
  MOD_RES (34)..(34): Xaa is C or S
  MOD_RES (12)..(13)..(14)..(15)..(16): Xaa is A or G
  MOD_RES (17)..(18)..(19)..(20): Xaa is A or G or is absent

SEQ ID NO: 36211 - protein, 31 aa, Artificial Sequence; identical to SEQ ID NO: 2746
  GFR-binding peptide
  MOD_RES (1)..(1): Xaa is C or S

SEQ ID NO: 36212 - protein, 38 aa, Artificial Sequence; identical to SEQ ID NO: 4667
  GFR-binding peptide
  MOD_RES (33)..(34): Xaa is C or S
  MOD_RES (11)..(12)..(13)..(14)..(15): Xaa is A or G
  MOD_RES (16)..(17)..(18)..(19): Xaa is A or G or is absent

SEQ ID NO: 36213 - protein, 40 aa, Artificial Sequence; identical to SEQ ID NO: 10227
  GFR-binding peptide
  MOD_RES (2)..(34): Xaa is C or S

SEQ ID NO: 36214 - protein, 40 aa, Artificial Sequence; identical to SEQ ID NO: 10229
  GFR-binding peptide
  MOD_RES (1)..(35)..(36): Xaa is C or S
  MOD_RES (13)..(14)..(15)..(16)..(17): Xaa is A or G
  MOD_RES (18)..(19)..(20)..(21): Xaa is A or G or is absent

SEQ ID NO: 36215 - protein, 31 aa, Artificial Sequence; identical to SEQ ID NO: 10230
  GFR-binding peptide

SEQ ID NO: 36216 - protein, 35 aa, Artificial Sequence; identical to SEQ ID NO: 10231
  GFR-binding peptide
  MOD_RES (2)..(2): Xaa is C or S
  MOD_RES (14)..(15)..(16)..(17)..(18): Xaa is A or G
  MOD_RES (19)..(20)..(21)..(22): Xaa is A or G or is absent

SEQ ID NO: 36217 - protein, 37 aa, Artificial Sequence; identical to SEQ ID NO: 10232
  GFR-binding peptide
  MOD_RES (34)..(35): Xaa is C or S
  MOD_RES (12)..(13)..(14)..(15)..(16): Xaa is A or G
  MOD_RES (17)..(18)..(19)..(20): Xaa is A or G or is absent

SEQ ID NO: 36218 - protein, 37 aa, Artificial Sequence; identical to SEQ ID NO: 10233
  GFR-binding peptide
  MOD_RES (34)..(35): Xaa is C or S
  MOD_RES (12)..(13)..(14)..(15)..(16): Xaa is A or G
  MOD_RES (17)..(18)..(19)..(20): Xaa is A or G or is absent

SEQ ID NO: 36219 - protein, 34 aa, Artificial Sequence; identical to SEQ ID NO: 12100
  GFR-binding peptide
  MOD_RES (31)..(32): Xaa is C or S

SEQ ID NO: 36220 - protein, 38 aa, Artificial Sequence; identical to SEQ ID NO: 10234
  GFR-binding peptide
  MOD_RES (2)..(4)..(38): Xaa is C or S
  MOD_RES (16)..(17)..(18)..(19)..(20): Xaa is A or G
  MOD_RES (21)..(22)..(23)..(24): Xaa is A or G or is absent

SEQ ID NO: 36221 - protein, 37 aa, Artificial Sequence; identical to SEQ ID NO: 12101
  GFR-binding peptide
  MOD_RES (33)..(34): Xaa is C or S
  MOD_RES (11)..(12)..(13)..(14)..(15): Xaa is A or G
  MOD_RES (16)..(17)..(18)..(19): Xaa is A or G or is absent

SEQ ID NO: 36222 - protein, 41 aa, Artificial Sequence; identical to SEQ ID NO: 2751
  GFR-binding peptide
  MOD_RES (2)..(4)..(37)..(38): Xaa is C or S
  MOD_RES (15)..(16)..(17)..(18)..(19): Xaa is A or G
  MOD_RES (20)..(21)..(22)..(23): Xaa is A or G or is absent

SEQ ID NO: 36223 - protein, 38 aa, Artificial Sequence; identical to SEQ ID NO: 12103
  GFR-binding peptide
  MOD_RES (2)..(35)..(36): Xaa is C or S
  MOD_RES (13)..(14)..(15)..(16)..(17): Xaa is A or G
  MOD_RES (18)..(19)..(20)..(21): Xaa is A or G or is absent

SEQ ID NO: 36224 - protein, 36 aa, Artificial Sequence; identical to SEQ ID NO: 10237
  GFR-binding peptide
  MOD_RES (1)..(3)..(35)..(36): Xaa is C or S

SEQ ID NO: 36225 - protein, 39 aa, Artificial Sequence; identical to SEQ ID NO: 10238
  GFR-binding peptide
  MOD_RES (34)..(35): Xaa is C or S
  MOD_RES (12)..(13)..(14)..(15)..(16): Xaa is A or G
  MOD_RES (17)..(18)..(19)..(20): Xaa is A or G or is absent

SEQ ID NO: 36226 - protein, 34 aa, Artificial Sequence; identical to SEQ ID NO: 10240
  GFR-binding peptide
  MOD_RES (33)..(34): Xaa is C or S
  MOD_RES (11)..(12)..(13)..(14)..(15): Xaa is A or G
  MOD_RES (16)..(17)..(18)..(19): Xaa is A or G or is absent

SEQ ID NO: 36227 - protein, 39 aa, Artificial Sequence; identical to SEQ ID NO: 12105
  GFR-binding peptide
  MOD_RES (2)..(34)..(35): Xaa is C or S

SEQ ID NO: 36228 - protein, 33 aa, Artificial Sequence; identical to SEQ ID NO: 2757
  GFR-binding peptide
  MOD_RES (1)..(33): Xaa is C or S

SEQ ID NO: 36229 - protein, 38 aa, Artificial Sequence; identical to SEQ ID NO: 10242
  GFR-binding peptide
  MOD_RES (1)..(34)..(35): Xaa is C or S
  MOD_RES (12)..(13)..(14)..(15)..(16): Xaa is A or G
  MOD_RES (17)..(18)..(19)..(20): Xaa is A or G or is absent

SEQ ID NO: 36230 - protein, 40 aa, Artificial Sequence; identical to SEQ ID NO: 12107
  GFR-binding peptide
  MOD_RES (1)..(35): Xaa is C or S
  MOD_RES (13)..(14)..(15)..(16)..(17): Xaa is A or G
  MOD_RES (18)..(19)..(20)..(21): Xaa is A or G or is absent

SEQ ID NO: 36231 - protein, 42 aa, Artificial Sequence; identical to SEQ ID NO: 10243
  GFR-binding peptide
  MOD_RES (1)..(3)..(37)..(38): Xaa is C or S
  MOD_RES (15)..(16)..(17)..(18)..(19): Xaa is A or G
  MOD_RES (20)..(21)..(22)..(23): Xaa is A or G or is absent

SEQ ID NO: 36232 - protein, 30 aa, Artificial Sequence; identical to SEQ ID NO: 10244
  GFR-binding peptide

SEQ ID NO: 36233 - protein, 34 aa, Artificial Sequence; identical to SEQ ID NO: 12108
  GFR-binding peptide
  MOD_RES (2)..(33)..(34): Xaa is C or S

SEQ ID NO: 36234 - protein, 36 aa, Artificial Sequence; identical to SEQ ID NO: 4682
  GFR-binding peptide
  MOD_RES (2)..(33)..(34): Xaa is C or S

SEQ ID NO: 36235 - protein, 32 aa, Artificial Sequence; identical to SEQ ID NO: 4685
  GFR-binding peptide
  MOD_RES (1)..(32): Xaa is C or S

SEQ ID NO: 36236 - protein, 39 aa, Artificial Sequence; identical to SEQ ID NO: 12111
  GFR-binding peptide
  MOD_RES (34)..(35): Xaa is C or S
  MOD_RES (12)..(13)..(14)..(15)..(16): Xaa is A or G
  MOD_RES (17)..(18)..(19)..(20): Xaa is A or G or is absent

SEQ ID NO: 36237 - protein, 36 aa, Artificial Sequence; identical to SEQ ID NO: 4686
  GFR-binding peptide
  MOD_RES (2)..(35)..(36): Xaa is C or S
  MOD_RES (13)..(14)..(15)..(16)..(17): Xaa is A or G
  MOD_RES (18)..(19)..(20)..(21): Xaa is A or G or is absent

SEQ ID NO: 36238 - protein, 37 aa, Artificial Sequence; identical to SEQ ID NO: 10245
  GFR-binding peptide
  MOD_RES (31)..(32): Xaa is C or S

SEQ ID NO: 36239 - protein, 34 aa, Artificial Sequence; identical to SEQ ID NO: 12113
  GFR-binding peptide
  MOD_RES (31)..(32): Xaa is C or S

SEQ ID NO: 36240 - protein, 33 aa, Artificial Sequence; identical to SEQ ID NO: 12114
  GFR-binding peptide
  MOD_RES (32)..(33): Xaa is C or S

SEQ ID NO: 36241 - protein, 39 aa, Artificial Sequence; identical to SEQ ID NO: 12115
  GFR-binding peptide
  MOD_RES (2)..(35)..(36): Xaa is C or S
  MOD_RES (13)..(14)..(15)..(16)..(17): Xaa is A or G
  MOD_RES (18)..(19)..(20)..(21): Xaa is A or G or is absent

SEQ ID NO: 36242 - protein, 37 aa, Artificial Sequence; identical to SEQ ID NO: 12116
  GFR-binding peptide
  MOD_RES (1)..(3)..(37): Xaa is C or S
  MOD_RES (15)..(16)..(17)..(18)..(19): Xaa is A or G
  MOD_RES (20)..(21)..(22)..(23): Xaa is A or G or is absent

SEQ ID NO: 36243 - protein, 36 aa, Artificial Sequence; identical to SEQ ID NO: 10247
  GFR-binding peptide
  MOD_RES (2)..(4)..(36): Xaa is C or S

SEQ ID NO: 36244 - protein, 40 aa, Artificial Sequence; identical to SEQ ID NO: 10248
  GFR-binding peptide
  MOD_RES (2)..(34)..(35): Xaa is C or S

SEQ ID NO: 36245 - protein, 43 aa, Artificial Sequence; identical to SEQ ID NO: 10249
  GFR-binding peptide
  MOD_RES (2)..(4)..(37)..(38): Xaa is C or S
  MOD_RES (15)..(16)..(17)..(18)..(19): Xaa is A or G
  MOD_RES (20)..(21)..(22)..(23): Xaa is A or G or is absent

SEQ ID NO: 36246 - protein, 37 aa, Artificial Sequence; identical to SEQ ID NO: 10250
  GFR-binding peptide
  MOD_RES (1)..(33)..(34): Xaa is C or S

SEQ ID NO: 36247 - protein, 37 aa, Artificial Sequence; identical to SEQ ID NO: 12118
  GFR-binding peptide
  MOD_RES (1)..(3)..(37): Xaa is C or S
  MOD_RES (15)..(16)..(17)..(18)..(19): Xaa is A or G
  MOD_RES (20)..(21)..(22)..(23): Xaa is A or G or is absent

SEQ ID NO: 36248 - protein, 35 aa, Artificial Sequence; identical to SEQ ID NO: 10252
  GFR-binding peptide
  MOD_RES (1)..(3)..(34)..(35): Xaa is C or S

SEQ ID NO: 36249 - protein, 37 aa, Artificial Sequence; identical to SEQ ID NO: 2766
  GFR-binding peptide
  MOD_RES (1)..(35)..(36): Xaa is C or S
  MOD_RES (13)..(14)..(15)..(16)..(17): Xaa is A or G
  MOD_RES (18)..(19)..(20)..(21): Xaa is A or G or is absent

SEQ ID NO: 36250 - protein, 33 aa, Artificial Sequence; identical to SEQ ID NO: 12121
  GFR-binding peptide
  MOD_RES (2)..(33): Xaa is C or S

SEQ ID NO: 36251 - protein, 36 aa, Artificial Sequence; identical to SEQ ID NO: 12122
  GFR-binding peptide
  MOD_RES (1)..(3): Xaa is C or S
  MOD_RES (15)..(16)..(17)..(18)..(19): Xaa is A or G
  MOD_RES (20)..(21)..(22)..(23): Xaa is A or G or is absent

SEQ ID NO: 36252 - protein, 38 aa, Artificial Sequence; identical to SEQ ID NO: 12123
  GFR-binding peptide
  MOD_RES (2)..(4)..(36): Xaa is C or S

SEQ ID NO: 36253 - protein, 35 aa, Artificial Sequence; identical to SEQ ID NO: 12124
  GFR-binding peptide
  MOD_RES (32)..(32): Xaa is C or S

SEQ ID NO: 36254 - protein, 41 aa, Artificial Sequence; identical to SEQ ID NO: 10254
  GFR-binding peptide
  MOD_RES (1)..(3)..(36)..(37): Xaa is C or S
  MOD_RES (14)..(15)..(16)..(17)..(18): Xaa is A or G
  MOD_RES (19)..(20)..(21)..(22): Xaa is A or G or is absent

SEQ ID NO: 36255 - protein, 36 aa, Artificial Sequence; identical to SEQ ID NO: 10255
  GFR-binding peptide
  MOD_RES (32)..(32): Xaa is C or S

SEQ ID NO: 36256 - protein, 35 aa, Artificial Sequence; identical to SEQ ID NO: 12126
  GFR-binding peptide
  MOD_RES (1)..(3)..(35): Xaa is C or S

SEQ ID NO: 36257 - protein, 40 aa, Artificial Sequence; identical to SEQ ID NO: 2769
  GFR-binding peptide
  MOD_RES (1)..(34)..(35): Xaa is C or S
  MOD_RES (12)..(13)..(14)..(15)..(16): Xaa is A or G
  MOD_RES (17)..(18)..(19)..(20): Xaa is A or G or is absent

SEQ ID NO: 36258 - protein, 35 aa, Artificial Sequence; identical to SEQ ID NO: 10257
  GFR-binding peptide
  MOD_RES (1)..(3)..(34)..(35): Xaa is C or S

SEQ ID NO: 36259 - protein, 36 aa, Artificial Sequence; identical to SEQ ID NO: 10258
  GFR-binding peptide
  MOD_RES (33)..(34): Xaa is C or S
  MOD_RES (11)..(12)..(13)..(14)..(15): Xaa is A or G
  MOD_RES (16)..(17)..(18)..(19): Xaa is A or G or is absent

SEQ ID NO: 36260 - protein, 34 aa, Artificial Sequence; identical to SEQ ID NO: 4699
  GFR-binding peptide
  MOD_RES (2)..(33)..(34): Xaa is C or S

SEQ ID NO: 36261 - protein, 38 aa, Artificial Sequence; identical to SEQ ID NO: 12130
  GFR-binding peptide
  MOD_RES (2)..(33)..(34): Xaa is C or S

SEQ ID NO: 36262 - protein, 37 aa, Artificial Sequence; identical to SEQ ID NO: 12132
  GFR-binding peptide
  MOD_RES (2)..(35)..(36): Xaa is C or S
  MOD_RES (13)..(14)..(15)..(16)..(17): Xaa is A or G
  MOD_RES (18)..(19)..(20)..(21): Xaa is A or G or is absent

SEQ ID NO: 36263 - protein, 34 aa, Artificial Sequence; identical to SEQ ID NO: 12135
  GFR-binding peptide
  MOD_RES (33)..(34): Xaa is C or S
  MOD_RES (11)..(12)..(13)..(14)..(15): Xaa is A or G
  MOD_RES (16)..(17)..(18)..(19): Xaa is A or G or is absent

SEQ ID NO: 36264 - protein, 37 aa, Artificial Sequence; identical to SEQ ID NO: 2780
  GFR-binding peptide
  MOD_RES (1)..(34)..(35): Xaa is C or S
  MOD_RES (12)..(13)..(14)..(15)..(16): Xaa is A or G
  MOD_RES (17)..(18)..(19)..(20): Xaa is A or G or is absent

SEQ ID NO: 36265 - protein, 38 aa, Artificial Sequence; identical to SEQ ID NO: 12136
  GFR-binding peptide
  MOD_RES (2)..(33)..(34): Xaa is C or S

SEQ ID NO: 36266 - protein, 39 aa, Artificial Sequence; identical to SEQ ID NO: 10262
  GFR-binding peptide
  MOD_RES (2)..(4)..(38)..(39): Xaa is C or S
  MOD_RES (16)..(17)..(18)..(19)..(20): Xaa is A or G
  MOD_RES (21)..(22)..(23)..(24): Xaa is A or G or is absent

SEQ ID NO: 36267 - protein, 36 aa, Artificial Sequence; identical to SEQ ID NO: 4708
  GFR-binding peptide
  MOD_RES (1)..(35)..(36): Xaa is C or S
  MOD_RES (13)..(14)..(15)..(16)..(17): Xaa is A or G
  MOD_RES (18)..(19)..(20)..(21): Xaa is A or G or is absent

SEQ ID NO: 36268 - protein, 38 aa, Artificial Sequence; identical to SEQ ID NO: 4711
  GFR-binding peptide
  MOD_RES (2)..(4)..(35)..(36): Xaa is C or S

SEQ ID NO: 36269 - protein, 41 aa, Artificial Sequence; identical to SEQ ID NO: 10263
  GFR-binding peptide
  MOD_RES (1)..(3)..(36)..(37): Xaa is C or S
  MOD_RES (14)..(15)..(16)..(17)..(18): Xaa is A or G
  MOD_RES (19)..(20)..(21)..(22): Xaa is A or G or is absent

SEQ ID NO: 36270 - protein, 37 aa, Artificial Sequence; identical to SEQ ID NO: 10264
  GFR-binding peptide
  MOD_RES (1)..(3)..(34)..(35): Xaa is C or S

SEQ ID NO: 36271 - protein, 32 aa, Artificial Sequence; identical to SEQ ID NO: 2782
  GFR-binding peptide
  MOD_RES (32)..(32): Xaa is C or S

SEQ ID NO: 36272 - protein, 37 aa, Artificial Sequence; identical to SEQ ID NO: 12142
  GFR-binding peptide
  MOD_RES (1)..(3)..(35)..(36): Xaa is C or S

SEQ ID NO: 36273 - protein, 40 aa, Artificial Sequence; identical to SEQ ID NO: 10266
  GFR-binding peptide
  MOD_RES (2)..(36)..(37): Xaa is C or S
  MOD_RES (14)..(15)..(16)..(17)..(18): Xaa is A or G
  MOD_RES (19)..(20)..(21)..(22): Xaa is A or G or is absent

SEQ ID NO: 36274 - protein, 43 aa, Artificial Sequence; identical to SEQ ID NO: 12143
  GFR-binding peptide
  MOD_RES (1)..(3)..(37): Xaa is C or S
  MOD_RES (15)..(16)..(17)..(18)..(19): Xaa is A or G
  MOD_RES (20)..(21)..(22)..(23): Xaa is A or G or is absent

SEQ ID NO: 36275 - protein, 36 aa, Artificial Sequence; identical to SEQ ID NO: 12145
  GFR-binding peptide
  MOD_RES (33)..(34): Xaa is C or S
  MOD_RES (11)..(12)..(13)..(14)..(15): Xaa is A or G
  MOD_RES (16)..(17)..(18)..(19): Xaa is A or G or is absent

SEQ ID NO: 36276 - protein, 35 aa, Artificial Sequence; identical to SEQ ID NO: 2789
  GFR-binding peptide
  MOD_RES (33)..(34): Xaa is C or S
  MOD_RES (11)..(12)..(13)..(14)..(15): Xaa is A or G
  MOD_RES (16)..(17)..(18)..(19): Xaa is A or G or is absent

SEQ ID NO: 36277 - protein, 41 aa, Artificial Sequence; identical to SEQ ID NO: 12146
  GFR-binding peptide
  MOD_RES (2)..(36)..(37): Xaa is C or S
  MOD_RES (14)..(15)..(16)..(17)..(18): Xaa is A or G
  MOD_RES (19)..(20)..(21)..(22): Xaa is A or G or is absent

SEQ ID NO: 36278 - protein, 36 aa, Artificial Sequence; identical to SEQ ID NO: 4719
  GFR-binding peptide
  MOD_RES (1)..(3)..(35)..(36): Xaa is C or S

SEQ ID NO: 36279 - protein, 38 aa, Artificial Sequence; identical to SEQ ID NO: 12148
  GFR-binding peptide
  MOD_RES (2)..(36)..(37): Xaa is C or S
  MOD_RES (14)..(15)..(16)..(17)..(18): Xaa is A or G
  MOD_RES (19)..(20)..(21)..(22): Xaa is A or G or is absent

SEQ ID NO: 36280 - protein, 35 aa, Artificial Sequence; identical to SEQ ID NO: 12149
  GFR-binding peptide
  MOD_RES (1)..(35): Xaa is C or S
  MOD_RES (13)..(14)..(15)..(16)..(17): Xaa is A or G
  MOD_RES (18)..(19)..(20)..(21): Xaa is A or G or is absent

SEQ ID NO: 36281 - protein, 36 aa, Artificial Sequence; identical to SEQ ID NO: 2792
  GFR-binding peptide
  MOD_RES (32)..(33): Xaa is C or S

SEQ ID NO: 36282 - protein, 41 aa, Artificial Sequence; identical to SEQ ID NO: 4720
  GFR-binding peptide
  MOD_RES (1)..(3)..(37)..(38): Xaa is C or S
  MOD_RES (15)..(16)..(17)..(18)..(19): Xaa is A or G
  MOD_RES (20)..(21)..(22)..(23): Xaa is A or G or is absent

SEQ ID NO: 36283 - protein, 37 aa, Artificial Sequence; identical to SEQ ID NO: 4723
  GFR-binding peptide
  MOD_RES (1)..(32)..(33): Xaa is C or S

SEQ ID NO: 36284 - protein, 37 aa, Artificial Sequence; identical to SEQ ID NO: 12153
  GFR-binding peptide
  MOD_RES (1)..(32)..(33): Xaa is C or S

SEQ ID NO: 36285 - protein, 37 aa, Artificial Sequence; identical to SEQ ID NO: 12154
  GFR-binding peptide
  MOD_RES (31)..(32): Xaa is C or S

SEQ ID NO: 36286 - protein, 41 aa, Artificial Sequence; identical to SEQ ID NO: 10273
  GFR-binding peptide
  MOD_RES (2)..(4)..(38): Xaa is C or S
  MOD_RES (16)..(17)..(18)..(19)..(20): Xaa is A or G
  MOD_RES (21)..(22)..(23)..(24): Xaa is A or G or is absent

SEQ ID NO: 36287 - protein, 35 aa, Artificial Sequence; identical to SEQ ID NO: 12155
  GFR-binding peptide
  MOD_RES (31)..(32): Xaa is C or S

SEQ ID NO: 36288 - protein, 35 aa, Artificial Sequence; identical to SEQ ID NO: 10274
  GFR-binding peptide
  MOD_RES (1)..(3)..(34)..(35): Xaa is C or S

SEQ ID NO: 36289 - protein, 37 aa, Artificial Sequence; identical to SEQ ID NO: 12157
  GFR-binding peptide
  MOD_RES (33)..(34): Xaa is C or S
  MOD_RES (11)..(12)..(13)..(14)..(15): Xaa is A or G
  MOD_RES (16)..(17)..(18)..(19): Xaa is A or G or is absent

SEQ ID NO: 36290 - protein, 38 aa, Artificial Sequence; identical to SEQ ID NO: 12158
  GFR-binding peptide
  MOD_RES (1)..(3)..(35)..(36): Xaa is C or S

SEQ ID NO: 36291 - protein, 37 aa, Artificial Sequence; identical to SEQ ID NO: 10275
  GFR-binding peptide
  MOD_RES (1)..(3)..(35)..(36): Xaa is C or S

SEQ ID NO: 36292 - protein, 36 aa, Artificial Sequence; identical to SEQ ID NO: 10276
  GFR-binding peptide
  MOD_RES (34)..(35): Xaa is C or S
  MOD_RES (12)..(13)..(14)..(15)..(16): Xaa is A or G
  MOD_RES (17)..(18)..(19)..(20): Xaa is A or G or is absent

SEQ ID NO: 36293 - protein, 38 aa, Artificial Sequence; identical to SEQ ID NO: 10277
  GFR-binding peptide
  MOD_RES (1)..(3)..(37)..(38): Xaa is C or S
  MOD_RES (15)..(16)..(17)..(18)..(19): Xaa is A or G
  MOD_RES (20)..(21)..(22)..(23): Xaa is A or G or is absent

SEQ ID NO: 36294 - protein, 38 aa, Artificial Sequence; identical to SEQ ID NO: 10278
  GFR-binding peptide
  MOD_RES (34)..(35): Xaa is C or S
  MOD_RES (12)..(13)..(14)..(15)..(16): Xaa is A or G
  MOD_RES (17)..(18)..(19)..(20): Xaa is A or G or is absent

SEQ ID NO: 36295 - protein, 34 aa, Artificial Sequence; identical to SEQ ID NO: 2801
  GFR-binding peptide
  MOD_RES (2)..(34): Xaa is C or S

SEQ ID NO: 36296 - protein, 38 aa, Artificial Sequence; identical to SEQ ID NO: 4733
  GFR-binding peptide
  MOD_RES (2)..(4)..(37)..(38): Xaa is C or S
  MOD_RES (15)..(16)..(17)..(18)..(19): Xaa is A or G
  MOD_RES (20)..(21)..(22)..(23): Xaa is A or G or is absent

SEQ ID NO: 36297 - protein, 38 aa, Artificial Sequence; identical to SEQ ID NO: 12161
  GFR-binding peptide
  MOD_RES (32)..(33): Xaa is C or S

SEQ ID NO: 36298 - protein, 35 aa, Artificial Sequence; identical to SEQ ID NO: 12162
  GFR-binding peptide
  MOD_RES (34)..(34): Xaa is C or S
  MOD_RES (12)..(13)..(14)..(15)..(16): Xaa is A or G
  MOD_RES (17)..(18)..(19)..(20): Xaa is A or G or is absent

SEQ ID NO: 36299 - protein, 32 aa, Artificial Sequence
  GFR-binding peptide
  MOD_RES (2)..(2): Xaa is C or S
KXSKVIMNSLQEIKPTKGIYYLITLPELDQSV

SEQ ID NO: 36300 - protein, 40 aa, Artificial Sequence; identical to SEQ ID NO: 12163
  GFR-binding peptide
  MOD_RES (34)..(35): Xaa is C or S
  MOD_RES (12)..(13)..(14)..(15)..(16): Xaa is A or G
  MOD_RES (17)..(18)..(19)..(20): Xaa is A or G or is absent

SEQ ID NO: 36301 - protein, 41 aa, Artificial Sequence; identical to SEQ ID NO: 12164
  GFR-binding peptide
  MOD_RES (1)..(3)..(37)..(38): Xaa is C or S
  MOD_RES (15)..(16)..(17)..(18)..(19): Xaa is A or G
  MOD_RES (20)..(21)..(22)..(23): Xaa is A or G or is absent

SEQ ID NO: 36302 - protein, 38 aa, Artificial Sequence; identical to SEQ ID NO: 10280
  GFR-binding peptide
  MOD_RES (2)..(36): Xaa is C or S
  MOD_RES (14)..(15)..(16)..(17)..(18): Xaa is A or G
  MOD_RES (19)..(20)..(21)..(22): Xaa is A or G or is absent

SEQ ID NO: 36303 - protein, 31 aa, Artificial Sequence; identical to SEQ ID NO: 10281
  GFR-binding peptide

SEQ ID NO: 36304 - protein, 39 aa, Artificial Sequence; identical to SEQ ID NO: 10282
  GFR-binding peptide
  MOD_RES (1)..(3)..(35): Xaa is C or S

SEQ ID NO: 36305 - protein, 32 aa, Artificial Sequence; identical to SEQ ID NO: 4735
  GFR-binding peptide
  MOD_RES (31)..(32): Xaa is C or S

SEQ ID NO: 36306 - protein, 34 aa, Artificial Sequence; identical to SEQ ID NO: 4737
  GFR-binding peptide
  MOD_RES (1)..(3): Xaa is C or S

SEQ ID NO: 36307 - protein, 37 aa, Artificial Sequence; identical to SEQ ID NO: 10283
  GFR-binding peptide
  MOD_RES (1)..(33): Xaa is C or S

SEQ ID NO: 36308 - protein, 40 aa, Artificial Sequence; identical to SEQ ID NO: 2809
  GFR-binding peptide
  MOD_RES (1)..(35)..(36): Xaa is C or S
  MOD_RES (13)..(14)..(15)..(16)..(17): Xaa is A or G
  MOD_RES (18)..(19)..(20)..(21): Xaa is A or G or is absent

SEQ ID NO: 36309 - protein, 36 aa, Artificial Sequence; identical to SEQ ID NO: 12167
  GFR-binding peptide
  MOD_RES (32)..(33): Xaa is C or S

SEQ ID NO: 36310 - protein, 33 aa, Artificial Sequence; identical to SEQ ID NO: 10285
  GFR-binding peptide
  MOD_RES (31)..(32): Xaa is C or S

SEQ ID NO: 36311 - protein, 34 aa, Artificial Sequence; identical to SEQ ID NO: 4738
  GFR-binding peptide
  MOD_RES (34)..(34): Xaa is C or S
  MOD_RES (12)..(13)..(14)..(15)..(16): Xaa is A or G
  MOD_RES (17)..(18)..(19)..(20): Xaa is A or G or is absent

SEQ ID NO: 36312 - protein, 35 aa, Artificial Sequence; identical to SEQ ID NO: 2810
  GFR-binding peptide
  MOD_RES (32)..(33): Xaa is C or S

SEQ ID NO: 36313 - protein, 38 aa, Artificial Sequence; identical to SEQ ID NO: 12169
  GFR-binding peptide
  MOD_RES (1)..(35)..(36): Xaa is C or S
  MOD_RES (13)..(14)..(15)..(16)..(17): Xaa is A or G
  MOD_RES (18)..(19)..(20)..(21): Xaa is A or G or is absent

SEQ ID NO: 36314 - protein, 36 aa, Artificial Sequence; identical to SEQ ID NO: 2811
  GFR-binding peptide
  MOD_RES (2)..(36): Xaa is C or S
  MOD_RES (14)..(15)..(16)..(17)..(18): Xaa is A or G
  MOD_RES (19)..(20)..(21)..(22): Xaa is A or G or is absent

SEQ ID NO: 36315 - protein, 33 aa, Artificial Sequence; identical to SEQ ID NO: 2812
  GFR-binding peptide
  MOD_RES (1)..(1): Xaa is C or S
  MOD_RES (12)..(13)..(14)..(15)..(16): Xaa is A or G
  MOD_RES (17)..(18)..(19)..(20): Xaa is A or G or is absent

SEQ ID NO: 36316 - protein, 36 aa, Artificial Sequence; identical to SEQ ID NO: 12170
  GFR-binding peptide
  MOD_RES (1)..(33)..(34): Xaa is C or S

SEQ ID NO: 36317 - protein, 38 aa, Artificial Sequence; identical to SEQ ID NO: 12172
  GFR-binding peptide
  MOD_RES (2)..(36)..(37): Xaa is C or S
  MOD_RES (14)..(15)..(16)..(17)..(18): Xaa is A or G
  MOD_RES (19)..(20)..(21)..(22): Xaa is A or G or is absent

SEQ ID NO: 36318 - protein, 38 aa, Artificial Sequence; identical to SEQ ID NO: 12173
  GFR-binding peptide
  MOD_RES (1)..(33)..(34): Xaa is C or S

SEQ ID NO: 36319 - protein, 32 aa, Artificial Sequence; identical to SEQ ID NO: 10291
  GFR-binding peptide
  MOD_RES (1)..(32): Xaa is C or S

SEQ ID NO: 36320 - protein, 34 aa, Artificial Sequence; identical to SEQ ID NO: 10292
  GFR-binding peptide
  MOD_RES (1)..(3)..(34): Xaa is C or S

SEQ ID NO: 36321 - protein, 39 aa, Artificial Sequence; identical to SEQ ID NO: 12174
  GFR-binding peptide
  MOD_RES (2)..(36)..(37): Xaa is C or S
  MOD_RES (14)..(15)..(16)..(17)..(18): Xaa is A or G
  MOD_RES (19)..(20)..(21)..(22): Xaa is A or G or is absent

SEQ ID NO: 36322 - protein, 39 aa, Artificial Sequence; identical to SEQ ID NO: 12175
  GFR-binding peptide
  MOD_RES (34)..(35): Xaa is C or S
  MOD_RES (12)..(13)..(14)..(15)..(16): Xaa is A or G
  MOD_RES (17)..(18)..(19)..(20): Xaa is A or G or is absent

SEQ ID NO: 36323 - protein, 41 aa, Artificial Sequence; identical to SEQ ID NO: 12176
  GFR-binding peptide
  MOD_RES (2)..(35)..(36): Xaa is C or S
  MOD_RES (13)..(14)..(15)..(16)..(17): Xaa is A or G
  MOD_RES (18)..(19)..(20)..(21): Xaa is A or G or is absent

SEQ ID NO: 36324 - protein, 37 aa, Artificial Sequence; identical to SEQ ID NO: 10293
  GFR-binding peptide
  MOD_RES (1)..(32)..(33): Xaa is C or S

SEQ ID NO: 36325 - protein, 35 aa, Artificial Sequence; identical to SEQ ID NO: 12177
  GFR-binding peptide
  MOD_RES (1)..(34)..(35): Xaa is C or S
  MOD_RES (12)..(13)..(14)..(15)..(16): Xaa is A or G
  MOD_RES (17)..(18)..(19)..(20): Xaa is A or G or is absent

SEQ ID NO: 36326 - protein, 32 aa, Artificial Sequence; identical to SEQ ID NO: 10294
  GFR-binding peptide
  MOD_RES (31)..(31): Xaa is C or S

SEQ ID NO: 36327 - protein, 37 aa, Artificial Sequence; identical to SEQ ID NO: 10295
  GFR-binding peptide
  MOD_RES (2)..(36)..(37): Xaa is C or S
  MOD_RES (14)..(15)..(16)..(17)..(18): Xaa is A or G
  MOD_RES (19)..(20)..(21)..(22): Xaa is A or G or is absent

SEQ ID NO: 36328 - protein, 34 aa, Artificial Sequence; identical to SEQ ID NO: 10296
  GFR-binding peptide
  MOD_RES (1)..(3)..(34): Xaa is C or S

SEQ ID NO: 36329 - protein, 32 aa, Artificial Sequence; identical to SEQ ID NO: 12179
  GFR-binding peptide
  MOD_RES (1)..(1): Xaa is C or S

SEQ ID NO: 36330 - protein, 35 aa, Artificial Sequence; identical to SEQ ID NO: 10298
  GFR-binding peptide
  MOD_RES (1)..(34)..(35): Xaa is C or S
  MOD_RES (12)..(13)..(14)..(15)..(16): Xaa is A or G
  MOD_RES (17)..(18)..(19)..(20): Xaa is A or G or is absent

SEQ ID NO: 36331 - protein, 33 aa, Artificial Sequence; identical to SEQ ID NO: 2819
  GFR-binding peptide
  MOD_RES (32)..(33): Xaa is C or S

SEQ ID NO: 36332 - protein, 38 aa, Artificial Sequence; identical to SEQ ID NO: 10300
  GFR-binding peptide
  MOD_RES (1)..(35)..(36): Xaa is C or S
  MOD_RES (13)..(14)..(15)..(16)..(17): Xaa is A or G
  MOD_RES (18)..(19)..(20)..(21): Xaa is A or G or is absent

SEQ ID NO: 36333 - protein, 35 aa, Artificial Sequence; identical to SEQ ID NO: 10301
  GFR-binding peptide
  MOD_RES (2)..(2): Xaa is C or S
  MOD_RES (14)..(15)..(16)..(17)..(18): Xaa is A or G
  MOD_RES (19)..(20)..(21)..(22): Xaa is A or G or is absent

SEQ ID NO: 36334 - protein, 40 aa, Artificial Sequence; identical to SEQ ID NO: 12181
  GFR-binding peptide
  MOD_RES (2)..(4)..(38)..(39): Xaa is C or S
  MOD_RES (16)..(17)..(18)..(19)..(20): Xaa is A or G
  MOD_RES (21)..(22)..(23)..(24): Xaa is A or G or is absent

SEQ ID NO: 36335 - protein, 41 aa, Artificial Sequence; identical to SEQ ID NO: 12182
  GFR-binding peptide
  MOD_RES (1)..(35)..(36): Xaa is C or S
  MOD_RES (13)..(14)..(15)..(16)..(17): Xaa is A or G
  MOD_RES (18)..(19)..(20)..(21): Xaa is A or G or is absent

SEQ ID NO: 36336 - protein, 33 aa, Artificial Sequence; identical to SEQ ID NO: 12183
  GFR-binding peptide
  MOD_RES (31)..(32): Xaa is C or S

SEQ ID NO: 36337 - protein, 39 aa, Artificial Sequence; identical to SEQ ID NO: 12184
  GFR-binding peptide
  MOD_RES (33)..(34): Xaa is C or S
  MOD_RES (11)..(12)..(13)..(14)..(15): Xaa is A or G
  MOD_RES (16)..(17)..(18)..(19): Xaa is A or G or is absent

SEQ ID NO: 36338 - protein, 39 aa, Artificial Sequence; identical to SEQ ID NO: 12185
  GFR-binding peptide
  MOD_RES (2)..(4)..(36)..(37): Xaa is C or S

SEQ ID NO: 36339 - protein, 34 aa, Artificial Sequence; identical to SEQ ID NO: 10302
  GFR-binding peptide
  MOD_RES (33)..(34): Xaa is C or S
  MOD_RES (11)..(12)..(13)..(14)..(15): Xaa is A or G
  MOD_RES (16)..(17)..(18)..(19): Xaa is A or G or is absent

SEQ ID NO: 36340 - protein, 34 aa, Artificial Sequence; identical to SEQ ID NO: 12186
  GFR-binding peptide
  MOD_RES (31)..(32): Xaa is C or S

SEQ ID NO: 36341 - protein, 44 aa, Artificial Sequence; identical to SEQ ID NO: 10304
  GFR-binding peptide
  MOD_RES (2)..(4)..(38)..(39): Xaa is C or S
  MOD_RES (16)..(17)..(18)..(19)..(20): Xaa is A or G
  MOD_RES (21)..(22)..(23)..(24): Xaa is A or G or is absent

SEQ ID NO: 36342 - protein, 38 aa, Artificial Sequence; identical to SEQ ID NO: 10305
  GFR-binding peptide
  MOD_RES (32)..(33): Xaa is C or S

SEQ ID NO: 36343 - protein, 36 aa, Artificial Sequence; identical to SEQ ID NO: 12187
  GFR-binding peptide
  MOD_RES (1)..(33)..(34): Xaa is C or S

SEQ ID NO: 36344 - protein, 35 aa, Artificial Sequence; identical to SEQ ID NO: 12188
  GFR-binding peptide
  MOD_RES (2)..(4): Xaa is C or S

SEQ ID NO: 36345 - protein, 32 aa, Artificial Sequence; identical to SEQ ID NO: 12189
  GFR-binding peptide
  MOD_RES (31)..(32): Xaa is C or S

SEQ ID NO: 36346 - protein, 39 aa, Artificial Sequence; identical to SEQ ID NO: 4751
  GFR-binding peptide
  MOD_RES (1)..(3)..(37)..(38): Xaa is C or S
  MOD_RES (15)..(16)..(17)..(18)..(19): Xaa is A or G
  MOD_RES (20)..(21)..(22)..(23): Xaa is A or G or is absent

SEQ ID NO: 36347 - protein, 37 aa, Artificial Sequence; identical to SEQ ID NO: 10306
  GFR-binding peptide
  MOD_RES (1)..(33)..(34): Xaa is C or S

SEQ ID NO: 36348 - protein, 37 aa, Artificial Sequence; identical to SEQ ID NO: 4752
  GFR-binding peptide
  MOD_RES (31)..(32): Xaa is C or S

SEQ ID NO: 36349 - protein, 31 aa, Artificial Sequence; identical to SEQ ID NO: 12193
  GFR-binding peptide
  MOD_RES (1)..(1): Xaa is C or S

SEQ ID NO: 36350 - protein, 34 aa, Artificial Sequence; identical to SEQ ID NO: 12194
  GFR-binding peptide
  MOD_RES (1)..(33)..(34): Xaa is C or S

SEQ ID NO: 36351 - protein, 31 aa, Artificial Sequence; identical to SEQ ID NO: 12195
  GFR-binding peptide
  MOD_RES (31)..(31): Xaa is C or S

SEQ ID NO: 36352 - protein, 37 aa, Artificial Sequence; identical to SEQ ID NO: 10307
  GFR-binding peptide
  MOD_RES (1)..(3)..(35)..(36): Xaa is C or S

SEQ ID NO: 36353 - protein, 35 aa, Artificial Sequence; identical to SEQ ID NO: 10308
  GFR-binding peptide
  MOD_RES (1)..(3)..(35): Xaa is C or S

SEQ ID NO: 36354 - protein, 33 aa, Artificial Sequence; identical to SEQ ID NO: 4755
  GFR-binding peptide
  MOD_RES (31)..(32): Xaa is C or S

SEQ ID NO: 36355 - protein, 34 aa, Artificial Sequence; identical to SEQ ID NO: 12197
  GFR-binding peptide
  MOD_RES (31)..(31): Xaa is C or S

SEQ ID NO: 36356 - protein, 35 aa, Artificial Sequence; identical to SEQ ID NO: 12198
  GFR-binding peptide
  MOD_RES (1)..(33)..(34): Xaa is C or S

SEQ ID NO: 36357 - protein, 38 aa, Artificial Sequence; identical to SEQ ID NO: 12199
  GFR-binding peptide
  MOD_RES (2)..(36)..(37): Xaa is C or S
  MOD_RES (14)..(15)..(16)..(17)..(18): Xaa is A or G
  MOD_RES (19)..(20)..(21)..(22): Xaa is A or G or is absent

SEQ ID NO: 36358 - protein, 37 aa, Artificial Sequence; identical to SEQ ID NO: 4757
  GFR-binding peptide
  MOD_RES (1)..(3)..(35)..(36): Xaa is C or S

SEQ ID NO: 36359 - protein, 39 aa, Artificial Sequence; identical to SEQ ID NO: 12202
  GFR-binding peptide
  MOD_RES (1)..(3)..(35)..(36): Xaa is C or S

SEQ ID NO: 36360 - protein, 37 aa, Artificial Sequence; identical to SEQ ID NO: 10310
  GFR-binding peptide
  MOD_RES (1)..(3)..(35)..(36): Xaa is C or S

SEQ ID NO: 36361 - protein, 37 aa, Artificial Sequence; identical to SEQ ID NO: 12204
  GFR-binding peptide
  MOD_RES (33)..(34): Xaa is C or S
  MOD_RES (11)..(12)..(13)..(14)..(15): Xaa is A or G
  MOD_RES (16)..(17)..(18)..(19): Xaa is A or G or is absent

SEQ ID NO: 36362 - protein, 34 aa, Artificial Sequence; identical to SEQ ID NO: 10311
  GFR-binding peptide
  MOD_RES (32)..(32): Xaa is C or S

SEQ ID NO: 36363 - protein, 34 aa, Artificial Sequence; identical to SEQ ID NO: 4761
  GFR-binding peptide
  MOD_RES (31)..(32): Xaa is C or S

SEQ ID NO: 36364 - protein, 33 aa, Artificial Sequence; identical to SEQ ID NO: 10312
  GFR-binding peptide
  MOD_RES (31)..(32): Xaa is C or S

SEQ ID NO: 36365 - protein, 33 aa, Artificial Sequence; identical to SEQ ID NO: 10314
  GFR-binding peptide
  MOD_RES (2)..(2): Xaa is C or S

SEQ ID NO: 36366 - protein, 38 aa, Artificial Sequence
  GFR-binding peptide
  MOD_RES (2)..(4)..(35)..(36): Xaa is C or S
SXKXSKVIMNSLQEIKPTKGIYYLITLPELDQSVXXPS

SEQ ID NO: 36367 - protein, 40 aa, Artificial Sequence; identical to SEQ ID NO: 12206
  GFR-binding peptide
  MOD_RES (2)..(4)..(38)..(39): Xaa is C or S
  MOD_RES (16)..(17)..(18)..(19)..(20): Xaa is A or G
  MOD_RES (21)..(22)..(23)..(24): Xaa is A or G or is absent

SEQ ID NO: 36368 - protein, 40 aa, Artificial Sequence; identical to SEQ ID NO: 12207
  GFR-binding peptide
  MOD_RES (34)..(35): Xaa is C or S
  MOD_RES (12)..(13)..(14)..(15)..(16): Xaa is A or G
  MOD_RES (17)..(18)..(19)..(20): Xaa is A or G or is absent

SEQ ID NO: 36369 - protein, 40 aa, Artificial Sequence; identical to SEQ ID NO: 2850
  GFR-binding peptide
  MOD_RES (1)..(3)..(37)..(38): Xaa is C or S
  MOD_RES (15)..(16)..(17)..(18)..(19): Xaa is A or G
  MOD_RES (20)..(21)..(22)..(23): Xaa is A or G or is absent

SEQ ID NO: 36370 - protein, 38 aa, Artificial Sequence; identical to SEQ ID NO: 10316
  GFR-binding peptide
  MOD_RES (33)..(33): Xaa is C or S
  MOD_RES (11)..(12)..(13)..(14)..(15): Xaa is A or G
  MOD_RES (16)..(17)..(18)..(19): Xaa is A or G or is absent

SEQ ID NO: 36371 - protein, 35 aa, Artificial Sequence; identical to SEQ ID NO: 10317
  GFR-binding peptide
  MOD_RES (31)..(32): Xaa is C or S

SEQ ID NO: 36372 - protein, 38 aa, Artificial Sequence; identical to SEQ ID NO: 12208
  GFR-binding peptide
  MOD_RES (1)..(3)..(37): Xaa is C or S
  MOD_RES (15)..(16)..(17)..(18)..(19): Xaa is A or G
  MOD_RES (20)..(21)..(22)..(23): Xaa is A or G or is absent

SEQ ID NO: 36373 - protein, 36 aa, Artificial Sequence; identical to SEQ ID NO: 10318
  GFR-binding peptide
  MOD_RES (2)..(4): Xaa is C or S
  MOD_RES (15)..(16)..(17)..(18)..(19): Xaa is A or G
  MOD_RES (20)..(21)..(22)..(23): Xaa is A or G or is absent

SEQ ID NO: 36374 - protein, 43 aa, Artificial Sequence; identical to SEQ ID NO: 2853
  GFR-binding peptide
  MOD_RES (1)..(3)..(37)..(38): Xaa is C or S
  MOD_RES (15)..(16)..(17)..(18)..(19): Xaa is A or G
  MOD_RES (20)..(21)..(22)..(23): Xaa is A or G or is absent

SEQ ID NO: 36375 - protein, 34 aa, Artificial Sequence; identical to SEQ ID NO: 10320
  GFR-binding peptide
  MOD_RES (33)..(34): Xaa is C or S
  MOD_RES (11)..(12)..(13)..(14)..(15): Xaa is A or G
  MOD_RES (16)..(17)..(18)..(19): Xaa is A or G or is absent
